United States Patent Application Publication US 2013/0332133 A1 - sequence listing, part 24

SEQ ID NO: 211576 - DNA, 546 bp, Unknown
  Bacterial polypeptide expressing nucleotide sequence isolated from the Sargasso Sea
caatgggacaaacttcaaatgaaatttatcttgtagaaaataaagaagatgtcaaaaaattacccattcaaccagatataaaaattgcttatgttacccaaacaactctatcagttgatgatactagagatataattgatgaaataaaattacattttaaaaatgttgtagaaccaaagaagaaagatatttgctatgctactaccaatagacaagaagcagtaaaaaatattgccaaatttagtgattatttttttgttattggttcaaaaaattcctctaattccctacgccttgtagaagtagcacaaaattatggctctcaaaatgcaatattaatagataatattgataattttgatgctactatactaaatgagtcatcaaaaatcggaataacagcaagtgcatcttcaccagaaattcttgtaagcaaaatgctaacaaaaattggtgaacaatttgaattaaatattattgagccaaaatatcataaagaaaatactcattttaaaattccacaaaagttaaaagaagtaatttgaa

SEQ ID NO: 211577 - DNA, 268 bp, Unknown
  Bacterial polypeptide expressing nucleotide sequence isolated from the Sargasso Sea
aatgaaaagtaaaaaaattaaaattttacttgcagccccacgtggattctgcgctggtgtagagcgagctatagaaattgtaaaaaaaagtattaataaatatggagcgccagtctatgtaaggcatgaaattgttcacaataaacatgtggttgatggtcttaaaaaaatcggtgctatttttgtcgaagagctagatgaaataaaagataaaactagaccagtaattttttctgctcacggtgttccaaaaaaagtccctattgaa

SEQ ID NO: 211578 - DNA, 465 bp, Unknown
  Bacterial polypeptide expressing nucleotide sequence isolated from the Sargasso Sea
aatgaaacaaaaaattaaaatttttttagcagcacctagaggtttttgtgctggtgtagacagggcaattgaaatagttaaaaaaactctaaataaatatggtagcccagtttatgtcagacatgaaatagtacataataagaatgttgttgaaaacttaaaaaatttgggagctatatttgttgaggaaatttctgagattaaagataaatctagaccagttatattttcagcgcatggtgtacctaaatcagttcctgaagaagcaaaccttgaaaaaattttttatattgatgctacatgcccgcttgtttcaaaagtacatagggaatcggaacaattatataaaaggggatttgatattgttttaattggtcacaaaaatcatccagaggttataggaacaatgggacaactaccaaatgggtcaattaaattaatcgaaaaaaaagatgagataaaaaa

SEQ ID NO: 211579 - DNA, 514 bp, Unknown
  Bacterial polypeptide expressing nucleotide sequence isolated from the Sargasso Sea
gatgaaagtgaaaaataatcatcttaaaatacttttagcagctcctagaggtttttgtgcaggcgttgatagggcaattgagattgtaaagaaaagtatagaaaaatatggtgctcctgtttacgtaagacacgaaatagttcataacaaacatgtagtagacggcttaaaaaaaattggtgcaatatttgttgaagagattgatgaaattgaggataaaactaggcctgttatcttttcagctcatggtgtccctaaatctgtgcctcaagaagcagaaagtttaaatatgatatttgttgatgcgacatgcccattagtatccaaagttcacagagaggcagaaaatttaaataaaaaagatgttcaagttttgcttataggtcataaaaaccatcctgaagtaattggcacaatgggccaagtagctaatggaaagattgatcttattgaaactttagatgatgcaaaaaattatcaaagaggtaaaaacgataaacttgcttatattaca

SEQ ID NO: 211580 - DNA, 1033 bp, Unknown
  Bacterial polypeptide expressing nucleotide sequence isolated from the Sargasso Sea
tatggtaaataatctctatgtagtaactccaagaggattttgtgcaggtgtagaaatggcaataaaagctctaacgtggatgcttaaaatatatgatgaacctgtttattgttatcacgaaattgtacataatgactggattgttcaaaggttcaaagacaaaaatgttatattcattgaggatccaaaaaatcttccgaaagattctattataatgctttcggctcatggaacagcaccaatggttgagatggaattcaaaaatacttcaatgacaagtgtcaattctgtatgtcctcttgttacaaaagttcatcatgaagcaaggagatttagtgaagatggaaaaaagattatttacgtaggtcataaaaatcacgatgaagctataggtgcattaggtgttgcaccagataatatgatattggtagagtctgtcgaagatattgatcaaactaaccttcacaacgacaaggttgcattacttgctcaaactacacttgcaatgtctgaatgggaaccaatattaaataaagcaaaaagtgagtacaaaaatattgaactaccaagaaaaagtgatttatgttatgcgactactaacagacaaaaagcactaataaatatttcaaacaaggttgataaagtattggtagttggatctagtacctcaagtaatactaatgcattagtaactacaattaataatctaggaaaagaagcacatagaatagagactctggacgatttagataatataagtttagataatgtagatgttgctatcactgcaggagcatctgccccagatcatatcgtcaaagaaatatcagaatatttaaatccaaataatttagaattttttattgacacaactgaggaagagtattttccacttcctaaagaattaagaggtaatataaccgcactttcaaaacttttaaaaaatatgtttcctacaaatagtaaagaagctgtaaatggcatatccaatgataaaagttggtcagctaccgaagctttaagttctttataa

SEQ ID NO: 211581 - DNA, 868 bp, Unknown
  Bacterial polypeptide expressing nucleotide sequence isolated from the Sargasso Sea
aatgaagataatcttagctaaagacgcaggatattgttttggagtaagagatgctgtaaatagcgcctatgaaatgagtaaaaaatatggtgaagtctatatgttgggagatattgttcataatgaaagcgtagtaagcgatttagaaaaagaaggtgttaaagttgttgagaagcttgatcaaattccgaaaaataaacctgttcttttccgagcccatggtactgccaaagaggtttggaaaaaagctgaagataaaaaaatgaatattattgatgccacatgtccgctagttcatgaaatacatcatgaagtaaaagctttacatgaagagggaagaaaaattattataattggtgatcacggtcatgatgaagtaattggtatagctagtcaaataccagatcctataattgtagctacagttgaagaagctgaagacttaagaaaaacaaagaaagctggaatcgttactcaatcaacacaaacaattgagaatgttcaagatattataaatattttaatgacaaaagtatttgatttaagatttgtaaatacaatttgtttcccaactaagagaaatcaagaacaaattaaagagttatcagaagtaactgaccttatgattattattggatcatttacaagtgctaattctaaacgtttagctgaattaagttcagaaaggaatgaaaatacatttcaggtgacttgcgcttcagaaattgattcatcttggttcaaagatgatgtaaattctgtaggaatatctgccggagcttcaactccagactggataatcgaatcagtaattaaaaaagtcaaagaaataacaaatacacaggaaaaggaaataattcatgagtaa

SEQ ID NO: 211582 - DNA, 1033 bp, Unknown
  Bacterial polypeptide expressing nucleotide sequence isolated from the Sargasso Sea
atggtagataatctatatgttgtaacaccaagaggattttgtgctggagtggaaatggcaattaaagctttaacatggatgctaaaaatttatgatgagcctgtatattgttatcacgaaattgtacacaatgactggattgttcaaaagtttaaagaaaaaaacgtaatttttattgaagatcctaaagaactaccaacaaattcaattgtgatgctttcagctcatggtactgcaccaaaagttgagatggaatttaaaaatatttcaatgacaagtgtcaattcagtatgtccactggtaacaaaagttcatcatgaagcaaaaaaatttagtgaaaatggaaaaaagataatctatgtaggtcacaaaaatcatgatgaagctataggtgctttaggtgtggcaccaaataatatgattctaattgagactgttgaggatctcgacaataatagcttgcaaaacgaaaatgttgcactgcttgctcaaactacacttgctatgtctgaatgggaacctatattaaacaaagctaaaagtgaatatgaaaatattgaattaccgagaaaaagtgacctttgttatgcgactacaaacaggcaaaaagcactgataaatatatcaaataaagtagacaaagtgctggtggttggctcaagtacttcgagtaatacaaatgctttggtaactactataaataatttaggtaaagatgcttatagaatcgaaacattggccgatttaaggaatttggatttagatggcacagatgtagcaataactgcaggagcatcagcgcccgatcatattgtaaaagaaataacagaacatttaaatccaaataatttagagttttatattgacacaacagaggaagagtattttccccttcctaaagaattaagacgaaacataaccggactttcaaaacttttaaaaaatatgtttccaaaaaatgataaagacgctctaaatgggatatccaaagataaaagttggtctgctactgaagctttaagttctctataat

SEQ ID NO: 211583 - DNA, 826 bp, Unknown
  Bacterial polypeptide expressing nucleotide sequence isolated from the Sargasso Sea
atggttaataaagtttatttagtaacgcctagaggattttgtgctggtgtagaaatggctattaaagctctttcgtggatgcttaaaatttatgatgaaacaatttattgttatcacgaaattgttcacaataaatggatagtaaataagtttgaaggtcataatgtagtttttgtcgaagacccttcagaaattcccgaaggagcaatagtaatgctttcggcacatggtacatctccaagtgttgaaaatagatttaatgaaaaagctacattaactatcaattctgtgtgcccattagtaactaaagtacatcatgaagcaaaaaaatatacagatcaaggtgcccaaataatatatgttggccacaaaggacacgatgaggctttgggtgctattggggtatccccagacaatatgcatcttgtagaaaatatagatgacgtagaaaatttaaatctacaaggcgagactgccttacttgcacaaactactttagctatatctgaatgggaacctattatgaatcattctaaaaagaaatacccaaatttatcaatgccaaggaaaagtgatttatgttacgcaacaacaaataggcaatcagcaattgttgaaatattaaacgaagttaattctgtacttgttgttggttcagaaaattcttccaatactaaagcattagtagagatggtaaaaagtaacggttgtgatgctcaccgtattgaaaatgttgatgatctaaccgatctgaatctaaatggaaatattgcaattactgcaggcgcctcagctccagatcatttagttttcgaaaataattgac

SEQ ID NO: 211584 - DNA, 868 bp, Unknown
  Bacterial polypeptide expressing nucleotide sequence isolated from the Sargasso Sea
aatgaagataattttagctaaagatgctggatattgttttggagtaagagatgctgtaaatagcgcttacgaaatgagcaaaaaatatggagaagtctatatgttgggagatattgttcataatgaaagtgtcgtaagtgatttagaaaaagaaggtgtaaaagttgttgagaaacttgatcagattccaaaagacaaacctgttcttttcagagctcacggtactgcaaaagaggtctggaaaaaagctgaagataaaaaaatgaatattattgatgccacatgtccgctagttcatgaaatacatcatgaagtaaaagctttacatgaagagggaagaaaaattattataattggtgatcacggtcatgatgaagtaattggtatagctagtcaaataccagaccctataattgtagctacagttgaagaagctgaagaattaagaaaaacaaagaaagctggaatagttactcaatcaacacaaacaattgagaatgttcaagatattataaatattttaatgacaaaagtatttgatttaagatttgtaaatacaatttgctttccaactaaaagaaatcaagaacaaattaaagagttgtctgaagtaactgacttaatgattattattggatcatttacaagcgctaattccaaacgtctagctgaattgagctcagaaaggaatgaaaatacatttcaggtgacttgtgctgcagaaattgattcatcttggtttaaagatgatgtaaattctgtaggaatatccgccggagcttcaactccagactggataatcgaatcagtaattaaaaaagtcaaagaaataacaaatacacaagaaaaggaaataattcatgagtaa

SEQ ID NO: 211585 - DNA, 241 bp, Unknown
  Bacterial polypeptide expressing nucleotide sequence isolated from the Sargasso Sea
atgtatctatccaaatcaggaacaaatgcttacttaattaattcatacgatgaaatagaaaaaaaatggttagagggaattgaaaaagtaggaattacttcaggagcttctacaccagataaattggtctatgaaatagtaaaaaaactagagcccaaaaaagtcattagattccatgatatagacgaagaaataaagtttgaaataccaagaaaggtaaaaaaacttttagatgaatgag

SEQ ID NO: 211586 - DNA, 532 bp, Unknown
  Bacterial polypeptide expressing nucleotide sequence isolated from the Sargasso Sea
ctctaaaaatatctatcttgttgaaaagaaaaatgatgtaaaaaatttgcccattccaaaaactaaacaaattgcttacgttactcaaacaactctatcagtagatgacacaaaagatataattgatgaaattaaattacattatgaaaatgttttagaaccaaagaaaaaagatatttgctatgcaactactaacagacaggaagctgtaaaaaatattgctgcgttgtctgattatttttttgtaataggttcaaaaaattcctcaaattctcttcgtttagtagaagtagcaaaaaattatggttctaaaaatgcaatattaatagatgatattaacaattttaatccttctttaatcaacactgcatctaaaattggaataactgcaagtgcatcctcaccagaaattcttattagcaaaatgatagcgaaaattggtgaacaatttgatttaaatattattgagtctaattatgaaaaagaaaatacacactttaaaatcccacaaaaattaaaagaagcaatttaa

SEQ ID NO: 211587 - DNA, 512 bp, Unknown
  Bacterial polypeptide expressing nucleotide sequence isolated from the Sargasso Sea
gttcatcaaactaattgaaactgttgatgaagttaatgatttaaaattttcaaaaccattggcatacgtaacacaaacaactttatctgttgatgatactaaagaaataattgatgctctaaagtttaaatttcctgaaataaaaggtccgatcaaagaggatatttgttatgccacaacaaacaggcaggctgctgttaaaaaaattgctcctaattgtgaaatgttttttgttattggaagcagaaactcatctaattctgcaagattagttgaggtagcaaaaaaatcaggatgtaaaaaatcagaacttattttttatggaaaaaaagctcctttagaaaaaataaaaaattgtaagactattggattgtcatctggagcttcagcaccagaggaattggttcaaaattttattaaagaaattaaaaaaaatatgaatgtttcaattgaggaagttgtaacagcaaacgagagagtagtttttaaattgcctaaagaattaaattaga

SEQ ID NO: 211588 - DNA, 385 bp, Unknown
  Bacterial polypeptide expressing nucleotide sequence isolated from the Sargasso Sea
aaatttccagatataaaagagccaatgaaagaagatatttgttatgcaactactaaccgccagatggcagtaaaaaatattgcaaagaattgtgatatgttttttgttattggaagcagaaactcttcaaattctgtcaggcttgttgaggtagcaaaaaagtcaggctgcgaaaattcgcaacttattcactctgaaagctcaataccatatgatcaaatagaaaattgtaataccataggtatatcgtcaggagcgtctgcgccagaaattttagttgaaaattttattaatgatttaaaaaataaattttctataagtattgatgaaattgaaataattaaagaagatgtagtatttaaagttcctaacaaattaaattaaa

SEQ ID NO: 211589 - DNA, 634 bp, Unknown
  Bacterial polypeptide expressing nucleotide sequence isolated from the Sargasso Sea
gttactaaagtacatagagaggctgaaaatttgcataaagatggatcccatattcttttgattggccataaaaatcatcctgaagtgataggcactatgggtcaaattccttctgaaggtatagatcttattcaaagtttaggtgatgcgattaaatacaataaaaaaaacaataaaaatttagcatttataactcaaacaactttatccgttgacgatacaaaagatattgtcgatgaattaaaaaaaagatttccagggataaaagagccaaaaaaagaagatatttgttatgcgactacaaatagacagtctgctgtaaaaaaaattgcaaacaaatgtgaaatgttttttgttatcggtagtagaaattcatcaaattctttaaggcttgttgaagttgctaaaaattcaggttgtaaaaactctatacttcttcattcagagagtggagtaccatttgatcaaattgataagtgtaaaactattggtatatcatcgggtgcatctgctcctgaaattttagtagaacagtttttagatgaaattaaaagtaaatataatatttctgtcgaagaagttgagattatcaaagaagatgtaactttcaaaattcctggaaaattaaattaat

SEQ ID NO: 211590 - DNA, 478 bp, Unknown
  Bacterial polypeptide expressing nucleotide sequence isolated from the Sargasso Sea
aagttatattttccttcaagccaaaaacttgcctacataacacaaacaacgctatcagtatttgacacacaagacattgttgatgcccttgaaaaaaaatacccttcaatccttgcaccgaaaaaatcagatatttgctacgcaacttctaataggcaattatctgtacaagagatgtctaaaaatgttgatgctttttttgtaattggggcacacaatagttcaaattcaattaggttggttgagactgctaaaagatttggctgcaaaaatagtgaattaatagaaaatataaatgactttgattactcaaccttagcagaattcaatacaataggtctgacggctagtgcctccgctccagaagagcaattaaatatgttcattgatcaaattaaaaaggtttatgcaatcgaagttttgaattttaaagaagatgaaaacataacctttaaaatacctaattttcttaattaaa

SEQ ID NO: 211591 - DNA, 599 bp, Unknown
  Bacterial polypeptide expressing nucleotide sequence isolated from the Sargasso Sea
taaaaaagaactcccacttatattaataggtcatcgtaatcaccctgaagtaataggtactatgggacaaacaaaaggtaaaatatatcttgtagaaaaaaaagaagatgtaataaagttaccattagatgcagaaaaagaaattgcatacgttactcagacaactttatcaattgatgatacaaaagatatagttaaagaaatcaaaaaaaaatttaaaaatgtattagagcctaaaaaaaatgatatttgttatgctacaactaatagacaggaagcagtaaaaaatattgcagggaattgtgattattttcttgtaattggagctagtaattcttcaaattctttaagattagttgaagtagctaaaaattatggttcaaaaaaatctatattagttgaagatgtagactcgcttaatcttagtatatttgaaaatattaaaaatattggcatcactgcaagtgcatcttcacctgaaatactagttaaaaaactattagataaattaaaaaataattttgatattaaaattaatgaagaaaattataaaagagaagatgtatactttaaagtacctcaaaaattaaaaaattaga

SEQ ID NO: 211592 - DNA, 331 bp, Unknown
  Bacterial polypeptide expressing nucleotide sequence isolated from the Sargasso Sea
aatgaaaaataaaaacttaaaaattttgttagcttctccaagaggattttgcgcaggcgttgatcgtgcaattgaaattgtaaaaaaaagtatagataaatatggggcgcccgtttatgtaagacatgaaattgttcacaacaaacatgttgtagatagtttaaaaaaaataggggctgtatttgttgaagagttagaagaaattaaagataaaactagacctgttattttttctgctcatggagttccaaaatctgttccaaaagaagcttcgaatcttaatatgacttatgttgatgccacttgcccattggtttctaaagtacatagg

SEQ ID NO: 211593 - DNA, 474 bp, Unknown
  Bacterial polypeptide expressing nucleotide sequence isolated from the Sargasso Sea
acaaaaattcaaataaagatattgcttatgtaacgcatacaactttgtcagtagatgatacaaaggatataatagataaattaaaaattaagtttcctcatataaaagaaccaaaaaaagatgatatttgttatgcaacaacaaatagacaaagcgcagttaagaatattgcaaaattgtgtgaaatgttttttgttataggcagcagaaattcatcgaactctgttagactagtcgaagtagcaaaaaactcgggatgtgaaaaatcaactttaattcattctgaaagtacaacaccatttgaggaaattgataagtgcgataccattggtatatcatcaggggcgtctgcacctgaaattttagtaaataatttcataaacaatcttaaagaaaaatacgaagttgaaatagaggaagtagaaattataaaagaaaatataatttttaaaattccaaaaaaattaaactaat

SEQ ID NO: 211594 - DNA, 351 bp, Unknown
  Bacterial polypeptide expressing nucleotide sequence isolated from the Sargasso Sea
aatgaaaaaagaacttaaaatctatttagcgtcaccaaggggattctgtgctggagttaaaagagcaatagacattgttgaaaaatcaatcaataagtttggatccccagtatatgttagacacgagatagtacataataaacaagttgttgaagagctaaaaaaaaagggggcaatttttgttgatgagttatctgacataaaggatgaaaaaagaccagtgattttttctgctcacggcgtccctaagtctgtgccacaagaagcaaaatcgaaaaatttatcttttgtagacgctacttgccccctagtatccaaagttcacagagagtcggaacaattgcacaaaaa

SEQ ID NO: 211595 - DNA, 424 bp, Unknown
  Bacterial polypeptide expressing nucleotide sequence isolated from the Sargasso Sea
ggtagatgatactaaagaaattatcgatttactaaaaaaaaaatttcccaaaatcaaagggccagtaaaagaagatatctgttatgctacgactaatagacaaaaagctgtaaaagaaatcgcaaaaaattgtgatttattttttgtaataggaagtagaaattcatctaactcagtcagattagttgaagtagcaaaaaaagctggatgtaaaaattcatttttgatgcatcacggtagagaattaccgattgaagagattaaaagtagtactacaataggaatatcttctggagcctctgcaccagaaagattagtgcaaaatttaattaatgaaattaaattaaattttaacgtttccataaaagaaataaaagtggcggaagaaaaagttgtttttaaacttccaaaagaattaaattga

SEQ ID NO: 211596 - DNA, 331 bp, Unknown
  Bacterial polypeptide expressing nucleotide sequence isolated from the Sargasso Sea
atgcaaaataggaatttaaaaattttattggcagctcctcgtggcttctgtgctggtgttgatcgtgcaattgaaattgttaaaaaaagtatagataaatatggatcgccggtttatgtaaggcatgagattgttcataataaacatgtggttgacaatttaaaaaaaattggagcaatatttgttgaagagctagaagaaataaaggataaaacaagaccggttattttttctgctcatggagtaccaaaatctgttcccgaggaagcttcaaatttgaatatgacctttgtggatgccacatgttcctcttgtttcaaaagtcacagag

SEQ ID NO: 211597 - DNA, 535 bp, Unknown
  Bacterial polypeptide expressing nucleotide sequence isolated from the Sargasso Sea
ggtcaaatacctaaagatggtatcgacttaattgaaaacataaatgatgcaaagaattataaaaaaaaagataaaaagcaattagcttatgtcacccaaacaacattatcagttgatgatacagaagatattataaaagaacttaaaattaaatttccagagataaaggaaccaaaaaaagaggatatttgttatgccacaactaatagacaggcggctgttaaaaaaatagctgataaatgtgatatgttttttgtaattggaagcagaaattcctctaattctcttagacttgttgaagtggcaaaaaaatctggatgcaaagaatcgttattaattcattctgaaagtaacataccttatgaaaagttaaaaaattgtaaaacaattggtatttcttcaggagcttctgcgccagagatactagttgagaattttataaacagcgtaaaaaaaaaatatgaaatcaaaatagaagaagttgaaattattaaggaagatgtgacgtttaaaattcctggaaaattgaattaat

SEQ ID NO: 211598 - DNA, 361 bp, Unknown
  Bacterial polypeptide expressing nucleotide sequence isolated from the Sargasso Sea
aatgaaagaagatatttgttatgcaactacaaatcgtcaaatggctgtaaaaaatattgcacaaagttgtgatatgttttttgttattggaagtagaaactcatcaaattctgttaggcttgtagaggtagcaaaaaaatcaggatgtaaaaattcgcaacttatccactcagaaagctcaataccatttgatcaaatagaaaattgtaatactattggtatatcgtcaggagcatctgcgccagaaattttagtcgaaaattttattaatgatttaaaaaataaattttctataagtatcgatgaagttgaaataattaaagaagatgtagtatttaaagttcctaacaaattaaattaa

SEQ ID NO: 211599 - DNA, 469 bp, Unknown
  Bacterial polypeptide expressing nucleotide sequence isolated from the Sargasso Sea
aatggaaataagactagctaatactcgtggtttctgtgcaggagttgacagagccatagagatcgttaagaaggttatcgaaatgcatggtgctccagtatatgtaaaacatgaggtagtccataacaaaaccgttgttgaagaattgaagcgattaggtgcaatttttgtagaagatattaaagagataccagaaggggaggtcgttgtttatagtgctcatggtatttcaaaagcagttgaatttgaatctgaagtaagaaaactagatgtatttgatgcgacatgtcctttagtaagtaaggtacatgctgaagttaatacttatgcgaagatggggtttgattgtttgctaatcggtcataagaatcatcccgaggtagagggaacgatgggacagtttgatacatcatttggtggaacaattactcttatcgaagatatatcagatgctaaaaagctcaattta

SEQ ID NO: 211600 - DNA, 661 bp, Unknown
  Bacterial polypeptide expressing nucleotide sequence isolated from the Sargasso Sea
aatgacttatattgatgccacttgtccattggtatcaaaggtccatagagaagctgagaacttgcataaagcaggcaatcatattttattaattggtcacaaaaatcatccggaagttattggaacaataggtcaactacctaaagggtcgattgacttaattgaatctattgaggatgttaaaaactataataataaaaaaaaaaatatagcctatgttactcaaacaactttatcggtcgacgatacaagagaaattatagaaaaattaagaactaaatttcctgaaattaaagaaccaaaaaaagaggacatttgttacgcaacaacaaataggcaaagcgctgttaaaaatattgcaaaactatgtgaaatgttttttgttataggtagtagaaattcatcaaactctgtaagactggtggaggtagcaaaaaactctggctgtaaaaaatcttcattaatacattcggagagtactacaccttttgaggaaatcgataaatgtaataccataggtatatcatcaggagcatctgctcctgagattttggttaataatttcataaataatcttaaagaaaaatatgaagttgaaattgaggaagttgaaattataaaagaaaatataatttttaaaattccaaagaaattaaactaa

SEQ ID NO: 211601 - DNA, 631 bp, Unknown
  Bacterial polypeptide expressing nucleotide sequence isolated from the Sargasso Sea
tcacattgaagcagaacgtcaccacaaaaatggcttccaaattgtaatgattggccaccgcggtcatcctgaaacaatcggaacaatggggcagctgccagaaggagaagttttacttgttgaggatgaattagacgtacaaaatttagaggtaagggataaccaaaatcttgcttatgtgacacaaacaacactatccatagacgatactttttcggttgttcaagcgctacaaaaaaagtttcctgcaatccagggtcctcataaagaagatatctgctacgcaacaacaaatcgacagcttgcggtgaaagaaatagcaaacaagatcgacgcgctgttagtagtaggtgctccaaattcatctaactctaaacgcttagtagaagttggcaaaagagccgggtgtgaatactcccaactcgttcaaagagccagtgaaatagattttagagcattagaaggtattaaaaatttgggtattaccgcaggtgcatcggccccagaagttctaatcgatgaagttattgattctttcagagaaaaacatcttattgatgtagaaatcgttgaaaccgcggttgaaaacgttaacttcaaagtaccaagagttctaagagaaccagcgtga

SEQ ID NO: 211602 - DNA, 757 bp, Unknown
  Bacterial polypeptide expressing nucleotide sequence isolated from the Sargasso Sea
tcaaaaaatataggagcaccagtttatgttaatcatgaaatcgttcataacaaatatgttatagatgaattaagtgataagggtgcagtttttttagaaaatattaatgatgcgccaacagatcgaccatttatcttttctgcccatggtgtttcaaaggacgtcgagcaacatgcaaataaaaataataaaatagttattaatgcaacatgtccgcttgtaaccaaagttcatgttcaagctatgaagtttttcgaaatgggttatcgcattattcttattggacataaaaatcaccctgaagtaataggaactatgggtcagcttccaaaaaatacaatagaacttgttgaaactgtaagtgatgtaatgaaactttctgtaaatgacaatgataagtttgcctatctaactcaaacaacactttcacttgatgatacaaaaaaaataattgaagcattaaaaattcgattacctaaaatttcttcatctccaaaagaagatatttgttatgcaacttcaaatcgtcaaaaagcaattaaagaatatgcgcatttatgtgatgcttttatagttgtaggatcaagtaattcatctaattctaatcgtttagttgaagtagcaaaaaatgcaggttgtgagaatacaattcttttagaaaacgaacttaatttaaatgttaatgattatgagcttatgacatcgattggtatttcttctggcgcatcggttccggacgttctagttaaaaatgtaa

SEQ ID NO: 211603 - DNA, 370 bp, Unknown
  Bacterial polypeptide expressing nucleotide sequence isolated from the Sargasso Sea
attgaagttccaaaaaaagacgatatttgttatgcaacacaaaacaggcaggatgctgtaaaacagttagctcttgaatcagattatattattgtagttggatcaaaaaatagttcaaactcgaatagacttaaagagcttgctgaaaaatgtggttgcaaatcaactttaatagatgaattttcagacttaaatcttgaggatattaaaaaatgtaaaaatattgctattacagctggagcatctgctccagaatcaagagttatggaaatcgcaaaatctcttgaagattattttggagcaaagcttattgaggatggtgaagatactgagaatgtttattttaaaatgcctcctggattgagataaa

SEQ ID NO: 211604 - DNA, 893 bp, Unknown
  Bacterial polypeptide expressing nucleotide sequence isolated from the Sargasso Sea
tatggacacccgcgcgttcaagcgttctctgcatcactcggagcgctataaccgtaggggctttggccgcgcagaagaggtggccggcagtcttgaagaggcttacaagagcgatctgattcagagcatcagggacaacggttatgtccttgaagagggacgtgtgacgatccgactcgccgaggcctttgggttctgctggggagtggagcgggcggttgccattgcttatgagacccggcgccactacccaaccgagcgcatctggatcactaacgagatcattcacaacccctctgtgaatgcccacttgagagagatggatgtgcttttcatcgctgttgatgagggggtgaaggatttttccgaggtggagcgcggggatgtggtgatccttccggcttttggcgccacggttcaggaaatgcagctgctcaatgagcggggatgccacatcgttgacaccacctgtccttgggtttcaaaggtctggaacagcgttgagcgacacaagaagcagtccttcacctcggtgatccacggcaaggtcaagcacgaggagacccttgcaaccagctcttttgccgggacgtacctggtggtactggatctggaggaagcgcagcttgtttgtgactacatcctgggcaacggcgatcgagacacttttgtgcgccgcttcgcaggagcgacctcaccgggttttgatcccgacagggacctggttcgcattggcgtggcgaaccagacgacgatgctgaaaagtgaaactgaggaaatcggccgcctgtttgagcgcaccttgctgcgtcgctacggccccgatgaaatcaacgatcactttctggcgttcaacaccatctgtgacgcgactcaggagcgtcaggacgcca

SEQ ID NO: 211605 - DNA, 771 bp, Unknown
  Bacterial polypeptide expressing nucleotide sequence isolated from the Sargasso Sea
attttgtagacgaattatctgatgttaaagatgaaaacagaccagttatattttcagctcatggtgttcctaaatctgttcctaaagaggctaaattaaaaaatttgtcttatgtggatgctacttgcccgctagtttctaaagttcatagagagtctgaacagcttaataaaaagggttatgaaatattactaattggtcataaaaatcatcctgaggttataggaacaatgggtcagctcccagatgggtcgataaaattaattgaaactatagatgatgctgaggctctagaggtgggaaattttactaaacctctagcttacattacacaaactacactatcagtagatgacactgctgagataattaattgtcttaaagagaaatttccaaaaataaaaggcccaattaaagaggatatttgttacgcgaccaccaatagacagtcagcggtaaaaaagatagcttcaaaatgcgatatgttttttgttgtaggaagtagaaattcttctaattctgttagattggttgaagttgcaagaaaagcaggatgcaaaaattctcaattaatgcattctgaaaaagaaataccttttgctgaaatagataattctcaaactataggaatatcatcaggtgcatcagctccagaaaaattagttcagactctaattaataatattaaaaaaaatagaaaagtttccatagaagaggttgtggttgctgaagaaaaagttatttttaaattaccaaaagagctcaactaat

SEQ ID NO: 211606 - DNA, 767 bp, Unknown
  Bacterial polypeptide expressing nucleotide sequence isolated from the Sargasso Sea
tgttgaggaaattgatgagattcctgatgattcattagtaatctttagtgctcatggagtatctagcgaagtagaggagactaccaaggcaagaaatctaaatttttttgatgccacatgccctttagttaccaaagttcatatggaagtaagaaaacatgctaaagcaaatagagatattattttaattggtcatgaaggccatccagaagttgagggtacgatgggccgtcatataaattcggaaaatagttcaatatatttagttcaagatgagaatgatgcactaaatattaatgtaaacaacagcgaaagtcttgctcttgtcactcagacaacactaagtgttgatgagacaatttcgataatcgatatactaagaaaaagatttccaaatattgaagttccaaaaaaagacgatatttgttatgcaacacaaaacaggcaggatgctgtaaaacagctagcccttgaatcagattatattattgtagttggatcaaaaaatagctcaaactcgaatagacttaaagagcttgctgaaaaatgtggttgcaaatcaactttaatagatgaattttcagacttaaatcttgaggatattaaaaaatgtaaaaatattgctattacagctggagcatctgctccagaatcaagagttatggaaatcgcaaaatctcttgaagattattttggggcaaagcttattgaggatggcgtagataatgagaatgtttattttaaaatgcctcctggattgagataaa

SEQ ID NO: 211607 - DNA, 574 bp, Unknown
  Bacterial polypeptide expressing nucleotide sequence isolated from the Sargasso Sea
aatgaaaaataaagatttaaaaatatatttagctgctccaagagggttttgtgctggcgttgatcgagcaatagaaattgtaaaaaaaagtataaataaatttgggtcaccagtttatgttcgacatgagattgtccataataaacatgtggtagataatttaaaaaaaattggtgcaatatttgtagaagaacttagtgaaatcaaggacaaaactagaccagtgattttttcagctcatggagtgccaaaaaaagttccaaaagaagctcaagacttaaaaatggaatatatagatgctacttgtcctttggtttcaaaagtacatagagaggctgaaaatttaaataaagcaggcttccatatttttttaattggtcacgaaaatcatcccgaagtagttggcactatgggtcaaattccagaggggtcaatagaattagttgaaacaattgatgatgttgaggatattgatattccatcaaatgaaaaattagcttttgtaactcaaacgactctttctgtcgatgatacaaaagatattattaatgctttaaaaaaaaaatttccgcaa

SEQ ID NO: 211608 - DNA, 874 bp, Unknown
  Bacterial polypeptide expressing nucleotide sequence isolated from the Sargasso Sea
atgaaaaataaagaattaaaaatcttgttgtctgcaccacgtggtttttgtgcaggtgttgaaagggcaattgaaattgttgaaaaatcaattcaaaaatttggtgccccagtttacgttcgacatgaaattgttcataacaaacatgttgttgacgatctaaaaaataaaggagctatatttgttgatgaacttgaagaaataaaagacaaatcaagacccgttattttttcagctcacggtgtaccaaaaaaaataccagaggatgcaaaaagctataaaatgacttatgttgatgcaacatgtcctttggtttcaaaagtacacagagaagcagaaaatcttaacaaagctggatatcaaattattttaattggacaccaaaaccatccggaagtaattggaactatgggacaactcccagatggtgcgattagactaatacaaaatgaagatgaggctcaaaattaccatgctgaaaaaaatgataaaattgcttatataactcagacaacattatcggtagatgacaccaaggaaataataaaaatcctaaaaaataaatatccatcaatgaaagaaccgatgaaggaagatatttgttatgccactactaatagacaagctgcagttaagaatatagcaaaacaatgtgacatgttttttgtaattggaagtagaaattcctcaaactcagtaagattggtagaagttgcaaaaaaatctggatgtggaaatgcacaattaattcattccgaaagtgaaattccatataatgaaatagaaaaatttaatactataggaatttcatcaggtgcgtcagctccagaagttttagttgaaaattttataaatgctttgaaaaataaattca

SEQ ID NO: 211609 - DNA, 721 bp, Unknown
  Bacterial polypeptide expressing nucleotide sequence isolated from the Sargasso Sea
ttttctgcacatggaattcctaaaagtgttttgattgaagctaaggcaaaagaaatgccgtttattgatgcaacatgtcctttagttataaaggttcataatgaagcaaaaaggctttatagggatggagcccatatatttcttattggtcatgaaggtcatccagaagttatagggacaatgggacaaattccgttagatgctattactttaattcaagataaacaagatgttaaagaattaaaaaaaattaactacaagaaggtggctctaatcactcaaaccaccttatcagtagatgataccaaagaaatcattgatgaattaaaatgtatttttccaaatattattcaacctccaaaagaagatatttgttatgcaactacaaaccgtcaattagcaataaaatctatcgcgagtaaatgtgatttaatttatgtcattggcgctaataactcatcaaattcattaagattggttgaagttggaaaaaggtctggttgtgatgaaacacatttgatatcagatatatctgaagttaattggaaattggttgaaaaaaaacaaaaaataggattaacggctggcgcgagcgcaccagatatactaattcaagagtttataaatgaattgaatcaattatataatgtagaaattaaaaagatctcagttgctgatgaaaatataacatttaaaatacccagggaacttaatgagtaat

SEQ ID NO: 211610 - DNA, 777 bp, Unknown
  Bacterial polypeptide expressing nucleotide sequence isolated from the Sargasso Sea
gggggcaattttttgtagaaaatgttactgaaattcctttgggctctcttgcaatttattcagctcacggtgtgtctcctgtggttcgaaaaattgctgaaggaaggaaattaaaggttttggatgctacctgcccactagtgacaaaagtgcatggtgaagctcagcgttatgcacagaaagattacacaatcattctaattggtcaccataagcatgttgaggttaagggtacagtaggtgaggctccggatcgaattattgtggtgggaaatcttaaagaagttgaaaaattggtggttcaggatgaaaacaaggttggttatattacacaaacaactttatcactggatgatactgcagaaattatcagtgcactgaaaaagcgattcccaaaaatccaaggtccagcaaaaaacgatatttgttatgccactcaaaatcgccaaaatgctgtcaaagcattgagcaaagaagttgatctggtcctagttgttggagcaccaaatagttcaaactcagtgcgtctggttgaagttgctagggcaactggagtaaaagcccgcagaattgaatcaaaggaagaattgaatccggaatggtttaaaggaattaggcgcattggtgttacagcaggagcatctgctcctgaagatattctgcagggaattgtttctggactaaagaaaatgttctcttcaagtaaggtaagggaccttaatctagttcaagaggatgttacttttgctttgcctgcagtgttaagaagtgattaaa

SEQ ID NO: 211611 - DNA, 666 bp, Unknown
  Bacterial polypeptide expressing nucleotide sequence isolated from the Sargasso Sea
gatgaccatgaccccactgaccattcgcctttgcggcccgcgcggcttttgcgccggcgtcgaccgggcgatccagatcgtcgtgctggcgctgaagcgctacggcgcgccggtctatgtgcgtcacgagatcgtgcataaccgctacgtcgtggaagggcttgaggcgcgcggcgctgttttcgttgaggagctcgacgagatcccggcggagcatcgcgagcagccggtggtgttttccgcccatggcgtgccgaaatccgtgccggccgatgccgaaagccggaacctgttctatctcgacgccacatgcccgctggtttccaaggtccacaagcaggcgatgcgccatgagcggctcggccgccacgtggtgctgatcggccatgccggccacccggaagtgatcggcacgatggggcaattgcccgaaggcgcggtgtcgctggtggaaacggtggaggatgccgagcgctacgagcccgccgatccggaaaatctaggctatgtgacgcagacgacgctctcggtgcaggatactgcggcggtgatcgccaagctcaccgagcggtttccgaacctcaccgcgccgtctgccgattcgatctgctatgccaccaccaacccgcaggaatcggtgtcggcggcagcgcccggctgcgacct

SEQ ID NO: 211612 - DNA, 749 bp, Unknown
  Bacterial polypeptide expressing nucleotide sequence isolated from the Sargasso Sea
aatgaataaaaaactaaatatatacttagctggccctagaggattttgtgctggggtcgatagagcaattgaaatggttaaagaagcattaaaaaaatatggcaaacctgtatatgttagacatgaaattgttcataataaatatgtagttgaaaatcttaaatccgaaggagcagtatttgtagaagagcttgatgaaattaaagatactagcaggccggtaatattttcagctcatggggttccaaaatcagtaccagaagaagcccttaaactaaatttgatttattatgatgcaacttgtcctcttgtaagtaaaattcataaagaagttgaacactttgataaaaaaaaattacctgtaattttaattggccatcgtaatcatccagaggtcataggaacaatggggcaaacaaatagtgaaattcatcttgttgaaaaagttgcagatgtcagaaatttacctttaaattttgatgaagaaattgcatatgtaacacagacaacattatcagtcgatgatactaaggatattgtggatgaaataaaaaattattttaataatgttatagaacctaaaaaaaatgatatttgttatgcaactactaataggcaagaagcagtaaaaaaagttgcctcaaactgtgattattttttagtaataggtgctagtaactcgtcaaattccttaagacttgtagaggtcgctaaaaattatggatcaaaaaaagcaattttagttgagg

SEQ ID NO: 211613 - DNA, 697 bp, Unknown
  Bacterial polypeptide expressing nucleotide sequence isolated from the Sargasso Sea
atgaagaacaaaataaacatatacctagcagcaccaaggggattctgtgcgggcgttgatagggcgatagaaatggttgagctagcacttgagaagtggggagccccagtctacgttcgacatgagatagttcacaataggtttgtagttgatggactgaaaaaaaagggagccatttttgttgaagaagtaagtgaatgtccaaccgaccggccaattattttctccgcgcatggcgtagctaaatctgttgttagcgaagcaaacaacagaaaaatgattttcttggatgctacttgccctcttgtatcaaaagtgcatttggaggcagagcgccatcacaagcaagggaatcagatgattatgattggtcatgagggtcatcctgaaactatcggtacgataggacaacttccggctggcgagataatattagtggaaaccgagagcgacgtagccgcagttaagccaagaaacccagaaaaattggcttacataacacagactacactttcagtagatgacacagcaacaatcgttaaggctttaaaaaagcggttcccaaagataattgggccacataaggaagatatatgttacgccactaccaaccgtcaaaatgccgtaaaaaaaattgcgcagaatatagatgcgttattggtagtgggctctcccaattcgtcgaactcccgtagac

SEQ ID NO: 211614 - DNA, 838 bp, Unknown
  Bacterial polypeptide expressing nucleotide sequence isolated from the Sargasso Sea
tccaatttacgttagacacgagatagttcataacaagcatgtagttgaaaacttaaaaaaaattggtgcaatctttattgaagagttaagtgagattgaagataaaactagaccagtgattttttctgcacatggtgtacctaaaactgttcctaaagaagcaaaaaatttaaatatggaatatattgatgctacttgtcctctagtttccaaagttcatagagaagcagaaaatttacacaaatctggttctcatataattcttataggtcataaaaaccatcctgaggtagttggaacaatgggacagatccccaaaggaggtattgatttaatagaaagtgttgaagatgttaatctatatgaaaataaagacaacaaagatttagcttttgtaactcaaacaactctttctgttgatgatacaaaagaaattatcaataaattaaaaaaaaagtttccaaatataaaagaaccaaaaaaggaagatatttgctacgcaacaactaataggcaggcggcagtaaaaaaaatagccaaagaatgtgaaatgttttttatcattggcagtagaaattcttctaattcagttagactggtagaagtggcaaaaaattctggatgttccaaagctgaattaatccattcagaaagtgttataccgtacgaaaaaattgcaaattgttctacaataggtatatcttctggggcatcagctccagagattttagttgatgaatttattaaaaacttaaaaaaaaaattcgtactaaaaatggaagaaatagaaataattaaagaagaagttacttttaaaattcccgcaaaattaagttaa

SEQ ID NO: 211615 - DNA, 879 bp, Unknown
  Bacterial polypeptide expressing nucleotide sequence isolated from the Sargasso Sea
aatggatactcaagcttttagaagatcccttcatcactctgatagatacaatagaaggggtttcgattctccaacaaaaagagctcaagcgttagaagaagcttaccaaagtgatttgataagtactattagggataatggtttttcttatactaaaggcagactaaatattaagttggcccaagccttcggtttctgttggggagttgaaagagctgtagcaatggcttatgaaactagaagacattacccaaatgagaatatctggataacaaacgaaataattcataatccctcggttaatgatcacttaagaaaaatgaatgtaaaattcatttcagctaaaaatggaattaaagatttttctttggtttctaatggagatgtagttatactccctgctttcggagctactgttcaagaaatgaaacttttgcatgagaaaggttgtcatatcattgatacaacttgtccatgggtttctaaggtttggcatacagttgaaaaacataaaaaacatgttttcacatctattattcatggaaaatttaagcatgaagagactctcgctacaagttcattcgcaggtaaatatttagttgtacttgatctagaagaagcaaactacgtttctgaatatattctggggagaggtaatagaaatgagttcatgaacaaatttgctaaagcttgttctagtggattcgatcctgataaggatttagaaagagttggagttgcaaatcagacaactatgcttaagagcgagactgaggaaattgggaaggtttttgaaaagacaatgttaaaaaaatttggaccagaaaacctaaatggtcactttttagcttttaatacaatttgtgatgcaactgaaga

SEQ ID NO: 211616 - DNA, 649 bp, Unknown
  Bacterial polypeptide expressing nucleotide sequence isolated from the Sargasso Sea
aatgaagaataaaaatttaaaaatatatttagctgctcctagaggattttgtgctggagttgatagagcaatagaaattgttaaaaaaagtataaataaatttgggtcaccagtttatgtacgacatgagatagttcacaataagcatgtagtagaaaatttaaaaaaaattggtgcaatatttgtagaagaacttagtgaaattaaagacaaaactagaccagtaattttttcagctcatggagtgccaaaaaaagttccaaaagaagctcaagacttaaaaatggaatatatagatgctacttgtcctttggtttctaaagtacatagagaggctgaaaatctaaataaagcaggtttccatatttttttaattggtcacaaaaatcatcccgaagtagttggcactatgggtcaaattccagagggttcaatagaattagttgaaacaattgatgatgttgaggatattgatattcaatcaaataaaaaattagcgtttgtaactcaaacaactctttctgttgatgacactaaagatattattggtgctttaaaaaaaaaatttccacaaattaaagaaccaaataaagaagatatctgttatgccacgactaatagacaggcagctgttaaaagattgcttcaa

SEQ ID NO: 211617 - DNA, 634 bp, Unknown
  Bacterial polypeptide expressing nucleotide sequence isolated from the Sargasso Sea
ggtttcaaaagttcacagagaagcggaaaatcttaataaagcaggatatcaaattattttaattggacacaaaaaccatccagaagtaattggaactatgggacaactcccagatggtgcggttagactagtacagaatgaagatgaggctcaaaattaccatgctgaaaaaaatgataaaattgcttatataactcagacaacattatcggtagatgacaccaaggaaataataaaaatcctaaaaaataaatatccatcaatgaaagaaccaatgaaggaagatatttgttatgccaccaccaataggcaggctgcggttaagaatatagcaaaacaatgtgatatgttttttgtaattggaagtagaaattcttcaaactcagtaagactggtagaagttgcaaaaaaatctggatgtgaaaatgtacacttaattcattcggaaagtgaaattccatataatgaaatagaaaaatttaatactataggtatttcatcaggtgcgtcagctccagaagttttagttgaaaattttataaatgctttgaaaaataaattcgctattaaaattaatgaagttgaaataataaaagaaaacgtagtttttaaaattcctaatagattaaattaa

SEQ ID NO: 211618 - DNA, 692 bp, Unknown
  Bacterial polypeptide expressing nucleotide sequence isolated from the Sargasso Sea
aatggaaataagactagctaatactcgtggtttctgtgcaggagtagacagagccatagagatcgttaagaaggttatagaaatgcatggcgctccagtatatgtaaaacatgaggtagtccataacaaaacagttgttgaagaattgaaacgattaggtgcaatttttgtagaagatattaaagagataccagaaggggaggtcgttgtttacagtgctcatggtatttcaaaagcagttgaatttgaatctgaagtcagaaaactagatgtttttgatgcgacatgtcctttagtaagtaaggtacatgctgaagttaatacatatgcgaagatggggtttgattgtttgctaataggtcataagaatcatccagaggtagagggaacaatgggacagtttgatacatcatttggcggaacaattactcttattgaagatatattagatgctaaaaagctaaattttaaagattcgtctcgtttggcatttgtgacgcagactactttatctgtagatgatacaaaagaaataaaagattttctgactgatagattcccagatatcaagggcccaaagaaagatgatatttgttatgcaacccaaaatcgacaggatgcaattaagcaattagctctcgagtcggatctagtgttagttattggttctgaaaatagttctaactccaata

SEQ ID NO: 211619 - DNA, 514 bp, Unknown
  Bacterial polypeptide expressing nucleotide sequence isolated from the Sargasso Sea
aatgaaaaataaagaactcaaagttttactagcttcaccaagaggtttttgtgctggtgtcgacagagctatagagatagttaaaaaaagtattgaaaagtatggcagcccagtctatgtgagacacgaaatagttcataataagcatgttgttgaaagtttaaaaaaaattggtgcaatctttgtcgaagaattaaatgaaattgatgataaaagcagaccagttattttttcagcacatggtgttccaaaatctgttccgaaagaggctgcaaatttaaaaatggaatatgtagatgctacttgcccgttggtatccaaagtacaccgtgaagctgaaaatttatataagactggtgcgcatataatattgattggccataaaaatcatcctgaagtaattggaacaatgggacaaattccaaaagaaagtatcgatttaatagaaaatataaaagatgtggaaaaattcgaaaataaagaaaataaagaccttgcgtttatcacacaaaca

SEQ ID NO: 211620 - DNA, 707 bp, Unknown
  Bacterial polypeptide expressing nucleotide sequence isolated from the Sargasso Sea
aatgaaaaataaagaattaaaaatattattatctgcacctcgtgggttctgtgctggggtagaaagagcaattgaaatagtagaaaaatctatacaaaaatttggagctccggtttatgtgcgtcatgaaatagtgcataacaagtatgttgtagatgatttaaaaaataaaggggcaatatttgttgaagagcttgaggagataaaagataaatcaagaccagtaattttttcagcgcatggtgttccaaaaaaaatacctgaaaatgcaaaaagttataaaatgacttatgtggatgctacatgtccacttgtatctaaagttcatagagaagcagaaaatcttaataaagccggctaccatataatattaattggtcatgaaaatcatcctgaagtaattggaactatgggtcaattaaatgaaggctctatagatttaattcaaaatgaggaagatgctttaaactatcaaaataaactagataaaaaattagcatacattactcagaccactttatcagttgatgacacaaaagagataatcaaaattttaaaaactaattttcctaatataaaagagccaatgaaagaagatatttgttacgcaactactaaccgtcaaatggcagtaaaaaatattgcaaaaaattgtgatatgttttttgttattggaagtagaaactcttcaaattctgttagactag

SEQ ID NO: 211621 - DNA, 387 bp, Unknown
  Bacterial polypeptide expressing nucleotide sequence isolated from the Sargasso Sea
gatgggtgaattcacaatcgaacttgcgaatccccgaggtttttgtgcgggagtagatcgtgcgatcgagatagtggagcgcgcacttgagctttatggcgcaccgatttatgtgcggcatgaggttgttcataaccgctatgtcgtcaggaacctgaaagaaaagggcgcggtgttcgttgaggaacttgaagaaattccagatgacagtacggtgatattcagcgcgcatggcgtagccagggttgtccagaatgccgccgcaggtcgcgaacttcgcgtactcgatgcgacctgccctctcgtcacgaaagtgcacaccgaagtgagccgctacggacgcgagggcaggacggtcattcttgtggggcatgcaggacatccgga

SEQ ID NO: 211622 - DNA, 772 bp, Unknown
  Bacterial polypeptide expressing nucleotide sequence isolated from the Sargasso Sea
aaggagcaattttttggtggaagaactaaaagatattaaagatgcttctcgccctgttatattttcagctcacggtgttccaaaaactgtacctgaagaagctactaataaaaatatgttttatgttgatgctacatgtcctctagttactaaagttcataaagaagcagaaagacataataaaaatggatataaaataattcttgttggacacaaaaaccatcctgaagtaataggcactatggggcaattacctaataataatatagttcttatagaaaatgtaaatcaggcaaaaaatgttaatttaagtggtccagttgcttatgtgactcaaacaactttatctgtagatgatacaagggatataattaatgtattaaaaaataaatttccaaatattaaaggaccaataaaagaagatatctgttatgcaacaacaaataggcaagctgcagtaaaaaaaatagctcctctttgtgatatattttttgttataggtagcacaaattcatcaaactcaaaaaggctagtagaagttgcaaaaaaagctggttgtaaaaagtcagagctaattcatgacaacaagaagtttcctataaaagatatactggaatgcaagaatattggattaacttcgggtgcttctgccccagaaatattagtacaaaatttcatatcagaagttaaaaaatactgcacggtttcaattaaagaaatatctattacaaaagaaaatgtatcttttaaattacctagttctgtaaactaa

SEQ ID NO: 211623 - DNA, 678 bp, Unknown
  Bacterial polypeptide expressing nucleotide sequence isolated from the Sargasso Sea
aatgaaaaataaaaatttaaaaattttattggcttcaccaagaggattttgtgcaggagttgatcgggcaatagaaatcgttaaaaaaagcatagataaatacggatcacctgtttatgtaagacatgaaattgttcacaacaaacatgttgtggatagtttaaaaaaaataggagctgtatttgtagaagagctagatgaaataaaagataagactagaccggttattttttccgctcatggagttccaaaatctgttcctgaagaagcttcaaatttaaatatgacatatatagatgcaacatgccctcttgtttccaaagtacatagagaggctgaaaatttaaataaaaataacatacatattttacttattggtcataaaaaccacccagaagttattggaacaatggggcaattgccaaaagaaagtattgaccttattgaaagtaaggatgatgcaaaaaaatattctaaaaaaaatgaaaaaaagttagcatatataactcaaacaactctttcagttgatgacactaaagaaattataaatattcttaaatcaaaattcccagagatcagtgaacccaaaaaagaagatatttgttatgccactacaaacagacaaacagcagtaaaaaagattgcaaaaaattgtgatatgtttttttgttattggta

SEQ ID NO: 211624 - DNA, 481 bp, Unknown
  Bacterial polypeptide expressing nucleotide sequence isolated from the Sargasso Sea
tagatcattaactgtttcgcagcctgaaaatcttgcatacgtaacacaaacgaccctcagccttgatgacactattgccatagtgaaaatcttatatgagcagtttcctaaaattctaaaaccaaaaagcgatgatatttgttatgcaactcaaaatagacaggatgctgttaagcaacttgctttagagagtgagtttattgttgttataggctcaagaaatagctctaactcaaaccgtctaaaagagttggctgagaagtgtggtgctacctctgtcctgatagatggtcctgaggagcttgatttaaaatcattatctaaatataacaatattggtataacagccggagcatctgcaccagaatcaattgtgcagagtgtggtacaagcaattagccttgagttaaatactgttgccaaagagttaggcgagaataaagaaaatatatattttagactgcctcctgagctacgctga

SEQ ID NO: 211625 - DNA, 572 bp, Unknown
  Bacterial polypeptide expressing nucleotide sequence isolated from the Sargasso Sea
aatgaaaaacgaagttaaaatttttttagcatctccgagaggtttttgtgcaggagtggaaagagctatagacatagttgaaaaaacaattttaaagtatggaacgcctgtttatgtaagacacgaaattgtccataataaacaagttgttgaaaatttaaaaaaaaaaggaactatatttgttgaggaactttctgaggttagagatctatccaggccagtaatattctctgcgcacggagtaccaaagactgtaccggaagaagcaaagattaaaaatttgttttatattgacgcaacatgtcctttggtttcaaaagtacatagagagtccgaacagttatataaaaatggatatgacataattctaattggtcacaaaaaccatccagaagttgttggcactatgggtcaattaccttctggatcaattcgtttaatcgaacaagttggtgaagttgaagatttaaatccagagtcttttaaaaaaccattggcttatattacccaaactactttatccgtagatgacactgctgaaattattacaaaactaaaagacaaatttccta

SEQ ID NO: 211626 - DNA, 846 bp, Unknown
  Bacterial polypeptide expressing nucleotide sequence isolated from the Sargasso Sea
aatgaaaaataagcatttaaaaattatgttagctgccccaagaggtttttgtgcaggggttgatagggctattgagatcgttaaaaaaagtatagaaaaatacggtgcgccagtttatgtgcgccatgaaatagtacacaataaacatgtagtagatagtttaaaaaagattggagctatctttgttgaagaaattgaggaaattagtgacaagacaaggccagttattttttctgcccatggagttccaaaatcagtaccaaaggaagcaaaaaacttaaaaatgatttttgtagatgctacatgccctttagtttcaaaagttcacagagaggcagaaaatctagataaaaaagatatacacattttgcttattggtcacaaaaatcatccagaagtaattgggactatgggtcaacttccagatggaaaaattgacttaatcgaaacaattgaagatgcccaaaagtttgaaaatgaacaaaatttaaaacttgcttatataactcaaacaactctgtctgttgatgatactagagatatcataaatgttttaaaagaaaggtttccagatattcacgaacctaagaaagatgatatttgttatgcaacgacaaatagacaagcagctgtaaaaaaaatagctaaagattgcgataatttttttgttataggtagtagaaattcctcaaattcagtaagattagttgaggttgctaaaaataatggttgtagtgaggctgaattgattcattcagaaagtatttttcctattgagaaaatatctaaatgcaaaactatcggtatatcttcgggagcatcagctcctgaagttttagttaaaga

SEQ ID NO: 211627 - DNA, 634 bp, Unknown
  Bacterial polypeptide expressing nucleotide sequence isolated from the Sargasso Sea
tttcaaagttcaccgagagtctgagcaattaaataaaaatggttttgaaatattattaattggacataaaaatcatcctgaagttattggcacaatgggtcaacttccaaaaggatcaattaaactaatcgagacaaaaaatgatgttgatctgctaaaagaaaacgattttaaaaaacctcttgcatatattactcaaacaaccctgtccgtagatgatacagctgaaataattgaagctcttaaaaacaagtttccaaaaattaaaggccctatcaaagaggatatatgttacgcaactactaacagacagtctgctgttaaagagatagcttccaagtgtgatatgttttttgtagtgggtagccgtaactcgtctaattctgtgagattagttgaagttgcaaaaaaagctggttgtaataattctcatttaatgcattctgaaaaagaaattccttttaatgaaatagataattctgaaattattgggatatcttctggagcgtctgcaccagaaaagcttgttcaaaatttattagataatttaagaaaagatagaaaggtttctattgaagaagtaatagttgcaaaggaaaaagttgtatttaaattgccgaaagagctcaattaa

SEQ ID NO: 211628 - DNA, 756 bp, Unknown
  Bacterial polypeptide expressing nucleotide sequence isolated from the Sargasso Sea
tgtttatgtaagacatgagattgttcacaataagcatgtagtagatagtctaaaaaaaattggagctatatttgtagaagagttagatgaaataaaagataaaactagaccagttattttttctgctcatggagttccaaaatctgttccaaaagaagcttcaaatttgaatatgacttttgttgatgctacctgtccattagtctctaaagttcatagagaggctgaaaatttacataaaaatggttctcatatattgcttattggacatcggaatcatccagaagtagttggaacaatgggtcaattgcctaaagaaagtatagaacttattgaaagtgttgaagatgcagaaaaatattcaaaaaaaaatggaaataggatagcctacattactcaaactacattatcagtagatgacactagagagattataaacgttttaaaaagaaaatttccagaaatcaatgaaccaaagaaagaagatatttgttatgctaccacaaatagacagtcagctgtaaaaaagattgcaaaaaactgtgatatgttttttgtaataggaagtagaaactcatctaattcagttaggttagtagaagtagcaaaaaataacggatgtgataaatcagaactaattcattctgaaagtaaagttccaatagataaaatctcaaattgcaaaactatagggatttcatctggtgcatcggcaccagaaattttagtagaagagtttatagatgaattaaaaaa

SEQ ID NO: 211629 - DNA, 744 bp, Unknown
  Bacterial polypeptide expressing nucleotide sequence isolated from the Sargasso Sea
taaaagataaatcacgaccagtaattttttccgcccatggtgtaccaaaaaaaatacctgaagatgcaaaaaattataaaatgacctatgttgatgctacatgtccacttgtttctaaagttcatagagaagcagaaaatcttaataaagctggttaccatataattttaattggtcatgaaaatcatcctgaagtaattggaactatgggtcaattaaacgaaggttctatagatctaatccaaaatgaggaagaggctacaaactatcaaaataaactaaacaaaaatttagcatatattactcagactactttgtcagttgacgatacaaaagaaataatcaaaattttgaaaaataattttcctaatataaaagagccaatgaaagaagatatttgttatgcaactactaaccgccagatggcagtaaaaaatattgcaaagaattgcgatatgttttttgttattggaagtagaaactcgtctaattctgttaggctagttgaagtagcaaaaaaatcaggctgtgaaaattcgcaacttattcactcagaaagctcaataccatatgatcaaatagaaaattgcaataccataggtatatcatcaggagcatctgcaccagaaatattagttgaaaattttattaatgatttaaaaaataaattttctataagtattgatgaagttgaaataattaaagaagatgtagtatttaaagttcctaaaaaattaaattaaa

SEQ ID NO: 211630 - DNA, 661 bp, Unknown
  Bacterial polypeptide expressing nucleotide sequence isolated from the Sargasso Sea
catgacttatattgatgctacttgcccattggtatcaaaagttcatagagaagctgagaatttgcataaagcagggaatcatattttgttaatcggtcataaaaatcatccggaagttgttggaacaataggacaattacccaaagggtcgattgatctaattgagtctattgaagatgtggaaaactataagaatataaaaaaaaatatagcttatgttactcaaacaactttatcggtggacgatacaaaggaaattatagaaaaattacggattaaatttcctaaaattaaagaaccaaaaaaagaagatatttgttatgcaacaacaaataggcaaagtgcagttaaaaatattgcaaaaatgtgtgaaatgttttttgttataggtagtagaaattcatcaaactctgtaagattggttgaagtagcgaaaaactctggctgtgaaaaatcaactttaattcattccgaaagtacaactccatttgaggaaattgataagtgcaataccattggtatatcatcaggagcatctgcacctgaaattttagtaaataatttcataagcaatcttaaagaaaaatatgaagttgaaatagaggaagtagaaattataaaagaaaatataatttttaaaattccaaaaaaattaaactaa

SEQ ID NO: 211631 - DNA, 577 bp, Unknown
  Bacterial polypeptide expressing nucleotide sequence isolated from the Sargasso Sea
agttccagaggaagcaacaaatttgaatatgattttcgttgatgctacatgccctttagtttcaaaagttcatagagaggcagaaaatctacataagagagatatacatattttacttattggtcacaaaaatcatcctgaagttattggaactatgggtcaacttccagatggaaaaattgacttaatagaaacaatcgaagatgcacaaaagtttcaaagagggcaaagtgaaaaacttgcttatataactcaaactactttatctgttgatgatactagagatatcataaatgttttaaaagaaaggtttccagatatttacgaacctaagaaagatgatatttgttatgcaacaacaaataggcaagcagttgtaaaaaaaatagctaaagattgtgataatttttttgttataggtagtagaaattcctcaaattcagtaagattagttgaagttgctaaaaataatggttgtagtgatgccgaattgattcattcagaaagtatttttcctatcgagaaaatttctaaatgcaaaaccataggtatttcgtcagagcgcatcagctcctga

SEQ ID NO: 211632 - DNA, 769 bp, Unknown
  Bacterial polypeptide expressing nucleotide sequence isolated from the Sargasso Sea
ctagatgtgtatttagcgggacctagggggttttgtgcgggtgtagaaagagcaattctgatggttcaagaagcaataaaaaaatatggggctcctgtatatgtgcgacatgaaattgttcataacaaatatgtagttgataatcttaagcaagaaggggccatatttgttgaagagttagatgagatagatcaattggataggcccgtgatattttcggcacatggtgttcctaaatcagtacccaaagaagcagctaatatgaaattactatattttgatgccacttgtccgttagtaagtaaaattcatcgagaggttgaaaattttgaaagaaaaaatttgccagttattttgattggtcatcgaaatcatcctgaagttataggtacaatgggtcaaacatcaaaagatatctatcttgtagagaacaaagcagatgtaagaaaattatccattccacaaaatcaagaaattgcttacgtgactcaaacaacgttatccgtagatgatacaaaagatatcattgatgaaataaaattacattttgagaatgttgtagaaccaaagaaaaaagatatttgctacgcaacaactaatagacaggaagctgttaaaaatattgctgaattgtcagattacttttttgtcataggttcaaaaaattcatcaaattctctacgcttagtagaagttgccaaaatttatggctcctcaaaagcgatactaatagatgaaattgatacttttgatccaatgatgctaaaaa

SEQ ID NO: 211633 - DNA, 694 bp, Unknown
  Bacterial polypeptide expressing nucleotide sequence isolated from the Sargasso Sea
gttcgcaacgaagcaaaaccgccgtgaattaaaagtgtttgatgcaacctgtccgctggtcactaaagttcatatggaagtaactcgtgcgagtaaaaaaggcatagagtgtgtgttgattggccaccatgggcaccctgaagttgaaggcaccatgggacagtatgacaacgaagcgggtggtatttacttagtagaaacccctgaagatgtcgaaaagctgagcgttaaaaaccctgaaaacttattttactgtagccaaacgacattatctgtagatgatacggcagatgtgattgatgcactacgtgctaagtttccagccattgacggcccacgcaaagatgatatttgttacgcaacgcaaaaccgccaagacgcagtccgtgatttagcggataaagtggatgtattacttgttgtgggagcaaaaaatagctctaactcaaaccgtctacgcgagcttgctgataaaatgggcactaaggcgcatttgattgatgatgcaagtaacgttgaagcggattggttcgacaatgtcaatgcggtgggtgttactgccggcgcatctgcacccgaggttctggttcagcaagttattgcgcgcctgaaagaattaggcggtaatcaagttgttgaaaaccctggtgaagaagaaaatatagtatttgccgttcctgttgagctacgctaa

SEQ ID NO: 211634 - DNA, 694 bp, Unknown
  Bacterial polypeptide expressing nucleotide sequence isolated from the Sargasso Sea
aaatctgtgccaaactctgcaaagcttaaaaaaattttttttatagatgcaacttgtccacttgtttctaaagtacacagagaagcggagcaattaaataaaaatggctataaaattttgcttattggtcactcgaatcatcctgaagtaataggaactatgggacaattgcccgaaggatcagtcaaattaattgaaacaaaaaatgatgctgaaaactttgaaaatttatcaggtaaaaaaaaactagcttatataacccaaactactttatcggtagatgatacatatgaaataattaaaatattaaaaaaaaaatttcccgatatagttagtccaaaaaaagatgacatttgctatgccacaactaatagacagttggctgtaaaaaaaattgcacctttgtgtgaagttatttttgtaattggtagtaaaaattcatcaaactcggttaggcttgtggaggttgctaaaaaatcaggatgtgaaaaaacttttttaatagattctaaaaaagacagtgaaataaatgatattttaaagtataaaaatataggtataacttctggtgcatctgcccctgaaaaattattatttgattttataaatgaaattaaaaaaaagactgaagtggaagtaaaaataattgaagcagcaaaagaaaaagtatcatttaaacttcctaaattataaa

SEQ ID NO: 211635 - DNA, 715 bp, Unknown
  Bacterial polypeptide expressing nucleotide sequence isolated from the Sargasso Sea
acatggtgtgtcaagtgaagttgaagagaaaacaaaggcaagaaatttgagttttttcgatgccacatgcccattagtgactaaagtacacatggaagttaggaagcatgcaaatgcaaataaagatattatattgataggtcatgagggtcatcctgaggttgaaggaacaatggggagacatataaattcagaaaatagctcaatttttttggtgcaaaacgagcgagatgctaaaaatattaatattttgaaaaaagacaacttagcattagtaacccagacaaccctaagcgtagatgaaactaaatcaattattaagattctcaaggacagatttcctaaaattgaagtcccaaaaaaggatgatatttgttatgcaacacaaaataggcaggatgctgtcaaacaactagcccttgaatcagattatatgatagttgtaggttcaaaaaatagctcaaactctaatagactgaaggagcttggtgaaaaatgtggttgcgattcagttttgattgatgaattttctgatttgaatctcgaagatttgaaaaattgcaaaaccatttcaattacagctggtgcttctgcaccagaatcaagagttatggaaatagcaaaatctcttgaaaattattttgatgccagacttattgaaagtggtcacgataatgaggatgtatattttaagcttcctcctggtttgagataa

SEQ ID NO: 211636 - DNA, 606 bp, Unknown
  Bacterial polypeptide expressing nucleotide sequence isolated from the Sargasso Sea
aatgaaaaataaagaattgaaaatattattgtctgcacctagaggcttttgtgctggtgtagaaagagctattgaaattgttgaaaaatcaattcaaaaatatggtgcacctgtttatgttcgtcatgaaatagtacataataaatatgttgttgacgacttaaaaaataaaggagcaatctttgtggaagaacttgaggagatagaagataaaactagaccggttattttttcagcacatggagttccaaaaaaaataccagaggatgctaaaaactacaatatgacttatgttgatgctacatgcccgttagtgtcaaaagtacatagagaagcagaaaatcttaataaagctggatatcatttaattttaataggacatcaaaatcatcctgaagtaattggtactatggggcagttacccaaaggatcaattgatcttattcaaaatgaagatgaagccaaaaactataaaattcaaaataacaaaaaaatttcttatgttacacaaacaacattatctgtggatgatacaaaagatataatccaaatcttgaaagagagatttcctgatataaaagagcctttaaaagaagatatttgtta

SEQ ID NO: 211637 - DNA, 463 bp, Unknown
  Bacterial polypeptide expressing nucleotide sequence isolated from the Sargasso Sea
ggcctatatcacacagaccacgttgagcgtggatgacacgctggaaatcgtgcaggcgctgcacgcgcggttccccgatatcatcgggccgcataaggaagacatctgctacgccaccaccaaccggcaggaggccgtgaaggccgtcgcccccaaggtggacgccctattggtgatcggcgcgcccaattcctcgaactcgcgccgtttggtcgaggtcggagcccgcgccggttgcgcctattcgcaactggtccagcgcgcggtggagatcgactggcgggccctggacgggatcaccgcattgggcattaccgccggggccagtgcgccgcaggtgctgatcgacgaggtgatcgacgcctttcgcgcccgctacgacgtgaccgtcgaagtggtggagacggcacaggaaaacgtggagttcaaggtgccccgcgtcctgcgcgagagtgccgcctga

SEQ ID NO: 211638 - DNA, 703 bp, Unknown
  Bacterial polypeptide expressing nucleotide sequence isolated from the Sargasso Sea
aatgaaaaataaagatttgaaaatattattatctgcacctagaggcttttgtgctggtgtagaaagagctatagagattgtagaaaaatcaattaagaaatatggttctccagtatatgttcgtcatgaaatagtgcacaataaatatgttgtagatgatttaaaaagtaaaggagccatatttgtcgaagaactagaggagatagaagataaaactagaccagttattttttcagcacacggtgttccaaaaaaaataccagaggatgctaaaaaatacaatatgacttatgttgatgctacatgcccattagtatcaaaggtacacagagaagctgaaaatctaaataaagctggatatcatttaattttaataggacatcaaaatcatcctgaagtaattggtactatgggtcagttacctaaaggatcaattgatcttattcagaacgaagaagaagctaaaaaatataaaattaaaaataacaaaaaaatttcttatgttacacaaacaacattatcagttgatgatacgaaagatataatccagatattgaaagataaatttccagatattaaggaacctttgaaagaggatatttgttatgctactacaaacaggcagatggcagttaaaaatattgcaaaaaaatgtgatttattttttgtgataggtagtagaaattcatctaattcagtaaga

SEQ ID NO: 211639 - DNA, 550 bp, Unknown
  Bacterial polypeptide expressing nucleotide sequence isolated from the Sargasso Sea
aatgaaaaataaacatttaaaaatctatttagctgctccaagagggttttgtgctggagttgatcgagcaatagaaattgtaaaaaaaagcataaataaatttgggtcaccagtttatgtgcgacatgagatagttcacaataagcatgtagtagaaaatttaaaaaaaattggtgcaatatttgtagaggaaattagtgaaattaaggacaaaactagaccagtaattttttcagctcatggggtgccaaaaaaagttccaaaagaagctcaagatttaaaaatggaatatatagatgctacttgtcctttggtttctaaagtacatagagaggctgaaaatttaaataaagcgggttttcatatttttttgattggtcacgaaaatcatcctgaagtagtcggcaccatgggtcaaataccagaaggttcaatagaattagttgaaacgattgatgatgttaaaaatctaaatattccatcaagcaaaaaattagcttttgtaactcaaacaactctttctgttgatgatacaaaaagatataattga

SEQ ID NO: 211640 - DNA, 691 bp, Unknown
  Bacterial polypeptide expressing nucleotide sequence isolated from the Sargasso Sea
gacaaaaaaaagacttaaagtctttgatgcaacatgtccacttgtaactaaagttcattttgaaatacataaatttgcatcacaaaacattgatgttgttctagtaggacacagtggtcacccagaagtagagggaacaatgggtcaatatatatctgagaaaggcaatattcaccttgtagagacaaatgatgacatagacaagttaaaaattgaaaataaaaatatagcgtatgtgacccagacaactttatcagttgatgatacaaaaagtattgtcagttgcctaaaaaataaatttccaaatattataggtccacggaaagatgatatttgttacgcgacacaaaatagacaagaagctgttaaaaaaattttagagttttgcgattcattgatagttgtcggttcacaaaatagctcaaattctcagcgcttgaaagaaataggtgttcagtatggaattaagtcttatttgatagacgatataaaccaaattgatattgatgatttgagcagtgataagattataggcattactgctggtgcctccgcacctgaggatactgttgcctctctagtaaaatttctactgagcaaaggtgcgaggatgtctgataagaatctatcttttaagagtgaaaatataacattctctattccaagagaacttagaccgcctaatagctaa

SEQ ID NO: 211641 - DNA, 739 bp, Unknown
  Bacterial polypeptide expressing nucleotide sequence isolated from the Sargasso Sea
gacaaaacaaggccagtaattttttctgctcatggggtcccaaaatctgtaccagaagaagcaacaaatttaaaaatgatttttgtagatgctacatgccctttagtttctaaagttcacagagaagcagaaaatctagataagaaaaatatacatattttacttattggtcataaaaaccatccagaggttatagggactatgggtcaacttcaagatggaaaaatagatttaatagaaacaattgaagatgcacgaaagtttgaaaaagggcaaaatgagaatcttgcttacataactcaaacaactttatctgttgatgatactaaagatatcataaatattttaaaagaaagatttccagatattcacgaacctaagaaagatgatatttgttatgcaacaacaaataggcaagcagctgtaaaaaaaattgctaaaaattgtgataatttttttgtaataggtagtaggaattcttctaattctgtaagattagttgaagttgctaaaaataatggttgtagtaatgctgaattgattcattcagaaagtattttccctattgagaaaatttctaaatgtaaaactataggtatttcatcaggagcatcagctcctgaagttttggttaaagaatttatagataatattaaaaaagaatttactgtacaaattgaagaagtagaaataataaaagaagacgtaacatttaaaatccctggaaaattgaattaat

SEQ ID NO: 211642 - DNA, 611 bp, Unknown
  Bacterial polypeptide expressing nucleotide sequence isolated from the Sargasso Sea
aatgaaaaataaggaattaaaaatattattgtcttctcctcgaggtttttgtgctggtgttgaaagagctatagaaattgttgaaaaatccattaaaaaatatggtgcaccagtttatgttcggcacgaaatagttcataataaattcgtagttgatgatttaaaaaataaaggcgctatatttgtagaagaacttgaggaaataaaagataaatctagaccagtaatcttttctgctcacggtgttcctaaaaaaatacctgaagacgcaaaaaattataatatgacttatattgatgccacatgtccactagtctcaaaagtacatcgcgaagctgaaaatctttataaagctggttatcatttaatattaattggtcataaaaatcatccagaggttataggcacaatgggtcaattacctaaaggatctattaatctaattcaaaatgaagaagaagcacaaaaatacaatttaaaaaagactaaaaaaattgcttttgttactcaaacaactttatcaatagacgatactaaaaatataattaaagttttaaaagatagatttccaaatattaaagaaccgtttaaagaagatatttgttatgcaa

SEQ ID NO: 211643 - DNA, 562 bp, Unknown
  Bacterial polypeptide expressing nucleotide sequence isolated from the Sargasso Sea
atgaataaaaaacttaatgtttatcttgctggacccagaggtttttgtgctggagttgatagagctattgaaatggtgaaaggtgccttaaaaaaatatggtaaaccagtatacgtaagacatgaaatagttcataataaatacgttgttgatagtttaaaatcagaaggggcaatatttgttgaagacttaaatgaaatagataacaaatctagacctgttattttttcagcccatggagtaccaaagtcagtaccagaggaagcatcaaagttgaatttgctattttttgatgcaacttgtcctctagtaagtaagattcataaagaagttgaacaatttgataaaaaaaaattacctgtaatattaataggtcatagaaatcatccagaagttattggaacaatgggtcaaacaaataataaaatttatttagttgaaaatgtttccgatgttaagaaagtgcctgtaaatgaatatgaaaaaatttcttacgtaactcagacaactctttcggttgatgatacaaaagatatcgtaaaagaaattaaatcacgtttta

SEQ ID NO: 211644 - DNA, 482 bp, Unknown
  Bacterial polypeptide expressing nucleotide sequence isolated from the Sargasso Sea
cggtgcgccgatttatgtcaggcatgaggtagtgcacaatcgcccagtggtggaagatttgcaaagaaagggtgcaatttttactgactatatcgaagacatcccccgaggtgctacggttatttatagtgcgcatggtgtttcacaggaagttcgtcggattgcaaagcagcggtgtttgcgtgtgtttgatgccacctgtccgttagtcacaaaggtgcatatggaggtggcgcgtcttgctaaaaatggggtcgagtgcgttcttattgggcacaataagcatcctgaggttgagggaacaatggggcaatacgacaacgaagatgcgggtattcatctggttgaagcgattgaatgtgtgcatgaactgcaattaaaggatgccagtcgatgtgcttatgtcacgcaaaccacactgtccgtcgatgacactcaggacattatcaaggccttgcgaacgcgttttccggcgatttgtg

SEQ ID NO: 211645 - DNA, 536 bp, Unknown
  Bacterial polypeptide expressing nucleotide sequence isolated from the Sargasso Sea
aatgataaaacaattaacgttagcggcgccacgcggattttgcgctggagttgatcgcgccgtaagaattgtcgaagtctcgctagagaaatttggtcaacctgtttatgtccgccacgagattgtacataataaaactgttgtcgatggattagctgcaaaaggtgccattttcgtctcagagctggacgaagtgccggcaggtgcccctgtggttttttcggcgcatggcgtttcacgagcggttgttgccgccgccgatgaacgccgcatgattgccgtcgatgccacctgcccgctggtgaccaaggtgcatatcgaagcccggcgccacgccgataataaccgtcacttgcttttaattggtcatgccggccatcccgaaatcgaaggcaccatggggcaggtcaacgccgaccaagtcaccttaatagaaacggttgaggacgcccgcacggttcaaccgccagagggtagcaatctggcattcgccactcagacaacattatcagttgatgatacagctgaaataattt

SEQ ID NO: 211646 - DNA, 568 bp, Unknown
  Bacterial polypeptide expressing nucleotide sequence isolated from the Sargasso Sea
atgaaaactaatcatttaaaaatacttttagcagcacctagaggtttttgtgctggagttgatagggcaatcgagattgtaaagaaaagtgtagagaagtatggtgcccctgtatatgtgagacacgaaatagttcacaacaaacatgtagttgataatttaaaaaaaattggtgctatttttgtcgaagaaattgatgaaattgaagataaatcaagacctgttatcttttcggctcatggtgttcctaaatcagttccgcaagaggcagaaaacttaaatatgatttttgttgatgcaacatgcccgctagtttctaaagttcatagagaggcagaaaacctggataaaaaagatgttcatgttttattaataggacataaaaaccatccagaagtggttggtacaatgggtcaagtaccagatggaaaaattgatcttatagaaactatagatgatgcaaaaaattatcagagaaacaatattaataaacttgcatatattacacaaacaactttatctgttgatgacactaaagatatcattaatgttttaaaagagcgctttc

SEQ ID NO: 211647 - DNA, 720 bp, Unknown
  Bacterial polypeptide expressing nucleotide sequence isolated from the Sargasso Sea
tctcagctcatggagttcctaaatctgttccagaggaggctagattaaaaaaattatcttttgttgatgctacatgtccattagtttctaaagtgcatagagaatcagagcagctaaataagaatggatacgatatattgttaattggacataaagatcatcctgaggttattggtacaatgggtcaacttcctaatggatcgatcaaattaatagaaactaaagatgatgtagaaatacttaatacaaaagattttaaaaaacctttagcttatataactcaaacaactctttctgtagacgatactgctgaaataattcaagtccttaaaaataagtttccaaaaattaaaggccctataaaagaagatatatgttatgcaaccacaaacagacagacagctgtaaaagagatagcttcaaagtgtgatatgtttttcgtagtaggtagtcgtaactcatcaaattctgttagattagttgaggttgcaaaaaaggctggttgtaataattctcatttaatgcattctgaaaaagaaattccgtataatgaaatagaaaactctaaaacaattggaatatcttccggagcttctgcgccagaaaaacttgttcaaagtttattggataatattagaaaagatcgaaaagtctctattgaagaggtaatagtagctgaagaaaaagttgtttttaaattgccgaaagaactcaattaat

SEQ ID NO: 211648 - DNA, 481 bp, Unknown
  Bacterial polypeptide expressing nucleotide sequence isolated from the Sargasso Sea
ggtaagggattcccaaaatcttgcttttgtcacacaaactacactatctatagacgatactttgtcagtcgttcaagcgctacaaaaaaggtttccagcgattcagggtccacataaagaagatatttgctatgcaacaacaaatcgccagcttgcggttaaggaaatagcaaaaaagattgatgcattgttggtagtgggtgctccaaattcatcgaactctaaacgtctagtggaagtaggtaggcgggcgggctgtaaatactctcaacttgtacaaagggccgatgaaatagattttagagcattaaaaggtatagaaaccttaggcgttaccgcaggtgcttctgccccagaaattctgataaatgaagtcattgactcgttccgagagaaccatcgcgttgacgtagaaatcgttgaaactgcagttgaaaacgttaacttcaaagttccaagagttttacgagaacccgcgtga

SEQ ID NO: 211649 - DNA, 343 bp, Unknown
  Bacterial polypeptide expressing nucleotide sequence isolated from the Sargasso Sea
aatgaaaaacaaagaaattaaaatattattatctgcacccagaggtttttgtgcaggtgttgaaagagctattgaaattgttgaaaaatcaattcaaaaatatggagctcctgtctatgttagacatgaaatagtacataataagtatgtggttgatgatttaaaaaataagggagcaatctttgtcgaagaacttgaggagatagaagataaatcaagaccagtaattttttctgctcacggtgttcctaagaaaataccagatgatgcaaaaaattataatatgacttatgttgatgctacatgtcctttagtttcaaaggttcatagagaagcagaaaat

SEQ ID NO: 211650 - DNA, 846 bp, Unknown
  Bacterial polypeptide expressing nucleotide sequence isolated from the Sargasso Sea
gagaggtttccgtgcaggtgttgaaagagctattggtatagtaaaccgagctattgaaatgtttgatgaagaaatctacgtaaaacatgaagttgtccataacaaaaatgtaatagaagagctcaccaaaaaaggggttgtatttatagagtcgttaactgaagtaccagataagtcaatattaatttatagtgcacatggtgtatcaaaagaagtggcagacatagctcaaaagaagaatttaacaatctttgatgctacttgtcctctagttacaaaagtccattttgaaattcataaatatgctcgtgaaaatatagatgttattctaataggccataatggtcatcctgaagttgaaggaactatgggacaatataaatctagagaaggaaaaatttatttagtagaaagtaaagctgatgtagaaaccttagaaattaaaaataagaaaatttcatatgtgactcagacaacactctcagtcgatgatacgcaagatatagttgatgctttgaaagagaaatatcctaatattgaggggccaaagaagagtgatatatgttatgcaacccagaacagacaagaggcagttaaaaaaatattagatctttgtgatgcacttattgttgtaggttcacaaaatagctctaactcacaacgtttaaaggaaatagctatacaatatggaaaagatgcctacttaattgatcatgagagtcagctagatatcaataaacttggtacgagtaaagtcataggtataactgcaggagcatctgccccggaacatacagttcaatcgttaattagattcttaattaataatggtgcgaaaatgtcaaa

SEQ ID NO: 211651 - DNA, 939 bp, Unknown
  Bacterial polypeptide expressing nucleotide sequence isolated from the Sargasso Sea
gtaaagaattaaaaatattattatctgcacctcgtggattttgtgcgggggtagaaagagcaattgaaatagtagaaaaatctataaaaaagtttggtgctccagtttatgtacgtcatgaaatcgtacacaataaacacgttgtggatgatttaaaaaataaaggagcaatatttgtcgaagagctggaggaaataaaggataaatcccgaccagtaattttttccgctcatggagtaccaaaaaaaatacctgaagatgcaaacaattataaaatggtatacgttgatgctacatgtccactcgtatctaaagttcatagggaagccgaaaatttaaataaagctggttatcacatacttttaattggtcacaaaaaccaccctgaggtaataggaactatgggtcaattaacagaaggctcaatagatttaatccaaagcgaagaggatgctagcaactataaaaataatttagataaaaaaatagcatatattacacagactactttgtcagttgatgatacaaaggaaataatcaaaattttgaaaaataaatttccagatataaaagagccaatgaaagaagatatttgttatgcaactactaaccgccaaatggctgtaaaaaatattgcaaaaaactgtgatatgttttttgttatcgggagcagaaattcttcaaattctgttaggcttgtagaggtggcaaaaaaatcaggatgtaaaaattcgcaacttatccactcagaaagctcaataccatttgatcaaatagaaaattgtaatactattggtatatcgtcaggagcatctgcaccagaaattttagttgaaaattttattaatgatttaaaaaataaattttctataagtatcgatgaagttgaaataattaaagaagatgtagtatttaaagttcccaacaaattaaattaaa

SEQ ID NO: 211652 - DNA, 709 bp, Unknown
  Bacterial polypeptide expressing nucleotide sequence isolated from the Sargasso Sea
tggggtatctgaaaaagttgaaaaaaatgcatacaaaaaaaatctttctgtaatagatgcaacttgtcctctagttaaaaaggtacatattgaagctttaagataccatgataaaggttataagattatattagtcgggcataatggtcatcctgaagtagaaggtacggcaggaagaattcctggaggagttcaagtagttgagacaattgatcaaatagatcaacttgattacaaaccaaatgatagattggcttatgttactcaaactactttatcagttgatgatactagagaaattattaagtctttaaaaattcgttttccaaaaatacaaggtcctgatgttaaagatatttgctatgcgacacaaaatagacaaaaagctgtaagagacttagcaaattgcagtgatattgttttaatattaagaaataaaaatagttctaatagtgtgcgtttagcagaaatttcttcacttaccggtgtgccaacttatcgtatttctgataaaaatgaagtgaaatttgaatggtttgataatgcttttacaataggtataacagcgggtgcttctactccagaaattttagtagaagaattggtaggttttcttaaagagaaatatggcaaaaatatagatgttgaaattttagatggaacaaaagaaaaagtaaatttcaatcttccaaaagaactaatagattag

SEQ ID NO: 211653 - DNA, 769 bp, Unknown
  Bacterial polypeptide expressing nucleotide sequence isolated from the Sargasso Sea
attgaagaatatttcggaagttccagataattctattattatttttagcgcccatggcgtctcaagcaagattgaagaagctgttaaagcaagaaatctgaaattctttgatgcaacttgtccgcttgtaaccaaagttcacatggaggtcatcagacatggaagagcaaatagggacattatattaattggtcatgaaggacaccctgaggttgaaggcacaatgggaaggtacttcagtcaaaatggaaaaatatatcttgttcaggatttagaagaagctatggaagtttctgtaaatcaaccaaaaaatgttgcgtatgttacccaaactacactcagtgtagatgaaacaaaagatatcatatgcgagctaacaagaaagtttccacatattataggtccaaaaaaagatgatatttgctatgcaactcaaaataggcaagatgctgtaaaacaactagctcttgagacagatttcattattgttgtcggctcaagagcaagttcaaattcaaatcgactaaaggagcttgctaataagtgcggagttaattctatcttaatagatgaatttagcgatcttgatttagatgaattaaaaggctgcaagaatattgggctaaccgctggagcatctgcaccagaatcgaaagttcaagaaataatcttaaatctgagtacttttttagatgcagagattgaagagaagggcggagttaaggagaatatttcttttaagctgcctccagagttaagagcaagttaa

SEQ ID NO: 211654 - DNA, 376 bp, Unknown
  Bacterial polypeptide expressing nucleotide sequence isolated from the Sargasso Sea
atgaaagtgaagaataatcatcttaaaatacttttagcagctccgagagggttttgtgccggtgttgacagagcaattgaaattgtgaagaaaagcatagaaaaatatggtgcccctgtatatgtaagacatgaaatagttcataacaagcacgtagtagatggcttaaaaaaaattggtgcaatatttgttgaggaaattgatgaaattgaggataaaacaaggccagtaattttttccgcccatggagttccaaaatcagttccagaggaagcaacaaatttgaatatgattttcattgatgctacatgccctttagtttcaaaagttcatagagaggcagaaaatctacataagagagatatacacattttac

SEQ ID NO: 211655 - DNA, 659 bp, Unknown
  Bacterial polypeptide expressing nucleotide sequence isolated from the Sargasso Sea
aatgaaaaacgaaattaaaatttatttagctgctccaagaggattttgtgctggcgttgatagagctatagagatagtaaaaaaagctttagataaatatggttctccagtctatgtaagacatgagatagttcataataaaaatgtagtcgaatccttaaaaaaattaggtgccgtttttgtggaggagttatctgaaataaaggatgtatctagaccagttattttttcagcacacggcgtaccaaaaaaaatacctgaagaggcaaaatcaaaaaaaatcttttatgtagatgctacttgccctcttgtttcgaaggttcaccgagaaacagagcagctatttaagaagggttttgatattgttctaattggtcataaaaatcatccagaagttataggcacaatgggacaactacccacaggttccattaagctaattgagactgttggggatgttaaaaatttaagtttttcaaaaccagttgcttatgttactcaaacaacactatctgttgatgatacaaaagaaattattgatgcattgaaacaaaaatttccagaaataaagggaccaattaaagaagatatttgctatgcaacaacgaatagacaatcagcggttaaaaaaaatgctccaaattgtgagatgttttttg

SEQ ID NO: 211656 - DNA, 649 bp, Unknown
  Bacterial polypeptide expressing nucleotide sequence isolated from the Sargasso Sea
aatgaaaagcaaagaaattaaaattttactcgctgccccacgtggcttctgcgctggcgtagagcgagctatagaaattgtaaaaaaaagtattaataaatatggagcgcctgtgtatgtaagacatgaaattgttcacaataaacatgtagttgatggtcttaaaaaaatcggtgctatttttgtcgaagaactagatgaaataaaagataaaactagaccggtaattttttctgctcacggtgttccaaaaaaagtccctattgaagcagaaaattttaaaatggaatatgtggatgcaacatgcccacttgtatcgaaggtccatagagaagctgaaaatttaaataaaaatggattacaaattttattaattggacacaaaaatcatccagaagttattggaactatgggtcaaattcctgagggtgagatagatcttattgaaaatgttgatgatgcaaataattatgaaaataaatctaaaaaaaaattggcttttgttacccaaacaactctttccgtcgatgatactaaagaaataatattggctttaaagaaaaaatttccagaaattagagaaccaaaaaaagaggatatttgttatgcaacaacgaatagacaggctgcggttaaaaaaattgcagaa

SEQ ID NO: 211657 - DNA, 613 bp, Unknown
  Bacterial polypeptide expressing nucleotide sequence isolated from the Sargasso Sea
agaggctgaaaggcataataaaaatggttacaaaattattcttattggtcacaaagggcatccagaagtaattggtacaatgggtcaaattcaaaaagaaaatatagttttgattgaaaccatcgatgatgcaaaaaaacttaaaattgatggccaagttgcatatgttacacaaacgacactttcagttgatgatacaaaggatataattaaagttttagaaaaaaaattccctggaattaatgcgccagttaaagaagatatatgttacgcaaccacaaatagacaaaatgcagtaaaaaaagttgcatctcaatgtgatatgtttttggtaattggcagtgataattcttctaactcaaaaagattagtagaagttgctaaaaaagctggttgtaataaagctaaacttattgattttaagagacaactacctttaaaagaaatatcagaatgtaatacaattggtttaacatcaggtgcttctgcccctgaaaaattagttcaagattttatttctgagattaaaaaacatactaaggtttctatagacgaatatattacttcaaaagaaaatgtaacttttaaacttccttcttcacttacaagttaa

SEQ ID NO: 211658 - DNA, 881 bp, Unknown
  Bacterial polypeptide expressing nucleotide sequence isolated from the Sargasso Sea
aatgaacagtattaaaaatttaacaaaacccaataaaaatttgtatttagcatctccaagagggttttgtgcaggtgttgaaagagcgattaaaatagtagagcaagcaattaaattacatggaaaacctgtatatgtaaaacatgaaatagttcataacaaacacgttgtaaaaagattatctaatgatggtgcaatttttgtcgaagacttagatgatatacccgaaaatgcgaatgtaattttttctgctcatggtgttgctaaaaaaatatctgaagaggccataaacaataaactaaatgtttttgatgcaacatgcccacttgtaacaaaggtgcaccttgaggctataaaattaaataataatggttatcacattttcttaattggacatgacgggcatccagaaattgaaggtacaagaggacaagttccagaggatagtataacattaatacaaactgttgaagaagctgaaaccgttacggccccaaaaaaaagactcgcatggttgagccaaactacattgtctgttgatgatactaaagaaatagttacaactcttactgcaaggtttaatgatatcttaggccctaaaaagggagatatttgctatgcaactactaacagacagcaggctgtaaaagaaatagctccattagtggaaataatgcttgtagttggatctgaaaactcgtcaaactctcaaaggttagtagaagtagctcaaaaagctggttgtaaaaaatcatttttaatttccgatgtaaactttattgactggaatgaagtagatcaaattcaaaatataggcctttcttctggagcatcagcgcctgaaacacttattgaagaaataaggaataaattttcagaac

SEQ ID NO: 211659 - DNA, 679 bp, Unknown
  Bacterial polypeptide expressing nucleotide sequence isolated from the Sargasso Sea
atgaaaaataaaaaaatcaaaatattattatctgcaccgagaggcttttgtgctggtgttgaaagagctatagaaattgttgagaaatcaattcagaagtacggtgctccagtttatgttcgtcatgaaatagttcataataaatatgtagttgatgatttaaaaaataaaggagcgatttttgtagaagagttagaggagattgaagataaaactagaccagttattttttcagcacacggagtaccaaaaaaaattccagaagacgcaaaaaattataatatgacttatgttgacgctacatgcccgttagtatcaaaagtacacagagaagctgaaaacttgaataaagctgggtatcatttaattttaataggacatcaaaatcaccctgaggttattggcactatgggtcaattacccaaaggatcaattgatcttattcaaaacgaaaatgaagccaaaaattataaacctcaaaataataaaaaaatttcttatgttactcaaacaactttatctgtagatgacacaaaagatataatccaaattttgaaaaataaatttcctgatattaaggatcctttgaaagaagatatttgttatgcaacaacaaatagacagatggcggataaaaatattgcaaacaaatgtggacttattctttgtaattggtagt

SEQ ID NO: 211660 - DNA, 625 bp, Unknown
  Bacterial polypeptide expressing nucleotide sequence isolated from the Sargasso Sea
atgagcaaaaagattaaggaaattgttttagcaaatcccagaggtttttgtgccggcgttgatagagctatagatatagttgagaaatcattagaaaaatataatgagccagtttatgtaaggcatcaggttgtacacaacaaaagagtagttgaaggcctagaaaaaaaaggcgttaaatttgtaaaagaagtaagcgaaataccggataatgcagtagctatctttagtgcgcatggagtaagtagtgaagttgaaaatgaagcaaaatctagagattttatgtactttgatgctacatgtcctcttgtaacaaaagtccaccttgaagttcaaaaacatgccaagaaaggtagagatattatcctaatagggcacaggggtcatcctgaagttattggaacattaggaagacatccaaaaaattcaggcacaaatatatatctcatagaaacaagaaaagatatagataaattaaaagtaaattcagattctttagcttatgttactcaaacaactctttctgtagatgaaacaaaagagctaattgatgtcttaaagaaaaaatttccaaaaattattggaccaagtgctgatgacatatgttatgcaacccaaaaataga

SEQ ID NO: 211661 - DNA, 472 bp, Unknown
  Bacterial polypeptide expressing nucleotide sequence isolated from the Sargasso Sea
ggaaaacttcgcctacaccacgcagaccacgctgtcggtggacgacacgcgcggcatcatcgatgcgctgcgtgagcgcttcccggcgatgcagggcccgaagaacgacgacatctgctacgccacgcagaaccgccaggatgcggtgcgcgacctggccaagcgctgcgacctggtgctggtggtcggttcgccgaacagctccaactccaatcgcttgagtgagctggcccgccgcgaaggcgtggagtcgtacctgatcgacggcgcgcatgaaatcgacccggcgtgggtggtgggcaagcagcacatcggcgtcactgccggtgcctcggcgccgcaggtgctggtcgatggcgtgctggcacgcctggccgagctgggtgccagcggcgtgggcgagctggatggcgagccggaatcgatggtattcgcgctgccgaaggaactgcgcctgcgtctggtcgactga

SEQ ID NO: 211662 - DNA, 750 bp, Unknown
  Bacterial polypeptide expressing nucleotide sequence isolated from the Sargasso Sea
aatgaaaaaagaacttaaaatttatttagcgtcaccaagagggttttgtgctggagttaaaagagcaattgaaatagttgaaaaatctattaagaagtttggtgctccggtatatgttcgtcatgaaattgtacataataagcaagttgttgaagaactaaaagagaaaggtgcaatttttgttgatgaattatctgacgtgaatgacataagtagacctgtaattttctcagcccatggagttcctaagtcagttccaaaagaagctaaactaaaaaatttatcctttgtagatgcaacatgtccattagtttctaaagtacatagagagtccgaacaattgaataaaaatggttttgacatattattaattggacataaaaaccaccctgaagttattggcacaatgggacagcttccaaaaggatctattacacttattgaaacaaaaaatgatgtagagctaataaaaaaggataaatttaaaaaacctttagcatatataactcaaacaactctgtcagtagatgatacagctgaaataatcgaagctcttaaaaataagtttcctaaaataaaaggtcctattaaagaggatatatgttatgcaactactaatagacaatctgctgttaaggaaatagcttccaaatgcgatatgttttttgtagttggaagtcgaaactcatccaattctgtaagattagttgaagttgcaaaaaaagctggttgcaataattctcatttaat

SEQ ID NO: 211663 - DNA, 568 bp, Unknown
  Bacterial polypeptide expressing nucleotide sequence isolated from the Sargasso Sea
cataaaaaccatcctgaggtaattggtactatgggtcaagtagccaatggaaagattgatcttattgaaaccatagatgatgcaaaaaattatcaaaaaggaaaaaacgataagctagcttatattacacaaacaacactgtcagttgatgatactaaagatattataaacattttaaaaaaacgctttcctgatattcacgagcctaaaaaagatgatatttgttatgcaacaacaaataggcaagcagcggtgaaaaagatagcaaaagagtgtgataatttgtttgtgattggcagtaggaattcttctaactcggttagactagtagaagtagctaaaaataatggatgtgaacatgcagaattaattcattcagagagcacttttccacttgaaaaaatatctaaatgcaaaacaataggtatctcatctggtgcctcagctcctgaagtattagttaatgagttcatagaaaatatcaaaaaaaaatttactgtagaaatagaggaagttgaaatagtaaaagaagacgttacatttaaaattccaggaaaattaaattaat

SEQ ID NO: 211664 - DNA, 470 bp, Unknown
  Bacterial polypeptide expressing nucleotide sequence isolated from the Sargasso Sea
tatctcaaataaacagctatctttcataactcaaacaactctctctgtagatgataccaaagatataattgcagctctaaaatctaaattcccagatattaaagaacctaaaaaagatgacatttgttatgcaacaacaaatagacaatccgcagttaaagaaatagcagataaatgtgatatgttttttgtaattggaagtagaaattcatctaactcggtaagattagttgaggttgctaaaaattctggttgtggttctgctgagttaattcactcagaaagcccggtgcctatagataaaattaaaggatgtaatacaattggaatctcctcaggtgcttcagcaccagagatacttgttgaaaagtttatagcagagttaaaaaatcaatttaaagtcaacatagaagaagttgaaatcgtaaaagaaaatattacttttaaaattcctggaaaattaaattaat

SEQ ID NO: 211665 - DNA, 583 bp, Unknown
  Bacterial polypeptide expressing nucleotide sequence isolated from the Sargasso Sea
ctgctgatcggtcatgccggtcacccggaagtcatcggcacaatgggtcagttgccaccaggcagcatgaccctgatcgagaccgaggaagacgccgaaaagcttgaggttaccaatccggaaaacctcgccttcgtgacacaaaccacgctttcgcttgatgacaccgccaaaatcatcgaaatccttcagcgccgtttcccgtccatttcagtgccgaagaaagaagacatttgctatgcgaccaccaatcgccagcacgcggtcaaaatgatcgccgagaaggctgatgcaattctggtactgggtgcgccgaactcgtcaaactccaaccgtctggtcgaagttgccaaacgcgaaggatgcacacgttcggttcttgttgaacgcgcccgtgacattgactggaccaagcttgaagggatcgaaacccttggcattaccgccggtgcgtcagccccggaagttctggtcgaagaagtcattgatgcctgccgcgaacgttatgacgttacggtcgagaccatcacactgaccgaagaaaatgtgaccttcaaactgccgcgtcagcttgcaagctaag

SEQ ID NO: 211666 - DNA, 757 bp, Unknown
  Bacterial polypeptide expressing nucleotide sequence isolated from the Sargasso Sea
atgcaaaaattgacaggaaaaaaacttgttctagcagatccaagagggttctgtgcaggagtccaaagggcaatagatattgtagataaagctattgagctatttggtaatcctatatatgtaaaacatgaggtcgttcataataaatttgtaattgaaaaattgaaagataaaggagtaatttttattgaagatatagggtcggttccagagaattctatcataatttttagtgcacatggggtctcttctaaagttaaagaagaatcaaaaaaaagaaatttaaaaatatttgatgctacttgtccccttgtaacaaaagtacatttggaagtgcataaatatgcatctgaaaataaagatgtgatactgataggacatagagggcatccggagattgagggaacaatgggtcaattcaattctgagtctggaaaaatacatctaattgaagatgaagatagcgtagaaaaaattgatattaccaataaagatgttgcatatgtaacacagaccactctttcagttgatgacactagaagcattattgataaaattaaaattaaatttcctaatatcgtttctccagcaaaagatgacatatgttatgcaacccaaaacagacaagatgccgtaaaatcaattcttaagttttgtgattgtttaattgtagttggatcagttaacagttcaaattcgaagaggcttacagaattagctggaaaacaaaatattgttgcttatttagttgataata

SEQ ID NO: 211667 - DNA, 714 bp, Unknown
  Bacterial polypeptide expressing nucleotide sequence isolated from the Sargasso Sea
aatggatattttattagctaatccacgtggcttctgcgcaggcgttgatagagcaattagcatagtagagcgcgctttagatatttttgaaaagccaatttacgtacgtcatgaagttgttcataacaaatatgttgttgacggcttaaaaaaccgaggcgcagtatttgtagaagaattacaccaagtaccagacgacagcattgttatttttagtgcgcatggtgtatctcaagcggtacgctctgaagccaagcgcagagagttaaaagtatttgatgcgacttgtccacttgtaactaaagtacatatggaagtaacccgcgcaagccgtaagggtatagaatgtattttaattggccatcatggtcacccagaggttgaaggcaccatggggcaatacgacaatgatgctggcggtatttatttagtagaaaccgtagacgatgttattgcgcttaatgttaaagatgcaaaaaacttattttattgtagtcaaacaacgctctctgttgatgacactgctgatgtaatagatgcattacgagaaaaatttcctgcaattgacggcccgcgtaaagatgatatttgttacgcgactcaaaatcgccaagatgctgttcgcgacctagctgataaggttgatgtattattagttgttggtgcgaaaaatagctcaaactcaaatcgcttgcgcgaacttgcagataaaat

SEQ ID NO: 211668 - DNA, 633 bp, Unknown
  Bacterial polypeptide expressing nucleotide sequence isolated from the Sargasso Sea
aatgaaaaacaaagaaattagaatattactatctgcacctagaggtttctgtgctggtgttgagagagctattgaaatagttgaaaaatcaattcaaaaatatggagctccagtttatgtaagacatgaaatagttcataacaaatacgtagttgatgatttaaaaaacaaaggtgctgtatttgtagaggagctggaggaaattgaagataaatcaaggccagtaattttttctgctcatggggttccaaaaaagatacctgaggatgcgaaaaattataacatgacttatgttgatgctacttgtcctttagtttcaaaggtacatagagaggcagaaaatcttcataaagctggatatcatttaattttaattggtcaccaaaaccatcctgaggtaattggtacaatgggtcaattaccaaatggatctatagatcttattcaaaatgaagatgaagcaaaaaaatataaaataaataaccaagacaaaatatcttacgttactcaaacaactttatctgtagatgatacgaaagatataataaaaattttgaaaaaaagatttccaaatattaaggagcctcaaaaagaagatatttgttatgcgacaacaatagacaaatggcagta

SEQ ID NO: 211669 - DNA, 810 bp, Unknown
  Bacterial polypeptide expressing nucleotide sequence isolated from the Sargasso Sea
tttgggttcaccagtgtatgtgagacatgaaatagttcataatacccaagttgttgaaaacttaaaaaagcttggagcaatatttgttgaagaattaagcgaaatagaagatagctcaagacctgttattttttcggctcatggagttccaaaatcagtaccagaagaagcatcttttaaaaaaatgttttatattgatgctacctgtcctcttgtaacaaaagttcacagagaggctgaatctcttcataaaaatggttacgatgttattttaataggacacaaaaatcatccagaagtgcttggaacaatgggccaacttccaaaaggagcaataaaacttattgaaacggtaaaacaagcacaaaatctaaatattaatgaaataaagaaacccgttgcttacgttacacaaacaacattatcggttgatgacacaaaggatattatagaagtgataaaaggtaaatttccagagataaaatcaccaaccaaagaagatatatgttatgcaacaacaaatagacaggaagctgttaaaaagatcgcaccattgtgcgacatgttttttgttgttggaagtaaaaattcatcaaattctcaaagattagtagaggtagcaaaaaaatcaggctgttttagttctgaacttataacatttaatgaaaaaattcccatagactcaataattaaatgtaacaaaataggaattacatcgggcgcctctgcaccggaaaaattagtacaaaatcttatatttgaaataaaaaaacattgtaatgtttctatggaagaagttgtacttacgaa

SEQ ID NO: 211670 - DNA, 742 bp, Unknown
  Bacterial polypeptide expressing nucleotide sequence isolated from the Sargasso Sea
tactgacaaaacaaggccagtaattttttctgctcatggggtccccaaatctgtaccagaagaagcaacaaatttaaaaatgatttttgtagatgctacatgccctttggtttctaaagttcacagagaggcagaaaatctagataagaaaaatatacatattttacttattggtcataaaaaccatccggaggttatagggactatgggtcaactcccaatgggaaaaattgatttaattgaaacaattaaagatgcacaaaagtttgaaaaagggaaaaatgaaaaacttgcttatataactcaaacaactttatctgttgatgatactaaagatatcataaatgttttaaaaaaaagatttccagatattcatgaacctaaaaaggatgatatttgttatgcaacaacaaatagacaagcagctgtaaaaaaaatagctaaagattgtgataatttttttgttataggtagtagaaattcatctaattcggtaagattagttgaagttgctaaaaataatggttgcagtgatgccgaattgattcattcagaaagcatttttcctattgataaaatttctaggtgcaaaactataggtatttcatcgggagcatcagctcctgaagttttggttaaagaatttatagataatattaaaaaagaatttactgtacaaattgaagaagtagaaatagtaaaagaagacataacatttaaaatcccaggaaaattgaattaa

SEQ ID NO: 211671 - DNA, 670 bp, Unknown
  Bacterial polypeptide expressing nucleotide sequence isolated from the Sargasso Sea
aatgaaaaacaaagaaattaaaatattattatcagcacctagaggtttttgtgcgggcgttgaacgagctattgaaattgtcgaaaaatcaattcgaaaatatggagctcctgtatatgtgagacatgaaatagttcataataagtatgttgttgatgatttaaaaaataaaggagctatttttgtagaagagctagaagagatagaagataaatcaagaccagttattttttccgctcacggtgttccaaaaaaaataccagaagatgcaaaaagttataatatgacttatgtggatgctacttgccctttagtttcaaaggtgcatagagaggcagaaaatcttcataaagctggttatcatttaatcttaataggtcatcaaaatcatcctgaggttatcgggacaatgggtcaattgcccaatggatcaatagatcttattcaaaatgaggatgaagcaaaaaaatataaaacaagaaatccagataaaatttcttatgttactcaaacaactttatctgtagatgatacaaaagagatcataaagattttaaaagaaagatttccaaatattaaagagcctcaaaaagaagatatttgttacgcaaacacaaatagacagatggcggtaaaaatatcgcaaaaaaatgtgacttgttttttgtta

SEQ ID NO: 211672 - DNA, 685 bp, Unknown
  Bacterial polypeptide expressing nucleotide sequence isolated from the Sargasso Sea
aaagatgctaaaagctataatatgacttatgttgatgctacatgcccattagtatcaaaagttcatagagaagctgaaaatttaaataaagctgggtatcatttgattttaattggacatcaaaatcacccagaggttattgggactatgggtcaattacccaaaggatcaattgatcttattcaaaatgaagatgaggctaaaaaatataaacttcaaaagaacaaaaaaatttcttatgtaacacaaacaacattatcagttgatgatactaaagatattatccaaatcttgaaaaatagattccctgatattaaagaacctttaaaagaagatatttgttatgccacaacaaatagacagatggcagtaaagaatattgctaaaaaatgtgatttatttttcgtaatcggtagtagaaattcatcgaattcagttagattagtagaagttgctaaaaaatctggctgttcaaattcaattttaattcattctcaaagtgaaatcccatttgatttaatcaaaaactcaaatacaattgggatttcttctggagcatctgctcctgaaattttagttaataattttataaaagagttaaaaaatagatttacagtaagtatagatgaagtagaaatcataaaagaaaacgttgttttcaaagctccaaaaaaattaaattaaa

SEQ ID NO: 211673 - DNA, 760 bp, Unknown
  Bacterial polypeptide expressing nucleotide sequence isolated from the Sargasso Sea
atgatagaagataataaaaatttaaatttaaataaaaatctttatctagcttcaccaagaggtttttgtgcaggagtagagagagctattaaaattgttgaacaagcaattaaaattcatggaaaacctgtttatgtgaaacatgaaattgttcataataaacacgtagtaaaaagattatctgaagatggcgcaatttttgttgagtcatttcagaatgtaccaaaaaactctattgtaatattttctgcacatggtgttgcaaaaaaagttgttaatgaagctaaagactatgatttaaatatttttgatgcaacatgccctttagtaactaaggttcatcttgaggcgattaaattacataacaatggttatcatatacttttagtaggacatgatggacatccagaaattgagggtactagagggcaagttcctaaagagagtataactttaattcaaaatctcaaagaagcaaaaaccttcagatcaaaagaaaaaaaactagcatggctaagtcaaactacattatcagttgatgatacttctgaaatagtaaaaactttaaccaaacgttttccaaaaattataggaccaaagaaaggtgatatttgctatgcaactacaaacagacaaatggctgttaagaaaattgcttcaaatgttgaaataatgctaattgtaggatcagaaaattcctccaattcacaaaggcttgtagaagttgcaaaaaatgaaggttgtgtaaattcatatttgg

SEQ ID NO: 211674 - DNA, 712 bp, Unknown
  Bacterial polypeptide expressing nucleotide sequence isolated from the Sargasso Sea
catgaaaaaacaaaatataaatttatatttagcttctcctagaggattttgtgctggcgttgatagagctgttaagattgttgaaaaagctattaaaaagtttggttcgccagtttatgttagacatgaaatagttcacaacaaagaggtagtaaacagtttgtctaaaaagggtgctgtttttattaatgaagtttatgaagcaccaaaaaattctacaattattttttcagctcatggagtaccaaagtctgtttttactgaagctaaaaatagaaatatgattagtattgatgcaacatgccctttggtgacaaaggttcataatgaaacccataagaattttgtagaaggaagacatattttgttgattggacatagaaatcatccagaagtggttggtactatgggacaagtctcggagggctttgtaactcttgtcgaaactgaaaaggatgcaaagaatgtagttgttagggacccctgtaatcttgcgtatgccacgcaaacaactttatcagttgatgaaacagaaaaaattctaaaaatcttaaaaaatagatttccaaaaatcaaaggtccaagttcaaatgatatttgttatgctacaactaatagacaattagcagtaaaatcaatgactaaaatatgtgattgcatattagtaattggcgcagaaaactcctctaattcaaaaagattagtagaagta

SEQ ID NO: 211675 - DNA, 814 bp, Unknown
  Bacterial polypeptide expressing nucleotide sequence isolated from the Sargasso Sea
atgaaagtattagtaacaaatcctagaggtttttgcgctggtgtcgtaagagcaatagacatagttgaacttgcaattaagaaatttggtgagccagtttatgttaaacaccaaattgttcacaatccaaatgttgtaaacgatgttgaacaacagggtgcaataactgttgaggaaatccacgaaatacctgatggtagtgttgttgttttctctgcacatggatcagctccagaagattataagctagctaatgaaaaaaaattaaagattattgatgccacatgccctttagttactaaggtccacaacgaagcaaaaaagtattccaatgaaaataaatctatagtattagtaggtcatgagggccatcaagaggtcaaaggtacaatgggtcagacagatatgatcttaattgacgaaagaaaagaatttccagtagataaaattaaagatcttaaaaatgtagcagtaatttctcaaacaactctttctgtaaatgacactgcaaaagcaattgaaaatatcaaagaaattatacctgatgtaactgttagaaatgatatatgttatgcaaccactaacaggcaagatgcaacagaattgttggcagaccaatgcgatctagttttagtaattggtgcgaataatagttcaaattgccaaaggttaaaagacgtagcaattcgtaaaggcgtgccttcatatttaatactaggccctgaagaaattaactttgattggttaaaaaatgtaaagactgtaggtataacttcaggggcatctacacctgagaaaatggtcaagaagtaat

SEQ ID NO: 211676 - DNA, 664 bp, Unknown
  Bacterial polypeptide expressing nucleotide sequence isolated from the Sargasso Sea
aatgacttatgtggatgctacatgtccacttgtctctaaagttcatagagaagcagaaaatctctgtaaagctggttaccacataattttaattggtcatgaaaatcatcctgaagtaattgggactatgggccaattaaaagagggttctatagatctaatccaaaatgaagaagaggctaaaaattatcaaaataaactagataaaaaattggcatatattactcagactactttgtcagttgatgatacaaaagaaataatcaaaattttaaaaaccaattttcctaatataaaagaaccaatgaaagaagatatttgctatgcaactactaaccgtcaaatggcagtaaaaaatattgcaaaaaattgtgacatgttttttgttattggaagtagaaactcttcaaattctgttagactagttgaagtggcaaaaaaatcaggctgtgaaaattcacaacttattcattcaaagagctcaataccgtttgatctaatagaaaattgcaatactataggtatatcctcgggagcatctgcgccagaaatattggttgaaaattttattaatgatttaaaaaataaattttctataagtatagatgaagttgaaataattaaagaagatgtagtatttaaagctcccaaaaaattaaattaa

SEQ ID NO: 211677 - DNA, 565 bp, Unknown
  Bacterial polypeptide expressing nucleotide sequence isolated from the Sargasso Sea
atgaaaaataaaaacttaaaaattttgttagcttctccaagaggattttgtgctggtgttgatcgcgcaattgaaattgtaaaaaaaagtatagataagtatggggcgcccgtttatgtaagacatgaaattgttcacaacaaacatgttgtagatagtttaaaaaaaataggagctgtatttgttgaagagttagaagaaattaaagataaaactagacctgttattttttctgctcatggagttccaaaatctgttccaaaagaagcttcgaatcttaatatgacttatgttgatgccacttgcccattggtttctaaagtacatagagaagctgaaaatttacataaaaatggttcacatatattacttattgggcacaaaaatcacccagaagtagttggaacaatgggtcagttaccaagtgattgtatagatcttattgaaaatgttaatgatgctgaaaaatattcaaaaaaaaatggaagtaaattagcttacattacacaaaccacattatcagttgatgatactagagaaattataaacgttttgaaaaataaat

SEQ ID NO: 211678 - DNA, 613 bp, Unknown
  Bacterial polypeptide expressing nucleotide sequence isolated from the Sargasso Sea
tggtagaaaaaaaatgagtaacaaaaatttaaaaatttatttagctgcaccaagaggattttgtgcaggagttgatagagcaattgaaattgtaaaaaagagtatagataaatttggtgctccagtttatgtaagacacgaaattgtacataacaaacatgttgtagaaagtttaaaaaaaataggagcgatatttgttgaagaattagatgagattaaagataaatcgagaccagttatattttcagcacatggggttccaaaatctgttccagaggaggcttctaatttaaatatgatgtttgtagatgcaacgtgtcctctagtatctaaagttcatagagaagcagaaaacttaaataaacaaggacatcatatattattaataggtcacaaaaaccatccagaggttattgggactatgggtcaattgccagaaggttcaatagatttaatagaaaatattgaggatgcaaataagtatgaaaatgtcaaaaaaaaacatctatctttcataactcaaacaacactctctgtagatgataccaaagatattattgcagctctaaaatctaaattaccagatattaaagagcctaaaaaagatgacata

SEQ ID NO: 211679 - DNA, 793 bp, Unknown
  Bacterial polypeptide expressing nucleotide sequence isolated from the Sargasso Sea
tcggttaatgatcatttgagaaaaatgaatgtaaagttcatttcagctaaaaatggaataaaagatttttctttagtttctaatggggatgttgttattcttcctgctttcggagctactgttcaagaaatgaaactcttgcatgagaaaggttgtcatatcattgatacaacttgtccatgggtttctaaggtttggcatacagttgaaaaacataaaaaacatgttttcacatctattattcatggaaaatttaagcatgaagagactctcgctacaagttcattcgcaggtaaatatttagttttactcgatctagaagaagcaaactacgtatctgaatatattctggggagaggaaatagaaatgagtttatgaacaaatttgctaaagcttgttctaatggatttgatcctgataaagatttaaatagagtcggagttgcaaatcagacaactatgctgaagagcgagactgaagaaattgggaaggtttttgaaaggactatgttaaaaaaatttggcccagaaaacttaaatagccattttttagcttttaataccatttgtgatgcaactgaagaaagacaagatgccatgttctctttggttgatgaagatcttgacatactagtagttattggaggcttcaattcttcaaatactactcatttacaagaaatagcaattactaaaaatatttcatcttttcacattgacacgccagagaggatatccgtcaaagaaaactcaatatttcataaaccacttggatcagatttagaacttaaaa

SEQ ID NO: 211680 - DNA, 847 bp, Unknown
  Bacterial polypeptide expressing nucleotide sequence isolated from the Sargasso Sea
atgaaaaataaagaattaaaaatattattatctgcccctcgtgggttttgtgctggggtagaaagagcaattgaaatagtagaaaaatctatacaaaaatttggggctccagtttatgtgcgtcatgaaattgtacataataagtatgtcgtagatgatttaaaaaataaaggagcaatatttgttgaagagctggaggagataaaagataaatcaagaccagtaattttttcagcacatggtgttccaaaaaaaatacctgaagatgcaaaaaattataaaatgacttatgttgacgctacatgtccactagtttctaaagtacacagagaagcagaaaatcttagtaaagctggttaccatataattttaataggtcatgaaaaccatcctgaagtaattggaactatgggtcaattaaatgaaggttctatagatctaattcaaaatgaggaagatgctttaaactatgataataaactagacaaaaaattagcatatattacccagactactttatcagttgatgacacaaaagagataatcaaaattttaaaaaccaattttcctaatataaaagaaccaatgaaagaggatatctgttatgcaactactaaccgtcaaatggcagtaaaaaatattgcaaagaattgtgacatgttttttgttattggaagtagaaactcttcaaattctgttaggctagttgaagtagcaaaaaaatcaggctgtgaaaattcgcaacttattcactcagaaagctcagtaccatatgatcaaatagaaaattgcaatactataggtatatcttcaggagcatctgcaccagaaatattagtgaaaattt

SEQ ID NO: 211681 - DNA, 742 bp, Unknown
  Bacterial polypeptide expressing nucleotide sequence isolated from the Sargasso Sea
atgaaaagaattaagctggcgaaccctaggggtttttgtgctggggtagatagagcaattgacatagtttcgaaagcattagagatttatgatgacccagtttatgtcagacatgaggttgtccataacaggaaagtagttgacgatctcaaatcaagaggtgctgtatttgtagaagaattatcagaaattcctgatgatggcattactattttctcagcacatggaatttcagcatctgtagaaaatgaagctgaagatagaaaattaaaattctttgatgcaacttgccctttggtttcaaaagttcacaaagaagttattaggtttgctagcgtaggtaaagacataattatgattgggcataaaaatcatccagaggttgaaggcactcttggaagatttccggagcattctcaaggaaaaatgtatttggtagaaaatttagaacaggctaaaactataaaggttaatcaatcagataatttatgtttagtaacacaaacaactttgtctgtttcagatacggaagaaattgtagaagaattgaagactagatttcctctaatgcaagagccaaagtccgaagacatatgctatgccactcagaatagacaagatgctgtaaagcaactagctttagaatcggatttaataattgtggttggatctcagaatagttcgaattcaaccaggctaaaagaattagcagaaaattgggagtcaagtctgtgctcttaga

SEQ ID NO: 211682 - DNA, 707 bp, Unknown
  Bacterial polypeptide expressing nucleotide sequence isolated from the Sargasso Sea
tgtatctcaagcggtgagacaagaagctaaggcgcgagggcttagagtctttgatgcgacgtgccccttagtgactaaagtacatcttcaggtgacgcgtgccagccgcaaaggtattgagtgcatcctgattggccatgaagggcaccctgaggtcgaaggtactatgggtcaatacgataatcctaatggtggagtttatctgattgaatcgccagccgatgttgaagctttggaagtgcgtgaccccaataatctctgcttcgtgacacaaactacattgtctgtagatgatactttggacattattgttgccttacaaaaaaggtttccctctattgaaggtccgcgaaaagacgatatctgttatgcaacgcagaatcgtcaagatgcggtacgtaatttgtctgcagacgttgatttgttgattgttgttggctcaaagaacagctctaactctaatcgtttacgcgagctagcattgaaaacaggaacccagtcttatctggtggacaccgcggatgatgttgagtctagttggtttgataatgttacacgtgtagcagtgactgcaggcgcatctgctcccgaggtcttagttcaacaagttgttcaagctatcgcgacactcgcccctagtgtggtcacagaggttgaaggccgtaaagaagatacagtttttgcggtacctgctgaattacggtaac

SEQ ID NO: 211683 - DNA, 493 bp, Unknown
  Bacterial polypeptide expressing nucleotide sequence isolated from the Sargasso Sea
gatgaagctcaaatattaccatgctgaaagaattgataaaattgcttatataactcagacgacattatcagttgatgacaccaaggaaataataaaaatcttaaaaaaaaaatatccaaaaataaaagaacccatgaaggaagatatttgttatgccacaaccaataggcaggctgcagttaagaatattgcaaaacaatgtgaaatgttttttgtaattggaagcagaaactcttcaaactcagtaaggctggtagaagttgcaaaaaaatctggatgtgaaaacgcacacttaattcattcggaaagtgaaattccatataatgaaatagaaaaatttaataccataggtatttcgtcaggtgcgtcagctccagaagttttagttgaaaatttcataaattctttaaaaaataaattcactttaaaaataaatgaagttgaaataataaaagaaaacgtagtttttaaagtcccaaataaattaaattag

SEQ ID NO: 211684 - DNA, 688 bp, Unknown
  Bacterial polypeptide expressing nucleotide sequence isolated from the Sargasso Sea
tatgaaacttttagttgctgctcccagaggattttgtgcaggtgtagatcgcgcaatagaaattgtagaaaaatgtctgcaaaaatatggaaagcccgtatatgttcgtcatcagatagtgcataataaatatgttgtagaagatttagaaagaaaaggggccatatttgtcaaagaattatttgaatgtccaaaagatagaccagtggttttttctgcacatggtgtagcaaggtcaattttttctgatgctaaagagcgtaatttacaatacgtagacgcaacttgccctcttgttactaaagtgcatattgaagtaaatagataccataaattaggttatcagattataatgattggccataaaaaccatccagaaacaattggtacaatgggtcagctcccaagtggggaggtcttgctggtggaaaattctaaagacgttgatgctattaacccgagagatgaaaataaacttgcctatgttacacagactactttatctatagatgataccttagagataggaaacgcgctaaaaaatagatttcctggtatagtggctccacataaagaagatatttgttatgccactaccaataggcaaaatgcagttaaaaaaatttcaccacttatagatggatttatagtagttggatcaataaattctcgaactcaaaaaggttag

SEQ ID NO: 211685 - DNA, 721 bp, Unknown
  Bacterial polypeptide expressing nucleotide sequence isolated from the Sargasso Sea
atgaaagaaaaagaaattagaattttgttagctgctccaagaggtttttgtgctggtgttgatagagcaattgagattgttaaaaagagtatagataaatttggtgctccagtgtacgtcaggcatgaaattgttcacaataagcatgttgttgaaagtttaaaaaaaattggtgcagtttttgttgaggaattaagcgaagtaaaagataaatctagacctattattttttctgcgcatggtgtaccaaaatctgtacctaaagaagcagagaatttaaagatggaatatatcgatgcaacttgtccattggtttctaaagttcatagagaagctgaaaacttaaataaaaatggatcacatattcttttaataggacacaaaaatcaccctgaagtaattggaacaatgggccaaattccagttgatggaattgatttaattgaaagcgtggaggacgctaaaaattataataaaaaagtgagcaaaaacatagcatatgttactcaaacaacactttctgttgatgatacaaaagaaataattagagaactaaaaaataaattcccagaaatccaagagccaaaaaaagaagatatttgttatgcaacaacaaatagacaagcagctgttaaaaagattgctgaaaaatgtgatatgttttttgttatagggagtagaaattcatctaattctgtcagattagttgaggtagcaaaaa

SEQ ID NO: 211686 - DNA, 491 bp, Unknown
  Bacterial polypeptide expressing nucleotide sequence isolated from the Sargasso Sea
aaagacgcaaaaaaatatatcaataaccaaaaaaaataatcttgctgtggttacccagactacgcttagtgttgatgaaactcgatctataattgatatcttaaaggatagattcccaaacataagtattccaaaaaaagatgatatttgttatgcaactcaaaatagacaggatgcggtaaagcaattagctttagaatcagattttatgattgttgtaggatcaaagaatagttcaaactcaaatagattaagagaattaggtgaaaaatgtggttgcaaatcggtattaattgatgaattcaatgatttagaccttaatgagctaatgaattattcaaatatctctataactgcaggcgcatcagcgcctgaatcaagagttatggagattgctaagtctctagaatcgcatattggcgctgagatagttcaacatggggaggataatgaaaatatctatttcaaacttccgcctggattaagataat

SEQ ID NO: 211687 - DNA, 343 bp, Unknown
  Bacterial polypeptide expressing nucleotide sequence isolated from the Sargasso Sea
gcagaaccgccaggatgcggtcaagcaattggccagcgagtgcgacgtgctgctggtcgtcggcagccccaacagctccaactccaaccgcctgcgcgaactggccgagcgcatgggtacaccggcctacctgatcgacggtgccgaagacctcaagcgtgagtggttcgatggggtaagcgggataggcatcactgcaggcgcttccgcgccagaagtgctggtgcgtggcgtggttgatcaactgcgcgcttggggggcggaaggggagacggaacttgatgggcggccggagaacattacgttttcgatgccgaaggagttaagggttaaggctttgtga

SEQ ID NO: 211688 - DNA, 399 bp, Unknown
  Bacterial polypeptide expressing nucleotide sequence isolated from the Sargasso Sea
aatgaataaaacgatagatgtatatttagctggtcctagaggcttttgcgctggtgtagatagagccattttaatggtccaagaagcaataaaaaaatatggagcccctgtttatgtaagacacgaaattgttcataataaatatgtagttgatagcttaattgctgaaggagctatttttattgaagagcttaatgaaattaatcaaatagatagacctgttatattttcagcacatggtgttcctaaatcagtacccaaggaagcagaggaattaaaattactatattttgatgctacttgtccattagtcagcaaaatacacagggaagttgaaaattttgaaagaaaaaaattaccagtaatattaataggccacaaaaatcatccagaagtagt

SEQ ID NO: 211689 - DNA, 442 bp, Unknown
  Bacterial polypeptide expressing nucleotide sequence isolated from the Sargasso Sea
atggaccagcaaatagaaacccaaaataaaatcaattcaggaaatttattggaagtgatattggccagtccgagaggtttttgtgcaggagttgaccgggccattaccattgttgagaaggctttggaaaagttcggaccgcctatttatgtccgccatgaaatcgtccacaaccgccatgtggtcagtcgattgcgggaaaagggggtgatctttgtggacgaactggatcaggtcccggaaggtgcccatgcgatcttttccgcccacggagtttccccgcaggtacgggaacaggcgttggaacggaatcttgaagtgcttgacgccacatgcccgcttgtgaccaaggtccatgttgaggccaaacgttatgctcagaaagaattcatcattcttctaattgggcatcgggaacacgttgaagtcgaaggaacttttg

SEQ ID NO: 211690 - DNA, 421 bp, Unknown
  Bacterial polypeptide expressing nucleotide sequence isolated from the Sargasso Sea
aatgaaaaataaagaattaaagatattattatctgctcccagaggtttttgtgctggagtagaaagagcaatagaaattgttgaaaaatctatagaaaaatatggatcaccagtttatgttcgtcacgaaattgttcacaacaaatatgttgttgatgatttaaagaataaaggtgcaatttttgttgaagagttaaatgagataaaagataaaactagacctgttattttttctgctcacggtgttccaaaaaaaatacctaaagatgcagaaaacttaaacatgacttatgttgatgctacatgtccattagtatctaaagtgcatagagaagctgaaaacctccataaagctggttatcatcttattttaattggtcatcaaaatcatccccgagtcattggaactatgggacagtta

SEQ ID NO: 211691 - DNA, 721 bp, Unknown
  Bacterial polypeptide expressing nucleotide sequence isolated from the Sargasso Sea
ttttctgcacatggagtacctaaaactgtaccagaagaagctgaaaataaaaaaatgttctatatagatgcaacgtgtcctcttgttacaaaagttcacaaagaatctgagcgtcactttaaaaacggatatcaaataattttggtgggacataaaggacatccagaagtcattggaacaatgggacagcttcctaaaggaagtattaaattaatagaaactgaagaagatgctacaaatcttaaaaaagatgaatttgatagaccggtagcatatgtaacgcaaactacattatcaattgacgatacaaaaaatattattgaaattttaaagaagaaatttccaaatattaaatcttcaattaaagaagacatatgctacgcaaccacaaacagacaaaatgctgttaaacaaattgcgggaaattgtgatatgttttttgtcattgggagcgaaaactcttccaactccaaaagattggtagaagtagctaaaaaatcagggtgtaagagagcagaactgttcgattttagcaaaaaacttccaataagtgagataataaataataaaaaaattggtcttacatctggtgcatctgctcctgaaaagttaattcaagattttataacagaagtaaaaaaacactgtaaagtttcaatagaagaagtggttactactgaagaaaaggttactttcaaactgcctagatctttaagctaat

SEQ ID NO: 211692 - DNA, 769 bp, Unknown
  Bacterial polypeptide expressing nucleotide sequence isolated from the Sargasso Sea
aatggaaaataaagaaattaaaattttattagcagcgccaaggggtttttgtgctggtgtagtaagagcaatagaaattgtagaaaaaactttaaaaaaatatggctcaccagtttatgtaagacatgaaattgttcataacaaatatgtcgtcgaaaatttaaaacaaaaaggtgcaatttttgttgaagagcttagtgatattaaagatgctactcgtcctgttattttttctgcgcatggtgttcctaaaaaagttcctgaagaagctattaaaaaaaaaatgttttatgtagacgcaacttgtcctttggttactaaagttcacaaagaagcagaacgacataataaaaatggatacaaaatcattcttattggacacaaagatcatcctgaggtaattggaactatgggacaaataccaaaagataaaatgattcttgtagaaaatgttgaagacgcaaaaaaagttaatttgactggccctgttgcttatgtaactcaaactactttgtcagttgatgatacaaaagatattattgagatattaaaaaataaatttccagatattcgcggtccgattaaagaagatatttgttatgcaacaacaaataggcaagaagctgtaaaaaaaatagcaccactatgcgacatgttttttgttattgggagtagcaattcatcaaattcaaaaagactagtagaagtagcaaaaaaagctggttgtaaaaatgctgaacttattaattttgaaaaaaaatacctatag

SEQ ID NO: 211693 - DNA, 847 bp, Unknown
  Bacterial polypeptide expressing nucleotide sequence isolated from the Sargasso Sea
aatgaataaaaaacttgatgtatatttagctggacctagagggttttgtgctggtgtagaaagagctattcttatggttcaagaagcaataaaaaaatacggagccccggtatatgttcgtcatgagattgttcacaacaaatatgttgttgataatcttaagaacgagggggcaatatttgttgaagaattaaatgaaatagatcaactggataggccggttatattttctgcacatggtgttcccaaatcagtaccagaagaagcggcaaatatgaatttgctttattttgatgccacctgtcctcttgtaagcaaaattcatagagaagttgaaaactttgaaagaaaaaatttaccggtaattttgattggtcatcaaaatcatccagaagttattggaacaatgggtcaaacttcaaaagatatttatcttgtagaaaagaaaaaagaagtaagcaagttgcctattccaaaaaatcaagaaattgcttacgttacgcagacaactttatctatagatgatacaaaggatattattgatgagattaaaatacattttaaaaatgttttagaaccaaagaaaaaagatatttgctatgctactactaatagacaggaagctgtaaaaaatattgctaaattatctgattatttttttgtaattggttcaaaaaactcttctaattcactacgcttagtagaagtagcaaaaacctatggttcgcaaaaagcaatattgatagatgacattgataattttgatccatcaataattaataaatcatcaaaaataggcattacagcaagtgcatcttcacctgaaatattggtaagtaaaatgctt

SEQ ID NO: 211694 - DNA, 874 bp, Unknown
  Bacterial polypeptide expressing nucleotide sequence isolated from the Sargasso Sea
cattgaattgttgaaaatcaattcaaaatttggtgcgccagtttacgttcgttatgaaattgttcataacaaacacgtggttgacgaccttaaaaataaaggagccatatttgtagaagagcttgaagagattaaggataaaactagacctgttattttttctgcacacggtgttcccaaaaaaataccagaagatgcaaaaaactataaaatgacttatattgatgcaacatgtcctttggtttcaaaagtgcatagagaggcggaaaatctaaataaagctggatatcacattattttaattggacacgaaaaccatccagaagttgttggaactatggggcagctcccagatggtgcagtaaaactaattcagaatgagtatgaggctaaaaattatcacactgaaaaatttgataaaattgcctacataactcaaacgactttatcggtagatgacactaaagaaataataaaaatcttaaaaaataaatacccatcaatgaaagaaccaatgaaggaagatatttgttatgcaacaacaaataggcaggctgctgtaaagaatattgcaaaaaaatgtgaaatgttttttgtgattggaagtagaaattcctcaaactctgtaagattagttgaagttgcaaaaaaatcaggatgtgagaatgctcacttaattcattccgaaagtgaaattccatatgatgaaatagaaaagtttaatactataggtatatcatcaggtgcgtctgctccagaaattttagttgaaaattttataagtgcactcaaaaataaatttactataaatataaatgaagttgaaataataaaagaaaatgtaatttttaaagtccctaacagattaaattag

SEQ ID NO: 211695 - DNA, 647 bp, Unknown
  Bacterial polypeptide expressing nucleotide sequence isolated from the Sargasso Sea
ttgcccattagtttctaaagtacatagagagtctgagcagttaaataaaaatggatatgaaatattgttaattggacataagaatcaccctgaagtaattggtactatgggtcaactttctaaaggatcaattaaactaatcgaaactaaaaatgacgtacagaatttaaatattaatgattttaaaaaacctctagcatatattacccaaactacactttcagtagatgacactactgaaataattgaagcacttaaaaagaagtttccaaaaattaaaggtcctgttaaggaagatatttgttatgcaactactaatagacaatcagctgtaaaagaaatagcttcaaaatgtgatttgttttttgtagtgggcagccgtaactcatctaattcagtaagattagtggaggttgcaaaaaaagctggatgcaataattctcaattaatgcattctgaaaaggaaattccttataatgaaatagatagttcaaatattattggaatatcttctggagcttctgcaccagaaaaattagttaaaacactgttagataatataaaaaaaaatcgaaacgtgtctatagaagaggtagtggtggctgaagaaaaggttgtttttaaattaccaaaagagcttaactaat

SEQ ID NO: 211696 - DNA, 523 bp, Unknown
  Bacterial polypeptide expressing nucleotide sequence isolated from the Sargasso Sea
tatgaaacaaacacttaaacctttaaaggtatttttagctcaacctcgagggttttgcgccggtgtagaacgagcaatagagattgtcgagagagctctcaaaatttatggtccaccagtctatgttagacacgaaatagttcacaataagagagtcgttaataatcttagttccaaaggtgcagtttttgttcaagaacttgaccagatcccagctggtgccgttacaatcttcagcgctcatggagttgcccaaagaattgaagacactgctaaagatagaaaacttcctattctggatgcgacatgtcctcttgtagcaaaagtccataaagaaggtcaaagatactcatccaaaggttatgaggttattttaattggtcacgaaggtcatccagaagtcgaaggcacaatgggaagaatttctggagacgtctatcttgtttcaaacacagaagatgtctttaaacttcaagtgaaaaatccacagaaactctcatatataagtcaaaccaccctctct

SEQ ID NO: 211697 - DNA, 847 bp, Unknown
  Bacterial polypeptide expressing nucleotide sequence isolated from the Sargasso Sea
gtatggttcgccggtttatgtgagacatgaaatagttcataacaaacacgttgtagaaagtttaaaaaaaataggtgcgatattcgttgaagagcttgatgaaataaaggacaaatcaagacctgttattttttcagcacacggtgtccctaagtctattccagcacaagctagtgatttaaagatggaatatattgatgctacctgcccccttgtaacgaaagttcatagagaagctgaaaaccttaataggaaaggagatcacattttattaatagggcacagaaaccatcctgaggttataggaacaatgggacagatagataatggcggtattgatcttatagaaagtgttgatgatgcaaaaaactaccaaaatatatctaataaagaactagcatacgtaacacaaactacattgtcagtagatgacacaaaagagataataagtgaactaaaaagaagatttccaggaattaaagagccaaaaaaagatgatatttgttatgctacaaccaatagacaatccgcagtcaagaagattgcaagtttctgtgatatgttttttgtaattggaagtagaaactcatcaaactcggtaagattagttgaggtggcaaaaaagtctgggtgtgaaaattctttacttatccattcagaaagcgaaattccatttgataagattgatgcttgtaaaactattggtatttcatccggtgcatcggcgcctgaaatactagtcgaagaatttattaaaaatttaaaaaagaaatatcaaattgaaattgcaaatactgaagtcataaaagaagatgtcacttttaaaatccctggtaaattaaattaa

SEQ ID NO: 211698 - DNA, 584 bp, Unknown
  Bacterial polypeptide expressing nucleotide sequence isolated from the Sargasso Sea
tataattttaattggtcatgaaaatcatccagaagtaattggaactatgggtcaattaaatcaaggttctatagatctagtccaaaatgaggaagatgctacaaattatcaaaataaactagataaaaaattggcatatattactcagactactttgtcagttgatgatacaaaagaaataatcaaaattttaaaaaccaattttcctaatttaaaagaaccaatgaaagaagatatttgttatgcaactactaaccgtcaaatggcagtaaaaaatattgcaaaaaattgtgatatgttttttgttattggaagtagaaactcctcaaattctgttagactagttgaagtggcaaaaaaatcagggtgtgaaaattcacaactcattcattcagaaagctcaataccatttgatcaaatagaaaattgcaatactataggtatatcttcaggagcatctgcgccagaaatattagttgaaaattttattaatgatttaaaaaataaattttctataagtatcgatgaagttgaaataattaaagaagatgtagtatttaaatctcccaaaaaattaaattaaa

SEQ ID NO: 211699 - DNA, 790 bp, Unknown
  Bacterial polypeptide expressing nucleotide sequence isolated from the Sargasso Sea
gcgactgtacaagaaatgaaactctttcatgagaaaggatgtcatattatcgatactacttgtccatgggtttctaaggtttggcatactgttgagaaacataaaaagcatattttcacatctataattcacggaaaatttaagcatgaagagactcttgcgaccagctcatttgcaggaaagtatttagtagtacttgatctagaagaggcaaactatgtatctgaatatattcatgggagaggaaacagaaatgagtttatgaacaaatttgctaaagcttgttccgatggatttgatcctgataaagatttagatcgagtcggagttgctaaccagacaactatgcttaaaagcgagaccgaggaaattggaaaagtttttgaaaggacaatgttaaaaaaatttggacctgaaaacttaaatagtcactttttagcgttcaatacaatctgtgatgctactgaagaaagacaagatgcaatgttttctttagtagatgaagatcttgatatccttgtcgttataggaggcttcaattcttctaatactactcatttacaagaaatagcaataactaagaatatctcttcttttcatatagatactcctgagaggatatcagttgaagaaaactcaatactacataaaccactagggtcagatttagaacttaaaaataactttttacctagtggaaatattaatgttgggatcacctctggtgcatctactcctgatagagtcgttgctgatgttattgaaaagttaattgatatagcttcgtaaa

SEQ ID NO: 211700 - DNA, 853 bp, Unknown
  Bacterial polypeptide expressing nucleotide sequence isolated from the Sargasso Sea
tgcaaaatacggttctccgatttatgtccagcatgaaatagttcataataagcatgttgtacagcgtctcagggagaggggagcgatttttgttgaaaatatcaatgaaattcctttgggctcacgagcaatctattctgctcacggggtttctcctgtggttcgtaaattagctggaaaaaggaaattaaaggttttggatgcaacctgtccacttgtaacaaaagtgcatggagaagcgcagcgttatgcccagaaagatttcacaataattctaattggtcatcataaacatgttgaggttcaaggcacagtaggtgaggctcctgataaaatcattgtggtggggagtcttgaggaggttgataaattaaatgttcaggatgaaaacaaggtaggttatataacacaaacaactttgtccctagatgatacagctgaaattattagtgctctcaaaaagcgattccctaaaatccagggtcctgcaaaaaatgatatttgttatgccacacaaaatcgtcagaatgctgtcaaggcactaagtaaagaagttgatctggtcatcgttgttggagcacctaacagttcaaattcagtgcgtttactggaagttgcaaaggcaactggagtgaaagcccgcagaattgaatcagagcaagaattaaatccgagttggtttaaaggtgtaaaaagtattggtgttacagcaggagcatctgcccctgaagatattctgcaaggagttgtttctggattaaagaaaatgttctcttcaagtcaggtgagggaccttaacatagttaaggagaatgttacttttgctctgcctgcagttttaagaagtgattaa

SEQ ID NO: 211701 - DNA, 718 bp, Unknown
  Bacterial polypeptide expressing nucleotide sequence isolated from the Sargasso Sea
atgagacttttagtagcagcacctaggggcttttgtgcaggagtagatcgtgcaatcgaaattgtggaaaaatgtctcaaaaaatttggaaaaccagtgtatgtaagacacgaaattgttcacaaccaatatgtggtaaatgaccttacagaaaaaggtgcgatatttgtcgatgaattagatgagtgtcccgatgacagaccagtagtgttttcagctcatggagtaccgaagggaatatttaaacaagcccagagaagaaacatgcattatattgatgcaacttgccctcttgtaacaaaggttcacttagaggcaaaaagatacttcaatttagggtaccagttggtaatgattggtcataaaaatcatcctgaaacggttggcactatgggtcaacttcctcctggtgaagtactattggtagaaaatatagatgatgtattttccatagaacctaaaaatagtgaaaaacttgcttttataacacaaacaacgctgtcagttgacgatacgtcagagatagcagaggcgttaaagggcagatttcccaagatagaagcaccccacaaagaggatatatgttatgcaacaaccaacagacagaatgctgtcaaaactatttctccaatgattgaggggcttctagtagttgggtcaaccaattcctctaattcaaaaaggttggttgaagttgggaagaaagcctgggtgtgaa

SEQ ID NO: 211702 - DNA, 805 bp, Unknown
  Bacterial polypeptide expressing nucleotide sequence isolated from the Sargasso Sea
aaacatgttgtagatagtttaaaaaaaattggagcaatatttatagaagagctggatgaaataaaagataagactagacctgttattttttctgcccatggagttccaaaatcagttccgaaagaagcttcaaatttaaatatgacttatgttgatgctacctgtccactggtttccaaggttcatagggaagctgaaaatttatataaaaatgggtctcacatattacttattggacataaaaatcatccagaagtaattggaacaatgggtcaattgcccaaagaaagtattgaacttattgaaagtgttgaagatgcagaaatgtataaaaaaaaaaatggaaataaattagcatatattactcaaactacgttatctgtagacgacacaaaagagattataaatgttttaaaaagaaaatttccagaaattaatcagccaaaaaaagaggatatttgttacgctacaacaaatcgacagtctgcggtaaaaaagattgcaaaaaattgtgatatgttttttgtaataggcagtagaaattcttctaattcagtaagattggtagaagtagctaaaaacaatgggtgcgataagtcagaactaattcattctgaaagtaaggttcctatagataaaattactaactgtaaaactatagggatttcttccggcgcctcagctccagaagttttagtagaagaatttattaatgaattaaaaaaagaatttgttatagaaattgaagaagttgaaataataaaagaaaatataatatttaaaattcctggaaagttgaactaat

SEQ ID NO: 211703 - DNA, 607 bp, Unknown
  Bacterial polypeptide expressing nucleotide sequence isolated from the Sargasso Sea
aatcttaataaagctggttaccatataattttaattggtcatgaaaatcatccagaagtaattggaactatgggtcaattaaacaaaggttctatagatctaatacaaaatgaggaagatgctacaaactatcaaaataaactagataaaaaattagcatatattactcagactactttgtcagttgatgatacaaaagaaataatcaaaattttaaaaaccaattttcctaatttaaaagaaccaatgaaagaagatatttgttatgcaactactaaccgtcaaatggcagtaaaaaatattgcaaaaaattgtgatatgttttttgttattggaagtagaaactcttcaaattctgttagactagttgaagtggcaaaaaaatcagggtgtgaaaattcacaacttattcattcagaaagctcaataccgtttgatcaaatagaaaattgcaatactataggtatatcttcaggagcatctgcgccagaaatattggttgaaaattttattaatgatttaaaaaataaattttctataagtatcgatgaagttgaaataattaaagaagatgttgtatttaaagctcccaaaaagttaaattaaa

SEQ ID NO: 211704 - DNA, 952 bp, Unknown
  Bacterial polypeptide expressing nucleotide sequence isolated from the Sargasso Sea
atgaaattagatcctaccagcccaagtttaaatattatgctggccaatcctcgcggcttttgtgctggtgtggacagagccattagtattgttgagcgtgctctcgagttattttcgccgccgatttatgttcgccatgaagtcgtgcataaccgctatgtagtgcaaaacctgaaggaccgcggtgccgttttcgttgaagagttagaccaagtaccggataacaatattgttatcttcagtgcgcatggggtttctcaggcggtacgtgccgaggctaaggcacgtgggttgcgagtattcgatgcgacttgtccgttagtcaccaaagttcatttacaagtgacccgtgcgagtcgcaagggaattgaatgtattttgattggccatgcggggcatcctgaagttgaaggcaccatgggacaatatgataaccccaatggtggtgtttatctgattgagtcccctgcagatgtcgagactttagaagttcgcgatcctaataacctctgtttcgtgactcaaacgacgctgtcggtggatgatacgctcgatatcatcagcgcgttattaaagcgcttcccgtccattgaaggcccgcgtaaggatgatatttgctacgcgacgcaaaaccgtcaggatgcagtgcgtaacttatcggccgatgtggatttgttaattgtggtcggttcgaaaaatagctctaactctaatcgcttgcgtgaattggcattaaaaaccggaactcaatcttatctggttgataccgctgatgatatcgattcatcttggtttgaaaatgtgacaaaagttgcagtgaccgctggcgcatcggcaccagaagtgctggttcagcaagtggttcaagcgattgcaaaattagcaccgagtgccgtcaccgaagttgaagggcgtaaagaagataccgtctttgccgtacctgcggaattac

SEQ ID NO: 211705 - DNA, 808 bp, Unknown
  Bacterial polypeptide expressing nucleotide sequence isolated from the Sargasso Sea
gaggtggctggaagccttgagcaggcctaccaaagtgagctgattcaaagcatccgtgagaacggatatgagctgcgtgaggggcgggtcacgattcgcctggctgaagcgtttggcttttgctggggtgtggagcgtgcggtagccattgcctatgagacccgcaggcattaccccaccgagcgcatctggatcaccaacgagatcattcacaacccgtcggtgaatgcccatctgcgcgagatggatgtgctgttcatctctgttgagcaaggggtgaaagatttctccggtgtggaaagcggcgatgtggtgatcctgccggcctttggcgccactgttcaggagatgcagctcctcaatgagcgtggttgtcacatcgttgacaccacctgcccctgggtgtccaaggtttggaacagtgttgagcgtcacaagaaaaactcattcacctcggtgattcacggcaaggtgaagcacgaggaaaccctggccacgagctcatttgccggcacctatttggtggtgttggatctcgaggaagcccagttggtctgtgactacatccttggtaacggcaatcgcgaagccttcttgcagcgctttgctggggccacctcacccggttttgatcccgattgcgatctggtgcgcatcggcgtggctaaccagaccacgatgctgaaaagtgaaacagaagacatcggccgcctctttgagcggactttgttgcggcgttatgggcctgccgaactcaatgaccatttcctggcgttcaacaccatttgcgatgccaccccaggagcgt

SEQ ID NO: 211706 - DNA, 694 bp, Unknown
  Bacterial polypeptide expressing nucleotide sequence isolated from the Sargasso Sea
gttcctgaagaggcaaaattaaaaaacctatcttttgtagatgctacatgtcctttagtttctaaagtacatagagagtcagaacaattatataggaatggatatgaaatattgttaattggtcataaaaatcatcctgaagtgataggaactatgggtcaacttcctaaaggatcaattaaattaatagaaacaataaaagatgtggaactattaaatgcaagagattttaaaaaacatttagcttatattactcaaacaacactgtctgtagatgatacagccgaaataattgaaactcttaaaaaaaagtttcctaagattaaagggccaataaaagaggatatttgttatgcaactactaacagacaatctgcggtcaaagaaatagcatcgaaatgtgatatgtttttcgtagtaggtagtcgaaattcttcaaattcagtaagattagtggaggttgcgaaaaaagctggatgtaataattcacaattgatgcactcagaaaaagagattccatataatgaaattaataattctgaaaccataggaatatcttcaggtgcatcagctccagaaaaattagtacaaaaattattagatataataaaaaaggatcgaaaagtttctatacaagaagttgtagttgctgaagaaaaggtcgtttttaaattaccaaaagaattaaactgat

SEQ ID NO: 211707 - DNA, 585 bp, Unknown
  Bacterial polypeptide expressing nucleotide sequence isolated from the Sargasso Sea
ttggtcacgctgggcatccagaggttgtaggtactatgggacgaattaaaggagatgtttatctagtttctaacactgatgacgttaaaagacttaaagttagaaacccaaaaaaattatcatatataagccaaacaacattatcagttgatgatacaaaagttgttattgaagcactaaaagatagatttccaagtatcgaaggacccgatgtgaaggatatatgttatgcaacccaaaatagacagtcggctgtaagagatttagttaaccacgttgatttgatgttagtagtaggagcaaagaatagttcaaattcgaatcgtcttagagatctaggagaggaatctggagttggtacatttctaattgaaacagcagatgatttagatagggcatggtttgatgatgtaaattcagttggaatttcctcaggggcctcaacccctgatgaacttgtgaatgaggttatagatagaatttcaacctttagagaaataaaaattgaaaaaagacctggaattgaagaaaatgttgtttttaaacttccaaatcaacttgttgagaaccaattaggaaagtaaa

SEQ ID NO: 211708 - DNA, 322 bp, Unknown
  Bacterial polypeptide expressing nucleotide sequence isolated from the Sargasso Sea
aatgaaaaataaagaattaaaaatcttgttgtctgcaccacgtggtttttgtgcaggtgttgaaagggcaattgaaattgttgaaaaatcaattcacaaatttggtgctccagtttacgttcgacatgaaattgtacataacaaacacgttgttgacgatctaaaaaataaaggagctatatttgttgaagaacttgaggaaataaaagacaaatcaagacccgttattttttctgctcacggtgtaccaaagaaaataccagaagatgctaaaaattataaaatgacttatgttgatgcaacatgtcctttggtttcaaaa

SEQ ID NO: 211709 - DNA, 568 bp, Unknown
  Bacterial polypeptide expressing nucleotide sequence isolated from the Sargasso Sea
aatgaacattttgatcgctaacccaagaggcttttgtgctggagttgatagagccatagagattactgaaaaagctttaagtatttttggtgcacctatctatgtcaaacatgagatagtgcataataactatgttgtaaaaaatcttgaagcaaaaggagcgaaatttattgaaaatatagaaaatcttaaagaaggctcgattttgatttttagtgcacacggtgtttctaacgatattgaaaataaagctcaagaaaaaaatttaaaagtttttgatgcaacatgccccttagtaacaaaagttcacatggaagttcaaaaatattctgacgataaaattaatacaatactaattggtcataaaggacaccctgaagttgagggtacaattggaaggtacaaatctacagaccaagcaagaatatttttagttgaaaatattaatgacgtgaatgcattaactttaaaaaatgatgagccagtcgcgtatgttactcaaactacattatctcttgatgatacagaaaaaatcattgaccatcttaaaaaacgattcaagaactta

SEQ ID NO: 211710 - DNA, 424 bp, Unknown
  Bacterial polypeptide expressing nucleotide sequence isolated from the Sargasso Sea
tatgcatatcaaactcgccaatccccgtggcttctgcgccggtgtcgaccgcgccatcgagatcgtcaaccgtgccctggaggtattcggtccgccgatctacgtgcgccatgaagtggtgcacaacaagttcgtggtcgaggacctgcgcgcccgtggcgcggtgttcgtcgaggagctggatcaggtgccggacgacgtcatcgtcatcttcagtgcgcacggtgtttccaaggcggtgcgcgacgaggcggcgaaccgtggtctcaaggtattcgacgccacctgcccgctggtgaccaaggtgcacatggaggtggtgcgctacagccgcgaaggtcgcgagtgcatcctcatcggccacgaaggccacccggaagtcgaaggcaccatgggccagtacgacgccagcaacggtggctcc

SEQ ID NO: 211711 - DNA, 658 bp, Unknown
  Bacterial polypeptide expressing nucleotide sequence isolated from the Sargasso Sea
ttttatgttgatgcgacatgtcctttggttaccaaggtccatagagaagctgagcggcattataaaaatggctacaaaataattcttattggtcataagggccatccagaagtaataggcacaatggggcaaattccaaaaggaaacattgtattagtggaaactttagaagatgctaaaaatgttaaaattaacggtctcgtcgcctatgttacgcaaactactttatcagtagatgacactaaagaaattattaaagtcttggagaaaaaatttccaaaaattaaaccaccagtaaaagaagatatatgttacgcaacaacaaatagacaaaatgcagtaaaacaaatagcttcttcatgcgatatgttttttgttattggtagtgacaattcttcgaattcaaaaagattagttgaggtagctaaaaaagctggttgcggaaaatcttaccttattaattttaaaaatgatcttcctataaaagaaataattaattgcaagaagattggtttaacatcaggagcctcagctccagaagaattagtacaaagttttatttctgaaataaaaaaatatacagatatttctatagacgaaagtataaactcaaaagaaagtgtgatttttaaacttccgccctcgttaataaactaaa

SEQ ID NO: 211712 - DNA, 424 bp, Unknown
  Bacterial polypeptide expressing nucleotide sequence isolated from the Sargasso Sea
atgaaacaaaaaactaaattatcactggctaatcctaggggtttttgtgctggtgtagatagggctattgaaatagtaaatagagcacttgatatgtttggaagtcctatctatgtaaagcatgaggttgttcacaatgaggctgtagtaaatgatctaaaggaaagaggcgctatatttatcgaagaaatctcagatgtccctgataattcaattattatttttagtgctcatggagtctcacgcaagattgaacaatccgttaaagcgagaaatctgcagtttttcgatgcgacttgcccacttgttaccaaagttcacatggaagtcattaggcatggcagagcaaatagggacataatattaataggtcatgagggtcatcctgaagtagagggaacaatgggaagatactttagtcaaa

SEQ ID NO: 211713 - DNA, 178 bp, Unknown
  Bacterial polypeptide expressing nucleotide sequence isolated from the Sargasso Sea
gatgggtgagttcacaatcgaacttgcgaatccccggggcttttgcgcgggcgtagatcgtgcgatcgaaatagttgaacgcgcacttgatcgttatggtgccccgatttatgtgcggcatgaggtggtgcataaccgctatgtcgttaatgaccttaaaaagaaaggcgctgtttcg

SEQ ID NO: 211714 - DNA, 630 bp, Unknown
  Bacterial polypeptide expressing nucleotide sequence isolated from the Sargasso Sea
aatgaaaaataaagaattaaaaatattattatccgcacctcgtggattttgtgctggggtagaaagagcaattgaaatagtagaaaaatctattcaaaagtttggtgctccagtttatgtgcgtcatgaaattgtacacaataaacacgtagtagatgatttaaaaaataaaggcgcaatatttgttgaagagctggaggaaataaaggataaatcgcgaccagtaattttttcagcacatggtgtaccaaaaaaaatacctgaaaatgcaaaaaattataaaatgacctatattgatgccacatgtccacttgtttcaaaagttcatagagaggcagaaaatctcaataaagctggttatcatatacttttaattggtcacagaaaccatcctgaagtaataggaactatgggacaattgtctgaaggttctattgatttaattcaaagcgaagaagatgctagcaactaccataataatctagataaaaaaatagcatacattacacaaaccactttatcagttgatgacacaaaggaaataatcaaaattttaaaaaataaatttccaaatataaaagagccaatgaaagaagatatttgttatgcaactactaatcgtcaaatggc

SEQ ID NO: 211715 - DNA, 519 bp, Unknown
  Bacterial polypeptide expressing nucleotide sequence isolated from the Sargasso Sea
gaagtcattggaactatgggtcaacttccagatggaaaaattgacttaatagaaacaatcgaagatgcacaaaagtttcaaagagggcaaagtgaaaaacttgcttatataactcaaactactctatctgttgatgatactaaagatatcatacatgttttaaaagaaaggtttccagatattcacgaacctaagaaagatgatatttgttatgcaacgacaaatagacaagcagctgtaaaaaaaatagcaaaagattgtgataatttttttgttataggtagtagaaattcctcaaattcagtaagattagttgaggttgctaaaaataatggttgtagtgatgctgaattaattcattcagaaagtatttttcctattgagaaaatttctaaatgcaaaattataggtatttcgtcaggcgcatcggctcctgaagttttggttaaagaatttatagataatattaaaaaagaatttactgtacaaattgaagaggtagaaatagaaaaagaagac

SEQ ID NO: 211716 - DNA, 769 bp, Unknown
  Bacterial polypeptide expressing nucleotide sequence isolated from the Sargasso Sea
tatcgaagaatctcagatgttcctgatgattcaattattatttttagcgctcatggagtctcacgcaagattgaagaatccgtaaaagagagaaatttgcagtttttcgatgctacttgcccacttgttactaaagttcacatggaagtcatcaggcatggcagaacaaatagggacataatattaataggccatgagggtcatcccgaagtagagggaacaatgggaagatactttagtcaaaatggaaaaatatatcttgttcaggatttagaggaggcaaaggaggtttctgtaaaccaaccagaaaatgttgcctatgtctcacaaactactctaagtgtagatgaaacaaaggatatcataagtgagttaactgagaagtttccaagtattgtaggtccaaaaaaagatgatatttgttatgccacacaaaacaggcaggatgcagtgaaacaacttgcactcgaaacagattacattattgttgttggttcaaaagcaagctcaaattcaaatcgcctaaaggagcttgcaaataagtgtggcgtcaactcggtcctaatagatgaatttagtgatcttgacttaaatgaattaaaagactttaagaatattggcctaactgctggagcatctgcaccagaatcaaaagttcaagaaataatctcaaatcttagtattttcttagatgcagagatagaagagaagggtggagtcaaagagaatatttcttttaaattacctccagaattaagagcaagttaat

SEQ ID NO: 211717 - DNA, 724 bp, Unknown
  Bacterial polypeptide expressing nucleotide sequence isolated from the Sargasso Sea
gttattttttcagcacatgggtgtgcctaagtctattccagcacaagctagtgatttaaagatggaatatattgatgctacctgccctcttgtatccaaagttcatagagaagctgaaaaccttaataggaaaggagatcacattttattaataggacacagaaaccaccctgaggttataggaacaatgggacagatagagaatggtggtattgatcttatagaaagtgttgatgacgcaaaaaattaccaaaatatatctaataaagagctagcgtacgtaacacaaacgacattatcagtagatgacacaaaagaaattataactgtgctaaaaaaaagatttccaagaattaaagaaccaaaaaaagatgatatttgttatgctacaactaatagacaatccgctgttaagaagattgcaagtttctgtgatatgttttttgtaattggaagcagaaactcatcgaactctgtaagattagttgaggtggcaaaaaagtctggatgtgaaaattctttacttatccattcagaaagtgagattccatttgataagattgatgcttgtaaaactattggtatttcatccggtgcatcggcgcctgaaatactagttgaggaatttattaaaaatttaaaaaaaaaatatcaaattgaaattgaaaataccgaagtcataagagaagatgttacttttaaaattcccggtaaattaaattaa

SEQ ID NO: 211718 - DNA, 903 bp, Unknown
  Bacterial polypeptide expressing nucleotide sequence isolated from the Sargasso Sea
tggggcgttgaaagagctgtagcaatggcttatgagacaagaaggcattatcctaatgagaatatttggataacaaacgaaataattcacaacccctcagtaaatgatcacttaaggaaaatgaatgtaaaattcatttcagctaaaaatggtattaaagatttttctttagtttctaatggtgatgtagttatattgcccgctttcggagccactgttcaagaaatgaaactccttcatgagaaagggtgtcatatcatagatacaacgtgcccttgggtttctaaggtttggcatactgttgagaaacataaaaaacatgttttcacctccataattcacggaaaatttaagcatgaagaaactctcgctacaagctcatttgcgggcaagtatttagttgtacttgatcttgaagaagcaaattacgtatcagaatatattctgggtagaggaaatagaaatgaatttataaacaaattttctaaagccttctctaatggatttgatcctgataaagatttagatagagtcggagtcgcaaatcagacaacaatgttaaaaagcgagaccgaggaaattggaaaagtttttgaaagaacgatgttaaaaaaatttggaccagaaaatcttaatagtcattttttggcttttaatacaatttgtgatgcaactgaagaaagacaagatgcaatgttctctttggttgatgaagatcttgatattcttgttgtaataggaggcttcaattcttctaataccactcatttacaagaaatagcaattactaagaatattgcttcttttcatatagatactcctgagaggatttctgttgaagaaaactcaatattacataaaccactaggatctgatttaaaaattaaaaataattttttgcct

SEQ ID NO: 211719 - DNA, 520 bp, Unknown
  Bacterial polypeptide expressing nucleotide sequence isolated from the Sargasso Sea
gatgcttaaaaattcggaaatattattaacagaacctaggggcttctgtgcaggtgtagaaagagcaatagaaatagtcaaccgtgctgtagaaatttttgatgaaactatctttgttaagcatgaggttgtccataataaacatgtaatagaacagctagtagaaaaaggtgttgtttttgttgaatctctagagactgtcccagatcagtctatactaatttacagtgctcatggtgtgtctaaggaaatatcagaattagcgataaaaaaaagacttaaagtctttgatgcgacatgtccacttgtaactaaagttcattttgaaatacataaatttgcatcacaaaatattgatgttgttcttgttggacatagtggtcacccagaagtagagggaacaatgggtcaatatatatctgagaaaggtaaaattcaccttgtcgagacaaatgatgatataaagaaattaaaaattgaaaataaaaatatcgcgtatgtgacccagacaactttatca

SEQ ID NO: 211720 - DNA, 550 bp, Unknown
  Bacterial polypeptide expressing nucleotide sequence isolated from the Sargasso Sea
atgaaaaaagaacttaaaatttatttagcttctccaagaggattttgtgcaggtgttaaaagagctatagagatagtagaaaaatcaattgataaatatggttcaccagtttatgtcagacatgaaattgttcataataagcaagttgttgatgagctaagaactaaaggtgcaatatttgtagatgagttgtctgacgttaaagactccagtagaccagtcatcttctctgcacatggggttccaaaatctgtgccggaagaagcaaagtttaagaatctatcatttgttgatgcaacttgccctttggtgtctaaagtgcatagagagtcggaacaattgtataaaaatggttatgaaatattattaattggccacaaaaatcatcccgaagtaattggaactatgggccaattaccaaaaggatcaataaagttgatagaaactaaacatgatgcagaaaaattgaatactagtaatttcaaaaaacctttagattatatcactcaaacgactttatcagttgatgacacttcagaaaataattgac

SEQ ID NO: 211721 - DNA, 636 bp, Unknown
  Bacterial polypeptide expressing nucleotide sequence isolated from the Sargasso Sea
aatgagaaaaaatgaattaaaaatttatttagcatctcctagaggcttctgtgcaggagtagatagggcaattgaaatagtaaagaaaagtattgataaatttggttcacctgtatacgtgaggcatgagattgttcataataaacatgttgttgaaagtttaaaaaaaattggtgcaatttttgttgaggagattagcgagattaaagatagatctaggcctgtgatattttctgcacacggtgttcctaaaaaagttccaaaagaagcagaggagttaaatatgaaatatgttgatgcaacttgtcctttggtgtcaaaggttcatagagaagcagaaaatatgtataaaagtggatatcatataatattaattggccataagggacacccagaagtaattggaacgatgggtcaaattccagaaaatggtattacgcttgttgaaacaatagaagatgtaaaaaaaatcatctttaaaaaagatgaaaagttatcatttatcacacaaactaccttatctgtggatgacacaaaggaaataatagaatgtttaaagaaaaggtttccacaaattaatgagccaaaaaaagaggatatttgttatgctactacaaatagacaggccgcagtaaa

SEQ ID NO: 211722 - DNA, 838 bp, Unknown
  Bacterial polypeptide expressing nucleotide sequence isolated from the Sargasso Sea
gctgccccaagaggtttttgcgcaggggttgatagagctattgagattgtcaaaaaaagtatagaaaaatatggtgcgccagtttatgtgcgccacgaaatagttcataataaacatgtagttgatagtctaaaaaagatcggagctatatttgttgaggagattgaggaaattactgataaaacaaggccagtaattttttctgctcatggagtcccaaaatcagtacccgaagaagcaacaaatttaaaaatgatttttgtagatgctacatgccctttagtttcgaaagttcacagggaggcagaaaatctagataagagagatatacatattttacttattggtcacaaaaatcatcctgaagttattggaactatgggtcaacttcaagatggaaaaatcgatttaatagaaacaattgaagatgcacaaaagtttgaaagagtacaaaatgaaaaacttgcttatataactcaaacaaccctatcagttgatgatacgaaagatataataaatgttttaaaagaaagatttccagatattcatgaacctaagaaagatgatatttgttatgcgacaacaaataggcaagcagctgtaaaaaaaatagctaaagattgtgatgatttttttattataggtagtagaaattcctcaaattcagtaagattagttgaagttgctaaaaataatggttgcagtgatgctgaattgattcattcagaaagtatttttcctatcgaaaaaatttctaaatgcaaaaccataggtatttcgtcaggcgcatcagctcctgaagttttagttaaagaatttatagataatataaaaaaga

SEQ ID NO: 211723 - DNA, 623 bp, Unknown
  Bacterial polypeptide expressing nucleotide sequence isolated from the Sargasso Sea
taaggtccacagagaaactgaacaattacacaaaagaggatttgatattattttaatagggcacaaaaatcatcccgaagttgttggtacaatggggcagctgcctgagggatctattaaattaatagaaactgttgatgaagtaaaaaatttaaaattttcaaaaccgcttgcctatgtaactcaaactactttgtcagtggatgatactaaagaaattattgacgctctaaaacgtaaatttccagatataaaaggaccaattaaagaagatatttgttatgcaacaacaaataggcaagctgctgtcaaaaaaattgctcctgattgcgaaatgttttttgtaattggaagcagaaattcttcaaattctgctaggttggtagaggttgcaaaaaaatctggatgtgaagattccgagctaattttttatggaaagaaagctcctttagataaaataaaaaactgtaaaactattggtttatcatcaggtgcctctgctccagaagagttggttcaaaattttatttcagaaataaaaaaaagtatgaatgtttctattgaagaagtagtaacagcaaaagaaaaagtagtttttaaattgccaaaagaactgaattaaa

SEQ ID NO: 211724 - DNA, 598 bp, Unknown
  Bacterial polypeptide expressing nucleotide sequence isolated from the Sargasso Sea
atgaaaaataaagaattaaaaatattattatctgcaccgcgtggattctgtgctggagtagaaagagcaattgaaattgtagaaaaatctatccaaaaatttggagctccagtttatgtgcgtcatgaaatagtacataataaatatgttgtagatgatttaaaaaataagggagcaatatttgttgaagagctagaggagataaaggataaatcaagaccagtaattttttcagcacatggtgttccaaaaaaaatacctgaagatgcaaaaaattataaaatgacttatgttgatgccacatgtccacttgtttctaaggttcatagagaagcagaaaatcttaataaagctggctaccatataattttaattggtcatgaaaatcatccagaagttattggaactatgggtcaattaaatgacggttctatagatctaatccaaaatgaggaagatgctacaaactatcaaaataaactggacaaaaaattggcatatattactcagactactttgtcagttgatgatacaaaagaaataatcaaaattttaaaaaccaattttccaaatataaaagaaccaatgaaagaagata

SEQ ID NO: 211725 - DNA, 493 bp, Unknown
  Bacterial polypeptide expressing nucleotide sequence isolated from the Sargasso Sea
tgatgatgcaaaaaattatcaaagaggtaaaaacgataaacttgcttatattacacaaacaacattgtcggttgatgatacaaaagatattatagatgttttaagagaacgttttcctgatattttcgagccaaaaaaagatgatatatgctatgcaaccacgaatagacaagcagcagtcaaaaaaattgcaaaagagtgtgataatctgtttgtgattggtagtaggaattcttctaactcagttagattagtggaagtagctcgaaataatgggtgtgaaaatgctgaattaattcattcagaaagcagctttccaattgaaaaaatatctaaatgcaaaacaataggtatttcatctggtgcctcagctcctgaagtattagttaatgaattcatagaaaatattaaaaaaaaatttaccgtagaaatagaggaagttgaaatagtcaaagaagacgtaacatttaaaatcccaggaaaattaaattaa

SEQ ID NO: 211726 - DNA, 722 bp, Unknown
  Bacterial polypeptide expressing nucleotide sequence isolated from the Sargasso Sea
aatgaaaaataagcatttaaaaataatgttagctgccccaagaggtttttgtgcaggggttgatagagctatagaaattgttaaaaaaagcatagaaaagtatggttcgccagtatatgtgcgccatgaaatagtccacaataaacatgtagttgatagtttaaaaaagattggagctatctttgttgaagaaattgacgaaattagtgacaaaacaagacctgtaattttttctgctcatggagttccaaaatcagtaccagaggaagcaacaaatttgaatatgattttcgttgatgctacatgccctctagtttcaaaagttcacagagaggcagaaaatcttaataagagagatatacacattttacttattggtcacaaaaatcatccagaagttattggaactatgggtcaacttccagatggaaaaattgacttaatagaaacaattgaagatgcacaaaagtttgaaaaaggacaaattgaaaaacttgcttatataactcaaacgactctatctgtagatgatactaaagatattataagtgttttaaaagaaagatttccagatattcacgaacctaaaaaagatgatatttgttatgcaacaacaaataggcaagcagctgtaaaaaaaatagctaaagattgtgataatttttttgtaataggaagtagaaattcttctaattcagtaagattagttgaagttgctaaaa

SEQ ID NO: 211727 - DNA, 703 bp, Unknown
  Bacterial polypeptide expressing nucleotide sequence isolated from the Sargasso Sea
tgccaagtcagttccagaggaagctaaattaaaaaatttatcttttgtagatgcaacttgtccattagtttcaaaagttcacagagagtctgagcaattaaataaaaacggttttgaaatattgctaattggacataaaaatcaccctgaagttattggcacaatgggtcaacttccaaaaggatcaattaaactaatcgagactaaaaatgatgttgatctgctaaaagaaaatgattttaaaaaacctcttgcatatattactcaaacaaccctgtcagtagatgatacagctgaaattattgaagctcttaaaaaaaagtttccaaaaattaaaggccctattaaagaggatatatgttacgcaactaccaacagacagtctgctgttaaaaagatagcttccaagtgtgatatgttttttgtagtaggtagtcgtaactcatctaattctgtcagattagttgaagttgcaaaaaaagcgggttgtaataattctcatttaatgcattctgaaaaagaaattccttttaatgaaatagaaaattctgaaaccatcgggatatcttctggcgcgtccgcaccagaaaaacttgttcaaactttattgaatagtttaaaaaaagatagaaatgtttctattgaagaagtaatagttgcggaagaaaaggttgtatttaaattgccgaaagaacttaattaa

SEQ ID NO: 211728 - DNA, 568 bp, Unknown
  Bacterial polypeptide expressing nucleotide sequence isolated from the Sargasso Sea
atgaaaattaaacatttaaaaataatgttagctgccccgagaggtttttgtgcgggtgttgatagggctattgagattgtaaaaaaaagtatagaaaaatacggcgcaccagtttatgtacgccatgaaatagttcacaataaacatgtggttgatagcttaaaaaagattggagctatctttgtagaagaaataggggagattagtgacaaaacaaggccagtaattttttcagctcatggagttccaaaatcagtacccgaggaagcaacaaatttaaatatggtttttgtagatgctacatgccctttagtttcaaaggttcacagagaggcagaaaatctaaataagagagatatacacattttacttattggtcacaaaaatcatccagaagttattggaactatgggtcaacttccacatggaaaaattgacttaatcgaaacaattgaagacgcacaaaagtttgaaaaaggtcaaagtaaaaaacttgcttatataactcaaacaactctatctgttgatgatactaaagatatcataaatgttttaaaagaaaggtttc

SEQ ID NO: 211729 - DNA, 643 bp, Unknown
  Bacterial polypeptide expressing nucleotide sequence isolated from the Sargasso Sea
ccttttgtttcgaaagtccatagagagtctgaacagttacataaaaatggatatgaaatatttttaattgggcataaaaatcatcctgaggtcgtgggaacaatgggtcaactccccatcgggtcgattaaattgatagagactaaaaatgatgttgaaaaacttcaaactgacaatttcaaaaaacctttagcttatataactcaaacaacactctctgtggatgatacagcagaaataattaacgctcttaaaaataaatttcctaaaattaagagtccaattaaggaagatatttgttacgcaacaactaatcgtcaatccgctgtaaaagaaatagcatccaaatgtgatttgttttttgtagttgggagtcgaaattcatcaaattcagtgagacttgtggaggtagccaaaaaggcaggatgcaaaaactctcaattgatgcattcagaaaaagagataccttttaacgaaataaagaattcaaatactattggaatttcctctggtgcatcagcaccggaaaaattagtacaagcgttgttaaataatattaaaaaagatcgaaaagtacatattgaagaggtagtagttgcagaagaaaaagtcgtattcaaattaccaaaagaacttaattaat

SEQ ID NO: 211730 - DNA, 439 bp, Unknown
  Bacterial polypeptide expressing nucleotide sequence isolated from the Sargasso Sea
atgaaaaataaaaacttaaaaattttgctggcgtcaccgagaggattttgtgctggtgttgatcgagcaatagaaatagtaaaaaaaagtatagataaatacgggtcacctgtttatgtaagacatgaaattgttcacaataaacatgtagtagacagtttaaaaaaaataggagctatatttgtagaagagttagaagaaataaaagataaaactagaccagttattttttctgcccatggggtaccaaaatctgttccaaaagaagcttcagatttaaatatgacttatgttgatgcaacatgtcctctagtttctaaagttcacagagaggctgaaaatttatataaaaatggttctcatatattgcttataggacataaaaatcatccagaggtagtggaaccatgggacaattacccaagaaagcatagacctt

SEQ ID NO: 211731 - DNA, 673 bp, Unknown
  Bacterial polypeptide expressing nucleotide sequence isolated from the Sargasso Sea
aattaaaaatggggaatatgtggatgcaacgtgtcctcttgtatcaaaagttcatagagaagcagaaaatttaaataaaaatggaattcaaattttattaattggccacaaaaatcatccagaagttataggaactatgggtcaaatacctaggggtgaaatagatcttattgaaaatattaatgatgttaacaattatcaaaataaatctaataagaaattagcttttgtaacacaaacaactctttctgttgatgatacaaaagaaataatattagcattaaagaaaaaatttccagaaatcaaagaaccaaaaaaagaagatatttgttatgcaacaactaatagacaagctgctgttaaaaaaattgcagaaaagtgtgatatgttttttgttattggaagtagaaattcatctaactctttaagattagtagaggttgcaaaaaactctggatgtgaaaattcaagactaattcattctgaaagtacagttcctttagatgaaattgaaaaacatcaaactataggaatttcatcgggggcttctgcacctgaaatattggttgataactttataaataatttaaaaaaacaatttacagtggcgatagaagaaatagaaatagttaaagaaaatataacatttaaaattccaggcaaattaaactag

SEQ ID NO: 211732 - DNA, 664 bp, Unknown
  Bacterial polypeptide expressing nucleotide sequence isolated from the Sargasso Sea
agaaggggcttcgattctccaacaaaaagagctcaagcattagaagaagcttaccaaagtgatttgataagttcgattagagataatggttttacttatactaaaggtagattaaacattaaattggcaaaagcattcggtttttgttggggagttgaaagagctgtagcgatggcttatgagacgagaaggcactacccaaatgaaaatatttggataacaaacgaaataattcataacccttcagttaatgatcatctaagaaaaatgaatgtaaaattcatttctgctaaaaatggtattaaagatttttcattagtatccgatggtgatgttgtaattcttccagctttcggagctaccgttcaagaaatgaaacttcttcatgagaaaggttgtcatattattgatactacttgtccatgggtttctaaggtttggcatacggtcgaaaagcataaaaaacatgttttcacatctataattcacggaaaatttaagcatgaagagacgctggctactagttcattcgcaggtaaatatttagttgtccttgatctagaagaagcaaattatgtatcggactatattttggggagaggaaatagaaatgagtttatgaacaaatttgctaaagcttgttctaatggatttgatcccgata

SEQ ID NO: 211733 - DNA, 365 bp, Unknown
  Bacterial polypeptide expressing nucleotide sequence isolated from the Sargasso Sea
aatgaataaaaaattagatgtatatttagcaggccctcgtggtttttgtgccggtgtggatagagcaattttaatggttcaagaagcaattaagaagtacggggccccagtatatgtcaggcatgaaatagttcataataaatacgttgtagataatttgaagaatgaaggagcaatttttattgaagaattaagtgaaattgataaggtagatagacccgtgattttttcagcacacggtgttccaaaatcagttcccaaagaggctgatagactaaaacttctttactttgacgcaacttgtccgctagtaagtaaaattcatagagaagttgagcattttgaaagagaaaaatttccagtaa

SEQ ID NO: 211734 - DNA, 475 bp, Unknown
  Bacterial polypeptide expressing nucleotide sequence isolated from the Sargasso Sea
caaaactacaaaaaagaatatacgcttatcgttacacaaacaactttatctgtagatgacacaaaagacatcataaacaaattaaaaactaagtttcctgaaataaaagaaccaaagaaagaagatatttgttatgcaactacaaataggcaaagtgcagttaaaaatattgctaagttgtgcgaaatgttttttgttataggcagtagaaattcatcaaattcagtaagactagttgaagtggctaaaaactcaggttgtgaaaattcgtctttaatacattcagaaagcactactccatttgagcaaattgataagtgcaacactattggtatctcatctggagcatctgcgcctgaaattttggttaataatttcataagtaatcttaaagaaaaatatgaagttgaaattgaggaagttgaaattataaaagaggatatagtttttaaaattccaaaaaaattaaactaat

SEQ ID NO: 211735 - DNA, 829 bp, Unknown
  Bacterial polypeptide expressing nucleotide sequence isolated from the Sargasso Sea
aatgaaaaacgaaattaaaatttatttagctgctccaagaggattttgtgctggcgttgatagagctatagaaatagtaaaaaaagctttagataaatatggttctccagtctatgtaagacatgagatagttcataataaaaatgtagtcgaatccttaaaaaagttaggtgccgtttttgtggaggagttatctgaaataaaggatgtatctagaccagttattttttcggcacatggcgtaccgaaagaagtaccggaggaggcaaaatcaaaaaaaatattttatgttgatgctacttgcccgcttgtttcgaaggtacaccgagaaacagaacaactatttaagaagggttttgatattgttctaattggtcataaaaatcatccagaagttattggcactatgggacaactgccaaaagattctattaagcttgtcgagactgttggggatgttaaaaatttaagtttttcaaaaccagttgcttatgttactcaaacaacgctatcggttgatgatacaaaagaaattattgacgctttgaaacaaaaatttccagatataaaaggaccaataaaagaagacatttgctatgcaacaacgaatagacaatcagcggttaaaaaaattgctccaaattgtgaaatgttttttgttttaggaagcagaaattcgtcgaattcagcaagattagttgaagtagctaaaaaatctggatgtgaaaattcagaattaattttttatggcaaaaaagctccaatagataaaattaaaaattgtaagactattggtctttcatctggtgcatcagcgcctgaagattag

SEQ ID NO: 211736 - DNA, 549 bp, Unknown
  Bacterial polypeptide expressing nucleotide sequence isolated from the Sargasso Sea
aatgaaaaataaagaattaaaaattttattagctgcgcctagaggtttttgtgctggagttgaaagggcgatagagattgtgaaaaaaagcattacaaaatacggtgcaccagtttatgtaagacatgaaattgttcacaataaacacgttgtggacagtcttaaaaaaattggagcaatatttgtagaagaaattgaggaaattaaagacaagtctagacctgttgtattttcagctcatggggtaccaaaatcagttccagctgaagcaataagtaataaaatggaatatgttgatgcaacttgtcctttagtttcaaaagttcatagagaagcggaaaatttaaataaaaatggatatcatataattcttattggtcataaaaatcatccagaagtaatcggaacaatgggccaattacctaaaggatctatagacttaattcagagtgagaaagatgttcaaaattattcgtataatggagaaaaaaaaatcgcttatataactcaaactactctttcagtagatgatacaaaaaatattattca

SEQ ID NO: 211737 - DNA, 673 bp, Unknown
  Bacterial polypeptide expressing nucleotide sequence isolated from the Sargasso Sea
atgaaaaataataaaattaaagtttttttagcagcacccagaggtttttgcgctggtgtagatagagcaattgaaattgttaagaaaagtttaaataaatatggttctccagtttatgtcaggcatgaaatagttcataataaacatgttgtagaaagtttaaagaaaataggcgcaatttttgtggaggagcttgatgagattgaagataaaactagaccagtaattttctctgctcatggagttccaaaatcagtatcagaaaatgcatcaaatttaaaaatgacttatgtagatgctacatgtcctctagtttcaaaagttcaccgagaagctgaaaatattaacaaacaaggaatgcacattctccttattggccataaaaatcatccagaagtcattggtactatgggtcaattacctaaaggatctatagacttaattgagagcactgaagatgccaataattatattaataattctgacaagaaattggcttatattactcaaacaactctctctgtagatgataccaaagatataattgaagttctaaaatttaaatttccagatatttatgaacccaaaaaagaggacatttgttatgcaacaacaaatcgacaagatgcagtaaaaaaaattgctccaaaatgtgagatgttttttgtaattg

SEQ ID NO: 211738 - DNA, 759 bp, Unknown
  Bacterial polypeptide expressing nucleotide sequence isolated from the Sargasso Sea
ttgaagaactaagtgagatagatgacaaaactagaccagtaatattttctgctcacggtgttccaaaatctgttcccacagaagctgaggatttaaaaatgacatatattgatgcaacttgtcctttagtatcaaaggttcatcgagaggcagaaaatttacataaagcaggcaaccacattttattaattggtcataaaaatcatccagaagtaataggaactttaggtcaattaccaagggggtccattgatctaatagagtctatagaggatgtagaaaaattcggtaaaaaaaaaaaaaatcttgcttacgttacacaaactactctatcagtggacgacacaaaggaaattattaaaaaattaagaattaaatttcctgaaattaaagaaccaaaaaaagaagatatttgttatgcaacaacaaataggcaaagtgcagtaaaaaaaattgcaaaattgtgtgaaatgttttttgttataggaagtagaaattcatcaaactctgtaagactggttgaagtagctaaaaactctggctgtgaaaaatcctcattaatacattctgaaagtactacaccttttaatgaaattgataaatgtaatactattggtatatcatcgggagcatctgccccggaaattttagttaataatttcataagcaatcttaaagaaaaatatgaagttgaaattgaggaagtagaaattataaaagaaaatataatttttaaaattccaaaaaaattaaactaat

SEQ ID NO: 211739 - DNA, 654 bp, Unknown
  Bacterial polypeptide expressing nucleotide sequence isolated from the Sargasso Sea
gatgaaattgaaaaataatcatctaaaaattcttttagcagctcccagaggtttttgtgcaggagttgatagagcaattgaaattgtaaaaaaaagtatagaaaaatatggtgctcctgtatacgtaagacatgaaatagttcataacaaacatgtagtagacagcttaaaaaaaattggcgcaatatttgttgaagaaattgatgaaattgaagataaaactagacctgttatcttttcagctcatggtgttcctaaatctgtgcctcaagaagcagaaagtttaaatatgatatttgttgatgcgacatgcccattagtatcgaaagttcacagagaggcagaaaatttaaataaaaaagatgttcaagtattgcttataggtcataaaaaccatcctgaagtaattggcacaatgggacaagtccctgatggagaaattgatctaatagaaacgatagaagatgcaaaaaattatcaaagaagaaaaaataataaacttgcttatattacacaaacaacattatccgttgatgatacaaaagatattattaatgttttaaaagaacgctttcctgatattcacgaaccaaaaaaagatgatatttgctatgcaaccacaaatagacaagctgcaataaaaaaaattgcaaa

SEQ ID NO: 211740 - DNA, 667 bp, Unknown
  Bacterial polypeptide expressing nucleotide sequence isolated from the Sargasso Sea
tatgaaggaaaaaaaagatctagatatttatctagctgctccccgtggcttctgcgcgggagtagatcgagcgattaaaatggtggagttagcactggaaaagtggggctcaccaatttacgttcgtcacgagattgtgcataatagacacgtggttgaagacttgaaaagtaaaggcgcaatatttgtcgatgaggttgacgattgtcctgccgatagacctataattttttccgctcacggtgtcgcaaaaagcgtagtaaaagaagctcaaagaaaaaatatgctttttatagatgcgacctgcccactggtttcaaaggttcatattgaggccgagcgccattataagaatggtttacaaattataatgatcggtcataggggtcatcctgagactatcggtacaattgggcaactaccagagggaagcgttttattggtagaaaattctgaagatatttcgaaactaaaaacgcgaaataaaaataaattagcttatataacacaaacaacactctctgtggacgataccgctgaaatggtaactgccttgaaaaagcgttttccaactattcttggtcctcacaaagaagatatctgctacgcaacaactaataggcaaggagccgtcaaagacatttctcgtttaattgaagctctttta

SEQ ID NO: 211741 - DNA, 778 bp, Unknown
  Bacterial polypeptide expressing nucleotide sequence isolated from the Sargasso Sea
aggtgcaattttcgttgatgaattatctgacgtagatgacacgagcagacctgtaattttctcggctcatggggtgccaaagtcagtcccagaagaggctaaattaaaaaatttatcctttgtagatgcaacttgtccattagtttcaaaagttcacagagagtcggaacaattaaataaaaatggtttcgatatactattaatcggacataaaaatcatcctgaagttattggtacaatgggtcagcttccaaaaggttcaattagactagtcgagacgaaaagtgatgttgatctactaaaagaaaacgattttaaaaaacctcttgcatatattactcaaacaactctttccgtagatgatacagctgaaataattgaagctcttaaaaataagtttccaaaaataaaagggcctgttaaagaggatatatgttacgcaactactaacagacagtctgcagtaaaagagatagcttccaagtgtgatatgttttttgtagtgggtagtcgcaactcttctaactctgtcagattagttgaagttgcaaaaaaagcaggttgtaataattctcatttaatgcattctgaaaaaaaaattccttttaatgaaataaaaaattctaaaactatcggaatatcttctggtgcatcagcaccagaaaagcttgttcaaactttgttgaaaagtttaaaaaaagatagaaatgtttctattaaagaagtaatagttgccgaagaaaaagttgtatttaaattgccgaaagaactcaattaa

SEQ ID NO: 211742 - DNA, 588 bp, Unknown
  Bacterial polypeptide expressing nucleotide sequence isolated from the Sargasso Sea
aatgaaaaataaagaactaaaaatattattatctgcaccaagaggcttttgtgcaggtgttgagagagctatagaaattgttgaaaaatcaattaaaaaatatggtgccccagtttatgttcgtcatgaaatagtacacaataaatatgtggttgatgacctaaaaaataaaggagctatctttgtagaagaactcgaagagataaaagataaaactagaccagttattttttctgcgcacggtgtcccaaaaaaaatacctgaggacgctaaaaactataatatgacttatgttgatgctacttgcccattagtatcaaaagtacatagagaagctgaaaatcttaataaagctggatatcatttaattttgataggacatcagaatcaccctgaggtaattggtactatgggccaattaccaaagggatcaattgatttaattcaaaacgaagatgaggctaaaaaatataaacccaaaaataacaaaaaaatttcttatgttacacaaactactttatctgttgatgataccaaagatattattcagatcttaaaagataaatttcctgatataagagaaccttt

SEQ ID NO: 211743 - DNA, 358 bp, Unknown
  Bacterial polypeptide expressing nucleotide sequence isolated from the Sargasso Sea
tatgaataaacaaaatattaatttatatttagcttctccacgaggtttttgcgcaggtgttgatagagctgttaagattgttgaacaaacaattaaacaatttggcgcaccagtttatgtgagacatgaaattgttcataacaaagatgttgtaaattccttagcaaaaattggtgccatatttgttgatgatgtcagtgaagcaccaactagtagaccaattatattctcagcgcatggtgttgcaaaatcagtatttcaggaagctgaagaaagaaatatgatatctattgatgctacttgtcctttagtaactaaggtacataatgagacaattaaacattataatttgggaaga

SEQ ID NO: 211744 - DNA, 322 bp, Unknown
  Bacterial polypeptide expressing nucleotide sequence isolated from the Sargasso Sea
catgaaacaaaaaactaagttgtcactcgctaatcctaggggtttttgtgctggtgtagatagggctattgaaatagtaaatagagcacttgatatgtttggaagccccatctacgtgaagcatgaggttgttcacaataaagctgtagtgaatgatctaaatgaaagaggtgctatatttatcgaagaaatctcagatgttcctgatgattcaattattatttttagcgctcatggagtctcacgcaagattgaagaatcagttaaagagagaaatctgcagtttttcgatgctacttgcccacttgttactaaagttcat

SEQ ID NO: 211745 - DNA, 595 bp, Unknown
  Bacterial polypeptide expressing nucleotide sequence isolated from the Sargasso Sea
atgaaaaataaagaactcaaaatattactttcagctcctcgaggtttttgtgctggagtagaaagagcaattgaaattgttgaaaaatcgattaagaagttcggagctccagtttatgttcgacatgaaatagttcataataaatatgttgttgatgatttaaaaaataaaggagcaatatttgtagaagagcttgaagagattgaagataaatcaagaccagtaatattctcagctcatggtgtaccaaaaaaaattcctgaggatgcaaaaaattataatatgacttttgtagatgctacctgtcctcttgtttcaaaggttcatagagaagcagaaaatcttaataaatctggatatcatttaatattaatcggacatgaaagtcatcctgaagttattggaacaatgggccaattacctaaaggttcaattgatcttattcaagatgaagaagaggcaaaaaattataaatttgataaaaaaaaacaaattgcttttgtaactcaaacaactttgtcagttgatgatacgaaggatataataaaaattttaaaagaacgttttccaaaatatacgcgaaccgtaaaagagg

SEQ ID NO: 211746 - DNA, 514 bp, Unknown
  Bacterial polypeptide expressing nucleotide sequence isolated from the Sargasso Sea
gatgaaaaataaaaaacttaaaatcttgttggcaaaacctagaggtttttgtgctggtgttgatagagctatagaaattgtaaaaaaaagcatagaaaaatatggagcgcctgtatatgtcaggcatgagattgttcataataaagaagtcgttcaaagtcttaaaaaaattggtgctatatttgttgaggagttaagcgaaatttctgataaatctagacctgttattttctccgctcatggtgttccaaaatctgtaacgaaggaggcagaaaattataaaatggaatttattgatgctacatgtccattggtttcaaaagttcatcgagaagcagaaaaccattataaggcaggaaatcatattttactaattggccataaaaatcatccagaagtgatcggaactatgggtcagattccatctggaaagattgatttaatagaaacaatagatgatgcaaaaaaatatgaaatcaaaaattcgaaaaaaatagcatacgttactcaaaca

SEQ ID NO: 211747 - DNA, 814 bp, Unknown
  Bacterial polypeptide expressing nucleotide sequence isolated from the Sargasso Sea
atgacaaaaaaacttaatatctttcttgcaggacctcgaggtttttgtgctggagtagatagggcgatagaaatggttaagggcgctcttaaaaaatatggagcgccagtatatgttcgtcatgaaatagtgcataataaatttgttgttgaaaatctcaaatcacaaggagctatttttgtagaggaattaaatgaaattgaagataaaagtaggccagtaatcttttctgcacatggtgttccaaaagctgtgcccgaggaagcattaagtttaaatttgatatattatgatgcaacatgtccactagttagcaaaattcataaggaggttgaaaattttgataaaaagaatcttcctgtaattttaattggtcatagaaatcatcctgaagttataggaactatgggtcaaacaaataaagaaattcatttagtagaaaaagtggaagacgttaaaaaattaccctttaatcataatgatcagatcgcatatgtcactcaaactactttgtcagtagatgatacaaaagatataataaaagagataaaactacattttagtaatgttatagaaccaaaaaagaatgatatttgttatgccacgactaacagacaagaagcagtaaaaaagatagcaaatcaatgtgattattttttggtaattggtgcaagtaattcatcaaattcattaagattagttgaagttgcaaaaaattatggttctaaaaaagctatcttagttgaagatgtagattccttaaatttaaatatatttgaagaagctaaaaatataggaataacagcaagtgcgt

SEQ ID NO: 211748 - DNA, 358 bp, Unknown
  Bacterial polypeptide expressing nucleotide sequence isolated from the Sargasso Sea
atgaataaaaaattagatatatatttggctggtcctcgaggcttttgtgctggtgtggaaagagctattttgatggttaaagaagcaataaaaaaatatggttcacctgtatatgttagacatgaaatagtgcacaataaatatgtggttgataacttaagagcagaaggtgctatttttattgaggaacttaatgaaattgatcaaaaagatagacctgtaattttctcagctcacggtgtaccaaaatcagtacctgcagaagcagaaaagttaaatcttctgtattacgatgcaacatgtccacttgttagtaaaattcacagagaagttgaaaatttgaaagaaaaaatttacc

SEQ ID NO: 211749 - DNA, 496 bp, Unknown
  Bacterial polypeptide expressing nucleotide sequence isolated from the Sargasso Sea
tacagatgatgcaaaaaattatcaaagaggtaaaaacgataagcttgcttatattacacaaacaacattgtcggttgacgatactaaagatattataaatgttttaaaagaacgctttcctgatattcaagagccaaaaaaagatgatatttgttacgcaacaacaaatagacaagctgcagtaaaaaaaattgcaaaagagtgtgataatttttttgtaattggtagtagaaattcatctaactcagttagattggttgaagtagctaaaaataatggatgtgagcatgctgaattaattcattcagaaagcacttttccactagaaaaaatatctaaatgcaaaacaataggtatttcatctggtgcctcggctcctgaagtattagtgaatgaattcatagaaaatattaagaaaaaatttactgtagaaatagaggaagttgaaatagtaaaagaagacgtaacatttaaaattccaggaaaattaaattaa

SEQ ID NO: 211750 - DNA, 925 bp, Unknown
  Bacterial polypeptide expressing nucleotide sequence isolated from the Sargasso Sea
aatgcaaaataataaaattaaaatttatttagcagcaccaagaggattttgtgcaggggttgatagagctattgaaattgtaaaaaaaagtattaaaaaatatggatctccagtctatgttagacatgaaatcgttcataataaatatgtcgtggatagtcttaaaaaaattggagctatatttgtagaggaactaaatgaaattgaagataaaactagacctgtaatattttcagcacatggagttcctaaatctgttccaaaagaagcaaataatttaaatatgaattatgttgatgcgacttgtccattggtttcaaaagtacatagagaagcagaaaatttaaataaacaaggagcccatgtgttacttattggacataaaaaccatcctgaagtaattggaacaatggggcaactaccaaaaaatagcgttgaacttattgaaagtgttgaagatgctaaaaaatatataaataaaaataataataaattagcctatataactcaaacaacattatcagttgatgacacaaaggatataataaatgttttaaaaaaaaagtttcctaaaatatatgaaccaaaaaaagaagatatttgttatgccactactaataggcaatcagctgtaaaaaaaattgcaaaaaaatgcgatatgttttttgtaattggaagtagaaactcttcaaattctgttagattagttgaggtggctaaaaataatggttgtggaaattctgagttaattcattcagaaagtactattccaattgaaaaaattgctaattgtaaaactattggggtgtcatctggagcttcagcaccagaaattttggttgaaaaatttataaataaattgaaaaaagaatttattacagacatagaagaagttgaaatttataaagaaaatatagttttttaa

SEQ ID NO: 211751 - DNA, 724 bp, Unknown
  Bacterial polypeptide expressing nucleotide sequence isolated from the Sargasso Sea
gttattttttctgcacatggagttccaaaatctgttcctaaagaagcttcaaatctaaatatgacttatgttgatgccacttgcccactagtttctaaagttcatagagaggctgaaaatttatataaaaatggttctcatatattgcttattggacataaaaatcatccagaagtaattggaacaatgggtcaattacctaatgaaagtatagaccttattgaaagtgttgaagatgcagaaaaatatttaaaaaaaaatgaaaataaattagcttatattacacaaactacattatcagtagatgacaccagagaaattataaatgttttaaaaaaaaaatttccagaaattaatgagccaaaaaaagaagatatttgttatgctactacaaatagacaatcggctgtcaaaaagattgcaaaaaactgtgatatgttttttgttataggaagtagaaattcatctaattcagttaggttagtagaagtagcaaaaaataatggatgtgataaatcagaactaattcactctgaaagtaaagttccattagataaaattgcaaattgcacaactataggaatttcctctggtgcatcagcgccagaaattctagtagaagaatttataaatgaattaaaaaaagaatttactttagagattgaagaagtagaaataattaaagaaaatataacattcaaaattcctggaaagttaaactaat

SEQ ID NO: 211752 - DNA, 869 bp, Unknown
  Bacterial polypeptide expressing nucleotide sequence isolated from the Sargasso Sea
aatgaaagataaacaaataaaaatttacctagcatcaccaagaggtttttgtgcaggcgtagatagagcaattgaaattgttaaaaaaagtttagaaaaatatggttcaccagtttatgtgagacatgaaatagttcataacaaacatgtagtcgaaggtttaaagaaaataggagcaatatttgttgaggaactggaggagatagaagataaatctaggcctgtaattttttcagcgcacggtgtaccaaagtctgtgcctgaacaggcaaataatttgaagatgaattatatagatgcaacttgtccactggtatcaaaagttcaccgagaggctgaaaatctaaataaaaatggattacaaattttattaattggacacaaaaaccatccagaggttattggaacaatgggtcaaattccaagaggacaaatagatcttattgaaaatattgatgatgctattaattataaaaacaaatctaataagaaattagcttttgttactcaaacaaccctatccgttgacgatacaaaagaaataatatcggccttaaagaaaagatttccagaaattagaggaccaaaaaatgaagatatttgttacgcaactacaaatagacaagcagctgtcaaaaaaattgcaaagaaatgtgagatattttttattattggtagcagaaattcgtctaactctttaaggttagtagaggttgcaaaaaattctggatgctcaaattcaagattaattcattctgaaagtgaaataccttttgaggaaattgaaaaatataaaactattggaatttcatcgggagcttctgcgccagaaatattggttgataacttcataagtaatttaaaaaaaa

SEQ ID NO: 211753 - DNA, 581 bp, Unknown
  Bacterial polypeptide expressing nucleotide sequence isolated from the Sargasso Sea
tatgaagaaagaaaatataaatttatatttagctgctcctagaggtttttgtgctggggttgatagggctgtaaaaatagttgaagaagcaattaagaaatatggtccaccgatatacgtaagacacgaaattgttcataataaagaagtagtcaactcactatctaacttaggtgcaatatttgttgaagaagtcagagaagcaccagaaaattcaaccataatattttctgctcatggggttcctaaacaagtatatagcgatgcaaaaaaaagaaatatgatctatatagatgcaacctgtccattagtaagtaaggtacataatgaagcacaaaaacattatgctatgggaagacacatcatattaataggacataaaaatcatccagaagtcataggaactatgggacaggttccaaaagatgctgttacacttgtagaaaatgaaatagatgcaaaaagtattaacgtacccaataaagataaactcgcttatactacacaaacaacactttcagtggatgacacagaaataattttaaaaatcttaaaagatagatttccaaatataaaaggac

SEQ ID NO: 211754 - DNA, 584 bp, Unknown
  Bacterial polypeptide expressing nucleotide sequence isolated from the Sargasso Sea
tatattattaataggacacaaaaaccatccagaagtcataggaactatgggtcaattgcctgaaggttcaatagatttaatagaaaatattgaggatgtaaataagtatgaaaacatctcaaataaacagctatctttcataactcaaacaacactatctgtagatgataccaaagatataattgcagctctaaaatctaaattcccagatattaaagaacctaaaaaagatgacatatgttatgcaacaacaaatagacaatcagcagttaaagtaatagcagataaatgtgatatgttttttgtaataggaagtagaaattcatctaactctgtaagattagttgaagttgctaaaaactctggttgtaattctgctgagctaatacactcagaaagcccagtacctatagataagataaaagaatgtaacacaattggaatttcatcaggtgcttcagcgccagaaatacttgttgaaaagtttatagcagagttaaaagatcaatttaatgtcaacatagaagaagttgaaatcgtaaaagaaaatataacttttaaaattcctggaaaattaaattaat

SEQ ID NO: 211755 - DNA, 657 bp, Unknown
  Bacterial polypeptide expressing nucleotide sequence isolated from the Sargasso Sea
aatgaaaaataaagagattaaaatattattatctgcgcctagaggtttttgtgcaggtgttgaacgggctattgaaattgttgaaaaatcaattgaaaagtatggtgctccagtttatgtcagacatgaaatagttcataataaatatgtggtagatgatttaaaaaataaaggagctatctttgttgaagagctcgaagagataaaagataaatcgaggccggttattttttctgctcatggtgtcccaaaaaagatacctgaagatgcaaaaaattataatatgacttatgttgatgctacttgtccactagtatcaaaagtacacagggaggctgaaaacctttataaagctggttatcatttaattttaattggtcatcaaaatcatcctgaagttattggtacaatgggacaattgcccaatggaactatagatcttattcagaatgaaagtgaagcaaaaacatatcaactaaaaaatcaagagagagttgcttatgttacccaaacaactttatccgtagatgacactaaagatatcataaaaattttaaaagaaaaatttccaaatataaaagaaccatcaaaagaagatatttgttatgcaacaacaaatagacaaatggcagttaaaaatatagcaaaaaaatgtga

SEQ ID NO: 211756 - DNA, 344 bp, Unknown
  Bacterial polypeptide expressing nucleotide sequence isolated from the Sargasso Sea
aatgaagaaaattaaagtacttcttgcttcacccagaggcttttgtgctggagtaaaaagagctattgatatggttgatttagcgttacaaaatagtaattcccctatatatgttagacatgagatagttcataacaaaagagtagttaatgatttaaaaagaaagggtgcaatttttgttaaagaattagaagaggttcctaaaggtgcaaaagttatttttagtgctcatggagtatcaaaaaaagttaaacaagatgctaaaaactacaaacaattatctatcgatgcaacatgcccgttagtaagtaaagttcatcaacagattaagctttatgagaaaa

SEQ ID NO: 211757 - DNA, 658 bp, Unknown
  Bacterial polypeptide expressing nucleotide sequence isolated from the Sargasso Sea
atgaaaaataaagaattaaaaatcttgttgtctgcaccacgtggtttttgtgcaggtgttgaaagggcaattgaaattgttgaaaaatcaattcacaaatttggtgctccagtttacgttcgacatgaaattgtacataacaaacacgttgttgacgatctaaaaaataaaggagctatatttgttgaagaacttgaggaaataaaagacaaatcaagacccgttattttttctgctcacggtgtaccaaagaaaataccagaagatgcaaaaaactataaaatgacttatgttgatgcaacatgtcctttggtttcaaaagtacatagagaagcagaaaatcttaataaagctggatatcaaattattttaattggacacgaaaaccatccggaagtaattggaactatgggacaactcccagatggtgcggttagactagtacagaatgaagatgaggctcaaaattaccatgctgaaaaaaatgataaaattgcttatataactcagacaacattatcggtagatgacaccaaggaaataataaaaatcctaaaaaataaatatccatcaatgaaagaaccaatgaaggaagatatttgttatgccaccaccaataggcaggctgcggttaagaatatagcaaaactaatgtgat

SEQ ID NO: 211758 - DNA, 879 bp, Unknown
  Bacterial polypeptide expressing nucleotide sequence isolated from the Sargasso Sea
ttctgtgcaggtgttgatagagctgtcaagattgtagaagaatctattaaaagatttggatctccagtatatgttagacatgaaatagttcataataaagacgtcgttaattctttagctagaataggtgctgtgtttgttgacgaagttaatgaggcaccaactgatcgtccaattatcttctcagcacatggtgttgctaaatctgttctggatgaagcaaaaaaaagaaaaatgatttatatagatgcaacttgtccactagtaactaaagttcataatgagacaattcgtcattataatttaggaagacacgttttattaattggacataaaaaccatgtagaagtaattggaactatggggcaagttccaaaaaataatattactctgatcgaaacagaagaagatgcttatgaagttaaagtagataatccagacaatttagcttttgctacccaaacgacattgtctatagatgatacaagtaaaattttaagtattttaaaatctagatttccaaatattaaagggccgagttctgaagatatttgttatgcaaccacaaatagacaaatggcagtaaaatcaatgtcaaaaatatgtgattgcattttagttataggagctgaaaattcttctaattctgttcgtcttgtagaagtagcgttatcacacggtgtaaaaaaagctattttaatacccaacgagaataaacttgatttgtttttaaaaaaatttgatcccttaaaatctcctaatattggtttaactgctggtgcatcagcacctgagaccctagtacaaatgttaatatctaaacttaaaaaagattttgaagttaatttgatagatcatgaagtaataaaagaagatgtt

SEQ ID NO: 211759 - DNA, 719 bp, Unknown
  Bacterial polypeptide expressing nucleotide sequence isolated from the Sargasso Sea
catgttgaaagttgatcctacatctccagagttaagcattttactggctaatcctcgcggtttttgtgctggggttgatcgcgcaattagcattgttgagcgggctttagaattgtttgaaccgccaatttacgtgcgtcacgaagttgtacacaatcgatatgtggttgaaaacttaaagcaacgtggggcaatatttgttgacgagcttgaacaagtgccagacagcagcattgtaatttttagtgcacatggggtatcacaagcggtaagaaaagaagcaaaagtgcgtggtttgaaagtgtttgatgccacatgccccttagtcactaaagtgcatttgcaagtcacccgtgccagtcgcaaagggattgagtgtatcttgattggccatgaaggccaccctgaagttgagggcaccatggggcaatatgataaccctaaaggtggcgtttatcttattgagtcgccagaggatgtcgaaaaattgcaggttaacaatcctaataatttatgttttgttactcaaacaacactctctgtggatgatacattagatattattgcagcattgcaaaaacgttttccgtcgattgaagggccacgtaaagatgatatttgttatgcaactcaaaatcgtcaagatgcagtaagaagcatgtctgctgaagttgacttattaattgtagtcgggtcaaaaaacagttctaactcaaata

SEQ ID NO: 211760 - DNA, 720 bp, Unknown
  Bacterial polypeptide expressing nucleotide sequence isolated from the Sargasso Sea
aatgaaaagcaaagaaattaaaattttactcgctgccccgcgtggcttctgcgctggtgtagagcgagctatagaaattgtaaaaaaaagtattagtaaatatggggcgccagtctatgtaagacatgaaattgtccacaataaacatgtggttgatggtcttaaaaaaattggtgctatttttgtcgaagaactagatgaaataaaagataaaactagaccagtaattttttctgctcacggcgttccaaaaaaagtccctattgaagcagaaaattttaaaatggaatatgtggatgcaacatgccctcttgtatcaaaggtccatagagaagctgaaaatttaaataaaaatggattgcaaattttattaattggacacaaaaaccatccggaagttataggaactatgggtcaaattcctgaaggtgaaatagatcttattgaaaatgttgacgatgcgaatagttatgaaaataaatctaaaaaaaaattggcttttgttacccaaacaactctttctgttgatgatacaaaagaaataatatcagcattaaagaaaaaatttccagaaattaaagaaccaaaaaaagaagatatttgttacgcaacaacaaatagacaagctgctgttaaaaaaattgcagaaaagtgtgatatgttttttgttattggaagcagaaattcatctaactctttaagattggttgaggttgcaag

SEQ ID NO: 211761 - DNA, 824 bp, Unknown
  Bacterial polypeptide expressing nucleotide sequence isolated from the Sargasso Sea
aatgaaaaatccaaaattaactgtctacatggctgcaccccgagggttttgtgcaggagttgatcgtgctattaaaatagtagaaatggcgttagaaaaatggggggaacccgtttatgtccgacatgagattgtccataataaatatgtggttgatgagctcaaatcaaaaggtgctatttttataaaagaagtaagcgatgcgccagtagatagaccgataattttttccgcccatggagtaccaaaatccgtaccccttgaggcaaaaagccgaaaaatgatttatgttgatgcaacatgcccattggtcagcaaagttcacatagaggcagataggcattttgaaaacgggcttcaaattattatgatcggtcatgagggacatccagaaactatcggcaccatggggcaattacctgagggaggcgttttactggtcgagagcaccaaagatgtagaaaatctaattgttcgggaccctagtaagctggcctacgttacccaaaccaccttatccattgatgacactgctgaggtcgtcgaggcactaaaaactcgttttccaacaatagtaggccctcacaaagaggatatttgctatgcaaccagtaatagacaagctgcagtaaaagaaattgctccggaagtcgacgctctactcgtaattggagcaccaaattcttcaaattctcaacggctcgtagaggtcgcaaaaaaagcaggatgtgaaaactctcaaatggttcaaagagctgcagaaatcaactggaactcactaatgaatataaaatcagtaggtatcaccgcaggtgcatcggcac

SEQ ID NO: 211762 - DNA, 604 bp, Unknown
  Bacterial polypeptide expressing nucleotide sequence isolated from the Sargasso Sea
ttagtaaagctgggttaccatataattttaattggtcatgaaaatcatcctgaagtaattggaactatgggtcaattaaatgagcgttctatagatctaatccaaaatgaagaagatgctttaaactatcaaaataaactaaacaaaaaattagcatatattactcagactactttatcagttgatgacacaaaagagataatcaaaattttaaaaaataattttcctaatataaaagaaccaatgaaagaagacatttgttatgcaaccactaaccgtcagatggcagtaaaaaatattgcaaagaattgtgatatgttttttgttattggaagtagaaattcttcaaattctgtaaggctagttgaagtagcaaaaaaatctggctgtgaaaattcgcaacttattcattctgaaagctcaataccatatgatcaaatagaaaattgcaatactataggtatatcatcaggagcatctgcacctgaaatattagttgaaaattttattaatgatttaaaaaataaattttctataagtattgatgaagttgaaataattaaagaagatgtagtatttaaagttcccaaaaaattaaattaaa

SEQ ID NO: 211763 - DNA, 572 bp, Unknown
  Bacterial polypeptide expressing nucleotide sequence isolated from the Sargasso Sea
aatgaataaacataaattaaaaatattacttgctggcccaagaggattttgtgcaggcgttgatagagctattgaaatagtaaaaaaaagtatagataagtttggagctcctgtttatgtaagacatgagatcgttcataataaacatgttgtggaaagtttaaaaaaaataggtgcaatttttgtagaagaattaagtgaaattaaagataaaactagaccagtaattttttctgctcatggcgttcctaaatcaattccagctgaggctataagtttgaatatgaattatattgatgcgacttgtcctttagtatcaaaagttcaccgtgaagctgaaaatttatataaatctggaaatcatattttattaattggacataaaaatcatcctgaagtaataggaactttaggacaactgcccaaaggatctatagatcttatagagtctattgaggatgtggaaaattatactagtacaaaaaaaaaaattgcttatgttacacagacaactttgtctgtagatgacactaaagatataataaaaaaattaaaatataaattcccagaaa

SEQ ID NO: 211764 - DNA, 589 bp, Unknown
  Bacterial polypeptide expressing nucleotide sequence isolated from the Sargasso Sea
atgactaaagaaataaaattagccaacccaagaggcttttgtgctggtgttgatagagctatagacattgttaataaagctcttgatatatatggggctcctgtgtatgtgaaacatgaggttgttcataataaagtagttgttgatgatttaagaaataggggcgcagtatttgttgaggaaattgatgagattcctgatgattcattagtaatttttagtgcccatggagtatccagcgaagtagaggagactactaaggcaagaaatctaaatttttttgatgccacatgtcctttagttaccaaagttcacatggaagtaagaaaacatgctaaagcaaatagagatattattttaatcggtcatgaaggtcatcccgaagttgagggtacgatgggccgtcatataaattcgcaaaatagttcaatatatttagttcaagatgagaatgatgcactaaatattaatgtaaacaatagtgaaagtcttgctcttgtcactcagacaacactaagtgttgatgagacaattgctataatagacatactaagaaaaagatttccaaatatgaagtccaaaaaaagac

SEQ ID NO: 211765 - DNA, 456 bp, Unknown
  Bacterial polypeptide expressing nucleotide sequence isolated from the Sargasso Sea
aatgagtaacaaaaatttaaaaatttatttagctgcaccaagaggattttgtgcaggagttgatagagcaattgaaattgtaaaaaagagtatagataaatttggtgctccagtttatgtaagacatgaaattgtacataataaacatgttgtagaaagtttaaaaaagattggagcaatatttgttgaagaattagatgaaatcaaagataagtctagaccagttatattctcggcacatggagtgccaaaatctgtcccagaggaagcttctaatttaaatatgatgtttgtggatgcaacgtgtcctctggtatctaaagttcatagagaagcagaaaacttaaacaaacaaggtcatcatatattattaataggacacaaaaaccatccagaagtcataggaactatgggtcaattaccaaaaggttcaatagatttgattgaaaacactga

SEQ ID NO: 211766 - DNA, 790 bp, Unknown
  Bacterial polypeptide expressing nucleotide sequence isolated from the Sargasso Sea
ggagcaatcttctgtagaagaagttgaacaagctccaataaattcaataataattttttcggctcatggtgtgcctaaagcggtatttaaagaagcaaaaaaaagaaaaatgatttctattgacgctacatgtcctctagtcactaaagtacataatgaaacaaaaaaacattctaacaaagatagacacattcttttaattggtcataaatatcatccagaggtcataggcacaatgggtcaagttgatgaaagtaaggtaacacttattcaaaatgcagaagatgcaaataacgtaattgttaaaaatcctgacaaacttgcttatgcaactcaaaccacattatccgttgacgatacagaagaaattttaaggattcttaaaatcagatttcctaaaatccatggtccatcaacaaatgacatttgttatgctacaaccaacagacaattggctgtaaaatcaatggctaaaatttgtaattgtatattagtgattggatcaaataattcatctaattctaaaagattagttgaagttgctaaaataaatggtgcaaaaaattcccttttaatttcaaatgaaaaagatttaaataatttcttaaaatattttaatccaaaaactgaaccaaatataggactgacttcaggggcatctgctccagagacattagttcaaatcttaatttcaaaattaaaagaaagttttaaagtgaataaaatcgatcatgaagttataaaagaggatattcattttaacctaccaaaatctctcagatctagataa

SEQ ID NO: 211767 - DNA, 386 bp, Unknown
  Bacterial polypeptide expressing nucleotide sequence isolated from the Sargasso Sea
aatgaataaaaaactagatgtatatttagcaggcccaaggggattttgtgctggtgttgaaagagccattcttatggttcaagaagctataaaaaaatacggagctccagtatatgtgcgtcatgaaattgttcacaacaaatatgtagttgataatcttagagaagaaggtgctatatttgttgaagagttaaacgaaatagatcagttggataggccagtaatattttctgctcatggagttcctaaatcagtgcctgaagaggcatcaaatttaaacttactatactttgatgctacttgtcctttagtaagtaaatcccacagggaagttgaaaactttgaaaggaagaatttaccagttatttctataggacatcaaaatc

SEQ ID NO: 211768 - DNA, 535 bp, Unknown
  Bacterial polypeptide expressing nucleotide sequence isolated from the Sargasso Sea
aatgagtaacaataaattaaaaattctactcgccgctccaagaggattttgcgctggtgttgatagagccattgaaattgtaaaaaaaactataaaaaaatttggcgctcctgtttatgttcgacacgagattgttcataacaaatatgttgtggataatttaaaaaaaattggtgcaatttttgtagaagaattaaatgaaatagaagatagaacaagaccagtaatattttccgctcatggtgtgccaaaatctgtcccgaaaaaagcggatgattacaaaatagaatacatagatgcaacttgtccattggtttctaaagttcataaggaagctgaaaatcttcacaaaaataattatcatattttattaattggtcatcttaatcatccagaagttattggaactatgggacaattgcctaaagattcgattgatttgatagaaactgttgaagatgtagaaaaatatgtgagaaaaaataataaaaaaattgcttatataactcaaacaactctttcagtggatgacaca

SEQ ID NO: 211769 - DNA, 736 bp, Unknown
  Bacterial polypeptide expressing nucleotide sequence isolated from the Sargasso Sea
gtagatcgacctgtaatattttctgctcatggtgtgccaaaaaaggtcccagaggaagcagaaaaaaggcaaatgatatatgtggatgccacttgcccgttagtaacgaaagttcacaatgaaattaaaagatattatgaaaacggttataaaataataatgatcgggcatcgtggacatcctgaaacgattggtactatgggtcaactgccagaaggagaggttttgttggttgaaaatacgacggacgttgaaaaaatggatccatctgaatatccaaaattagcgtatgttactcaaacaaccctatctgtagatgatactaaggaaatagcattagctttaaacaaaaaattcccatctatagaaaaccctaagaaagaggatatctgctatgccaccactaataggcaagaggaagtcaaacgacttgtaaaacatgtagatttaatgttggttgtaggttcggagaactcatctaattctcagagactggttgatgtagcaaaagatagtggatgtacaaaagcatatttaattgaggattatagaaaaattgactgggtaaaagttactaaagccaattctataggaattacctcaggagcctcagctccagatcatctagttaaagacgttataagtagcatacaagaaaaatttgatacgagtttagtctatgatacgacaagaaaagagactatcgagtttaaagtcccacctgtactgaggtaga

SEQ ID NO: 211770 - DNA, 759 bp, Unknown
  Bacterial polypeptide expressing nucleotide sequence isolated from the Sargasso Sea
ttatgtgagacatgaaattgttcacaacaaacatgtggttgatagtcttaaaaaaattggtgctatttttgttgaagaacttcatgaaataaaagataaaactagaccagtaattttttctgctcatggagtgccaaaaaaagttcctgctgaagcagaaagttttaaaatggaatatgtggatgcaacatgtcctctggtatcaaaggttcatagagaggctgaaaatttaaataaaaatggattacaaattttgctaattggccacaaaaatcatccagaagttataggaactatgggtcaaattcctaaagatggaatagatcttattgaaaatattgaagatgttaacaattatcaaaataaatctcaaaaaaaattagcttttgttacccaaacaaccctctctgttgacgatacaaaagaaataatatcagctttaaaacaaaaatttccagatattaaagagccaaaaaaagaagatatttgttatgcaacaacaaatagacaagctgctgtaaaaaaaatagcaaaaaaatgtgatatgttttttgtaattggaagcagtaattcatctaactctttgagattagtagaagttgcaaaaaattctggatgtataaattcgagattaattcattctgaaagtgtaatacctttagaggaaattgaaaaatataaaactataggaatttcatcgggggcttctgcacctgaagtattggttgataattttataaatgatttaaaaaaaaaatt

SEQ ID NO: 211771 - DNA, 364 bp, Unknown
  Bacterial polypeptide expressing nucleotide sequence isolated from the Sargasso Sea
cctaagaaagatgatatatgttacgcaacccagaacagacaagacgccgttaagcaattagctttagagtcagacttagttctggtaattgggtcaattaatagttctaattctaatcgtttaagagaaattgcagaaagatcgggcgtagattcataccttattgactctataagcgatttagaaggttcttggttagaaggcaaacagaacattggtgtaacttccggagcttctgcacctgagcatttagtgaaggagcttgtagattctttagagcaagattatggatattctcttcaaggaagtcgtgaaataactgacgaaggaatagcttttcgactgcctaagggtttaagataaa

SEQ ID NO: 211772 - DNA, 591 bp, Unknown
  Bacterial polypeptide expressing nucleotide sequence isolated from the Sargasso Sea
atctcgaagaggcaaattatgtatctgaatatattctgggcagaggaaatagaaatgagtttatgaacaaatttgctaaagcttgttctaatggattcgatcctgacaaagatttagatagagttggagttgctaaccagacgactatgcttaagagcgagacagaggaaattggaaaggtttttgaaagaacgatgctaaaaaaatttggtccagaaaacctaaatagtcactttttagcgtttaatacaatttgtgatgcaactgaggaaagacaagatgcaatgttttctttggttgatgaagaacttgatattcttgttgttataggaggcttcaattcctcaaatactactcatttacaagaaatagcaattactaaaaatatttcttcttttcacattgatacaccagagaggatctcagtaaaagaaaactcaatattacataaaccactaggatcagatttagaacttaaaaataattttttacctgatggaaatattaatgttggaattacctcaggggcatctactcctgataaggttgttgcggatgttattgaaaagttaattgttatagcttcttaaa

SEQ ID NO: 211773 - DNA, 652 bp, Unknown
  Bacterial polypeptide expressing nucleotide sequence isolated from the Sargasso Sea
gatgccacatgtccacttgtatctaaagttcatagagaagcagaaaatttagataaaaaggacattaaagttttgcttataggtcataaaaaccatcctgaagtaattggtactatggggcaagtctctgatggaaaaattgatcttatagaaacgattgatgatgcaaaaaattatgaaagagctgaaaataaaaaacttgcttatataacacaaacaacattgtcggttgatgatacaaaagatattataaatgtattaagagaacgttttcctgatattcatgagccaaaaaaagatgatatatgctatgcaaccacgaatagacaagcagcagtcaaaaaaattgcaaaagagtgtgataatctttttgtaattggtagtaggaattcttctaactcagttagattagtggaagtagctcaaaataatgggtgtgaaaatgctgaattaattcattcagaaagcagctttccacttgaaaaaatatctaaatgcaaaacaataggtatttcatctggtgcctcagctcctgaagtattagttaatgaattcatagaaaatataaaaaaaaaatttaccgtagaaatagaggaagttgaaatagtcaaagaagacgtaacatttaaaatcccaggaaaattgaattaat

SEQ ID NO: 211774 - DNA, 706 bp, Unknown
  Bacterial polypeptide expressing nucleotide sequence isolated from the Sargasso Sea
ggagtaccaaaaaaaataccagaagatgctaaaaactataaaatgacttatgttgatgcaacatgtcctttggtttcaaaagtacatagagaggcagaaaatcttaataaagctggatatcaaattattttaattggacacgaaaaccatccagaagtaattggaactatgggacaactcccagatggtgcggttagactagtacagaatgaagatgaggctcaaaattaccacgctaaaaaaaatgataaaattgcttatataactcagacaacattatcggtagatgacaccaaggaaataataaaaatcctaaaaaataaatatccatctatgaaagaaccaatcaaggaagatatttgttatgccaccaccaataggcaggctgcagttaagaacatagcaaaacaatgtgatatgttttttgtaattggaagtagaaattcttcaaactcagtaagactggtagaagttgcaaaaaaatctggatgtgaaaatgcacacttaattcattcagaaagtgaaattccatataatgaaatagaaaaatttaatactataggtatttcatcaggtgcgtcagctccagaaattttagttgaaaattttataaatgctttgaaaaataaattcactattaaaataaatgaagttgaaataataaaagaaaacgtagtttttaaagttcctaataaattaaattaaa

SEQ ID NO: 211775 - DNA, 426 bp, Unknown
  Bacterial polypeptide expressing nucleotide sequence isolated from the Sargasso Sea
ttagccttgatgatactattgccatagttaagatcttatatgagcagtttcctaaaattctaaaaccaaaaagcgatgatatttgctatgcgactcaaaatagacaggatgctgttaaacaacttgctttagagagtgagtttattgttgttataggctcaagaaatagctctaactcaaaccgtctaaaagagttggctgagaagtgtggagctacttctgtattgatagatggtcccgaggagcttgatttaaaatctttatctaaatatagcaatattggtataacagccggagcatctgcaccagaatcaattgttcagaatgttgtccaagcaattagccttgaattaaatactgttgccaaagagctaggggagaataaagaaaatatatattttagacttcctcctgaattacgctgat

SEQ ID NO: 211776 - DNA, 881 bp, Unknown
  Bacterial polypeptide expressing nucleotide sequence isolated from the Sargasso Sea
gttttgtgcaggagtagacagggccattgaaattgtaaaaaaaacattaaacaaatatggttcaccagtatatgttagacatgaaattgtgcacaataaaaatgtggttgagtcactcaaaaaattaggtgcggtttttgtcgaggagatctctgagattacagatgtatctagacctgtcattttctcagctcatggagttcctaaaaaagtgcctgaggaagcaaagcttaaaaaaattttttatgttgatgctacttgtccactagtttctaaggtgcatcgagaaactgagcagttatatagaagaggatttgatattgttttagtaggtcacaagaatcaccctgaggttattggtacaatggggcaattacctaaaggttcgattaaactcatagaaaatatcgaagaagttaaaaatttaaaattttctaaaccactagcttatgtaacacaaaccactttatctgttgatgacacaaaggaaataattgatgctttaaaagaaaaatttccaaaaataaaaggtccaattaaagaagacatttgttatgcaactacaaatagacaagcagctgttaaaaaaattgctcctaactgtgaaatgttttttgttataggcagtaggaattcctcaaattcagctagattagttgaggttgctaaaaagtcaggatgtaaaaactctgaactgatattttatgggaaaaaagctccattagaaaaaataaaaaactgcaaaatcataggattgtcttcgggtgcttctgcacctgaagaattagttcaaaactttatttctgaaattcaaaaaaacatgattgtttccattgaggaagttatcactgctaatgaaaaagtagtttttaaattgccta

SEQ ID NO: 211777 - DNA, 265 bp, Unknown
  Bacterial polypeptide expressing nucleotide sequence isolated from the Sargasso Sea
atgaaacaaaaaactaaattatcactggctaatcctaggggtttttgtgctggggtagatagggctattgaaatagtaaatagagcacttgatatgtttggaagtcctatctatgtaaagcatgaggttgttcacaatgaggctgtagtaaatgatctaaaggaaagaggcgctatatttatcgaagaaatctcagatgtccctgatgactcaattattatttttagtgctcatggagtctcacgcaagattgaagaatccgtta

SEQ ID NO: 211778 - DNA, 790 bp, Unknown
  Bacterial polypeptide expressing nucleotide sequence isolated from the Sargasso Sea
aatggacaaaaaacttaatatttatttagcaggaccaaggggcttttgtgcaggcgttgatagggccattgaaatggtaaaggaagcattaaaaaagtatggtaaacctgtttatgtaaggcatgaaatagtccacaacaaatacgttgtagaaaacttaaaagaggagggtgcaatttttgttgaagagttagatgaaattaaagataaaagcagaccagttatcttttctgctcatggtgttccaaaatctgtacctaaagaggctctaaaactaaatctaatttattttgatgcaacatgtcccttagtaagcaagatacacaaagaagtagaaaactttgacaaaaaaaaacttccagttatcttaataggtcatagaaatcatcctgaagtgataggcacaatgggtcaagtaaatagtgaaatatatcttgttgaaaaagttgcagatgtcaaaaatcttcctatagataaaaacatagaaattgcctatgtaactcaaactactttgtcagttgatgatacaaaagacattattaaggagattaaaaatcaatttataaatgtaattgagccgaaaaaaaatgatatttgttatgcaactactaatagacaggaagcagtgaaacaaattgctcaaaattgtgattattttttagtaattggagctagtaattcatcaaattctttaagactggttgaggtagcaaaaaattatggatcaaaaaaagctattttagtagaagatgttgattcattaaaccttaatatttttgataatataaaa

SEQ ID NO: 211779 - DNA, 725 bp, Unknown
  Bacterial polypeptide expressing nucleotide sequence isolated from the Sargasso Sea
tttttctgctcatggagtacctaaatcggtaccagatgaagcaaaaaatttaaacttattatattttgatgccacttgtcctttggttagcaaaattcatagagaagtagagaattttgaaaaacaaaatcttccaattattcttatagggcaccgcaatcatcctgaagttattggcacaatgggacaaataaaatcttctatttatcttgttgaaaatgaaaaagatgttgaattattaaaattagataataataaaaaaattgcttatgtaacacaaacgacactctcagttgatgaaacaaaagaaattataaaagctataaaaaagaaatttaatgatgtaatcgaaccacgcaagaatgatatttgctatgctacaactaatagacaagaagcagttaaaaaaatagcctctaattgtgaagttttttttgttattggtgcttataattcttctaattctattagattagttgaggttgcaagaaaatatggtgcaaaaaaaagtatcttactagaaaacattgaacaaattgatgataaaatttttaaaaatattaactctattggtcttacagcaagtgcttctgctcctgaaatattagtacaaaactttattgatttattagaaaaaaaatttgatattgaacttattcaggatgattttataaaagaagatgtgaattttaaaatacctcaaaaacttaaagaagcaatttaaa

SEQ ID NO: 211780 - DNA, 422 bp, Unknown
  Bacterial polypeptide expressing nucleotide sequence isolated from the Sargasso Sea
tatggataatagcaagaaaataattttagtttcacccagagggttttgcgcaggagtcacaagagctatcgatgttgtattggaagcaataaaaaaatatggaaaaccagtatatgttaatcacgaaattgtccacaataagcatgttatagaagatttaaccactaaaggtgctatttttttaaaaaatattgtagatgctccaaaagataggccaattatattttcagctcatggagtttcaaaaaaaattactaattatgcaaaaagtaataatgaaacaataatcgatgcgacttgtcctctagttacaaaggttcatgtacaagctgataagttttataaattagggtttaaaattattttaataggtcataagaatcatcctgaagtagagggcacgatgggtcaattgccagggg

SEQ ID NO: 211781 - DNA, 604 bp, Unknown
  Bacterial polypeptide expressing nucleotide sequence isolated from the Sargasso Sea
atgaaagtgaaaaataatcatcttaaaatacttttagcagctccgagaggattttgtgctggtgttgacagagcaattgaaattgtaaaaaaaagcatagaaaaatatggtgctcctgtatatgtaagacatgaaatagttcataataagcacgtagtagatggcttaaaaaaaattggcgcaatatttgttgaagagattgatgaaattaaggataaaacgagacctgttgtcttttcagctcatggtgtaccaaaatctgttcctcaagaggcagaaagtttaaatatgatttttgtagatgctacatgtccacttgtatctaaagttcatagagaagcagaaaatttagataaaaaggacattaaagttttgcttataggtcataaaaaccatcctgaagtgattggtactatgggccaagtagctagtggaaagattgatcttattgaaactacagatgatgcaaaaaattatcaaagaggtaaaaatgataaacttgcttatattacacaaacaacattgtcggttgatgatacaaaagatattataaatgttttaagagaacgctttcctgatattcatgagccaaaaaaagatgata

SEQ ID NO: 211782 - DNA, 590 bp, Unknown
  Bacterial polypeptide expressing nucleotide sequence isolated from the Sargasso Sea
aatgaaaaataaagaattaaaaatcatgttgtctgcaccacgtggattttgtgcaggtgttgaaagggcaattgaaattgttgaaaaatcaattcaaaaatttggtgctccagtttatgttcgacatgaaattgttcataacaaacatgttgttgatgatctaaaaaataaaggggctatatttgttgaagagcttgaggaaataaaggacaaaactagacccgttattttttctgctcatggtgtaccaaaaaaaataccagaagatgctaaaaactataaaatgacttatgttgatgcaacatgtcctttggtttcaaaagttcacagagaagcggaaaatcttaataaagcagggtatcaaattattttaattggacacaaaaaccatccagaagtaattggaactatgggacagctcccagatggtgcggttagactagtacagaatgaagatgaagctcaaaattaccatgctgaaaaaaatgataaaattgcttatataactcagacaacattatcggtagatgacaccaaggaaataataaaaatcctaaaaaataaatatccatcaatgaaagaaccgatga

SEQ ID NO: 211783 - DNA, 562 bp, Unknown
  Bacterial polypeptide expressing nucleotide sequence isolated from the Sargasso Sea
aatgaaaaaagaacttaaaatttatttagcgtcaccaagagggttttgtgctggcgttaaaagagcaattgaaatagttgaaaaatctatcaacaaatttggggctcctgtatatgttcgtcatgaaatagtgcataataagcaggttgttgaagagttaaaagaaaaaggtgcaatttttgttgatgaattatctgacatagatgacgcaaatagacctgtaattttctcagctcatggagtacctaagtcagtcccagaagaggctaaattaaaaaatttatcctttgtagatgcaacttgtccattagtttcaaaagttcacagagagtcggaacaattaaataaaaacggtttcgatatattattaattggacataagaatcaccctgaagtcattggaacaatgggtcagcttccaaaaggatcgattaaactaattgaaacaataaatgatgttgagcttcttagagaaaatgattttaaaaaacctctggcatatattactcaaacaactctgtccgttgatgatacagctgaaataattgaagctcttaaaaaa

SEQ ID NO: 211784 - DNA, 752 bp, Unknown
  Bacterial polypeptide expressing nucleotide sequence isolated from the Sargasso Sea
atgtcacattatagatactacttgtccttgggtttcaaaggtttggcatactgttgagaagcataaaaaacatgttttcacatccataatccatggaaaatttaagcatgaggagactcttgctactagctcatttgcaggaaagtatttagttgttcttgatttagaagaagcaaattatgtatctgactatattctgggtagaggaaacagaaatgagtttattaataaatttgctaaagcttgttctaacggattcgatcctgataaagatttagatagagtaggagttgctaatcagacaactatgctcaaaagcgagactgaggaaattggaaaagtttttgaacaaacgatgttaagaaaatttggaccacagaatctaaatagtcactttttagcgtttaatacaatttgtgatgcaactgaagaaagacaagatgcaatgttttcattggtagatgaagatcttgatattcttgttgttataggaggattcaattcttcaaatactacgcatttacaagaaattgccattactaagaacattgcttcctttcatatagacacacctgagaggatttcagttaaagaaaactcaatattacataaaccattaggatcagacttaaaactgaaaactaattttttaccgagtggaaatattaatgttggaattacttcaggtgcatctactcctgacaaggttgttgctgacgttattgagaagttaatagacatagccgcttaaa

SEQ ID NO: 211785 - DNA, 785 bp, Unknown
  Bacterial polypeptide expressing nucleotide sequence isolated from the Sargasso Sea
aaaagtctaaaagtttttttagcagctcccagaggattttgcgcaggtgtagatagagcaattgaaattgttaaaaaaagtttagataaatatggatctcctgtttatgttagacatgaaattgttcacaacaaacatgttgttgatggtttaaagaaattaggagctatatttgttgaagaattaaatgaaattgaagataaaactcgaccagttattttttcagcacatggtgttcctaaatcagtgcctaaagaagcaacaaatttaaatatgactttcgtagatgctacatgcccacttgtatcaaaagttcatagagaagcagaaattttaaataaaaaaggtattcatgttttattaataggccataagaatcatccagaagtaattggaaccatgggacaacttccagttggagatattgatttaattgaaagtattgacgatgctaaaaaatttaaaaatagtgaaaataaaaagttagcatacattacccaaacaacattatctgtagatgacacaatggatataattaatgaattaaaaaataaattttcagatatatatgaaccaaaaaaagaagatatctgttatgccacaactaataggcaagctgctgtaaaaaaaattgcaaaaaattgtgatatgttttttgtagttggaagtagaaactcatcaaattcgttaagattagtagaagtagcaataaataatggttgtgaaaaatctgaactaattcactcagaaagcactgtgccccttgataaaattgctaattgtaa

SEQ ID NO: 211786 - DNA, 720 bp, Unknown
  Bacterial polypeptide expressing nucleotide sequence isolated from the Sargasso Sea
aatgaaaaataaagaaattaggattttactttctgcaccacgaggtttttgtgccggcgttgaaagagcgatcgagattgtggaaaaaactttaattaaatttggatcaccagtgtatgttagacatgagatagtccataataaatttgttgtggacgatttaaaaaagaaaggtgcaatatttgtagaagaacttgaagagatagaagataaaacaagaccggttatcttttcagcccacggtgtacctaaaaaaattcccctagatgctgaaaaatataaaatgacatacattgatgcaacttgcccgcttgtttcaaaagttcatcgagaagctgaaaatctccataagtctaattaccatttaattttaattggacatgaaaatcacccagaagttattggaacgatgggtcaattacctaaaggaacaattgatttgattcaaaatgaagatgaagcaaaaaattacaaatttgatagcaaaaaaaatttagcttttgtcactcaaactacattatcagttgatgatactaaggatattataaacattttaaaagaaagatttccaaatattaaagaaccacataaagaggatatctgttatgcaacaacaaataggcaaatggcagttaaaaatattgcaaaagattgtgatttatttcttgttataggaagtaggaattcctcaaattcagtaagattggttgaagtagctaa

SEQ ID NO: 211787 - DNA, 418 bp, Unknown
  Bacterial polypeptide expressing nucleotide sequence isolated from the Sargasso Sea
ggaaaggtttttgaaaggacgatgttaaaaaaatttggtccagaaaacttaaatagtcactttttagcttttaatactatttgtgatgcgactgaagaaagacaagatgcaatgttctctttggttgatgaagatcttgatattctagtagttattggaggcttcaattcttctaatactactcatttacaagaaatagcaattactaaaaatatttcttcttttcacattgacacgccagagaggatatcagtcaaagaaaactcaatatttcataaaccacttggatcagatttagaaattaaaaataattttctgcctagtggaaaaattaatgttggaattacctcaggtgcatccactcctgataaggttgttgcagatgttattgaaaagttaattgatattgcttcctgaa

SEQ ID NO: 211788 - DNA, 769 bp, Unknown
  Bacterial polypeptide expressing nucleotide sequence isolated from the Sargasso Sea
atgaacgaaaataaaaaattaaaaatattacttgctgctcctagaggattttgtgccggtgtagatagagcaattgaaattgtaaaaaaaagtataaaaaaatatggcgccccagtttacgttagacatgaaattgtacataacaaacatgtcgttgatagtttaaaaaaaattggtgcaattttcgtggatgaacttgaggaaattaaagataaaactagacctgtcatattttcagctcatggagtaccaaaatccgttcctaaaaaagctgcagaatacaaaatggaatatattgatgctacatgtccattggtttcaaaagttcataaagaagcagaaaatcttcataaaaacaattatcacatattattgattggtcatcaaaatcatccagaagtaattggtacaatgggccagcttccagataaatccattgatttaatagaaactcttgatgacgttaaaaattttacaaaaagaaatgacaaaaaagttgcttatgttacacaaacaactctttctgttgatgatacaaaaaatatagttgatgctttaaaaataaagtttccagaaataaaagaaccagttaaagaagatatttgttatgcaacaacaaatcgtcaggcagctgtaaaaaatatagccaaaaattgtgagatgttttttgttattggcagtagaaattcatcaaactcgcaaagattagtagaggtggcaaaacagtctgggtgcaatagatcagaactaattcattcagaaaagtgac

SEQ ID NO: 211789 - DNA, 449 bp, Unknown
  Bacterial polypeptide expressing nucleotide sequence isolated from the Sargasso Sea
atatattactcaaacaaccctgtctgtagatgatacagctgaaataattaaagctcttaaaagtaaatttccaaagatcaaaggccctattaaagaggatatatgttacgctacgactaacagacagtccgcggttaaagagatagcttctaagtgtgatatgttttttgtagtgggtagtcgtaactcgtctaattctgtcagattagttgaggttgcgaaaaaagcaggttgtaataattctcatttaatgcactctgaaaaagaaattccttttaatgaaatagataattctgaaaccatcgggatatcatctggagcgtctgcaccagaaaagcttgttcaaactttgttagacagtttaagaaaagatagaaatgtttctattgaagaagtagtagttgcagaagaaaaagttgtatttaaattgccgaaagagctaaattaat

SEQ ID NO: 211790 - DNA, 505 bp, Unknown
  Bacterial polypeptide expressing nucleotide sequence isolated from the Sargasso Sea
agaagagttgacacacttcaatttaaagaagaagacaagcttgcgtacctcacgcagacaacactctcagtcgacgatgcttcacgaatcatcaatcgattgaaggaacgttttccacaaattgttgggccaccgaaggatgatatctgctatgccacacagaatcgtcaagaagccgtccggcaactcgctgaacacgctgatatcgtgctagtgcttggcagccaaaacagttcaaatagccagcgacttgcagaacttgcaagtgaaagtgaaatatcggcctacctcattgacgatgcaaatgaaattgatccatcttggttcagtggtgatgaaaccgtgctcattactgcaggtgcaagcgccccagagagcgttgtgcaagactgcgtcacttggcttacgtcacgatataatgcaacggtagaagaaaaaacaattcgcgaagagcaagtgtatttccccctaccaaaacaacttcgtactgctttgcgcaactgag

SEQ ID NO: 211791 - DNA, 760 bp, Unknown
  Bacterial polypeptide expressing nucleotide sequence isolated from the Sargasso Sea
tgaagaaattaatgaaattgaagacaaaacaagacccgttattttttcagctcatggtgtccctaaatctgtgcctcaagaagcagaaagtttaaatatgatatttgttgatgcgacatgcccattagtatccaaagttcacagagaggcagaaaatttaaataaaaaagatgttcaagttttgcttataggtcataaaaaccatcctgaagtaattggcacaatgggtcaagtagctaaaggaaagattgatcttattgaaacaatagacgatgcaaaaaattatcagagaagcaaaaacgataaacttgcatatatcacacaaacaacattatcggttgatgatactaaagatattattaatgttttaaaagaacgctttcctgatattcacgaaccaaaaaaagatgacatttgttacgcaactacaaatagacaagaagcaataaaaagaattgcaaaagagtgtgataatctatttgtgattggtagtaggaattcatctaactcagttaggctagtagaagtagctaaaaataatggatgcgagaatgctgaattaattcattcagagagtagttttccgttagacaagatatctaaatgcaaaactattggtatttcatctggagcgtcagctcctgaagttttagtcaaagaatttatagaaaatataaaaaaaaaatttactgtagagatagaagaagttgaaatagttaaagaggacgtaacatttaaaatcccaggaaaattaaactaa

SEQ ID NO: 211792 - DNA, 728 bp, Unknown
  Bacterial polypeptide expressing nucleotide sequence isolated from the Sargasso Sea
aaaagtatagataagtttggtgctccagtttatgttagacatgaaattgtccataacaaacatgttgtggaaagtttaaaaaaaataggtgcaatttttgtagaagaattaagtgaaattaaagataaaaaaagaccagtaatattttcagcacatggtgttcctaaatcagttccagaagaagcccaaagtttaaatatgaattatgtagatgcaacctgtcctttggtttcaaaagttcatcgtgaagctgaaaacttgtataaatcaggaaatcatattttattaattggtcataaaaatcatcctgaggtaataggaactttggggcaactaccagagggatctatcgatcttattgagtcagttgaggatgtagaaaaatataaaaatgtaaaaaaaaatattgcttatgttacgcaaacaactctatctgtagatgacaccaaggatattataaatagattaaaaaataagttcccagaaatcaaagagccaaaaaaagaagacatttgctatgccacaacaaacagacaaagtgcagtaaaaaatattgctaaaatgtgtgaaatgttttttgtaataggtagtagaaactcctcaaactcagtaagattagttgaagttgctaaaaattctggatgtaaaaaatcaactttaatacattccgatagtgttgctccatttgaagaaattgataaatgtaataccataggtgtttcatcggg

SEQ ID NO: 211793 - DNA, 721 bp, Unknown
  Bacterial polypeptide expressing nucleotide sequence isolated from the Sargasso Sea
tttctgcacacggagttccaaatcagtacctaaagaagctaaaaaattaaatttactctattatgatgctacatgccctttagtaagtaaaattcatcgggaagtagagaattttgagagaagaaatttacctgttatacttattggtcaccgtaatcaccctgaagtaattggtactatgggtcaatcgtcaaaaattatatacttggttgaaaataaggaagatgtaaataatttaccaattcctagagatcaacaaattgcatatgtaactcaaaccactctatcagttgatgatacaaaagaaattattgatgaaataaaattactttataaaaattatttagaaccgaagaaaaaagatatttgttacgcaacaactaatcgacaagaggctgttaaaaatattgcaaaaaactgtgattatttttttgtaattggatcaaaaaactcttcaaattcactgcggttagttgaggttgcaaaaaattatggctcaaggcattctatattagttgatgatatagaaaattttgatccatccataattggtagtaactctaaaattggaatcacagcaagcgcatcttctccagaaattcttgtaaaaaaaattcttaaaaaaatagaagaaagctatgagttaaatattattgagtcaaagtatgaacaagaagatacacgttttaaaatacctcaaaaattaaaagaagcagtttaa

SEQ ID NO: 211794 - DNA, 697 bp, Unknown
  Bacterial polypeptide expressing nucleotide sequence isolated from the Sargasso Sea
aaatctgtacctgaaaaagcaaaaaatcttaacatagagtatgtagatgctacttgtccgcttgtatctaaagttcataaagaagcagaaaaattatataaaaataattatcatattcttttaattggtcacttcaatcatcccgaagtaataggtactatgggtcaactgccaaaaaattctattgatttaatagaaagagttgaagatgcaaataaatatgtaaaaaaaaatgacaaaaaaattgcttatattacacaaacaactctttctgtagatgacacaaaaaaaatagtggaagtgttaaaaaataaatttccagaaataaaagaaccagtaaaagaagatatatgttatgctacaactaatcgccaagctgcagtaaaaaaaatagctaaagaatgtgaaatgttttttataattggtagtaaaaattcttctaattctttaagattagttgaagttgcacaacaagcagggtgtaaacaatcagagcttattcacacagaaaacgaaataccaattaaaaaaattattaattgttctactataggaatttcatctggagcatctgcgccagaagtattggtaaaaaattttattgataaaattaaaaaagaagtcaaagttaatattgaagaagtggaaattattaaagaaaatgtaatatttaaaactccaggaaaattaaattaaa

SEQ ID NO: 211795 - DNA, 406 bp, Unknown
  Bacterial polypeptide expressing nucleotide sequence isolated from the Sargasso Sea
atgagtaacaaaaatttaaaaatttatttagctgcaccaagaggattttgtgcaggagttgatagagcaattgaaattgtaaaaaagagtatagataaatttggtgctccagtttatgtaagacacgaaattgtacataataaacatgttgtagaaagtttaaaaaagattggagcaatatttgttgaagaattagatgagattaaagataaatcgagaccagttatattctcagcacatggggttccaaaatctgttccagaggaagcgtctaatttaaatatgatgtttgtagatgctacgtgtcctctagtatctaaagttcatagagaagcagaaaacttaaataaacaaggacatcatatattattaataggtcacaaaaaccatccagaagtcataggaa

SEQ ID NO: 211796 - DNA, 805 bp, Unknown
  Bacterial polypeptide expressing nucleotide sequence isolated from the Sargasso Sea
taaacatgttgttgagagtttaaaaaaaattggagccatatttgttgaagaattggatgagatcaaagacaaatctagaccagtaatattttctgcgcacggagttccaaaaaaaatccctgatcaggcaaaagaattacatatggaatatattgatgcaacatgtccactggttaccaaagtacatagggaagctgaaaatttatataaaaatggatcgcatgttcttttgattggccataaaaatcatcccgaggtagtgggcaccatgggtcaaattccatctgatggtatagaccttattcaaagtttagatgatgtgaataagtatattaaaaagaatgataaaaaattagcatttatcactcagacaaccttatccgttgacgatactaaggatatagttgatggattgaagaaaaaatttccggagataaaagagccaaaaaaggaagatatctgttatgcgaccacaaacagacaagcggcggttaaaaaaatcgcaaacaaatgtgacatgttttttgtcatcggaagtagaaattcatcaaattctctaagactggtagaagttgctaaaaattcaggatgcgaaaattcaattcttcttcattcggagagcaaagtgccatttgataagattgataaatgcaaaagcataggtgtttcgtcaggtgcatctgctccagagatattagtggaacagtttttagataaaataaaaaaaaaatatagtatttctgtagaagaagttgaaattgttaaggaagatgtgaccttcaaaattcctgggaaattaaattaa

SEQ ID NO: 211797 - DNA, 493 bp, Unknown
  Bacterial polypeptide expressing nucleotide sequence isolated from the Sargasso Sea
gtatctaaagttcatagagaggcagaaaacttaaacaaacaaggtcatcatatattattaataggacacaaaaatcatccagaagtcataggaactatgggtcaattaccaagaggttcaatagatttaatagaaaatattgaggatgcaaataagtatgaaaatatttcaaataaacagctatctttcataactcaaacaacactatctgtagatgacactaaagatattattgcagctctaaaatctaagttcccagatattaaagagcctaaaaaagatgacatatgttatgcaacaacaaacagacaatcagctgataaagaaatagcatataagtgtgacatgttttttgtaattggaagtaggaactcatctaactcggtaagattagtcgaagttgctaaaaactctggttgtaattcttctgagttaatacactcagaaagtgcagttcccatagataagattaaagaatgtaatacgattggaa

SEQ ID NO: 211798 - DNA, 408 bp, Unknown
  Bacterial polypeptide expressing nucleotide sequence isolated from the Sargasso Sea
ttgaaaggacaatgttaaagaaatttggaccagaaaacttaaatagtcactttttagcttttaatactatttgtgatgcaactgaagaaaggcaagatgcaatgttctctctggttgatgaagaccttgatattttagtagttattggaggcttcaattcttcgaatactactcacctacaagaaattgcaattaataaaaatatttcatcttttcacattgataccccagagaggatatcagttaaagaaaactcaatatttcataaaccactaggatcagacttagaacttaaaaataattttctacctagtggaaaaattaatgttggaattacctcaggtgcatccactcctgataaagttgttgcagatgttattgaaaagttaattgatattgcttcctgaa

SEQ ID NO: 211799 - DNA, 554 bp, Unknown
  Bacterial polypeptide expressing nucleotide sequence isolated from the Sargasso Sea
aatgaaaaaagaacttaaaatttatttagcgtcaccaagaggattttgcgccggagttaaaagagcaattgaaatagttgaaaaatctatcagcaagtttggagctccggtatatgttcgtcatgaaatagtacacaacaagcaggttgttgaagaattaaaagaaaaaggagcgattttcattgatgaattatctggcgtagatgacgctagtagacctgtaattttctcggctcatggagtgccaaaatcagtcccggaagaggctaagttaaaaaatttatcctttgtagatgcaacttgtccattagtttcaaaagttcacagagagtcagaacaattaaataaaaatggttttgatatactattaatcggacataaaaatcaccctgaagttattggcacgatgggccagcttccaaaaggatcaattagactaatcgagacaaaaaatgatgttgatctactaaaagaaaaaaattttaaaaaacctcttgcatatattactcaaacaactctgtccgtagatgatacagctgaaataattgaagctc

SEQ ID NO: 211800 - DNA, 745 bp, Unknown
  Bacterial polypeptide expressing nucleotide sequence isolated from the Sargasso Sea
atgaagacaaaaacaagacctgttatcttttcagctcacggtgtcccaaaatctgttcctcaagaagcagaaagtttaaatatgatttttgttgatgcaacatgtccactagtatctaaagttcacagagaagcagaaaatttaaatagaaaagatattcaagttttgcttataggtcataaaaatcatcctgaagtaattggcacaatgggtcaagtccctgatggaaaaattcatctcatagaaacaattgatgatgcaaaaaattatcagagggataaaaacaataaacttgcttatattacacaaacaacattatcggttgatgatactaaagatattataaacgttttaaaaaaacgctttcctgatattcgcgagcccaagaaagatgatatttgctatgcgaccacaaatagacaatctgcaataaaaaagattgcgaaagaatgtgataatctatttgtgattggtagtagaaattcatctaactcagttagattggttgaagtagctaaaaataatggatgtgaaaatgctgaattaattcattcggaaagcacttttcctctagaaaaaatatctaaatgcaaaacaataggcatttcatctggtgcctcggctcctgaagtattagttaatgaattcatagaaaatattaaaaaaaaatttactgtagaaatagaggaagttgaaatagtaaaagaggacgtaacatttaagattccaggaaaattaaattaat

SEQ ID NO: 211801 - DNA, 727 bp, Unknown
  Bacterial polypeptide expressing nucleotide sequence isolated from the Sargasso Sea
aatgaataaaaaattggatgtttatttagctggccctagagggttttgtgctggtgtggaaagagctattttaatggttcaagaagcaataaaaaaatatggggcgccaatatatgtaagacatgaaattgttcataataagtatgttgttgatagtcttaaggaagaaggggcaatatttgttgaggaattaaatgaaatagatcaacgtgatagacctgtgatcttttctgcacacggtgttcctaaatcagtacctgaagaagcaaaaaacttaaacttactatattttgatgcaacatgccctttagtaagtaaaattcacagagaagttgaaaactttgaaagaatgaatctaccagttattttgataggtcatcagaatcatcctgaagtaataggaacgatggggcaaactgcaaaagaaatatttcttgtggaaaataaagaagaggtaaagcatttacccattccaaaaaatcaacaaattgcttatgtaacacaaacaactctatctgttaatgatacaaaagagattatagatgagattaaattacattttaaaaatgttttagagccaaagaagaaagatatttgttatgcaactaccaacagacaagaagctgtaaaaaatattgctaaattaagtaattatttttttgtaattggttcaagaaactcttcaaactctctacgcttagtagaggtggcaaaaaattatgtcaca

SEQ ID NO: 211802 - DNA, 680 bp, Unknown
  Bacterial polypeptide expressing nucleotide sequence isolated from the Sargasso Sea
aatgaaaaaagaacttaaaatttatttagcatctcctcgaggtttttgtgctggagttaaaagagctatagaaatagtagataagtctataaataaatatggttcaccagtttatgtgagacatgaaatagttcacaacaaacaagtagttgaagatttaaaaaaaaaaggagctatatttgtaaatgaactttcagatattaaagataacactagaccagtagttttttctgcacatggagttccaaaaactgtgcccgaagaagcaaaaattaaaaagctttcttatgtagatgcaacttgtcctttggtttcaaaagttcatagagagtcggagcaactttataaaaatggttatgagattatattgattggccataataaccaccctgaagtaattggaactatgggacaattgccaaagggagcaataacattggttgaaacaatagatgatgcaaaatctttaaacgaaaaaaattttagcaaaccaaccgcttacataactcaaactactttatcaatagatgacactgctgaaattattaattttttaaaaaaaaaatttcccaatattaagggaccagtaaaggaagacatatgctatgcaactactaatcgacaaatagctgtaaaaaaaatagcttccaaatgtgacatgttttttattattggtagca

SEQ ID NO: 211803 - DNA, 788 bp, Unknown
  Bacterial polypeptide expressing nucleotide sequence isolated from the Sargasso Sea
aaaagaaaaaggtgcaatatttgtagatgagctctcggacattaaggactcaagtagaccagttattttttctgcgcatggtgttcctaaatcagttcctgaggaggcaaaatttaaaaatttattttatgttgatgctacttgtccattagtttctaaagtacatagagagtctgagcaactaaataaaaatggttttgatatattattaattggtcataaagatcatccggaagttattggtaccatgggacaacttccaaaaggttcgattaaattaattgaaactaaaaatgatactgataatcttaatgcaactgatttcaataaacctttagcatatataactcaaaccactttatctgttgatgataccgctgaaataattgacgctcttaaaataaaatttccaaaaattaaaggtcctatcaaagaggatatttgttatgcaacaactaatcgacaatctgctgtaaaagaaatagcttcaaaatgtgatatgttttttgttgttggcagtcggaattcatctaattcagtgagactagtagaggtagcaaaaaaagcgggctgtaataattctcatttaatgcactctggaaaaaagattccttttaacgaaatagaggactctaatactattggaatatcctctggtgcttcagctccagaaaaattagttcaaggcttacttaatgatttaaaaaaagagcgcaaagtttctatagaagaagtagtggttgcggaggaaaaggtaatatttaaattaccaaaagaacttaactaat

SEQ ID NO: 211804 - DNA, 742 bp, Unknown
  Bacterial polypeptide expressing nucleotide sequence isolated from the Sargasso Sea
aaagataaaactagacctgtaattttttctgctcatggagtaccaaaatctgttccaaaagaagcttcgagtcttaatatgacttatgttgatgcaacttgcccattggtatctaaagtacatagagaagctgaaaatttatataaaaatggttcccatatattacttattgggcacaaaaatcatccagaagtagtcggaacaatgggtcagttaccaagtgattgtatagatcttattgaaaatgtgaatgatgctgaaaaatattcaaaaaaaaatggaagtaaattagcttacattacacaaactacattatcagttgacgacactagagaaattataaatgttttgaaaaataaattccctgaaattaatgaaccaaaaaaagaagatatttgttacgctactacaaataggcaatcagctgtcaaaaagattgcaaaaaactgtgatatgttttttgtaattggaagtagaaattcgtctaactcggttaggttagtagaagtagcaaaaaataacgggtgtgataaatcagaattaattcactctgaaagcaaagttcctattgataaaattgctaattgcaaaactataggtatttcttctggtgcttcagctccagaaattttggtagaggaatttattcaggaattaaaaaagcaatttgttttagaaatagaagaagtagagataataaaagaagatataacgtttaaaattcctggaaagttaaactaat

SEQ ID NO: 211805 - DNA, 616 bp, Unknown
  Bacterial polypeptide expressing nucleotide sequence isolated from the Sargasso Sea
atgttagcaacgcctagaggattttgtgccggtgttgagagagctgttgatatcgttaataaagcagttgatgtttttggtgcgccaatatatgtaaaacatgaagtagtacataataaatttgtaattgaagatcttgagaaaaaaggagttatttttatagaggatataactgatgtacctgataattctattataatttatagtgcccatggtgtgtccttaaaagttaaagaagatgctgatagaaagaatcttaagatctttgatgcaacatgccccctagtcacgaaagttcatatagaagtgcataaatactcaaaagatggggtggatgttatattaattggccataaaggccatccagaaatagaaggaacgatgggacagtataattcgtcatttggcgatattcatttaattgaaaataaggaagatatcgataaattaaagattaaaaatgataaagttgcatacgtaactcaaacaacattgtctactgatgatacaaagcatattatagattgtttatgtaataggtttcctaatatattatcgccaataaaaagtgatatatgttatgcgacacaaaatcgacaggatgctgttaaatcta

SEQ ID NO: 211806 - DNA, 589 bp, Unknown
  Bacterial polypeptide expressing nucleotide sequence isolated from the Sargasso Sea
aatgaaaaacgaagttaaaatttttttagcgtctccgagaggtttttgtgcgggagtagaaagagctatagacatagtcgaaaaaacaattttaaagtatggaacacctgtttatgtaagacacgaaattgtccataataaacaagttgttgaaaacttaaaaaaaaaaggaactatatttgttgaggaactctcagaggttagagatctatccaggccagtaatattctctgcgcacggagtaccaaagaccgtgccagaagaagcaaagattaaaaatttgttttatattgacgcgacatgtcctttggtttcaaaagtacatagagagtccgaacagttacataaaaatggttatgacataattctaattggtcacaaaaaccatccagaagttattggtactatgggtcaattaccttctggatcaattcgtttaatcgaacaagttggtgaagttaaagatttaaatccagagtcttttaaaaaaccattggcttatattacccaaactactttgtcggtggatgatactgctgaaattattacaaaacttaaagacaaatttcctaaaataaagagccaatta

SEQ ID NO: 211807 - DNA, 817 bp, Unknown
  Bacterial polypeptide expressing nucleotide sequence isolated from the Sargasso Sea
atgcttaaaaattcggaaatattactaacagaacctaggggcttctgtgcaggtgtagaaagagcaatagaaatagtcaaccgtgctgtagaaatttttgatgaaactatctttgttaagcatgaggttgttcataataagcatgtaatagaacagctggtagaaaagggagttgtttttgttgaatctctagagactgtcccggatcagtccatactaatttacagtgctcatggtgtatctaaggaaatatcagaattagcgacaaaaaaaagacttaaagtctttaatgcaacatgtccacttgtaactaaagttcattttgaaatacataaatttgcatcacaaaatattgatgttgttcttgttggacacagtggtcacccagaagtagagggaacaatgggtcaatatatatctgagaatggtaaaattcacctagtcgaaacaaatgatgacatagacaaattaaaaattgaaaataaaaatatcgcgtacgtgacccagacaactttatcagttgacgatacaaaaagtattgtaagttgcctaaaaaataaatttccaaatattataggtcccaggaaagatgacatttgttacgcaacacaaaatagacaagaggctgtcaaaaaaattttagagttttgtgattcattgatagttataggttcacaaaatagctcaaactctcagcgcttaaaagagataggggttcagtatggaattaagtcttatttgatagatgatataaaccaaattaatattgaagatttgagtggcgatgaggtcataggcatcactgctggtgcctcag

SEQ ID NO: 211808 - DNA, 715 bp, Unknown
  Bacterial polypeptide expressing nucleotide sequence isolated from the Sargasso Sea
aatgaataaaaaacttaatattttcttagcgggtccaagaggtttttgtgctggtgtcgatagggctatcgaaatggttaaagaagcattaaataaatatggtcaaccagtttatgtaagacatgagattgttcacaacaagtatgtcgtagaaaatttaaaatctgaaggtgcaatttttgtagaagaattaaatgaaataaaagataagagtagaccggttatcttttcagcacatggtgttcccaaaagtgttccaaaagaggctctggaattaaaacttctttactttgatgctacatgtccattggtaagtaaaattcacaaagaagttgaacactttgataaaaaaaatttacccgtaatcttaataggtcatagaaaccatccagaggttattgggactatgggacaaagcaataaagaaatttatctagttgaaaagaaggaggatgttaaaaaccttcaattgaatcagaatggttttgtagcatatgtaactcaaacaacattatcggtagatgataccaaagacattataacagaaatcaaaagaaaatttaaaaatgtaattgaaccaaagaaaaatgatatttgttatgcaactacaaacagacaagaagcagttaaaaaaattgcaaaaaattgtgattattttttggttattaacgctagtaactcatcaaattcattaagactagtgaagggcaaaaaa

SEQ ID NO: 211809 - DNA, 676 bp, Unknown
  Bacterial polypeptide expressing nucleotide sequence isolated from the Sargasso Sea
atgggggatgtagttatactgcctgctttcggagccactgttcaagaaatgaaactacttcatgagaaaggatgtcatatcatagatacaacttgtccttgggtttcaaaagtttggcatactgttgagaaacataaaaaacatatttttacttctataattcatggaaaatttaaacatgaagagactcttgctactagctcatttgcaggtaagtatttagttgtacttgacctagaagaagcaaattatgtatctgaatatattctgggcagagggaacagaaatgactttataaataaatttgctaaagcttgttcgaatggatttgatcctgataaagatttagatagagtcggagttgctaatcaaacaactatgcttaagagcgagacagaggaaattggaaaagtttttgaaaagacgatgttaaaaaaatttggacccgaaaacctaaataatcactttttagcgtttaatacaatttgtgatgcaactgaagaaagacaagatgcaatgttttctttggttgatgaagaccttgatattctcgttgttataggaggcttcaattcttccaatactactcacttacaagaaatagcaattactaagaatatttcttcttttcatatagatacgccagataggatatcagttgaagaaaactcaatat

SEQ ID NO: 211810 - DNA, 961 bp, Unknown
  Bacterial polypeptide expressing nucleotide sequence isolated from the Sargasso Sea
catgagcatcacggatacgactcttgccgaagccgagatcctgctggcgcagccgcgcgggttctgtgccggcgtcgatcgggccattgagatcgttgagcgagccatcaagctgcacggctcgccgatctacgtgcgccacgaaatcgtccataacgcctatgtcgtcgaggatttgcgcaagaagggcgcgattttcatcgaacaactggaagaggtgccggccggcaataccgtcattttcagcgcgcatggcgtgtcgaaagcggtgcgcgcggaagccgaatcgcgcggactacgcgtgtacgacgccacctgtccgctcgtcaccaaggtgcatatcgaagtcgcgaaaatgcgccaggacggcttcgatatcgtgatgatcggccacaagggtcacccggaagtcgagggcacgatgggccaggcgggcgagggtatgcaccttgtggaagacatcaaggatgtgcaggcgctgcaactggccgaccccgaacggatcgcgttcgtgacgcaaaccactctgtcggtcgacgatgcggctgagatcatcggcgccctgaagtcgaagtacccggcgatccgcgaaccgaagaagcaggacatctgctacgccacgcagaaccgtcaggacgcggtcaagttcatggcgccgcaatgcgacgtggtgatcgtagtcggcagcccgaatagttcgaattccaaccgcttgcgcgaactggccgaaaagctcggcgtgccgtcttatatggtggactcgccggatcagatcgatccggtctgggtcgaaggcaagcgccggatcggcgtgacggcgggcgcttcggcgccggaagcactggcacaagcggtgattggccgtttgcatgagctcggtgtgcgcaacgtgcgcgcgcttgaaggtatcgaagaaaacatcgcgtttccgctgccgcgcgggctgggtttgcctgcctga

SEQ ID NO: 211811 - DNA, 958 bp, Unknown
  Bacterial polypeptide expressing nucleotide sequence isolated from the Sargasso Sea
atgaaatttgatcctaccagcccaagtttaaatattatgctggctaatcctcgcggcttttgtgctggtgtggatcgcgccattagcattgttgagcgtgcgctcgagttattttcgccgccgatttatgttcgccatgaagtcgtgcataaccgctatgtggtgcaaaatctgaaggatcgcggtgccgtatttgtagaagagttagaccaagtaccggataacaatattgttatcttcagtgcgcatggggtttctcaggcggtacgcgccgaggctaaggcacgtggtttgcgggtattcgatgcgacttgtccgttagtcaccaaagttcatttacaagtgacccgtgcgagtcgcaaggggattgaatgtattttgattggccatgcggggcatcctgaagttgaaggcaccatgggacaatacgataaccccaatggtggtgtttatctgattgagtccccggcagatgtcgagactttacaagttcgcgatcctaataacctctgcttcgtgactcaaacaacgctctcggtcgatgatacactcgatatcatcagcgccttattaaagcgtttcccgtctatcgaaggcccacgtaaggatgatatttgttacgcgacgcaaaaccgtcaggatgcggtgcgtaacttatcggccgatgttgatttgttgattgtggtcggttcgaaaaacagttctaactctaatcgcttacgtgaattagcattaaaaacgggtacagagtcttatttggttgatactgcagatgatattgattcatcttggtttgagggtgtaactaaagttgctgtaacagctggcgcgtctgcaccagaggttcttgtacagcaagtggttcaagccatagcgaaattagcgccaagtgtggtgactgaagtcgaaggacgaaaagaagatactgtctttgccgtacccgctgaactacgttaat

SEQ ID NO: 211812 - DNA, 664 bp, Unknown
  Bacterial polypeptide expressing nucleotide sequence isolated from the Sargasso Sea
aatgaaaaataaagaattaaaaatattattatctgcacctcgtggattttgtgctggagtagaaagagcaattgaaatagtagaaaaatctatacaaaaatttggagctccagtttatgtgcgtcatgaaatagtgcataataaatatgttgtagatgatttaaaaaataaaggggcaatatttgttgaagagctggaggagataaaagataaatcaagaccagtaattttttcagcacatggtgttccaaaaaaaatacctgaagatgcaaaaaattataaaatgacttatgtggatgctacatgtccacttgtttctaaggttcatagagaagcagaaaatcttaataaagctggctaccatataatattaattggtcatgaaaatcatcctgaagtaattggaactatgggtcaattaaatgaaggttctatagatctaatccaaaatgaggaagatgctttaaactatcaaaataaactagacaaaaaattagcatatattactcagactactttgtcagttgaagatacaaaagaaataatcaaaattttaaaaaccaattttcctaatataaaagaaccaatgaaagaagatatttgttatgcaactactaaccgtcaaatggcagtaaaaaatattgcaaaaaattgtgatatgttt

SEQ ID NO: 211813 - DNA, 742 bp, Unknown
  Bacterial polypeptide expressing nucleotide sequence isolated from the Sargasso Sea
aggggaggtcgttgtttatagtgctcatggtatttcaaaagcagttgaatttgaatctgaagtaagaaaactagatgtatttgatgcgacatgtcctttagtaagtaaggtacatgctgaagttaatacttatgcgaagatggggtttgattgtttgctaatcggtcataagaatcatcccgaggtagagggaacgatgggacagtttgatacatcatttggtggaacaattactcttattgaagatatatcagatgctaaaaagctcaattttaaagattcgtctcgtttggcatttgtgacacagaccactttatctgtagatgatacaaaagaaataaaagattttctgattgatagattcccagatatcaagggcccaaaaaaagatgatatttgttatgcaacccaaaatcgacaggatgcaattaagcaattagctctagagtcggatctagtgttggttattggttctgaaaatagttctaattccaatagactgagagaaatagctgaacgatcaggagttgaagcttatctaattgatactatcggtgatttaccttcagattgcttaaaaggcaaatctaaaattggccttacttcaggagcttctgctccagaacatcttgtgtcagaagttatagacaagcttacttcatcttatgggtttaatttggtaggaaataaaaaaagaactgacgaaggaatatcttttagattacccaaaggcttaagataa

SEQ ID NO: 211814 - DNA, 946 bp, Unknown
  Bacterial polypeptide expressing nucleotide sequence isolated from the Sargasso Sea
aatgaaaaaagaacttaaaatttatttagcatctccacgaggtttttgtgcaggcgttaaaagagctatagaaatagttgatagatcaatagataaatatggttctccagtttatgtgagacatgaaatagttcacaataaacaagtggttgaagatttaaaaaaaaaaggagctgtatttgtaaatgaattgtccgatatcaaagataatactagaccagtagtcttttctgctcacggtgtaccaaaaactgttccagaagaagcaaaatttaaaaaactttcttatgtagatgcaacttgtccgttggtgtcaaaagttcatagagagtctgaacaactttttaaaaaaggatatgatattattcttgtaggtcataacaaccatcctgaagttatagggactatgggacaattaccaaaaggatccataacactagttgaaacaattgacgatgcaaaatctttaaacgataaaaaatttactaaaccgatggcctatataacacaaacaactttatcaatagatgatactgctgagattatagaacatttgaaaaagaaatttccaaatattaaaggtccaataaaagaggatatatgttatgcaactactaatcgacaaaaagctgtgaaaaaaatagcctcaaaatgtgacatgttttttattattggaagcagaaattcttcaaactccgccagattagttgaggtggcaaaaaaagcaggatgtaaaaactcattactaatgcattctgaaaaagaaattccttttttggacattgctaattcaaaaataattggtatatcttccggagcttcagccccagaagaactagtgcaaaatttaatcaaaaagataaagaaagattatttggtaactattgaagagataacagttgccgaagagaaagtagttttcaagctgcctaaagaattaaactaa

SEQ ID NO: 211815 - DNA, 707 bp, Unknown
  Bacterial polypeptide expressing nucleotide sequence isolated from the Sargasso Sea
agtgccaaaaactgttcctgaagaagcaaaaattaaaaaactttcttatgtagatgcaacttgtccattggtatcaaaagttcatagagaatccgaacaactttataaaaatggttatgatattattcttgtaggtcataataaccatcctgaagttataggtacaatggggcagttgccaaaaggggcgataacactagttgaaacaattaatgacgcaaaatccttaaaaattgaaaattttactaaaccgatggcgtatataactcaaactactttatcagtagatgatactgcggaaattataaactttttaaaaaaaaaatttccaaagattaaaggtccaataaaagaagatatatgttatgcgactactaatcgacaaacagctgtaaaaaaaatagcttcaaaatgtgatatgttttttattattggtagtagaaattcttcaaactcagctagattagtggaagttgctaaaaaagcaggatgcaaaaattcattgctaatgcattctgaaaaagaaattccatttgcagatattgcaaattcaaaaataattggtatatcgtcaggagcgtctgctccggaacagctagtacaaaatttaatcagagaaatagaaaaagattatctagtatctattgaagaggtttctgtagctgaagaaaaagtaattttcaaactacctaaagaattaaattaaa

SEQ ID NO: 211816 - DNA, 566 bp, Unknown
  Bacterial polypeptide expressing nucleotide sequence isolated from the Sargasso Sea
catgagaaaaacagcaaaatatctcagactcgccgcgccgcgcggcttttgcgccggtgttgaccgggccgtcaaaatcgtcgaggcagccctagacaagtttggtgcgcctgtctacgttcgtcacgagattgtgcataacaagactgtcgttgatgaacttgccgacaaaggtgccgtttttgtagaggaactctatgaggtgccgtccggtgcgccggtggtgttttccgcccatggtgtttcacgcgccgttattgatgaagccaacgacagaaaaatgattgctgtcgatgccacctgcccgctggtgagcaaggttcatatagaggccaaacgccacgccgcccacaggcgccatattctattgattggccatgctggccatcccgaggtggagggcacgatggggcaggtcgatgatgatgccatcacattgatcgaaacagctgatgacgcccacaatgtcacgccacccgaagattgtgatctggcctttgctacacaaacgactttgtcggtagacgatacggctgaaatcatttcaatcctgcaatttagattcc

SEQ ID NO: 211817 - DNA, 946 bp, Unknown
  Bacterial polypeptide expressing nucleotide sequence isolated from the Sargasso Sea
atgaaaaataaagaactcaaaatattgctttcagctcctagaggtttttgtgctggagtagaaagagcaattgaaattgttgaaaaatcgattaagaagttcggagctccagtttatgttcgacatgaaatagttcataataaatatgttgttgatgatttaaaaaataaaggagcaatatttgtagaagagcttgaagagattgaagacaaatcaagaccagtaatattctcagctcatggtgtaccaaaaaaaattcctgaggatgcaaaaagttataatatgacttttgtagatgctacctgtcctcttgtttcaaaggttcatagagaagcagaaaatctaaataaatctggatatcatttaatattaattggtcatgaaagtcatcctgaggttgttggaacaatgggccaattacccaaaggttctatcgatcttattcaagatgaagaggaagcaaaaaattataaatttgataaaaaaaaacaaattgcttttgtaactcaaacaactttgtctgttgatgatacaaaggatataataaaaattttaaaagaacgttttccaaatatacgtgaacccttaaaagaagatatttgctacgcaactacaaatcgacaaatggctgttaagaatattgcaaaaaagtgtgatatgttttttgttataggtagtagaaactcatctaattctgttaggttagttgaagttgcaaaaaaatcaggatgtttaaaatctcatttaatccattcacaaagtgaaataccttatgatttaatagaaaactcaaatacaattggaatttcctctggagcttccgccccagaagttttggttgaaaattttattaaggaattgaaaaaaagatttattgttactatagatgaggtagaaataataaaagaaaacgtaacttttaaagtccctaaaaaattaaattaaa

SEQ ID NO: 211818 - DNA, 778 bp, Unknown
  Bacterial polypeptide expressing nucleotide sequence isolated from the Sargasso Sea
taagggtgccatctttgttgaggagctcgaggagatagaagataaaacaaggccggttattttttctgcacatggtgttccaaaaaaaataccagaagatgctaaaaactataacatgacttatatagatgccacatgtccattagtatccaaagtacatagagaagcagaaaatttacatagagctgggtatcatttaattttgataggacatcagaatcaccctgaagtaattggtaccatgggtcaattaccagaaggatcaattgatcttgttcaaaatgaggatgaggctaagaaatataaacctcaaaacaacaaaaaaatttcatatgtaacgcaaacaacgctatcagtagatgatacaaaagatataattcaaattttaaaagatagatttcctactataaaagaaccaatcaaagaagatatttgttacgccacaactaatagacaattggctgtaaaaaatatcgcaaaaaaatgtgatttattttttgtaattggtagtagaaattcgtctaattcagttagattagtagaggttgcaaaaaaatctggctgctctaactcactattaattcattcacaaagtaaaataccattcgatttaattaaaaactcaaatataattggaatttcctctggggcttccgcaccagaaattttagtcaataattttatagatgagcttaaaaataaatttacagtcagcatagatgaaatagaaataattaaagaaaatgttgttttcaaagcaccgaaaaaattaaactaa

SEQ ID NO: 211819 - DNA, 481 bp, Unknown
  Bacterial polypeptide expressing nucleotide sequence isolated from the Sargasso Sea
atgaaaaataaaaaacttaaaatcttgttagcaaaacctagaggtttttgtgctggtgttgatagagctatagaaattgtaaaaaaaagcatagaaaaatatggagcgcctgtatatgtaaggcatgagattgttcataataaagaagtcgttcaaagtcttagaaaaattggtgctatttttgttgaggagttaagcgaaatttctgataaatctcgacctgttattttctctgctcacggtgttccaaaatctgttacaaaagaggcagagaattataaaatggaatttattgatgctacatgtccattagtttcaaaagttcatcgagaagcagaaaaccattataaggcgggaaatcatattttactaattggccataaaaatcatccagaagtgatcggaactatgggccagattccatctggaaagattgatttaatagaaacaatagatgatgcaaaaaaatatgaaatcaaaa

SEQ ID NO: 211820 - DNA, 778 bp, Unknown
  Bacterial polypeptide expressing nucleotide sequence isolated from the Sargasso Sea
aatgaagcgaataattttagctcaacctagaggcttttgtgccggtgtccaacgtgcagtagatattgttgagaaatctattgataaatttggttcaccagtatatgtgagacatgagatagttcataataagcatgtagtagatagcttaacagaaaaaggcgctatttttgtagatgaaatatcagacattcctgataaatcaaatactatttttagtgctcatggagtttctgataaggtagaaactgatgctaaaattaaatctttatctattgttgatgctacttgtcctctagttaaaaaagtacatgttgaagctttaaagtattacgagcaaggatataaaataattttggttgggcacaaaggtcatcctgaagtagaaggtacagctggaagagtgcctggaggggtaaaagttattgagacagttgatcatgtgaataagttaaaattttcaaaaagtgatctattagcttatgtaacacagacgacattatctgtagatgatacaaaaaaaataattgatgctttaaaagaaaagtatcctaatattaagggtccagatacaagagatatatgctatgcaactcaaaatagacaaaaggcagtcagggatttagctaaattttccgatgtagttttagttttaggtaataaaaatagttcgaatagtgtgaggttagcagaaatatctgctttaactggtattccaacttatagaatatctgacaaaaatgaacttaatttagaattaattaaaattataatgtaa

SEQ ID NO: 211821 - DNA, 697 bp, Unknown
  Bacterial polypeptide expressing nucleotide sequence isolated from the Sargasso Sea
gtccatcattcacggcaagtacagtcacgaggaaacggtggcgactgcgagtttcgcgacgaggtatttgatcgtcaaggatatgaaggaggcgacgtacgtgcgagagtacattttgaacggtggcgataaggcggagtttatggaaaagtttaaaaacgccgtgtcgcaaggtttcgatcccgacgacgacctcgaaggcgtcggcatcgccaatcaaaccaccatgctcaagggcgagaccgaggccatcggtaagctctttgaaaagacgatgatggaaaagcacggcgtggagaacatcgccgatcatttcatcgtcatggacaccatctgcgacgccacccaagagcgtcaagacgccatgtacaaactcgtcgacgaagagcccgacatcatgctcgtcatcggtggtttcaactcctccaacacctcccacctccaagagatcagcgaggataaatccattcccagctactgggtcgacacgtgcgatcgcatgaacgccgacaccaactccatcacccacaagctcgcgcacggcgagctcgtgcaaaccgacgactggcttccgcgctcggacgtcgtcatcggcgtcacctcgggcgcgtccacgccggataaggtggtcgaggacgtcatcgacgtcgtcttcgccaccaaacgcgcgctcacctccgaggtttcatcgcgatga

SEQ ID NO: 211822 - DNA, 825 bp, Unknown
  Bacterial polypeptide expressing nucleotide sequence isolated from the Sargasso Sea
aatgaaaaaagaacttaaaatttatttagcttcaccaagaggattttgtgccggtgttaaaagagcaattgaaatagttgaaaaatctattagcaagtttggagctccggtatatgttcgccatgaaatagtacacaataagcaagttgttgaggagttaaaagaaaaaggtgcaatttttgttgatgaattatctgacgtagatgacacaagtagacctgtaattttctcagctcatggagtaccaaagtcagttccagaagaggctaaattaaaaaatttatcctttgtagatgcaacttgtccattagtttcaaaagtgcacagagagtcagagcaattaaataaaaacggtttcgatatattactaatcggacataaaaatcaccctgaggttattggtacaatgggtcagcttccaaaaggatcgattaaactaatcgaaacaaaaaatgatgctaaactgcttagagaaaacgattttaaaaaaccgcttgcatatattactcaaacaaccctgtccgtagatgatacagttgaaataattgaaactcttaaagacaagtttccaaaaattaaaggccctattaaagaagatatatgttacgctactaccaacagacagtctgctgttaaagagatagcttccaaatgtgatatgttttttgtagtaggaagccgtaactcatctaattctgtgagattagttgaagttgcaaaaaaagctggttgtaataattctcatttaatgcattccgaaaaagaaatcccttttaatgaaatagaaaattctgaaactattggtatatcttctggagcgtcagc

SEQ ID NO: 211823 - DNA, 940 bp, Unknown
  Bacterial polypeptide expressing nucleotide sequence isolated from the Sargasso Sea
atgactaaagaaataaaattagccaaccctcgaggcttttgtgctggtgttgacagagctatagacattgtaaataaagctcttgatatatatggagctcctgtgtatgtgaaacatgaagttgttcataataaagtagttgtggatgatttaagaaataggggtgcagtatttgtagaggaaattgatgagattcctgatgattcattggtaatttttagtgctcatggagtatctagtgaagtagaggagactaccaaggcaagaaatcttaatttttttgatgccacatgtcctttagttaccaaagttcatatggaagtaagaaaacacgctaaagcaaatagagatattattttaattggtcatgagggacatcctgaagtagaaggtactatgggtcgtcatataaattctgaaaatagttcaatatatttagttcaagatgagaatgatgcattaaatattaatgtaaacaatagtgaaagtcttgctcttgttactcagacaacacttagtgttgatgaaacaatatcgataatagatatattaagaaatagatttccaaatatcgaagttccaaaaaaagatgatatttgttatgcaacacaaaacaggcaggatgctgtaaaacagctagcccttgaatcagattatattattgtagttggatcaaaaaatagctcaaactcgaatagactgaaagagcttgctgaaaaatgtggttgcaaatcaactttaatagatgaattttcagacttagatcttgaggatattaaaaaattcaaaaatattgctattacagccggtgcatctgctccagaatcaagagttatggaaatcgcaaaatctcttgaagattattttggagcgaagctcattgaggatggtgaagatactgagaatgtctattttaaaatgcctcctggattgagataaa

SEQ ID NO: 211824 - DNA, 639 bp, Unknown
  Bacterial polypeptide expressing nucleotide sequence isolated from the Sargasso Sea
gctgtcaaaatcgaaattaatacttgcttcacctcgtggtttttgtgctggtgtagagagagctgtggagatacttcaaagagcaattgatctacttggagcccctgtatatgtaaagcatgaagttgttcacaataaatacattattgaagattttgagaaaaagggggttatgtttattgaagatattaattcaataccagatgaagctgtcttaatatatagcgcacatggtgtttctaataagattaaagaaattgccaaaaaaaagaaccttaagatatttgatgctacatgcccactagttacaaaagttcatttgcaagtgcataaatacgcaagtcaaaatatcgacgtagttttaattggtcacataggacatccagaaattgagggtacaatgggaagatacgaatctgaaaaaggtaaactgcacttggtgcaatttgaggatgatgttgatagcctcgatatcgataatccaaatctggcttatgtgactcagactactttgtctgttgacgacacgaaaatcataattgatagacttaagaagaaatttccaaatatagtaggtccggtaaaagatgatatatgttatgcaacacaaaatcgacaggatgcagttaaatcaatact

SEQ ID NO: 211825 - DNA, 952 bp, Unknown
  Bacterial polypeptide expressing nucleotide sequence isolated from the Sargasso Sea
atgaaaaaagaactacataaagagattgtcttagcaaatccaagaggtttttgtgcaggcgttgatagggcaattgatattgtagaaaaatccttggacaaatttaaagagccagtatacgtaagacatcaagttgtacataacaaaaaggtagttgaagacttagagaaaaagggtgttaaatttgtaaaagaagtttcagaaattcctgacaatgcagtggcgatatttagtgcacatggagtaagtcaaaaagttgaggatgaagccaaaaatagaaatttcatgtattttgatgctacttgtcctttagtgactaaagttcatttagaagtacaaaaacatgctcaaaagggtagagatatcattttaattgggcataaaggacaccctgaagtaataggtacattaggcagacatccatctaattcaaatacaaaaatttaccttgtagaaaataatgatgatattaaaaaattggagataagttcccctgaagttgcttatgtaacacaaacaacactttccgtagatgagacaagggaattaattaattcgctcaaagaaaaatttccaggcattattggcccgagcgctgatgatatttgttacgcaacacaaaatcgacaagatgcagtgaaacaattgtcgcttgaatgtcagattgtacttgttataggatcgcagacaagttctaattcgaatagattaaaagagttggctgaaaaatgtggtactaaatcatttctaattgacgataaaacagatatagatttaaattctttaaaagacgctacctctgttggaattactgctggagcttcagcaccagaggaaattgttcaagaagtaatttcatttcttgttcccttaggatttaaaacagtaagaaatttgtcagaaaataatgaaaatatgacctttaaattgccaaaggaattaacatcatgaa

SEQ ID NO: 211826 - DNA, 1198 bp, Unknown
  Bacterial polypeptide expressing nucleotide sequence isolated from the Sargasso Sea
atggatactcaagcttttagaagatcccttcatcattctgatagatacaatagaaggggtttcgattctccaacaaaaagagctcaagcgttagaagaagcttaccaaagtgaattgataagttctattagggataataattttacctatactaaaggcagactaaatataaagttggcccaagccttcggtttctgttggggagttgaaagagctgttgcaatggcttatgaaactagaagacattatccaaatgagaatatttggataacaaacgaaataattcataatccctcggttaatgatcatttaagaaaaatgaatgtgaaattcatctcagctaaaaatggaattaaagatttttctttagtttctaatggggatgttgttatacttcctgctttcggagctactgttcaagaaatgaaactcttgcatgagaaaggttgtcatattattgatacaacttgtccatgggtttctaaggtttggcatacagttgaaaaacataaaaaacatattttcacatctattattcacggaaaatttaaacatgaagagactctcgctacaagttcattcgcaggtaaatatttagttgtacttgatctagaagaagcgaactacgtttctgaatatattcaggggagaggtaataggaatgagtttatgaacaaatttgctaaagcttgttctaatggatttgatcctgataaagatttagatagagtgggagtcgcaaatcagacaactatgcttaagagcgagactgaagaaattggaaaggtttttgaaaggacaatgttaaagaaatttggaccagaaaacttaaatagtcactttttagcttttaatactatttgtgatgcaactgaagaaaggcaagatgcaatgttctctctggttgatgaagaccttgatattttagtagttattggaggcttcaattcttctaatactactcacctacaagaaatagcaattactaaaaatatttcttcttttcacattgatacgccagagaggatatcagttaaagaaaactcaatatttcataaaccactaggatcagaattagaacttaaaaataattttctacctagtggaaaaattaatgttggaattacctcaggtgcatccactcctgataaggttgttgcagatgttattgaaaagttaattgatattgcttcctgaa

SEQ ID NO: 211827 - DNA, 772 bp, Unknown
  Bacterial polypeptide expressing nucleotide sequence isolated from the Sargasso Sea
aaactcctccatgagaaaggatgtcatatcattgatacaacttgtccatgggtttctaaggtttggcatactgtcgaaaaacataaaaaacatgtttttacctccattattcatggaaaatttaagcatgaagagactcttgctactagttcatttgcaggtaaatatttagttgtacttgatctagaagaagcaaattatgtatctgaatacattttggggagaggaaatagaaatgagtttataaataaatttgctaaagcttgttctgatggatttgatcccgataaagatttggatagagtcggagttgctaatcaaacaaccatgcttaaaagcgagactgaagaaataggaaaagtctttgaaagaactatgttaaaaaaatttggaccagaaaacttaaatagtcactttttagcttttaatacaatttgtgatgcaactgaggaaaggcaagatgcaatgttctctttggttgatgaagaccttgatattcttgttgtcataggcggctttaattcttccaatactactcacttacaagaaatagcaattactaaaaatatttcttcttttcatatagatacgccagagaggatatcagtagaagaaaactctatattacacaaaccactaggatcagatttagaattaaaaaataattttttacctaatggaaaaattaatgttggaatcacatcaggtgcatccactcctgataaggtagttgcagatgttattgaaaagttaattgatattgcttcctaaa

SEQ ID NO: 211828 - DNA, 670 bp, Unknown
  Bacterial polypeptide expressing nucleotide sequence isolated from the Sargasso Sea
gatgaaaaataaaaacttaaaaattttattagcatcaccaagaggattttgtgcaggagttgatcgagctatagaaatcgttaaaaaaagtatagataaatacggatcacctgtttatgttaggcatgaaattgttcataataaacatgttgtagatagtttaaaaaaaataggagctgtatttgtagaagagttagaagaaataaaagataaaagcagaccagttattttttctgctcatggagtgccaaaatctgttccaaaagaagcttcagaactaaatatgacttatgttgacgcaacatgtcctctggtttctaaagttcacagagaagctgaaaatttacataaaaacggttctcatatattgcttataggtcataaaaatcatccagaggtagttggaacaatgggacaattacccaatgaaagcatagaccttattgaaaatattgaagatgcagaaaaatattcaaaaaaaaatggaaataagttagcctatattactcaaactacattatcggtagatgacacgagagaaattataaatattttaaaaagaaaatttccagaaatcaatgagccaaagaaggaagatatttgttatgctactacaaatagacagtcagctgtaaaaaagattgcaaaaaagtgcgatatgttttttgta

SEQ ID NO: 211829 - DNA, 946 bp, Unknown
  Bacterial polypeptide expressing nucleotide sequence isolated from the Sargasso Sea
aatgaaaaaagaacttaaaatttatttagcatcaccaagaggattttgtgctggagttaaaagagcaattgaaatagttgaaaaatctatcagcaaatttggagctccggtatatgttcgtcatgaaatagtgcacaataaacaggttgtggaagagttaaaagaaaaaggtgcaattttcgtagatgaattatctgacgtagatgatgcaagtagacctgtaattttctcagctcatggggttccgaagtcagtcccagaggaggctaaattaaaaaatttatcctatgtagatgcaacttgtccattagtttcaaaagttcacagagagtcagaacaattaaataaaaatggtttcgaaatatttttaattggacataaaaatcaccctgaagttattggcacaatgggtcagcttccaaatggatcaattaaactaattgaaacaataaatgatgttgaacttcttaaagaaaatgattttaaaaaacctctggcatatattactcaaacaaccctgtctgtagatgatacagctgaaataattaaagctcttaaaagtaagtttccaaaaatcaaaggccctataaaagaggatatatgttacgctacgactaacagacagtccgcggttaaagagatagcttccaagtgtgatatgttttttgtagtgggtagtcgtaactcgtctaattctgtcagattagttgaggttgctaaaaaagcaggttgtaataattctcatttaatgcactctgaaaaagaaattccttttaatgaaatagataattctgaaaccatcgggatatcttctggagcgtctgcaccagaaaagcttgttcaaactttgttagacagtttaagaaaagatagaaatgtttctattgaagaagtagtagttgcagaagaaaaggttgtatttaaattgccgaaagagctaaattaa

SEQ ID NO: 211830 - DNA, 743 bp, Unknown
  Bacterial polypeptide expressing nucleotide sequence isolated from the Sargasso Sea
ggaaatttcagatgtatcaagacctgttatattttcagcacatggagtacctaaagaagttccagaagaagcaaagttaaaaaaaattttttatatagatgctacttgtcctttagtgtctaaagttcatcgagaaactgaacatctttataaaaatggatttgatattattttaataggacatagaaatcatccagaagttattggaacaatgggacaattaccaaagaactctattaaacttatagaaaatgttgaggaagtaaaaaacttaaaatttaataagccattagcttacgttacacaaacaacgctatctgtggatgacactaaagaaattatagatgcattaaagtttaaatttccagatataaaaggtccaattaaagaggatatttgttatgcaacaacaaatagacaagcggctgtaaaaaaaattgcacctaattgtgaaatgttttttgtaataggaagtagaaattcatcaaattctgcaagacttgttgaggttgccaaaaaatctggttgtaaaaattctgagctcattttttttggaaaaaaagctccactcgaaaaaataaaaaattgtaaaacaataggattatcttctggtgcctctgctcccgaagaattagttcaaaattttatatctgaaataaaaaaagatatgaatgtttctatagaagaagttgtgacagcaaatgaaaaggtagttttcaaattaccgaaagaattaaattaaa

SEQ ID NO: 211831 - DNA, 562 bp, Unknown
  Bacterial polypeptide expressing nucleotide sequence isolated from the Sargasso Sea
atgaaaaataaagaattaaaaatattattatctgcgccccgtggattttgtgccggggtagaaagagcaattgaaatagttgaaaaatctatacaaaaatttggagctccagtttatgtgcgtcatgaaatagtccataacaagtatgttgtagatgatttaaaaaataaaggggcaatatttgtcgaagagctggaggagataaaagataaatcaagaccagtaattttttcagcacatggtgttccaaaaaaaatacctgaagatgcaaaaaattataaaatgacttatgtggatgccacatgtccacttgtttctaaggttcatagagaagcagaaaatcttagtaaagctgggtaccatataattttaattggtcatgaaaatcatccagaagtaattggaactatgggtcaattaaataaaggttctatagatctaatccaaaatgaggaagatgctacaaactatcaaaataaactaaacaaaaaattggcatatatcactcagactactttgtcagttgatgatacaaaagaaataatcaaaattttaaaaacca

SEQ ID NO: 211832 - DNA, 946 bp, Unknown
  Bacterial polypeptide expressing nucleotide sequence isolated from the Sargasso Sea
atgagtaacaaaaatttaaaaatttatttagctgcaccaagaggattttgtgcaggagttgatagagcaattgagattgtgaaaaagagtatagataaatttggtgcccctgtttatgtgagacacgaaattgttcataacaaacatgttgtagaaggtttaaagaagataggtgcaatatttgttgaagaattagatgaaatcaaagataagtctagaccagttattttttcggcgcatggggttccaaaatctgttccagaggaagcttctaatttaaatatgatgtttgtagatgcaacgtgtcctctagtatctaaagttcatagagaagcagaaaacttaaataaacaaggtcatcatatattattaataggacacaaaaaccatccagaagtcataggaactatgggtcaattaccaaaaggttcaatagatttgattgaaaatattgaggatgcaaataagtatgaaaatatttcaaataaacagctatctttcataactcaaacaacactctctgtagatgataccaaagatataattgcagctctaaaatctaaatttccagatattaaagagcctaaaaaagatgacatatgttatgcaacaacaaatagacaatcagcagttaaagaaatagcagataaatgtgatatgttttttgtaataggaagtagaaattcatctaactctgtaagattagtcgaggttgctaaaaattctggttgcaattctgctgagttaatacattcagaaagtccggtgccaatagataagattaaaggatgtaatacgattggaatttcctcaggtgcttcagctccagaaatacttgttgaaaagtttattgcagagttaaaaaatcaatttacagtaaacattgaagaagttgaaattgtaaaggaaaatataacttttaaaattcctggaaaattaaattaat

SEQ ID NO: 211833 - DNA, 919 bp, Unknown
  Bacterial polypeptide expressing nucleotide sequence isolated from the Sargasso Sea
attggccagtccgagaggtttttgtgcaggagtcgaccgggccattaccattgtggaaaaggctttggaaaagttcggaccgcccatttatgtccgccatgaaatcgtccacaaccgccatgtggtcagtcgattgcgggaaaagggggtgatctttgtggacgaactggatcaggtcccggaaggtgcccatgcgatcttttccgcccacggagtttccccacaggtacgggaacaggcgttggaacggaatcttgaagtgcttgacgccacatgcccgcttgtgacgaaggtccatgttgaggccaaacgttatgcacagaaaggattcatcattcttttgatcgggcatcgggaacacgttgaagtcgaaggaacttttggtgaagctccggacaggatcatcatcgttgggactgttgaggaagcggaaaatctggaactccctccattctccaggatcgcctacctgacccaaacgactctctctcttgatgatactgccgacatcatcaaagtgctgcgccgacgtttcccggaaattgagggtcctgccaaggatgacatctgttatgccacccaaaaccgacagaatgctgtcaaacagatttccaaagaagtggatctggtcctcgttgtcggagcagaaaacagctcgaataccttgagactcgtcgaagtcgcagaaagcctggggacccgtgcagttcgtatccaatcttcctcagaactgcaacctgactggttggaagaatgcaacaaaatcggtatcaccgctggagcatcggctccggaagatatcgttcaggggattgtagacaaacttcaaggatggaatcctggatgccgggtacgggagttgaaactgacagaagaacaagtcagctttggtcttccaccccagctaaaaacgccttaa

SEQ ID NO: 211834 - DNA, 772 bp, Unknown
  Bacterial polypeptide expressing nucleotide sequence isolated from the Sargasso Sea
agcaatatttgttaacgaattatctgagataaatgacaaaagtcgaccagtaattttttctgctcacggtgtttcaaaaaaagttatagaagaagcaaaaattgaaaagctattttttgtagatgcaacttgtccattggtatcaaaagttcatagagaggctgaaatgttatataaaaaggaatataagatcttgctaatcgggcataaaggtcatcctgaagtaattggaactatgggtcaattaccagttggcagtgttgaacttatagaaaaaaaagaagatattttaaatttgaggattagcaataaagacaaggttgcttacattactcaaacaactctttcaatagatgatacttctgaaatagtaaatgcattaaaaacaagattcccaaaaattaaagaaccaattaaaagtgatatatgctatgcaacaactaatagacaaaatgcagttaagcaaatagcaaacaaatgtgacttgtttattgttataggtagtagaagttcttctaattcaaaaagacttgtagaagttgccaagaaaagtggttgcaaagagagcttattattacacagtgaagagatattgcccagagagaaaattatgaaggctgaaaatcttggtatttcttcgggtgcatcagctccagaaattttagtagaaaaaatgatagaagaaataaaaaatttaaggtctgttaagattgaagaatttaagacagtggatgagaatgtgtcttttaaattaccatctgaattacgataa

SEQ ID NO: 211835 - DNA, 973 bp, Unknown
  Bacterial polypeptide expressing nucleotide sequence isolated from the Sargasso Sea
attgactaataacaataatcctattgacgtttttcttgcccaacccaggggtttttgcgctggtgtagacagagctatcgctatagttgaagaggcacttcgtattcatggggcaccagtttatgtgcgacatgagattgttcataacaagcgagttattagtatgctcgaggataaaggagcaatatttgttgaagaggtagaggacataccagatggtgctataactatttttagtgcacatggcatttcctctaaagttgaaaaagacgcaatagcaagatctttgccagttattgacgcaacatgccccttggtctctaaggttcatgcggaaggcagaaaacatacagagaatggttgcgaggtaattctcattggtcataagggacacccggaagtagagggcaccatgggtagaattaatggcaccgtctatcttgtaagtaatgtaactgatgcaaaaactatcatggtggaaaatcctaataaattagcttacgttacccaaactacccttagcgtcgacgatacacgcgacattattttagagcttgagcggcgttttccaaaaatcaccggacccaatgtcaaggatatatgttatgctactcagaaccggcaaagtgctgtcaaagaacttacccaacaagttgatctactgatcgttcttggggctagtaacagctcaaactccaatcgccttaaggaaatagggatcgaacttggtgtgccctcttaccttattgacgaagcagaccagatggaacccagctggctaaatggggtttcaaaaataggaattaccgcgggcgcttcggcaccggaggaactggtcgaagagctaatagaaaacttgcgggcaattcgggagatcaatttgaagacctttggagatactatagaggatgtgatattcaaattacccaaagaactgacagagatatctagtcaaacacaagaaattttttag

SEQ ID NO: 211836 - DNA, 877 bp, Unknown
  Bacterial polypeptide expressing nucleotide sequence isolated from the Sargasso Sea
aatggataaaaaattagatttatatttagcgggacctagagggttttgtgctggtgtggaaagggctattttgatggtcaaagaagcaataaaaaaatatggcaaaccagtatatgttcgacatgagattgttcataacaagtttgtagttgaaaatttaaaaaaagaaggtgccatctttattgaagaattagatgaaatgaaagattcaaaaagacctgtgattttttcagcacatggagttccaaaaaaaataccaaataaagcaagagatttgaatttaattttttttgatgctacatgcccacttgtaagtaaaatacatagagaagttgaaaattttgaaaaaaataaactaccaattattttaattggtcatcgtaatcatccagaagttattggaacaatgggacaagttaaatcaaaaatatacctagtagaaaaaattgaagatataaaatctttaccatttaataaaaatgataaagtagcttatgttactcaaacaactttatctatagatgatacaaaggatataattttcgaaattaagaaaaaatttccaaaagcaatagaaccaaaaaaaaatgatatatgttacgcaactactaatagacaggaagcagtaaagcatattgctaaaaagtgtgattattttttagtaattggatcaaataactcctcaaattcattacgtttagtcgaagttgcaaaaaattatggtgcaaaaaaatgcatacttgtagaaaatataaatgaattagactcttcaatatttcaaaacgtggattccataggtataactgctagtgcttcatctccagagatattagtaaaaaatttaattaaactattatctaaaaaatatgagctaaac

SEQ ID NO: 211837 - DNA, 823 bp, Unknown
  Bacterial polypeptide expressing nucleotide sequence isolated from the Sargasso Sea
aatggaaataaggttagctaatactagagggttttgtgccggagtagatagagcaatagagattgtaaaaaaagtcatagagcttcacggtgcccctgtatatgtaaagcatgaagtggttcacaataagacagtggttgaagaattaaaaaatcttggtgctatttttgtagaggatatagaagaaattccagtaggtgaggtggttgtatatagtgcacatggaatttcaaaagcggtagaagttcaatcaggcgaaagaaatctagatgtttttgatgcaacatgccctttggtaagtaaggttcacgcagaagtgcatacctatgcaaaaatgggttttgattgtttacttatcggacataaaaatcatccagaagttgaagggacaatgggacaatttgatacatcttatggaggaacaataacactcgtagaagatatagaagatgctaaaaaattatcctttaaagactcctcaaatttagcttatgtaactcaaacaacattgtctgtagatgatacgaaagaaattaaggactacctattaagacgttttccaaacatcaaaggtccaaaaaaagatgacatttgttatgcaactcagaaccgacaggatgcaattaaacaactagcactagaatccgacctagtcatagtaattgggtctgaaaatagttcaaattccaataggctcagagaaatagcagaaagatctggagtagaagcttatctcatagatagtattgatgacttatctttggattgtctagaaagcaaatccaaaataggtcttacatctggggcttccgcccccagaaca

SEQ ID NO: 211838 - DNA, 1201 bp, Unknown
  Bacterial polypeptide expressing nucleotide sequence isolated from the Sargasso Sea
atggacacccacgccttcaagcgctccctccaccattcagagcgctacaaccggcggggcttcggacgagccgaggaagtggccgagagcctggagcaggcctaccagagcggtttgatcggcacgatccgggacaacggctacaaactcagccatggccggctcacggttcgcctggcggaggccttcgggttctgctggggggtggagcgggccgtggccatggcctacgagacccgcaagcactaccccgccgagcgcctgtggatcaccaatgagatcatccacaacccttcggtgaacgaccatctgcgcgagatggatgttcagttcatccctgttgaacaaggcgtcaaggatttttccggcgtcacctccggtgatgtggtgatccttcccgccttcggcgccaccgttcaggagatgcagctgctcaacgaacggggctgccacatcgtggacaccacctgcccgtgggtctccaaggtatggaccacggtggagaagcacaagaagcacacgatcacctcgatcatccacggcaaggtgaagcatgaggaaaccctcgccaccagctcctttgccgggacttacctggtggttctggacatggaggaagcccagatcgtggcggactacatcctgggcaagggcgaccgtgacgccttcatgcagcgcttctccgccgcctgctcccctggctttgacccggaccgtgatctctcacgcctgggcgtggccaaccagaccacgatgctcaaaagcgaaaccgaagagatcggacgcctgttcgaacgcacgatgctgagcaagtacggcccagccgagctcaacgatcacttcgtggctttcaacaccatctgcgatgccacccaggagcgtcaggacgccatgttttccctcgtggacgaaccgcttgatctgatggtggtaatcggcggcttcaactcctccaacaccacgcacctgcaggagatcgccgtgagccgcggcatccgctccttccacatcgacacgccggatcgtctcgatgcccaggccaatgccattgaacacaaaccgctcaacgaaaatctgcgactcgaaagcaactttctgccggctggaccggtcaccgttggcatcacctccggcgcctcgacaccggatcgggccgtggaagaagtgatcgagaagctgatgctgctcagcgagagctgat

SEQ ID NO: 211839 - DNA, 943 bp, Unknown
  Bacterial polypeptide expressing nucleotide sequence isolated from the Sargasso Sea
atgaataagcgtaaattaaaaatattgctagctgcaccgagaggtttttgtgctggagtagatagggcaattgaaatagtaaaaaaaagcatagaaaaatttggtgcacctgtctacgtaaggcacgaaattgttcataataaacatgttgtagaaagtcttaaaaaaattggggctatttttgttgaagagttaagtgagataaaagataaaaatagaccagttgtattctctgcccacggtgttcctaaatcagtgccggctgaggcagaagatttgaaaatgacttatgttgatgcgacttgtcctttggtatcaaaagtacatcgagaagcagaaaatttacataaagctggcaatcatatattgctgattggacacaaaaatcatccagaggttatagggactattggccagctaccaataggttctatagatctgattgagtcgatagatgacgtagaaaaatacgaaaattcaaaaaaggatattgcttatgtaacgcaaacaactttatctgtagatgatacaaaagacatcatagataaattaaaaattaagtttccaaatataaaggagccaaaaaaagaagatatttgctatgcaacaacaaatagacaaagcgcagttaagaatattgcaaaatcgtgtgaaatgttttttgttataggcagtagaaattcatcaaattctgttagactagtagaagtagcaaaaaactcaggttgtgaaaaatcaactttaattcattccgaaagtacaaccccatttgatgaaattgataagtgtaataccattggtatatcatcaggtgcatctgcgcctgaaattttggttaataatttcataaataatcttaaagaaaaatatgaagttgaaattgaggaagttgaaattataaaagaggatatagtttttaaaattccaaaaaaattaaactgat

SEQ ID NO: 211840 - DNA, 931 bp, Unknown
  Bacterial polypeptide expressing nucleotide sequence isolated from the Sargasso Sea
atggatatcttactcgccaatccacggggtttttgtgcaggtgtcgatcgtgcgataagcatagtgtcccgtgcgctggaaatttacgaaccgcctatttatgtgcgccatgaagtagtgcataacaaatttgtggttgatggtttacgtcgtgccggtgcagtttttgtcgacgagctggacgaagtgccggacgatgccatcgttattttcagtgcccatggtgtgtcacaggccgtgcgtgaaaatgcgaaacaacggggtttgaaagtatttgatgcgacctgcccactggtgactaaggtgcatatggaagtcactcgtgccagtcgtaaaggcatcgaatgcattttgattggccatgccggacaccctgaagtggaaggtactatgggccaatacgataacgccgaaggtggtatttatctggttgagtcggtcgaagatgtcgaacagttgcaggtgaaaaatccggctgctttatgtttcagcagccagaccaccttatccgtagatgacacagcggatgtgattgacgcactgcgccaacgtttcccagatattgaagggccgcgtaaagacgatatttgttatgcgacgcaaaaccggcaggatgcagtacgtgaactttccgccaaaacagaattattgctggtggtcggtgcgaaaaacagcagtaactcaaatcgtttgcgcgaactggctgaaaaaatggggtgtcgctcttacctgattgataccgctgcggatattcagcaggactggctaaaagatgtcaaatctgtcggggttacagcaggtgcttctgcgcctgaagtactggtgcagcaggttgtgcagcgtttgactgaatggggaggcaaacaggtgattgaacatcctggccgtgaagaaaacgttatttttgctgtgccggcagagcttcgctaat

SEQ ID NO: 211841 - DNA, 943 bp, Unknown
  Bacterial polypeptide expressing nucleotide sequence isolated from the Sargasso Sea
gatgacaaaaaaacttaatatatttcttgcaggacctcggggattttgtgcaggtgtagatagggctatagaaatggtaaagggtgctttaaaaaaatatggagcgcccgtatacgttcgtcatgaaatagtgcataataaatttgttgttgaaaatctcaaatcacagggagctatttttgtagaagaattaaatgagattgaagatagaagtaggccagttatcttttctgcacatggtgttccaaaagcagtcccagaggaagcattaagtttaaatttagtatattatgatgcaacatgtccgcttgttagcaaaatccataaagaagttgaaaattttgataaaaaaaatctgccagtaattttaattggtcatagaaatcatcctgaagttattggaactatgggtcaaacagataaaaaaattcatttagtagaaaaagttgaagatgtaaaaaaattgcctttaaaccaaaatgatgagattgcatatgttactcagacaacgctatcagtagatgatacaaaagatataataaaagagataaaattacattttagtaatgtcatagaaccaaaaaaaaatgatatttgttatgctacgacaaatagacaagaagcggttaaaaagatagcgaatcaatgtgattattttttagtaattggtgcaagtaactcatcaaattccctaagattagttgaagtagccaaaaattatggatcaaaaaaagctattttagtagaagatgtagattcattaaatttaaatatatttcaagaatctgaaaatataggaataacagcaagtgcatcatcgccagaagtacttgttaaaaaacttcttgataatttgaaaagaaattttgagatacatataaatgaaggatcttaccaaaaagaagatgtattttttaaagtgccgcaaaaactaaacgtatag

SEQ ID NO: 211842 - DNA, 937 bp, Unknown
  Bacterial polypeptide expressing nucleotide sequence isolated from the Sargasso Sea
atgaagatcagactagctgatactagaggattctgtgcaggggtcgatagagctatcgagatagtaaaaaaggttcttgagctcaatggagcacctgtttacgtaaaacatgaagtcgtacacaataaaacagttgtaaatgagttaaaatcattaggagttgtgtttgtagaagaagttgacgaagttcctaatggtgaaatagttatttatagcgctcacggcgtttctaaagccgttgagaccgattcacatgctaaagatttagaagtattcgacgctacctgcccattagtcagcaaggttcatgctgaagttaacacatacgccaaattaggttatgactgtttattaattggccatttaaatcatccagaggtagaaggaactatgggccaatttgatacttcacacggtggctccataacattgattgaaactttagaggatgtaaaaagtttaaaatttaaaaatggtaaaaatttggctttcgtaactcaaacaacattgtcagttgatgatacggaagaaattatagaattattagtttctagattccctgcaataacaggtcccaaaaaagatgatatttgttacgcaacacaaaatagacaagatgcagtcaagcagttagctttagagtccgatctagttttggttattggttcaatcaacagttctaactccaatcgtttaagggaaattgcagaaaggtcaggagttgactcatatttgttagattctgttgaaaatttagaagaatcttggttagaaggtaaaaagaatattggggtaacttctggagcatcagctcctgagcacctagtaaaagaacttatagactctttagaaaaaaattacggctattctcttcatggcagtaacgaaattatagatgaaggaatagcttttcgcctacctaagggtttaagataac

SEQ ID NO: 211843 - DNA, 757 bp, Unknown
  Bacterial polypeptide expressing nucleotide sequence isolated from the Sargasso Sea
catgaaaacaaaaatccttctcgccaatccaaggggtttctgtgcgggcgtagatcgagcgattgatatagttaatcaagctcttacaaaatttggtccacctatttatgtacgccatgaagttgttcacaataaaactgtagtagaggaactaaaatctaaaggcgtaatttttgttgatgacttaagtcaagtaccagaatcttcttatattatatttagcgctcatggggtttcagaaaaagttgaaaaagaaccagagatatataatttggtttcttttgatgcaacatgtcctttagttacaaaggttcatagtgaagttaagcgacatgtaagggccggaagagatattattttaattggtcatgaaggtcatccagaagttgaggggaccttaggaagacataatccagttaactcaaaaagcaacatctatcttgtacaagataaaaaagaggctgaattacttgaagtttctcaaccagaaaatctgacttatgtcactcaaactacgcttagtctcgacgacactatatccattattgaagtattgtgtaaaaagtttcctaagatacttaaacctaaaggtgacgatatatgttacgcaactcaaaatagacaagatgcagtaaaacaacttgcactggaaagcgaatttattattgttattggttcaagaaatagctctaattcaaatcgccttaaagaattagctgaaaaatgtggagcgacttcaattttaattgatggagct

SEQ ID NO: 211844 - DNA, 949 bp, Unknown
  Bacterial polypeptide expressing nucleotide sequence isolated from the Sargasso Sea
atgaacttaaaattaaaaaaaatattatatctacctcatccgagagggttttgtgctggtgttgatcgagcaataaatattgttgagttatcattagagaaatatgggccgccaatttttgtacgacacgaaattgttcacaacccttgggtaataaaagatttagagtctaaaggtgtgatattcattgaaaaccttaaagatgcccctaagggatctagaataattttctctgcacatggaattcctaaaagtgttttgattgaagctaaggcaaaagaaatgccgtttattgatgcaacatgtcctttagttataaaggttcataatgaagcaaaaaggctttatagggatggagcccatatatttcttattggtcatgaaggtcatccagaagttatagggacaatggggcaaattccgttagatgctattactttaattcaagataaacaagatgttaaagaattgaaaaaaactaactacaagaaggtggctctaatcactcaaaccaccttatcagtcgatgacaccaaagaaattattgatgaattaaaatgtatttttccaaatattattcaacctccaaaagaagatatttgttatgcaactacaaaccgtcaattagcaataaaatctattgcaagtaaatgtgatttaatttatgtcattggcgctaataactcatcaaattcattaagattggttgaagttggaaaaagatctggttgtgaagaaacacatttaatatcagataaatctgaagttaattggaaattggttgaaaaaaaacaaaaaataggattaacggctggcgcgagcgcaccagatatactaattcaagagtttataaatgaattgaatcaattatataatgtagaaattaaaaagatctcagttgctgatgaaaatataacatttaaaatacccagggaacttaatgagtaat

SEQ ID NO: 211845 - DNA, 768 bp, Unknown
  Bacterial polypeptide expressing nucleotide sequence isolated from the Sargasso Sea
catgaaacaaaaaactaagttgtcacttgctaatcctaggggtttttgtgctggtgtagatagggctattgaaatagtaaatagagcacttgatatgtttggaagccccatctatgtaaagcatgaggttgttcacaatgaagctgtagtgaatgatctaaaggaaagaggtgctatatttattgaagaaatatcagatgttcctgatgattcaattattatttttagcgctcatggagtctcacgtaagattgaagaatctgttaaagagagaaatctgcagtttttcgatgctacctgcccacttgttactaaagttcatatggaagtaatcagacatggcagagcaaatagggacataatattaataggccatgagggtcatcctgaagtagagggaacaatgggaagatactttagccaaaatggaaaaatatatcttgttcaggatttagaagaggcaaaggaggtttctgtaaaccaaccggaaaatgttgcctatgtctcacaaactactttaagtgtagatgaaacaaaagatatcataagtgagttgactgagaagtttccaagtattgtaggtccaaaaaaagatgatatttgttatgccacccaaaacaggcaggatgcagtgaaacaacttgcactcgaaacagattacattattgttgttggctcaaaagcaagttcaaattcaaatcgcctaaaggagcttgcaaataagtgtggcgtcaactcggtcctaatagatgaatttagtgatcttga

SEQ ID NO: 211846 - DNA, 940 bp, Unknown
  Bacterial polypeptide expressing nucleotide sequence isolated from the Sargasso Sea
atgaacaaagagataaaactagctaatccaaggggtttttgtgctggcgttgatagagcaatagatattgttaataaggcattagatatttacggagcaccagtatatgtaaaacatgaagttgtccataataaagttgttgtaaatgatttaaaaaagaaaggggcaatttttgttgaaaacattgatgaaatacctgataactctcttgtaatatttagtgctcatggtgtttcaagtgaagttgaagaaactacaaaatctagaaatttaaattattttgatgcaacttgtcctctggtaacaaaagtccatatggaagtcatcaaacatgcaaaagccaatagagacattatattaattggtcatgagggtcatccagaagtggaaggtactatggggcgacatgttaattcaaaaaacagcaatatatatttagttcaggatgaaaaagatgctagaaatttgcaaattgaaaacacaagagaaatagcattggtaacacagaccactttaagtgttgatgagaccgtagctattattgatattttaaaaagcaaatttcctaatattaatcttcctaaaaaagatgacatttgttacgcaacacaaaatagacaagatgctgttaaacaattggctttagaatcagattatattattgttgttggttcaaaaaatagctcaaactcaaatcgattaaaagaattggctgaaaagtgtggatgtaagtctgccttaatagatgaatttgctgatttggatcttgaagagctttcgtcatgctcaaatatttcgattacagcaggagcatctgctcctgaatcaagagttgttgaaattgcaaaatctcttgaagcccatattggtgcaaaaataatggaacatggagaagataaagaaaatatttactttaaactccctgcagaattaagataaa

SEQ ID NO: 211847 - DNA, 940 bp, Unknown
  Bacterial polypeptide expressing nucleotide sequence isolated from the Sargasso Sea
atgactaaacagattaaattagcaaatcctcgtggattctgtgctggtgttgatagagcaattgatattgtaaataaagctttggatatatatggagcgccagtttatgtaaaacatgaggttgttcataataaagttgttgtggcagatttaagggacagaggtgctatttttgtagaagaaattgatgaaattccagacgattcacttgtaatttttagcgcacatggcgtttcaagcgctgtagaagaagaaacaaaatcaaggaatttaaattttttcgacgcaacatgtccgcttgtcacaaaagttcatatggaagtcagaaagcatgcaaaagctagtaaagatattattctggttggtcacgaaggtcatccagaagttgaaggaacaatgggtagacacataaattctgataatagttcaatatatcttgttcaaaatgagttagatgctgaaaatatagaaattaataatccaacaaaattagctttagttactcaaaccactttaagcgttgatgaaacaaaatcaattattgatattttgaaaaataggtttccaagtatagatataccaaaaaaggacgatatttgttatgccacacaaaatcgacaagatgccgtaaagcagcttgcactagaatcagattttatgatagttgttggttcaaaaaatagttctaattcaaatagacttagtgagcttgctgaaaaatgtggttgtagatcaattctaatcgatgaattcacagatatcgatttagatgatttaaaaaattattctaaaatttctattactgcaggtgcttcagctcctgaatcaaaagttatggaaattgcaaaatctttagagctacatacagatgcaaaaattattgagcatggtgaagacaatgaagatatttactttaaattacctccagggttgagataaa

SEQ ID NO: 211848 - DNA, 943 bp, Unknown
  Bacterial polypeptide expressing nucleotide sequence isolated from the Sargasso Sea
tatgaacaaacataaattaaaaatattacttgctggaccaagaggtttttgtgcgggcgttgatagagctattgaaatagtaaaaaaaagtatagataaatttggtgctccagtttatgtaagacatgaaatcgttcacaataaacacgttgtggaaagtttaaaaaaaattggtgcaatttttgttgaagaattaagtgagatcaaggataaaactagacctgtaatattttctgctcatggagttccaaaatcagttccggctgaagcagaaggtttaaatatgaattatgtagatgcaacttgtcctttggtatcaaaagttcatcgtgaagctgaaaacttatataaatcaggaaatcatattttattaattggccataaaaatcatcctgaagtaataggaactttaggacagctgcccgacggagctatagatttaatcgagtctattgaagacgtagaaaaatataacaatgaaaataaaaatattgcttatgttactcagacaactttatctgtagatgatactaaggaaattataaataaattaaaaaataagtttccagaaatcaaagaaccgagaaaagaggatatttgctatgctacaacaaatagacagagtgcagtaaaaaatattgctaaattatgtgaaatgttttttgttataggcagcagaaactcttcaaattctgtaagattagttgaagttgctaaaaattctggttgtaaaaaatcaactttaatacattctgaaagttttactccttttgaagaaatagataaatgtagcactatcggtatttcatcaggtgcttccgctcctgaaattttagtagataattttattagtaatcttaaagaaaaatatgaggttgaagttgaggaagttgaaattataaaagaaaatataacttttaaaattccaaaaaaattaaattaa

SEQ ID NO: 211849 - DNA, 961 bp, Unknown
  Bacterial polypeptide expressing nucleotide sequence isolated from the Sargasso Sea
atgcaattaaaaaaaaaatctttgaaaattattttagctcagcctcgagggttttgtgcaggagttgaaagagcgattgaaatcgtagaaagggccttgaaaatatatggtcctcctgtttatgtccgccatgaaattgttcacaataaaagagttgttaataatctaagttcgaaaggtgctgtatttgttaaagagttagaccagattccacagggagctgtaactgtttttagtgctcatggtgtatcacaaaaagttgaagatacagctggtgtaagaaaacttcctgttcttgatgcaacatgccccttagttgctaaagttcataaagaaggacaacgttattccaacgatgggtttgaagttatattgattggtcacgaaggtcatccagaagttgagggtacgatgggaagaataccaggtccagtatatttagtttcaaacacaaatgatgtaaagagacttaaggtaaaaaacccagataaactgtcatatgtaagtcagacaactttatctgtcgatgatacgagagacgttataaatgcacttcaggaaagatttcctaaaattgtgggtcctgatgtgaaggatatttgttacgcaactcaaaaccgtcagtcagctgtgagagatttggttaaaagtgttgatttagtcttagttgttggtgctagaaatagttcgaactctaatagactgaaagatattggttccgagtctggtgtaaacacacatttgatagagacagctgatgacatgtctttaagttggtttgaaaatgttgactccgttggaataacctctggtgcatccacgcctgacgagttagttaaagaagtaattgatagaatttcaactttcacttcaatagagatagaaaaacaatcaggtaaagaagaaaatgttgtttttaaattaccaaaagaactgttgaattatgaaatggcaaattaat

SEQ ID NO: 211850 - DNA, 946 bp, Unknown
  Bacterial polypeptide expressing nucleotide sequence isolated from the Sargasso Sea
atgaaaagcaaagaaattaaaattttacttgctgccccacgtggcttctgcgctggcgtagaacgagccatagaaattgtaaaaaaaagtattaataaatatggggcaccagtctatgtaaggcatgaaattgttcacaataaacatgtggttgatagtctaaaagaaattggagctatttttgttgaagaacttcatgaaataaaagataaaactagacctgtaattttttctgctcacggtgtaccaaaaaaagttcctattgaagcagaaaattttaaaatggaatatgtggatgcaacatgcccactggtatcaaaggtccatagagaagccgaaaatttaaacaaaaatggagtacagattttattaattggccacaaaaatcacccagaagttataggaactatgggtcaaattccagaaggagaaatagatcttattgaaaatattgatgatgcaaataattatgaaaataaatctaaaaaaaaattagcttttgttacacaaacaacactttctgttgatgatacaaaagaaataatatcagctttaaagaaaaaatttccggaaattagagaaccaaagaaagaagacatttgttatgcaacaacaaatagacaggctgctgttaaaaaaatcgcagaaaaatgtgatatgttttttgttattggaagcagaaattcatctaactccctgagattagtagaagttgcaaaaaattctggatgtataaattcaagattaattcattctgaaagtacagtaccttttgaagagattgaaaagtataaaattataggaatttcatcaggagcttctgcacctgaaatattggtagacaattttataaataatttaaaaaaacaatttacagtagcgatagaagaaatagaaatagtaaaagaaaatataacatttaaaattccaggaaaattaaactaga

SEQ ID NO: 211851 - DNA, 946 bp, Unknown
  Bacterial polypeptide expressing nucleotide sequence isolated from the Sargasso Sea
tatgcgagtcatccttgctcaaccccgcggcttttgtgcgggtgttgttcgtgcaatcgaaatcgtcgatcgcgcattacagcaacacggcgcgcccgtgtatgttcgccacgagattgttcacaatcgccacgtggtggacaacctgcgccagaaaggcgcgcgctttgtcgaagaactcgatgaagtgccacatggcgccgtggcgattttcagcgcgcacggtgtcgcgcagaccgtcgagcgcgacgcggaacagcgcggcctcgacgtgctcgacgcaacctgcccgctcgtgaccaaggttcacgtgcaaggacgccaatatgtggcggcgggtcgtaccctgattctgattggccacgccggccatccggaagtggaaggcacgatcggccaaatccccggcaaggtgttgctggtgcagagcgaggccgaggtcgcccagctggacctgccgctcgatacgccgcttgcgtacgtcacgcagactacgctgtcggtcgacgacacacgtggcatcatcgacgccctgctgcgccgtttcaccgacatcgtcggtcccgacacgcgcgacatctgctacgccacgcaaaatcgccaggcggcggtgcgcgagttgagcaaagaagtcgatgtgctgctggtggtgggcgcgaccaatagttcgaactcgaaccggctgcgcgaaatcggcagcgaaaccggcgtggcgagttacctcgttgccgacggttcggaagtaaagccggagtggtttgccaacgtgcaaactgtcggcattacggctggtgcttcagcaccggaagaaatggtgaagaacgtaatcgatgcgctgcgcgcattggggcccgtcgatgtcacgacgatggcgggccgtgaagaaaaagtcgaattcaagttgccatcgaaactgatgcaaccactcgctgcacgcgaagtttaa

SEQ ID NO: 211852 - DNA, 943 bp, Unknown
  Bacterial polypeptide expressing nucleotide sequence isolated from the Sargasso Sea
atgaaaaaaaaaatccttctcgctaatccaagaggcttctgtgcgggtgtggatagggcaattgatatagttaatcaagctcttgataagtttggaccacctatttatgttcgtcatgaagttgttcacaatcaaactgttgttgacgaattaaaatctaaaggagtaatctttgtcgatgagcttagtcaagtcccagaatcttcatatgttatatttagcgctcatggggtttcagaaaaagttgagaaagagccagaaatatataatttagtctctttcgatgccacatgtcctttagttacaaaagttcacaatgaagtgaagagacatgcaagagcaggaagagatattattttaattggtcacgagggtcatccagaagttgaggggaccctcggaagacataatccgataaactttaaaagtaatatatatcttgtgcaggacgagaaagaggctgaattacttgaggtatcacaaccagaaaatttaacctatgtcactcaaacaacactcagtcttgacgatactatatccatagtagaaatattatttcaaaaatttccaaaaatccttaaacctaaaagtgatgatatatgttatgcaactcaaaatagacaggatgctgtgaagcaacttgctttggaaagtgaatttattattgttattggctctaaaaatagctcaaattcaaatcgtttaaaagaattggctgaaaaatgtggagccacatctattttaattgatggagctaatgaaatagatttcgaaaagctttctcaattcaaaagcataggaattacagcgggtgcatctgccccagagtctatcgttcaaaaagttgtgaaagttgtaagtaataaattcaatgcaattcctgaggagcttggagaaaataaggagaacatatatttcagattaccccctgaacttcgatgac

SEQ ID NO: 211853 - DNA, 904 bp, Unknown
  Bacterial polypeptide expressing nucleotide sequence isolated from the Sargasso Sea
aatgaaaaacaaacaaattaaaattttactttctgctccaagaggtttttgcgctggtgttgagagagctatagagattgtagaaaaatctattcaaaaatatggatcgccagtttatgttagacacgaaatcgttcataacaagcatgttgttgataatttaataaataaaggcgctatctttgttgaagaattagaggaaattaatgataaatctagacctgttattttttctgcgcacggtgttccaaaaaaaataccagaagatgctgaaaattataaaatgacttatgtagatgctacttgtccactagtttctaaagttcatagagaagcggaaaacttaaataaggctggttatcatattgttttgattggacatgaaaaccatccagaagtaataggcactatgggccaattacctaaaggatctattgatttggttcaaaatgaagctgaagcaatggagtataaaaccaatcataaagaaaaattggcttatataactcaaacaacactatctgttgatgacactaaagaaataataaaaattttgaaagatagatatacaaacattaaagagccagcaaaagaggacatttgttatgcaacaactaatagacaaatggcagtaaaaaatattgcaaaaaactgtgatatgttttttgtaataggtagtagaaactcttcgaattctgttagacttgttgaagtagcaaaaaaatcaggttgtcaaaattcacaactttttcattctgaaagtgaaattccttttgatcaaatacagaattcaaatactattggtatatcatcaggagcatcagcacccgaaattcttgtagaagattttattaatgaattaaacaaaaaattttctataattgttgaggaagtagaaattata

SEQ ID NO: 211854 - DNA, 664 bp, Unknown
  Bacterial polypeptide expressing nucleotide sequence isolated from the Sargasso Sea
tccttttgtagatgcaacatgtccattagtttctaaagtacatagagagtccgaacaattatataaaaatggttttgacatatttttaattggacacaaaaaccaccctgaggttattggtacaatgggtcaacttccaaaaggatctattaaacttattgaaacaaaaaatgatgttgaccttattaaacaggagaattttaaaaaacctttagcatatataactcaaacaactctttccgtagatgatacagctgaaataatcgcagctcttaaaaacaaatttccaaaaatcaaagcacctattaaagaggatatatgttatgcaactacaaacagacagtctgctgttaaggaaatagcttctaaatgcgatatgttttttgtagtaggaagtcgaaactcatccaattctgtaagattagttgaagttgcaaaaaaagctggttgcaataattctcatttaatgcactctgagaaagagattccttaccacgaaataaatgactctagtacaatcggaatttcatctggggcttcagcgcctgagaaattagttcaaacattacttgataacataaaaaaaaatcgaaaagtatctatagaagaagttgtggttgctgaagagaaggttgtttttaaattaccaaaagaactttactga

SEQ ID NO: 211855 - DNA, 767 bp, Unknown
  Bacterial polypeptide expressing nucleotide sequence isolated from the Sargasso Sea
gatggaccagcaaatagaagcccaaaaagcaatcaatcctggaaattcactggaagtgatattggccagtccgagaggtttttgtgcaggagtcgaccgggccattaccattgtggaaaaggctttggaaaagttcggaccgcccatttatgtccgccatgaaatcgtccacaaccgccatgtggtcagccgattgcgggaaaagggggtgatatttgtggacgaactggatcaggtcccggaaggtgcccatgcgatcttttccgcccacggagtttccccgcaggtacgggaacaggcaatggaacggaatcttgaagtgcttgacgccacatgcccgcttgtgaccaaggtccatgttgaggccaaacgttatgctcagaaagaattcatcattcttctgatcgggcatcgggaacacgttgaagtcgaaggaacttttggtgaagctccggacaggatcatcatcgttgggactgttgaggaagcggaaaatctggaactccctccatcctccaggatcgcctacctgacccaaacgactctctctcttgatgatactgccgacatcatcaaagtgctgtgccgacgtttcccggaaattgagggtcctgccaaggatgacatctgttacgccacccaaaaccgacagaatgctgtcaaacagatttccaaagaagtggatctggtcctcgttgtcggagcagaaaacagctcgaataccttgagactcgtcgaagtcgcagaaagcctggggacccgtgcag

SEQ ID NO: 211856 - DNA, 925 bp, Unknown
  Bacterial polypeptide expressing nucleotide sequence isolated from the Sargasso Sea
ttgaaaagagagattaagttagcaaatccaagaggattctgtgctggagtagatcgtgccattgaaattgtaaatcaggcattattgaaattcggtccgccagtctatgtcagacatgaagtagttcataatcgaaatgttgtagaagatctaaaatctaaaggagcaatttttgttgaacaaattgatgaaataccagaaggtgcaataactattttttctgctcatggagtttctaaaaaagttgtcgatgatgctgaagtaaagaacttgaattattttgatgcaacatgccctctggttacaaaagttcacatggaggtcatcagatatgcaaggcaaggtttggatataattttagttgggcatgataatcatcctgaagtggaaggaactctaggaagatttcctcacgactcaaaaggtaaaatttatttagttgagtcagaaattgatgcaaaaaatattgaaatagatcagccttccaatctggctatggttactcaaacaactttatctgtggatgatacaaaatcgattgtagatattttgaaaaagcgtttccccagactaataagcccatcttctgatgatatttgctacgcaacacaaaatagacaagatgctgttaaacagctcgcattagaaacagaactgataataattgtgggttctaacaacagttctaactcaaatagactaaaagaattgtcagaaaattgtggtgtaaaatccatattagttgatgatcctgatgagatagctcctgaacaactagatggaattttcaaattaggaatatccgctggggcttctgctcccgagtctttagttcaaagcattgtttcaaaatgtcaaaaattaggatttgaaatgtctcaggaactagacggcttgaaagaatcggtaaattttaaacttccaa

SEQ ID NO: 211857 - DNA, 898 bp, Unknown
  Bacterial polypeptide expressing nucleotide sequence isolated from the Sargasso Sea
aggagtagatagagcaatagagattgtaaaaaaagttctcgagatgaatggcgcacctgtttatgtaaaacatgaagtagttcataacaagactgtagtaaatgaactaaaatccttaggagcaatatttgttgaggaaattgaggatgtacctgatggcgagatagttatttatagtgctcatggagtttctaaagtagttgaatcggactcaaaagaaaaaagtctagatgtatttgatgccacttgtcctttagttagtaaggtgcatgctgaagtaaatacgtatgcaaaattaggttatgactgtttgttggtaggacatttaaatcatccagaggtagaaggcacaatgggtcaatttgatacttcttacggcggcaccataactttgattgagactttagatgatgtaaataaattaaaatttgcagacggaaagaacctggcatttgtaacacaaaccactttatcagttgatgatactttggagataactaatcttctagtaactaaatttccagacataacgggacctaagaaagatgatatttgctacgctactcaaaataggcaagatgctgttaaacaattagcattagaatctgatttggtattagttatcggctcaattaatagttcaaattcaaatcgtttaagggaaattgcagaaagatcaggagtagactcttatctaatagactcctctgatgatttacaagattcatggttgaaagggaaagagaatataggtgtcacttcaggagcatctgcacctgaacatttagtaagagagcttatcaattctttagagaaagactatggctactctcttcaaggcagcaatgaaataactgatgaaggaatagcttttcgcttacctaaaggtttaagataa

SEQ ID NO: 211858 - DNA, 937 bp, Unknown
  Bacterial polypeptide expressing nucleotide sequence isolated from the Sargasso Sea
gatgaatattcttctggccaatccccgtggtttctgtgccggtgtcgaccgggcgatcagcatcgtcgagagcgcgctggagaagttcggcgcccccatctatgtccgtcacgaggtggtgcacaaccgctacgtggtgaacaagctcaaggaggcgggcgccgtcttcgtcgaagagctggatgaggtgccggacgacagcatcgtcatcttctccgcccacggcgtctccaaagcggtgcgcgagatggccaagtcccgtgccctcaaggtgttcgatgccacttgcccgctggtgaccaaggtgcacatggaggtccatcgcgccagtcgcaagggctccgaggccgtgctgatcggtcatgccggtcaccccgaggtgatcggcaccatgggtcagtacgagaatcgcgaggggggcatgtatctggtggagacgccggaagacgtggccaagctcaaggtgaagaacccggacgacctctgcttcgtcacccagaccaccctcagcgtggacgagacctcggacgtcatcgatgccttgcgtgcccacttccccaagatccaggggccgcgcaaggacgacatctgttacgccacccagaaccgccaggacgcggtgcgggagatggcggggctggtggacgccatgctggtggtggggtcgcgcaactcctccaactccaaccgcttgcgggagctggccgagaaggtgggcgccaaagcctatctcatcgacgacgcctccatgatcgaggccgactggctggcgggagtagaggcgatcggcgtcaccgccggcgcttccgcccccgaggtgctggtgcagtcagtcatcacgcgcctgcgtgagctgggcggcaaggtggtggccgagcatcccggtcgtgaagagaacgtggtgtttgaggtgccgccggagctgcgcatcctttga

SEQ ID NO: 211859 - DNA, 946 bp, Unknown
  Bacterial polypeptide expressing nucleotide sequence isolated from the Sargasso Sea
atgagaaatatttggataacaaacgaaataattcataatccctcggttaatgatcatttaagaaaaatgaatgtaaaattcatttcatctaaaaatggaattaaagatttttctttagtttctaatggggatgtcgttatactccctgctttcggagccactgttcaagaaatgaaactcttgcatgagaaaggttgtcatatcattgatacaacttgtccatgggtatctaaggtttggcatacagttgaaaaacataaaaaacatgttttcacatccattattcacggaaaatttaaacatgaagagactctcgctacaagttcattcgcaggtaaatatttagttgtacttgatctagaagaagcgaactatgtttctgaatatattctggggagaggtaatagaaatgagtttatgaacaaatttgctaaagcttgttctaatggatttgatcctgataaagatttagatagagtgggagttgcaaatcagacaactatgcttaagagcgagactgaggaaattggaaaggtttttgaaaggacgatgttaaagaaatttggaccagaaaacttaaatagtcactttttagcttttaatactatttgtgatgcaacagaagaaaggcaagatgcaatgttttctttggttgatgaagaccttgatattttagtagttattggaggcttcaattcttctaatactactcacctacaagaaatagcaattaataaaaatatttcttcttttcacattgatacgccagagaggatatcagttaaagaaaactcaatatttcataaaccattaggatcagaattagaacttaaaaataattttctacctaatggaaaaattaatgttggaattacttcaggtgcatctactcccgataaggttgttgcagatgttattgaaaaattaattgatattgcttcctgaa

SEQ ID NO: 211860 - DNA, 364 bp, Unknown
  Bacterial polypeptide expressing nucleotide sequence isolated from the Sargasso Sea
atgatagaagataataaaaatttaaatttaaataaaaatctttatctagcttcgccaagaggtttttgtgcaggagtagagagagctattaaaattgttgaacaagcaattaaaattcatggaaaacctgtttatgtgaaacatgaaattgtccataataaacacgtagtaaaaagattatctgaagatggcgcaatttttgttgagtcatttcaggatgtaccaaaaaactctattataatattttctgcacatggtgtagcaaaaaaagttgttaataaagctaaggagcatgatttaaatatttttgatgctacatgccctttagtaactaaggttcatcttgaggcaattaaattacata

SEQ ID NO: 211861 - DNA, 706 bp, Unknown
  Bacterial polypeptide expressing nucleotide sequence isolated from the Sargasso Sea
atgaataaagaaataaaattagcaaatccaaggggtttttgtgctggtgttgatagggctattgatattgttaataaggccctagatatttatggggcgccagtttatgtaaaacatgaggttgttcataacaaagtcgtagtagatgatcttaaaaaaagaggcgctatatttgttgaagaaataaatgaaatacctgatgattctttggtaatattcagcgctcatggagtttctagagaggttgaagagagtacaaagtctagaaatctaaattattttgatgctacttgcccactagttactaaagttcacatggaggttaggaagcatgcaaatgctaataaggatattattttagttggccatgaaggacacccagaagtcgaaggtactatgggtaggcatgaaaattctgagaatagttcaatatatttagttgaaaatgagaacgatgcaaaaaatataaggataaccaaaaaaaataatcttgctgtggttacccaaaccacgcttagtgttgatgaaacaaaatctataattgatatcttaaaggatagatttccaaacataagtattccaaaaaaagatgatatttgttatgcaactcaaaatagacaggatgcgggtaagcaattagccttagaaatcagatttatgattgtttgtagggatcaaaaaatagttcaaactcttatagattaag

SEQ ID NO: 211862 - DNA, 475 bp, Unknown
  Bacterial polypeptide expressing nucleotide sequence isolated from the Sargasso Sea
gatgaatattattttggcaaacccaagaggattttgtgcaggcgtagatagagctattgaaataactaataaagcattagatatttttggagctccaatatacgtaaagcatgaaattgttcataataaatatgttgtggatgaattaaaagaaaaaggtgtaatttttatcgaggacgtgaaaaaaatccctcaccattcaatattgatctatagtgctcatggtgtttcagaaaaaattatccaagagtcaaacgaaagaaatttacaagtatttaatgcaacatgtcctttagtcactaaggtacatatggaagttgcaagattgtcaaaaaaaagaataaatactattttgattggacataaaggtcatcctgaagttgaaggaactatcggtagatataaaccatcatcaaaatcaaaaattattttagttgaaaacgaagatgatgtagaaatcttaaatttgatataa

SEQ ID NO: 211863 - DNA, 1198 bp, Unknown
  Bacterial polypeptide expressing nucleotide sequence isolated from the Sargasso Sea
atggacactcaagcttttagaagatctcttcatcattctgacagatacaatagaaggggttttgattctccaacaaaaagagctcaagcattagaacaagcttaccaaagtgatttgataagttccataagagataatggttttaattacactaagggcagactaaacataaagctggccaaagcttttgggttttgttggggagttgaaagagctgtagcgatggcttatgagactagaagacattactctaatgagaatatttggataacaaacgaaataattcataacccctcagttaatgaccatttaaggaaaatgaatgtaaaattcatttcagctaaaaatggaattaaagatttttcgttagtttctaaaggagatgtagttatattgcctgctttcggagctactgttcaagaaatgaaactccttcatgagaaaggatgccatattatagatacaacttgtccttgggtttctaaggtttggcatactgttgagaaacataaaaaacatgttttcacatctataattcatgggaaatttaagcatgaagagactcttgctactagctcatttgcaggaaagtatttagttgtacttgatctagaagaggcaaattatgtatctgaatatattcttggtagaggaaacagaaatgagtttatgaacaaatttgctaaagcttgttctaatggatttgatcctgataaagatttagatagagtcggagttgctaaccagacaactatgctcaaaagtgagactgaggaaattggaaaagtttttgaaaaaactatgttaaaaaaatttggaccagagaacctaaatagtcactttttggcgtttaatacaatttgtgacgcaactgaagagagacaagatgcaatgttttctttggttgatgaagatctagatattctggttgttataggaggcttcaattcttctaatactactcatttacaagaaatagcaattactaagaatattgcttcttttcacatagatacgcctgaaaggatatctgtagaagaaaactcaatatttcataaaccattaggattagatttggaacttaaaaataattttttacctagtggaaatattaatgttggaattacctcaggtgcatctactcctgacaaggtagttgctgatgttattgaaaagttaattagcatagcttcctaaa

SEQ ID NO: 211864 - DNA, 949 bp, Unknown
  Bacterial polypeptide expressing nucleotide sequence isolated from the Sargasso Sea
aatgaatcataaaactaagctgtcacttgcaaaccctagaggtttttgtgcaggtgtagatagagctattgaaatagtgaatagagctcttgacatgtttgggagtcctatttatgtaaagcatgaagttgttcacaatgaagctgtagtaagtgatttaaagaaaagaggcgctatatttattgaagaaatttcagatgttcccgatgattcaattattattttcagtgctcatggggtctcaagcaagattgaagaatctgttaaagctagaaatctccagttttttgatgcaacttgtccgcttgtaacaaaagttcatatggaggttatgcggcatggaagagcaaatagggacattatattaatcggtcatgaaggtcatcccgaggttgagggcacaatgggaagatactttagtaaagatggaaaaatatatttagttcaggatttagaagaagctatgcaagtttctgtaagccaaccagagaatctcgcatatgttacgcaaactacactaagtgttgatgaaacaaaagatatcattaatgtgttaacgagaaagttcccaaatataacagctccaaaaaaagacgatatttgttatgcaacccaaaacagacaagatgctgtcaagcaactagctcttgagacagatttcattattgttgtcggctcaaaagcaagctcgaattcaaatcgcttaaaagagcttgctaataagtgtggagttaattctgtcttaatagatgaattcagtgatctcgacttggatgaattaaaagactgtaagaatattggcctaacggctggagcatctgcaccagaatcaaaagttcaagaaataatctcaaatctaagtatttttttagatgcagagatagaagagaagggcggagtgaaagagaatattgcttttaaattacctccagagttaagagcaagttaa

SEQ ID NO: 211865 - DNA, 931 bp, Unknown
  Bacterial polypeptide expressing nucleotide sequence isolated from the Sargasso Sea
atggacattttactggcgaatccgcgtggcttttgtgccggtgtcgaccgggcaatcagcattgttgaacgggcactggagctgtatgagccgcctatttatgtgcggcatgaagtagtacacaataagtttgtcgtagacggcctgcgccggcgcggcgcggtgtttgttgacgagctaaacgaagtacccgatggcaatattgtgattttcagtgcccacggtgtatcgcaggcggtgcgtgaaaatgcccgccagcgcggtttaaaggtatttgacgccacctgcccattggtaaccaaagtgcatatggaagttacccgtgccagtcgtaaaggcatagagtgtattctgataggtcacgccggtcacccagaggtggaaggcacgatgggccagtatgataaccccgaaggtggcatttatctggttgaatcggcggaagatgttgcaacgctcagtgttaaaaatccggcccagctgtgttttagcagccagacgacattatcggtagatgatactgcagatgtgatagatgcgctgcgttcgcggtttcctgacattgaagggccgcgcaaagatgacatttgttacgcgacgcaaaatcgtcaggatgctgtgcgtgatttagccgctaaagctgatttgctgctggtggtgggtgcgaagaacagcagtaattcaaaccgtttacgcgaactggccgataaaatgggctgcactgcttatcttatcgacactgctgctgatattcagcaagcctggttagaaggtgtgcgggctgttggtgtaaccgccggcgcttcagcacctgaagtgctggtgcaacaggtggttaagcaattacagcaatggggtggtaagacggtaagtgaaaaccccggccgtgaagaaaatgtggtgtttgctataccggcagagttacgctgat

SEQ ID NO: 211866 - DNA, 949 bp, Unknown
  Bacterial polypeptide expressing nucleotide sequence isolated from the Sargasso Sea
aatgagcaaaaagattaaagaaatagttttagcaaaccctagaggtttctgcgcaggagttgatagagctatagatatagttgaaaagtcattagaaaaatatgatgagcctgtatttgtaaggcatcaagttgttcataataaaagagtagtagaaagcttagaaaaaaaaggagttaagtttgtaaaagaggttagtgagataccagataacgcagtagctatttttagtgcacatggagttagcagtgaagttgagaatgaagcaaaatctagagattttatgtattttgatgctacatgcccgcttgtcacaaaagttcatcttgaagttcaaaaacatgcaaaaaagggcagagacattattctgattgggcataaaggccatcctgaagttgtaggaacattaggaaggcatccaaaggattcagggacaaatatatatttaatagaaacaagagaagacatagatgaattagaagtaaattcagactctttagcatatgtaactcaaaccacattatctgtagatgaaacaacagaactgatagaaattttaaagagtaagttccctaatattatcggtccaagtgctgatgatatttgttatgcaactcaaaatagacaggacgcagttaaacaattatctcttgaatgtgaagttgtgctggttattggctcaaagacaagctcaaactctaataggcttaaagagttagcagagaaatgtggcacaaaatcatttttgattgatgataaagccgatatagaaatagacgaacttaaatccgtagcttctgttggtattacagctggagcttctgctcctgaagatatagttcaagaagtaatctcttatttagtcccattaggctataaccatgttcgaaatttatcagaaaataaagaaagcatgacctttaagttaccaagagagctagccgattaa

SEQ ID NO: 211867 - DNA, 946 bp, Unknown
  Bacterial polypeptide expressing nucleotide sequence isolated from the Sargasso Sea
atgaaaaataaaccgttaaagatattgctttctgcgcccagaggcttttgtgcaggtgttgaaagagctatagaaattgtagaaaaatcaattaaaaaatatggcgctccagtttatgttcgtcatgaaattgttcataataaatatgtagttgatgatttaaaaaacaaaggtgcaatctttgttgaagaactcgaagaaataacagatagaacaagaccagttattttttcagcacatggtgtccccaaaaaaatacctgaggatgctaaaaactataatatgacttatatagatgctacgtgtccattagtatccaaagtacatagagaagctgaaaatttacataaagctggctatcatttaattttgataggacatgaaaatcaccctgaagtaattggcactatgggccagttacctaaaggctcaattgatcttgttcaaaatgaggatgaggcaaaaaaatacaaacctcaaaataacaaaaaaatttcatatgttactcaaacgacattatcggtagacgatacaaaagatataattcagatcttaaaagatagatttcctgatattaaagaaccaatgaaagaagatatttgttacgctacaacgaatagacaaatggctgtcaaaaatattgcaaaaaaatgtgatttattttttgtaattggcagtagaaattcatctaattcagttagattagttgaagttgcaagaaaatccggttgttcaaattcactattaattcattcgcaaagtgaaataccattcgatttaattcaaaattcaaatacaattggtatttcctctggggcttctgcacctgaaattttagtaaataattttataaataagctaaaaaataaatttacagtcagtatagatgaagtagaaataatcaaagaaaacgttgtttttaaagcaccaaaaaaactaaactaaa

SEQ ID NO: 211868 - DNA, 946 bp, Unknown
  Bacterial polypeptide expressing nucleotide sequence isolated from the Sargasso Sea
aatgaaaaataaaaacttaaaaattttattagcttctccaaggggtttttgtgctggtgtagatcgtgcaatagaaatagtaaaaaaaagtatagataaatacggatcacctgtttatgtaagacatgaaattgttcataacaaacatgtggtagatggtttaaaaaaaataggagctatatttgtagaagaattagaagaaataaaagataaaactagaccagttattttttctgcccatggagttccaaaatctgttccgaaagaagcatcaaatctaaatatgacttatgttgatgctacctgcccattagtttctaaagttcatagagaagccgaaaatttatataaaagtggttctcatatattgcttattggacataaaaatcatccagaagtaattggtaccatgggtcaattacctaatgaaagtatagaccttattgaaagtgttgaagatgcagaaaaatatttaaaaaaaaatagaaataaattagcttatattacacaaactacattatcggtagatgataccagagaaattataaatgttttaaaaaaaaaatttccagaaattaatgaaccaaaaaaagaagatatttgttatgctactacaaatagacaatcggctgtcaaaaagattgcaaaaaactgtgatatgttttttgttataggaagtagaaattcatctaattcagtgaggttggtagaagtagcaaaaaataatggatgtgataaatcagaactaattcattctgaaagtaaagttccattagataaaattgctaattgcaaaactataggaatttcttctggagcttcagcaccagaaatattagtagaagaatttattaatgaattgaaaaaagaatttattttagagattgaagaagtagaaataattaaagaaaatataacatttaaaattcctggaaagttgaactaa

SEQ ID NO: 211869 - DNA, 946 bp, Unknown
  Bacterial polypeptide expressing nucleotide sequence isolated from the Sargasso Sea
atgaaaaaagaacttaaaatttatttagcatcaccacgaggattttgtgctggtgttaaaagagcaattgaaatagttgaaaaatctatcagcaagtttggagctccggtatatgttcgtcatgaaatagtgcacaataaacaggttgttgaagagttaaaagaaaaaggtgcaattttcgttgatgaattatctgacgtagatgatgcaagtagacctgtaatcttctcagctcatggagtaccaaagtcagttccagaagaggctaaattaaaaaatttatcctttgtagatgcaacttgtccattagtttcaaaagtacacagagagtcagaacaattaaataaaaatggttttgatatattattaattgggcataaaaatcaccctgaagttattggaacaatgggtcaacttccaaaaggttcaattagactaatcgagacaaagaatgatgttgatctgctaaaagaaaacgattttaaaaaacctattgcatatattactcaaacaactctatctgtagatgatacagctgaaataattgaagctcttaaaaataagtttccaaaaattaaaggcccaattaaagaggatatatgttacgcaactactaacagacaatctgcagtaaaagagatagctccaaagtgtgatatgttttttgtagtgggtagtcgtaactcttctaattctgttagattagttgaagttgcaaaaaaagcgggttgtaataattctcatttaatgcattctgaaaaagaaattcctttaaatgaaatagaaaattctgaaaccatcgggatatcctctggagcgtctgcaccagaaaagcttgttcaaactttgttggatagtttaagaaaagatagaaatgtttctattgaagaagtaatagttgcggaagaaaaggttgtattcaaattgccgaaagaactcaattaat

SEQ ID NO: 211870 - DNA, 940 bp, Unknown
  Bacterial polypeptide expressing nucleotide sequence isolated from the Sargasso Sea
aatgactaaacagattaaattagcaaatcctcgcggtttctgtgctggcgttgatagagcaattgatattgtaaataaggctttggatatatacggagcgccagtttatgtaaaacatgaggtcgttcataataaagttgttgtttcagacttaagagatagaggtgcaatttttgtagaagaaattgatgaaattccagatgactcacttgtaatttttagtgcacatggtgtttcaagcgctgtagaagaagaaacaaaatcaagaaatttaaatttttttgatgcaacatgtccacttgtcacaaaagttcatatggaagtcagaaagcatgcaaaagctagtaaagatattattctagttggtcacgaaggtcatccagaagttgaaggaacaatgggtaggcacataaattctgataatagttcaatataccttgttcaaaatgagtcagatgctaaaaatataaaaatcaataatccaacaaaattagctttagtaacacaaacaactttaagcgttgatgaaacaaaatcaattattgatattttgaaatataggtttccagatatagatatacctaagaaggacgatatttgttatgccacacaaaatcgacaagatgctgtaaagcagcttgcgcttgaatcagattttatgattgttgttggttcaaaaaatagctcaaattcaaatagacttagtgagctagctgaaaaatgtggctgtagatcaattctaatcgatgaatttacagatatcgatttagatgatttaaataagtattctaaaatttctattactgcaggtgcttcagcacctgaatcaaaagttatggaaattgcaaaatctttagaactgtacacagatgcagaaattattgagcatggtgaagacaatgaagatatttacttcaaactacctccaggattgagataa

SEQ ID NO: 211871 - DNA, 940 bp, Unknown
  Bacterial polypeptide expressing nucleotide sequence isolated from the Sargasso Sea
tatgacaaagcaaattaaattagctaatcccagaggtttttgtgctggtgttgatagggcaattgacatagttaataaggcattagatatttatggtgcgcctgtttatgtcaaacatgaagtagttcacaataaggttgttgttgaagatttaaaaagtcgcggagctattttcgtggaagaaataaatgaaattcctgatgattcattagtcatttttagtgctcatggcgtttctagcaaagtcgaagaagagacaaaatctcggaatttaaatttttttgatgcaacatgtcctctagttaccaaagttcatatggaagtaataaagcatgctaaagctggtagagatataattctaattggtcatgaaggtcatccagaagtcgagggaacgatggggagacatattaataatgataatagttcaatttatttagttcagaatgagaatgatgcaaactcaatcaagttaaataaaaaaaatgaacttgctgtggttacccagaccacattaagtgtcgatgaaacaaaatcaataatttctattttgcgtgatcgttttccaaaaattataactcctaaaaaagacgatatctgttacgcgacacaaaatagacaagatgctgtaaagcaattagcactcgaatcagattttatgattgttgtagggtccaaaaatagttcaaattcaaatcgattaaaggaattaggtgaaaattgtggttgcaaatcagtgctaattgatgagtttaatgatttagatttagatgtgataaaaaaattttctaggatttctattactgcaggagcatctgcaccagagtcaaaagtcatggaaattgctcaatcattagaatcatacataggtgcagaaatcttagagtatggagaagataatgaagatatcttcttcaaacttcctccaggattaagatag

SEQ ID NO: 211872 - DNA, 520 bp, Unknown
  Bacterial polypeptide expressing nucleotide sequence isolated from the Sargasso Sea
cattacattgatacaaaaaaaagaagatattaaaaaaatagataataataattatggaagggtagcgctgattacccaaaccacattgtcagttgatgacactaaagaaattattgaagatttaaaaaatatctttccagaaataatccaacctcctaaagaagatatttgttatgcaacaacaaatagacagctagctataaagtccatagcaaatgattgtgatctaatttatgtaattggcgccaataattcatcaaactcattaagattagtagaggttggaaaaaaatctggctgtaatcaaacacatttaatatcagatgtatctgaggttgattggcaagagatagaaaaagagcaaaaaataggactaactgcaggcgcaagtgcgccagacatattgattcaagattttatagataagatgaaccaattatatgatgtagaaataaaaaatatctctgttgccgatgagaatataacctttaaaataccaagggagcttaatgagcgataa

SEQ ID NO: 211873 - DNA, 946 bp, Unknown
  Bacterial polypeptide expressing nucleotide sequence isolated from the Sargasso Sea
aatgaaaaacaaagaaattaaaattttacttgcagcacctcgtggtttttgcgctggtgtagagcgtgctatagaaattgtaaaaaaaagtattaataaatatggggcaccagtgtatgtaagacacgaaattgtccacaataaacatgtggttgatggtcttaaaaaaattggtgctatctttgttgaagaacttcatgaaataaaagataaaactagaccagtaattttttctgctcacggtgttccaaaaaaagtccctattgaagcagaaaattttaaaatggaatatgtggatgcaacatgcccacttgtatcaaaggtccatagagaagctgaaaatttaaataaaaatggattgcaaattttattaattggacacaaaaaccatccagaagttataggaactatgggtcaaattcctgaaggtgaaatagatcttattgaaaatgttgatgatgcaaacaattatgaaaataaatctaaaaaaaaattggcttttgttacccaaactactctttctgtggatgatacgaaagaaataatatcagctttaaagaaaaaatttccagaaattaaagagccaaaaaaagaagatatctgctacgcaacaaccaatagacaagctgctgttaaaaaaattgcagaaaaatgtgacatgttttttgttattggaagtagaaattcatctaactccctgagattagtagaggttgcaaaaaattctggatgcacaaattcgagattaattcattctgaaagtggcgtgccttttgaggaaattgaaaaatataaaactataggaatttcatcaggggcttctgcaccagaaatattggttgataactttataaataatttaaaaaaacaatttacagtagctatagaagaaatagaaatagttaaggaaaatattacattcaagattcctggaaagttaaactaa

SEQ ID NO: 211874 - DNA, 409 bp, Unknown
  Bacterial polypeptide expressing nucleotide sequence isolated from the Sargasso Sea
tgaccatcttaaaaaacgattcaagaacttagtggggccaaaaaaagaagatatttgttacgcaacgcaaaatagacaaaatgcagtgaaaaaactatctaaaaaatgtgacattattttagtagtaggttcaaaaaatagctccaactctaatcgtttaaaagagattggtataaaggctggtgtaagtacaaaattagtcgattcagagaatgatttaaaagttgaatggtttaataataaaaataatataggtttgacagcaggtgcttctgctcccgaaattttaatacaaagtattgtatcaaaacttaaagaatttggtgctttagaggtaactgaaaccgagggagttgttgaaaaaacaacttttaaaattcctaaagaacttagtactctacataggtaa

SEQ ID NO: 211875 - DNA, 946 bp, Unknown
  Bacterial polypeptide expressing nucleotide sequence isolated from the Sargasso Sea
atgaaaaataaggatttaaaaatatatttagctgctccaagagggttttgtgctggggttgatcgagcaatagaaattgtaaaaaaaagcataaataaatttgggtcaccagtttatgtgcgacatgagatagttcacaataagcatgtagtcgaaaatttaaaaaaaattggtgcaatatttgtcgaagaaattagtgaaattaaggacaaaactagaccagtaattttttcagctcatggagttccaaaaaaagttccaaaagaagctcaagatttaaaaatggaatatatagatgctacttgtcctttggtttctaaagtgcatagagaagctgaaaatttaaataaagctggtttccatatctttttaattggtcacaaaaatcatcctgaagtagttggcactatgggtcaaattccagagggatcaatagaattagttgaaacgattgatgatgttaaggatattgatattccatcaaataaaaaattagcttttgtaactcaaacaactctttctgttgatgatacaaaagatattattgatgctttaaagaaaaaatttccacaaattaaagagccaaataaagaggacatctgttatgccacgactaatagacaagcagccgttaaacatattgcatcaaagtgtgacatgttctttgtaattgggagtaggaattcatctaattcaaaaagactcgtggaggtagccaataaagcaggatgtaattattcagagttaatacattctgaaagttcagttccattagaaaaaatttctcaatgtaatactataggtatttcatcaggtgcatcagcacctgaagttttagttcaggattttataaaaaaaattaaagaaaaatttaatgtcgaaattcaagaagtcgaaatagtaaaagaaaatgtaatttttaaagttccaggaaaactcaattaat

SEQ ID NO: 211876 - DNA, 946 bp, Unknown
  Bacterial polypeptide expressing nucleotide sequence isolated from the Sargasso Sea
aatgaaaaataaagaaataaaaattttattagcagctccaagaggtttttgcgcaggggtagatcgtgcgattgagatagtaaaaaaaagtatagaaaaatatggagctccagtttatgtaagacacgaaatagttcataataaacatgtcgttgaaagtttaaaaaagattggtgcagttttcgtagaggaattaaacgaaataaaggataaaacgcgaccagtcattttttcagcacacggagttccaaaagttgttcctgcggaggcaaaagaattaaaaatggattatattgatgcaacgtgtccattagtttctaaggttcacagagaggctgaaaatttaaataaaagtggatttcatgttttgttaattggtcataaaaatcatccagaagtgattggtacaatgggtcaaattccaaatggatcaatagatttaatagaaaatattgaagatgttaataaatttgaaatcaaaggaaatggaaagttagcttatgttacacaaactactttgtcagtagatgacacaaaagatataattaatgctcttaaagaaaaattttcaaatattaaagaaccaaaaaaagaggatatttgttacgcaacaactaatagacaagctgcagtaaaaaaaattgcaaaactctgtgatatgttttttgtaattggtagtagaaactcatctaattcattaagattagttgaggttgcaaataattctgggtgttctgaggcagttttaattcactctgaaagtagcatacccttagaaaaaataacaaaatgcaaaacaataggaatttcatcgggtgcatcagcccctgaaattttagttgaaaattttattaaaaaattaaaagaacaatttagtgtcaatatcgaagaagtagggattataaaagaaaatataacttttaaaattcccggaagattaaactaa

SEQ ID NO: 211877 - DNA, 534 bp, Unknown
  Bacterial polypeptide expressing nucleotide sequence isolated from the Sargasso Sea
gtcaattgccagaaggttcaatagatttaatagaaaatattgaggatgcaaataagtatgaaaatgtctcaaaaaaacatctatctttcataactcaaacaacgctctctgtagatgataccaaagatattattgcagctctaaaatctaaattcccagatattaaagagcctaaaaaagatgacatatgttatgcaacaacaaatagacaatccgcagttaaagaaatagcagataaatgtgatatgttttttgtaattggaagtagaaattcatctaactcggtaagattagttgaggttgctaaaaactctggttgtagttctgctgagttaatacattcggaaagtccagtgcctatagataaaattaaaggatgtaatacgattggaatctcctcaggtgcttcggcgccagaaatacttgttgaaaagtttatagcagagttaaaagatcaatttacagtcaacatagaagaagttgaaatcgtaaaagaaaatattacttttaaaattcctggaaaattaaattaat

SEQ ID NO: 211878 - DNA, 946 bp, Unknown
  Bacterial polypeptide expressing nucleotide sequence isolated from the Sargasso Sea
atgaaaaataaagaattgaaaatattattgtcagctcctagaggcttttgtgctggtgtagaaagagctatagaaattgttgaaaaatcaattcagaaatatggtactccagtatatgttcgtcatgaaatagtgcacaataaatatgtggtagatgatttaaaaaataaaggagctatctttgttgaagaactagaggagatagaggataaaactagaccagttattttttcagctcatggtgttccaaaaaaaattccagaggacgctaaaaactacaatatgacttatgttgatgctacatgcccattggtatcaaaagtacacagagaagctgaaaatctaaataaagctggatatcatttaattttaataggacatcaaaatcaccctgaagtaattggtactatggggcagttacccaaaggatcaattgatcttattcaaaatgaagatgaagccaaaaactataaaattcaaaataacaaaaaaatttcttatgttactcaaacaacattatcagtagatgatacgaaagatataatccaaatattaaaagatagatttccaaatataaaagaacctttgaaagaggatatttgttatgccactacaaacaggcaaatggcagttaaaaatattgcaaaaaaatgtgacttattttttgttataggaagtagaaattcatctaattcagttagattagtagaggtagcaaaaaaatctggctgctctaattcaatattaattcattcacaaagcgaaatcccattcgatttaatcaaaaacgcaaatacgattggtgtttcttctggagcttctgctcctgagattctagttgataattttataaatgagttaaaaaatagatttacagtcagtatagatgaagtagaaattattaaggaaaacgttgttttcaaagctccaaaaaaattaaattaaa

SEQ ID NO: 211879 - DNA, 913 bp, Unknown
  Bacterial polypeptide expressing nucleotide sequence isolated from the Sargasso Sea
atggatatttatttagcaagtccaagaggtttttgtgctggtgtagttttggcaattgatttagtagaaattgctctagaaaaatacggagctcctgtttacgtaaagcatcaaattgtacataatccagttgtagtgtctgaagtagagtctaaaggggctataacagtagaaaaagtatctgaaatacctgataattcagttgtagttttttctgctcatggttctcctcctgaagattataaattagctaaagaaaaaaacattactgttattgatgcaacctgtcccctagtaaccaaagttcacaatgaagcaaaaaaatattctaaagaggggaaaaaaattatacttgtagggcataaagggcatcaagaagtaattggaacatctggccaagcagatatgaaaataatagatgatagagaaaagtttgatcttgataaatcaaatgatgacgatgtgatcgtattatcacaaacaactttatcagtaagagatactcaagacacaataagtaaaataaaaaatgttcatccaaaagctatagtgagaaatgatatttgttacgcaacgacaaatagacaagaagttacagtaaagctagcaaaaaaagtagatttaattttagtagttggagcctcaaattcttctaattgtaatagattaaaggatgtttcaattcaatctggaactaaagcttatcttattaattcatttgatgaaattaaagatgaatggttgaaagatgtaaataaattaggactcacttcaggagcatcaactcctgataaattagtttttgaaataatcaagagattagatccatctaatgtatttaagtttgatgatatagaagaagatataaagttcgaaatccccagaaaagtaaaagaactgttaaatgaatgaa

SEQ ID NO: 211880 - DNA, 523 bp, Unknown
  Bacterial polypeptide expressing nucleotide sequence isolated from the Sargasso Sea
ttgaaaaaagaaattcatttaatatctcctagaggattttgtgctggcgtaacgagagctattgatgttgttaatatagcattagaaaagtatggacctcccgtttatgtcaagcatgagatagttcacaacaagtcagttatagaagagttaaaactgaaaggagctgtatttattgaagatataaaagatatgccacaaggtgctccactcattttttcagcacacggagtttcaaaactagttgttaatgaggcaaatgagaagaaggccattaccattgatgctacttgccctcttgtaactaaagttcatgttcaagcaaaaaaatttagttcccaagggtatcatattttcttgataggtcatcgtaaccatcctgaggttgagggaactttaggtcaattagactcttcagaaatcacacttattgaaaatacgaatgacgtttcacttttaaaaacaaattttgaaaaagttgcttttgttacacaaaccaccttatctgtcgatgatacaaaag

SEQ ID NO: 211881 - DNA, 940 bp, Unknown
  Bacterial polypeptide expressing nucleotide sequence isolated from the Sargasso Sea
atgactaaagaaataaaattagccaacccacgaggcttttgtgctggtgttgatagagctatagacattgtaaataaagctcttgatatatatggagctcctgtgtacgtgaaacatgaagttgttcacaataaagtagttgtggatgatttaagaaataggggtgcagtatttgttgaggaaattgatgagattccagatgattcactagtaatttttagtgcccatggagtatctagcgaagtagaggagactactaaggcaagaaatcttaatttttttgatgctacatgtccattagttaccaaagttcacatggaagtaagaaaacatgctaaggcaaataaagatattattttaattggtcatgaaggtcatcccgaagttgagggtacgatgggccgtcatataaattcgcaaaatagttcaatatatttagttcaagatgaaaatgatgcactaaatattgatgtaaacaatagtgaaagtcttgctcttgtcactcagacaacactaagcgttgatgagacaatttcgataatcgatatactaagaaaaagatttccaaatattgaagttccaaaaaaagacgatatttgttatgcaacacaaaacaggcaggatgctgtaaagcagctagcccttgaatcagattatattattgtagttggatcaaaaaatagctcaaactcgaatagacttaaggagcttgctgaaaaatgtggttgcaaatcaactttaattgatgaattttcagacttaaatcttgaggatattaaaaaatgtaaaaatattgctattacagctggagcatctgctccagaatcaagagttatggaaatcgcaaaatctcttgaagattattttggagcaaagcttattgaggatggcgaagatactgagaatgtttattttaaaatgcctcctggattgagataaa

SEQ ID NO: 211882 - DNA, 1033 bp, Unknown
  Bacterial polypeptide expressing nucleotide sequence isolated from the Sargasso Sea
tatggtaaataatctatatgttgtaactccaagaggtttttgtgccggtgttgagatggccattaaagctttaacctggatgttgaaaatctatgatgaaactatctattgttatcatgaaatagttcataatgattggattgttaaaaagttcaaagaaaataacgttaaatttgtggataatcctgatgaattacctgataatgcaatagttatgttgtcagctcatggaacagctcctaatatagaaaaagaatttaagtcaatatccttaactaatgtaaattcagtttgcccattagtaacaaaagtacatcatgaggctaaaaggtttagtgaagaaggtcatgaaataatttatgtaggacataaagatcatgatgaagcagttggagctatgggagttgctcctgaatcaatgaaactagttgaaaatgttgatgaaatagaagaaatagatttgaaatcagacaatgttgctttattagctcaaacaactttgtcaatgtcagattgggaaccaataatgttaaaagctaaagaaaaatatcctaatttaaaaatgcctagaaagaatgatttatgttacgcaactacaaatagacaagaagcaataattaatattgctggtgaagttgatttagttattgtagttggttcttcaacatcaagtaatacaaacgctcttgttacttcaataaataatattggtaaagaagcatacagaattgaaacaactgaggatttaaataatataaatttaataaataaaaatgtagctataactgctggagcctctgctcctgatcatatggtacaaaatattgtagactatatagaaccaaaaaatatagagttttatatagatacagatgaaactgaatatttccctttgcctgttgaactaagaacaaatattaaaaacttatctaattttatatcctcaatgtttccagaaaatacaattaaatcagaaaatggtatcaagaatgataaaagctggtccgctactaaagctttagcttctctataa

SEQ ID NO: 211883 - DNA, 931 bp, Unknown
  Bacterial polypeptide expressing nucleotide sequence isolated from the Sargasso Sea
ttggaagtgatattggccagtccgagaggtttttgtgcaggagtcgaccgggccattaccattgtggaaaaggctttggaaaagttcggaccgcccatttatgtccgccatgaaatcgtccacaaccgccatgtggtgagtcgattgcgggaaaagggggtgatctttgtggacgaactggatcaggtcccggaaggtgcccatgcgatcttttccgcccacggagtttccccgcaggtacgggaacaggcattggaacggaatcttgaagtgcttgacgccacatgcccgcttgtgaccaaggtccatgttgaggccaaacgttatgcccagaaagaattcatcattcttctgatcgggcatcgggaacacgttgaagtcgaaggaacttttggtgaagctccggacagaatcatcatcgttgggactgctaaggaagcggaaaatttggaactgcctccatcttccaggattgcttacctgacccaaacgactctctctcttgatgatactgccgacatcatcaaagtgctgcgccgacgtttcccggaaattgagggtcctgccaaggatgacatctgttatgccacccaaaaccgacagaatgctgtcaaacagatttccaaagaagtagatctggtcctcgttgtcggagctgaaaacagctcgaataccttgagactcgtcgaagtcgcagaaagcctgggaactcgggcaattcgtatccaatcttcctcagaactgcaacctgacttgttggacgaatgcaataaaatcggtatcaccgctggggcatcggctccggaagatatcgttcaggggattgttgacaaacttcgaggatggaatcctggatgcagagttcgggagttgaaactgacagaagaacaagtcagctttggtcttcctccccagctaaaaacgccttaaa

SEQ ID NO: 211884 - DNA, 949 bp, Unknown
  Bacterial polypeptide expressing nucleotide sequence isolated from the Sargasso Sea
atgagtcaaaaaactaagttgtcacttgcaaatcctaggggtttttgcgcaggcgtagatagggctattgaaatagtaaatagagctcttgatatgtttggaagccccatctatgttaagcatgaagttgttcataataaagctgtagttgatgatttaaaggaaagaggagccatatttattgaagaaatttcagatgttcctgatgattcaattattatttttagtgctcatggagtctcaagcaagattgaagaatctgttaaatcaaggaatctaaagttttttgatgcaacctgtccgcttgtaaccaaagttcatatggaggtcatgcgacatggaagagctaatagggacattatattaattggtcatgaaggccatcccgaggtagaaggcacaatgggaaggtattttagtcaaaatggaaaaatatatctcgttcaggatttagaagaggcaaaggaagtttctgtaaatcaaccggaaaatctagcttatgttacacaaactactcttagtgttgatgaaacaaaagatatcataaatgagttaatgaaaagattcccaaagattgcagctccaaaaaaagatgatatttgttatgcaacccaaaatagacaagatgctgttaaacaactagctcttgaaacagatttcattatagttgttggatcaaaagcaagttcaaattcaaatcgcctaaaggaacttgcaaataagtgtggagttaattcgatattaatagatgaatttgctgatcttgacttaaatgaattaaaagactgtaggaatattgggcttaccgctggagcatctgcacctgaatcaaaagttcaagaaataatttcaaatctgagtattttccttgatgcagagattgaagagaaaggcggagttaaggaagatatttcttttaaactcccaccagaattaagagcaagttaat

SEQ ID NO: 211885 - DNA, 538 bp, Unknown
  Bacterial polypeptide expressing nucleotide sequence isolated from the Sargasso Sea
attggggcaagtccctgatggaaaaattgaccttatagaaactattgatgatgcaaaaaattatcaaagaggtaaaaacgataaacttgcttatattacacaaacaacattgtcggttgatgatacaaaagatattatagatgttttaagagaacgttttcctgatattctcgagccaaaaaaagatgatatatgctatgcaaccacgaatagacaagcagcagtcaaaaaaattgcaaaaaagtgtgataatctttttgtaataggtagtaggaattcttctaactcagttagattagtggaagtagctcaaaataatgggtgtgaaaatgctgaattaattcattcagaaagcaactttccaattgaaaaaatatctaaatgcaaaacaataggtatttcatctggtgcctcagctcctgaagtattagttaacgaattcatagaaaatattaaaaaaaaatttaccgtagaaatagaggaagttgaaatagtcaaagaagacgttacatttaaaatcccaggaaaattaaattaa

SEQ ID NO: 211886 - DNA, 685 bp, Unknown
  Bacterial polypeptide expressing nucleotide sequence isolated from the Sargasso Sea
cctggctaatccaaggggtttttgtgctggtgttgacagagcgatagaaatggtagagctggctttaaaaaaatggggatcacccatttatgttaggcatgaaatagtccataacaaacatgttgttcacgaccttaaaaagaagggggctgtgttcgttgaggagttgaaggagtgccccgtagatcgacctgtaatattttctgcccatggtgtgccaaaagcgatcccggaggaggcagaaaaaaggcatatgctatttgtagatgctacttgtcccttggtaacgaaagttcacaatgaaatcaaaaaatattatgaaaaaggttataaaataataatgattgggcatcgtggacatcctgaaacaattggtactatgggtcaactgccggagggagcggttttgttggttgagaatacggcagacgttgagaaaatggacctatcaaaatacccaaagttagcttatgttactcaaacaactctatctgtagatgatacaaaagagatagctctagctttaaacaaaaagttcccatcaatagaaaacccaaagaaagaagatatctgctatgccactacaaacagacaagaggaggtcaagcgacttgtaaaatacgttgacttaatgttggttgtagggtcagagaactcatctaatctcagagactggttgatgtag

SEQ ID NO: 211887 - DNA, 526 bp, Unknown
  Bacterial polypeptide expressing nucleotide sequence isolated from the Sargasso Sea
ccaaaaaatggtattgatttaattgaaaatgttgaagatgttaaaaaatatgaaaataaaaataacaaaaaattagctttcgtaactcaaacaacgctttccgttgatgatacaaaagaaataatagatgaacttaagaaaaaatttccgagcataagagaaccaaaaaaagaagatatatgttatgctacaactaacaggcaagcagctgtaaaaaaaattgctaaacagtgcgatatgttttttattattggcagtagaaattcttctaattctgtaagacttgttgaagttgcaaataattcaggatgcaaaaatgcagttctaattcattccgagagcgatattccttttgataaaatttcaaattgtaatactattggaatttcttcaggagcctcagcacctgaaattttattagaaaattttatcaataatttaaaagaaaaatttgttgttaaaataaaagaagttgaaataattaaagaagacgtaacttttaaaattcctggaaaattaaactaat

SEQ ID NO: 211888 - DNA, 946 bp, Unknown
  Bacterial polypeptide expressing nucleotide sequence isolated from the Sargasso Sea
atgaaaaataaagaattaaaaatattattatctgcacctcgtgggttttgtgctggtgtagaaagagcaattgaaatagtagaaaaatctatacaaaaatttggatctccagtttatgtacgacatgaaattgtacataataagtatgtcgtagatgatttaaaaaataaaggagcaatatttgtcgaagagctggaggagataaaagataaatcaagaccagtaattttttcagcacatggtgttccaaaaaaaatacctgaagatgcaaaaaattataaaatgacttatgttgatgccacatgtccacttgtttctaaggttcatagagaagcagaaaatctgaataaagctggttaccatataattttaattggtcatgaaaatcatccagaagtaattggaactatgggtcaattaaatagaggttctattgatctaatccaaaatgaggaagatgctataaactatgaaaataaagtagataaaaaattagcatatattactcagactactttgtcagttgatgatacaaaagaaataatcaaaattttaaaaaccagttttcctaatataaaagaaccaatgaaagaagatatttgttatgcaactactaaccgtcaaatggcagtaaaaaatattgcaaaaaattgtgatatgttttttgttattggaagtagaaactcttcaaattctgttagactagttgaagtagcaaaaaaatcaggctgtgaaaattcacaacttattcattcagaaagttcaataccatatgatcaaatagaaaattgcaatactataggtatatcttcaggagcatccgcaccagaaatattggttgaaaattttattaatgatttaaaaaaaaaattttctataagtattgatgaagttgaaataattaaagaagatgtagtatttaaagttcccaaaaaattaaattaaa

SEQ ID NO: 211889 - DNA, 946 bp, Unknown
  Bacterial polypeptide expressing nucleotide sequence isolated from the Sargasso Sea
atgaaaaacaaagaacttaaaatattgttatctgctccacgtggattttgtgccggtgttgaacgggcaattgaaattgttgaaaaatcaattcaaaagtatggttctccagtttacgttagacatgaaatagtacacaataaatttgttgttgatgacctaaagaataaaggtgcaatatttgtggaagagcttgaagaaattgaagacaaaacaagaccagttattttttctgcacatggtgttccaaaaaaaattccacaagatgcaaaaaactataatatgacttatgttgatgcaacatgtccgttggtttctaaagttcatagagaggctgaaaatcttcataaggctggataccatttaatcttaatagggcataaaaatcatcctgaagtaattggaacaatggggcaactgcctaaaggatctatcgatcttatccaaaatgaggacgaagcaaataattatgatccaaaaaattttgaaaagatagcctatgttacccaaacaaccctatcggtagatgatacaaaagaaataatatcaatacttaaggaaaaattttcaaatattagagagcctgcgaaagaagatatttgttacgcaacaactaatagacaaatggctgttaaaaacattgcaaaaaagtgtgatatatttttcgttattggtagtagaaattcatctaactcagtaagacttgttgaagttgctaaaaaatcagggtgtgaaaactcaatattgatccactcacaaagtgaaattccattcaacttaattgaaaattcaaatataatcggaatttcatctggtgcgtctgcccctgaaatacttgtcgaaaatttcattaaagaattgaaaaataaatttacagtcactatagaagaagtagaaattataaaagaaaacgttgtttttcgtgttccgaaaaaattaaattaaa

SEQ ID NO: 211890 - DNA, 625 bp, Unknown
  Bacterial polypeptide expressing nucleotide sequence isolated from the Sargasso Sea
aatgactaaagaaataaaattagccaacccaagaggcttttgtgctggtgttgatagagctatagacattgttaataaagctcttgatatatatggggctcctgtgtatgtgaaacatgaggttgttcataataaagtagttgtggatgatttaagaaataggggcgcagtatttgttgaggaaattgatgagattcctgatgattcattagtaatttttagtgcccatggagtatccagcgaagtagaggagagtactaaggcaagaaatcttaatttttttgatgccacatgtcctttagttaccaaagttcacatggaagtaagaaaacatgctaaagcaaatagagatattattttaattggtcatgaaggtcatcccgaagttgagggtacgatgggccgtcatataaattcgcaaaatagttcaatatatttagttcaagatgagaatgatgcactaaacattaatgtaaacaattgtgaaagtcttgctcttgtcactcagacaacactaagtgttgatgagacaattgagataatagacatactaagaaaaagatttccaaatattgaagttccaaaaaaagacgatatttgttatgcaacacaaaacaggcaggat

SEQ ID NO: 211891 - DNA, 952 bp, Unknown
  Bacterial polypeptide expressing nucleotide sequence isolated from the Sargasso Sea
atgaatacacatcaaatcaaaatttatcttgcaggtcctaggggcttttgtgctggtgttgatcgagcaatactcatggttgaagaggcattaaagaaatacggtaatccagtttatgtccgccacgaaatagtacacaataaatatgttgtagaagacctaaaagaaaaaggagcgatatttattgatgaactaaatgaaataaaagatctttctaggccagtaattttttctgctcatggagttcccaaatcagtaccagatgaggcaaaaaatttaaacttattatattttgatgccacctgtcctttggttagcaaaattcatagagaagtagagaattttgaaaaacaaaatcttccaattattcttatagggcaccataaccatcctgaagttattggtacaatgggacaaataaaatcttctattcatcttgttgaaaatgaaaaagatgtcgaattattaaaattagataataataaaaaaattgcttatgtaacacaaaccacgctctcagttgatgaaacaaaagaaattataaaagctataaaaaagaaatttaatgatgtcattgaacctcgcaagaatgatatttgctatgctacaactaatagacaagatgcagttaaaaaaatagcatctaattgtgaagttttttttgttattggagcttataattcttctaattctattcgattagttgaggttgcaaaaaaatatggtgcaagaaaaagtatcttactagaaaacatagagcaatttgatgaaaaaatttttaaaaatattaactctattggccttacagcaagtgcttctgctcctgaaatattagtacaaaaatttattgaattactagaaaaaaaatttgatattgaacttattcaagatgattttataaaagaagatgtgaattttaaaatacctcaaaaacttaaagaagcaatttaaa

SEQ ID NO: 211892 - DNA, 1489 bp, Unknown
  Bacterial polypeptide expressing nucleotide sequence isolated from the Sargasso Sea
tttgcgccgggcctttcggccgtatcgggcgccgactgaacgagtaattcatgagcctcatcgatctatccgaagtgaagcccggttcccacgtcacattgcattaccggctggcactcgccgacggcgccgatatcgtcaacaccttcaccgacaagccggccacgctgctgctcggcgcggggcaactggcgccgtcgctggaacagattctgatcggcctcagggtcggcgaccattcgacttttcagctaacccccgaacaggggttcggtccccgcaatcccgacatgctccagcgcgtgacgctgtcgacgctgcgcgagaacgggatggtcggcgacgatttcacgccgggcgaactgatcgagttcaacgcgccggacggcggccggtacgcgggggtgctgaaggaagtcagcgaaacctcggcactgttcgacttcaatcatccgctcgcgggccaagcgctcacgttcgaagtgaaaatcatcggaatcctgtaatcatgagcaccaccgatacgctgtccgggcagaccgtcgccgccgatgccgaaatcctgctggcccagccgcgcggtttctgcgcgggcgtcgatcgcgcgatcgagatcgtcgagcgcgccatcgcgatgcacggtgcgccgatctacgtccgtcacgagatcgtccacaacaagtacgtggtcgaggatctgaagaagaaaggcgcgatcttcgtcgaggagctcgaggaagtgccggccggcaataccgtgatcttcagcgcgcacggcgtgtcgaaggccgtgcgcgacgaggccgacgtgcgcgggttgcgtatttacgacgcaacctgcccgctcgtcacgaaggtgcacgtcgaagtggcgaagatgcgccaggacggcgtcgacatcgtcatgatcgggcacaagggccatccggaagtcgaaggcacgatggggcaggtcgagcgcggcatgcatctcgtcgagagcgtcgaggacgtgcagaagctcgagctcgccgatcccgaacgcatcgcgctcgtcacgcagacgacgctgtccgtcgacgacgcagccgagatcatcgccgcgttgaaggccaagtatccgaagatccgcgagccgaagaagcaggacatctgctacgcgacgcagaaccgccaggacgccgtgaagttcatggcgccgcagtgcgatgtcgtgatcgtcgtcggcagcccgaacagctcgaattcgagccgcctgcgtgaagtggccgagaagcgcggcgtggacgcgtacatggtcgatgcgcccgaccagatcgatccggcatgggtcgcaggcaagcgtcgcatcggcgtgacggccggcgcgtcggcccccgaagtgctcgcccaggccgtgatcgcgcggctgcgcgaactcggtgtgcgcaatgtgcgcgcgctcgacggcatcgaggaaaacgtgtcgtttccgctgccgcgcgggttgaacctgccgcccgccgcctga

SEQ ID NO: 211893 - DNA, 937 bp, Unknown
  Bacterial polypeptide expressing nucleotide sequence isolated from the Sargasso Sea
aatgaaaaacgaaattaaaatttatttagccgctccaagaggtttttgtgctggtgtggatagagctatagagatagtaaaaaaagctttagataaatatggttctccagtctatgtaagacacgagatagttcataataaaaatgtagtcgaatccttaaaaaaattaggtgccgtttttgtggaggagttatctgaaataaaggatgcatctagaccggttattttttcagcacatggcgtaccaaaagaagtaccagaggaggcaaaatcaaaaaaaatattttatgttgatgctacttgtcctcttgtttcgaaagtacaccgagaaacagaacagctatttaagaagggatttgatattgttctagttggtcataaaaatcatccagaggtcattggcacaatgggacaactaccgaaaggttctattaagcttatcgagactattggagatgttaaaaatttaagtttttcaaaaccagttgcctatgttactcaaacaacgctatcggttgacgatacaaaagaaattattgatgttttgaaacaaaaatttccaggtataaaaggaccaattaaagaagatatttgctatgcaacaacgaatagacaatcagcggttaaaaaaattgctccaaattgtgaaatgttttttgttttaggaagtagaaattcatcaaattcagcaaggttagttgaagtggcaaaaaaatctggatgtgaaaattcggaattaattttttatggcaaaaaagctccaatagataaaattaaaaattgcaagactattggtctttcatctggtgcgtcagcacctgaagaattagtacaaaattttatttctgaaattaaaaagagcatgaaggtttcaattgaagaaattgttactgcaaacgaaaaagtagtttttaaattgccaaaagaagtgaattaa

SEQ ID NO: 211894 - DNA, 949 bp, Unknown
  Bacterial polypeptide expressing nucleotide sequence isolated from the Sargasso Sea
atgagcaaaaaaattaaagaaatagttttagcaaatcccagaggattttgcgctggtgttgatagagcaatagacatcgtagaaaagtcattagaaaaatacgatgaaccagtatttgtaagacatcaagttgtccacaataaaagagtagtagaaagcttagaaaaaaaaggggtcaagtttgtaaaagaagtgagcgagatcccagataatgcagtagctatcttcagtgcacatggagtaagcagtgaggttgaagacgaagcaaaatcaagagatttcatgtactttgatgctacttgccctcttgttaccaaagtccatcttgaagttcagaaacacgcaaggaaaggccgggatatagttctaatcgggcataaaggtcatcctgaagttgtagggacattagggagacatccaaaagattctggaacagatatttacttgatagaaacaaaagaagatatagaaaaattggaaataaattcagactctttagcatatgtaacccaaaccacattatctgtcgatgaaacaacagaaattatagaagttttgaaaaacaggttccctaatatcataggaccaagtgctgatgatatctgttatgcaacacaaaatagacaagatgcagttaaacaattatctcttgaatgtgaagttgttctagtcattggctcgaagacaagctcaaactctaatagacttaaagaattagcagaaaagtgtggcacaaaatcatttttgatagatgataaaaaggatataaagatagatgagcttaaatatgcaacttctgtcggcatcacagctggagcttctgcacctgaagatatagtccaagaagtaatttcttatttgattccattaggttatagccatgttcgaaatttatcagaaaacaaagaaaacatgactttcaaattgccaagagagctatctgattaat

SEQ ID NO: 211895 - DNA, 943 bp, Unknown
  Bacterial polypeptide expressing nucleotide sequence isolated from the Sargasso Sea
aatgaatataaaagaaaataaacaaatattacttatttcgcctagaggtttttgtgccggggttacacgggcaatagatacagtagtcgaagtcttagaaaagtttggacctcccgtttacgttaaacatgaaattgttcataacaaacatgtaattgaagatctaaaagcaaaaggtgcaatatttattgaggatatcaatgatgctcctattgataaaccactggttttttcagcgcacggtgtagcaaaaaatattttagatacagccaaacaaataaataaatatgtggttgatgccacttgtccattggttacaaaagttcacgttcaagcaataaaattttataatcttaattacaaaataattttaattggtcataaaaatcatccagaagttgagggaacaattggccaattacctgcgggtgaaattgtgttaatagaaaatttagatgatattcaaaatttgatgtttgaaaatgaagataaacttgcatatgtaactcagacaacattatctgttgatgatacgaaggaaattatagatgccttaaagacaaagttccctagtataaaatcatcacctaaagaggatatttgttatgcgacaacaaataggcagaacgcaattaaagactatgctcatgaatgcgattctttcattgttgtaggatcaaaaaattcatcaaattcaaatcgtttagttgaagtagcaaaaaaatctggatgtgatctttctgtgctattagaaaatgcaaataatttaaatattgataattataaaaatcatcaaactataggcctttcttcaggagcctctgttccggatatacttgttcaagatgttatttctaaatttagagaagcatttgaaattaatgttaaagaagttggtgcaggtgaagaaaatataagttttaaattaccaagaggaatttaa

SEQ ID NO: 211896 - DNA, 943 bp, Unknown
  Bacterial polypeptide expressing nucleotide sequence isolated from the Sargasso Sea
atgaaaaataaagaattaaaaatattactatcttcaccaagaggattttgtgctggtgttgaaagagctatagaaatagtagaaaaatctattcaaaaatatggtgctccagtttatgttcgtcatgagatagttcataacaaatatgtggttgatgatttaaaaagtaagggggctatctttgtagaagagcttgaagaaatcaatgataaatcaagacctgttattttttcagcacatggtgttccaaaaaaaataccagaagatgcaaaaagttataatatgacttatgttgatgccacgtgtccgttggtatcaaaagtacatagagaagctgaaaatctgtataaagcaggctatcatttaatattaattggacatcaaaaccacccagaagttattggcactatgggtcaactacctaaaggatctattgatcttattcaaaacgaagatgatgcaaaaaaatacaattctcaaaataaaaaaattgcatatgtcacgcaaacaactttatcagtagatgatacaaaagatataatccaaattttaaaaaatagatttcctgacgtacgtgaacccttaaaagaagatatttgttacgcaacaacaaatagacaaatggcagttaaaaatattgcaaaaaaatgtgatttattttttataataggtagtagaaattcatcaaattctgtcagattagttgaggttgcaaaaaaatctggatgttcgaatgctatattaattcattctcaaagtgaaattccgtatgacttaatagaaaaatcaaatacaattggtatttcctctggagcttcagcgccagaaatattagttaatgattttataaataaattaaaaaaaagatttgagatcaacatagatgaagtagaaattatcaaagaagacgtagtttttaaaattcctaaaaagttaaattaaa

SEQ ID NO: 211897 - DNA, 799 bp, Unknown
  Bacterial polypeptide expressing nucleotide sequence isolated from the Sargasso Sea
atgaataaagaaataaaattagcaaatccaaggggtttttgtgctggtgttgatagagctattgatattgttaataaggctctagacatttatggggcgccagtttatgtaaagcatgaggttgttcataacaaagtcgtagtagatgatcttaaaaaaagaggggcaatatttgttgaagaaataaatgaaatacctgatgattctttggtaatattcagcgctcatggagtttctagagaggttgaagagagcacaaagtctagaaatctaaattattttgatgctacttgcccactagttactaaagttcacatggaggttaggaagcatgcaaatgctaataaggatattattttagttggccatgaaggacacccggaagtcgaaggtactatgggtaggcatgaaaattctgagaatagttcaatatatttagttgaaaatgagaacgatgcaaaaaatataacgataaccaaaaaaaataatcttgctgttgttacccaaaccacgcttagtgttgatgaaacaaaatctataatcgatatcttaaaggatagatttccaaatataagtattccaaaaaaagatgatatttgttatgcaactcaaaatagacaggatgcggtaaagcaattagccttagaatcagattttatgattgttgtaggatcaaaaaatagttcaaactctaatagactaagagaattgagtgaaaaatgtggttgcaaatctgtattaattgatgaattcaatgatttagatcttaatgaactaaagaattattcaaatatttcta

SEQ ID NO: 211898 - DNA, 958 bp, Unknown
  Bacterial polypeptide expressing nucleotide sequence isolated from the Sargasso Sea
gatgaaattagatcctaccagcccaagtttaaatattatgctggctaatcctcgcggcttttgtgctggtgtggacagagccattagcattgttgagcgcgcactcgagttattttcgccgccgatttatgttcgccatgaagtcgtgcataaccgctatgtggtgcaaaacctgaaggaccgcggtgccgtttttgttgaagagttagaccaagtgcctgataacaatattgttatcttcagtgcgcatggggtttctcaggcggtacgtgcagaggctaaggcacgtggtttgcgagtattcgatgcgacttgtccgttagtcaccaaagtgcatttgcaggtcacccgtgcgagtcgcaaggggattgaatgtattttgattggccatgcggggcatcctgaagttgaaggcaccatgggacaatacgataaccccaatggtggtgtgtatctgattgagtcccctgcagatgtcgagactttagaagttcgcgatcctaataacctctgcttcgtgactcaaacgacgctttcggtggatgatacgctcgatatcatcagcgccttattgaagcgcttcccgtccatcgaaggtccacgtaaggatgatatttgttatgcgacgcaaaaccgtcaggatgcggtgcgtaacttatcggccgatgtggatctgttaattgtggtcggttcgaaaaacagctctaactctaatcgcttgcgtgaattggcattaaaaactggaactcaatcttatttggttgataccgcagatgatatcgattcatcttggtttgaaaatgtgacgaaagttgcagtgaccgctggcgcatcggcaccagaagtgctggttcagcaagtggttcaagcgattgcaaaattagcaccgagtgtcgtcaccgaagttgaagggcgtaaagaagataccgtctttgccgtacctgcagaattacgctag

SEQ ID NO: 211899 - DNA, 865 bp, Unknown
  Bacterial polypeptide expressing nucleotide sequence isolated from the Sargasso Sea
atgaaaaataaagaattaaaaatattattatctgcgcctcgtgggttctgtgctggggtagaaagggcaattgaaatagtagaaaaatctatacaaaaatttggagctccagtttatgtgcgtcatgaaatagtgcacaataagtatgttgtagatgatttaaaaaataaaggggcaatatttgttgaagagctagaggagataaaagataaatcaagaccagtaattttttcagcacatggtgttccaaaaaaaataccagaagatgcaaaacattataaaatgacttatgttgatgctacatgtccacttgtctctaaagttcatagagaggcggaaaatcttagtaaagatggttaccatataattttaattggtcatgaaaatcatccagaagtaattgggactatgggtcaattaaaagaaggttctatagatctaatccaaaatgaggaagaggctaaaaactatcaaaataaacctgacaaaaaattagcatatattactcagactactttgtcagttgatgacacaaaagaaataatcaaaattttgaaaaataactttccttatattaaagagccaatgagagaagatatttgttacgcaactactaaccgtcaaatggcagtaaaaaatattgcaaagaattgtgatatgttttttgttattggaagtagaaactcttcaaattctgttaggcttgttgaggtggcaaagaaatcgggctgcgaaaattcgcaacttatacattcagaaagcttaataccgtatgatcaaatagaaaattgtaatactataggtatatcttcaggagcatctgcaccagaaatattagttgaaaattttattaatgatttaaaaa

SEQ ID NO: 211900 - DNA, 949 bp, Unknown
  Bacterial polypeptide expressing nucleotide sequence isolated from the Sargasso Sea
aatgaaacaaaaaactaaattatcactggctaatcctaggggtttttgtgccggtgtagatagggctattgaaatagtaaatagagcacttgatatgtttggaagtcctatctatgtgaagcatgaggttgttcacaatgaggctgtagtaaatgatctaaaggaaagaggcgctatatttatcgaagaaatctcagatgtccctgataattcaattattatttttagtgctcatggagtctcgcgcaagattgaagaatccgttaaagcgagaaatctgcagtttttcgatgcaacttgcccacttgttaccaaagttcacatggaagtcattaggcatggcagagcaaatagggacataatattaataggtcatgagggtcatcctgaagtagagggaacaatgggtagatactttagtcaaaatggaaaaatatatcttgttcaggatttagatgaggcaaaggaggtttctataaaccaaccagaaaatgttgcttatgtctcacaaactactttaagtgtagatgaaacaaaagatatcataaatgagttaactgagaagtttccaagtattgtaggtccaaaaaaagatgatatttgttatgccactcaaaacaggcaggatgcagtgaaacaacttgcactcgaaacagatttcattattgttgttggctcaaaagcaagctcaaattcaaatcgcttaaaggagcttgcaaataaatgtggagttaactcggtcttaattgacgaatttagtgatcttgacttagacgaattaaaagactgtaagaatattggcttaactgctggggcatctgcaccagaatcaaaagttcaagaaataatctcaaatcttagtattttcttagatgcagagatagaagagaagggtggagtgaaagagaatatttcttttaaattacctccagaattaagagcaagttaa

SEQ ID NO: 211901 - DNA, 946 bp, Unknown
  Bacterial polypeptide expressing nucleotide sequence isolated from the Sargasso Sea
tatgaaaactagtaagaaaatatatttaatatcacctcgtggattttgtgctggcgttacccgcgcaattgaaatagttgaactagcaatcaaaaaatatggcccaccagtttatgtgaatcacgaaattgttcataacaaatatgtcatagatgaattgagtgataagggtgcagtttttttagataatataaatgatgcgcccccagatcgtccatttatcttttccgctcacggtgtttcaaaggatgttgagctacatgcaaataaaaaaaataaaatagttattaatgcaacatgtccacttgtaaccaaagttcatgttcaagctatgaagttttttgaattgggttaccgcattattctaattggacataaaaaccaccctgaagtaataggaaccatgggccagcttccaagcggcagcatagaacttgttgaaacggtaagtgatgtgatgaaactgtctataaatgacaatgataattttgcctatttaactcaaacaacactctcactcgatgatacaaaaaaaataatagaagcattaaaagttcgattacctaaaataatttcttctccaaaagaagatatttgctatgcaacctcaaatcgtcaaaaagcaataaaagaatacgctcaaatgtgtgatgcttttatagttgttggatcaagtaattcatctaattctaatcgcttggtggaagttgcaaaaaatgcaggttgtgagaactcaattctcttggaaaacgaagttaatctaaatataaaagactatgagcttatgacgtcaattggtatttcttcaggcgcatcggttcctgacatactggttaaaaatgtaattaataaatttgcagaattttatcaagttacgattgaagagctcagtttaggaaatgaaaatgtaacttttaaattacctaaggaattgagagttggttaa

SEQ ID NO: 211902 - DNA, 943 bp, Unknown
  Bacterial polypeptide expressing nucleotide sequence isolated from the Sargasso Sea
atgactaaaaaacttaatatctttcttgcaggacctcgaggtttttgtgcgggagtagatagagcgattgaaatggttaagggtgctctaaaaaaatatggggcgccagtatatgttcgtcatgaaatagttcataataaatttgttgttgaaaatcttaaatcacagggagcaatttttgtagaagaattaaatgagattgaagataaaagcaggccagttatcttttctgcacatggtgttccaaaagcagtacccgaagaagcgttaagtttaaatttaatatattatgatgcaacatgtccacttgttagtaaaattcataaggaggtagaaaattttgataaaaaaaatctccccgtaattttaattggtcatagaaatcatcctgaggttataggaactatgggtcaaactaataaagaaatttatttggtagaaaaagttgaagatgtaaaaaagttaccctttgaacaaaatgataagattgcatatgtaactcagacaactctatcagtagacgatacgaaagatataataaaagagataaaatcacattttaaaaatgttatagaaccgaaaaaaaatgatatttgttatgctacaacaaataggcaagaggctgttaaaaaaatagctaaccaatgtgattattttttagtaattggtgcaagtaactcatcaaattctttaagattagttgaagtagcaaaaaattatggttcaaaaaaagctattttagtagaagatgtagattccttaaatttaaatatatttcaagaatctgaaaatataggaataacagcgagtgcatcatcaccagaaatacttgttagaaaactccttgataatttgaaaaaaaattttgaattacatgtaaatgagggacattatcaaaaagaagatgtcttttttaaggttccacaaaaattaaatatttaaa

SEQ ID NO: 211903 - DNA, 809 bp, Unknown
  Bacterial polypeptide expressing nucleotide sequence isolated from the Sargasso Sea
aatgaacttaaaattaaaaaaaatattataccttccgcatccaagaggattttgtgctggagttgatagggcaataaatattgttaagctgtctttagacaaatatggtccgccaatttatgttaggcatgaaatagttcataacccatgggttattagagatttggaatctaaaggagttatatttattgaaaatctaagagatgcacctgaaggttcgagggtaattttttctgcacatgggataccaataagcgtactaaatgaagcgaaaaatagagaaatgccatttatagacgcaacctgccctctagttataaaagtacataacgaagcaaaaagactttacaaagatggagcacacatctttcttattggtcatgagggtcatccagaagttataggaacaatgggtcaaatcccgcaagatgccattacattgatacaaaaaaaagaagatattaaaaaaatagataataataattatggaaaggtagcgctgattacccaaaccacattgtcagttgatgacactaaagaaattattgaagatttaaaaaatatctttccagaaataatccaacctcctaaagaagatatttgttatgcgacaacaaatagacagctagctataaagtccatagcaaatgattgtgatctaatttatgtaattggcgccaataattcatcaaactcattaagattagtagaggttggaaaaaaatctggctgtaatcaaacacatttaatatctgatgtatctgaagttgattggctagagatagaaaaacggcaaaaaataggactaa

SEQ ID NO: 211904 - DNA, 862 bp, Unknown
  Bacterial polypeptide expressing nucleotide sequence isolated from the Sargasso Sea
agaaagtatagaaaaatatggtgctcctgtatacgtaagacatgaaatagttcataacaaacatgtagtagacggcttaaaaaaaattggtgcagtatttgttgaagagattgatgaaattgaagataaaacaagacctgttatcttttcagctcatggtgtgcctaaatctgtgcctaaagaagcagaaagtttaaatatgatatttgttgatgcgacatgcccattagtatccaaagttcatagagaagcagaaaatttagataaaaaagatgttcaagttttgcttataggtcataaaaaccatcctgaagtaattggaacaatgggtcaagtagcgagtggaaagattgatcttattgaaactatagatgatgcaaaaaattatcaaagaggtgaaaataaaaaacttgcttatattacacaaacaacattgtcagttgatgatactaaagatattataaacgttttaaaagaacgctttcctgatattctcgaacctaaaaaagatgatatttgttatgcaactacaaataggcaagcagcagtcaaaaaaattgcaaaagagtgtgataatctttttgtaattggtagtaggaattcttctaactcagttaggctagtagaagtagctaaaaataatggatgcgaacatgctgaattaattcattcagaaagcagctttccgcttgaaaaaatatctaaatgcaaaacaataggtatttcatctggtgcctcagctcctgaagtattagttaatgaattcatagaaaatattaaaaaaaaatttactgtagaaatagaggaagtcgaaatagtaaaagaggatgtaacatttaaaattccaggaaaattaaattaa

SEQ ID NO: 211905 - DNA, 670 bp, Unknown
  Bacterial polypeptide expressing nucleotide sequence isolated from the Sargasso Sea
atgaaaaataaaaatttaaaagttttattagctgctcctagaggattttgtgctggggtcgatagagctattgaaatagtaaaaaaaagtatagataagtacggatcccctgtctatgttcgtcatgaaattgtacataataaacatgttgtagaaagtttaaaaaatattggagcaatatttgttgaagaattaagcgagattaaagataaaagtaggcctgtaatattttctgctcatggagtgccaaaatctgtcccggaagaagcatctaaactgaatatggaatttgttgatgccacttgtcctttagtatcaaaagttcatagagaagcagaaaacttaaataaaagagatgtacatgttcttttaataggtcacaaaaatcatcctgaggttataggtacaatgggtcaattaccggaagataaaatagatcttattgaaaatattgaagatgcaaaaaattatacaaaaaaaaataataataaattagcttatgttacacaaactactctgtctgtggatgatacaaaagaaattgtagaaactttaaaaaaaagatttccagaaattcaagaacccaagaaagaagacatttgttatgcaactactaatcgtcaggctgcagttaaaaaaagagcacctcaatgtgatatgttttttgtta

SEQ ID NO: 211906 - DNA, 687 bp, Unknown
  Bacterial polypeptide expressing nucleotide sequence isolated from the Sargasso Sea
aagaggctaaaattaaaaaactctcttatgtagatgcaacttgtcctttagtatcaaaagttcatagagagtctgaacaactctataaaaaaggttatgatattatcctaataggtcacaataaccatcctgaagttataggaacaatggggcaattaccgaggggtgcaataaaattagttgaaacaataaaagatgcgaaatctttaagcgaaaaaaattttagtaaaccaacagcatatataactcaaactactttatctgtagatgatacagctgaaattatagatttacttaaaaaaaaatttccagatattaaaggtccaattaaagaagatatatgttacgcaacaaccaatagacagatagcagtaaaaaagatagctcctaagtgtgacatgttttttatcattggtagtagaaattcatcaaattcttctagattagttgaggttgctaagaaagcagggtgtcaaaattcattgctaatgcattctgaaaaagaaattccatttgaagatattgcaaattcaaaagtaattggtatatcttcgggtgcctctgctccagaacaattagttcaaaatttaattaaggaaatagaaaaagattacctggtatctattgaagaggtaactgttgctgaagaaaaagtagttttcaaattacctaaagaattaaattaaa

SEQ ID NO: 211907 - DNA, 610 bp, Unknown
  Bacterial polypeptide expressing nucleotide sequence isolated from the Sargasso Sea
atggacactcaagcttttagaagatctcttcatcattcggacagatataaccgaagaggttttgactctcccactaaaagagcccaagctttagaagaagcttaccaaagtgatttaatcaactcaattagaaataatagttttacatataaaaaagggagattaaagataaaattagctcaggcatttggtttttgttggggagttgaaagagctgttgcaatggcctatgaaactagaagacattatcctaatgagaatatttggataacaaacgaaataattcataatccctcagttaatgatcatttaagaaaaatgaatgttaaattcatttcagcaaaaaatggtattaaggatttttctttggtttcagatggagatgtggttatcttgccagcttttggtgctactgttcaagaaatgaaacttcttcatgaaaaaggttgtcatattattgatacaacgtgcccttgggtttcaaaggtgtggcatacggtagaaaaacataaaaaacatacttttacatctattattcacggtaaatttaagcatgaagaaactcttgctactagttcatttgcggataaatatcttgtagtacttaatc

SEQ ID NO: 211908 - DNA, 711 bp, Unknown
  Bacterial polypeptide expressing nucleotide sequence isolated from the Sargasso Sea
tatgcaaattcatttagctaaccctcgtggcttctgcgcgggcgttgatagagctatcaccatcgttgaacgcgcgcttgaaatgttcgagccgcccatttatgtacgccacgaagtggtacacaataaatttgtggtagatgggctacgtgagcgtggtgcgctatttgttgatgagcttcacgaagtaccagacgacagcatagtaatattttctgcccatggcgtatcgcaagcggtaagaaaagaagcggaaaatcgcggtttaaaggtctttgatgccacgtgccccttagtgacgaaagtacatatggaagttacccgcgctagcaaaacgggtactgaatgtatcttgattggtcatgctggtcaccctgaagtagagggcaccatgggtcagtacagcaacgaagatggcggtatttatttagttgaatctgaagctgatgtggcaacgcttgaagttaaagatccgaccaatctttattattgcagccaaactacgctgtctgttgatgataccgccgatgttattgacgcacttcgcgctaagttccccaaaatcaatggtccgagaaaagacgacatttgctatgccacgcagaatcgccaagacgcggtgcgtgacctagcccaagattgtcaggttttactggttgttggggcacagaatagctcaaactcgaaccgtcttcgcgagttggctgaaaa

SEQ ID NO: 211909 - DNA, 946 bp, Unknown
  Bacterial polypeptide expressing nucleotide sequence isolated from the Sargasso Sea
atggaaaataataaactcaaaatctatttagctgccccaaggggtttctgtgctggcgttgatagagcaattgagatcgttaaaaaaagtctcgacaaatatggagcgccagtatatgtcaggcacgaaattgtccataataagcatgtcgtcgaaagcttaaaagaaattggtgctgtatttgtcgaagaattagaggaaattcatgataaatcaaggcctgtgatattttcagctcatggggtaccaaaatctgtgattaaagaagcaagcaatctcaatatgatatttattgatgcaacatgcccattagtgtcaaaagtccacagggaagcagaaaatttatacagacacggaatgcatataatactcatagggcatgagaatcatcctgaggtaattggtacgatgggtcaattacctgatggtgctattgatttaattcaaagtgttactgatgctgaaaactatgatccaaaaacagataagaatttagcgtatattacgcagactactctatcaattgatgataccagtgaaataattagttgcttaagcaaaagatttcctaaaatacactcaccaaaaaaagaggatatttgttacgcaacaacaaaccgtcaaatagcggtaaaacaaattgctgataaatgtgatatgttttttgttattggtagtagaaattcatctaattcagttaggttggtcgaggttgcgcagaagactgggtgcccagattcgcagctaattaactccgagagtaaatttccaattgatagaataaggaattgcagtactattggtatatcttctggtgcgtctgcacctgaaattcttgtagagttgtttatatcaaaattaaaaaaggagtttgatcttgatattgaagaggttgaggcggtaaaagaggatgtaacttttcgtgtaccaggtagtttgagttgaa

SEQ ID NO: 211910 - DNA, 391 bp, Unknown
  Bacterial polypeptide expressing nucleotide sequence isolated from the Sargasso Sea
aatgacaaaagaaataaaattagctaatccacgaggcttttgtgctggtgttgatagagcaatagacattgttagtaaagctcttgatatatatggagctcctgtgtacgtaaaacatgaggttgttcataataaagtagttgttgaggatttgagaaataggggcgcaatattcattgaggaaattgacgaaattcctgatgattctttagtaatttttagtgctcatggggtatccagtgaggttgaggaaactaccaaagctagaaatcttaatttctttgatgccacatgtccattagttactaaagtgcatatggaagtaagaaagcacgctaaggcaaacagagatattattttaattggtcatgagggtcatcctgaagtagaa

SEQ ID NO: 211911 - DNA, 949 bp, Unknown
  Bacterial polypeptide expressing nucleotide sequence isolated from the Sargasso Sea
atgagtaaaaaattagatctatatttggcagggcctagaggtttttgcgcaggggttgaaagagcaattttgatggtaaaagaagcaatcaaaaaatatggcgcaccagtttatgttaggcatgaaattgtacataataaatttgtggttgaaaatttaaaaaaagaaggtgctatatttattgacgaattagatgaaatgaaagatagaaaaagacctgtaatattttcagctcatggagttccaaaaaaaataccagatcaagcaaaaaatttaaatttaattttttatgatgctacttgtccacttgtgagtaaaatacatagagaagttgaaaattttgaaaaaaataaacttccaattattttaattggtcatcataatcatcctgaagtcattggaacaatgggacaagttaaatcaaaaatatacttagtagaaaaaattgaagatattaagtctttgccgttcagtaaaaaagataaaatagcttatgtaacccaaactactctatcaatagatgatacaaaagagatgattttagagattaagaaaaaattcccaaaagtaatcgagccaaaaaaaaatgatatatgctatgcaactaccaatagacaagaagcagtaaaacgaattgcttcaaattgtgatttttttcttataattggatcaagtaattcttcaaattcactgcgcctagttgaagttgccaaaaattatggtgccaaaaagtgcattcttgtagaaaatatatatgaactggataatgaaatttttcaaaatgctaaatcaattggcattacagcaagtgcatcttctccagaaatactagtaaagaaattgattgaaaaattatctaaaaaatatgcgcttaatataattgagtcatcttataaaaaagaggatgtatattttaaaataccccaaatgctaaaagaggctatataaa

SEQ ID NO: 211912 - DNA, 583 bp, Unknown
  Bacterial polypeptide expressing nucleotide sequence isolated from the Sargasso Sea
attttattaatagggcacagaaatcaccctgaggttatcggaacaatggggcagttagagaatggaggaattgatttaatagaaaatattgaagatgctaaaaattatcaaaacaaatctaataaagaattagcatatgtcacccaaacaacattatcagtagacgacacaaaagatataattgctgaattaaagagaaaatttccagaaataaaagaaccaaaaaaagatgatatttgctatgctacaactaatagacaatccgctgttaagaaaattgcaagtttctgtgatatgttttttgtaattggtagcagaaactcatcaaattcagtcagattagttgaggtagccaaaaaatctggatgcgaaaattcattacttatccattcagagagtgaaataccatttgataaaattgataaatgtaaaacaattggtatatcgtctggtgcatcagcacccgaaatactagttgaagaatttattaataatttaaaaaaaaaattcaatatcaaaatcgaaaatactgaagtcataaaagaagatgttacttttaaagttcctggtaagttaaattaat

SEQ ID NO: 211913 - DNA, 946 bp, Unknown
  Bacterial polypeptide expressing nucleotide sequence isolated from the Sargasso Sea
atgaagattaatgatttaaaaatatacttagcatcaccaaggggtttttgtgcgggtgttgatagagctattgaaatagtaaaaaaaagtatttcaaaatatggtgccccagtatatgtcaggcatgaaatagttcataacaaacatgttgttgaaagcttaaaaaaaattggagcaatatttgttgaggaattgaatgagattgaggacaaatctagaccagtaatattttctgcgcatggtgttccaaaaaaaattcctaatgaagcaaaagaactaaatatggaatatgttgatgcaacatgcccactcgttaccaaagtacatagagaagctgaaaatttatataaaaatggttcacatgttcttttgattggccacaaaaatcatcctgaagtaataggaactatgggtcaaattccatctgatggtatagatctaattcaaagtttagatgatgtggttaagtatactaaaaagaatgataaaaaattagcatttattacacagacaaccctgtccgttgacgatacaaaagatataattgatggattaaagaagaaatttccagagataagagaaccaaaaaaagaagatatttgctatgcgactacaaatagacaagctgcagttaaaaaaatcgcaaataaatgtgatatgttttttgttattgggagtagaaattcatcgaattctttaagactagtagaagttgcaaaaaattcaggttgtgaaaattctatgctcctacattcagaaagcgaagtaccatttgataaaattgataagtgcaaaagtattggtgtctcttcaggtgcatccgcaccagaagtattagtggaacaatttttagatcagataaaaaaaaaatataatacttctgtcgaagaggttgaaattgtaaaagaagatgtaactttcaaaattcctggaaaattaaattaat

SEQ ID NO: 211914 - DNA, 319 bp, Unknown
  Bacterial polypeptide expressing nucleotide sequence isolated from the Sargasso Sea
atgaaaaataaaaatttaaaaattttattggcttcaccaagaggattttgtgcaggagttgatagggcaatagaaatcgttaaaaaaagcatagataaatacggatcacctgtttatgtaagacatgaaattgttcacaacaaacatgttgtggatagtttaaaaaaaataggagctgtatttgtagaagagctagatgaaataaaagataagactagaccggttattttttccgctcatggagttccaaaatctgttcctgaagaagcttcaaatttaaatatgacatatatagatgcaacatgccctcttgtttcca

SEQ ID NO: 211915 - DNA, 940 bp, Unknown
  Bacterial polypeptide expressing nucleotide sequence isolated from the Sargasso Sea
atgactaaacagattaaattagcaaatcctcgcggtttctgtgctggcgttgatagagcaattgatattgtaaataaggctttggatatatacggagcgccagtttatgtaaaacatgaggtcgtacataataaagttgttgttgcagacttaagagatagaggtgcaatttttgtagaagaaattgatgaaattccagatgattcacttgtaatttttagtgcacatggtgtttcaagcgctgtagaagaagaaacgaaatcaagaaatttaaatttttttgatgcaacatgtccacttgtcacaaaagttcatatggaagtcagaaagcatgcaaaagctagtaaagatattattctagttggtcacgaaggtcatccagaagttgaaggaacaatgggtaggcacataaattctgataatagttcaatataccttgttcaaaatgagtcagatgctaaaaatataaaaattaataatccaacaaaattagctttagtcacacaaaccacattaagcgttgatgaaacaaaatcaattattgatattttgaaatataggtttccagatatagatacgccaaagaaggatgatatttgttatgccacacaaaatcgacaagatgctgtaaagcagcttgctcttgaatcagattttatgattgttgtgggttcaaaaaatagctcaaattcaaatagacttagtgagctagctgaaaaatgtggctgtagatcaattctaatcgatgaatttacagatattgatttagatgatttaaaaaattattctaaaatttctattactgcaggtgcttcagctcctgaatcaaaagttatggaaattgcaaaatctttagaactgcacacagatgctgaaattattgagcatggtgaagacaatgaagatatttactttaaattacctccaggattgagataaa

SEQ ID NO: 211916 - DNA, 609 bp, Unknown
  Bacterial polypeptide expressing nucleotide sequence isolated from the Sargasso Sea
aaaatttaaataaaaaagatgttcaagttttgcttataggtcataaaaaccatcctgaagtaattggcacaatgggccaagtagctagtggaaagattgatcttattgaaactttagatgatgcaaaaaattatcaaagaggtaaaaacgataaacttgcttatattacacaaacgacattgtcagttgatgatactaaagatattataaacgttttaaaagaacgctttcctgatattcacgagcctaaaaaagatgatatttgttatgcaactacaaataggcaagcagcagtgaaaaagatagcaaaagagtgtgataatttgtttgtgattggtagcaggaattcttctaattctgttaggttagtggaggtagcaaaaaataatggatgcaaaaatgctgaattaattcattcagaaagcacttttccacttgaaaaaatatccaaatgcaaaacaataggtatttcatcaggtgcctcagctcctgaagtattagttaatgaattcatagaaaatattaaaaaaaaatttactgtagaaatagaggaagttgaaatagtaaaagaagacgtaacatttaaaattccaggaaaattaaattaat

SEQ ID NO: 211917 - DNA, 502 bp, Unknown
  Bacterial polypeptide expressing nucleotide sequence isolated from the Sargasso Sea
atgggcaagcagttgaacgtgttgctagcgagcccccgggggttctgcgccggtgtggaacgcgcgatcgagatcgtggagcgcgcgctagacctctatggaccgcccgtctatgttcgccacgaaatcgtccacaataagcatgtcgtcgaatcgcttcgcgagaagggcgcgatctttgtggatgaagtggatgacatccccgaaggcgcacatgcgatcttcagtgcccacggcgtctccgcgactgtcgttgacgccgccgcctacaggggcctggaaatcatcgacgcaacatgccccctcgtctctaaggtccacaaggaaggacagaaccatgtgggcaaagggcgccaagtcattctgattggccacgcgggccatcccgaggtcgagggcacccaaggccaaattcccggcggtgtgcttttggtcacacatcccgacgaagtgtggaagctccgcgtcgatgatccggatcaactggcatatgtgacgcaga

SEQ ID NO: 211918 - DNA, 604 bp, Unknown
  Bacterial polypeptide expressing nucleotide sequence isolated from the Sargasso Sea
aatgaaaagcaaagaaattaaaattttacttgccgccccacgtggtttctgcgctggagtagagcgtgctatagaaattgtaaaaaaaagtattaataaatatggagctccagtctatgtaagacacgaaattgttcataataaacatgtggttgacggtcttaaaaaaattggtgctatttttgttgaagaacttcatgaaataaaagataaaaccagaccagtaattttttctgctcatggtgtaccaaaaaaagttcctgttgaagcggaaaattttaaaatggaatatgtggatgcaacatgtccacttgtgtcaaaagtccatagagaagccgaaaatttaaacaaaaatggagtacagattttattaattggacataaaaatcatccagaagttataggaactatgggtcaaattcctgagggtgaaatagatcttattgaaactatagaagatgctaacaattatcaaaataaatctaaaaaaaaattagcttttgttacgcaaacaactctttcagttgacgatacaaaagaaataatatcagctttaaagaaaaaatttccagaaattaaagagccaaaaaaagaagatatttgt

SEQ ID NO: 211919 - DNA, 943 bp, Unknown
  Bacterial polypeptide expressing nucleotide sequence isolated from the Sargasso Sea
atgcgagtcatccttgcccagccccgcggcttttgtgcgggggttgtccgtgcgatcgagatcgtcgatcgcgcgctgcaacagcacggtgcgccggtctatgtgcgtcatgagatcgtgcataaccggcatgtcgtcgagaatctgcgtaataaaggggcccgattcgttgaggaactcgacgaggtgccccacggcgctgtcgcgatcttcagcgcgcacggtgtcgcccagacggtcgagcgcgacgcggaaacgcgcgggctcgacgtgctcgacgcgacctgcccgctcgtcacgaaagtgcacgtgcaaggccgccagtatgtcgcggcgggccgccggctgatcctgatcggccatgcgggccacccggaagtcgaggggacgatcggccagattccggccgaggtgatcctcgtgcagagcgaagccgaagtcgatacgctgacgctgcccgtcgacacgccggtcgcgtacattacgcagaccacgctgtcggtggacgatacgcgcggcatcatcgaagcgctgcagcgccggttcaccgacctcgtcggcccggacacgcgcgacatctgctacgcgacgcaaaatcgccaggccgccgtgcgcgagctgagcgaacaggttgacgtgctgctcgtggtcggtgcgacgaacagctcgaactcgaaccgcctgcgcgagatcggcaccgaaagcggtgtgccgagctacctcgtcgccgacggttcggaagtaaaggccgaatggttcgcgaatgcgaagaccgtgggcctgaccgccggggcgtccgcgcccgaggagatggtcgaagatgtcatcggcgcgttgcgcgcgctgggtcccgtcgacgtcacgacgatggcgggccgtgaggaaaaagtcgaattcaagctgccggcgaagctcacgcaagctgtcgcccgcgaagtttaag

SEQ ID NO: 211920 - DNA, 571 bp, Unknown
  Bacterial polypeptide expressing nucleotide sequence isolated from the Sargasso Sea
aggtcataaaaaccatcctgaggtaattggtacaatgggccaagtagctaatggaaagattgatcttattgaaactatagatgatgcaaaaaattatcaaagaggtaaaaacgataaacttgcttatattacacaaacaacattgtcggttgatgatactaaagatattataaatgttttaaaagaacgctttcctgacattcacgagcctaaaaaagatgatatttgttacgcaacaacaaataggcaagcagcaattaaaaaaattgcaaaaaagtgtgataatttattcgtgattggtagtaggaattcatccaactcggttaggctggtagaagtagctaaaaataatggatgcaaacatgctgaactaattcactcagaaagcacttttccactagaaaaaatatctaaatgcaaaacaataggtatttcatctggtgcctcagctcctgaggtattagttaatgaattcatagaaaatattaaaaaaaaatttactgttgaaatagaggaagttgaaatagtaaaagaggatgtaacatttaaaatcccaggaaaactaaattaa

SEQ ID NO: 211921 - DNA, 883 bp, Unknown
  Bacterial polypeptide expressing nucleotide sequence isolated from the Sargasso Sea
cgtctgggcgtgtggtgggagcagccggacacgtggaacgaatacttcggcgcgttggagcggtacaaggaaggacccgggaacggcgacccgaactgtctgcgtgcctacgtcgaccccgagaccggcctgaggctcggcgcgtggctcgccacccagcgtcagttgaagaggcggacgcgcaacccgctcgagcccgcacgcgtcgagcgtctggaacgtctgggcgtgcggtgggagcagccggacacgcacacgtgggacgaatacttcggcgcgttggagcggtacaaggaaggaccagggaacggcgacccgaactgtgcccaaagctacgtcgaccccgacaccggcctgaggctcggcgtgtggcttagccaccagcgtcagttgaagaggcggacgcgcaacccgctcgagcccgagcgcgtcgagcgtctggaacgtctgggcgtgtggtgggagcagccggacacgtgggacgaatacttcggcgcgttggagcggtacaaggaaggaccagggaacggcgacgcgaactgtccgcgtgactacgtcgaccccgagaccggggtgaagctcggttcgtggcttacctaccagcggaagataaagaagcggaagaagaacccgctcgatcccgagcgcgtcgagcgtctggaacgtctgggcgtgtggtgggagcagccggacacgtggaacgaatacttcggcgcgttggagcggtacaaggaaggaccagggaacggcgacccgaactgtccgcgtgcctacgtcgaccccgagaccggcctgaggctcggcgcgtggctcgccacccagcgtcagttgaagaggcggacgcgcaacccgctcgatcccgcgcgcgtcgagcgtctggaac

SEQ ID NO: 211922 - DNA, 898 bp, Unknown
  Bacterial polypeptide expressing nucleotide sequence isolated from the Sargasso Sea
ggctcgtacatcaagggcaccaacggcaagtcgcagggcgtcgtaccgttcctgaaagtggtcaacgacaccgccgtagcagtcaaccagggcggcaagcgcaaaggcgccgtgtgtgcgtacctggaaacctggcacctggacatcgaagagttcatcgagctgcgcaagaacaccggtgatgaccgccgtcgtacccacgacatgaacaccgccaactggattcctgacctgttcatgaagcgtgtcttcgatgacggcaagtggaccctgttctcgccttcggaagtgccagacctgcacgacctgaccggcaaggccttcgaagagcgctacgagtactacgaagccctgaccgagtacaacaagatcaaggtgttcaagaccgtccaggccaaagacctgtggcgcaagatgctgtcgatgctgttcgagaccggccacccatggctgaccttcaaagacccgtgcaacctgcgttcgccgcagcagcacgtgggcgtggtccacagctcgaacctgtgcaccgagatcaccctgaacaccaacaaggacgagatcgcggtctgcaacctgggctcgatcaacctgccgaaccacatcgtcgacggcaagctggacaccgccaagctgcaacgcaccgtgaacaccgccgtgcgcatgctcgacaacgtgatcgacatcaactactactcggtgccgcaagcgcgtaactcgaacttcaagcaccgtccggtcggcctgggcatcatgggcttccaggatgcgctgtacctgcagcacattccttacggctccgatgctgccgtcgaatttgccgacaagtcgatggaagcggtcagctactacgccatccaggcttcctgcgacctggccgatgaacgcggcgcctacgaga

SEQ ID NO: 211923 - DNA, 883 bp, Unknown
  Bacterial polypeptide expressing nucleotide sequence isolated from the Sargasso Sea
gtcgccgtcaccaggggtggcaagcgcaagggcgcggtctgcgcctacctggaaacctggcacatggacatcgaggaattcctcgagctgcgcaagaacaccggtgacgaccgtcgtcgtacccacgacatgaacaccgccaactggattccggacctgttcatgaagcgcgtcttcgaagacggcaagtggaccctgttctccccgagcgaagtgccggacctgcacgacctgaccggcaaggccttcgaagagcgctacgagtactacgaggccctgatcgagtacggcaagatcaagctgtacaagaccatccaggccaaggacctgtggcgcaagatgctctcgatgctgttcgagaccggccacccgtggctgaccttcaaggacccgtgcaacctgcgcagcccgcagcagcacgtcggcgtggtacacagctccaacctgtgcaccgagatcaccctgaacaccaacaaggacgagatcgccgtctgcaacctgggctcggtcaacctggtcaaccacatcgtcgacggcaagctggacatcgagaaactcggccgcaccgtcaagaccgctgtacgcatgctcgataacgtcatcgacatcaactactacagcgtcgaccaggcacgtaactccaacttcaagcaccgtccggtcggcctcggcctgatgggcttccaggacgccctgtacctgcagcacatcgcctacggctccgacgctgccgtcgacttcgccgacaagtcgatggaagccatcagctactacgccatccaggcttcctgtgacctggccgaagagcgcggcgctacagcaccttcgaaggttcgctgtggagcaagggcatcctgccgctggattcgcagcagatcctgat

SEQ ID NO: 211924 - DNA, 572 bp, Unknown
  Bacterial polypeptide expressing nucleotide sequence isolated from the Sargasso Sea
acttatttctagattaaaggcagtagttgcaggggatgagtatctcgatgatgattttgatgagttgggttatccttcagaggatgaattaaatgatattaataatttcaaacaaaatccaaagaatgcaaatacccttgctaattccaatccattcgattttatgaataacaacagatcatcaaaagtagttggtatgcctggaatcacaaattcatcctcagaagtaagcttaatggaaccaagaagttttgatgagatgcctcaagcgatacaagcattaagagaaagaaaaactgtaatactcaatttaactatgatggatcctgatcaagctcaaagagcggttgattttattgctggtggcacatatgcaattgatggacatcaagagagagtcggtgaaagcattttccttttcgctccaagttgtgtaaatgtaactagttcttccccagaagaagcttctccttcttctgtatctacagaaaacacaccacaatatagtttgggcaaaaatactactcctgaaccagcatggggtaattctaaattaagtgcttattcatgat

SEQ ID NO: 211925 - DNA, 539 bp, Unknown
  Bacterial polypeptide expressing nucleotide sequence isolated from the Sargasso Sea
attgtgtgatggatcagtgataacctaccctcaaatatttatagacggacgtcgcatcggaacatattttgattttcaggactacatcgaagaagaatacgaacctattctcgctccaaccctaaacaggttcacagttttccctctaaaatacccagaactttgggaactctataagaaggctcagatgtctaattggacagctgaagaagttgacctttcaaaagacctcgatgactggaaaacactaaacgataacgaacagaaattcattaaatatattctagcattttttgctggttccgatggcatagtttttgagaacatcaataataacttcgctgatgaggtgcaaatctctgaagcgcgttcattctatgcttaccaatctcacaatgaaatggttcatggtgagacttactctaaacttattgacaaatacattaaggacggtgccgaaaagaaacaactctttgaagctatacaaacagttccctgtatagaaagaaaggctaattgggctctaaaatggtttaaca

SEQ ID NO: 211926 - DNA, 325 bp, Unknown
  Bacterial polypeptide expressing nucleotide sequence isolated from the Sargasso Sea
cggtctttcagatatgtatggtgacgatttcgaaaaactttacacaaagtatgaaaatgaaatgaagcatttagaaaaaattaaagcacgagatctgatgtctaaaattatagaagcacagatagaaacaggacagccttatatgctctataaagacgcaatcaacaacaagtctaaccaaaaaaacattggtgtcattaaatcttcaaacctatgtgcagaaatagttgagtactctgataagaatgagacatctgtgtgtaatttggcttctatagctctaccaaaatttgtaaaaaaatctgaaaaaaagataatatatgac

SEQ ID NO: 211927 - DNA, 250 bp, Unknown
  Bacterial polypeptide expressing nucleotide sequence isolated from the Sargasso Sea
tatgcgtaactctacgctatcagcattaatgccgtcagagacgtcttctcagatttctaacgcgacaaacggcattgagccaccgcgtggctttatcagcattaagtcgagcaaagatggtgttcttaagcaagttgtacctgagtacgaaacgctaagagaccaatacgagctactttgggatattccttcaaacgatggttacctacaacttgttggtatcatgcagaagtttatcgaccaaactatc

SEQ ID NO: 211928 - DNA, 535 bp, Unknown
  Bacterial polypeptide expressing nucleotide sequence isolated from the Sargasso Sea
aatgaatagcaatatgacagtcacaaaacgctgtggtgcacgtgagacaatcgatctcgacaagatacaccgcgtaattacttgggcagccaagggattaaaaaacgtttctgtttctgaagttgaacttcgcacgcatttacagtttttcgacgggatcccaaccgaagctatccacgaaacgatcatcaaatctgcggcggatttaatttccccagaatcaccggattatcagtttctggctgcgcgcttagccgtattccatttacgtaagaaggcctttggtcagttcgaaccgccaaagttatacgaccatgtgactaaactggtcgagcttggcaagtatgatatgcatattctgcaggattacacccgcgaagaactcgatattatggacagctatatcgaccattggcgcgatatgaacttctcctacgcggcggtaaaacagctcgaaggtaagtatctggtacaaaaccgtgtgacccacgagatctacgagagcgcccagttcctctatattctggtggcggcc

SEQ ID NO: 211929 - DNA, 700 bp, Unknown
  Bacterial polypeptide expressing nucleotide sequence isolated from the Sargasso Sea
aatggcagttaccaaaagggatggtaacaaagaagacatttctttagaaaaaattacaaaccgtatatctattttatcaaatggattagagattgactctattacgattgcacaaaaagctatccaaggtttatacgatggtatcacaacaaacgaaattgatacttacttagctgagacagctgctgctttgacagtggaacatcctgactattcttatttggctggaagaattaaagctaacgcattacacaaagaaacacctggttttattattgcaacaaaaaatctttacgaagatggtttgttacgcgatgagtattatgaaaaggtaaaagctaatgctgaagaaatagaaaaaattatcgattatgatcgagattattattttgactatttcgcattaacaactttatttagagcttatcttctccaatcaaataacaaaactgcagaaagacctcaagatttatggatgagagtagctctgtgtgtttcgggtgataagtttgatttttatcaggttaaaaaaacatatgacagtttatcccaaggtttttacacacatgcaacgcctactcttttcaatagtggattgaaaatgcaacagttatcatcttgctttttaattggaatggaagacgattctattgaagggatttttaatacagtgaaagactgtgctttgatttccaaaaca

SEQ ID NO: 211930 - DNA, 676 bp, Unknown
  Bacterial polypeptide expressing nucleotide sequence isolated from the Sargasso Sea
tcaaaattagctacaaaaaacctagatcaagtaattgatattaatttctacccaacaaataaaaccgaaagctcaaacagtaagcataggccaataggacttggtatacagggcttggctgatgtatattttaaactaaaccttccttatgatggcgataaagcttcagaaataaataaattaatttttgaaacaatatattttggagcccttgaagcttcttgtgaattagctaaagaaaaaggcacttactcatcatttaaaggatctcctctatcaaaaggaaagtttcaatttgatttatggaatataaaaccttctaatatgtgggattgggatacgctcagagaaaaaattaaaaagtatggggttagaaactctttaactacagcttgtatgccaacagcttcaacaggaattatacttggaaataccgagacatttcaaattcaaacatcaaacatatataaaagacaaaccttatctggagaatttttattagttaatagattcttggtaaaagaactctctaaaagaaatttgtggaacaaagctatgagggataatataattcttgaaaatggatctgtgcaaaatatcccaaattttcctgaagatttaaaagaagtctataaaacagtttgggaaacttctcaaagaactgtaattgatatgg

SEQ ID NO: 211931 - DNA, 400 bp, Unknown
  Bacterial polypeptide expressing nucleotide sequence isolated from the Sargasso Sea
atgaatgataatttgtttgtcaccaaacgaaatggtgaaaaagagtctattgatttagaaaaaatccataaagtagtaacgtgggcggcaaaaggacttagcaacgtttctgtttcgcaagttgaaattaaagcgcaaatacagttctttgacggcattaataccagcgagatccacgaaacattaatcaagtcggcggcagatctcatttctaccgatgcccctgattatcaatatcttgctgcacgtctagctatcttccatctacgcaaaaaagcctacggacagtttgagccgccagcgcttatcgaccaagttaagcaaatggttgaaatgggcaaatacgatagccacctacttgaagactactctgctgaagagttcgccgaaatggaaacgt

SEQ ID NO: 211932 - DNA, 811 bp, Unknown
  Bacterial polypeptide expressing nucleotide sequence isolated from the Sargasso Sea
gataaaataacaaatagagtatctgttttatctactggtcttcatattgatcctattgtagttgcccaaaaagcgattcctggattgtatcctgatattacaagcacagaaattgataactatctttctgaaactgctgcagcattaactgttgaacatccagactattcttacctagctgcaagaattaaggctaattcacttcataaagaaactccaggttttgtaattgcaacaaaaaatttatacgaagatggtttgttaaaaaaagattattatgataaagttatggcaaatgctgaagcaattgaaacaattatagattacgataaagattataattttgattattttgcttttacaactcttataagagcatatttacttaaatttgaaaacaaaacaatagaacggcctcaagatttatggatgagagttgctcttactgtatcttgtgataattttgaatttaataaagtaaaagaaacatatgatagtctatcaaatggcctatatacacatgctacaccaactttatttaatagtggtcttaagatgcaacagttatcatcttgttttctgatcgccatggaagatgattcaattgaaggtatatttaatacaataaaagattgtgcgctaatatcaaaaacagcaggtggtattggcatgcatgcacataatataaggagtagtggtagtagaatcaaatcaactaatggaaaatctaatggattaatacccttcctaaaaattttcaatgaaaccgcaaagtctgtgatcaaggaggaggcaaacgaaaaggttcatt

SEQ ID NO: 211933 - DNA, 708 bp, Unknown
  Bacterial polypeptide expressing nucleotide sequence isolated from the Sargasso Sea
aaatagcaaaggaaaaaggagcttattctagttatgaaggttctccactctcagaaggaaaattacaatttgatttatggaatgtgaagccttcagacttatgggactgggatactttaagagaaaaagttaaaaaatatggagttagaaattctttaactactgcttgtatgccaactgcttcaactggaataatactaggaaatactgaaacatttcagattcaaacttccaacatatataaaagacaaactttatcaggtgaatttttgttggttaatcgatatttagtaaaagaattaactaaaagaaatttatggaacaaaacaatgagagataatataattttagaaaatggatctgtccaaaacatacctaacttcccacccgacttaaaagaaatttataaaacagtttgggaaacatcacaaagaactgtgattgatatggcagctgaccgagctccgtttatagatcaaactcaatctatgaatttatggctttcaaatcctactttcggtaaagtaaattcaatgcatatgtatgcgtggaaaaaaggtcttaaaacaggaatgtattatttaagaagtcgttctgctgtagatgccgttaaagtaacagtctcgtctgaaaaaaaagctaaagaagaatttcttaacaacaataatgaagataatccagaagaatgcttaacatgcagcgcttaaa

SEQ ID NO: 211934 - DNA, 526 bp, Unknown
  Bacterial polypeptide expressing nucleotide sequence isolated from the Sargasso Sea
gatgatgattttgatgatttggattatgcttcagaggatgaattaaatgatattaataatttcaaacaaaatccaaagaatgcaaatgcccttgcaaattcaaatccattcgattttatgaataacaacagatcatcaaaagtagttggtatgcctggaatcacaaattcatcctcagaagtaagcttaatggaaccaagaagttttgatgagatgcctcaagctatacaagcattaagagagagaaagactgtaattctcaatttaactatgatggatcctgatcaagctcaaagagcggttgattttattgctgggggcacatacgcaattgatggacatcaagagagagtcggtgaaagtatttttctttttgctccaagttgtgtaaatgtaactagttcttccccagaagaagcttctccttcttctgtgtctacagaaaatacaccacaatatagtttgggcaaaaatactactccagaaccagcatggggtaattctaaattaagtgcttattcatgat

SEQ ID NO: 211935 - DNA, 931 bp, Unknown
  Bacterial polypeptide expressing nucleotide sequence isolated from the Sargasso Sea
ggcaatctttacgacggtgtgtctgttgcagacatgagatctagcctaatcatgacagctagaacaaaagttgagaaagaaccaaactactcctttgtaactgctaggattttaatggatcaaattagaaatgaagctctggagtttttgggtatcgcagaagatgcaacatacggagatatgcaagaatattatcctaaagcacttctaagctacattgataagggtattgagctagatattcttaatccagaacttaaaacatttgatttaaaaaagataggtcaagcaatagatcacacaagggataaccaattcacatatcttggcttacagacactctatgacagatattttatccattcagatgatacaacatacgagctgccacaagttttctttatgagagttgctatgggtcttgcaatggaagaggagaatagagaagaaagagcaatagagttttacaacctaatatcaagttttgattacatgagttcaacacccacccttttcaactctggtaccgtaagaccacagctttcatcatgttatttatcaactgtcccggatgacctaaaaggtatcttcactgcgtatcaagatatggccctactatcaaaatgggctggaggacttggttatgattggaccccggtaagatcacttgggtcttatataaaaggaacgaatggaaaaagccaaggagttgttcctttccttaaagtagcgaatgatacagccgtcgcagttaatcaaggtggcaagagaaaaggtgcaatgtgctcatacctagaaacatggcatatggacattgaagagttcctagagcttagaaaaaatacaggagatgatagaagaagaacacatgatatgaatacagcgaactgggtgccagatcttttcatgaaaagagttcaaaatgatgaag

SEQ ID NO: 211936 - DNA, 643 bp, Unknown
  Bacterial polypeptide expressing nucleotide sequence isolated from the Sargasso Sea
aatggaatatgaatacgttataaaaagaaatggctctacagaaaaggtttattttgataaaattaacaatagattagaaaaactatgtagcaacctaagcatcaactcaacacgcgttactagaaatattacccagaaaatgtataatggaatcttaactagagaactggatgaactaggtgcacaaatagccgcatccctaagcactgaacatcctgattatggaattttagcaagtagaattattattagtaatcatcacaaaaatacatcaccttccttctctgaaactatgcggacactttatgaaaacaaggacgttcaaggaaaccaatcaccattaattagtaaagaactttttgaaacagtagaagcaaataaatctaagttaaacgatacgattaaatacgaacgtgacttcttttttgactattttggattcaagacattggagcgcagttacttaatgcgagttaaaagtgaaaatactagtaaacacaatttaaagggtgatatagttgagcgccctcagcatatgtttatgcgtgttgccttaggaattcacggtaaggccattaaagatgctattaatacatataatcttatgtccaataaatactttatccatgctacacccacgctt

SEQ ID NO: 211937 - DNA, 118 bp, Unknown
  Bacterial polypeptide expressing nucleotide sequence isolated from the Sargasso Sea
gatttcacttcaagggaaaacaaatttctttgaaaaaagagtttctgagtatcaaaaagcaggagttttaaataaagaatctgaagagactaaaattagttttgatgccgatttttag

SEQ ID NO: 211938 - DNA, 790 bp, Unknown
  Bacterial polypeptide expressing nucleotide sequence isolated from the Sargasso Sea
agaccaagttatagatatcaacttctaccccactagcaagactgatacctcaaataatttacatcgacctataggtttgggaattcaaggtttatcggatgtgtttttcaaattatcaattcctcatgatggtgaagaagcaggaaaaataaataaattaatatttgaaactatatattttggagctttagaagcttcaatggagttagcaaaagaaaaaggctcatattcttcctttaaaggttctccactatctgagggtaaatttcagtttgacctttgggatgttaaaccttctgaaatgtggaattgggatgcccttagagaaaaggtgataaaacatggagttaggaattctttaaccaccgcttgtatgcctacagcttctacaggcattatattaggcaatactgaaacttttcaaatacaaacatctaatatttataaaagacaaactttatctggtgaattcttattagttaatagacatttagttaaagaattatcaaaaagaaatctatggaataaagaaatgagagataatattattttagaaaatggatctgttcaaaatataagtaagttcccagaagatttaaaagaaatttataaaacggtttgggaaacttcacagcgtacagttattgatatggcagctgatagagcgccttttattgatcaaactcaatctatgaatttatggctttccaatccaacttttggaaaagtaaattctatgcatatgtatgcttggaaaaaaggtctaaaaacaggtatgtactacttaaga

SEQ ID NO: 211939 - DNA, 133 bp, Unknown
  Bacterial polypeptide expressing nucleotide sequence isolated from the Sargasso Sea
atggaactcatctcgctccaaggcaagacgaactttttcgaaaagcgcgtcggcgaataccaaaaggcgggcgtcatgaactccatcgggggcggcggtgtcaacgccttctccctcgacgaggacttttaag

SEQ ID NO: 211940 - DNA, 746 bp, Unknown
  Bacterial polypeptide expressing nucleotide sequence isolated from the Sargasso Sea
gatgctgggcatgatttttgaaacagggcatccctggatgaccttcaaggatccctgcaatctgcgctcgccccagcaacattgcggcgtagtgcattcatccaacctctgcactgaaatcacgctgaataccaatgctgaagagatcgcagtctgcaacctaggctcggtcaacttgccgcaacacattgaagacggcgagttgaacctcgacaagctgcgcagcacagtccgtacggcaatccggatgctcgacaacgtcatcgacatcaattactactcggtgccgcaagccgagacctctaacttccgtcaccgcccaatcggccttgggctgatgggttttcaggatgcgctctacaagatcgacgcatcctacggctctgacgacgcggtgacctttgccgaccggtccatggaggccatcagttacttcgctatcgaagcgtcgagtgagctggcgagcgagcgaggtaactattcgagctatgaggggtcactctggagccgcggcatcttcccgatggattcgctggatatcctcatcgagcagcgaggcgagcagtacattgacgttaaccgcgacaagaccctcgattgggacgctcttaaggcgaaggtggcggcagcgggtatgcgcaattccaacgtcatggccattgcgccaacggcaaccattgccaacattaccggcgtatcgcagtcgatcgagccaacctatcaaaacctctatgtgaagtcgaacc

SEQ ID NO: 211941 - DNA, 778 bp, Unknown
  Bacterial polypeptide expressing nucleotide sequence isolated from the Sargasso Sea
gatggtaactaaacgtgatggtgcaacagaacctgtttcattagataaaattactaatagaatatcagtattatctactggcctatctattgatccaataactgttgctcaaaaagctatcccgggtttatttaatgaaattacttcaacagaaatagataattatttagcagaaacagcagctgcattaactgttgaacatcctgactactcttatttagccgctagaattaaagctaatgccttacataaagaaactccaggttttgtaatagcaagtaaaaatctttacgaagatgggcttcttaaaaaagaatattatgataaggttttagaaaatgcagaagaaattgaatcaataatagattacgatagagattatcattttgattattttgctttaactactttgataagagcttatttattaagatgtgaaaataaaactatagaacgtcctcaagatctttggatgagagttgctcttactgtttcctgtcataattttgatttcgataaagttaaaaatacttacattgcattatcaaatggcatgtatacacatgcaaccccaaccttgtttaatagtggcttaaaaatgcagcagctttcttcttgttttttaataggtatggaggatgactctatagagggtatattcaacacaattaaagaatgcgctttaatttcgaaaacagctggaggaattggtctacatgcccataacataagagcaagtggtagtagaattaaatccactaatggtaaatcaaatggt

SEQ ID NO: 211942 - DNA, 916 bp, Unknown
  Bacterial polypeptide expressing nucleotide sequence isolated from the Sargasso Sea
ttgtgcagaattgttgagtactctgataaaaatgaaactgcggtatgtaatttagcttccatagcactaccaagctttattaataaaaaaacaaatgagtttgattataataaactttaccaaacagcaaaactggcaacaaaaaatttagaccaagttatagatatcaatttctaccctactagtaagactgatacctcaaataatttacatcgacctataggtttggggattcagggtttatcagatgtttttttcaaattatcaattcctcacgatggtgaagaagcaagaaaaataaataaattaatatttgaaactatatattttggagccttagaagcttcaatggagttggcaaaagaaaaaggttcatattcttcatttaagggctctccattatctgaaggtaaattccagtttgatctttgggatgccaaaccttctgatatgtggaattgggatgttcttagagaaaaagttaaaaaacatggggttagaaattctttaaccactgcttgtatgcctacagcttctacaggtattatattaggcaatacagaaacttttcaaatacaaacatctaacatttataaaagacaaactttatctggtgaatttttattagttaatagacacttagtaaaagaattatcaaaaagaaatctctggaataaagaaatgagagataacattatattagaaaatggatccgttcaaaatataactaagtttccagaagatttaaaagaaatttataaaactgtttgggaaacttcacaacgtacagttattgatatggcagctgatagagcgccttttattgatcaaactcaatctatgaatttatggttatcaaatccaacttttggaaaagtaaattctatgcatatgtatgcttggaaaaaggactgaa

SEQ ID NO: 211943 - DNA, 808 bp, Unknown
  Bacterial polypeptide expressing nucleotide sequence isolated from the Sargasso Sea
ctaaaaacacttgagaaaagttatctttataaggtgaatgggaaaattatagaaagaccccaagatatgattatgcgtgtagctctatcaatccatagaaatgatttaggaagagcatttgaaacatatcatttaatgagtcatcattatttcactcatgcgactcctacattatttaatgcgggttccaatagagaacaatttgcttcatgttttttactcgctatgaaagatgattctatcaaaggtatttatgagactctagctgattgtgcgactatttcacaacatgcgggcggaattggtctccatatccataatattagagctactaattcatttattgctgggacaaatggtaaatccaatggtattgttcctatgttacgagtatttaatgatacagctcgttatgttgatcaatgtgttttacctgaaacatacatatatactaccgatggtcctaaacaaatacaggattgtgaattaggtgtaacttctatattcactagtcgtggtccagaagttattcagaatgtattagaacacacttatgaaggtgacttattagaaatagatacaatgcattccatagaacccttacaaattactcctgaacatccagtttattgtatccgtaatcaaaagagtggattaaattataatattatcaagaataggttagataagaaactaatagaatttgaatggaccgatgctaaagaattaactaaagatgatttatgtttatttaagatacctgaatatgaaaaggattatcccgaattaacccaagatgattgttata

SEQ ID NO: 211944 - DNA, 901 bp, Unknown
  Bacterial polypeptide expressing nucleotide sequence isolated from the Sargasso Sea
caagttgcaaaacttgctacaaaaaacttggatcaggttatagatataaacttttatcctacagataaaacagagaactcaaatagtcgtcatcgaccaattggccttggcatacaaggtctagctgatgtctatttcaaaatgaatattgcatatgactctgttcaagcacagattattaataagcaaatatttgaaacagtctactttggtgccttagaggcatcaatggagcttgcaactgacaaagggccctattctacttttaagggctcacctctttctgagggacaatttcaatttgatctgtggggcgttaaaccatcaagtatgtgggactggaaaggcctaatggaaaagattcaaaaacacggtgtacgcaattccttgacaacagcatgtatgcctacagcttcaactggtatcatcttggggaatacagaaactttccaagtgcaaacatcaaatatttataaacgacaaactctctctggtgaatttttattagtaaatcgtcaccttgtaaaagaattgatgaaaaggaacctttggagtaaagaattacgcgatcaaattatattagaaaatggctctgttcagaatattgagggatttcccgaagacctaaaagatgtttacaaaactgtttgggaaacatctcaaaaaacagttattgatatggcagcggacagagcgccatttatcgatcaaacccaatccatgaacttatggttggcaacccctacttttggaaaagtgaactctatgcatatgtatgcatggaaaaaaggcttgaaaacaggcatgtattacctgagaagccgatcagctgtagacgcagttaaagtaaccgtgtcctctgaaaagaaagcaaaagagtcttatgtgaaagaggcgcaat

SEQ ID NO: 211945 - DNA, 665 bp, Unknown
  Bacterial polypeptide expressing nucleotide sequence isolated from the Sargasso Sea
accagttaggggaatgggagctcacataaaaggaactaatggtaggtcgcaaggcgttgttccttttttaaaagttgtaaatgatactgctgtagcagtgaatcaaggcggaaaaagaaaaggtgctgtatgcgcttatttagaaacatggcaccttgatatagaagagtttctggaactaagaaaaaacacaggagatgatagaagaagaacccacgacatgaatactgctaattggatacctgacttgttcatggaaagggttatgaacaaagaaagctggactcttttttctccaaatgaggctaaagatttacatgacttaacgggtaatgagtttaaggaacagtatgaaaaatatgaggaggaggcaaaaaaaggaaatataaaagcatacaaagaagttgatgctgaagagctatggagaaaaataatttcaatgctttttgagacaggccatccttggctaaccttcaaagatgcctgtaatttaagatcaccacaacaacacacaggtgtaattcattcatctaatctatgtacggaaataactcttaatacatctcaggatgaaattgcagtatgcaacttaggttcagtaaatttaaaaaatcatttagataaagataacaacctcgataaagaaaaacttcagaaaacaatat

SEQ ID NO: 211946 - DNA, 385 bp, Unknown
  Bacterial polypeptide expressing nucleotide sequence isolated from the Sargasso Sea
gaagcgttacacaccgagttcgcgatttatctttacaacaaaatcgtggggagggacacaaatttgaaaatgtcgtgcgaagatattcacgcgatgatgcgggacgcttacgatattgagtgcgagtttattaccgaggcgttgccttgtaaattgatcggaattaatcaggagtctatgaaacagtacatccaattttgtatcgatagattgttagtccaacttaaatacgacaagatgtacgatgtgacaaacccgttcaaatttatggagatgctgagcatagaaggtaagactaatttttttgagaaacgcgtgggcgagtactcgttatccgattattcgagagaagaggcttttgatattgaaaacgtagacttttgaa

SEQ ID NO: 211947 - DNA, 707 bp, Unknown
  Bacterial polypeptide expressing nucleotide sequence isolated from the Sargasso Sea
aatggctgttaccaaaagagatggtaacaaggaagacatttctttagagaaaattacaaaccgtatatctattttatcaaatggattggagattgaccccattacgattgcacaaaaagctatccaaggtttatacgatggtatcacaacaaacgaaattgatacttacttagctgagacagctgctgctttgacagtggaacatcctgactattcttatttggctggaagaattaaagcaaacgcattacacaaagaaacacctggttttattattgcaacaaaaaatctttacgaagatggtttgttacgcgatgagtattatgaaaaggtaaaagctaatgccgaagaaatagaaaaaattatcgattatgatcgagattattattttgactattttgcattaacaactttatttagagcctatcttctccaatcaaataacaaaactgcggagagacctcaggatttatggatgagagtagctctgtgtgtgtcgggtgataaatttgatttttatcaggttaaaaaaacttatgacagtttatcccagggtttctacacacatgcaacgcccactcttttcaatagtggattgaaaatgcaacagttatcatcttgctttttaattggaatggaagacgactctattgaagggatatttaatacggtgaaagactgtgctttaatttccaaaacagcaggtg

SEQ ID NO: 211948 - DNA, 751 bp, Unknown
  Bacterial polypeptide expressing nucleotide sequence isolated from the Sargasso Sea
atggtgactaaaagagatggaagtaaagagccaatttcactggataagataaccaatagagtctctgttctatctacaggtttaaatattgatccaattgtcgttgttcaaaaagcagttccaggcttatatagtgatattagttccgttgaaattgatacctatcttgcagaaaccgcagctgctttaactgttgagcatcctgattattcttatcttgcagcaagaataaaagtgaactcactacataaagaaaccccagggttcataattgcaacaaaaaatttatacgatgatggattgttaagagaagattattataaaaaggtgatggagaacgcagatttaatagaatccgtaattgactacgacaaagattatacttttgattattttgctctaacaacattaataagagcatatttattaaagtttgataataaaacaattgaaagacctcaggatctctggatgagagtgactttaacggttaccggtagtgaatttaattttgataaaataaaagaaacttataaaagtttatcaactggtatgtatacacatgctactccaacattgtttaatagtggattaaaaatgcagcaattatcttcgtgctttttaataggtatggaggatgactccatagaaggtatttttaataccataaaagattgtgccctaatatctaaaacagctggtggtattggaatgcatgctcacaatatcagaggtagggaagtagaataaa

SEQ ID NO: 211949 - DNA, 717 bp, Unknown
  Bacterial polypeptide expressing nucleotide sequence isolated from the Sargasso Sea
gtattcgagaaccttatgaaaaagcagttatcgttcttctggcgaccagaagaagtggacgtatcgaaagatagagccgattggcaaacgctaagtgaagctgaaaagcacatctttatctcaaatttgaaatatcaaaccctgcttgattctattgcggctcgttcagttagtgctgcatttttaccactggtctcaatacccgaactcgaaacatggatagagacatgggctttttctgaaactattcatagccgttcttatacgcatattttgcgaaacctatttactgacccaagcgaagtgtttgacgatatcgtcattaaccctgcgatcatcaaacgtgctgttagtatatctaaatactttgacgaacttattcaaatcacgcaagtgtataacatacatggtgaaggtgttcatgaaattgatggtaaaaaaatcgaagtgactgaacgcaaagttaaagagaagctttatttagctgtttgctcaacaaacgcactagaagcgattcgattttacgtgtcatttgcttgttcgtttgcctttgcagaacgctcattgcttgaggggaatagtaaactgataaagcttatttcgcgagatgaatccgtgcacctttcaagcacacaagccatactaaacctatggtctagcggcaaagacgactccgaaatgaaggaggtgtcagacgaactaaaagaagaaggtcgt

SEQ ID NO: 211950 - DNA, 877 bp, Unknown
  Bacterial polypeptide expressing nucleotide sequence isolated from the Sargasso Sea
ttgatggcagaagagcctcagtattcttacttagctgcgcgcttgttgagcacattcatcgacaaagaagtgtctaatcaagaaattcacgctttctcccagtcggttcgcctcggcttcgagaagggattgattaacggtaataccttcgaattcattcaagcaaataaacgaaagctcaatgacgctattgagaacggacgcactgacctctttcaatattttggtttgcggactctctacgatcgatatctgttgaaggaccctgagagccgaaaagttctcgaaacgcctcagtatttcttcatgcgcgtggcgtgtggcttgtcaacgacgcccacggaagcgattgagttttataaggttctttcgtctttctcctatatgccaagctctccaacgctctttaactcgggaacacggcatccacaaatgtcgtcgtgctacctgctagactcgccgaacgatgacctagaagccatctatggtcgatacaccgaaattgcgaagttatccaagcatgcgggtggaattggcattgcataccaccggattcgtggcgagggctccctgattcggggcactaatggccagtctagtggcattattccttttttaaatacgcttaacgcttcggtaggtgcggttaaccagggtggtcgccgaaaaggcgcttgctgcgtgtatttggagacgtggcactctgatattgagtctttcttggagctccgtgacaatactggggaccattcgcgccgaacgcataacctgaacctggcaaattgggtccctgatttgtttatgaagcgggttgagtcggatgagcagtggtcactctttgatcctaaagcggttcctgaattttgtgacctcttcg

SEQ ID NO: 211951 - DNA, 727 bp, Unknown
  Bacterial polypeptide expressing nucleotide sequence isolated from the Sargasso Sea
gacatcttcgaagcgatatatgtcggcgcattggaagcgtcgatcgagctcgcgaagaagcacgggccgcacgactcgtacgcggggtcgccggcgtcgcgcggcgagctccagccggacttgtggggtctcaacgcgaaggagctcgacgcgaagtcgcggtgggactgggcccagttaagggccgatctcgcgcgctatggattgcggaactcgttgctgacggcgccgatgccgacggcgtcgacggcgcagatcatgggctgcaacgagtgcttcgagccgtacacgtccaacctatacgcgcggcgcgtcaaggccggggagttcgtggtggcgaaccggcacctcgtcaaggacttatgtgaactgggtttgtgggacgaaaatctgaggcgggacctgttgcgggcgcaggggtcggtccagggcctggctattcccgacgacttgaaggctttgtacaagacggcctgggagctctcccaaaagtcgctgctggacctgagcgcgggccgcgggccttttgtggatcagtcgcagtccctgaactgtttcatcgcggcgccggactacggcaagctcacgaccttccacttccggggctgggaggcgggcctcaagacgggcatgtattatttgaggacgcggcccgcggcggacgcgatccagttcacgctcgaggcttccgcgcccggcgcggcggcggcggcggcgcccacgacga

SEQ ID NO: 211952 - DNA, 133 bp, Unknown
  Bacterial polypeptide expressing nucleotide sequence isolated from the Sargasso Sea
atgcttgttataaagagagatggtagaaaagagtcagtaaaatttgataaaattactgcaagaattgaaaaattaagctatggacttaataccaaatatgttaaaaccatagaaatagcaaaaaaagttattg

SEQ ID NO: 211953 - DNA, 669 bp, Unknown
  Bacterial polypeptide expressing nucleotide sequence isolated from the Sargasso Sea
ataactacattcctgacataaaggaaagagagcaggcatttgcagctatagaaaatattccctctattaaacagaaaggcgacttctgctttaaatggatgggaacaatggaagaccttgaagaagtaaggactgaagaggatcagcgaactttccttctaaaccttatttgctttgctgcctgtatcgagggcttattcttctttgcagcattcgcctacgtatatttcctaaggagtaaaggcttattaaacgggcttgcggccggaactaattgggttttcagagatgaaagctgccatatgaattttgctttcgaagtagtgaataccgcccgtaaacagcaaccagaactatggacgcctgaacttatggaagatatccgaaacatgctccaagaagctgtcgaatgcgaaatgaagttcgcagaagatgtattgggtggcggagttaatgggatgagcctcaaagatacaagagaatatcttcaatttgtcgctgaccaacgtttaatgcaacttggacttgagcctatataccgctcaaaaaacccatttgactttatggctctccaagacgttcaagagcttactaatttctttgagaaaaccgttacgtcttatcaagtaggcgtcgaaggagacgtcgctttcgacgaggatttctaat

SEQ ID NO: 211954 - DNA, 867 bp, Unknown
  Bacterial polypeptide expressing nucleotide sequence isolated from the Sargasso Sea
gactccattcaaggccgtggtcctgggatggcttttattccttactgcagcctacctgaactagaggcatgtatggaggtctggggatttatggaaatgatccatagtcgctcctacacatacatcatcaagaacatctacagcgacccctcagaggtctttgataagattgtgactgataatcgcatcctggagcgtgctagcagcgtcacacaggggtatgacgactttattcagagtgctcatcaatatgatggtagcaccatgtgggaacttgccacggagggacatattggaggtcaatatgatcgccgtgaggtgaagcgtaaactttatagagcagttgcaaatgtcaacatccttgaaggaattcggttttatgtttcttttgcttgcagttttgcttttggtgaacttaaactcatggaaggttcagcaaaaattatctcccttattgctagagatgagaatcaacacctcgccatcacccaaaacattctgaataagtggaagcaaggtgatgatcctgagatgaaacagatcatgaaggaagaggaagagtggactctcaaagcatttgataatgcagtcaacgaagagaagcgttgggcagactatctgttcaaagatggatctatgattggtttgaatgacaagttgcttcagcaatatgttgagtggattgctaatcgtcgtcttaaagcgattggtctgaaaccacaatatgatatcgcagcaagcaacaaccctctgccctggacgcagcactggatctcttctaagggtctccaggtagcaccacaagagactgaggtagagtcctacgttgttggtggcatcaagcaagatgtgaaaaaggacacattt

SEQ ID NO: 211955 - DNA, 958 bp, Unknown
  Bacterial polypeptide expressing nucleotide sequence isolated from the Sargasso Sea
taaaaaactttaccaaacagcaaaactagcaacaaaaaatttagaccaagttatagatatcaatttctatcccactagcaagactgatacttcaaataatttacatcgacctataggcttgggaattcaaggtttatcagatgtgtttttcaaattatcaattcctcatgatggtgaagaagcaagaaaaataaataagtcaatatttgaaactatatattttggagctttagaagcttcaatggagttggcaaaagaaaaaggtccgtattcttcctttacaggttccccactatctgagggtaaatttcagtttgacctttgggatgttaacccttctgatatgtggaattgggatgctcttagagaaaaagtaaaaaaacatggagttagaaattctttaaccaccgcttgtatgcctacagcttctacaggcattatattgggcaatactgaaacttttcaaatacaaacatctaatatttataaaagacaaactttatctggtgaatttttattagttaatagacatttagtaaaagaattatcaaaaagaaatctatggaataaagaaatgagagataatattattttagaaaatggatctgttcaaaatataagtaattttccagaagatttaaaagaaatttataaaactgtttgggaaacttcacagcgtacagttattgatatggcagctgatagagcgccttttattgatcaaactcaatctatgaatttatggctttccaatccaacttttggaaaagtaaattctatgcatatgtatgcttggaaaaaaggcttaaaaacaggtatgtactacttgagaagtagatctgctgttgatgctgtaaaggttactgtttcatcagaaaaaatggctagagaaaatattattaattcacaaactaatgattctaatgatacagaagaatgtttaacttgtagtgcatag

SEQ ID NO: 211956 - DNA, 817 bp, Unknown
  Bacterial polypeptide expressing nucleotide sequence isolated from the Sargasso Sea
gcacaaattgaaactggtcagccgtatatgctttacaaagattctgtaaatgaaaaatctaaccaaaagaatattggtgtaattaaatcatctaatctatgtgctgaaattgttgaatactctgaaaaagatgaaacggctgtttgtaacctagcgtcaatcgccttaccaaagtttgttacagatgaaagtaaatttgattaccaaaacttataccaagttgcaaaacttgctacaaaaaacttggatcaagttattgatataaacttttatcctacagataaaacagaaaactcgaatagtcgtcatcgaccaattggccttggcatacaaggtctagctgatgtttatttcaaaatgaatattgcgtatgactctgttcaagcacaaattattaataaacaaatatttgaaacagtttactttggtgccttagaggcatcaatggagcttgcaactgacaaagggccctattctacttttaagggctcacctctttctgagggacaatttcaatttgatctatggggagttaaaccatcaagcatgtgggactggaaaggcctaatggagaaaattcaaaaacacggtgtacgcaattccttgacaacagcatgtatgcctacagcttcaactggtatcatcttggggaatacagaaaccttccaagtgcaaacatcaaatatttataaacgacaaactctctctggtgaatttttattagtaaatcgtcaccttgtaaaagaattgatgaaaaggaacctttggagtaaagaattacgcgatcaaattatattagaaaatggctctgttcaga

SEQ ID NO: 211957 - DNA, 494 bp, Unknown
  Bacterial polypeptide expressing nucleotide sequence isolated from the Sargasso Sea
tccgtcctggtcgacgctgaaggaagacgagcagaagctcaccatccgcgtcttcaccgggctgacgctgctcgacaccatccagaacacggtcggcgcgatcacgctgatgccggatgccgtcacccagcacgaggaagcggtgctaacgaacatcgccttcatggaggcggttcacgcgcgctcctattcctcgatcttctccacgctctgctcgatgccggaagtggacgacgcctatcgctggtctgaggaaaacgccttcctccaggaaaaatcgcagctcatcctgcaggaataccgcgccaccgatccgcttcgaaagaaggtcgccagcgtcttcctcgaaagcttcctgttctattcgggcttctatctgccgatgtactggtcgagccgcgccaagctcaccaacaccgccgacttgatccgcctgatcatccgcgacgaggccgtgcatggctattatatcggctacaagttccagcaagggc

SEQ ID NO: 211958 - DNA, 781 bp, Unknown
  Bacterial polypeptide expressing nucleotide sequence isolated from the Sargasso Sea
gtacctgacttgtttatgaaaagagttgaacaagacaaaaattggaccttgttttcacctggagaagcaccagaccttcatgaccttattggaaaagaatttgaagagaaatatgaagaatatgaagaaaaagcaaaaaatggagaaattaatcaacataagtctattcctgccaaagagttatggaggaagatgttaacaatgctatttgaaacaggacatccatggattacatttaaggactcatgtaatttaaggtctccacagcaacacacaggagtcatccactcctctaatttatgtacagagataactttaaatactagtgctgataaagaaatcgcagtttgtaatctaggttcagttaatctagcgaatcacatggaaaatggcacattaaacgaagaaaaagttaagcaaacagtatcaacagcaataagaatgttagataacgtaattaatattaactactattcagttgatacagcaaaaaattcaaattacaaacatagaccaattggcttaggcctaatgggattccaggatgcattgtatttacaaaacattccatattgcagcgaagaagctattgagtttgctgacaaaagcatggaattaataagctataacgcaatacttgcgtcaacagagctcgcaaaagaaagaggatcatatgagtcatttgatggatcgctttggagtaaaggaatattacctaaagattcgattgatatcttagagaaaaatagaggtgaagaatatatcaaggttgataagtctg

SEQ ID NO: 211959 - DNA, 330 bp, Unknown
  Bacterial polypeptide expressing nucleotide sequence isolated from the Sargasso Sea
tatgaaagttgagacaccagtgtccggtgtgggcctgggtcttcggcgggcccttatgggcccgctttcacaggctcgtgattacgcaccagagagcattccgttcgattttatggaagtggccccagagaactggatccccatgggcggtcgacagggtaaagagttccgtgcttttaccgagcgctatccttttgttgctcacgggctgagtctgtcactgggtgggccagagcccctggattttgaattattgaaatcggtgaagtcgtttcttaaacaacacaacattcgccgctatacagaacacttgagttactgcagtgacca

SEQ ID NO: 211960 - DNA, 790 bp, Unknown
  Bacterial polypeptide expressing nucleotide sequence isolated from the Sargasso Sea
aatgattcactcaaagtcatacacatatatcatcaaaaatgtatattcagatcctggtgaggtctttgataagattgtaactgatgaacgcattctagagcgagccagtagcgttacagagtcctatgatgacttcattaatagtgctcaggtatggggaactggaaatatgtggagaagtgattttaaagattcgccaacttctcaatgggagattcgagatgtcaaaagaaaactctacagagcaatcgcaaacgtcaatatattggaagggatacgcttttatgtttcttttgcttgcagttttgcttttggtgagctcaaactcatggaggggtctgcaaagattatttccctcatcgccagagacgaaaatcagcatcttgccatcacacaaaatattctgaataaatggaagcaaggcgatgatcctgagatgaaggaaattatgcaagaggaacaggattggacatacaaaatgtttgatcgtgcggtgaatgaagaaaaacgctgggcagagtatctttttaaggatggatctatgattggtttaaatgacaaactacttcagaaatatgttgagtgggtcgctaatcgtcgtctaaaggcaattggactcaaaccacagtacgatattgcagcaaagaacaatccacttccctggacacagcactggatctcttctaaaggtcttcaggttgctcctcaggagactgaagtagagtcttatgttgttggtggcatcaagcaagatgtcagcaaagacacatttagtgggtttaaactttga

SEQ ID NO: 211961 - DNA, 158 bp, Unknown
  Bacterial polypeptide expressing nucleotide sequence isolated from the Sargasso Sea
ttccgatataaaaagcaaccctcttccttggatgaaatcatatttaacgtctgataacgtacaagttgccccacaagaagcagaaatatcaagctatttggttggtcagattgactctaacgttgaagcaggtgagtttgacgattacgaattataat

SEQ ID NO: 211962 - DNA, 118 bp, Unknown
  Bacterial polypeptide expressing nucleotide sequence isolated from the Sargasso Sea
atgtgccggccggacttggatcgcttcctcatcttccccatccgccagcctgcgttgtggaccaagtacaagcagcacgtcgcgtcgttctggacggcggaggagatcgacctgagcg

SEQ ID NO: 211963 - DNA, 197 bp, Unknown
  Bacterial polypeptide expressing nucleotide sequence isolated from the Sargasso Sea
aatgacagaatatctattgacggaagaaaataagcgttttgttgttttccccattcagaatgataaagtttacgagatgtacaaaaaagctgtggctagtttttggacacccgaagaaattgatttggaaaaagatttgacggattttaatgctctgaacgatgaaaagcgtcattttattgagaatgttttggcct

SEQ ID NO: 211964 - DNA, 803 bp, Unknown
  Bacterial polypeptide expressing nucleotide sequence isolated from the Sargasso Sea
tttgactgacaaaccagaagaactcgcaaaagcaaaagaagaaattagcagtaaatatggtggtgaatttaaatcatttccacaaattgttatagatttccacggaagaaaaggagataaatatgtaggcggatattcggagtttgaagaatttactcgtccatattatgatttcaataaacttgctcatattacaaaggtcgtaacaaataatctaaatgaagtgattgatatgaatcgttatccggttcctgaaacagagctatcaaacaagcgtcatcgtcctcttggtattggcgtacaaggtctcgcagatacttatgccaaaatgagatatggatttgatagtccagaagctatgcagttgaacaaagatatgtttgcggtaatgtattacgcagcaatgcaaaaatcactagaaatcgcaaagagagacggagcatatgaaacgtttaaaggttctccactaagtgaaggtaaattccaatttgatttatggaacgtagaacctgtacgaatggttggtcgtaatgatgaaacatatcacaaatataacaatgagatgcaattagaatgggaatcacttcgcactgaagtaatggaacacggagttcgcaattcgcttcttatggctctaatgcctactgcatcaaccagtcagattatgggaaataatgaatgtattgaaccatttacaagcaatatttatttgcgtcgtgtgcttgctggagaatttattgtcgtaaataaatatttacttcgagacctcaaaaaccttgggttgtggaacaaagatatgaaga

SEQ ID NO: 211965 - DNA, 880 bp, Unknown
  Bacterial polypeptide expressing nucleotide sequence isolated from the Sargasso Sea
ataaagcatttagaaaaaattaaagcaagagatcccatgtctaagatcatagaagcgcagatagaaacaggacaaccatatatgctttataaagactcgattaataataagtctaaccaaaaaaacattggtgtaattaaatcgtctaacctatgtgcagaaatagttgaatattctgataaaaatgaaacatctgtatgtaatttagcatctatagccctaccaaagtttgtaaaaaaatcagataaaaaattaatatatgactatgatgctctttatgagactgcaaaattagctacaaaaaacttagatgaagtaattgatattaatttttatccaactgataaaacggaaagatctaataataaacataggccaataggtttaggtattcagggacttgcagatgtatacttcaagatgggaataccttatgaatctgaggaggcaaaacagataaataaactaatatttgaaacaatctattttggtgctttagaatcttcatgtgaattagcaaaagaaaaagggtcttacgagacatttaaaaattcaccgatatcagaaggtaagtttcagtttgatctttggaatgtcaacccatcttcaaaatgggattgggacactcttagaactaaaattaaaaaatatggtgtaagaaattcactaactacagcttgtatgccaactgcgtcaactggcattatattaggaaatactgaaacattccaaatacaaacctctaacatatataaaagacaaacactctctggtgaatttttattagtaaatagatacttagtaaatgaactttctcaaagaggattatggaataaagagatgagagatagaataatcttggaaaatggatcagtttgaa

SEQ ID NO: 211966 - DNA, 823 bp, Unknown
  Bacterial polypeptide expressing nucleotide sequence isolated from the Sargasso Sea
gttcagttcaacaaactaatgtatcagcgcatgatgaaagacggctatatctcactattcagcccgtctgacgttccaggtctttacgatgctttcttcgctgaccaagagaagtttgaagagctatacgttaaatacgaaaacgacgacagcatccgcaaaaagcaaattaaagccatggagctattcagcttgttcatgcaagagcgtgcaagcacaggtcgtatttatctacaaaacgttgaccactgtaatacgcacagcccgtttaacccagaagttgcgccagttcgtcagagcaacctgtgccttgaaattgcgctacctactaagccgcttcagcacgttaatgatgagaacggtgaaattgcactatgtacgctgtcagcgtttaacttaggtgcgattaagtcactggacgagtttgaagagttgtctgaccttgcagtacgtgcgctagataacctgcttgattaccaagactaccccgttcctgctgcatataatgctacgatgggacgtcgtacgctaggtgttggtgttatcaactttgcatactaccttgctaaaaatggcgttaagtattctgatcacagcgcgaacggtctagttcaccgcacgttcgaagcaatgcagtactatctacttaaagcgtcgaacaatcttgctaaagaaaaaggtgcgtgtcctaagtttaacgaaaccacctattctcaaggcatcatgccaattgatagctacaagaaagatcttgatagcgtatgtaatgaaccacttcattacgactgggatgcacttcgtgaagaaatcaaaactcacggtt

SEQ ID NO: 211967 - DNA, 773 bp, Unknown
  Bacterial polypeptide expressing nucleotide sequence isolated from the Sargasso Sea
tatcaagaaatggaaacaaattatccaaaagccttcaaggcttatattgataaaggaattgaacttgaaattttaaatcctgaactaaaaaactttgacattgaaagacttgcggaggcaattgacttcacacgagataaccagtttacctacttagggcttcaaactctatacgacagatattttatacattgtgatgatgtcagatatgaacttccacaggtattttttatgagagtctccatgggtttagctatagaggaagataaaagagaagaacgagccattgaattttataaattattatcaagttttgattatatgagctctacaccaactttgttcaactcaggaaccaaacgacctcagttatcatcatgttacttaacaacaatacctgatgacttagatggtattttctctgcgatgaaagacaatgcattgttatcaaagtgggctggtggattaggaaatgattggacgccggtaagagctatgaactcatatattaagggcaccaacggtaaaagccaaggtgttgtacccttcttgaaggtagcaaacgatacggcagttgctgtaaatcaaggaggcaaaagaaaaggagcaatgtgtggatacttagagacttggcacttagatattgaggagtttctagaactaagaaaaaacacaggtgatgaaagaagaagaactcatgatatgaatacagcaaattgggttccagatctttttatgaaaagaatggagcaagataaaaactggacactttt

SEQ ID NO: 211968 - DNA, 868 bp, Unknown
  Bacterial polypeptide expressing nucleotide sequence isolated from the Sargasso Sea
atatttccaataaaaaaccaagaaatttgggacagatacaaacaacatattcaagccttttggacaacagaggaagtatcattacaagatgacttgagagatcttgaaaccttaaatgaaggtgaaaagcactttataaaacatgtgctggcttattttgctaactctgaggcaatgattaatgaaaacttagcaagtaggttctacaaagaaatactaatacctgaagcaagatgctttatctcaatgcagatgttaaatgaatcaattcatgcagaaatgtacggtcttcaaatagaagcttatgtaaaagatgcaaaagaaaaagacatgctttttgatgcaatccaaaatgtaccatgtattaaccataaagcacaatgggtatcaaaatggcttaacggcagtcaaaatctcctaacaagattaataggttttggattagttgaaggtttgttttttgcaggctctttttgtgccatatattattttagaaaaagaggattattacctggtttagccttatctaatgattggattgcaagagacgaaggaatgcactttagtttttcatcgttaatgtttaggactttaagagataagtttaataataaaacattaactgatgcagatattagtgatttatctttgattccttcagacgtacctcaatcacagtttgaagaaattgttagagaagcagtagcttttgaaaaagaatttgtaagagatgcactaccagtagatttaattggtatgaatgctgatttaatgtgtcagtatatcgaagctgttgcagatagaattgctgatctatttgaatttgacagagtttttaaaacagagaatccttttgatttcatgagag

SEQ ID NO: 211969 - DNA, 972 bp, Unknown
  Bacterial polypeptide expressing nucleotide sequence isolated from the Sargasso Sea
aatgggtgaaaaccaagggccagtatatttctggaaactttatggagacatgcttgttgcagtaaaccaaggaggcaaaagaaaaggggctggatgcgcctatctagagacttggcattcagatatagaggatttccttgagctaagaaagaatgttggcgatgaaagaatgcgcgctcacgatatgaatacagccaattggattcctgacttatttttaaagcaagtagaaaaagatgaagattggtacctatttagccccaatgagacgccagaattacatgaaatttacggcaaagagtttgaagataaatattgggagtacgtagaaaaaggcaaagctggcgagcttagagtattcaaagaagttaaagcaaaagatctttggaaaaaaatgctcaaagctttgtttgagactggccatccatggatcacatttaaagatccatcaaatattagatattctaaccaacacgtaggaactgtacactctagtaatttgtgcactgaaattctcttgcatacaaaaccgacaaaatacaaagagggaaacttgagagaagtagaagagtatggagaaactgccgtatgcaacttggcgtcaattaatttaaaaaatcatctcaaaaaaagaactttagactttgacaaaattcgcgccaccgcagagattggaatgcgaatgctagataatgttgttgatataaacttttacccaaccaaggaatctgaaaatgcaaatgttcgtcatcgcccagttgggttaggtagtatgggctggcatgacgttttttatgcgcttgacgtagattattctagcgatgaagctgttgaatggtcggataaaatttatgagcatattagctatggtgcaattctagctttcagcaaactagctaaagaaagaggcaaatattccacatataaagactctttgtggggaccaggcatatttaccatagacacatataa

SEQ ID NO: 211970 - DNA, 332 bp, Unknown
  Bacterial polypeptide expressing nucleotide sequence isolated from the Sargasso Sea
tatgtatgtagtaaaaagagatggaagaagagaagcagtaaagtttgataaaatcacagccaggattaaaaagctgtgttatggtttaaatcctttagttacacccgaaaaggtagctatgaaagtcatcgaagggttgtatgatggtgtaacaactagtgaacttgacaatttagcagctgaggtcgctgcaactaatactatcacacatccagattatgcattattagcttcgcgaattgctgtttctaatttgcataaaaacaccaaaaaatctttttcagatgttgttaaggatttatacgaatatattgaccccaagacagataaaa

SEQ ID NO: 211971 - DNA, 907 bp, Unknown
  Bacterial polypeptide expressing nucleotide sequence isolated from the Sargasso Sea
ctgtcgtcttgctacttatcaacattgccagatgatttaaggggaatatttgaaggcataagcgatgacgcaatgctctctaaatttgctggtggtttaggaaatgattggtcacaagtcagagccctaggctcatacatcaaaggtactaacggtaaaagccaaggagtcatcccttttcttaaagtagcaaacgatactgcagtagctgttaatcaaggcggtaaaagaaaaggcgcaatgtgtgcttatttagaaacttggcatttagatattgaacagtttctcgagctcagaaaaaacacaggcgacgagagaagaagaacacatgatatgaatacagctaattggattcctgatctatttatgaaaagagtccatggcaatgaagagtggacacttttctccccttcagatacacctgatctccatgatttatacggcttagattttgaagaaaagtatatggaatatgaagatcttgcaaaatctggtgggattaaaaattttaagactgtaaatgcagtagatatctggagaaaaattctcagcatgctctttgagactgggcatccttggattacatttaaagatccatgtaatgtcagatctccacaacaacacaaaggcgttgttcactcatcaaacttatgtacagagatcacattgaatacttcaaaagatgaaattgcagtatgtaatcttggatctgtcaacctggctgctcatattactgaagctggaaaaattgatacaaagaaacttaaaaaaacaattatgacagctatgagaatgctcgataatgttattgaatataattattacagtgtagataaagcaaaaaactctaacttaaaacatcgccctgttggattagggattatgggctttcaaggatgctttatat

SEQ ID NO: 211972 - DNA, 1463 bp, Unknown
  Bacterial polypeptide expressing nucleotide sequence isolated from the Sargasso Sea
aatggtaggtcgcaaggtgttgttccttttcttaaaagttgtaaatgataccgctgtagcagtgaatcaaggtggaaaaagaaaaggtgctgtatgcgcttatttagaaacatggcaccttgatatagaggaatttttggaactgagaaaaaacactggagacgatagaagaagaactcacgatatgaatactgcgaactggatacctgacctgttcatggagagggttatgaacaaagaaacctggactcttttttctccaaatgaagcgaaagatttacatgacttaacgggtaatgagtttaaggaacagtatgaaaaatatgaggaggaggcaaaaaaaggaaatataaaagcttacaaagaagttgatgctgatgaactctggagaaaaataatttcaatgctttttgagacaggtcatccttggctaaccttcaaagatgcctgcaatttaagatcgccacaacaacacacaggcgtaatccattcatctaatctgtgtacggaaataacactgaatacatctcaagatgaaattgcggtatgtaacctaggttcagtaaatctaaaaaatcatttggataaagataacaacctcgataaagaaaaacttcagaaaacaatatccattgctataagaatgttagataacgtaatagacataaattactacgcggtcccacaagctgaaaactctaactttaaacatagaccaataggtcttgggataatgggttttcaagacatcctgcaaataaaaaaaataccctactcttctgacgaagcagttgagttagcagatgactcaatggaaacagtcagctattttgctattgaggcctcgtctgatcttgcaaaagagagaggatcttacagttcttatgaaggatctttatggagtcagggtatatttcctatcgattcaatatccatcttaaaagaacatagaacagaaggatttctcgatcaaaatgaagagaagaaaaaggactgggatacgctaaaagaaaaggtcaaaaaacaaggtattagaaattcaaatgttatggcaattgctccaactgcaacaattgcaaacattactggagtcactcaatcaatagaaccaacctattcaaatctttttgttaaatcaaacctatcaggggaatttactgtcataaatgaaaacttggtcaacgcattgaaagaaatagatatgtgggatgaagttatggtttatgaccttaaaaacctaaatggcagtcttgaaacaattagcagggtcccagatgaaattaagagaatttttgcaacatcttttgaaattgaacctaaatggcttattgaatctgcgagcagaagacaaaaatggatagatcaaagtcaatctctaaacctttatgttgcggaaccgaacggaaagaaacaagatgtaatgtataagatggcttggttgagaggtctaaaaacaacctact

SEQ ID NO: 211973 - DNA, 1349 bp, Unknown
  Bacterial polypeptide expressing nucleotide sequence isolated from the Sargasso Sea
ttggcatttagacatagagcaatttctagagcttagaaaaaatacaggtgatgagagaagaagaactcatgacatgaacactgctaattggattccagatctatttatgaaacgtgttcacgctaatgaagaatggaccctgttttcaccttcagatacacctgatttacatgatttgtacggactagaatttgaggaaaaatataccgaatatgaagatttagctaaaactggtggcattaaaaactttaaaactgttaatgcagtagatatatggagaaaaatcctaagcatgctctttgagacagggcacccatggattacattcaaagacccatgcaatattagatcgccacaacagcacaagggcgtggttcattcctctaatctgtgtactgagataacactcaatacatctaaagaagagatagcagtatgcaatttaggttctgttaatttagccgctcacatcactgacgatggaaaaataaatactaaaaaattaaagacaacaatctctactgcaatgagaatgcttgataatgttattgaatataattattacagtgttgataaagcaaaaaactcaaacctgaagcatcgaccagttggcatgggcattatgggattccaggatgctctttataaaattcgtgttccatatgaatccgaagaggcagttgattttgctgataagagtatggagtacgttagttactttgcaatcgaagcatcaatggaacttgcaaaagagcgaggcgcatatgaatcatttgatggttcattatggagccagggaatactgccgatagatagtcttaagaaacttaagaaggttcgtggtaaatatttagatgttaatttagatgaaagtcttaaatgggatgaactaagagacaaaataaaagctaatggcatgagaaattctaatacacttgccatagctcctactgcaactatctcaaatatttgtggtgtctcacaatcgatcgagccaacttatcaaaacttatatgttaaatctaatctatcgggagaatttactgtgatcaatccttacttaattaatgatttgaaatcacgtgatttatgggatgaagttatgataaaagatctgaaatattttgatgggcaactacagcctatcaaccgagttccagacgatttaaaagctatctattcaacatgctttgagatagatactagatggttggttgaagcagccgctcgaagacaaaagtggatcgatcaatcacaatcactaaatttatatatacctgattctgatggtaaaaaacttgatagcgcatataagcttgcttggataagagggcttaaaactacatatt

SEQ ID NO: 211974 - DNA, 2995 bp, Unknown
  Bacterial polypeptide expressing nucleotide sequence isolated from the Sargasso Sea
catgcaaaccaccgacaacgcgacgtcccagtacgagagcgcctcgagccgtccgctcggcgggaccgaacagggcgcgaaggcgctcgcgccgcaggccacgttcgccgactacaaggtgatccgccgcaacggcagcgtcgtctcgttcgaaccttcgaagatcgcgattgcggtgaccaaggctttcctggccgtcaatggcgggcagggcgcggcatcggcgcgcgtccgcgagcaggtcgagcaactgacgcacaacgtcgtgcgcgcgctcgtgcgcagccgcccgaacggcggtacgttccatatcgaagacatccaggatcaggtcgaactcgcgctgatgcgcggcggcgagcacaacgtcgcgcgtgcgtacgtgctgtatcgcgagaagcgtcacctcgagcgccagcatgcgggcgaggaagcagcggcagccggcggcgaggcgagtaccggcatcaacgtcgtcgacaacggcgtcacgcgtccgctcgacctgaacgcgctgcgcgcgctgatcgtgtcggcatgcgacggcctcggcgctgcggttaaccctgatccgatcgtcgccgaaacggtgaagaacctgtacgacggcgtgccgatgagccaggtctacgactcggcgatcctggctgcgcgcacgatgatcgaaaaggatccggcatacagccaggtcacgtcgcgcatcctgctgcacacgatccgtcgcgagatcctcggcgaggaagtggtccaggccgagatgtcgacccgttacgcggagtacttcccgcagttcctgaagcgcggcgtcgacgccggcctgctcgacgacaagctgctgcagttcgacctgaagcgcctcggcgaagcgctcgacgcgaaccgcgacctgcagttcggctacctcggcctgcagacgctgtacgaccgctacttcctgcacgtcgagggcacccgcatcgaaatgccgcaggcattcttcatgcgcgtcgcaatgggcctgtcgctgaacgagatcgaccgcgaaacgcgcgcgatcgagttctacaacgtgctgtccagcttcgacttcatgagctcgacgccgacgctgttcaactcgggcacgcaccgctcgcagctgtcgtcgtgctacctgacgaccgtcgcggacgatctcgacggcatctatgaagcgctgaaggaaaacgcgctgctgtcgaagttcgccggtggcctgggcaacgactggacgcgcgtgcgtgcactcggctcgcatatcaagggcacgaacggcaagtcgcaaggcgtggtcccgttcctgaaggtcgtcaacgacacggccgtcgcggtcaaccagggcggcaagcgcaagggcgcggtctgcgcgtacctcgaatcgtggcacctcgacatcgaggagttcctggagctgcgcaagaacacgggcgacgatcgccgccgtacgcacgacatgaacacggcgaactggattcccgacctgttcatgaagcgcgtgatggaaggcgccgactggacgctgttctcgccgtcgacctgcccggacctgcacgacaagttcggcgcggaattcgaggcggcttacacggcttacgaagacaaggtcgcgcgcggcgagatcaagctgttcaagaagatcccggcgcagcaactctggcgcaagatgctcggcatgctgttcgagacgggccacccgtggatcacgttcaaggatccgtgcaacgtgcgctcgccgcagcagcacgtcggcgtcgtccactcgtcgaacctgtgcacggaaatcacgctgaacacgagcgacaccgaaatcgcggtgtgcaacctcggctcggtgaacctcgtcgcccacctggtgaagcaggccgacggcagctacgcgctcgaccacgacaagctgaagcgcacgatcagcgtcgcgatgcgcatgctcgacaacgtgatcgacatcaactactacgcggtgccgaaggcgcgtaactcgaacctgaagcaccgtccggtcggcctgggcatcatgggcttccaggactgcctgcacctgctgcgcacgccgtacgcgtcggaagcggcggtcgagttcgccgatcgttcgatggaagcggtctgctactacgcgtactacgcgtcgaccgagctggccgaagagcgcggccgctactcgagctaccgcggctcgctgtgggatcgcggcatcctcccgcaggacacgctgaagctgctgacggaagcacgcggcggctacgtcgaggtcgacacctccgaatcgctcgactggacgtcgctgcgttcgcggatcgcctcgcacggcatgcgcaactcgaactgcgtcgcgatcgcgccgacggcgacgatctcgaacatcatcggcgtgtcggcctgtatcgagccgaccttccagaacctgtacgtgaagtcgaacctgtcgggcgaattcacggtggtgaacgagtacctggtgcgcgacctgaaggaacgcggcctgtgggacgaagtgatggtcgccgacctgaagtacttcgacggcatgctgtcgcgcatcgaccgcatcccggccgacctccgcgcgatctacgcgaccgcgttcgaagtcgacccgacgtggctggtcgaagcggcatcgcgtcgccagaagtggatcgaccaggcgcagtcgctgaacatctacatgggcggcgcgtcgggcaagaagctcgacgaggtctacaagctcgcatggctgcgtggcctgaagacgacctactacctccgcacgatggcggcgacgcacgtcgagaagtcgacggtcgcacacggcgcgctgaacgccgtgccgacgagcggcggttcgagcagcggcggcgcgcaaggcgcggctggcggcttcggtgcggcaggcggcgatgcgtcgtcgggcgcggtcaacgcggcaccggcactcgcaccggtcgaggcagatggtccggtgtgcacgatgcgtccgggcgatcctggcttcgacgaatgcgaagcgtgccagtaa

SEQ ID NO: 211975 - DNA, 1616 bp, Unknown
  Bacterial polypeptide expressing nucleotide sequence isolated from the Sargasso Sea
tgcttcggaaaatgaaataaaggaagctctaattttgtcatcaagatcgttagtcgagatagagccaaactacactttcgcgacttcaagaattctattagataatttaagaacagaggccctatcctttttagatatttcccagaatgcaacgcaaaaagaaatgggaaaactctaccccaaatctctcgaagcctttataagaaaggccattgagctagaactagtaaatcctgaattaggaaagatgaatcttaaaaaacttggaaaaagtttaaaacctgaaagagacctccaattttcttatcttggacttcaaactctttatgacaggtattttattcacaaaaacgaaataagatttgaattgcctcaaatattttttatgagagtggcaatggggttggctattgaagaaaaagatagagaagaaaaagcgatagagttttatgatcttctttcatcttttgattacatgagctctactcctacactcttcaattcaggaacaattcattctcaattatcttcgtgctacttaactactgtgccagatgatttaaaaggaatttatgatgccctcggtgacaatgcgatgctttccaagtgggcaggagggcttggcaacgattggactccagttcgaggtatgggagcccacatcaaaggtactaacggcaaatctcagggagttgttccctttcttaaggtagtcaatgatactgccgtagctgtaaatcagggtggaaaaagaaaaggagctgtttgttcttatttagagacttggcatctagacattgaggaatttgttgagcttcgaaagaacacgggcgatgatagaagaagaactcatgacatgaatacagcaaattggataccagacttattcatgcaaagagtaatgaatggagaaaaatggactttgttcactccaaacgaaactccagacttgcatgacttaaccggagctgctttcaaaaaaagatatgaagagtatgagaaggaagcaaaagaaggaagaattactgtatcaaaagaagtagaagcgaaagaattgtggaggaaaataatttcgatgttattcgaaacaggtcacccatggataactttcaaagatgcctgcaatttgagatcgccgcaacaacacactggagtaattcattcttctaatctttgtacagaaattactctaaacacttctccggatgaaatcgctgtttgcaacctgggatccataaatttaccaaatcacctggacgaaaaaggtgatttaaatgaaaagaaactagaaaaaacaataaatactgctattagaatgctcgacaacgttatcgatataaattattacgcagttccacaagcagaaaattcaaatctaaaacatagacctattggattgggaataatgggttttcaagatgccctttatataaaagagctcccatactcttcagaggaagctatttcatttgctgacgaatcaatggaaatggtgagctactatgcaattaaagcgtcatctaatttagcagttgaaagagaatcttactcttctttcgaaggatctctctggagcaaaggaattcttccactagattcgatagaaattttaaaaa

SEQ ID NO: 211976 - DNA, 1117 bp, Unknown
  Bacterial polypeptide expressing nucleotide sequence isolated from the Sargasso Sea
ttgagtgttgtcagacgagatggatccataacgcctttcaagtctgacaaaattgcaaatgctattagaaaagcttttttagctcaaactgatcttagagatagtaagcagattgataaaagtgtatctgaactcactgagactgtcacagcggctctgacaagacgaattgctaatggtgatatgattcacatcgaggatatccaagatcaggttgaattggcgttgatgagaggagagcaccataaagttgctcgtgcttatgttctttacagagagcagagagctaatcaacgttataaaacagctcaacttaatgaacaaataggtgccaaagtctcaacaatggctgttaccaaaagagatggtaacaaagaagatatttctttggagaaaattacaaaccgtatttcaattttatccaatggcttggaaattgacccaattacaattgctcaaaaagctattcagggtctttacgatggtattacaacaaatgaaatagatacttacttggcagaaacagctgctgcactaacagttgagcatcctgattactcttatttagcaggcagaattaaagctaatgctcttcataaagaaacaccaggctttattattgcaactaaaaatctttatgaagatggattactacgtgatgaatattatgaaaaagtaaaagcaaatgcagaagaaatagaaaaaattattgactacgatagagattattattttgattattttgcactaaccactttatttagagcatatctcctccagtcaaataataaaactgcagagaggcctcaggatttgtggatgagagttgctctatgtgtatcaggagataagttcgatttttatcaggttaaaaaaacctatgatagtttatctcaaggtttctatacacatgcaacgcccactcttttcaatagtggtttaaaaatgcaacagctgtcatcttgttttttgattggaatggaagatgactctattgaaggaatttttaatacagtaaaagactgtgctttaatttctaaaactgcaggtggtatcggccttcatgcccataatattagaggtggtggaagtcgtattaaatcaacaaatggcaagt

SEQ ID NO: 211977 - DNA, 1535 bp, Unknown
  Bacterial polypeptide expressing nucleotide sequence isolated from the Sargasso Sea
cacatatgcatctgccagactattgttagatagcatgagacgtgaagcgttaacttttatatatgataaagagtttcaagcaacttccaaagaaatggaaaaaatttatcctgattactttaaaggatatatggacaaagctgtaggtttaagtttaatagataaagatatagcaagtttgttcgatttaaatattcttgctaaagctcttcttcctgaaagagatttaaaatttacttacttaggactccaaacgctttacgataggtactttatacactccaaagacataaggttcgaacttcctcaagcatttttcatgagagtagccatgggtttagcatgtaatgaagaggctagggaagagagagcaattgagttttataaattactctcatcttttgatttcatgagctcgacgccaactctgtttaactctggcacccttcgcccgcagctctcatcgtgctacttaagcactatcccagatgatctgcggggcatttttggaggcataacagatgatgcattactctctaagtttgctggtggcctaggtaacgattggtcaagagtaagaggtatgggcacacatattaaagggacaaatggaaaatctcaaggcgttgtgcctttcttgaaagttgcaaatgatactgctgtagcggttaatcaaggtggtaaaagaaaaggggcgatgtgtgcgtatttagaaacatggcatttagatattgaagaattcctagaacttagaaagaataccggtgacgacagaagaagaacgcatgatatgaatactgctaactggattccagatctttttatgaaaagagtagtcgaagaatctgtatggacattattctcaccaaatgatgttcctgacttacatgagacctatggaaaagactttgaaaataaatattgtaattatgaaaaattagctaaagaaggaaaaatcgaaaattataaagaggttagtgctgtagatttatggaaaaaaatgcttggaatgctttttgagactggacatccttgggttacctttaaagatccatgtaatattcgctctcctcaaaaacacactggcgttgttcactcttcaaacttatgcaccgagattactttgaatacttctgatagtgaaatagctgtttgtaatttaggttcagtcaatttagctgcacatataaaagacggtaaattagatattgaaaaacttgagaagacggttaccacagcaatgagaatgttagataatgtcattgattataattattatagcgttgataaagcaaggaactctaattataaacacagaccagtcggattgggcctaatgggttttcaagatgctctgtataaattatcaataccgtattcaagtcaagaggctatagattttgctgaccattctatggaatatatcagttattttgctataaaagcttcttcagatcttgcctcagaaagaggaaaatatgaaagtttcgatggatcgttatggtcaaagggtgtgttacctatagactcggttc

SEQ ID NO: 211978 - DNA, 115 bp, Unknown
  Bacterial polypeptide expressing nucleotide sequence isolated from the Sargasso Sea
ttgaattcagacaacgtgcaagtggcacctcaagagtctgaaatcagctcttatcttgttggtcaaatcgactctgccgtgagcgaagacgactttgctgattttgagctgtaaa

SEQ ID NO: 211979 - DNA, 1727 bp, Unknown
  Bacterial polypeptide expressing nucleotide sequence isolated from the Sargasso Sea
taatttcgaaactttaacgacagaaagtagaaacacaattttaagtccttcggttatctcaaccgctccaggtcagcttaaaatcataaaaagaaatggtgcagttgttggctacgagtcggacaaaatagctgtggcaatgactaaagccttcctagccgtagaaggaggtacagcagcggcctctccgaggataagggaactagtaagccaactaaccgaacaagtttcccagacctttgaaagaagactgcccacagggggcacgctccacatagaagaagtacaagaccaagtagagcttgcattgatgagatcaggcgaacatcaagtagcaagatcatacgttttatatcgagcagaaagagcgaagttaaggacagaaactgtccaaccccaaccaaaagatactgaatattcaaaaatcaatgtaaccaataaagatgagagtcaagcaccattggacgtggctcgactgcggacgctcattgaagaagcctgtcaggatttgaagagcgtcgacgccaatcgggtcatcgaaaatgcattggataacatgtacgacggtatatcagtagatgatgtatccacatcgatcttaattacagcgagaacgttggtagaagaagagcccagctatacctatgtaacttctagattgctattagaccaattaagaaccgaagctctagactttttgggggtagctgaaaacgctactcaggggcaaatggctgatttatacccgaaaactttggaagctttcattaacaaaggcgtggaactggagttattggatccacagctcactaaatttgatttaactttcctaggagaagcaattaaaccagaaagagatttgcagtttacttatttgggactgcaaactctttacgatcgctacttcatccattgggatgaggtgagatttgagctaccacaagtattttttatgcgagtggcaatggggcttgcaaccgaagaggatgaacctaataccagagcggtcgagttttatgacttgttatcatcttttgattacatgagttcaaccccaaccctattcaattcaggaacgcttcggccacagttgtcttcctgtttcctgacaacagttcctgacgacttgaaaaaaatatatggagcaatccaggataatgccatgctctcgaaatgggctggcgggctaggcaacgattggaccccggtgagagcgctaggctcctatattaaagggactaatggcaagtctcagggagtagtaccttttcttaaagtagttaacgatacagcagttgccgttaatcaaggtggaaaacgaaaaggagccgtatgtgcttacctggaaacttggcacctcgacatagaggaattcctagagcttagaaaaaatactggagacgaccgaagacgcacacacgatatgaatactgctaattggatacctgatttgtttatgaagagggtgaccgaagaaggagactggacccttttctcacctagcgacacgccggacttgcatgacctttacggagccgcctttgagaagagatacaaagaatatgaaggccaaactgaaacgggcaagttaacgctctttaaaaaggtgcgagcagcagatttgtggcgaaaaatgttgtccatgctattcgaaacaggtcatccttggattacatttaaagatgcttgtaatattcgatcccctcaacagcatataggcgtaatac

SEQ ID NO: 211980 - DNA, 1077 bp, Unknown
  Bacterial polypeptide expressing nucleotide sequence isolated from the Sargasso Sea
gtaaaccattgggtgtacaaagatatgatggattcaagtatcctgtcttgaaaaaattaacaaaccaaatgttaggttatttctggagacccgaagaggtatctctacagaaagatagaggagactatcaactactaactgaaccacaaaaacatatcttcacatcaaatcttaagtatcaaatactattagattcagtacaaggtcgaggtccttctatggcattcgctccttattgttctctacctgagttagaaggtgctatgaaagtgtgggagtttatggagatgatccatagtagatcctacacatacatcattaagaatgtatatcctgatcctacagaagtctttgacactatactagatgatgagaagatcattgcacgtgcagagtcagtaacagcagcatacaatacctttgttaatcaagcacatcaatgggatacaggttgtatgtggaagaaagattctcgtggttcatctacacagacgtggcaagagaaagagttgaagcgtgatctttatagagcagtagtgaatgttaatatcttggaaggtatcaggttctatgtttcctttgcttgcagttttgcttttggtgagttaaaatgtatggaaggtagtgctaaaattatttccttgattgctagggatgaagcacaacatctagttcttactcaaaatattattaagaactggcagaatggcgatgacgatcagatgaaagaaatcgctaaggaagaagaaggtaacgttaaagaaatgtttatcaatgcagtaaacgaagagaaagattgggcagagtatctgttccgtgatggatctatgattggtctgaatgataaactattgcagaagtatgttgaatgggttgctaatcgtagaatgaaagcgattggtattgcacctgtctatgatgtacctgcacgtaacaacccactaccttggacagagcattggttgaactctaaaggtcaacagaatgcaccacaggaaacagagattgaatcttatgttgtcggtggtatcaaacagaacgtaaagaaaaacaccttctctggttttaaactatgat

SEQ ID NO: 211981 - DNA, 183 bp, Unknown
  Bacterial polypeptide expressing nucleotide sequence isolated from the Sargasso Sea
ttttggttgagcttaactgtgataaagtttataactcaacaaatccatttgaattcatggatatgatttctttacaaggaaaaacaaacttctttgaaaaaagagtttcagagtatcaaaaagctggagtattaaataatgatactagatctgaagagatcagttttgatgaagatttttaat

SEQ ID NO: 211982 - DNA, 469 bp, Unknown
  Bacterial polypeptide expressing nucleotide sequence isolated from the Sargasso Sea
tttgctatggtttcacgagcttgttgatcctgttagggtagccatgagggttattgaaggtctttacgatggtgttaccacatctgagttggataatcttgctgctgaaattgctgcaacaatgacaacaactcatccagaatatgcttcacttgcagctagaatctctgtctccaacttacataaaaatacgaataagtctttttcatccactatgaaggatttacatacttatgtaaacccgatcacaggaaaaaaagctcctcttctttcagatgaagtatatgaagtaattaagaaaaatgcagagctgttagattcaaaaattatttataatagagattttggatatgattattttggttttaaaactcttgaaagatcctatcttttaaagattaatggtaaaatttgtagaaagaccacaacacatgttaatgagagtttcggttggaattcatctggatga

SEQ ID NO: 211983 - DNA, 2704 bp, Unknown
  Bacterial polypeptide expressing nucleotide sequence isolated from the Sargasso Sea
atgactgaagaattacagaatactagcctctcaggtaaaggagagaaacaaataatcgcagacaatgctagcttagccccaattcccggcaaatatcgggttatgcgcagaaatgggaaagttacttcttttgatttagataaaattactgtagcaatgaccaaggctttcctgagcgtagaaggcagtagtgctgcggcatcaacaagaatacataatgaagttgaattgctagcctcaaaagttgacggagccataaaaagaagatttccagaaggtggcgttattcatatagaggatatacaagaccaagttgaattagctattatgagagcaggttatcaggacgttgctagatcatatgtactatatcgagaagaaagaaaccaggctagaaactcaaataaggtcgaatctttagaagatctgccaattaaaaaaggagtcataaatgaagatggctctaaacaagatctagatatcactaaactgagattaattatagatgaggcttgttcaggagtcgaagatgtttcagccgatgctgtctttgagctaattgataaaaatatttatgatggaatcaagaaagaagatttatctagttctatcttaatatcgatcaggccattgattgaaaaagaccccaactattcttatgtggtagcaagacttcttttaaccagcttatatgaagaaggacttacatttttaaattttaaagataatgctccaacaattaaagagatgtctaaggtttaccctgagtactttaaatcatacataacgagtgcagtagaattagaattaatagataaggaattgctaaactatgatatcgattttatagcaaaaaatattgatccttcaaaagacttggcatttacatatctaggccttcaaactttgtatgatagatatttcatccataagcaaggcaagaggtttgagttgcctcaggctttctttatgagggttgcgatggggcttgcaataaatgaagaaaatagagaagagagaaccctagagttttacaatctaatttcatcatttgattttatgtgtagcaccccaacattatttaattcaggcacattgagaccacaactatcttcatgttatttatctactttaccagatgatctaaaaggtatttttgaaggtataagtgatgatgcaatgttatcaaaatttgcaggaggtttgggtaatgattggtctcaggttagagcactaggttctcatatcaaaggaacaaatggtcaaagtcagggcgtcataccttttttaaaagttgctaatgatacggccgttgctgtaaatcaaggcggtaaaagaaaaggggcaatgtgtgcatatcttgaaacttggcacctcgacatagaacagtttttagagttaagaaaaaatactggagatgatagaagaagaactcatgatatgaacaccgcaaattggatacctgatcttttcatgaaaagagtccataacgatgaaggttggaccttattttctccaaatgattgtcctgatctccatgatttaactgggctagattttgaaaaaaaatacaaagaatatgagagaagagccgaacaaggaaagatagttaattttaaaagtgtaaaagcagtcgatctttggcgtaagattttaagcatgttatttgaaacgggtcatccatggataacatttaaagatccttgtaatctaagatcacctcagcaacatgttggtgtggttcattcatctaatctttgtactgagataactttaaatacatcaaaagacgaaattgcagtttgtaatttaggttcaataaatttagcagcacatattgatgagaataatgaacttaatgtcaaaaaacttgagaagactatcagaacagctatgagaatgctcgataatgtgatcgattataattactatagtgtggaaaaagcaaaaaactctaatgcgaaacatcgtccagtaggtctaggtctaatgggatttcaagatgcgctgtataaattaagaatcccatatgcctcagaggaagctgtagagtttgctgataaaagtatggagtatgttagttattttgcgattcaatcttcgatggaattagcgattgaaagaggtccatatcaaacatttgatggatcgttatggagccaagggatcctgccaattgatagcttaagaaactttaaagaaattcgaggaaaatatcttgatgtaaacatgtctcaaaatctagattgggacactctgcgtgaaaaaattaaaaaaaatggaatgagaaattcaaatagtctggcaattgctccaaccgcaactatttcaaatatatgtggtgtagctcaatctattgagccgacttatcaaaacctgtatgtaaaatctaacctatctggtgaatttactgtaattaacccttatctaattaaagactttaaagatgcaaatatatgggatgaagtaatgataaaagatttaaaatatttcgacggccaactgtcatctataagcagagttcctgataaattaaagtcaatatatcaaacgtgctttgaaattgatactagatggttagtcgaagcagctgctagaagacaaaaatggatagatcaatcacaatcattgaatctatacattcctgatacagatggtaaaaaacttgatagtgcatataagctggctggatcagaggtttaaa

SEQ ID NO: 211984 - DNA, 826 bp, Unknown
  Bacterial polypeptide expressing nucleotide sequence isolated from the Sargasso Sea
atgcaatttaaaaaaccaattttttgggataaaaaattttcagtgtggaagtatcttttgcttccattaagttatatttatttttttttcagtaaaattaattttaaaaaaaaacatactgtaaacggcgtattttcaatctgcgttggaaacatttatgttggaggaactggtaaaacaccaagttgcttgttgcttaaaagaattttagaaagacttgatataaaatcatgctttattaaaaaaaattattctaaccaaattgatgagcaaaatttattaagtaagtatggggatttatttgttgaaaaaataagattaagtgcattaattaaatcaaaaaaccaaggttataaagttgcaatatttgatgatggtttccaagataaatcaataaattataatttaaagattatttgttttaacagtgaaaattttattgggaatggaaacctaataccctctggcccactaagagaaaaaatatcagcagtcaaaaattgtgatgcagtttttttaaatggattaagtctaaataataaaaaaaatattgataaattaaaaacaataaatcctaaaattaagatctttgaaacaatttataaaatgaaagatattgaaaacttagacaaatcagcaaaatatttaatttttgccgggataagtaatccagttaatttttttaatttgttaaaaaataataatataaatatcgttaaaagaatattttacgctgatcactatatttataatgaagaagatattgaaaagattaaaaaaatttctgttaaagagaatttaaaaataattacaactgaaaaagatt

SEQ ID NO: 211985 - DNA, 183 bp, Unknown
  Bacterial polypeptide expressing nucleotide sequence isolated from the Sargasso Sea
tatgcagcaagaaccacttttacaagaaaataaagatagatttgtaatctttccaattgagcatcatgatatatgggaatggtataaaaaatgtgaagccagcttttggacagctgaagagattgatcttcatcaagatctaaatgattggagttcaaaattgaatggacgacgagagatatt

SEQ ID NO: 211986 - DNA, 2224 bp, Unknown
  Bacterial polypeptide expressing nucleotide sequence isolated from the Sargasso Sea
gcgcggcgtgcaagccgagctgctcgacgacaagctgctgcagttcgtcctgaagcgcctgggcgcggcgctcgacaacaaccgcgacctgcaattcggctacctcggtctgcaaacgctgtacgaccgttacttcctgcatcacgacggcgtgcgcatcgaaatgccccaggcattctttatgcgtgtggcgatgggcctgtcgctgaacgagatcgaccgcgaagcgcgcgcgatcgagttttacaacgtgctgtcgagcttcgacttcatgtcgtccacgcccacgctgttcaactcgggtacccgccgctcgcaactgtcgtcgtgctacctgaccacggtcgacgacgacctcgacggcatctacgaagcgctgaaggaaaacgcgctgctgtcgaaattcgccggcggcctgggcaacgactggacccgcgtgcgtgcgctcggttcgcacatcaagggcaccaacggcaagtcgcaaggcgtggtgccgttcctgaaggtcgtcaacgacaccgcagtggcggtcaaccagggcggcaagcgcaagggcgcggtctgcgcgtacctggaaacgtggcacctggacatcgaggaattcctcgagctgcgtaagaacaccggcgacgaccgtcgccgcacccacgacatgaacacggcgaactggattcccgacctgttcatgaagcgcgtgcacgaaggcggtgactggacgctgttctcgccgtccacctgcccggatctgcacgacaagtttggcgcggaattcgaagcggcttacacggcttacgaagacaaggtcgcgcgcggcgagatcaagctgttcaagaagctgccggcggcacaactgtggcgcaagatgctgggcatgctgttcgaaaccggccacccgtggatcacgttcaaggatccgtgcaatgtgcgctcgccgcaacagcacgtcggcgtcgtccactcgtcgaacctgtgcacggaaatcacgctgaacaccagcgactcggaaatcgccgtctgcaacctgggctcggtgaacctcgtcgctcacctgaaggagcaggctgacggcaccctggcgctcgaccacgacaagctcaagcgcaccgtcagcgtggcgatgcgcatgctcgacaacgtaatcgacatcaattactacgcggttgccaaggcacgtaactcgaacctgaagcaccgtccggtcggcatgggcatcatgggcttccaggactgcctgcacctgctgcgcacgccgtacgcgtcgcaagaggcggtggagttcgccgatacgtcgatggaagcggtctgctactacgcttactacgcgtcgaccgaactggcgcaggaacgcggccgttactccagctaccgcggctcgctgtgggaccgcggcatcctcccgcaagactcggtgaagctgctggccgaagcgcgcggcggttatgtcgaagtcgattcgagcgaatcgatggactggaccgaactgcgttcgcgcatcgccacctacggcatgcgcaactcgaactgcatcgcgatcgcgccgacggcgacgatctcgaacatcatcggcgtgtcggcctgtatcgaaccgaccttccagaacctgtatgtgaagtcgaatctgtcgggcgaattcacggtggtcaacgactacctggtgcgcgacctgaaggcgcgcggcctgtgggacgaagtgatggtcgccgacctgaagtacttcgacggcacgctctcgcgcatcgaccgcatcccggccgacctgcgcgcgatctacgcgaccgcgtttgaagtcgatccgaagtggctggtcgaagcggcttcgcgccgtcagaagtggatcgaccaggcgcagtcgctgaacatctacatgggcggcgcgtcgggtaagaagctcgacgagatctacaagctcgcatgggtgcgcggcctgaagaccacctactacctccgtacgatggcggcaacgcacgtcgagaagtcgacggtggcgcacggcgcgctgaacgcggtgagctcgggtggcggcgaagggtcgggcggcgcgggcggtgtcggcggtggcgcggcaggcagcttcggcgcgaacggcggtgcggcttcgggcggcatccaggtagcggcggcagcgccggcggttgcagtcgaagcagcgccggaagcggacggtccggtgtgcatgatgcgtccgggcgatccgggtttcgacgagtgcgaggcttgccagtaa

SEQ ID NO: 211987 - DNA, 1478 bp, Unknown
  Bacterial polypeptide expressing nucleotide sequence isolated from the Sargasso Sea
agaagaagaacccatgatatgaatacatcaaattggattcctgatttatttatgaaaagagtcgaaacagacgatgattggacacttttttcacctgaggaagtaggtgatttgcatgattcttttggaaagaaatttgaggatttatatacaaattacgaaagaatgattgatactggagaaattaaaaaatttaaaaagattcctgctaaagagttgtggagaaaaatgctcacaagattatttgagactggtcacccatggataacatttaaagatccttgtaatgtaaggtcacctcaagatcatgttggagtagttcatagttctaatctttgtactgagattacattaaatacttctgctgaggagacagcggtttgtaatcttggctcagtaaatttatctaaacatgtaactgaggatggaaaactagataaaggtttattagagaaaacaataaacattgcaatgagaatgttggataatgtagtcgatttaaacttttatccaaccgttgaagccaaaaattctaatatgaaacatagaccaattggtcttggtattatgggattgcaagatgcattgttcaagcttgatcttccatttgattcacaaaaggctttaaatttttctgatcaactgatggaacaaatttcgtatcatgcaataagtgcttcttccgatttagcaaaagagagaggagcttatgagtcctttaaaggttcaaagtgggataggggtattttcccactagattctcttagcttgctagaggaagagagaggtcaaaatatcgatgttaataaaataacttcactcgactgggaaggtttgaaatctaaggttaaagaaaacggaatgagaaattcaaataccatggctattgctcccacagcaacaatttcaaatattgcaggctgttatccttgcattgagccaatatataaaaatatctatgttaaagccaatatgagtggcgagtttaccgttgttaataattatcttattaatgatttaaaagctttaaacttatggtccaaggatatgttagataaaatcaagtatttcgatggaaacttagatcatatagaagaattacccgaagacataaagaacaaatacaaagaagcattttcaatagatcccgttgtactcttgaagcacacttcagtaagaggaaaatggatagatcaaagtcaatcacacaatgtttttatgcaaggtgtgtcaggtaagaagctaagtgaaatatatacagctgcttggaagtttggtttaaaaactacttattatctgcgaacattagctgcaagtcagattgaaaaatcgactttagatgctaacaaatttggttacactcagaaaagagagtataaaaaagtcgaagaaggagctgctgttgaagaacaacagtctgtgactaatgaagctacaaattcagaggcccctggaagtgaggttgctagtgcttgtag

SEQ ID NO: 211988 - DNA, 511 bp, Unknown
  Bacterial polypeptide expressing nucleotide sequence isolated from the Sargasso Sea
attttttgcaggatcattttgcgctatttattattttagaaaaagagggttgctcccgggtttagcactatctaatgattggattgcaagagatgaaggaatgcattttagtttttctgcattaatgtttaaaactctaagagataagtttaataatggaacgctaagtgactcagatattaaaaatttaaatttaataacaagcaatgttgcgcaatcagaatttgaagaaattgttcgtgaagctgtatcatttgaaaaagaatttgtaacttcagcattacctgttgacttaattggcatgaataaagagttaatgtgcgaatacatagaggcagttgcagatagaattgcagatttatttgaattcgaaagagtatttaataccgaaaacccatttgattttatgagagccttagatgttcaaaacgttacaaatttttttgaaaaacgtgtttctgaatatcaaagaccaactgatagagctctaggttttgatgataatttctag

SEQ ID NO: 211989 - DNA, 735 bp, Unknown
  Bacterial polypeptide expressing nucleotide sequence isolated from the Sargasso Sea
aacaaacggaaaaagccaaggtgtagttcctttcctcaaagttgcaaatgatacagctgtcgcagttaatcaaggtggtaagagaaagggtgctatgtgttcttatctagaaacatggcatatggatattgaagagttcctagaactgagaaaaaatacaggagacgatagaagaagaacacatgatatgaatacggccaactgggtgccagatcttttcatgaaaagagttcaaaatgatgaagactggtcacttttctcgcctggcgaaacacctgatctacatgacttaattggtaaagaatttgaagaaagatatgccgagtatgaggaaatgggtgaaaaaggagagcttagacaattcaaaaaaataaaagcaaaagagttatggagaaaaatgcttacaatgctctttgaaacaggtcatccatggataactttcaaggattcatgcaatctaaggtcaccccagcaacacgagggagttgttcactcatctaacctctgtaccgaaataacactcaacacaaaagcgagtgaagaaattgcagtgtgtaatttgggttctgttaatttaaagcagcatatgaaagatggaaaacttgatgaggaaaaagtaaaacaaacagttacaactgcaatcagaatgctcgataacgttatcaatattaattattactcagtggagacctcagagaaatcaaacatgaagcatagaccaataggtcttggcct

SEQ ID NO: 211990 - DNA, 617 bp, Unknown
  Bacterial polypeptide expressing nucleotide sequence isolated from the Sargasso Sea
tatggacgaccaatacataggtagttacagtacatttaaaaatagtcctgcttcaaaaggaatattacaatttgatatgtggggtgttactccaagtttatatgattgggatgtattgaaaaagaaaataacaacaactggattaagaaatagtttattgttggctccaatgcctactgcatcgacatcgcaaattttaggaaacaatgaatgttttgagccatttacaagtaatatttatacacgtcgaacattggctggtgaatttatagtggtaaataaacatttaatgaacgatttattaatgatagatatgtggtcagaagaaatgaaaaatgcaatcattgaacacaaaggtagtgtacagaatattgaaaatattcccaaatatataaaagaaaaatataaaatatcttgggagatttcaatgaaaaatgtgattgatatggctcgtgacaggggtgcgtttatatgtcaatctcaaagtatgaatttgtggatggaggatccaaactataaaacactaacttctatgcatttttacgcttggaaacaaggattaaaaacgggtatatactatcttagacgcaaaccaaaacaccaagcgcaacaattta

SEQ ID NO: 211991 - DNA, 884 bp, Unknown
  Bacterial polypeptide expressing nucleotide sequence isolated from the Sargasso Sea
aatgacagtaacaaaaagaaatggtgaaaaagaacctatatcacttgataaaattaccaatagagtttcagttttatctactggattaaatattgacccaattgtagtagtacaaaaagcagtgccaggtctttataatgaaatcacttctacagaaattgatacttatctagctgaaacagctgcatcactaactgtggagcatcctgattattcttatttagcagcaaggataaaagcaaattcacttcataaagatacgcctggttttattatttctacaaaaaatctttttgatgatggtctacttagagaagagtattataataaagttatagctagtgctgaagatatagaagcaataattgattatgatagagattataattttgattattttgcttttactactctaactagggcgtatctcttaaaatttgaaaacaaaactattgaacgtccacaagatttgtggatgagagttgctttgacagttacaggtgatacttttaattttgaaaaagttaaacaaacttatgatagcctttcgaatggatattatacacacgctacacctactttattcaatagtggtttaaaaatgcagcaattatcatcatgttttttaataggaatggaggatgactcaattgagggtatttttaatactattaaggactgtgctctaatttctaaaacagcaggtggaattggaatgcatgctcacaatataagaggaagtgggagtagaataaaatctactaatggtaaatcaaatggtttaattccattcttaaaaatatttaatgagacagcaaaatcagttgatcaaggtggaggtaaaagaaaagggtcctttgctgtttatcttgaaccgtggcacg

SEQ ID NO: 211992 - DNA, 787 bp, Unknown
  Bacterial polypeptide expressing nucleotide sequence isolated from the Sargasso Sea
aatgaaaatctagctagcagattttataaagaaatacttattccagaagcaagatgctttatatcaatgcaaatgcttaatgagtctattcatgcagaaatgtacggattacaaattgaagcttatgtcaaagactctaaagaaaaagagatgttatttgatgctattcaaaatgttccctgtatcaatcataaagcacaatgggtttcaaaatggttaaatggtaaccaaaatttattaacacgtttaattggatttggattggtagaaggtttattttttgcaggatcattctgtgcaatttattattttagaaaaaggggcctgttaccaggtttagctttatcaaatgactggattgcaagagatgaaggaatgcattttagtttttcttcgctgatgtttagaaccttaagagataaatttaataacaaaactctaacagactcagatattaatgatttatctttgattccatcagatgtacctcaatcacaatttgaagaaattgtaagagaagctgtagcctttgaaaaagagtttgttaaagatgctttacctgtagatttaattggaatgaatgctgatttaatgtgcaaatatattgaagcagttgcagatagaattgcagatttgtttgagtttgatagagtttttaatactgaaaatccatttgattttatgagagcattggatgtacaaaatgtaacaaacttttttgaaaaaagagtttctgagtatcaaagaccaactgatagagcgcttagttttgatgaagctttttgat

SEQ ID NO: 211993 - DNA, 374 bp, Unknown
  Bacterial polypeptide expressing nucleotide sequence isolated from the Sargasso Sea
ttttgcatgcttattacatagtcaattagaaagacccacatcagaaagcaaaatccatagaattattgctgaagcagtaacaattgaaaaagaatttatcacagatgcattaccggtgtccctaataggcatgaatgctgatttaatgtcgcaatatcttgaatttgttgcagatagactacttgtagctttaaactgcacaagactgtatgacgcaacaaatccgttcccgtggatggaaatgataagtatgcaaggaaaaacaaatttctttgagaaaagagttggagaatatcaaaagagcggggtacttaattccggcgaagttgcggcttcactccaaacacgtttttccatggaagaagacttctaaa

SEQ ID NO: 211994 - DNA, 664 bp, Unknown
  Bacterial polypeptide expressing nucleotide sequence isolated from the Sargasso Sea
atgaatagcaatatgacagtcacaaaacgctgtggtgcacgtgagacaatcgatctcgacaagatacaccgcgtaattacttgggcagccaagggattaaaaaacgtttctgtttctgaagttgaacttcgcacgcatttacagtttttcgacgggatcccaaccgaagctatccacgaaacgatcatcaaatctgcggcggatttaatttccccagaatcaccggattatcagtttctggctgcgcgcttagccgtattccatttacgtaagaaggcctttggtcagttcgagccaccaaagttatacgaccatgtgactaaactggttgagcttggcaagtatgatatgcatattctgcaggattacacccgcgaagaactcgatatcatggacagctatatcgaccattggcgcgatatgaacttctcctacgcggcggtaaaacagctcgaaggtaagtatctggtacaaaaccgtgtgacccacgagatctacgagagcgcccagttcctgtatattctggtggcggcctgtttgtttgcccgttatccaaaagaaacgcgcctgcaatacgttaaagatttttacgacgcggtatcgacctttaaaatttctctacccacgccaatcatggcgggtgtgcgcacgccaacgcgtcaat

SEQ ID NO: 211995 - DNA, 477 bp, Unknown
  Bacterial polypeptide expressing nucleotide sequence isolated from the Sargasso Sea
ttagaaaaagaggtttgcttcctggattagctctttccaatgattggattgcaagagatgaaggtatgcattttagtttttcagctttaatgtttaaaactcttagagataaatttagtaatggttcattaactgactcagatatctctgatctatctttaataccaagcgaagttccccaatcacaatttgaagaaatagttagagaagctgtatcatttgaaaaagaatttgttaaagatgctttgcctgttgatttaattggaatgaatgcaaatttaatgtgtgattatattgaagcagttgctgatagaattgctgatttatttgaatttgaaagagtatttaatactgaaaatccgtttgattttatgcgtgctttagatgttcaaaatgtaacaaatttctttgaaaaaagagtatctgaatatcaaagacccactgatagagcgctgagttttgacgaagctttttaat

SEQ ID NO: 211996 - DNA, 688 bp, Unknown
  Bacterial polypeptide expressing nucleotide sequence isolated from the Sargasso Sea
aaatcaaaaaaatattggggtaataaaatcttcaaatctttgtgcagaaatagttgaattctctggcaataatgaaactgcggtttgcaacttagcttcaatagccttgcccaagtttgtgaataaaaaagaaaaaaaatatgattataaaaaattgtatgaaactgcaaaactagcaataagaaatttggatcaagtaattgatattaatttttatcctacgaataaaacagataattccaataaacttcaccgtccagtgggcttaggcgttcaaggattagcagatgttttttttatgttaaaaactccatacgatagtgaaaaagcaattgatataaataaacaaatatttgaaacaatatattttggagcattagaatcatcaatggaattagcaaaagaaaaaggaacatactcaacttatgagggttcacctttgtcggaaggtagatttcagtttgatttgtggaatgttaagccctcaacaaattgggattgggaaggtctcagagaaaaaataaaaaaatacggagtgagaaattcacttacgacagcctgcatgcctacagcttctacaggcataattttaagcaatactgaaacctttcaaattcaaacatcaaatatttaccaaagacaaactttgtcaggagaaattttgctagttaatagacattttggttaa

SEQ ID NO: 211997 - DNA, 181 bp, Unknown
  Bacterial polypeptide expressing nucleotide sequence isolated from the Sargasso Sea
gcacgtcgatcaggggctatcgctgacgctctttttccccgataccgccaccacccgcgatatcaataaggcgcaaatctacgcgtggaagaagggcatcaagacgctgtattacatccgtctgcgccagctggcgctggaaggtaccgaaatcgaaggctgcgtgtcctgcgcgctgtaa

SEQ ID NO: 211998 - DNA, 853 bp, Unknown
  Bacterial polypeptide expressing nucleotide sequence isolated from the Sargasso Sea
gatgagttacaccacctttagccgtacgaacaatgatcaaatgaaagagccgatgttttttggcaatccggtgaacgtgtcccgttatgatcaacagaaatacggcatttttgaaaaactgatcgaaaagcaactgagctttttctggcgtcctgaagaagtagatgtcagtaaagaccgtatcgactttcaacagttaccagaacatgaaaagcatatattcctcagtaatttaaaataccaaactctgctggactcagtacaaggccgttcaccgaacgttgctttgttgcctatagtgtccttgcctgagctggaaacctggattgaaacctgggccttcagtgaaactattcacagccgcagttacactcatatagtgcgtaatatcactaacgagccacacaaagtatttgacgatatattgttgaatgaacgtattgttgaacgcgcagatgacgttactcgttattacgatgatttaatcacttctgttagcctgtaccacttatgtggtgtagggactcatgaagtcaacggcaagacccataccatcagcatgcatgatctgaagcgcaagctgtacatctgtattttgtcggtgaacgtgctcgaagccattcgtttttatgtcagcttcgcttgtagttttgcttttgccgaacgcgaactgatggaaggcaatgccaaaattatcaaactgattgcgcgtgatgaagcactgcatttaaccggtactcagcatatgctgaatattatggccgccggtgaagatgacccggaaatggcgattatcgctaaagagtgcgaagacgaagcctacgccatcttccgtaaagccgctgagcaggaa

SEQ ID NO: 211999 - DNA, 307 bp, Unknown
  Bacterial polypeptide expressing nucleotide sequence isolated from the Sargasso Sea
gacgtacctcaatcacagtttgaggaaattgtcagagaagcagtagcttttgaaaaggagtttgtaaaagatgcgctgccagtagatttgattggtatgaatgctgatttaatgtgtcaatatattgaggctgttgcggatagaattgctgatttatttgaatttgatagagtgtttaaaacagaaaatccatttgattttatgagagctttagacgttcaaaatgtaactaacttttttgaaaaaagagtgtctgaatatcaaagaccaacagatagggctctaagttttgatgaagcattttaat

SEQ ID NO: 212000 - DNA, 667 bp, Unknown
  Bacterial polypeptide expressing nucleotide sequence isolated from the Sargasso Sea
atggccttcaaaattgaagcttacgtaaaagatacaaaagaaaaagatatgctttttgatgctatacaaaatgtaccttgtattaatcataaagctcaatgggtttcaaaatggttgaatggaagtcaaaatttattaactagattaattggatttggtctagttgaaggactattctttgctggttcattttgtgcaatatattatttcagaaaaagaggcttacttcctggcttggcattatctaatgattggattgcaagagatgagggtatgcactttagtttttcatcattaatgtttagaacattaagagataaatttaataataaaacattaactgactcagatattaatgatttatctctgattccttccgatgtaccacaatcacaatttgaagagatagtaagagaagctgtagcatttgaaaaagagttcgtaaaagatgctttgccagttgatttaattggcatgaatgcagaattaatgtgtaaatacatagaagcagttgctgatagaattgcagatctatttgaatttgaaagagtttttaatactgaaaatccttttgattttatgagagctttagatgttcaaaacgtaaccaacttttttgaaaaaagagtatctgagtatcagagaccaacagatagggcgttaagtt

SEQ ID NO: 212001 - DNA, 741 bp, Unknown
  Bacterial polypeptide expressing nucleotide sequence isolated from the Sargasso Sea
aagcaagatgttttatatcaatgcaaatgctaaatgaatctatacatgctgaaatgtacgcattacaaattgaagcttatgtaaaagatcctaaagaaaaagatatgctttttgatgctatatctaatgttccttgtattaatcacaaagctcaatgggtttcaaaatggttaaatgggaatcaaaatttacttacccgtttaataggttttggattagtagaaggcttgttttttgctggttcgttttgttcaatatattattttagaaaaagaggattgttacctggtctatcattgtcaaatgattggattgcaagagatgaaggtatgcattttagtttttcagctcttatgtttaaaacactaagagataaatttaataataaaacattaacagatgaagacattgtggacgtttctttgataccaaacgatgtgccgcaaacagagtttgaagaaattgtaagagaagcagtttcttttgaaaaagaatttgttaaagatgctttgcctgtagatttaattggtatgaataaagagctgatgtgccaatatattgaagcagttgcagatcgaattgctgatctttttgaatttgaaagagtttttaatacggaaaatccttttgattttatgcgcgctttagatgttcaaaatgtaactaacttttttgaaaaaagagtatctgaatatcaaagaccaacagacagggctttaagttttgatgaagctttttaat

SEQ ID NO: 212002 - DNA, 393 bp, Unknown
  Bacterial polypeptide expressing nucleotide sequence isolated from the Sargasso Sea
cctccccccgacagacgcttgagcgctcatacctcctcaaggtgaacggcacgatcgctgagcgcccgcagcacatgctcatgcgcgtgtccatcggcatccacaaagacgacatcgccagcgctgtcgagacgtacaactacatatcgcagaagtacttcacgcacgccaggtgcgccccagtggctgtttgcgcctgttttgttcgcgatgctcgcacgcatggtatgtcgcatgtgtgccagcggtgcatgggaaggagcgcatgcggtgtggcggcggcgggacagcggctgacggtgagcgaactcatgtgcagccctacgctcttcaacgctggcacgccgcaccccccagatgtcgtcgtgcttccttgtacacctgaaggatgac

SEQ ID NO: 212003 - DNA, 397 bp, Unknown
  Bacterial polypeptide expressing nucleotide sequence isolated from the Sargasso Sea
ctttagtaatgagcttatttcgcgtgatgaggcattgcatacagaatttgcggtattgatgtactctaaattgaataaaaaaattagaaaagataaattatatgaaatagtaaaggaggcagtagaaatagaaaaagagtttataacagctgcgttaccgtgtcgtttaataggcatgaatgatatattaatgtcccaatacatagaatttgtagcagataggttagtaatacagctaggatatgaacctatttataattcatcaaatccatttgaatttatggaaatgataagcattgaaggaaagacaaatttttttgaaaaaagagttggtgagtatgcgttggcaaccaaagacaaagaggaaaatatatttgagctagatggcgtgttttag

SEQ ID NO: 212004 - DNA, 677 bp, Unknown
  Bacterial polypeptide expressing nucleotide sequence isolated from the Sargasso Sea
atttagaggttctccagcatctgaaggtattttgcaatacgatatgtgggatgtgaaaccgagtgatagatgggattgggaatctctaaaaacaaagattaaggacactggtttaagaaatagtttagtgttggcccctatgcctacagccagtactgctcaaatattatccaacaatgaatgctttgagccttacactagtaacatgtatagcagacgtgttctaagtggagaatttgttgtacttaatgaacatatggtgagagaacttatagatcgtaatctatggacagatgatattagaaatcatatcatgttggataagggttctatccaggctattgatattattccagaagatgtaagagaactttataaaacagcatgggaaatgaagatgagagatattattgatatggctgcagatagaggtgcatttattgatcagtctcaatctctgaacatgtttgtagagaaaccttcttttagtaagctatattccatcatcatgtatggatggaagaagggattaaaaactggcgtatactatctcagaacaagatctgctgctgatcctattcagttcacagtgaagaaaataaaggcaaaaaaggaatccccggtaaaaccagcggaacaaaacacagatgatgagtgtgtaatgtgcagtgcttaaa

SEQ ID NO: 212005 - DNA, 662 bp, Unknown
  Bacterial polypeptide expressing nucleotide sequence isolated from the Sargasso Sea
tgtcaaagatcaaaaagaaaaagatttactatttgatgcaattcaaaatgtaccatgcattaatcataaagctcaatgggtttcaaaatggttaaatggaaatcaaaatttactaacgagactaataggttttgggcttgttgaaggcttattctttgctgggtcattttgtgcaatctattacttcagaaaaagaggactattgccaggtttagcgctttcaaatgattggatcgcaagagatgaagggatgcactttagtttctcagccctaatgtttaagacactaagagataagtttaataataacaaactcacggatgctgatgtggcagatctatcattgataccaaataatgtgcctcaatctcaatttgaggagattgtaagagaagcagtttcatttgaaaaagaatttgtaagagatgctctgccagttgatttaattggaatgaatcaagatctaatgtgtcaatatattgaagcagtcgctgatagaatagcagatctgttcgaattcgaaagagtctttaatactgaaaatccatttgattttatgcgtgctttagatgttcaaaatgtaacaaatttctttgaaaaaagagtttctgaatatcaaagacctactgatagagcactcagctttgatgacgctttttaaa

SEQ ID NO: 212006 - DNA, 754 bp, Unknown
  Bacterial polypeptide expressing nucleotide sequence isolated from the Sargasso Sea
ttcttgagcaacctccgttaccagactctgctggattccgttcagggacgcagcccaaacgcaacgctgctgccgcttatttcaattccagagctcgaaacgtgggtggaaacatggtcgttctctgaaaccattcacagccgcagctacacccacattattcgcggtatggtggatgatccgagcattgtcttcgatggcattgtgaccgacgaggaaattatcagccgggctatcagtatctctacagagtacgacaagctctatgagatgacctgcgcgcgccagcacctgggagaagatgaattcgaacggctctacgtctccgaatttgacggaaagccctaccctctccagcgccagctgttccgtactttggtatccatcaacgcgctggaggccattcgtttttacgttagcttcgcctgtacgtttgcttttggagaaaggaaattacttgagggcaacaccaaaatcatgcgtttcattgcgcgcgatgaggcacttcattgcgaaggcacagaacgaatgctccggtttatgcgtacaggccgcgaaggcttgctatgggcccagatcgctgcggatgaggaaccattcatctatcagaccatgatggacgttgccgaacaggaaatgcgctgggcagattatctgtttaaagacggctcaatgattggtttaaacgccgatatcctgaaaagctatgttaaataccgaaccaatcttgcgatgcgccgtcttggcctgaaac

SEQ ID NO: 212007 - DNA, 893 bp, Unknown
  Bacterial polypeptide expressing nucleotide sequence isolated from the Sargasso Sea
agggctctttgagttctataagctcttatcaagctttgattatatgagctctactccaaccttatttaattctggaaccaaacgaccacaactttcctcttgttacctaacaaccgttcctgacgacttgtccggaatatatggagcaatcagagataatgctttgctatcaaagtgggctggaggtttaggaaatgattggacaaacgtcagagcgttgggctcaaaaatcaaagggacaaacggaaaaagccaaggtattgttccatttttaaaagtttcgaatgataccgcagtagcggtaaaccagggcggcaaaagaaaaggagccttctgtgcttatctagagtgctggcatctagatgtcgaagaattcttggatttacggaaaaacacaggagatgatagaagaagaacacatgatatgaatacagctaactggatcccagatctatttatgaaaagattagagaaaggagaaaaatggacccttttttcaccatcagatgttccagaacttcatgatatctatggaaaagagtttgaaactaaatatacagaatatgagaggaaggcagaagctggggaaatcaaacattttaaaacagttgaagcaaaagatttgtggagaaaaatactttcaatgctttttgaaaccggacacccatgggtaacgtttaaagatccatgcaatataaggtctcctcagggtcatgttggtacagtacactcatcaaatctatgtacagagataactcttaatacgaatgaagatgaaatagctgtttgcaatttgggaagcatcaacctaccccaacatatagacgaaggaaaaattaatatcgagcaacttaaaagttctgtaacaactgccatcagaatgctagataatg

SEQ ID NO: 212008 - DNA, 895 bp, Unknown
  Bacterial polypeptide expressing nucleotide sequence isolated from the Sargasso Sea
ttttcgatgtacgataacatcaccactcaagagattgacattttgtcggcggagatttgtattggtatgattacttcggaccccgattacgagattctcgccactcgaattgtggcgagtaacattcataagatttgtccgaataactttcacttagctatgcgaaagcttcaaaaggccggtgtcatcactgatgaagtggttgaagttgcacagcaggtcaaggatcacatcaaaacggaccgtgacttcgattttggatatttcggtcttaaaaccctggagaaaagttaccttcaacgagtaaacggaaagctcatcgaaacacctcagtacatgtttatgcgtgtagctatcggtattcatggtaaggacgtcccggccgttctcgaaacctacgataaaatgtcacagggatacttcattcacgcgacaccaaccctatttaatgcgggtaccccaagaccccaaatgtcctcgtgtttcctaatcgcgaacaaagaagattcaattaatggtatctatggcactctaaccgagtgtgcacagatttctaaatgggctggaggaataggtatgcacatccacgatatccgtgcgaataagtctcatattagagggactaacgggaactccgacggcataattcccatgttgagagtcttcaacgcgacagctcggtacgtgaaccaggctggtcgacgtaaggggtcaattgctgtttaccttgaaccctggcatgcagatatcatggatttcctcgagcttcgcctcaaccaaggtgacgaggaagcacgctgtagggaccttttctcagcgatgtggattccagacctatttatgaaacgagtcgaagagggtggtaactggtccctcttttgcccggacaaggcga

SEQ ID NO: 212009 - DNA, 757 bp, Unknown
  Bacterial polypeptide expressing nucleotide sequence isolated from the Sargasso Sea
tataggtttaggtatacaaggtttagcagatgtttattttaaactaggaattggttatgaaacagaagaggcaaagtcaataaataagctaatttttgaaactatatattttggagctttggaagcatcatgtgaattggcaaaagaaaaaggtgcttatgaaacttataataactcgcctatatctgaagggaaatttcaatttgatctttggaatgtaaatccttcttcgaaatgggattgggaaacacttagagctaaaataaaaaaacatggtgtaagaaactcattaactactgcttgtatgcctactgcgtcaacaggaataattttaggaaatactgaaacattccaaattcagacttctaacatatataaaagacagacattgtctggtgagtttttacttgttaatagatatcttgtaaatgagctttctcagcggaatctttggaataaggaaatgagagataaaattattttggaaaatggatcagtagaaaatattaatgaaatacctaatgagctaaaagaggtttataaaaccgtatgggaggtatcacaaaaaacagtaatagatatggctgcagatagagctccatttatagatcaaacacaatctatgaacctttggttatcaacgccaacattcggaaaagtaaattctatgcatatgtatgcttggaaaaaaggtttaaaaacaggtatgtattaccttagaagtagatcggctgttgatgctgttaaagtaacagtt

SEQ ID NO: 212010 - DNA, 685 bp, Unknown
  Bacterial polypeptide expressing nucleotide sequence isolated from the Sargasso Sea
gtatggtcttcaaattgaggcttatgtaaaagatacaaaagaaaaagatatgctttttgatgcaattcaaaatgtaccatgtattaaccataaagcacaatgggtatcaaaatggcttaatggcaatcaaaatctcttaaccagattgataggttttggattagttgaaggtttattttttgcagggtcgttctgtgccatatattattttagaaaaagagggttattacctggtttagccttatctaatgattggattgcaagagatgaaggaatgcactttagtttttcatcattaatgtttagaactttgagagacaagtttaataataaaacattaaccgatgcagatattagtgatttatctctaattccttcggatgttcctcaatcacaatttgaggaaattgttagagaagcggtagcttttgaaaaagaatttgtacaagatgcactcccagtagatttgattggcatgaatgctgatttaatgtgtcaatacatcgaagctgttgcagacagaattgccgacctatttgaatttgatagagtctttaaaacagagaatccatttgattttatgagagctttggatgttcaaaacgttacaaacttttttgaaaagagagtatctgagtatcaaagacctacagaccgagctttaagttttgatgaagcattttga

SEQ ID NO: 212011 - DNA, 601 bp, Unknown
  Bacterial polypeptide expressing nucleotide sequence isolated from the Sargasso Sea
aatgcgaaactcactactattggctccaatgccaactgcttcaaccagtcaaatcttaggaaataacgaatgctttgaggccttcacatccaatctatacgttagaagaactctttctggagaatttatcgtactcaacaagcatctagtaaatgacttaatttctagaggactttggtcgactgaaatgaagactgaaatcattcgtcataaagggtcagtacaagctatcgaaggaatccctatggatctcaaggagatatacaggacgacttgggaaattagtcaaaagcatatcttagatatggctgcagaccgaggtgcttacatcgaccagagtcaatctctaaacatccatatgaccgatgcaaatccagcaaaggtatcttcaatgcacttttatggctggaagaaaggactcaaaactggaatgtattatctaaggacaaaggcagcagcggatgcaattcaattcactgttgaacaaaaagccaaggatgaaactgtagaaagtttggcagcacgcgctgaggaattaaagcgtgaagcgatcgcttgtagcatcgaaaatggcgatgattgcgaagcatgcggttcgtga

SEQ ID NO: 212012 - DNA, 658 bp, Unknown
  Bacterial polypeptide expressing nucleotide sequence isolated from the Sargasso Sea
aaagatataaaagaaaaagatgatttatttgatgctataaaaaatgttccttgtataaatcacaaagctcagtgggtgtcaaagtggctaaatggaaaccacaatttattagttcggttaattggttttggtcttgtagaaggtttgttttttgcgggttctttttgtgctatttattattttagaaaaagaggattattgcctggtttagctctttcaaatgattggatcgcaagagatgaaggtatgcattttagcttttctgctttaatgtataaaactctaagagataaatataataatggaacactaaatgatactgatattgctgatatcaatttaattccaaaagatgttcaccaatctgaatttgaagaaattgttagagaagcagtagcctttgaaaaagaatttgtaaaagattcgttacctgttgatttgattggaatgaatgcagacttaatgtgtgaatatattgaagctgtagcagatagaatagctgatctatttgaatttgatagagtttttaatactgaaaacccttttgattttatgcgagctcttgatgtccaaaatgttacaaacttctttgaaaaaagagtttcagaatatcaacgtccaactgatagagcactgagctttgatgatactttttgat

SEQ ID NO: 212013 - DNA, 229 bp, Unknown
  Bacterial polypeptide expressing nucleotide sequence isolated from the Sargasso Sea
ccagtagatttgattggtatgaatgctgatttaatgtgtcagtatatcgaagctgttgcagacaggattgctgatctattcgaatttgacagagtctttaaaacagagaatccttttgattttatgagagctttagacgttcaaaatgttacaaactttttcgaaaaaagagtgtctgaatatcaaagacctacagatagagctttaagttttgatgaagcgttttgat

SEQ ID NO: 212014 - DNA, 199 bp, Unknown
  Bacterial polypeptide expressing nucleotide sequence isolated from the Sargasso Sea
ttaatgtgtcagtatatcgaagctgttgcagacagaattgctgatctatttgaatttgacagagtctttaaaacagagaatccttttgattttatgagagctttggatgttcaaaatgttacaaacttttttgaaaaaagagtatctgagtatcaaagacctactgatagagctttaagttttgatgaagcattttgat

SEQ ID NO: 212015 - DNA, 352 bp, Unknown
  Bacterial polypeptide expressing nucleotide sequence isolated from the Sargasso Sea
attttgcgtgtctgatgtatggcaattggataacaagcttgattacaacaggaccgcggagatcgtgggagaggcggtggcagtagagaaaaacttcatatgcgacgcactgccatgcgaattgatagggatgaacaagaatctaatgagccaatacatagagttcgtggcggataggcttcttaccgccttggactttccgaagctgtacggaagtaggaatccttttgattggatggagctgatcagtatgcagggcaagacgaacttctttgagaagcgcgtgggagagtaccagaaagctaacgtactgagcgggacttcagccttcgcccttgacagtgacttctga

SEQ ID NO: 212016 - DNA, 813 bp, Unknown
  Bacterial polypeptide expressing nucleotide sequence isolated from the Sargasso Sea
gagcgccatcaactggaacaagattgaagatgataaagatcttgaggtatggaaccgtctgaccagtaacttctggctcccggaaaaggttccgctctccaatgacattccggcctggcaaaagttgaacgcagccgaacagcagctaacaatccgcgtttttaccgggctgacgctgctcgacaccattcagaatgttgccggagcaccagcgttaatgactgattcgttaacgccgcatgaagaggcggtgctgtcgaatatcagctttatggaggcggtgcacgcccgttcctatagctctattttctccaccctttgccagaccaaagatgtggatgcagcttacacctggagtgaagaaaataccccactccagcgcaaggcgcagatcgttttggcacattacgccagcgacgaaccgttgaagaaaaaaatagccagcgtgtttctggaatccttcctgttctattctggcttctggttaccgatgtatttctccagccgcggtaaactgaccaataccgccgatctcattcgtctgatcattcgtgatgaagcggttcatgggtattacattggttataaatatcaaaaaggtctggagcatatttccgaatcatcacgcgaagagttaaagcattttgcctttgacctgttgatggaattgtatgataacgaagcgcgttatacggaagaattgtatgctcagaccggctgggtggatgacgtcaaagccttccctttgtacaacgcccataaggcattaatgaatttgggatatgaggcgctatttccgcctgaaatggcgga

SEQ ID NO: 212017 - DNA, 370 bp, Unknown
  Bacterial polypeptide expressing nucleotide sequence isolated from the Sargasso Sea
agacaatacaataatggaactttaaatgacagcgatattattgataaaaatttaatcccaaaagatatagcacaatcagagtttgaagaaattgttcgagaagctgtagcatttgaaaaagagtttgttaaagaagctttacctgtagacctaattggaatgaactctgatttaatgtgtcaatacatagaggcagttgcggatagaattgcagacttatttgaatttcagagagtgttcaatacggaaaatccttttgattttatgcgcgctttagatgtacaaaatgttacaaacttttttgaaaaaagggtttctgagtaccaaagaccaactgacagagcattgagctttgatgatgctttttaat

SEQ ID NO: 212018 - DNA, 871 bp, Unknown
  Bacterial polypeptide expressing nucleotide sequence isolated from the Sargasso Sea
tgtcctggattatctgatgtttatggggacgattttgaaaagctatatactaaatacgaagcagaaaagaaaaacttagaaaagattaaagctagagatttaatgtccaaaattattgaggcacaaatagaaactggacaaccttatatgctttataaagactcaattaataataaatcgaatcaaaaaaatattggtgttattaaatcatctaatctatgtgcagaaatagttgaatactcagataaaaatgaaacatctgtttgcaacttagcatcaatagcgcttccaaaatttgtaaaaaaatctgataaaaaaatctattatgattatgatgctctttatgaaactgcaaaacttgcaacaaaaaatttagatgaagttatagatatcaatttctaccctacagataaaactgaaagatctaacaataaacacagacctataggtttaggtatacaaggattagctgatgtatattttaaacttggaataggatacgaatctgaggctgcaaaagaaataaataaacttatttttgaaacaatatattttggtgcacttgaagcgtcatgcgaattagcaaaagaaaaaggggcatatgaaacattcaaaaattcacctatttcaaatggtaaatttcaatttgacctttggaatgttaatccttcttcaaaatgggattgggattcacttagatctaaaataaaaaaacatggtgtaagaaattcattaacaacagcttgtatgcctactgcgtcaactggtataattttgggcaacacagaaacattccaaatacaaacttccaacatatataaaagacaaacattatctggtgaatttcttttagttaatagattcttagtaa

SEQ ID NO: 212019 - DNA, 733 bp, Unknown
  Bacterial polypeptide expressing nucleotide sequence isolated from the Sargasso Sea
gatgaaagtccaaaaacgcaatggttcacttgaaaatgttagttttgataaaatacaaacgcgactattaacattatgtcaagaaccaaagttaaaactattaaatattgatacaaccattgtagcacaaaaagtatgttcagaaatttatgatggtgttacaacagaagaattggatattctttcatcagaaattagtatttcattatattcaaaaaatgtagattataaacatttagcatcaagaattgtagtatcaaatcatcataaaaatacaagtggaacatttggtaatattatagatagattacacaattacaagaaaaatggtaaaggagaaccattaatcaatgatgatttttacaatctggtacaaagtaatttagaacttatagaatctaaaatagattatatatgtgattataattttgattactttggatacaaaacacttgaacgcagttatttattaaaaattgatggcaaaattgttgaaagaccacaagatatgttaatgagagtatcattatcaattcatagaaaagatttagataaagcatttgaaacatatgagcatatgtcaaagggtgattttattcatgctacaccaacattatttaatgctggaacaaataaggaacaattttcaagttgttttctattagcaatgcaagatgatagtgttcaaggtatctttgatacattaacagatttgctaaaatttcaaaacatg

SEQ ID NO: 212020 - DNA, 895 bp, Unknown
  Bacterial polypeptide expressing nucleotide sequence isolated from the Sargasso Sea
atgagaaataaagaagaacgagctattgaattctacaatttatttagcaatatgttgtacactccatccactcctactctttttaatagtggaactactcactctcaattaagctcatgttatttaaacacattcgatgatagtattgacggaatctttgaaggggtctggcaagaggcgcgtaagagtaaatacgctggaggtcttggctttgatgttactaattttcgtgcttctggggcttttatcaaaggcacaaacgggatttctggaggccttgtcccatggctcaaaatcctcaacgacacactcgtcgcagtaaatcaaggcggtaagaggcccggtgctggatgtgcatatctagaaccttggcatcttgattttgaagattttctcaatttgcgccgcaacacaggtgatgaccgcttgcgttgtcacgacatgaatactgcgtcttgggtgccagatttgttcatgcagaaggtaaaaagcaatgaagattggtatatgttttgcccatccgactgccgcgatttacatgagacttttggtgcagaattcgaaaagctttacaatgaaatgtgccagaaggctgacgcaggagaactgtctaatttccgcgtcgttaacgctaaagatctatggaaaaagatgttaaaggtgctttttgagacatctcacccatggattacctttaaagacccgtcaaatattcgttacagcaaccaacatttaggtgtagtacatagttcaaacctttgtacggagattttacttcatacaaagccatcaacctatgaaaacggcactaaaacggaaattggtgaaactgctgtatgtaatcttgggtctgtcaatcttaagaatcatcttagagtccctagcgaggcaaagc

SEQ ID NO: 212021 - DNA, 664 bp, Unknown
  Bacterial polypeptide expressing nucleotide sequence isolated from the Sargasso Sea
actgggttcgtatagtagttttgcaggtagtatgacaagtaaaggagttttgcagtttgataaatggggggtaacaccaactaccagatacaattggaaaaaattaaaaacatcgattatcaaacatgggttaagaaattctttattgatagcaccaatgccaacagcaagtacttcacaaattttaggaaacaatgaatgcatagagccgtttacaagtaatttatattcacgaagaactcttgctggtgaatttataattagtaataagcatttaattcgagatttaatagatcttgatttgtggaacaaagatgttaaaaataaattaataaagaaccgaggaagtattcagcatatagagagtattccagatcatattaaaaagaaatataaaacagtttgggagatatcaatgaaatcagtgatagatatggcaaaagataggggtgcttatatttgtcaaagccaaagtatgaatttatggatggccgatccatcatacaaagcattaaccgctatgcacttttatgcatgggagagtggattaaaaacaggaatgtattatttaaggagacaaccaaaacaccatgtacagcaatttacaattgaacctacaaaatcaatacgtaatactaatgaaataagtaatgaagatgaagaa

SEQ ID NO: 212022 - DNA, 862 bp, Unknown
  Bacterial polypeptide expressing nucleotide sequence isolated from the Sargasso Sea
agaattattatatcaaataatcataaaaatactatttcttcatttagtgaaactatggagaagttgtataattttaaagatatacataacaacaatatccccattatagattcaaaaatttggaatattattgaaaataataaagatttttttgattccatagtggattatagtagagattacgaaattgattattttggatttaaaacacttgaacgggcatatttaatgagagttaataaagttgtagttgaacgtcctcaacatatgtggttacgtgttgcaataggtattcattttaacgatttggattcagttaaagaaacttatgatttaatgtctcaaaaatatttcacacacgctacacctacattgtataatgcgggaaccccgcgacctcaattaagttcatgttatttactatctatggaaaacgacagtattgatggtatatataatacactaaaggattgtgctagtatatcaaaatgggcaggtggtatcggtcttcatattcacaatgtaagagcaactggtagtcatattagaggaacaaatggaacctcaaatggaattgttccaatgttacaggtttttaataaaaccgcgcggtatgttgatcagggtggcggtaaaagaaacggttcattcgcaatttatctagaaccttggcatggtgacattgaagattttttggatttgaagaaaaatcacggtgatgaagaattgcgtgctcgcgatttattttacgcaatgtggattccatccttatttatggaaagggttgagaaagacaaagaatggtctttattttgcccagacaagtgtcctggactagctgattgttacagaagtaatttta

SEQ ID NO: 212023 - DNA, 853 bp, Unknown
  Bacterial polypeptide expressing nucleotide sequence isolated from the Sargasso Sea
atgagagttgctatgggtctagccgttgaagaggatcagaaagaagaaagagctattgagttctacagattgctatcaagctttgattatatgagctcaactccaaccctcttcaattctggtactttgcgtcctcaactatcatcatgctacctcacaaccattccagatgatctggatggaatatttggagcaatgaaagataatgcgctgctctctaagtgggcaggtggactaggaaatgactggtcgcctgtgagagcattgggttcttacattaaaggaacaaatggcaaaagtcagggcgttgttccctttttaaaagttgcaaacgatacagctgttgctgtgaatcagggcggtaaaagaaaaggagctatgtgtgcttacttagaaacatggcacttagatatagaagaattcttagatcttagaaaaaataccggggacgacagaagaagaactcacgatatgaatactgccaactgggtacctgatttgtttatgaaaagagtggagttagataaaaattggactcttttttctcctggtgaagccccagacttacatgatcttaccggcctagcatttgaaaaaagatatgaagaatatgaagcgttggctgctgaaggaaaaatggatcaacataaaactattccagctaaagatctatggagaaaaatgcttaccatgttattcgaaacagggcatccatggataacttttaaagattcatgtaatttacgttcaccgcaacagcatattggagtaattcactcatctaacctatgtactgagattacccttaacacaagcaatgatgaaatagctgtttgtaatcttggatcagtaa

SEQ ID NO: 212024 - DNA, 672 bp, Unknown
  Bacterial polypeptide expressing nucleotide sequence isolated from the Sargasso Sea
ttatgatcgttatctcattcaccatgatagtaaacgaattgagttgccacaagtgttttttatgcgcgttgcaatgggtctggcgcactgtgaaggtgatgcacgtaatgagcgggctattgagttttatcagcaattttcaagctttgattatatgtcatcgacacctactttgtttaatgccggcaccttgcggccgcaactatcaagctgctttttaacgactattccagatgatttggatggcatttatggcgctgttaaggataatgcactattgtcgaaatacgccggtggtattggtaacgactggacgcctgtcagaagtttgggtgcgcatattaaaggtacgaatggtaagtcacttggtgtggtgccttttatgaatgttgcagatgcaacggcagtagctgttaaccaaagtggtaaacgtaaaggtgcggtgtgtggttacttggaaacatggcatatggatatagaggaattcctggaattacgtaaaaatacaggagatgacaggcggcgtacacatgacatgaatacggcgaattggatccctgatttatttatgcagcgtgtatttgaaacagccgattggactttgttttcgcctaatgaaacaccggatttacacgatttatatggagacgcatttgcaaaacgttatattga

SEQ ID NO: 212025 - DNA, 565 bp, Unknown
  Bacterial polypeptide expressing nucleotide sequence isolated from the Sargasso Sea
ggcagtcaaaatctcctaaccagattaataggttttggattagttgaaggtttgttttttgcaggctcattttgtgcaatatattactttagaaaaagaggtttattacctggtttagccttatctaacgattggattgcaagggacgaaggaatgcactttagcttttcatcgttaatgtttaggactttaagagataagtttaataataaaacattaactgatgcagatattagtgatttatctttgattccttcagacgtgcctcaatcacagtttgaagaaattgttagagaagcagtagcttttgaaaaagaatttgtaaaagatgcactaccagtagatttaattggtatgaatgctgatttaatgtgtcagtatattgaagctgtggcagacagaattgctgatctatttgaatttgacagagtatttaaaacagagaatccttttgactttatgagagctttggatgttcaaaatgttacaaacttttttgaaaaaagagtatctgagtatcaaagacctacagatagagctttaagttttgatgaagcattttgat

SEQ ID NO: 212026 - DNA, 946 bp, Unknown
  Bacterial polypeptide expressing nucleotide sequence isolated from the Sargasso Sea
cctcgattacggcgttcaactgaacaagctgatgtacgaacgcatgatcaagaatggcaacatcaccctgttttcaccgagtgatgttcctgggctttacgacgccttctttgaggaccaggaactgtttgagcagctctacaccaagtacgaagctgatgacagcatccgcaaaaagaccatcaaggcggtcgaccttttctcaatgatgatgcaggaacgtgcaagtaccggccgtatctacattcagaatgtggaccactgtaatacccacagcccgttcaatccgaagaaagcgccagtgcgtcagtcaaatctctgtctcgagattgcactgccaaccaagccgctgaacgacattaacgacgagagtggcgaaatcgccctgtgtactctcgccgcgtttaacctgggcaagatcgacgacctgaacgaacttgaagatctttctgatcttatcgtgcgtgcgctcgacagcctgctcagctatcaggactatccagtacctgcagctcagcgcgccagccttgcacgccgcactctgggtgttggcgtgattaacttcgcctacttcttagcgaagaatggtgttaagtactcagacggttcagccaacggcctgactcatcgcgcctttgaagcgattcaatactggttgctgcgcgcatcgaaccagctggcgaaagagcaaggcgcgtgtgaagcgttcagcgacacgacttatgctcaggggattctcccaatcgactcttacaagaaagatgtcgacaagttctgtgaagaacctcttcagtacgactgggaaacactgcgcaaagacatcgtcgataccggcctgcgtaactcaacactgacagccctgatgccatccgaaacatcatcgcagatcagtaacgcgaccaacggtattgagccgccacgtggttacatcagcgtaagcagagca

SEQ ID NO: 212027 - DNA, 793 bp, Unknown
  Bacterial polypeptide expressing nucleotide sequence isolated from the Sargasso Sea
gctgttaaccagggtggaaaaagaaaaggtgccatgtgtggctatctagaaacatggcatttggatatagaagaatttctagaattaagaaaaaatactggagatgaaagaagaagaactcatgatatgaatactgcaaattgggtccctgacttgtttatgaaaagagttgagcaagataaaaattggaccctattctctcctggcgagacagctgatttgcacgacttgattggtaaggcgtttgaaaaaaaatatgaagaatatgaagaaaaggctaaaaaaggagaaatggaccaatttaaatctatacctgcaaaagagttatggagaaaaatgttaacaatgttatttgaaaccggtcatccatggattacatttaaagattcctgtaatttaagatcaccacagcaacatactggtgttatacattcatcaaatctttgtacagaaataacattaaacacaagtgcagataatgaaattgctgtatgtaatctaggctctgttaatctcgctaaccatatggaaaatggaaagctcaataaagaaaaagttaaacaaacagtctcaacagcaattagaatgttagataatgtaataaatattaattactattctgtagatactgctaaaaattctaattttaaacataggccgataggtcttggtctcatgggttttcaagatgctttatatcttcaagatataccttattgcagtgatgaagcaattgattttgctgacaaaagtatggaattaattagctataacgctatatatgcatccacag

SEQ ID NO: 212028 - DNA, 340 bp, Unknown
  Bacterial polypeptide expressing nucleotide sequence isolated from the Sargasso Sea
cttgatattcgctgatatcaatttaatcccaaaagatgttcagcaatctgaatttgaagaaattgttagagaagctgtagcttttgaaaaagaatttgtaaaagattcattgcctgttgatttgattggaatgaatgcagacttaatgtgtgaatatattgaggctgtagcggatagaatagctgacttatttgaatttgatagagtttttaatactgaaaacccttttgattttatgagagcactggatgttcaaaatgttacaaatttctttgaaaaaagagtttcggaatatcagcgtccaactgatagagcactaagttttgatgacgcattttaa

SEQ ID NO: 212029 - DNA, 520 bp, Unknown
  Bacterial polypeptide expressing nucleotide sequence isolated from the Sargasso Sea
tacgacgatctgatcgaggcgaccgcgctctacaacctgcacggtgaaggcacccaccgggtggccggtcgtgacgtgaccatcaccttgcgcgagctgaaaaagaaactctacctgtgcctgatgagcgtcaacgcgctggaagcgatccgcttctacgtcagcttcgcctgctccttcgccttcgccgagcgcgagctgatggagggcaacgccaagatcatcaagatgatcgcccgcgacgaagcgctgcacctgaccgggacccagcacatgctgaacctgatgcgcagcggccaggatgaccccgagatggccgagattgccgccgagtgcgagcaggcctgcttcgagctgttcaaggaagcggccattcaggagaaggagtgggccgagtacctgttccaggacggctccatgatcggcctgaacaaggacatcctctgccagtacgtggaatacatcaccaacctgcgcatgaatgcggtgggtctgcagccagcctttgccggggccaagc

SEQ ID NO: 212030 - DNA, 850 bp, Unknown
  Bacterial polypeptide expressing nucleotide sequence isolated from the Sargasso Sea
attaaggcgagagaattatggtcagcgattttaacttctcaaattgaggtaggaactccttatttattatataaggatgcttgtaatcgtaaatctaatcaacaaaatctaggaactataaaatcatctaatttatgtactgaaatagttgaatatacatctcctgaggaaacggctgtatgtaatttagcaagcatttcactaaagaaatttattaaaaagaaggattgtagtggtttagtattcagattatttagtaagcctaattgtgtatattgtgaattagcaaaggggttattaaataaaatgaatattcaatatgaagttaaaaattataaagagttaacaaatgtttctggtgaatatccactaggagtcaaattccctcaaatttatcggattgataatcataaaactgatattattggtggatatactgaattatatgaatatttaaaacctggttatgattttgtttctctacaaaagattactgaacgcttaacaaaaaatctaaataatattattgattataattattatcctactaaagaaacaaaaatatcaaatcttagacatagaccgattggtataggtgttcaaggattagcaaatgtattctttgaatttggatatgcgtttgattcagatgaagctaaagaattaaatgaaagaatttttgaatgtatttattatggttcattaaaagcatctatggaattatccagagctagagaaaatgatatgaaaatatataaatcttataaaaatcaatttgccgatggttctgatttcgggggagacaatttcatatcttcagataagtttaatactgttaagaattcattaa

SEQ ID NO: 212031 - DNA, 481 bp, Unknown
  Bacterial polypeptide expressing nucleotide sequence isolated from the Sargasso Sea
atgaatcaaaatctctcagtcagtaaacgtgacggtcgaaaagaaccgcttgacctggataaaattcaccgcgttattgcttgggctgcagaggggttgaataacgtttctgtatcgcaagttgaactcaagtctcatatccaattttatgatggtatacgtactgaagacatccatgagacaattatcaaagctgctgctgatctaatttctaaagatacccctgattatcaatatctagctgctcgattagcagtttttcacttgagaaaaaaagcatacggtcaatttgagccgcctaaactgtatgaccatatggttaaaatggttgagtcacacaagtatgatgcccatctattagctgattacactaaagaagaaatagacgaacttgatgcttatatagaccacgcacgtgatatgactttcagctatgcagctgttaaacagctagaaggtaaatatttagtacagaacccgt

SEQ ID NO: 212032 - DNA, 746 bp, Unknown
  Bacterial polypeptide expressing nucleotide sequence isolated from the Sargasso Sea
tacctgctgcgccatccgcacacccgcaaggtgatcgagaccccgcagcagttcttcctgcgcatcgccagtgcactgagcgaggacgtgccggaagccctggcgctgtaccgccgcatgggcaacctggactacctgccgtccagcccgaccctgttcaactccggcaccacccacgagcagctctcctcgtgcttcctgctggattcgccgcaggattcgctggagtcgatctactccaagtacggcgacatcgcccagctgtccaagttctccggcggcatcggcgtcagctacacccgcgtgcgttcgcgcggttcgctgatcaagtcgaccaacggccactccaacggcatcgtgccgtggctcaagacgatggattcgtcggtcgctgcggtgaaccagggcggcaagcgcaagggcgcggcctgcgtgtacctggaaacctggcacgccgacatcgaggacttcctcgagctgcgcgacaacaccggcgacgaatcgcgccgtgcgcacaacctgaatctggccaactggatcccggacctgttcatgaagcgcgtcgaggccgaccaggaatggtcgctgttcgatccgcgcgtggtgcccgagttcaccgacctgttcggtgaagccttcgagcaggcctacctgcaggccgaagcccagggcaaggcgaaccgcaccatttccgcgcgcaagctgtactcgcggatgatgcgtaccctggccgagaccggcaacgg

SEQ ID NO: 212033 - DNA, 714 bp, Unknown
  Bacterial polypeptide expressing nucleotide sequence isolated from the Sargasso Sea
attcctgatttatttatgaaaagagttgagaaagatctagactggactttaatgagtgaacatgaatgccctggtctttctgacaaatatggcgatgattttaaaagtttatatgaaaaatatgaaaaagaaatgccacatttagaaaaaataaaggcaagagatttaatgtcaaaaatcatcgaagcacaaattgaaactggccagccttacatgctctacaaagactctataaataaaaaatcaaatcaaaaaaacataggtgtaatcaaatcttctaatttgtgtgcagaaatagttgaatattctgataaatctgaaacatcagtatgtaatcttgcttctattgcacttcctaaatttgttaaaaaatcaaaaaataaaaagattaaagaatatgattacaaagctctatataaaacagccaaattagctactaaaaacttggatgaagtaattgatataaatttttacccaacagaaaaaacagaaacatcaaataataaacacaggccaattgggcttggcatacaaggtcttgctgatgtttattttgaacttgatattccatacgatagtgaagaagctaaagtaataaataaacttatatttgaaacaatatattttggtgcacttgaagcatctcacgaacttgctaaagaaaagggtgcatattcaacctttaagggatcaccattatcagaaggaaaattt

SEQ ID NO: 212034 - DNA, 884 bp, Unknown
  Bacterial polypeptide expressing nucleotide sequence isolated from the Sargasso Sea
gaaagataatgcactattatcaaaatgggctggaggcttaggtaatgattggactccagtaagagcaatgaactcttatatcaaaggaacaaatggaaaaagtcagggtgttgttcccttcttaaaagttgcaaatgatactgctgttgcagtgaatcaaggcggtaaaagaaaaggagccatgtgtggttatttagagacttggcatttggatattgaagagtttttagagcttagaaaaaatactggcgacgaaagaagaaggacgcatgatatgaacactgcaaactgggtgcctgatctatttatgaaaagagtggaaaaagacgaaaactggacacttttttcacctggagaaacaccagatctgcatgatctaattggtaaagcctttgaagaaaaatatgaagaatatgaagaaaaggcaaaaaatggtgagatggatcaattcaaatctgttccggcaaaagagctatggagaaaaatgcttacaatgttgttcgaaacaggtcatccttggattacatttaaagactcttgcaacctaagatcaccacaacagcactcaggagttgttcattcatcaaatctttgtaccgagattaccctaaatacaagcgcagataatgaaattgctgtttgtaatttaggctctgttaatcttgcaaatcatatgaaaaatggaaagcttgatgaagaaaaagttaaaaaaactgtatctacagctataagaatgttagataacgtcattaatattaattattactctgttaatactgctaaaaattcaaacttaaaacataggccaataggacttggcctcatgggtttccaagacgcactttatttacaaaatataccatactgcagcgatgaagcagtag

SEQ ID NO: 212035 - DNA, 588 bp, Unknown
  Bacterial polypeptide expressing nucleotide sequence isolated from the Sargasso Sea
cttctaccctatttggcacttagaagtggaatcgctgctggtactgaaaaacaaccgcggtgttgaagataaccgtattcgccacttagactacggcgtgcagctcaacaagctgatgtaccaacgtctgatcaaaggcgaaaacattagcctgttcagcccatcggacgtaccaggtctttacgatgccttcttcgaagatcaagacgaattcgaacgtctgtacctgcaatatgagcaagacagcagcattcgtaagaagacattgaaagcggtcgaactgttctcattgatgatgcaagagcgtgcttcaacgggccgtatctacatccaaaacgtcgaccactgtaacacccacagtccgttcgactcgaaagtcgctccgatcagacaatctaacctttgccttgaaatcgcgctgccgaccaagccattgaacaacattgacgatccaaacggtgaaatcgcgctgtgtacactgtcaccgttaaacttaggtgcaatcaaaaacttagccgagcttgagccattagccgatttagcggtacgtgcactggataacctactggattaccaagattatccaat

SEQ ID NO: 212036 - DNA, 929 bp, Unknown
  Bacterial polypeptide expressing nucleotide sequence isolated from the Sargasso Sea
ccgaatagatgatttaacagctgaattatgtacatctgaaatgacttctgaaactgagtatggtgatttagcatctagaattgttatatctaataaccataaaaatacaagtgattcttttatggatgttatagaaaaaatgtatagacatgttgatgaaaaaaatattaaaaattctagaatttctgataaggtatataattttattaaaaaacatagtgaactaattatcaaaaaaattaattatgatcttgattttaattttgattattttggatttaaaacacttgaaaaggcatatcttgttaagctaaatggacatataattgaacgtatacaacatatgctaatgcgtgtttctattggtatacatcatgatgatatagaagctgctttaaacacatatgatatgatgtcaaataaatattttattcatgcaacacctacactttttcatgcaggatcaaaccacccacaattattaagttgttttttgcttggggttgatgattcaattcaaggtatttacaaaactttatatgattgtgctcaaatatctaaatgggctggtggaataggaacacatataactaatattagagcaaaagatagtattattcgaggtacaaatggaattacatcaggtattatacctatgttaaaagtatataatgagaccgcaagatatgttaatcaaagtggaaaaagaaacgggtcttttgcaatatatcttgaaccatggcatgcagatatattatcattcttaaacttaaggaaaaatcatggtgacgaaaatcaacgtgctagagatttattttatgcaatgtggatacctgatttatttatgaaacgtcttgaaaaaaaaggtaaatggtcactattttgtccagatgaatgcaaagatttatgtaatttatacggagataaat

SEQ ID NO: 212037 - DNA, 257 bp, Unknown
  Bacterial polypeptide expressing nucleotide sequence isolated from the Sargasso Sea
tatgcagcaagagccacttttacaagaaaacaaagatagatttgtaatttttccaattgagcaccatgacatatgggaatggtacaaaaaatgtgaagccagtttttggacggctgaagaaattgatctccatcaagatttaaatgattggagtacaaagttaaatgacgacgagagatacttcattaagcatatcctagctttttttgctgcctccgatggaattgtaaacgaaaatttagcagaaaattttgtga

SEQ ID NO: 212038 - DNA, 876 bp, Unknown
  Bacterial polypeptide expressing nucleotide sequence isolated from the Sargasso Sea
atcgcttggatcttatataaaaggcacaaatggaaaaagccaaggcgttgttcctttcctaaaggttgccaatgatacagccgttgcagttaatcaaggcggtaaaagaaaaggtgcaatgtgttcttacctagaaacatggcatatggatatcgaagaattcttggagctaagaaaaaacactggagatgatagaagaagaacgcatgatatgaatacagccaactgggtaccagatctttttatgaaaagagttcaaaatgatgaagagtggtcgcttttctccccaggcgaaacgccagatttacatgacttaatcggtaaagaatttgaggaaagatatgctgaatatgaggaaatgggtgaaaaaggaaaactcagacaattcaaaaaaataaaagcaaaagagttatggagaaaaatgcttacaatgctctttgaaaccggtcatccgtggattacttttaaggattcatgcaatctaaggtcgccccaacaacacgagggagttgttcactcatctaacctctgtacagaaataacactcaatacaaaagcgagtgaagaaattgcggtttgtaatttaggctctgttaacttaaagcagcacatgaaagatggaaagttagatgaagataaagtcaaacaaacggttacaactgctatcaggatgctcgataacgttatcaacattaattattattcagtggagacctcagagaactcaaacatgaagcatagaccaataggtcttggcctgatgggattccaggatactctttatatgcaaaatatttcatataactcacaggaagctgttgattttgctgatagaagtatggagcttataagctactatgcaataaatgcatcatc

SEQ ID NO: 212039 - DNA, 844 bp, Unknown
  Bacterial polypeptide expressing nucleotide sequence isolated from the Sargasso Sea
tgtgcgcggcggtgcagctaccctgttctacccgctgtggcatttagaagtagaatcgctattggtgctgaaaaacaaccgcggcgtagaggaaaaccgggtacgccacttagattacggtgtgcagtttaaccgcctgatgtacacccgcttaattaaagatgattacatcaccctgtttagcccatcagacgtaccgggcttgtacgatgccttctttgaagatcaggaaaagtttgaacagctgtatgtgaagtacgagaacgacagcagcattcgcaaaaagcgcttaaaagcactggagctgtttaccctgtttatgcaagagcgtgccagcacggggcgtatttacctgcaaaacgttgaccactgcaatacgcacagcccgtttaaccccaaatttgcgccggtacgccagagcaacctgtgcctggaaatagcgttgccaaccaagccgttaaacgacgttaacgatcctgaaggcgaaattgctctttgtacgctgtcagcatttaacttaggcgccattgaaaacttagcggaacttgaagagctggccgagcttgcggtgcgctcactcgatagcctgctggattaccaggactaccctattccagccgcgtttcatgcctctatcaaccgccgcactttaggcgttggtgtcattaactacgcctattatctggcgaagaacggcgtgaaatactcagatggctctgctaatgcgctaacgcaccgcacctttgaagcgatgcagtattatctactgaaagcctcaaacaaactggcgcaggagtttggcgcttgtccgaagtttaacgagacgacctatgctgaaggtatt

SEQ ID NO: 212040 - DNA, 491 bp, Unknown
  Bacterial polypeptide expressing nucleotide sequence isolated from the Sargasso Sea
tgcaatttattattttcgtaaaaggggtctgcttcctggactcgcactatcaaatgactggatagctagagatgaaggtatgcactttagtttttctgctctaatgtataaaacacttagagataaatataataatggaacattaaatgactctgatatttataatactgatttaataccaaaagatatacaacaatcagaatttgaagaaattgttagagaggctgtatcatttgaaaaagagtttgttaaagatgctcttccagtaagtcttataggtatgaatgctgatttgatgtgtcaatatattgaagctgtagctgatagaattgctgatttatttgaatttgaaagagtatttaatactgaaaatccttttgattttatgcgggcattagatgtgcaaaatgtaacaaatttctttgaaaaaagagtatctgaatatcaaagaccaacagacagggctcttagctttgatgatgctttttaat

SEQ ID NO: 212041 - DNA, 304 bp, Unknown
  Bacterial polypeptide expressing nucleotide sequence isolated from the Sargasso Sea
atgactaaggagttacttttatcagaagaagaaaatagatatgtaattttccctattaaacaagaacctatttggaacatgtataagaaggcaatgtcaagtttttggacacccgaagaaattgatttatctaaagatatggatgattttacaaaattgaaagatgaagaacaacatttcattaaaaatgttctggcattctttgcggcatcagatggcatagtgaatgaaaatctggtagaacgtttttgtaatgaagtcaaaatcttagaagcaaaattcttctatggattccaaaatagct

SEQ ID NO: 212042 - DNA, 160 bp, Unknown
  Bacterial polypeptide expressing nucleotide sequence isolated from the Sargasso Sea
cagacttatttgaatttgaaaggggtatttaatactgaaaatccatttgattttatgagagctttagatgttcaaaatgtaacaaacttctttgaaaaaagagtatctgaataccaaagaccaactgatagagctcttagctttgatgatgctttttaaa

SEQ ID NO: 212043 - DNA, 886 bp, Unknown
  Bacterial polypeptide expressing nucleotide sequence isolated from the Sargasso Sea
tgcagatatagagaaatttttagaactaagaaaaaatacaggggctgaagaatttagagcaagggatttattttatgctctatggattcctgatttatttatgcaaagagtaaaagatgatgatgattggaccttaatgagtgaacatgaatgtcctggtttatctgattgctatggtgatgaatttgaaaagctatatatcaagtatgaaaaagaaaagactcacttagaaaaaattaaagctagatccttaatgtcaaaaattattgaagcccaaattgaaactggtcaaccatatatgttatataaagattccataaataaaaaatcaaatcaaaaaaatattggtgtaataaaatcttcaaatttgtgtgctgaaattgttgaatattcggataagaatgaaactgctgtttgtaatttagcttctatagcactccctaaatttattgataaaaaaaatcttaaatacgactataaaagactttacgaaacagcaaaattagcaacaaaaaatttagatcaagttatcgatataaatttttatccaacaaacaaaactgataaatctaacaacttacacaggcctattggcttgggtgttcaaggactttcagatgttttctttaaattatctattccacatgatggtgaaaaggctagtagaattaataaactaatatttgaatcaatttattttggtgctcttgaagcatcaatggaactagctaaagaaaaaggagtatattcaacttttaaaggctctccattgtctgaaggtaaatttcaatttgatttatggaaagttaaaccttctaatatgtgggattgggactcattgagagaaaaaatcaaaaagtatggtgtacgcaactctcttacaaca

SEQ ID NO: 212044 - DNA, 952 bp, Unknown
  Bacterial polypeptide expressing nucleotide sequence isolated from the Sargasso Sea
cgtgcgagcacaggtcgtatctacttacaaaacgttgaccactgtaatacgcacagcccgttcatctcgactgtggcaccaattcgtcaatctaacttatgtttagaaattgcattaccaactaagccacttagcaatgtaatggacgaagaaggtgaaattgcactttgtacgctgtcggcttttaacttaggtgcaattgaatcacttgacgaattagaagagcttgctgaacttgcagtacgtgcccttgataacttacttgatttccaagactaccctgttcctgcggctaaaaacgcgaccatgggtcgtcgtacgctaggtattggtgttattaactacgcgtactacttagcgaaaaatggtaagcgttactcagatggcagcgcaaatgccctaactcacaaaacatttgaagcaattcaatattacctaatgaaagcatcaaatgagttagcgaaagaacgtggtgcgtgtcctaaatttaacgagacaacgtattctcaaggcattatgccaacagatacttacaaacgtgacctagatcagttctgtgaagagccgcttcacttagattgggattcattacgcgaaagcattaaacagcacggtatgcgtaactcaacgctatctgcccttatgccttcagagacatcatcgcaaatctctaacgcaacaaatggtattgagccaccacgtggtcatatcagcgttaaagcaagtaaagatggtatcttaaagcaagtagtgccagattatgaaaatctgaaagataactacgagctactgtgggatattccttcaaacgatggttacctacaactggttggtattatgcaaaaattcgttgaccaaacgatctctgcaaacactaactatgatccatctaagtacgaaggcggtaaagtacctatgaaggtgctattaaaagacctactgactgcgtaca

SEQ ID NO: 212045 - DNA, 414 bp, Unknown
  Bacterial polypeptide expressing nucleotide sequence isolated from the Sargasso Sea
gctggactccattcagggacgtagtccaaacgtcgcgctgctgccgttaatctcgatccctgaactggaaacctgggtggaaacgtgggcgttttctgaaactatccattcccgctcctacacccatattattcgcaatatcgttaacgatccggcggtggtgtttgacgatatcgtcactaatgagcaaatccagaaacgcgcagaaggtatttccagctactacgacgaactgatcgagatgaccagctactggcatttgctcggtgaaggtacgcataccgttaatggcaaaacggttgtcgtaaacctgcgtgagctgaagaagaagctgtatctgtgcctgatgagcgtcaacgcgctggaagcgatccgcttttatgtcagcttcgcctgctccttcacattctccga

SEQ ID NO: 212046 - DNA, 892 bp, Unknown
  Bacterial polypeptide expressing nucleotide sequence isolated from the Sargasso Sea
gatggtaacaaaacgtgatggaacaaaagaacctgtatctttagacaaaattactaatcgtgtttctgttttatcaactggattatctattgatccaatagttgtagcgcaaaaagcaataccaggtttatataatgatattacttctacagaaatagataattatctagctgaaacgtcagctgctctaactgttgaacatcctgattattctaatttagctgcaagaataaagtctaatgctcttcacaaattaactcctggttttgttatagctacaaaaaatttatttgaagacggtttattacatgaaagttactataatcaagtaatggaaaatgctgaagaaattgaatctgtaattgattatgatagagattacagttttgactattttgctttaacaactctaataagagcatatcttctaaaatatgaaaatcaaactatagaaagacctcaagatttgtggatgcgtgttgctttaactgtatctggaaaagaatttaacctttccaaggttaaagaaacatatgattccctatctaaaggtttgtatactcatgctactccaactctttttaatagtggactaaaaatgcaacaattatcttcttgttttcttattggtatggaagatgactctatagaagggatttttaatacaattaaagattgtgctttaatatcaaaaactgcaggtggcatagggatgcatgcacataatatacgtggaagtggaagtagaattaaatcaaccaatggaaaatcaaatggccttataccttttttaaaaatatttaatgaaacagcgaaatctgtagatcagggtggcggaaaaagaaaaggttcatttgctatttatttagaaccatggcatgcagatattgaa

SEQ ID NO: 212047 - DNA, 325 bp, Unknown
  Bacterial polypeptide expressing nucleotide sequence isolated from the Sargasso Sea
gatggatttaatccctggtcctgttgcacagtctgagttcgaagaaatagtgagagaagcagtggagtttgaaaaagaatttgtaactgacgcgcttccagttgatctcattggtatgaacaaggaaatgatgtgtatgtatattgaggctgtttcagatcgtattgctgacctttttggatttgaaagggtatttaatactgaaaacccatttgatttcatgagagctcttgatgttcaaaacgtgactaatttcttcgaaaaaagggtatctgaataccagcgtccaacagatcgttctttgtcttttgacgagtctttctaa

SEQ ID NO: 212048 - DNA, 798 bp, Unknown
  Bacterial polypeptide expressing nucleotide sequence isolated from the Sargasso Sea
gattggtcgccagttagagctttaggatcctacataaaaggtactaacggtaaaagtcagggagttgttccatttctaaaagtagcaaacgatacagctgttgctgttaatcagggtggaaaaagaaaaggtgccatgtgtgcgtatcttgaaacttggcatctagacatagaggagtttctagatcttagaaagaacacaggagacgatagaagaagaacccatgatatgaatacagcaaactgggttccagatcttttcatgaaaagagtcgaattggatctaaattggacgttattttctcctggtgaaacacctgatttgcatgaccttactggtcttgaatttgaaaaaagatatgaagaatacgaagcgttggctgctgaagggaagatggatcaacataaaacaattcctgcaaaagacctatggagaaagatgcttactatgttgtttgaaactggacacccctggattacctttaaggactcatgtaatttgcgttcacctcagcaacacatcggggtaattcattcatcaaatctttgtactgagataaccttaaatacaagtaacgatgaaattgcggtatgtaatttaggttcagttaatctaccgcaacacatgaaagacggtgtcctagatcaagaaaaaatcaaacagactgttacaactgctttaaggatgcttgataatgttattgatattaattattactcagtagatacagcaaagaattcaaacctaaaacatcgcccagttggtatgggtcttatgggattccagatgccctctata

SEQ ID NO: 212049 - DNA, 390 bp, Unknown
  Bacterial polypeptide expressing nucleotide sequence isolated from the Sargasso Sea
taatgtttaagacactaagagataagtttaataataactcactcacggatgctgatgtgtcagacctatcattaataccaaatgatgttcctcaatctcagtttgaggaaattgtaatagaagcagtttcatttgaaaaagaatttgtaagagatgctcttccggttgatttaattggaatgaatcaagatcttatgtgtcaatatattgaggcagttgctgacagaatagcagatttatttgagttcgaaagagtctttaatactgaaaatccatttgattttatgcgtgccttagatgttcaaaatgtaacaaacttctttgaaaaaagagtttctgaatatcagagacctactgatagagcgctcagctttgatgatgctttttaaa

SEQ ID NO: 212050 - DNA, 605 bp, Unknown
  Bacterial polypeptide expressing nucleotide sequence isolated from the Sargasso Sea
tataaaccataaagctcagtgggtttcaaaatggctaaatggaaatcaaaatttattaatgagattgattggttttggtttagttgagggattattttttgctggttctttttgttctatttattattttcgtaaaagaggtttacttccaggtttagctttatcaaatgattggatagcaagggatgaaggtatgcattttagtttttcagcactaatgtataaaactctgcgagataaatataataatggtactttggatgatactgatattgctgataaaagtttaattccaaaagatgttgctcaatcagaatttgaagaaattgttagagaagctgtctcatttgaaaaagaatttgttaaagaagcattgcctgtagatttaattggcatgaattcagatttaatgtgtcaatatatagaagcagttgcggatagaattgctgatttatttgaatttcaaagagtttttaatactgaaaatccatttgattttatgcgtgccctagatgtacaaaatgtaactaatttttttgaaaaaagagtttcagaatatcaaagaccaactgatagagcactaagctttgatgatgctttttaat

SEQ ID NO: 212051 - DNA, 866 bp, Unknown
  Bacterial polypeptide expressing nucleotide sequence isolated from the Sargasso Sea
gatttgattgccccagtcttctttatgcgagttgcaatgggcctcgcgtcaaacgaagataatcgcgaacaaagagccatcgagttttacaatcttatttccagttttgattacatgacatcaacgccgcaattgtttaattctggaacattaagacctcaattatcttcatgctttttgacaacagtacccgatgatcttcacgggatatattccgctattagagacaatgcaatgctttctaagtgggcaggaggcctaggcaatgactggactccagttcgcgccctaggagctcatattaaagggaccaacggcaaatctcagggtgttgtccctttcttgaaagtagtaaacgacaccgccgttgcggttaatcaaggcggtaaacgcaaaggtgcagtctgctcttatctagagacctggcatttagacatagaagagttcttagaactaagaaaaaatacaggcgacgaccgtcgtagagctcacgatatgaatacggccaattggattccagacctattcatgaaacgggtatttaacgatcaagagtggacactcttctctccaaataatgtgccagatttgcatgagaaacatgggaaagagtttgaaagcgcttatttagaatatgaacgtttagctatagccggagaaattgaagtctataaaacagtgaaagccagcgatctctggcgcaagatgatttctatgttatttgaaacaggccacccttggataactttcaaagactcctgcaatgtacgctctccccaacagcatactggaactattcactcaagcaacctgtgcacagagatcacattaaacacgaatccagaagaaatcgctgtctgtaactt

SEQ ID NO: 212052 - DNA, 991 bp, Unknown
  Bacterial polypeptide expressing nucleotide sequence isolated from the Sargasso Sea
atgatatcaaaaggcgtaaaatcaatatttccaataaaaaaccaagaaatttgggatagatataaacaacatattcaagccttttggacaacagaggaagtatcattacaagatgatttaagagatcttgaaaccttaaatgacggtgaaaagcactttataaaacatgtactcgcttattttgctaactctgaagcaatgattaatgaaaacttagcaagtagattctacaaagaaatactaattcctgaagcaagatgctttatctcaatgcaaatgttgaatgaatcaattcatgcagaaatgtacggtcttcaaatagaagcttatgtaaaagatacaaaagaaaaagatatgctctttgatgcaattcaaaatgtaccatgcattaaccataaagcacaatgggtatcgaaatggcttaatggtgatcaaaatctcctaacaagattaataggttttggactggttgagggtttgttttttgcaggttctttctgtgccatatattattttagaaaaaggggtctattacctggtttagctctatcaaacgattggattgcaagagacgaaggaatgcactttagcttttcatcattaatgtttaggactttaagagacaagtttaataataaaacattaaccgatgcagatattagtgatttatctttgatcccttcagacgtaccccaatcacaatttgaagaaattgttagagaagcagtagcattcgaaaaagaatttgttagagatgctttaccagttgatttgattggtatgaataaagacttaatgtgtcagtatattgaagcagttgctgatagaattgcagatttatttgaatttgacagagtctttaaaacggaaaatccttttgattttatgagagctttagatgttcaaaacgttacaaacttttttgaaaaaagagtatctgaatatcaaagacctacagatagggctttaagttttgatgaagcattttaat

SEQ ID NO: 212053 - DNA, 550 bp, Unknown
  Bacterial polypeptide expressing nucleotide sequence isolated from the Sargasso Sea
gatgccaactgcatcaacatctcaaattttaggaaacaacgaatgttttgagccatatacatcaaacatatataccagaagagttctttcaggtgagtttatagttgttaataagcacttacttaaagatttaattaagcttaagctttgggacgaaaatatgaaagatagacttatggccgcaaatggttctattcaagaaataaaagaaattccagatgatatcaaattgctatatagaactgtttgggaagtatctcaaaaaagtattatagatatggcagcagatagaggagcctatatatgtcaaagtcaaagtatgaatattcacatgcaagatgcaaactttggaaaattaacatctatgcattttcatgcatggaagaaagggcttaaaactggattatattatctaagaacaaaagctgcagctgatgcaatcaaatttacaattgttaaagatgaaaaggctttagataaagatcaagaacaagcagcgatgcaatgttctattgataatcaagatgattgtgaaatgtgcggaagctaa

SEQ ID NO: 212054 - DNA, 1000 bp, Unknown
  Bacterial polypeptide expressing nucleotide sequence isolated from the Sargasso Sea
aaaagccaaggtattgttccatttttaaaagtttcgaatgatactgctgtagcggtaaaccaaggcggtaaaagaaagggagccttctgtgcttatctagagtgctggcatctagatgtcgaagaattcttggatttacgaaaaaacaccggagatgatagaagaagaacacatgatatgaatacagctaactggattccagatctgtttatgaaaagattagagaaaggagaaaaatggactcttttttcaccatcagatgttccagaccttcatgatatctatggaaaagagtttgaaaccaaatatagagaatatgagaggaaggcagaagctggggaaatcaaacattttaaaacagttgaagcaaaagatttgtggagaaaaatactttcaatgctttttgaaaccggacacccatgggtaacgtttaaagatccatgcaatataaggtctcctcagggccatgttggtacagtacactcatcaaatctatgtacagagataactcttaatacgaatgaagatgaaatagctgtttgcaatttgggaagcatcaacctaccccaacatatagacgaaggaaaaattaatatcgagcaacttaaaagttctgtaacaactgctatcagaatgctagataatgtaattgatattaattattatccagttccacaagcggaaaactctaataaaaaacacagaccgattggtttaggtcttatgggttttcaagatgctctatacaagcttggcatttcatatgattcagaagaagcagtcgattttgctgataaatcgatggaactaattagttattttgctattgaagcttcctgtgaacttgctgaagaaagaggaacatatgaaacatacaaaggatctctctgggataatggcatctttccacttgattctataaatctattagcagaacaaagaggtagtgattttattgatcaaaataccgaaaaaactcttgattgggacaaattaaaag

SEQ ID NO: 212055 - DNA, 2872 bp, Unknown
  Bacterial polypeptide expressing nucleotide sequence isolated from the Sargasso Sea
atggaaatacaacaacaagaagaaaataaaaaaataaaccaatctatatcagatatagaaacaacagcaccaggaaagctaagagtcataaaaagaaatggaaaggtagtgccttttgaagatgacaaaataaaagttgcaattacaaaagcttttctagcagttgaatcaggaaatgccgcagcaagtgaaagaattcacaccaaagtcaatgagttaacaaacaatgttgttgaaattttcaagcgcagaatgccgtctggtgggacacttcatattgaagaaatacaagatcaagttgaacttcaactaatgagatcagaagaacttgatgttgcaaagagttatatactctatagagctgaaagaactcaagaaagaaaaaaagaaaccttagacatcgatattcccgatgtgcctaatataaatgtgacaaaggcagatggaagccttgaaccacttaatgtcgaaaaggttgcaggtttaattaatgatgcttgtgacggacttgaggaagtatcggtaaaagaggttttggacgaagctttaaagaatctgtatgacggggtttcaatatcagatatgagaacaagtttggtcatgtcagcaaggacaaaagtagaaaaagagcctaattattcattcgtgacagcacgtatattgatggatcaaataagaaacgaggcgctcaactttttgggaatttcagaagagtcaacatatcatgaaatggaaaagcactatcctgcagcattcaaggcatatatagataaaggtattgaattagatatattaaatcctgaactaaaggaatttaatctagataagcttgcagatgcaatagattatgaaagagataatcagtttacgtatttaggattgcaaactctatacgatagatattttattcattctaacgatgtcagatacgaactacctcaagtattcttcatgagagtctctatgggacttgcattagaagaagataacagagaagaaagagctattgaattttataaactattgtctagttttgattatatgagctcaacaccaacattatttaattctggaacaaagaggcctcagctctcttcttgttatttaacaacaataccagatgatttggatggcatcttttcagctatgaaagataatgctttattatcaaaatgggctggtggacttggaaatgactggactcctgtcagagcaatgaactcctatatcaaaggtacaaatggtaaaagtcagggggttgttccttttctaaaagtcgcaaatgatactgccgttgcagtgaatcaaggtggaaaaagaaaaggcgctatgtgtggctaccttgaaacctggcatcttgatattgaggagtttcttgagctcagaaaaaatacaggtgatgaaagaagaagaacccacgacatgaacacagcaaattgggtcccagatctttttatgaaaagagtagaacaagacagagaatggacacttttctctcctggtgaaacacctgagcttcatgacctcattggaaaagagtttgaagataagtatgaagcatatgaagaaaaagcaaaaaaaggtgaaatgggccagtataaaacagttccagcgaaagaactttggagaaagatgttaactatgttgtttgaaacaggtcacccatggataacttttaaagactcatgtaacttgagatcaccgcaacagcatgctggtgttgtccactcttcaaatctttgcaccgaaataacactaaatacaagcgctgataaagaaattgctgtatgtaacttaggttcggtaaatcttgcaaatcatatgactgatggaaagttagatgaaaagaaaatcaaacaaactgtttcaacagcgataaggatgttagataacgttataaacataaactactattcagtcgatactgcaaaaaactcaaatatgaagcacaggccaattggacttggtttgatgggtttccaggatgctctatatctacaaaacataccatattgcagtgatgaggccgtcgaatttgcagataaaagtatggagatgattagctataacgctattcttgcatcaaccgagttagccaaagaaagaggagcctatgaaagttttgagggttcattgtggagtcaagggatactcccaaaagactcattagatattctagaaaaacacagaggaaaagaatacctacaagttgatagatcagagactttagattggggctctctaagaaagaaagtgatgaaagatggtatgagaaattcaaatgtaatggcaatagctcctacagcaacaatttcaaatataacaggcgtcactcaatctattgaaccaacttatcaaaatctatacgttaaatcgaatttatcaggtgaatttacgattgttaatcctcatctggtaagaaagcttaaagaattagatctttgggacgatgtaatgatcaatgatcttaaatattttgaaggcagtctaactgaaatatcaagaatacccgatgatataaaaaaattattttcaacagcatttgaggtagagccaaggtatatagttgaatcagcaagtagaaggcagaaatggattgatcaagctcaatctctaaatctatatattggaaatgcagatggtaaaaagctagatataacatacagaatggcatggtactcaggtttaaaaaccacatattatctgagatcaatagctgctacttcaacagagaaatctacagttcaacagggaaaactaaacgcagtaagctctgatgcaaatcagacttcaaaccaagaactaggagcaccagctcctgttccagatgcatgctctttggatgatccagattgcgaagcatgtcaataat

SEQ ID NO: 212056 - DNA, 1816 bp, Unknown
  Bacterial polypeptide expressing nucleotide sequence isolated from the Sargasso Sea
ctgtatgacggagtttcaatatcggacatgagaacaagtttggtcatgtcagcaagaacaaaagtagaaaaagaacctaattattcatttgtgacagcgcgtatattgatggaccaaataagaaatgaggcgctaggctttttgggagtttcagaagaatcaacatatcatgaaatggaaaagcactaccctgcagcattcaaagcgtatatagataaaggtattgaattagacatattaaatccagaacttaaggaatttgatctagagaagcttgcagatgcaatagattatcaaagagacaatcagtttacctatttaggtttgcaaactttatatgatagatattttattcattccaatgatgttagatacgagctacctcaagtattcttcatgagggtctctatggggcttgcattagaagaagaaaatagagaagaaagagctattgaattttataaactattgtctagttttgattatatgagctcaacaccaacattatttaactctgggacaaaaagacctcagctctcttcttgttatttaacaacaataccagacgatttagatggcatcttttctgctatgaaagataacgcattattatcaaaatgggctggtggtctgggcaatgactggactcctgtaagagcaatgaactcatatatcaaaggtacgaatggtaaaagtcagggagtggttccttttctaaaagtcgcaaatgatactgctgttgcagtgaatcaaggtggaaaaagaaaaggagctatgtgtggctacctcgaaacctggcatcttgatattgaggagtttcttgaactcagaaaaaatacaggtgatgaaagaagaagaacccacgatatgaatacagcaaattgggtcccagatctttttatgaaaagagtagaacaggatagagaatggacacttttctctccaggtgagacacctgagcttcatgaccttattggaaaagaatttgaagataaatacgaagaatatgaagaaaaagctaaaaaaggtgaaatgggtcaatataaatcagtgcctgctaaagagctctggagaaaaatgttaactatgttgtttgaaacaggccacccatggataacttttaaagattcatgtaatttgagatcgccgcaacaacatgctggcgttgtccattcctcaaatctttgtactgaaataacactaaatacaagcgctgataaagaaattgctgtatgtaacttgggttcggtaaatctcgcaaatcatatgactgatggaaagttagatgaaaagaaaatcaaacaaactgtttcaacagcaataaggatgttagataacgttataaacataaactattactcagtcgatactgcaaaaaactcaaatatgaagcatagaccaattggacttggtttgatgggttttcaggatgctctatacctacaaaacataccttattgtagtgatgaggccgtcgagtttgcagatagaagtatggagatgattagctacaacgctattcttgcatcaactgagttagctaaagaaagaggagcctatgaaagttttgagggttcattgtggagtcaaggaatactcccgaaagactctttagatattctagaaaaacacagaggaaaagaatacctacaagtcgacagatcagagactttagattgggactctttaaggaagaaggtaatgaaagatggtatgagaaattcaaatgtaatggcaatagcgcctactgcaacaatttcaaatataacaggggttactcaatcaattgaacctacttatcaaaatctttacgtaa

SEQ ID NO: 212057 - DNA, 971 bp, Unknown
  Bacterial polypeptide expressing nucleotide sequence isolated from the Sargasso Sea
aatgatatcaaaaggcgttaaatcaatatttccaataaaaaaccaagaaatttgggataggtacaaacaacatattcaagccttttggacaaccgaagaagtatcattgcaagatgatttaagagatcttgaaactttaaatgatggtgaaaagcattttattaagcatgtacttgcatattttgcaaactctgaggcaatgattaatgaaaacttagcaagtagattttacaaagaaatactaatacctgaagcaagatgttttatctcaatacaaatgttgaacgaatccattcatgcagaaatgtacggtcttcaaattgaagcttatgtaaaagatgcaaaagaaaaagatatgcttttcgatgcaattcaaaatgtaccatgtattaatcataaagcacaatgggtatcaaaatggcttaatggcagtcaaaatctcctaaccagattgataggttttggattagttgaaggtttgttttttgctggctctttctgtgcaatatattactttaggaaaagagggttattacctggcttagccctatctaatgattggattgcaagagatgaaggaatgcactttagcttttcatcattaatgtttagaactttgagagataagtttaataataaaacattaactgatgcagatattagtgatttatctttaatcccttcagacgttcctcaatcacaatttgaggaaattgttagagaagcggtggcttttgaaaaagagtttgtaaaagatgcgctcccagtagatttaattggtatgaatgctgatttaatgtgtcaatatatcgaagctgttgcagacagaattgctgatctattcgaatttgatagagtctttaaaacagagaatccatttgattttatgagagctttagatgttcaaaacgttacaaacttttttgaaaaaagggtatctgaatatcaaagacctacagacagggctttaa

SEQ ID NO: 212058 - DNA, 1360 bp, Unknown
  Bacterial polypeptide expressing nucleotide sequence isolated from the Sargasso Sea
gttgagaaagaaccaaattatttcttttgtaacagcaagaatactcatggatcaaataagaagtgaagcattgaattttcttggtgttgctgaagaatcaacatatcaagaaatggaatcaaactatccaaaagcatttaaggcgtacatagataaaggaatagaacttgatatattaaatgctgaacttaaaacctttgaccttgagaagcttggaaaggcaatagattttactagagataatcaatttacatatttaggccttcaaaccctttatgacagatattttattcattgtgatgacgtaagatatgagttgcctcaagtattttttatgagagtttcaatgggacttgcaatagaagaagaaaacagagaagaaagagcaatagaattctacaagctactttctagctttgattatatgagttctacaccaactttattcaattctggaacaaaaagaccacaattgtcttcatgttatttaacaacaatacctgatgacttagatggtattttctctgcaatgaaagataatgcattattgtcaaaatgggctggaggcttaggtaatgactggactccagtaagggcaatgaactcttacatcaaaggaacaaatggaaaaagtcagggtgtggttcccttcttaaaagtagcaaatgatactgctgttgcagtaaatcaaggcggtaaaagaaaaggcgccatgtgtggttatttagaaacttggcatttggatattgaagagtttttagagcttagaaaaaatactggtgacgaaagaagaagaacgcatgatatgaacactgcaaactgggtgcctgatctatttatgaaaagagtagaaaaagacgaaaactggacacttttctcacctggagaaacaccagaactacatgatctaattggtaaagcttttgaagaaaagtatgaagaatatgaagataaggcaaaaaatggtgagatggatcaattcaaatctattccagcaaaagagctatggagaaaaatgcttacgatgttattcgaaacaggccatccttggattacatttaaagactcttgcaacctaagatcaccacagcaacactcaggagttgttcattcatcaaatctttgtaccgagatcacactaaatacaagtgctgataatgaaattgctgtttgtaatttaggctctgttaaccttgcaaatcatatgaaagatggaaagcttgatgaagaaaaaattaaaaaaactgtttctacagctataagaatgttagataacgtcataaacattaattattattctgtcgatactgctaaaaatttcaacttaaaacacaggccaataggacttggcctttatggt

SEQ ID NO: 212059 - DNA, 1401 bp, Unknown
  Bacterial polypeptide expressing nucleotide sequence isolated from the Sargasso Sea
aatggcagacaactcacaggtatcccaaaaagaagaaaaggagaaaagtgtaaacttattaagtttaaatgtagtaagaagagatggatctataagcgcatttaaatctgataaaatatcagaagcaattaaaaaagctttcttagcacaaaccaaaattagaaataataaaaacaaagaaaaagaacaggaagacagtattcacaaaactgttgaagatcttacccataaagttgtttcagcattaacaagaagaatcgctgatggagatatgattcatattgaagatatacaagatcaagttgaattagcgctaatgagagatgagcaccataaagtagcaagggcatatgtcttgtatagagagcaacgagctgcatctagataccatactaaaaaattaaaagagcaagtaggtgcaaaggcatcttcaatgactgtaacaaaaagaaatggtgaaaaagaaccgatttcacttgataaaattactaatcgagtttcagtactatcaacaggattaaatattgacccaattgttgtagtacaaaaagcagttcctggtctttacaatgaaattacttctacagaaattgatacctatcttgctgaaacagcagcatcattaactgttgaacatccagattactcttatttagcagcaagaataaaagcaaactcactacataaagatacccctggctttattattgccacaaaaaacctttttgatgatggtctactcagaaaagaatattatgacaaagttttggcaagctcagaagaaattgaatcaataattgattatgatagggattataatttcgattattttgcattcactactttaaccagagcctatcttctaaaatttgaaaataaaactattgagagacctcaagatttatggatgagggtggcgttaacagtttctggagataaatttaattatgataaggtaaaagaaacctatgatagcctatcaaatggatattacactcacgctacacctactttattcaatagtggacttaaaatgcagcaattatcgtcatgttttttaattagtatggaagatgactcaatagaagggatttttaatacaattaaagactgtgctcttatttctaaaaccgctggtggtattgggatgcatgcacataacataagaggtagtggaagtagaataaaatcgacaaatggtaaatcaaatggacttattcctttcttaaaaatatttaatgaaaccgctaaatcagttgatcaaggtggtggtaaaagaaaaggttcttttgctgtttatttagaaccctggcattcagatattgaacaatttttggaattaagaaaaaatacaggagctgaagaatttagagcaagagatttattttatgcactttggat

SEQ ID NO: 212060 - DNA, 901 bp, Unknown
  Bacterial polypeptide expressing nucleotide sequence isolated from the Sargasso Sea
atgagttacaccacctttagccgtacgaacaatgatcaaatgaaagagccgatgtttttcggcaacccggtgaacgtgtcccgctatgatcaacaaaaatacggtatctttgaaaaactgattgaaaaacaattgagctttttctggcgccctgaagaagtagatgtcagtaaagatcgtatcgattttcagcagctgcccgaacatgaaaagcatatttttatcagtaacttaaagtatcaaactttacttgattcagtgcaaggccgctccccgaacgtagctttgctacctatcgtctctttgccagagctggaaacctggattgaaacctgggcctttagtgagaccatccatagccgtagctacactcatattgtgcgtaacattaccaatgaaccgcacaaagtatttgacgatatattgctcaatgaacgcatcattgagcgcgctgatgatgttacgcgttactatgacgacttaattcattcagtgaacctctatcacttatgtggtgaaggcactcatgtggtcgatggtcaaactcacactatcagcttacgcgatctgaaacgtaagctttatgtctgtattttgtcagtcaacgtgctcgaagctattcgtttctatgtcagctttgcctgtagttttgcctttgctgagcgtgagctgatggaaggcaatgcaaaaattatcaaactgattgcccgcgatgaagctctgcatttaacaggcactcagcatatgttgaatattatggccgcaggtgaagacgacccggaaatggctgagatagcgaaagagtgcgaagacgaagcctacgccatattccgcaaagcagctgagcaagaaaaagactgggctgagttcttgtttaaagatggttcgatgattggttaaa

SEQ ID NO: 212061 - DNA, 2872 bp, Unknown
  Bacterial polypeptide expressing nucleotide sequence isolated from the Sargasso Sea
atggaagttcaacaacaaaatcagaaagaaaatattaatcaatctatcagcgaaatagaaacaacagcaccgggaaagctaagagtaataaaaagaaatgggaaagttgttccttttgaggacgataaaataaaagtggctataaccaaagcatttttagctattgaatctggaaatgcagcagcaagcgaaagaatacataaaaaggttggtgaacttactgatgctgttgtagaggtttttaagagacgaatgccctcaggaggaactcttcatatagaagagatacaagatcaagtagaacttcagctcatgaggtcagaggaacttgatgttgcaaaaagttacatactatatagagcagaaagaacacaagaaagaaaaaaggaaaaggttgaaatagatctgcctgatgttccaagtataaatattacaaaaagcgatggaagcatggtgcctcttgatgtggagaaagttgcagcattgataagtgatgcgtgtgaagacttggaagaagtatcagttaatgaggttttagatgaagctttaaaaaatttatatgatggagtgtcaatttcagacatgagaacaagtcttgttatgtcagcaagaacaaaggttgagaaagaacctaattattcttttgtaacagcaagaatactcatggatcaaataagaagtgaggcattgaattttcttggtgttgctgaagaatcgacatatcaagaaatggaatcaaactatccaaaagcatttaaggcgtacatagataaaggaatagagcttgatatattaaatcctgaacttaaaaccttcgacattgagaagcttggaaaagcaatagattttactagagataatcaatttacatatttaggcctacaaaccctttatgacagatattttattcattgtgatgacgtaagatatgagctacctcaagtatttttcatgagagtttcaatgggacttgctatagaagaagaaaacagagaagagagagcaatagagttctacaagcttctttctagctttgattacatgagttctacaccaactttattcaattctggaacaaaaagaccacaattatcttcatgctatctaacaacaatacccgacgacctagatggtattttctcagcaatgaaagataatgcattattgtcaaaatgggctggaggcttaggtaatgattggactccagtaagggccatgaattcttacatcaaaggaacaaatggaaaaagtcagggtgtggttcccttcttaaaagttgcaaatgatactgctgttgctgtaaatcaaggcggtaaaagaaaaggcgctatgtgtggttatttagagacttggcatttggatattgaagagtttttagagcttagaaaaaatactggcgacgaaagaagaagaacacatgatatgaacactgcaaactgggtgcctgatctatttatgaaaagagtggaaaaagacgaaaactggacacttttttcacctggagaaacaccagaactgcatgatctaattggtaaagcttttgaagaaaagtacgaagaatatgaagaaaaggcaaaaaatggtgaaatggatcaattcaaatctgttccggcaaaagagctatggagaaaaatgcttacaatgttattcgaaacaggacatccctggattacatttaaagactcttgcaacctaagatcaccacaacagcactcaggagttgttcattcatcaaacctgtgtactgagatcaccctaaatacaagcgctgataatgaaattgctgtttgtaatttaggctccgttaatcttgcaaatcatatgaaaaatggaaagctcgatgaagaaaaaattaaacaaactgtttctacagctataagaatgttagataacgtcataaacattaattattattctgttgatactgctaaaaattcaaacttaaaacacaggccaataggacttggtcttatgggtttccaagatgcactttatttacaaaatataccttactgcagcgacgaggctgtagagtttgcagatagaagtatggaactaataagttataacgcaatatatgcctcaacagagctggcaaaagaaagaggcgcatatgagagctttgacggatccttatggagcaaggggatacttccaaaggattcattaaatattcttgaggaaaacagaggaagtgagtatctaaatgttgacagatctgaaacattagactgggagacactaagaaagaaagttaaaaaagatgggatgagaaattcaaatgttatggcaattgcaccaacagctaccatttcgaacataactggaataacacaatcaattgaacctacatatcaaaacttatatgtaaaatctaacctgtcaggtgagtttacgattgtaaatcctcatcttgtaagaaaattaaaagaattggatttatgggatgatgtaatgattaatgaccttaaatatttcgaaggaagcttatcagagatttcaagaatacctgaagacatcaaaaagctattttccactgcatttgaggttgagccaaggtatatcgttgaatctgctagcagaagacaaaaatggatagatcaagctcaatcactaaatttatatattggaaatgctgatggtaaaaagctagacataacatacagaatggcatggtattcaggtttaaaaacaacctattatctaaggtcgattgcagcaacatcaacagaaaaatctacagttcaacagggtaaattaaacgcagtaagttctgatgcaagtcaggcttcaacaaaggagctcggtgcacctgcaccagttccaacagcatgctcactggatgatccagattgtgaagcatgtcaataaa

SEQ ID NO: 212062 - DNA, 1840 bp, Unknown
  Bacterial polypeptide expressing nucleotide sequence isolated from the Sargasso Sea
ctggcatcagatgaaataaacataacggctccaggaaagatgagagtgataaaaagaaatggaaaggtggttccatttgaagaagacaaaattaaagttgctgtcaccaaagccttcctcgcaaacgagtcgggtaacgcagctgcaagcgaaagaattcacataaaggtagaagaaatttcggcagatgttgaagaagtttttaaaaggagaatgccatcaggtgggactcttcatattgaagagatacaagatcaagtagaacttcagcttatgcgcaatgaggaatatgtagttgcaagaaaatatattctttacagggaggaaagagctacagaaagaacaaaagaagcccctcaagaaacaactatcaatgctcctgaaatatcagttacaaaaagagatggaactctagttcctctagacatcaatagattagcagctgttgtaaatcatgcatgcgatggattggaggatgttagtgcagacttgattcttgaagagtccataaagaatctctatgacggagtttctgtcagtgacatgaagtcgtctcttgtcatgtcagcgaggacgaaagttgaacaagagccaaattatagttttgttacagctagaatccttctagatgagttaagaagtgaagcgttaacatttttaaatatagcagaagaaagctcacacccagaaatggagaaatattatccaaaagcattccaagcctatatagataaaggcattgagcttcaaatgcttgatcctaaactcaaagaatttgatcttaagaaacttggtaaagccattgatcatgatagagattatcaattcacctatttaggcctgcaaactctttatgacagatactttattcactaccaagatacaagatatgaactaccgcaaatcttctttatgcgagttgctatgggtctttcaatggaggaagataaaaaagaagaacgggctattgagttctatagattactgtcaagctttgactatatgagctcaactcctactctatttaattccggtacattgcgtcctcaattgtcatcatgctatttgacaaccattccagatgatctagatggaatttttggtgccatgaaagataacgctttactttccaagtgggcaggaggacttggaaatgattggtcgccagtaagagcattgggttcttacatcaaaggaacgaatggaaaaagtcagggtgtagttcctttcttaaaagttgcaaatgatacggccgttgctgtcaatcaaggcggtaagagaaaaggagcaatgtgcgcttatcttgagacatggcatttagacattgaagagtttctagatcttagaaaaaataccggtgacgatagaagaagaacccatgacatgaatactgcaaactgggtccctgatctatttatgaaaagggttgaatccgatgctaactggactttattttctccaggcgaaacgcctgatctgcatgatcttactggtcttgcgtttgaaaaaaaatatgaagaatatgaggctttggcagccgaggggaaaatggatcaacataaaacaattcctgcaaaagacctatggagaaaaatgctaactatgctgtttgaaaccggtcatccttggattactttcaaagactcatgtaatttgcgttctccccagcagcacattggagtgatccattcatcgaatctgtgtactgaaataactcttaacacaagcaatgatgagatagcagtatgcaatctaggctcagtcaatcttccacaacatatgaaagacggcgcactagatcaagaaaaagtaaaacaaactgttacaaccgctttaagga

SEQ ID NO: 212063 - DNA, 2872 bp, Unknown
  Bacterial polypeptide expressing nucleotide sequence isolated from the Sargasso Sea
aatggaaatacaacaacaagaagaaaataaaaaaataaatcaatcaattggagatttagagacaactgctccaggtaaattaagagtaataaaaagaaatggaaaagtggttgcctttgaagattataaaattaaagttgcaatcactaaagcttatttagccattgagtctgggaatgcagcagctagcgaaagaatccataaaaaagttaatgaactcactgaaaatattgtagaagtttttaaaagaaggatgccttctggtggaacacttcatattgaggagatacaagatcaggtagagcttcaattaatgaggtctgaagaactagaagttgcaaaaagctatatcttatatagagctggaagaactcaagaaagaaaaaaagaaaccacttcaatagatatacctgatacacctaacattaatgtagcaaaaagtgatggtagccttgtgcctttaaatgtggaaaggcttgctgggttaataaatgatgcatgtgaaggcctagatgaggtttcagtaaatgaagtgttagaagaagcattaaagaacctatatgacggtgtttcaattgctgatatgagaacaagtttagttatgtcagcaagaacaaaggttgaaaaggaaccaaattactcttttgttacagcaagaatactgatggatcaaattagatcagaggctttaggttttcttggggttactgaagaatcaacatatcaagaaatggaagtaaattatcctcaagcatttaaagcatatatagataaaggtattgaattagatatattaaatcctgaattgaaaaactttgatcttgataagttaggagatgctattaattacactagggataaccaatttacctacttaggccttcaaaccctgtacgacagatattttattcactgtgatgatgttagatatgaattaccgcaggtgttttttatgagagtatctatgggattggcgttagaagaaaataatagagaagaaagagccattgaattctacaatctactatctagttttgattatatgagttcaacacctactctttttaattcagggactaaaagacctcaactgtcatcatgttatctaactacaattcctgatgatttggatgggattttttctgccatgaaagataatgccttattatcaaaatgggctggaggtctaggcaatgattggactccagtcagagctatgaattcttatatcaaaggaacaaatggtaaaagtcagggtgttgttccgtttttaaaagttgcaaatgatacagctgttgctgttaaccaaggcggcaaaagaaaaggtgctatgtgtggatatctagaaacgtggcatttagatatagaggaattccttgaattaagaaaaaatactggagatgagagaagaagaactcatgacatgaataccgcaaattgggtaccagacttatttatgaaaagagttgagcaagataagaattggaccctcttctctcctggtgaaacatctgaattacatgatctgataggtaaagcttttgaagaaaaatatgaagaatatgaagagaaggcaaaaaacggagaaatggatcagtttaaatctataccagcaaaggagttatggagaaaaatgttaacaatgttgtttgaaacagggcatccttggataacatttaaagattcatgcaatcttagatctccacaacaacatgcaggcgttgtacattcttcaaacctttgtactgagataactttaaatacaagcgctgacaacgaaattgcagtttgtaatctgggttcagtcaatctatcaaaccatatgaaagatggcaagttagatgaagagaaggtgaaacaaacagtttcaacagcaattagaatgctggataatgttataaatattaactattactctgttgatactgctaaaaattctaatcttaagcataggcctataggtcttggtcttatgggttttcaagatgctttgtatcttcaagatattccttattgtagcgatgaagcaattgaatttgctgacagaagcatggaattaattagttataacgcaatatatgcatctactgaacttgcaaaagaaagaggctcatatgaatcctttgaaggttctttatggagtaaaggcatcctgcccaaggattcaattgaaatacttgaagaaaacagaggaaaagaatatttaaatgttgatagatcagaaacattggattgggagtctcttagaaagaaagttaaaaaagatgggatgagaaactctaatgtaatggcgattgcgcctactgcgactatttccaatataacaggagttactcaatcaattgaaccaacgtatcaaaatttatatgtaaaatctaacctgtcaggagaatttacaattgttaatcctcatcttgttagaaaattaaaagaattagacttatgggatgatgtaatgataaatgatctgaaatattttgaaggaagtttgtcagagatatccagaataccagatgaaataaagaaattattctcaacagcttttgaggtagaaccaaggtatatagttgagtctgcaagtagaaggcaaaaatggattgatcaagcgcaatctttgaacttatatataggtaatgcagatggtaagaagttagatataacatatagaatggcctggtattctggtttaaagaccacttactatttaagatctattgctgcgactcaaactgagaaatctactgtagaaaaaggaaagcttaatgcagtaagttctaataccaatgaagtttcaacaaatgagcttggagcaccagcgccaataccagaagcatgctctctggatgacccagattgtgaggcatgtcaataa

SEQ ID NO: 212064 - DNA, 991 bp, Unknown
  Bacterial polypeptide expressing nucleotide sequence isolated from the Sargasso Sea
aatgatatcaaaaggagtaaaatcaatatttccaattaaaaaccaagaaatttgggatagatataaacaacatattcaagccttttggacaactgaagaagtatcattacaagacgatttaagagatcttgaaaccttaaatgatggtgaaaaacattttataaagcatgtacttgcttattttgctaactctgaagcaatgattaatgagaacttagcaagtaggttctacaaagaaatattaataccagaagctagatgttttatctcaatacagatgttaaatgaatcaattcatgcagaaatgtacggtcttcaaatcgaggcttatgtaaaagatgcgaaagaaaaagatatgctttttgatgcaatacaaaatgtaccgtgtattaaccataaagcgcaatgggtatcaaaatggcttaatggtagtcaaaatctattaactagattaataggatttggattagtcgaaggtttattttttgcaggttcattttgtgcaatttattattttagaaaaagaggtttgctacctggtttggcattatctaatgattggattgcaagagatgaaggaatgcacttcagtttctcatcgttaatgttcagaactttaagagacaaatttaataataatacattaacagatgctgatattagtgatttatctttgatcccttcagacgtacctcaatcgcaatttgaagaaattgtaagagaagcagtagcttttgaaaaagaatttgtaaaagatgctcttcctgtagatttaattggtatgaatgctgatttaatgtgtcaatatattgaagctgtagcagataggattgctgatttatttgagtttgatagagtatttaatacagaaaatccatttgattttatgagagctctagacgttcaaaatgtcactaatttttttgaaaagagagtatccgaatatcaaagaccaacagatagagctttaagttttgatgaagccttttaa

SEQ ID NO: 212065 - DNA, 904 bp, Unknown
  Bacterial polypeptide expressing nucleotide sequence isolated from the Sargasso Sea
gacgccagaagaagtttcacttcacgatgatttgagagatcttgaaactttaaatgatggagaaaaacattttataaaacatgtgctagcttactttgctaattctgaggcaatgattaatgaaaacctagcaagtagattttacaaagaaattttaattccagaagcacggtgttttatctctatgcaaatgctcaacgagtctattcatgctgaaatgtatggattgcaaatagaagcttacgttaaagatcaaaaagaaaaagatttgcttttcgatgcaattcaaaatgtcccatgtataaatcacaaagcacagtgggtctcaaaatggttgaatggaaatcaaaatttactaacgagactaataggttttggtcttgtagagggtttattcttcgccggatcattttgtgcaatctattactttagaaaaagaggtctattaccaggtttagcactttcgaatgattggatcgcaagagatgaaggaatgcactttagtttctcagccctaatgtttaagacactaagagataagtttaataataacacactcacggatgttgatgtggcagatctatcattaataccaaatgatgttcctcaatctcaatttgaagaaattgttagagaagcagtttcatttgaaaaagaatttgtaagagatgctcttccagttgatttaattggaatgaatcaagatctaatgtgccaatatattgaggcagtcgctgatagaatagcagatctatttgagttcgaaagagtctttaatactgaaaatccatttgattttatgcgtgctttagatgttcaaaatgtaacaaatttctttgaaaaaagagtttctgaatatcaaagacctactgatagagcgctcagctttgatgacgcattttaa

SEQ ID NO: 212066 - DNA, 892 bp, Unknown
  Bacterial polypeptide expressing nucleotide sequence isolated from the Sargasso Sea
ttgctacgtgccgagaagagcgaacgaattctaagcaaggaaaaccgtcagcttgcgtttcgtgtttctgaccagcaactgtgggatttatacaatcgccagcttgaatgcttttggaatccaagtgagatcgaaccgggcaaagacaaaggctgggagacattgaacgagaatgaacgcgagttcatcagttctatactggcgttttttgcgacggcggatgcgatcgtttttgacaatgtggaaatgaatttctgcaacgaagtcgtcattacggaggcaaaattcttttatgggatgcaggcgttcatggagaacatccattcacaggtgtacatgtcgctgcttacaacgtatgtgactgatgaaatggagcaaaagcgattaatcaacgcgatttatgaaataccaacgataaaaaataaggcggattgggctgtacgattcttttcagacgatgtgccctttgccatgcgtctcattgcgtttagtattgtcgagggtgtatttttctcgtccgcgttcgcatcaatcttttggctcaaaaagtacaagaaggggattttagaagctttgacgctttcaaattcgtttatagcgcgtgatgaaggtcttcacacggaatttgctgttgctctttttcacagattgtcgtatcaccctgacgaaaaagaggttcacgagctgtttgcttctgcggttgaactggaggctcaatttgtgaatcgtgctttaaactcggctgttgttgggcttgacgcttcgaagctggttgagtatgtgaaatttgtagcggatcgtcttcttgttcagttggggtattcgccactatacgacatctcaaataatcctcttccgtttatggagacacaatcgatgcgcgtgacgacaa

SEQ ID NO: 212067 - DNA, 1225 bp, Unknown
  Bacterial polypeptide expressing nucleotide sequence isolated from the Sargasso Sea
aaatcagagaaaatttcgaatgctattaaaaaagcattcttagcacaaacaaaaattagaaatgataaaaataaggaaaaagaacaacaagatggaattcataaaaccgtcgaagctttaacacataaagttgtctcagcactaaccagaaggattgctgatggagatatgattcacatagaagatatacaagatcaagtggaattagctcttatgagggatgagcatcataaggttgctagagcatatgttttgtatagagaacaaagagcagcttcaagatatcatactaaaaaactaaaagaacaagttggagaaaaagcttcttcaatgatggtcactaaaagagatggaagtaaagaaccaatttcacttgataaaattaccaatagagtttccgttctatcgactggtttaaatattgatccaattgttgttgttcaaaaagcagttccaggattgtatagtgatattagttctgttgaaattgatacttatcttgctgaaacagcagcagctttaacagttgaacatcctgattattcttacctggcagcaaggataaaagttaattctcttcataaagaaactccaggcttcataatagctacaaagaacttacacgatgatggtttattgagagaagattattataaaaaagtaatggaaaatgcagatgcaatagaatcagtgattgattatgacaaagattatacttttgattattttgctcttacaacactaatcagggcatatttattaaagttcgataataaaacaattgaaagacctcaagacttatggatgagggtaactttaacagttactggcaatgagtttaatttagataaaataaaagaaacttataaaagtttatcaactggtacgtatacacatgctacgccaactttgtttaatagtggattaaaaatgcagcaattatcttcatgctttttaataggtatggaggatgattctattgaaggtatttttaacaccataaaagattgtgctctaatatctaaaactgcaggtggtattggcatgcacgcacacaacattaggggtagtggaagtagaataaaatcaacaaatggtaaatctaatggtcttattccatttttgaaaatttttaatgagacagctaaatcagttgaccaaggcggaggtaaaagaaaaggttcttttgcagtttacttagaaccttggcatgctgacattgaga

SEQ ID NO: 212068 - DNA, 2743 bp, Unknown
  Bacterial polypeptide expressing nucleotide sequence isolated from the Sargasso Sea
atggctccaggaaagatgagagtcataaaaagaaatggaaaagttgtcgcttttgatgaagaaaaaataaaagttgcaatcatgaaagcttttctcgaggttgaaggcggttcagctgcaggatcttctcgtattcatgacgaagtagaaaagatgactacagatatagtcgctagatctaaaggcagattgccatcaggagggacaatccatattgaggagcttcaagaccttgtagagatccagttgatgcgtaatgagcatcataaagttgctagagcttatgttctttatagagaagcaagaaatagtgaaagaccggatgagcaagaaaccgtagctgttgaaaaaaatattgaagaagtggttgatgcatctgtcaaaaaagcttgtagcggtcttgaaaatgtcgatgaggttatgcttgcaacccaaataaagagtacttcatatgaaggaatatcagaaaaagatctcgctgaaagcatgttaatgactgcaagaactttagtagaaaaggagccaaattattcttatgtaacagccagactgctacttaataatatggaaaaggaagttgcagattttcttgggttaaataaaaaattattaaacaaaagatctgaaatgtatcaagaagctctaccaaaaacaattgccaaaggtatagagttagggatattaagtgaagagttacaaacttttgatttagataaattggggaaagtaataaaagaggaaagagatcttcagtttacttatttaggtttgcaaactctctacgacagatactttattactcacgaagaaattagatatgagcttcctcaagttttcttaatgcgtgtagctatgggcttagccgtacaagaaaaagataaaaatgaaaaggctgaagagttttacatgctgctatcaagtttcgattatatgagctcaacacctacactatttaattccgggacaaaaagacctcaactctcctcttgctatctaacaacagttccagatgatcttggtggaatatatgactctataagagataatgctctgctttctaaatgggctggtggtttaggtaatgactggacaaatgttagggcattaggcgcaagaattgatggaactaatgggaagagccaaggaatagttcctttcttaaaagtatccaatgataccgctgtagctgttaatcaaggtggcaaaagaaaaggtgctttctgtgcatacttagaatgctggcatttggatgtagaagaattcttagagctaagaaaaaatacaggcgatgatagaagaagaactcatgacatgaatactgctaattggattcctgatctatttatgaaacgtttagagaaggatgaagaatggactttattttctccttcagatgttcctgacttacatgatatttatggattagagtttgaaaagaaatacgttgagtatgagaagaaggcagaaaaaggtgacataaaactatttaagaaagttaaggctaaggatctttggagaaaagttttatcaatgctttttgaaacaggacatccttgggttacttttaaggatccatgcaacattagatcaccacaaggacatgtaggcacagtacattcatctaatctatgtacagaaataacattaaataccaacaaagatgaaattgctgtttgcaatcttggcagcataaatctacctcagcatatcgatgatgggaaaattaatgttgaacagctaaagagttcaataaaaacagcaataagaatgttagataacgtagttgatattaatttttatcctgttcctcaggcagagaattcaaataagaagcatagacctataggtttgggtttaatgggttttcaagatgccttatataagcttggaatatcttataactctgatgaagccgttgattttgcagataaatcaatggagctagtaagctattttgctatacaagcttcttcagagttagcaaaagaaagaggcgcatacgaaacctatgaaggttcactttgggataaaggaatatttccaattgattcaatcaatcttctggcagaacaaagaggtaaagaatttatagatcagaatactgatacaaatttagactgggactctcttaaagcttcagtctcagagaatggtatgaggaattcaaatgtaatggcaatagcaccgacagcgaccatagctaacataactggagtttcgcagtccatagagcctacttatcaaaatttatttgttaaatcgaatctttctggtgaatttacagtagtaaatccatatttaattgaagaattgaaaaaagaaaatttatgggatgatgttatgttgagcgatttaaaatattttgagggctctctatcacaaataaacagaattcccgaagccactaaagaaagatttaaaactgcatttgaaattgaaccaagatttattgttgaagcagctagcagaagacaaaaatggattgatcaagcacaatctctcaacctatatataggaaatgtagatggtaaaaagctagatgtaacttatagaatggcttggtataaagggcttaaaaccacatattatttaagatccatgggcgctacagcaactgaaaaatcaacagtggatagaagtaacctgaatgctgtagaaacaaaccaacaagaacaacaagtagctagtaaagcgccggaagcatgcagtattttggacccagactgtgaggcatgccaatagg

SEQ ID NO: 212069 - DNA, 703 bp, Unknown
  Bacterial polypeptide expressing nucleotide sequence isolated from the Sargasso Sea
tctattcatgctgaaatgtatggtttgcaaattgaagcctatgttaaagatcaaaatgaaaaagatcttctttttgacgcaattcaaaatgtaccctgtataaatcataaagctcaatgggtatctaaatggcttaatggaaaccaaaatttattaactagacttattggttttggtcttgttgagggtttattttttgcaggttcattttgtgcaatttattattttagaaaaaggggacttttacctggcttagctctatcaaacgattggatagcaagagatgaggggatgcattttagtttttcggcattaatgtttaaaactctaaaaaataaatataacaataatacactgacagatgcagatattgctgacttatcattaataccaaatgatgtacctcaatcgcaatttgaggaaattgtaagagaagctgtttcatttgaaaaagaattcgttaaagatgcgcttccagtcgacttaattgggatgaatcaagaccttatgtgtcaatatattgaggctgttgctgatagaattgcagatttatttgaatttgaaagggtatttaatactgaaaatccatttgattttatgagagctttagatgttcaaaatgttacaaacttctttgaaaaaagagtttctgaataccaaagacctactgatagagctcttagctttgacgacgctttttaat

SEQ ID NO: 212070 - DNA, 2896 bp, Unknown
  Bacterial polypeptide expressing nucleotide sequence isolated from the Sargasso Sea
atgacaacacaagagttaagtaaaactcaggaaacttctgctcaaggagctataggggcattggcatcagacgatataaatattacggctccaggaaagatgagagtaataaaaagaaatggaaaggtggttccatttgaagaagacaaaattaaagttgctgtgactaaagccttcttagcaaacgagtcgggtaatgcagctgcaagcgaaagaatacacagaagggttgaagaaatttcggaagatgttgaagaagtttttaaaagaagaatgccttcaggaggaacacttcatattgaagagatccaagatcaggtagaactccaacttatgcgcaatgaagaatatgtagttgcaagaaagtacattctttatagagaggaaagagccacagaaagattaaaagaaggtcctcaagaaacaactataaatgctccagaaatatcagtaacaaaaaaagatggtactcaagttccgctagacatcaacagactagcagctgtcgtaaatcatgcatgcgatggtttggaagatgtaagcgcagacttgattttggaagagtcattaaagaatctctatgacggagtttctgtgagtgacatgaaatcatctcttgtcatgtcagcaagaacaaaagttgagcaagagccaaattatagtttcgttacagccagaattcttcttgatgaacttagaagtgaagcactgacatttttaaatattgctgaagaaagctcgcacccagaaatggaaaaatattatccgcaagcatttcaagcatatatagacaaaggcattgaactacaaatgctagatccacaactaaaagaatttgatcttaagaagcttggtaaagcaatagatcatgatagagattatcaattcacctatttgggactacaaactctttatgacagatactttattcactatcaggatacaagatacgaactgccacaaatcttttttatgagagttgctatgggcctagcaatggaggaagacaaaaaagaagaacgggccattgagttctataaattgctgtcgagtttcgactatatgagctcaacccctactctatttaactctggcacattgcgtcctcaattatcatcatgctatttaacaacaataccagacgatctagacggaatctttggtgctatgaaagacaatgccttgctttctaaatgggcaggagggctaggaaatgattggtcaccagtaagggctttaggttcttacatcaaaggaacaaatggaaagagtcaaggcgtagttccgttcttaaaagttgcgaatgatactgcagttgctgttaatcaaggcggcaaaagaaagggagcaatgtgtgcataccttgagacgtggcatttagacatagaagaatttctcgatctaagaaaaaatacaggtgatgatagaagaagaacccatgatatgaatactgcaaattgggtgccagatctatttatgaaaagggttgaatctgatgctaactggactttattttctccgggtgaaacgcctgatttgcatgatcttaccggtcttgcatttgaaaaaagatatgaagaatatgaggctttagcagcagaaggcaaaatggatcaacataaaacaattcctgcaaaagatctatggaggaagatgttaacaatgttgtttgaaactggccacccttggattacttttaaggactcatgtaatttgcgttcgccacagcagcatattggagttatccattcttcgaatctgtgcactgaaataacactaaatacaagtaatgatgaaatagcggtatgtaatttaggctcagtcaatcttccgcaacacatgaaagatggtgttcttgatcacgagaaagtaaaacaaactgttacaactgccttaagaatgcttgataatgttattgatattaattactactcggtagatacagcaaagaattcgaacttaaaacatcgcccagttggtatgggccttatgggatttcaagatgcgctttacatgcaggatgccccttattgctctgacgcagccattgaatttgctgatcgaagcatggaagtaataagctactatgcgattcatgcatcaagtgaactagcaaaggaaagaggaagatatccatcttatgagggctctctttggagtcagggaatatttcccaaagactcaatcgatatcctagaaaaaaatagaggcagtgaatatataaaagttgataggtcggaaaccttggattgggaaaagttaaaagcaaaagtgaagaaagatggtatgagaaactctaatgtcatggccatagctccaactgcaacaatttctaatatcacaggagttactcaatctattgaaccaacttaccaaaatttatatgtgaaatcgaatttatcaggcgagttcacaattgttaacccccacttggtaaggaaattaaaagcattagacctgtgggatgacgttatgatcaatgacttaaagtactttgagggcagtttaagtgagatatctagaattcctgacgatattaaaaaacttttttcaacagcatttgaagttgagccaaaatatatcgttgagtcagctagcagaagacaaaaatggattgatcaggcgcaatcacttaatctgtatatcggaaatgccaatggtaaaaagcttgacctgacctacagaatggcttggtattcaggtttaaaaacaacatattacttaagatctatagcggcaacaacaaccgaaaaatcaactattaatcaaggcagcttaaatgctgtaagtgctcaggctgaaacagcgccagaggttcctcatgagcttggtgcgccagcaccggtgccagaagcatgctcattagatgaccctgactgcgaagcctgccaatgac

SEQ ID NO: 212071 - DNA, 991 bp, Unknown
  Bacterial polypeptide expressing nucleotide sequence isolated from the Sargasso Sea
catgatatctaaaggatgcaaatcaattttccctattcaacatcaagaaattttcgatcgttataaacaacatgtacaagcgttttggacgcctgaagaagtttcactccaagatgatttaagagatctaaaaacactgggtgagggagaaatacattttattaaacatgtgcttgcttttttcgctaattcagaggctatgataaacgagaacctagcttcaagattttataatgaaattttaattcctgagtctcgattatttattactatgcagatgctaaatgagtctattcatgctgaaatgtatggtttacaaatagaagcctacgtcgaggacccatcagaaaaagataagttgttctctgcaattcaaaatgttccctgtattaataaaaaagcacagtgggtttcaaagtggcttaatggaaatcaaaatttacttatgcgattaatagcttttggtttggtagagggattattttttgcaggatctttttgtgccatttattactttagaaaaagaggtctgcttccaggcctagcactttctaatgattggattgcaagagatgagggaatgcattttagtttctctgctttaatgtttaaaacattaagtgaaaagtttaataagggtacattgtcagatgaagatattaaatcaatggatttaataccaggtgctgtaactcaatcagagtttgaagaaattgttagagaagcagttgaatttgaaaaagaatttgtcaccgacgcgctacccgttgatcttattggcatgaacaaagagatgatgtgtatgtatattgaagcagtatcagatcgtatagctgatctttttggatttgatagagtgtttaatacagaaaatccatttgactttatgagagctctggatgttcaaaatgtaactaattttttcgaaaaaagagttactgaatatcagcgtccaacagatcgctctttgtcatttgatgagtctttctaa

SEQ ID NO: 212072 - DNA, 2806 bp, Unknown
  Bacterial polypeptide expressing nucleotide sequence isolated from the Sargasso Sea
gatggaacaacaagtcagacaagaaaaaaaagaagaagcaattgaagtttcaccaaatctggttatggccccaggaaagatgagagtcataaaaagaaatgggaaagttgttgcttttgatgaagaaaaaataaaagttgcaatcatgaaggccttcctagaagttgagggaggaacagcagcaggatcatctcgtattcatgacgaagttgaaaaaatgaccgcagatatagtcgctagatcaaaaggcagattaccttcaggagggacaatccatatagaagaactccaagacctcgttgaaattcagttaatgcgtaatgagcatcataaagttgctagggcttatgtcctttatagagaggcaagaaatagtgaaaggccggaagaacaagaaacagtagctgttgaaaaaaatattgaacaagtagttgatgcttctgtgaaaagagcgtgtgctggccttgagaatattgatgaagcaatgcttgcaacacaaataaaaaatactacatatgaaggcatttctgaaaaagatcttgctgaaagcatgctaatgacagcaagaactctggtcgaaaaagagccaaattattcttacgtaacagcaaggttattgctcaataatatggaaaaagaagttgtagattttcttgggttaaataaaaaattgcttagtaaaagatcagagatgtaccaagatgcactggttaaaacaattgcaaaaggcatagaactaggaatattaaatgaagaattagaaagttttgatttagatagattaggaaaagtaattaaagaggaaagagaccttcaatttacatacttgggtttacaaactctttacgacagatacttcattactcatgaagaaatcagatatgaacttcctcaagtttttttaatgcgtgtagctatgggtctagcgatacaagaaaaggacaaaaatgaaaaggccgaagagttttatatgttgttatcaagttttgattatatgagctcaacacctacgctgtttaattcaggcacaaaaagacctcagctctcctcttgctacctgacaacagtaccggatgatcttggtggaatatatgactctataagagacaatgcacttctgtctaaatgggctggtggtttaggtaatgactggacaaatgttagggctctaggtgcaagaattgatgggactaatggaaaaagtcaaggaatagttcctttcttaaaagtatccaacgatactgctgtagctgttaatcaaggtggaaaaagaaaaggtgctttctgtgcatacttagaatgctggcatttagatgtagaagaattcttagagctaagaaaaaatactggtgatgatagaagaagaacccatgatatgaatacagctaattggatacctgatctatttatgaaacgtttagagaaggatgaagaatggactctattttctccttcagatgttcctgatctacatgatatctatggtttagattttgagaagaaatacgttgaatatgaaaagagtgcagaaaaaggtgatataaagctattcaagaaaattcaagctaaagatctttggagaaaagtcctctcaatgctttttgaaactggtcatccatgggttacttttaaagatccatgtaatataagatcgccacaaggacatgttggcacagtccattcatctaatctttgtacagaaataacattaaatacaaacaaggatgaaattgctgtctgtaatcttggtagcattaatttacctcaacatattgaagatggaaaaattaatgtcgagcagctaaaaagttcaataaaaacagcaatcagaatgctggataacgtagtcgatatcaattattaccctgttcctcaagccgagaactcaaataagaagcatagacctatagggctaggtttgatgggctttcaagatgccttatataagcttggaatatcctacaattctgatgaggctgtcgatttcgcagataaatcaatggagctaataagttattttgctatacaagcttcttcagaattagcaaaggaaagaggagcatatgaaacctatgaaggttccctttgggacaaaggcatatttccgattgattcaatcaaccttcttgctgaacaaagaggtaaagaatttatagatcagaatactgatacaaatttagattggggctctcttaaagctgtagtctcagaaaatggtatgagaaattcaaatgtaatggcaatagcaccaacagcaactatagctaacataactggagtttcacaatctatagagcctacttatcaaaatttatttgttaaatcgaatctttctggtgaatttactgtagtgaacccatatttaattgaggaattgaaaaaagaaaacctgtgggatgatgtgatgttgagcgatttaaaatattttgagggttctttagcacaaataaacagaatacctgaagccattaaagaaaggtttaaaactgcatttgaaattgaaccgagatttattgttgaagcagcaagcagaagacaaaaatggattgatcaagcacaatctctcaacctttatataggaaatgtggacggtaaaaaactagatgtaacctacaggatggcatggtataaaggccttaaaactacatattacttaagatcaatgggcgctacagcaacagaaaaatcaacagtagatagaagcaatctaaatgctgtagaggctaaccaacaagaacaacaagtagctacaaaagcaccagaagcatgcagcattttagacccagattgtgaggcgtgccaatag

SEQ ID NO: 212073 - DNA, 673 bp, Unknown
  Bacterial polypeptide expressing nucleotide sequence isolated from the Sargasso Sea
aatagaggcatatgtacctaatccagaagaaaaagataaactattttcagctattgaaaatgtgccatgcataaatcataaagctcaatgggtttcaaagtggcttaatggaaatcaaaatttacttacaagattaattggctttggtttagttgaaggtttattttttgctggctctttttgcgccatatattactttagaaaaagaggtttgctcccgggattagctttatctaatgattggattgcaagagatgagggtatgcactttagcttttcttcactcatgtttaaaattttaagagataaatataataatagcaccttatcagatctagatataaaggatatgaatttaattagtggtgatgttactcaacctgagtttgaagaaatagttagagaagcggtatcattcgaaaaagaatttgttacttctgctttacctgttgatctaattggaatgaacaaagaattaatgtgccagtatattgaagctgtagcagaccgaatcgctgatttgtttgaattcgaaagagtatttaacactgaaaatccatttgattttatgagggcattagatgttcaaaatgttactaatttttttgaaaaaagagtatcagaatatcaaagaccatctgatagatctttagcatttgatgaagctttttaa

SEQ ID NO: 212074 - DNA, 1726 bp, Unknown
  Bacterial polypeptide expressing nucleotide sequence isolated from the Sargasso Sea
cttgtctggatatattggagctataagagataacgcattgctatcaaagtgggctggaggactaggaaatgattggacaaatgtcagagctctaggttcaagaataaaggggaccaatgggaaaagccaaggaattgtgccatttcttaaagtctcaaatgatacagcagttgcagttaaccaaggcggaaaaagaaaaggagctttctgtgcttacctagaatgctggcatcttgatgtcgaagagtttcttgatcttagaaaaaacactggtgatgacagaagaagaacacatgatatgaatacggcaaactggattccagacctatttatgaaaagacttgaagaggataaggattggactctcttttcaccctcagatgttccagagctacatgacttgtatggacaggaattcgaaaaaaaatacgaggagtacgaagccttggccgaaaaagatgagttaagtctatataaaaagataccagcaaaaactctttggaggaaaatgttatcaatgctctttgaaactgggcatccttgggtaactttcaaagacccatgtaacataagatcaccccaaggacatgttggtactgttcactcatcaaatctttgtacagaaataacgcttaatacaaacgaggaagaaatagcagtatgcaaccttggtagtataaatttaccgcaacatatacaagaagggaagatagatatagatcaattaaaaaatactgttagaactgcagttaggatgctagataatgttattgacatcaattattacccagttccacaagcagaaaactcaaataaaaaacacaggccagttgggcttgggttaatgggcttccaagatgctctttataagctcggaatatcatataactcggaagaagccgttaaatttgctgataaatcaatggagctaataagctattttgctattgaagcatcttccgaacttgctgctgaaagaggaacatatcagacatatgaaggttctctttgggatcgtggaatttttccaattgattccattaaccttttaaaggagcaacgaggagaaaattacttagatcagaatattgaaactactctagattgggattctttgagagaaaaggtaaaaaagtctgggatgagaaattctaatgttatggcaattgcaccaacagcaacaattgcaaacattacaggagtatctcaatcaatagaacccacctatcaaaacctttttgtgaaatcaaacttgtcaggagaatttacagttgttaatccatatttaatcgaggagcttaaaaacaaggaactttgggatgatgtgatgttaagtgatctcaaatattatgaaggatcgctatcgcaaataaataggatccctgaagagataaaagaaaaatttaaaactgcctttgaagttgagccaaaatttattgtggaggcagctagcaggaggcaaaaatggattgaccaagcacagtcattaaacttgtatattgctaatgtagatgggaaaaaacttgatataacatacaggatggcttggtataagggtcttaaaactacatattacttgaggtcaatgggagcaacctcaactgaaaaatcaactgtggagaggagcaatttaaacgccgtagatagcgaaaagggagaacaagtagcagcgcaagccccgcaagcttgcagcatactagatcctgattgcgaggcatgccaatag

SEQ ID NO: 212075 - DNA, 2158 bp, Unknown
  Bacterial polypeptide expressing nucleotide sequence isolated from the Sargasso Sea
atggaagttcaacaacaaaatcagaaagaaaatattaatcaatccataaacgaaatagaaacaacagcaccaggcaaactaagagtcataaaaagaaatgggaaagttgttccttttgaggacgacaagataaaagtggctataaccaaagcatttttagctattgaatctggaaatgcggcagcaagcgaaagaatacataaaaaggttggtgagcttacagatgctgttgtagaggtttttaaaagacgaatgccctcaggagggacccttcatatagaagagattcaagatcaagtagaacttcagctcatgaggtctgaggaacttgatgttgcaaaaagttacatactatatagagcagaaagaacacaagaaagaaaaaaagaaaaggttgaaatagatctacctgatgttcctagtataaatattacaaaaagcgatggaagcttggtacctcttgatgtggagaaagttgcaggattgataagtgatgcgtgtgaagacttggaagaagtctcagttaatgaggttttagatgaagctttaaaaaatctatacgatggagtgtcaatttcagacatgagaacaagtcttgttatgtcagcaagaacaaaggtcgagaaagaacctaattattcttttgtaacagcaagaatactcatggatcaaataagaagtgaagcattaaattttcttggtgttgctgaagaatcaacatatcaagaaatggaatcaaactatccaaaagcatttaaggcgtatatagataaaggaatagagcttgatatattaaatcctgaacttaaaacctttgaccttgaaaagcttggaaaggcaatagattttacaagagataatcaatttacatatttaggccttcaaactctttatgacagatattttattcattgtgatgacgtaagatatgagctacctcaagtgtttttcatgagagtttcaatgggacttgccatagaagaagaaaacagagaagaaagagcaatagagttctacaagcttctttctagctttgattacatgagttctacaccaactttattcaattctggaacaaaaagaccacaattgtcttcatgttatttaacaacaatacccgacgacttagatggtattttctcagcaatgaaagataatgcattattgtcaaaatgggctggaggcttaggtaatgattggactccagtaagggcgatgaactcttatatcaaaggaacaaatggaaaaagtcagggcgtggttcccttcttaaaagttgcaaatgatactgctgttgcagtaaatcaaggcggtaaaagaaaaggtgctatgtgtggctatttagagacttggcatttggatattgaagagtttttagagcttagaaaaaatactggtgatgaaagaagaagaactcatgatatgaacactgcaaactgggtgcctgatttatttatgaaaagagttgaaaaagacgaaaactggacacttttttcacctggagaaacaccagaactgcatgatctaattggtaaagcttttgaagaaaagtatgaagaatatgaagaaaaggcaaaaaatggtgagatggatcaattcaaatctgttccggcaaaagagctatggagaaaaatgcttacgatgttattcgaaaccggccatccttggattacatttaaagactcttgcaatctaagatcaccacaacagcactcaggagttgttcattcatcaaatctttgcaccgagatcacccttaatacaagtgcagataatgaaattgctgtttgtaatttaggctctgttaatcttgcaaatcatatgaaagatggaaagcttgatgaagaaaagattaagcgtactgtttctacagctataagaatgttagataacgtaataaacattaattattattctgttgatactgctaaaaattcaaacttaaaacacaggccaataggacttggtcttatgggtttccaagatgcactttatttacaaaatataccttactgcagcgaagaggctgtagagtttgcagatagaagtatggaactaataagttataacgcaatatatgcctcaacagagctggcaaaagaaagaggcgcatatgagagttttgacggttccttatggagcaaggggatacttcaaa

SEQ ID NO: 212076 - DNA, 991 bp, Unknown
  Bacterial polypeptide expressing nucleotide sequence isolated from the Sargasso Sea
atgatatctaaaggatgcaaatcaattttccctattcaacaccaagaaatttttgatcgctacaagcaacacgttcaagcattttggacacctgaggaggtatctcttcaagatgatttaagagatctaaaaacactaggagaaggagaaatacattttatcaaacatgtacttgcattttttgcaaattcagaggcaatgataaatgaaaatctagcatctagattttataatgaaattttaattcctgagtctcgattgtttatcaccatgcaaatgctgaacgagtctattcacgcagaaatgtatggtttacagattgaagcttatgtagaggacccatcagaaaaagataagctgttttctgctattcaaaacgttccttgtattaataaaaaagcacagtgggtttcaaaatggcttaacggaaatcaaaatttattaacacgcttaattgcctttggtttagttgaaggattattttttgctggatccttttgtgccatctattactttagaaaaagaggtttacttccaggcttagccttatcaaatgactggatagccagagatgaaggaatgcacttcagtttctcagctttgatgtttaaaacactaagtgaaaagtttaataaaggaaccttgtcagatgaagatattaaatcgatggatttaatacctggtcctgttgcacagtctgagttcgaagaaatagtcagggaagcagtggagtttgaaaaagaatttgttactgatgcacttcctgttgatctcattggtatgaacaaagaaatgatgtgtatgtatattgaagctgtttcagatcgaattgctgatctttttggatttgagagggtatttaatactgaaaacccatttgatttcatgagagctcttgatgttcaaaatgtgactaatttctttgagaaaagggtatctgaataccagcgtccaacagatcgttctttgtcttttgacgagtctttctaag

SEQ ID NO: 212077 - DNA, 349 bp, Unknown
  Bacterial polypeptide expressing nucleotide sequence isolated from the Sargasso Sea
gctattggtatatggtcgaaggagatgaaagatttgatgattaaggctggtggttctattcaaaatattattgatattcccgaccatatcaaggaactttataaaactgtatgggaaatcagtcaaaaagtcattatcgacatggcagctgacaggggtgtgtttattgatcagagtcagagtatgaaccttttcatcgaaaaccctaccctttctaaactttcatcgatgcacatgtacgcatggaaatcgggtctgaagactggtatgtattatttacgaagtaaagcaaaggctcgtccaatccaatttagtcttgaagcggaatgtactgcctgttcagcttaaa

SEQ ID NO: 212078 - DNA, 670 bp, Unknown
  Bacterial polypeptide expressing nucleotide sequence isolated from the Sargasso Sea
catgtcttatactacttttagtcgtaatcataataaccaaatgcaagagccaatgttttttggccagaccgttaacgtatcgcgttacgatcaacaaaaatatcctatttttgaaaagttaattgaaaagcaactgtctttcttttggcgaccagaagaagtagatgtgagtaaagaccgtttagattttcaggcgctaccagagcatgaaaagcacatatttttaagtaacttaaaatatcaaacactgcttgatagtgtacaaggccgctctcctaacgttgcgctactacctatcgtgtctatcccagaacttgaaacctggatagaaacgtgggcatttagtgaaacaattcacagccgttcatacacccacattattcgtaacgtaacacaatcaccagagcttatttttgatgacatcgttagcaacgataaaattagcgagcgcgctgatgcagttacaacttattacgatgatttaattaactctgtttcactttacaacctttacggtgaaggcaagcatgaaatcaacggtaaaacagttgttgtaaacttattcgagctgaaaaagaaactttacctcgctatgatgtcggtaaatattcttgaagcaattcgtttttatgtcagctttgcttgttcatttgcatttgctgaaacgtga

SEQ ID NO: 212079 - DNA, 1072 bp, Unknown
  Bacterial polypeptide expressing nucleotide sequence isolated from the Sargasso Sea
gaaatagttgagtattctgataaaaatgaaacgtcagtttgtaatttagcttcaattgctttaccaaaatttgttataaaatctcagaaaaacaaaaccaaagaatatgattacaaaaaattgtatgaaactgctaaactagctacaaaaaatctagatcaagtaattggtattaatttctatccaaccaacaaaactgaagtttctaataataaacacagaccaatcggattgggtattcaaggcttagcagatgtatttttcgaattaaacattccttatgatggtgaagaagctaagaaaattaataaaaaaatatttgaaacaatctattttggtgcactagaagcatcctgtgaacttgctaaggaaaaaggagcatactcaacctttaaaggctcccctttatctgaaggaaaatttcaatttgatttatggggaattgagccctcaaatatgtgggattgggactctctaagggaaaaaattaaaaaagtaggtgttagaaattctcttactacagcatgtatgccaactgcctctactggaataattttaggaaatacagaaacttttcaaatacaaacttctaatatttataaaagacaaactttatctggagaatttttattagttaatagacatctagttaaagtattatctaaacgcaacctttggaataaagaaatgcgtgataaaattattttagaaaacggttctgtgcaaaatattcaaaattttcctgaagatctcaaagaaacttataaaacagtttgggagacatctcaaaaaacagtaattgatatggccgctgatagggctccatttatagatcaaactcagtctatgaatttatggttatcaacaccgacttttggaaaagttaattcaatgcatatgtatgcttggaaaaaaggtttaaaaacaggtatgtattatcttagaagtagatcagctgttgatgctgtaaaggtaactgtttcatcagaaaaagttgctaaggaggattttttaaagaatgccgttactgaaaatgatgatccagaagattgtttaacatgcagtgcataaa

SEQ ID NO: 212080 - DNA, 1132 bp, Unknown
  Bacterial polypeptide expressing nucleotide sequence isolated from the Sargasso Sea
ggagccttctgtgcttatctagaatgctggcatctagatgtcgaagaattcttagatttacgaaaaaacaccggggacgatagaagaagaacacatgatatgaatacagctaactggattccagatctgtttatgaaaagattagagaaaggagaaaaatggactcttttttcaccatcagatgttccagaacttcatgatatctatggaaaagagtttgaaactaaatatacagaatatgagaagaaggcagagacaggggaaataaaacattttaaaacagttgaagcaaaagatttgtggagaaaaatactttcaatgctctttgaaaccggacacccatgggtgacgtttaaagatccatgcaacataaggtctcctcagggccatgttggtacagtacactcatcaaatttatgtacagagataactcttaatacgaatgaagatgaaatagctgtttgcaatttgggaagcatcaacctaccccaacatatagacgaaggaaaaattaacgtcgagcaacttaaaagttctgtaacaactgctatcagaatgctagataatgtaatcgatattaattattacccagttccacaagcggaaaactctaataaaaaacacagaccaattggtttgggtcttatgggttttcaagatgctctttacaagctcggcatttcatatgattcagaggaagcagtcgagtttgctgacaaatccatggaactaattagttatttcgctattgaagcttcctgtgctcttgctgaggaaagaggaacatacgaaacatacaaaggatctctctgggataatggcatctttccacttgattctataaatctattagcagaacaaagaggtagtgattttattgatcaaaataccgaaaaaactcttgattgggacaaattaaaagaaaaaatgtcgaaacatggtattagaaattcaaatgtaatggcaatcgctccaacagcaacaattgctaacattacgggagtctctcaatctatagaaccaacgtatcaaaatctatttgttaaatcgaacttatctggtgagtttactgtagtcaatccttacttaattgaggaattaaaaaaagaaggtttatgggatgaagtaatgc

SEQ ID NO: 212081 - DNA, 518 bp, Unknown
  Bacterial polypeptide expressing nucleotide sequence isolated from the Sargasso Sea
tatggttgaaccaattttaaaagaaaataaagacagatttgtcatattcccaataaaacatcacgatttatgggagtggtacaagaaatgtgaagctagtttttggactgctgaagagattgatttacatcaagatctaacggattggagcacaaagttaaatgatgatgaaagatatttcgtcaagcatattttggcattctttgcagcttccgatggaattgttaatgaaaatttagcagagaattttgttaatgaagtacagtactcagaagcaaaattcttttatggttttcaaataatgatggaaaatattcattctgaaacttattctcttttaattgatacctacgtaaaagatgatgcagaaaaagataatttatttaatgcaattgaagttttcccagcaattaagaaaaaagcagattgggcattaaagtggattgaatctgattcatttgcagaaagattaattgcatttgctgcagttgaaggaattttcttttcaggagcgttct

SEQ ID NO: 212082 - DNA, 980 bp, Unknown
  Bacterial polypeptide expressing nucleotide sequence isolated from the Sargasso Sea
gttgagcttggcaaagtatgatatgcatattctgcaggattacacccgcgaagaactcgatatcatggacagctatatcgaccattggcgcgatatgaacttctcctacgcggcggtaaaacagctcgaaggtaagtatctggtacaaaaccgtgtgacccacgagatctacgagagcgcccagttcctgtatattctggtggcggcctgtttgtttgcccgttatccaaaagaaacgcgcctgcaatacgttaaagatttttacgacgcggtatcgacctttaaaatttctctacccacgccaatcatggcgggtgtgcgcacgccaacgcgtcaattcagttcatgcgtactgattgaatgtggcgacagcttagattctatcaacgcgaccgcctcttctatcgtgaagtatgtgagccaacgcgcaggtatcggtatcaacgcaggtcgtatccgtgcactaggtagcccaatccgtggcggcgaagccttccacaccggttgcttacctttctacaagtatttccaaacggcggtaaaatcttgctcgcaaggcggcgtccgtggtggtgctgcgaccctcttctaccccatttggcacctagaagtggaatcactactggtcctgaaaaacaaccgcggtgttgaagataaccgtattcgccacttagactacggcgtgcagctcaacaagctgatgtaccaacgtctgatcaaaggcgaaaacatcagcctgttcagcccatcggacgtgccaggtctttacgatgccttcttcgaagatcaagacgaattcgaacgtctgtacctgcaatatgagcaagacagcagcattcgtaagaagacattgaaagcggtcgaactgttctcattgatgatgcaagagcgtgcttcaacgggccgtatctacatccaaaacgttgaccactggtatacccacagtccgttcgactcgaaagtcgctccgatcagacaat

SEQ ID NO: 212083 - DNA, 802 bp, Unknown
  Bacterial polypeptide expressing nucleotide sequence isolated from the Sargasso Sea
gaaccgcctgcgctgtacgaccacgtcgccaggatggtgaaaaaaggtaaatacgatactcatctgctggaagactacacggaagaagagttcaagcagatggattcgttcattgttcacgatcgcgatatgagtttctcctacgctgccgttaagcagctggaaggcaaatatctggtccagaaccgcgtcaccggcgaaatttacgagagcgcccagttcctctatattctggttgccgcctgcctgttctccaactacccgcgcgagacgcgtctggactacatcaagcgtttctatgatgccgtctccacctttaaaatctcgctgccgacgccgattatgtccggcgtgcgtaccccaacgcgtcagttcagctcctgcgtgctgatcgagtgcggcgatagcctcgactccatcaacgccacctccagcgccatcgtgaaatatgtttctcagcgcgccggtatcggcattaacgccggccgcatccgtgcgctcggcagcccgatccgcggcggcgaagcgttccacaccggctgtattccgttctataagcacttccagaccgcggtgaagtcctgctcgcagggcggcgtacgcggcggtgcggcgacgctgttctacccgatgtggcatctggaagtcgaaagtctgctggtgctgaaaaacaaccgtggtactgacgccaaccgcgttcgccacatggactacggcgtacagatcaacaaactgatgtacacccgcctgctgaaaggtgaagacattaccctgttcagcccgtccgacgttccgggtctgt

SEQ ID NO: 212084 - DNA, 685 bp, Unknown
  Bacterial polypeptide expressing nucleotide sequence isolated from the Sargasso Sea
atggaagataaatcatcagttcaagccgaaaatttagatcaagtaaatcttaataaagatttagatgaaaatttagttatcgaggagcctattttaaaagagaatccaaataggtttgttcttttccctattcaacacaatgatatttgggaaatgtataaaaaacaagaagcaagtatttggactgctgaagaattagatctttctcctgatttagtcgattgggaaaataaattgaatgatgacgaacgtttttttataaaacatgttctagccttttttgctgcatctgatggtattgtcaatgaaaatctggcagaaaattttcttagtgaagttcagtatactgaagcaaagtttttctatggatttcaagttatgatggaaaacattcattcagaaacctattccttattaatagatacatatattaaggacaccaaggaaaaaaattatctttttaatgcaatagaaacctttgaaccagttaagaaaaaggccgactgggctatgagatggattgataacggatcttatgctgaacgtttgatctcttttgctgctgttgaaggtattttcttttcgggatcattttgttctatcttttggttaaagaaaaggggattaatgcctggattgactttttctaatgagttgatttcaagggacgaaggattacactgtg

SEQ ID NO: 212085 - DNA, 1009 bp, Unknown
  Bacterial polypeptide expressing nucleotide sequence isolated from the Sargasso Sea
gtttccgttttatctactggcttatctattgatccaatagttgtggcacaaaaagcaataccaggtctatataatgatattacttctacagaaatagataattatctagctgaaacatcagctgctttaactgttgaacatcctgattattctaatttagctgcaagaataaagtctaatgctcttcacaaattaactcctggttttgtaatagcgactaaaaatttatttgatgatggtctactgcatgaaaattattataataaagtaatgcaaaatgctgaagaaattgaatctataattgattatgatagagattacagttttgattattttgctttaacaaccttaataagagcatatcttctaaaatttgaaaatgaaaccatagaaaggcctcaagatttatggatgcgtgttgcattaacagtatcaggaaaagaatttaaccttgctaaggttaaagaaacttatgactctctatctaatggtctatatactcatgctacaccaactctttttaatagtgggctaaaaatgcaacaattatcttcctgttttcttattggaatggaagatgactcaattgaggggatttttaatactatcaaagattgtgcattaatatcaaaaactgctggtggtattggaatgcatgcgcacaatatacgcggaagtggaagtagaattaaatcaaccaatggaaaatcaaatggccttataccttttttaaaaatatttaatgaaacagcaaaatcagttgaccaaggtggtggaaaaagaaaaggctcatttgctatttatttagaaccatggcatgcagatattgaaaaattcttggaactaagaaaaaatactggtgcagaagaatttagagctcgtgacttattttatgcactctggattcctgatttatttatgcaaagagttgaaaaggatgaagattggactctaatgagtgaacacgaatgtcctgggctatctgatagctatggtaagagttttgaga

SEQ ID NO: 212086 - DNA, 907 bp, Unknown
  Bacterial polypeptide expressing nucleotide sequence isolated from the Sargasso Sea
atacgatgatggtttattgagagaagattattataaaaaagtgatggaaaatgcagatttaatagagtctataattgactacgacaaagattatacttttgactattttgcccttacaacactaatcagggcatatttattaaagtttgataataaaacaattgaaagacctcaagacttatggatgagagtaactttaacagttaccggcaatgagtttaatttagataaaataaaagaaacttataaaagtttatcaactggtacgtatacacatgctacgccaactttgtttaatagtggattaaaaatgcaacaattatcgtcgtgctttttaataggtatggaggatgattctattgaaggtatttttaacaccataaaagattgtgctctaatatctaaaactgcaggtggtattggtatgcacgcacacaatattagaggtagtggaagtagaataaaatcaacaaatggtaaatctaatggtcttattccatttttgaaaatttttaatgagactgctaaatcagttgaccaaggcggaggtaaaagaaaaggttcttttgcagtttacttagaaccttggcatgctgacattgagaaatttttagaacttagaaaaaatactggcgccgaagaatttagagcaagagatttgttttacgctttatggataccagatttattcatgaaaagagtagaaaatgatgaagaatggacacttatgagtgaacatgaatgtccaggactttcggatgtgtatggcgacaagtttgaaaaactttacactaaatatgaaaatgaaataaagcatttagaaaaaattaaagcaagagatctaatgtctaaaattatagaagcgcagatagaaacaggacagccttatatgctctataaagactca

SEQ ID NO: 212087 - DNA, 724 bp, Unknown
  Bacterial polypeptide expressing nucleotide sequence isolated from the Sargasso Sea
atgcagcaagaaccccttttacaagaaaacaaagacagatttgtaattttcccaattaaacatcatgacatatgggaatggtataaaaaatgtgaagcaagtttttggactgcagaagaaattgatctacatcaagatttaaatgattggagtacaaaattaaatgatgatgaaagatatttcataaagcatattcttgctttctttgcagcttctgatggtatagtgaacgaaaacttagcagaaaactttgtaaatgaagttcaatactcggaggcaaaatttttctatggatttcaaataatgatggaaaatattcattcagaaacttactcgcttttaattgacacttatgtcaaggatgataaggaaaaagatacattgtttaaggctattgagaattttcctgcaattaaaaagaaggctgattgggcattaaaatggattgagtcagattcttttgctgaaaggcttattgcttttgcaggtgttgaaggagtatttttctcaggctcattttgttcaatattctggctcaagaaaagaggtcttatgccaggccttacattctcaaatgagttaatctctcgtgatgaaggagttcattgtgattttgcagttcacctgcacaataatcacatgattaataaggttccaaaggaaagaattaaggaaatacttcttgatgctttaaacatcgaaagagaatttataacggaatctt

SEQ ID NO: 212088 - DNA, 841 bp, Unknown
  Bacterial polypeptide expressing nucleotide sequence isolated from the Sargasso Sea
aaagacagaaaagatttcaatgagaagatgaatgacaatgaaagatattttattgaaaatattctcgcattctttgccgcgagtgatggaatcgtcaatgaaaatttaggtgaaagattttacaatgaaatacaaattcaagaagctaagtttttctatggatttcaaatcgctgttgaaaatattcactctgaaacttattctcttctcattgaaacttacgtaaaagataatgcgaaaaaggaaaaactattcaatgcgattgatacaattccaagtgttaaaaagaaggcagaatgggctatcaaatggattaatgataaagatgcgacacttggaactcgtgtgattgctttcgcggctgttgaaggtatcttcttttcaggttcgttttgttctattttctggcttaagaaaaggggattaatgcctggattatgtcatagcaatgaattaatcagtcgagatgaaggactacatacagaatttgctgttcttatttattcgatgttgaaaaataaaccatccaaagaaataatttatgaaattattaaagaagctgttgaattagaaaaagaatttattactgaatcacttccatgtaacttaattggaatgaatatggttcttatgaaacaatatattgaatatatcgcagatcgattactattgatgcttggtcttgaaaaagtatatcataaagaaaatccctttgaatggatggaacttatttctgttcagggaaaaacaaatttctttgaaaaaagagttggtgaatatgcgaacatcgcaaaatcaaatcaaaatgataatgtatttgatcttaatgaagaattttaat

SEQ ID NO: 212089 - DNA, 825 bp, Unknown
  Bacterial polypeptide expressing nucleotide sequence isolated from the Sargasso Sea
aatttttgaaacaatttattatgcagctgttatggcttccattgaagaggctgaaaaggatggtccatatgaaacctataaggggtctccaatttctcagggtgaatttcaacacaatctttggggaataaaagatgaagaactcagtggaagatgggattggaaagatgcgagaaaaaaattgaagaaatctggtgttagaaactctctacttgttgcacctatgccaactgcgtcaacatctcaaatcctaggaaacaatgaatgttttgaaccctatacttcaaatatttatactcgcagagtattatctggagaatttatagttgtcaacaaatatcttttagaagatcttgtagcacttggtgtttggaatgaagacatgaaacaagaattaatgcaagcaaatggttctattcaaaatattaaaggaattcctgatgacattaaagaaatctacagaactgtctgggagatgagtatgaaagacattattgatatggctagacatcgaggctattttatcgatcaatcacagtctctaaatcttttcatggaaggagcaacagcggcaaaacttacatccatgcatttttatggatggaagtctggtcttaaaacaggaatgtattatctaagaactaaatccgcagtagacgctattaaatttactcttgataattcaaaaaaagctaaagttgaaaaacctgttgctgaaaaagtaacctcagcacctgcagcagccagtaaaaaaaacactgatgctaagggcaaacaaattgttgcaaaacctcttagccctgaagagctcaaagaaatgcttga

SEQ ID NO: 212090 - DNA, 819 bp, Unknown
  Bacterial polypeptide expressing nucleotide sequence isolated from the Sargasso Sea
acaatcatctgatttagaaccactacttcgcgaaaatccacagcgattcgtactctttccaattaactataatagtatttggcaaatgtacaagaaatctctcggtcttttttggactgcggaggaaattgatttaggaaaggatttaaacgactgggtcaaacttaaaccggaagaacaacacttcattaaaaatattctggcttttttcgcaggtagtgacggcattgtcttagaaaacttaggttcccgctttatgaatgaaatacagattccagaggctaaatgtttctatggattccagattgcgatggaaaatatccactccgaaacctatagtcttttaattgatacttatatcaaagattcagtagaaaaagaccgtcttcttagggcaatagatacaattccctgtgtggagaagaaaggtaagtgggctttgcggtggattaacgatactgactctaacttcgcaacacgcttagtagcttttgcttgcgtagaaggtattttctttagtggttctttctgtgctatattctggttaaaaaagagaggtttaatgcctggtttaactagtagtaatgaattaattagtagagatgaaggtttacatactgattttgcctgtttaatttacagtatgttaaatcaaaaattaagctttgaaacaattaaagaaattgtatgcgatgccgtggagattgaaaaggaattcattacggattccattccttgtagattaattggaatgaatgctcaattaatgaaaacttatattgaatttgtagcagatagattactagttcaattaggtta

SEQ ID NO: 212091 - DNA, 811 bp, Unknown
  Bacterial polypeptide expressing nucleotide sequence isolated from the Sargasso Sea
atgagtccacaatttgtagaaccattattaaaagaagacgataataggtatgttatgtttccaattaaagatcaagacatatggcaaatgtataaaaaacaagaagatttattttggcgagctgaagaaattgatttatccaaagatatgaaacattgggatgcccttaaccccgatgaaaaacatttcatatctatgattttagcctttttcgctgccagtgatggaattgttcttgaaaatcttggtatgagatttatgtctgaaattcaactagcagaagctcgtgccttttatggtctgcaaatcgctatggaaaatattcattctattacttattctacccttattgatacttatattaaagataaaactgaaaaaaataagttgtttaatgctttaaatgaatatccttgtattaagaaaaaagccgattgggctattaaatggatacaagacaagcgttctagttttgctacgcgattagttgcttttgctgttgttgaaggtatattttttagtggagcattttgttctattttttggctaaaaaaacgtggtattatgcctggattatgtttttctaatgagttaatatctagagatgaagcgctacatacagaatttgctgttttattacataataaattagagagacctcttaaaaaacaaaaaatagaagaaattattagagaagctgttgatattgaaattgattttattaataatgctttaccttgtcgtttaattggtatgaatggtatgttaatgcagcaatatatagaatttgttgctgatagattagccgttc

SEQ ID NO: 212092 - DNA, 546 bp, Unknown
  Bacterial polypeptide expressing nucleotide sequence isolated from the Sargasso Sea
aatggaacctttgttagatcaatctcaaaatcgttatgttttatttccaattcaacatgatgatatctgggaaatgtataaaaaagcagagtctagtttctggacaacagaagaaatagatttatcaaaagatcatagtgatttttcaaaattaactccaaatgaacaacattttattaaatatgtacttgctttctttgctgcttctgatggtattgtcaatgaaaatctagttgaaagatttacacaagagattcaattattagaggctaagtttttctatatgtttcaaggatcaattgagaatattcattcggaaacctattctttattaatcgatacattaattaaaaatcaagaagaaaaacatagtttatttaatgcgatagaagaaatacctagtattcgtaaaaaagccgaatgggctcaaacatggataaatgataaacatagttcattcggtcatcgtgtgatcgcatttgcggcggttgaagggatattcttttcaggtgccttttgttcgatattctggttaaagaaaagggg

SEQ ID NO: 212093 - DNA, 809 bp, Unknown
  Bacterial polypeptide expressing nucleotide sequence isolated from the Sargasso Sea
cattattgctaccaaaaatttatacgaagatggacttttaagagatacatactacgaaaaagttatagaaaatgctgatgtaattgagtcaattattgattacgataaagattatacatttgattattttgctttaacaacactaatcagggcatatttattaaagtttgataataaaacaattgaaagaccccaagacttatggatgagagtaactttaacagttaccggtaatgtgttcaatttagataaaataaaagaaacttataaaagtttatcaagtggtatgtatactcatgctactccaacattatttaatagtggattaaaaatgcaacaattatcatcgtgttttttaataagcatggaagatgattctatagaaggtatttttaatactataaaagattgtgcactaatatctaaaactgcaggtggcatcggaatgcatgctcacaatatcagaggtagtggtagtagaataaaatccacaaatgggaaatctaatggcctcattccatttctaaaaatttttaatgagactgctaaatcagttgatcaaggtggaggtaaaagaaaaggctcctttgcagtttacttagagccttggcacgcagatattgtaaaatttcttgaactcagaaaaaacacaggtgcagaagaatttagagcaagagatttattttatgctctatggataccagatttatttatgaaaagagtagaaaatgatgaagagtggacgcttatgagtgaacatgaatgtccaggactttcagatgtatatggcgatgagtttgaaaattata

SEQ ID NO: 212094 - DNA, 928 bp, Unknown
  Bacterial polypeptide expressing nucleotide sequence isolated from the Sargasso Sea
tctgatgaagcaaaagagcttaatcaggaaattttggaaactatctattatgctgcacttaatgcttcagtgagggaagctaaaaaagatggagtttatgaatcatataaaggatcaccaatttcaaaaggtgaattccaacataatatgtggggagttgaagatgatgatttaagtggtagatgggattggaaaaaattaagaaaagatgttttaaagcatggtgtgagaaactctcttttagtggcaccaatgccaactgcaagtacatctcaaattcttggaaataatgaatgttttgaaccttatacttcaaacatttatactagaagagttttatctggtgaatttattattgttaataagcatttactaaatgacctagttgaattaggactttggagtgaagatatgaaacaagatctaatggctgcaaacggatccattcaagatattgaaggtattccagatgatttaaaagagctatataaaaccgtgtgggagatgagtatgaaggatataatcgatatggctagacatagagggtttttcattgaccaatcacaatcacttaatttatttatggaaggtgctactatgtcaaaacttacatctatgcacttctatgcatggaaatctggtcttaaaacaggtatgtactatttaaggactaaatctgctgttgatgcaattaagtttacacttaagaaaaaagaatctgttcccgaaaaaacagaagagattaaacttgaagcagagactgaagaggtaggtgaagttcaaattactagaacagaaaaagcagcaaaaactaaatccaaggaaaaaccagttgctgttgaaccacttactcctgaagagctaaaacaaattatctctcaatctaaagagaatgaggatgatgactgtcttatgtgtggttcttaat

SEQ ID NO: 212095 - DNA, 604 bp, Unknown
  Bacterial polypeptide expressing nucleotide sequence isolated from the Sargasso Sea
ctctgatacaatgaaggatctacacacatacgttaatccaataactggtaaaaaggctccgctattatcagatgaagtctttaaagtgattaagaaaaatgcagagttacttgactcaaaaatcatttacaatagagatttcggatatgattactttggttttaaaactcttgaaagatcataccttttaaaaattaatggaaatatagttgagagaccacagcatatgttgatgagagtctcagtaggtattcaccttgatgatattgatgctgtaattgatacctacgagttaatgtcaaaaaaatattttactcatgcaactccaactttatttaatgcaggtacacccaagccacaaatgtcctcatgtttcttactaactatgcaagatgatagtattgatggaatctatgatacactaaaacaaacagctaaaatttcacaatctgctggaggaattggtctttcaattcataatataagatctacaggatcatacatatctggaacaaatggtacatcaaatggtatcgttccaatgcttagagtttttaatgatactgcaagatatgtagatcaggggggtgtaaaagaaaaggtc

SEQ ID NO: 212096 - DNA, 825 bp, Unknown
  Bacterial polypeptide expressing nucleotide sequence isolated from the Sargasso Sea
agagcttaatcaagaaatttttgaaactatttattatgctgcactttatgcttcagttgaggaagctaaaaaagatggcgtttatgaatcatataaaggttctccaatttcaaaaggtgaatttcagcataatatgtggggagttgaagataatgatttaagtggtagatgggattggaaaaaattaagaaaagatgttttaaagcatggtgtgagaaactctcttttagttgcaccaatgccaactgcaagtacatctcaaattcttggaaataatgaatgttttgaaccttatacttcaaacatttatacgagaagagttttatctggtgagtttattattgttaataaacacttactaaatgacttagttgaattaggaatttggagtgaagatatgaaacaagatctaatggctgcaaacggatcaattcaagatattgaaggtattccagatgatttaaaagagctatataaaactgtgtgggagatgagtatgaaggatataatcgatatggctagacatagagggtttttcattgaccaatcacaatcacttaatttatttatggaaggtgctactatgtcaaaacttacatctatgcacttctatgcatggaaatctggtcttaaaacaggcatgtactatttaaggactaaatctgctgttgatgcaatcaagtttacacttaagaaaaaagaatctgttcctgaaaaaacagaagagattaaactcgaagctgaaactgaagaggtaggtgaagttcaaattactagaacagaaaaagcagctaaaactaaatccaaggaaaagccagttgctgt

SEQ ID NO: 212097 - DNA, 475 bp, Unknown
  Bacterial polypeptide expressing nucleotide sequence isolated from the Sargasso Sea
atgtcgtcgtgcttccttgtacacctgaaggatgactcgatcgagggcatctacgacacactcaagacgtgtgcgcagatctccaagtcggctggtggcatcggcctcaacatccacaacatcagggcgcgcggcagctacatccgtggcaccaacggcacctccaacggcctggtgccaatgctccgcgtgttcaactcgaccgcgcgctacgtggatcagggcggcggcaagcggccaggcgccttcgccatgtacctggagccttggcaccccgacgtgtttgacttcctcgacctgcgcaaaaacacaggctctgaggagaaccgctgccgcgacctcttcctggcactctggatccccgacctcttcatgaagcgcgtcgaagagaatggcgattggtccatgttctgtccctgcgactgccccggcctgagcgactgctggggcgcggagttcgaggcactctataaca

SEQ ID NO: 212098 - DNA, 904 bp, Unknown
  Bacterial polypeptide expressing nucleotide sequence isolated from the Sargasso Sea
tatgctttgtggattcctgatttatttatgaaaagagtaaaagatgatgaggattggactctaatgagtgaacatgagtgtcctggtttatcggataattacggtaaagaatttgaaatactttatacaaagtatgaaaaagaaaaaaaacatttagaaaaaataaaagctagagctttgatgtctaaaataatagaggcacaaattgaaacaggtcaaccatatatgctttataaagattcaattaatgaaaaatcgaaccaaaaaaatattggtgtaattaaatcttcaaatttatgcgcagaaattgttgagtattctgataaaaaagaaactgctgtttgtaatttagcttctatagcacttccaaaatttatagatagtaaaaataaaaaatatgattataaaaaactttatgaaacagcaaaactagcaacgaaaaatttagatcaagtaattgatatcaatttttatccaacaaataaaacagatgtttcaaataatttacatagacctattggtttaggcattcagggtctttcagatgtattttttaaattatcaataccacatgaccatgaggaagcagctaaaataaataaattaatatttgaaacaatttattttggggctcttgaagcttctatggaattagcaaaagaaaagggtgcatattcaacttttaaaggctctcctttgtcagagggtaattttcagtttgatttatggaaagtcaaaccttctaacatgtgggaatgggatactttaaaagaaaaaataaaaaaatatggagttagaaactcacttacgacagcttgtatgcccaccgcttcaacaggaataattttaggtaatacagaaacttttcaaattcaaacttcaaatatatacaaaagacaaactc

SEQ ID NO: 212099 - DNA, 666 bp, Unknown
  Bacterial polypeptide expressing nucleotide sequence isolated from the Sargasso Sea
tatgtttgtagtaaaaagggatgggcataaggagccaattatgtttgataaaattacggcaagagtaagaaagctgtgttatggactgaacggtcttgttgatccagtaagagtttcaatgagagttattgaagggctatatgatggtgtttcaacttcagagcttgataatttagcttcagaaatatctgctacaatgacaactactcatcctgattacgcacaacttgctgcaagaatttctgtttctaatttgcataaaaatactaaaaagtccttttctgatactatgaaagatctgtatgagtatgtaaatccaagaacaggtaaaaaagctcctttattatcaaaagaagtttatgaaactataaagaaaaattccgaaaagcttgactccagtattatttacaatagagattatggatatgatttttttggatttaaaactcttgaaaaatcataccttttaaaactcagtggtaaaattgctgaaagacctcaacacatgcttatgagggtctctgtcggaattcatctagatgatattgattcggtaattgaaacttatgatctaatgtcaaagagattttttactcacgccactccaactttatttaacgctggtaccccaaagccacaaatgtcatcatgctttttattaaccat

SEQ ID NO: 212100 - DNA, 894 bp, Unknown
  Bacterial polypeptide expressing nucleotide sequence isolated from the Sargasso Sea
ttctcggctctatgggttccggatcttttcatgaaacgcgtggaagaaggtggtaactggtctctgttctgtcccgacaaggctcctggtctttcggacgtatacggtgatgaattcgaatcactctacaccagatacgaagctgaaggtctcgcgaatgagaccatcccagctcttgatgtttggaaagctatcatcaagtcacagagtgaaaccggaacgccttatatgttatacaaagattcgtgtaacaagaaatcgaatcaaaagaatgtcggtgtcatcaagtcttccaacctctgtagtgaaattatcgagtattcggatgacaaggaaacagccgtctgtaacctttcgtctatcgccattccttcgtgtgtagatatcgacacgaaaacgttcaactatacaaagttacacggtcttacgaaaatgatcactcgtaacttgaaccgtgtaatcgacaggaacttttatccgactgaaaatgcgaaacgttctaattttagacacagaccaatcggtattggtgtacaaggattggccgacgtgtttattatgtgcggaatggcgtttggttcagaagaatctcgtaacatgaatgcttacattttcgagactatgtatcacgccgcactcgaagcaagttgcgaacttgctgaattgtatggaccgtatgaaacgttcgaaggttcaccagcgagtaaaggtatcttacagttcgacatgtgggacagacagccgagattcagtggtatgtacgactggacagctatgcgcgaacgtgtaaagaagggtattcgtaacagtctatttatggcaccaatgcccactgccagcacttctcaaattttgggtaataacgagtgttttgagccgtacaccaccaacatt

SEQ ID NO: 212101 - DNA, 790 bp, Unknown
  Bacterial polypeptide expressing nucleotide sequence isolated from the Sargasso Sea
atggcgtacacaacctttaacagacaaatcaacgatcaattaaaagagccaatgttttttggcaacccggtcaatgtgtcacgttacgatcaacaaaaatacggtatctttgaaaaactgattgaaaaacaactgagttttttctggcggccagaagaggtggatgtcagcaaagatcgtatcgactttcaaaacctgcccgagcacgaaaagcacatttttatcagcaacctaaagtaccagaccttgcttgactcggtgcagggccgctcacctaatgtagcttttttgcctatcgtatcgctgcctgagcttgaaacctggattgaaacctgggcgtttagtgaaactattcacagccgcagctacactcacattgtgcgtaatatcagcgccgagccgcataaagtgtttgacgacattatgctgaatgaaaaaattctgcagcgtgctgaagatgtcacccgctactacgatgcactgattgacggtattaatttgtatcagcgctgtggcgaaggcactcacaccatcaacggtgaaacgcacagcatcagcctgtatgaactcaaacgccggttatacctgtgtgtgatgtcggtgaatgtgctcgaagccatccgcttttacgtcagtttcgcctgcagctttgcttttgccgaacgcgaactgatggaaggcaatgctaaaataatccgtcttatcgcccgtgacgaagcgctgcatttaaccggcactcagcatatgctaaatattatggcagccggcgatgacgacccgcaaatggcgc

SEQ ID NO: 212102 - DNA, 376 bp, Unknown
  Bacterial polypeptide expressing nucleotide sequence isolated from the Sargasso Sea
atgtctgaatatctgcttactgaagaaaacaagcgttttgttgttttcccaattcaaaacgataaagtatatgaaatgtacaagaaagctgttgcaagtttctggactcccgaagaaattgatttggaaaaagatttgacagattttaataatcttaatgatgatgaaagacattttattgaaaatgttctcgcatttttcgcagctagtgatggtattgtaaatgaaaatcttggtgaaagatttttgaatgaagtacagattaaagaagctaaaatgttctatggattccaaattgctatggaagataaacatggtattacatactctctccttattgatacatacaaaaaggaaagtgtaaagaaagataaat

SEQ ID NO: 212103 - DNA, 738 bp, Unknown
  Bacterial polypeptide expressing nucleotide sequence isolated from the Sargasso Sea
ttaacagttaccggtaatgagtttaatttagataaaattaaagaaacttataaaagtttatcgactggtatgtatacacatgctactccaacattgtttaacagtggattaaaaatgcagcaattatcttcgtgctttttaataggtatggaagatgactccatagaaggtattttcaatactataaaagattgtgcccttatatctaaaacagctggtggtattggaatgcatgctcataatatcagaggtagtggaagtagaataaaatcaacaaatggaaaatctaatggtcttatcccatttttgaaaatttttaatgaaactgctaaatcagttgatcaaggtggaggtaaaagaaaaggatcttttgcagtttacttagagccttggcacgctgacattgtgaagtttctagaacttaggaaaaatacaggtgctgaagaatttagggctagagatttattttatgctttatggataccagacttatttatgaaaagagtagaaaatgatgaagaatggacacttatgagcgaacatgaatgcccaggtctttcaaatgtgtatggtgatgagttcgaaaaactttacactaaatatgaaaatgaaataaagcatttagaaaaaattaaagcaagggatttaatgtctaaaattatagaagcgcagatagagacaggacaaccttacatgctttataaagattctatcaataataagtctaaccaaaaaaat

SEQ ID NO: 212104 - DNA, 753 bp, Unknown
  Bacterial polypeptide expressing nucleotide sequence isolated from the Sargasso Sea
ttaatgagaacttagctgaaaattttgttaatgaagttcaatattctgaggcaaaatttttctacggttttcaaattatgatggaaaatattcattcggagacatattctttacttattgatacatatgtaaaggatgataaggaaaaagatactctgtttaaagctatagaaaatttcccagcgattaaaaagaaagcagactgggctctaaaatggattgagtctgactcttttgctgagagacttatcgcttttgcgggagttgaagggatatttttctcaggctctttctgttcaattttttggttaaaaaagagaggactgatgccaggactaacattttctaacgaattaatttctcgtgatgaaggtgtacattgtgattttgcagtccatcttcataaccatcatattataaataaagtgccaaaggaaagaattaaagaaattttaattgatgctcttaatattgaaagagaatttataacggaatctttaccagtaagtttaattggaatgaatgcaaaattaatgacacaatatctagaatttgttaccgatagacttttagatcaatttggatgtgaaaaagaatttaatgtttctaatccatttgactttatggatatgatcaaccttcaaggtaaaactaatttctttgagaaaagagtttctgaataccaaaaagcaggtgttctaaataacgataaaaaagaagagtcaaactttgatcttgacgatgacttctaaa

SEQ ID NO: 212105 - DNA, 944 bp, Unknown
  Bacterial polypeptide expressing nucleotide sequence isolated from the Sargasso Sea
gatgcgagttgcaattcaaattcacggtaaaaatcttgaaagtgtacgtcaaacatatgattatatgtcttgcaaatattttacacacgcaacacccactttatttaatgctggaacaacgcgaccacaattgagctcttgctatcttattggaatggaagatgatagtattgacggcatttataacacattaggagattgcgcccgcatttcaaaatgggcaggaggtattggtctacatattcataatgttagagcatcgggaactcatattcgaggaacgaatggtacaagcaatggtattattcctatgcttaaagtttttaataacactgctagatatgttgatcagggcggtggtaaacgaaatggttcgtttgcaatctatctagaaccatggcacgcagatattgaagattttctgtcacttaaaaaaaatcatggcgatgaagaaatgcgcgcacgagacttattttatgctgtttggataccagatttatttatgagacgtgttaaaacaaacaaaaaatggacgttgttgtgtcctgatgaatgtcctggtctcgctgatgtttatggagacgaattcgataaattatatgaatcttatgaaaaggcgaacaaaggtaaatttcaaattaatgcacgtgatttgtggtttaaaattctcgattcacagattgaaaccggtactccgtatatcttatttaaagatgcgtgtaacaaaaaatccaatcagaaaaatttgggaacaattaaaagcagtaatctttgtactgaaattgtcgaatacagtgataaaaatgaaactgctgtttgcaatttggcgtctattggtcttgcaaaatttgttgaatcgccaaaatacactgttgaaacacttaaatcttatgataaatcaaataaaatttattcaaaaacaaaatgcaatttctgcaaaaaaa

SEQ ID NO: 212106 - DNA, 833 bp, Unknown
  Bacterial polypeptide expressing nucleotide sequence isolated from the Sargasso Sea
actttcattaccgacgccaattatgtctggtgttaggacccctactcgtcagttcagttcatgcgttttaattgaggcaggcgatagcttagattcaatcaatgcaaccgcaagcgcaattgttaagtacgtgagccaacgtgccggtattggagtgaaccctgggcgtattcgtgcactaggtagcccaattcgcggtggtgaagcattccacactggatgcattcctttctacaagtactttcaaacggcagttaaaagctgttcgcaaggcggtgttcgcggcggtgcggcaaccttgttctatccactatggcacatggaagttgaatcgctgttagtacttaaaaacaatcgtggtgttgaagagaaccgcgttcgccacctcgactacggtgtgcagtttaacaagcttatgtatcaacgcatgatgaaggacggctacatttcattatttagcccgtccgatgtgcctggtttgtacgatgccttcttcgccgatcaagataagtttgaagagctgtacgttaaatacgaaaatgacgacagcattcgcaagaaacaaattaaagccatggaattgttcagcttgtttatgcaagagcgagcaagtactggccgtatttatcttcaaaatgtggaccactgtaatactcacagcccgttcaaccctgaagtagcgccggtacgtcaaagtaacctatgtcttgaaatagcgcttccaactaagccgcttcaacacgtaaatgatgaagaaggcgaaattgcgttatgtacactgtctgcatttaatttaggggctattaagtcattagacgaattgaagagctagc

SEQ ID NO: 212107 - DNA, 850 bp, Unknown
  Bacterial polypeptide expressing nucleotide sequence isolated from the Sargasso Sea
gctgaaggatcgctgtggagccacggcatccacgtatccacaggtttttgttaacggttgtcacgtaggcgactattttgctttcgaagaattcatagaagaagccgaaccgatacttttaccaaccatgaacagattcactatatttcctatagaatatgagcacctatggtccttatataaaaaggcgcaaatgtcaaattggaccgccgaagaagtagatgtgtcgtctgacatggaagattggaaatcattgagcgaaaatgaacaacattttattaagtacattttagcattttttgctggttcggatggtattgttttcgaaaatataaataataattttgctgacgaggttcaaattactgaagctcgttctttctacgcatatcaatgccacaacgagatggtacacggagaaacatatagtaaacttattgataaatatatacgtgatagtaccgagaagaaacgtctttttgaagctatcacgttgattgatcctattaagaaaaaagccgaatgggctatgaagtggtttgatacttctagaccattcgctgaacgtctcctggcgttcgcgtgtgttgaaggtatattcttttcgggtagtttctgtgcaattttctggctcaagaaacgtggtttaatgcctggactttgctttagtaacgaactaattagtcgtgatgaaggtttgcatttagaattcgcgatagaattattcaaaatgctgaaaaataaacctagccaagatatcgtgtatgagatagttcgcgaggcagtggaaattgaaaaatcgttcataatcgaagctttaccgtgcagcctaattggtatgaattccgat

SEQ ID NO: 212108 - DNA, 802 bp, Unknown
  Bacterial polypeptide expressing nucleotide sequence isolated from the Sargasso Sea
catcgaaggtatttttaatactatcaaagattgctcgctaatatctaaaactgctggcggtattggaatgcatgctcacaacattagaggaagtggaagtagaataaaatcaacaaatggtaaatctaatggtcttattccatttcttaaaatttttaatgaaactgctaaatcagttgatcaaggtggaggaaaaagaaaaggttctttcgcagtttacttagagccttggcatgctgacattgagaaatttctagaacttagaaaaaatacaggtgccgaagaatttagagcgagagatttgttttatgctttatggataccagatttattcatgaaaagagtagaaaatgatgaagaatggacacttatgagtgaacatgaatgtcctggtctttctgatgtgtatggtaacgagtttgaaaaactttacactaagtatgaaaatgaaatgaagcatttagaaaaaattaaagcaagagatctaatgtctaaaattatagaagcgcagatagaaacaggacaaccttatatgctttataaggactctattaacaataagtccaaccaaaaaaacatcggtgtcattaaatcttcaaacctgtgtgcagaaatagttgaatattcagataagaatgaaacgtctgtatgtaacttggcttctatagctctgccaaaatttgtaaaaaaatcagataaaaaattaatatatgattatgatggtctctatgaaacagcaaaattagctacgaaaaacttagatgaagtaattgatattaatttctacccaactgataaaact

SEQ ID NO: 212109 - DNA, 307 bp, Unknown
  Bacterial polypeptide expressing nucleotide sequence isolated from the Sargasso Sea
ttaaaaattactgaaataataacagaatcagtagagattgaaaaagaatttataacagagtcccttccttgtcgtcttattggcatgaattcagttttaatgtctcaatatatagaatttgttgctgaccgtttatctctacaattaggatgtgataaaatatacaatgttacaaatccatttgattttatggaaatgataagtctagaacaaaaaacaaatttcttcgaatcaagagtatctgaatattcattggcagaaatgtctggaaaagaagatgcgtttaatgaagaaatagatttttaat

SEQ ID NO: 212110 - DNA, 822 bp, Unknown
  Bacterial polypeptide expressing nucleotide sequence isolated from the Sargasso Sea
aaagaagaattaagagctagagatttattttatgcaatgtggatacctgatctgtttatgaaaagagttgaatctaatgaggattggtctttattttcaccagatgaagctaaggaccttcatgaaacgtatggtgaagaatttgaaaaactttatgagaaatttgaaaaggaaggaaaagcgagaaaaactgttaaggctcaagacctttggtttgaaattttagaagcccaaatcgaaactggaaatccttacatattatataaagatgctgcaaataaaaagtctaaccaaaagaaccttggaacgataaagtcttcaaatttatgtactgaaattatagaatatacatcacctgatgaggtggcagtatgtaatcttgcttcaatcgctttaaacaagtttgttaaagatgatcttacttatgaccatcagaaactttatgaaatcacaaaagtgataactaaaaatttaaataaagttatagatgtaaattattatccagttgaagaagctagaaactcaaatttaagacatagacctattggtattggagttcaaggtatggctgatacatttatattgatgaggcatgcatttgactcccccgaagctaaaaaattaaattctgaaatttttgagacaatttattatgcttcgatggaggcttcaatggaaattgcaaaaaaggaaggtccttataaaacatatgaagggtcgcctgtttctaaaggaattttccaatttgatatgtggggcgtagcaccaagttcaaaaagatggaattggacaaaactaaagagagaagttaaaaagccatgg

SEQ ID NO: 212111 - DNA, 841 bp, Unknown
  Bacterial polypeptide expressing nucleotide sequence isolated from the Sargasso Sea
gaagtctttctctgatacaatgaaggatctacacacatacgttaatccaataactggtaaaaaggctccgctattatcagatgaagtctttaaagtgattaagaaaaatgcagagttacttgactcaaaaatcatttacaatagagatttcggatatgattactttggttttaaaactcttgaaagatcataccttttaaaaattaatggaaatatagttgagagaccacagcatatgttgatgagagtctcagtaggtattcaccttgatgatattgatgctgtaattgatacctacgagttaatgtcaaaaaaatattttactcatgcaactccaactttatttaatgcaggtacacccaagccacaaatgtcctcatgtttcttactaactatgcaagatgatagtattgatggaatctatgatacactaaaacaaacagctaaaatttcacaatctgctggaggaattggtctttcaattcataatataagatctacaggatcatacatatctggaacaaatggtacatcaaatggtatcgttccaatgcttagagtttttaatgatactgcaagatatgtagatcaggggggtggtaaaagaaaaggttcttttgcaatttatattgaaccatggcactctgatatttatgattttctagatctaaagaaaaatcatggtaaagaggaaatgagagcaagggatttattttatgctatgtggattcctgatctattcatgaaaagagttgaaaataatgaagagtggactttaatgtgtccaaacgagtgtcctggattgtatgattgtcacggagatgagtttgataagctttat

SEQ ID NO: 212112 - DNA, 819 bp, Unknown
  Bacterial polypeptide expressing nucleotide sequence isolated from the Sargasso Sea
gttttttattagtatggaagatgactcgatagaaggaatattcaacacaattaaggactgtgctctcatctctaaaactgcaggtgggattggaatgcatgcacataatatacgaggaagtggtagtagaataaaatctactaatggtaaatcaaatggcctaatcccgttcttaaaaatatttaatgaaacagcaaaatcagttgaccaaggtggaggtaaaagaaaaggctcttttgctgtttatctcgagccttggcatgctgatatagaacagtttttagaattaagaaaaaacactggggctgaagaatttagagcaagagatttattttacgcgctttggattcctgatttgtttatgaaaagagttgaggaagatggagattggacgctaatgagtgaacatgaatgtccaggtctgtctgacagctatggtgaagaattcgtaagtttgtatgaaaaatatgaaaaagaaatgccaaatttagaaaaaattaaggctagagaattaatgtcaaaaattattgaagcgcaaattgaaactggtcaaccatatatgctttataaagactccattaataataaatcaaatcaaaaaaatataggtgtaattaaatcttcaaatttgtgtgcagaaatagttgaatactctgataaatcagaaacctcagtatgtaatctagcatctattgcattacctaaatttgttaaaagatcaaaaaacaaaaaaaataaggagtatgactttaaagccctttataaaacttcaaagttagctacaaaaaacttggatgaggttatagatataaactttta

SEQ ID NO: 212113 - DNA, 346 bp, Unknown
  Bacterial polypeptide expressing nucleotide sequence isolated from the Sargasso Sea
tatgcagcaagaaccccttttacaagaaaacaaagacagatttgtaattttcccaattaagcatcatgatatatgggaatggtataaaaaatgtgaagcaagcttttggacagcagaagaaattgatttgcatcaagatttaaatgactggagcacaaaactaaatgacgatgaaagatattttatcaaacatatactagccttctttgctgcatctgatggtattgtaaatgagaacttagcagaaaattttgtaaatgaagttcaatattctgaagcaaaatttttctatggttttcagattatgatggagaatattcattcagaaacatattcacttttgatt

SEQ ID NO: 212114 - DNA, 815 bp, Unknown
  Bacterial polypeptide expressing nucleotide sequence isolated from the Sargasso Sea
aagggttactaaaaatttaaacaaagttattgatagaaattattatcctgtaaaagaggcagaaaattccaactttagacatagacctataggtctcggggttcaaggtttagcagatgcctttattgagttaagaatgccttttacctctgaaaaagcaaaagaattgaatcaagatatttttgaaactttatattttgctgcacttcaagcttctgttgaagagtcaaaaaaagatggaccgtataaaacctataaaggttctccaatatcaaagggagagtttcagcataacatgtggggggttaaagatgaagagttaagtggaagatgggattgggctaaactaagaaaggatgttctaaaacatggtgtaagaaattctcttttggtagcgccaatgccaacagcaagtacctcacaaattctaggtaataatgaatgttttgagccttatacttctaatctctatactagaagagtattgtctggtgagtttattatcgttaataagcatttgcttaaagatttagttgagctaggattatggaatgaagatatgaagcatgagcttatgagatctaatggctcaatccaggatattaaacagatcccagatgaattaaaagaattatacaaaactgtttgggagatgagtatgaaagatattatagatatggccagacacagaggttattttattgatcaatctcaatctttaaacttatttatggaaggtgctacaatgtcaaaattaacttctatgcatttttatggttggaaatcaggtcttaaaacaggaatgtattatttaa

SEQ ID NO: 212115 - DNA, 813 bp, Unknown
  Bacterial polypeptide expressing nucleotide sequence isolated from the Sargasso Sea
ttgtgcattaatttctaaaactgcaggcggaataggtatgcatgcgcacaatattagagggagtggaagtagaataaagtcaacaaatggaaaatccaatggattaataccattccttaaaatttttaacgaaacagcaaaatctgttgatcagggtggtggaaaaaggaagggatcttttgctatctatttagagccttggcattcagatatagagaaatttttagaacttagaaaaaatacaggagcagaggagtttagagctagagatttattctatgctttgtggataccagacttatttatgaaaagagtggaaaatgatgaagattggacattaatgagcgaacatgagtgtccaggcctttctaatacatatggagaaaaatttgaaaaactatacgaaaaatatgaaaaggaatttccaaatttagaaaaaatcaaagctagagcattaatgtcaaagattattgaagcacaaatagaaacagggcagccttacatgttgtacaaagatgctattaatattaaatcaaatcaaaaaaatattggcgttataaaatcatccaacctatgtgcagaaattgttgaatattctgataataatgagacatcagtttgtaatttagcttcaatcgcccttcctcaatttatcaaaaaatcaaataataaaaaggagtatgattataaaaaattatatgaaactgcaaaacttgcaacaaaaaacttagaccatgttattgatatcattttctatccaacaaataaaacagagacatctaataataaacatagacctatcggccttggtat

SEQ ID NO: 212116 - DNA, 897 bp, Unknown
  Bacterial polypeptide expressing nucleotide sequence isolated from the Sargasso Sea
tatgagaaagaaggcaaggggaagaaaaacaatgaaagctcaagatttgtggtttaagatattagagtctcaaattgaaacaggaacgccttacatgctttataaggattctgccaatgcaaaatccaatcaacaaaatttgggcacaataaaatcctcaaatttatgtactgaaataattgaatatactgccccagatgaagtagcggtatgtaatcttgcttctttagcattgccaaaatatgtaactaacgaaaaaacatttgatcacgataaattatttgaggttacttatcaggctacagttaatttaaatcgaattatagatgagaattattaccctgtagaagaggcgagaaattcaaatatgcgccatagaccaattggtcttggtgttcaaggcttggcagatgcttttattttgatgggctttccttttgagtcagaggatgccagaaaattaaatagtgagatttttgaaaccatatattatgcatcaatgatggcatcaaaagacttatcaaaggaatttggtccatatgaaacctatgagggttctcctgtctcaaatggagcttttcaatttgacatgtggggtgttactcccagtaatcgttgggagtgggatttattgaaaaaagaagtgaaaacacatggtgttagaaactctttattattggctccaatgccaacagcatcaactgctcaaatattaggcaataacgagtgttttgaaccatacacttctaatgtttacacaaggcgagttttgtctggagaatttatcattgttaacaagcatttacttaaagatcttgtcaaagaagggctctggaatgatgaaatgcgtcaaagaattatggctgaaaatggttcgattcaaaatatagagagtgt

SEQ ID NO: 212117 - DNA, 832 bp, Unknown
  Bacterial polypeptide expressing nucleotide sequence isolated from the Sargasso Sea
aaagatttcaatgaaaagatgaatgataatgagagatattttattgaaaatgttctcgcattctttgccgcaagtgatggaattgtcaatgaaaatttaggtgaaagattttacaatgaaatacaaattcaagaagcaaagtttttttacggtttccagattgcggttgaaaatattcactcagaaacctattcccttcttattgaaacatatgtaaaagataatgcgaaaaaggaaaaactattcaatgcgattgacaccatcccaagtgtcaaaaagaaagcagattgggctatcaaatggatcgacgataaagattcgagtcttggaacaagaataattgctttcgcagctgttgagggtatcttcttttcaggttcattttgctctattttctggcttaagaaaagagggctaatgcctggattgtgtcatagcaatgaattgattagcagggatgagggacttcatactgaatttgcggttcttatgtattcaatgttgaaacataaaccatccaaggaaacagtttatgaaattattaaagaagccgttgaattagaaaaagaatttattactgaatcacttccttgtaatttaattggaatgaatatggttcttatgaaacaatatattgaatatatcgcagatcgattactattgatgcttggtcttgaaaaagtatatcataaagaaaatccctttgaatggatggaacttatttctgttcagggaaaaacaaatttctttgaaaaaagagttggagaatatgcgaatatcgcaaaatcaaatcaaaatgataatgtatttgaacttgatgaagacttttaat

SEQ ID NO: 212118 - DNA, 757 bp, Unknown
  Bacterial polypeptide expressing nucleotide sequence isolated from the Sargasso Sea
ttttttggccttaaaacactagaacgtgcttatttgataaaagtagatggtaaaattgtggagcgtcctcaacatatgattatgagagtatgtttagcaattcatagtgattctattaaagaaacaatcaagagttataaactaatgtcagatggtatttttactcatgctacaccaactctttttaatatgggaacaaatttacaacaagcatcctcatgttttcttttgactatggttgaagatagtattgatggaatttatgaaactatgaaacgatgtgctttgattagtaaatccgcaggaggtattggatgttctattcatactattagagcaaagggaagtaaaattaaaggaactaatggtgttagtgatggtattattcctatgcttaaagtattcaatgatacagcctgttacgttaatcaaggtggtcgtcgtaatggttcctttgctatgtatgtagaaccatggcatgcagatattgaggatttcttgatgcttcgtcgtaatacaggaacggaggaaatgagagctcgtgatttgttttatgctttatgggttcctgatctttttatgaaacgtgttcaaactgatggtgattggacacttatgtgtcctaacgaatgccctaaattatgtgatacttatggtgatgaatttgaaaaactttacattcagtacgaagccgaaggacgtggtaaaaagacggtaaaaaaccagaagatctggaaaataattttagatagtcaaa

SEQ ID NO: 212119 - DNA, 682 bp, Unknown
  Bacterial polypeptide expressing nucleotide sequence isolated from the Sargasso Sea
ccagattgctatagaaaatatacattcagaaatgtattcactcttaatagatacttatataaaatccccagaagaaaaagaacatctttttaatgccattgagactataccttcagtgagtaaaaaggcaaagtgggcaattaaatggataaatgatgatagttcttcttttgctaaaagagttgtagcatttgctatagttgaaggaatatttttttcaggtagtttttgtgctatattttggttaaaaaaaagaggtttaatgcctggtttaacatcaagtaatgaattaataagtagagatgaagggatgcatacagattttgcagttgaaatttataaacttataaataataaactagattttgatactattaaggaaattgtacaagaagcagttcatatcgaaaaagaatttattaatgaatcaataccctgtaaattaataggaatgaattctgttcttatgtctgaatatattgaatttgttgccgatagattacttttacaattaggatataataaaatatataatgcaaagaacccatttgattttatggaaatgatttcactagaaggtaaaactaattttttcgaaaaaagagtaatggattattcaaaagcaaatataggtacatcaaatgaaaataaacatagttttagtttagatgccgcattttag

SEQ ID NO: 212120 - DNA, 949 bp, Unknown
  Bacterial polypeptide expressing nucleotide sequence isolated from the Sargasso Sea
tttagaagcgagaaaaaatcatggtgatgaagaattaaaagcccgagatttattttatgctctttggatacctgattattttatgaaatgtgtacatgaagatggaatgtggcatttattttgtcctgataaaagtcctggattatctgatgttgtaggaagtgattttgtagatttatataaaaaatatgttaatgataataattttgtaaagaagctgaaagcaagagaattatggtttaaaattttagatagtcaaatggaaacaggtacaccatatattttatataaagatcatgcgaatttaaaaagcaatcaacaaaatttaggtattattaaaagtagtaatttatgttgtgaaattattgaatattcatcatcaaccgaaactgctgtatgtaatttagctagtatagcattatcaaaatttgtaaaagatgataaatcatttgattatgatagtttacatgaagttagtaaacaggttacagttaatttgaataaattaattgatgtaaattattatccaaatgataagacacgaaggtctaatatgttacacagacctattggaattggggtgcaaggtttagccgatgtatttatgttgatggatttatcatttacgtcagatgaaggtaaaacattaaataagtatatatttgaaactatttatcatgcgtcactggaagcttctaatgaattagcaattactcgtaaaaagacattgcaacaattacatgatgtattacttccaaaagatgatagtttcaaattaaagtgtggattaacagaattacacaaagagttatgtaataatattagcgatgaagagttaatgagtaaacttaaactattaaaagattgtgatattaacgaatataaaccaatatacaatgaattattaaatttatcatacggacatgccggttcatatagtacttttaca

SEQ ID NO: 212121 - DNA, 808 bp, Unknown
  Bacterial polypeptide expressing nucleotide sequence isolated from the Sargasso Sea
gtctaacttacataaaaacactaaaaaatcattttcttcaacgatgaaggatctttttgaatacgttaatcccagaactggaaaaaaagcacctctgttagcagatgaggtatatgaggtcataaagaaaaatgctgagaaaattgattcaaacataatttataatagagattatggatacgatttttttgggtttaaaacattagaaagatcataccttcttaaattaaatggtaaaatagctgagcgtcctcagcacatgctaatgagagtttctattggtattcaccttgatgacctagatgctgcttttgaaacatatgaactaatgtctaaaaagtattttactcatgcaacccctacattatttaatgcaggaacgccaaaacctcaaatgtcttcttgttttttacttaccatgaaacaagatagtatagatggtatttatgatactcttaaacaaaccgcaaaaatttctcaatcagccggaggaattggtctttctattcataatatcagagcaacgggttcatacatcgcaggaacaaatggaacttcaaatggaattgtcccaatgctaagagtttttaatgatactgccagatatgttgaccagggcggcggaaaaagaaaaggctcgtttgcaatttatgttgagccttggcacgcagatatttttgatttcttggagttaaagaaaaatcatggcaaagaagaaatgagagccagagatttattttatgccatgtggactcctgatctttttatgaaacgagttgaagaaaatggtcaatggactctaatgtgt

SEQ ID NO: 212122 - DNA, 598 bp, Unknown
  Bacterial polypeptide expressing nucleotide sequence isolated from the Sargasso Sea
aggtgggcgtagaaatggtagttttgcaatttatctttcgcctgatcatccggatatagaggattggttggatttaaagaaaaataccggcgatgaaaatgcccgagcgcgcgatttattttatggtctctgggtccctgatttatttatggaaagagttcacgcaaatcaagaatggtccttgttttgtccatctatttgtcctaatctagataaagtatatggtaaagactatgaatccctctatctagaatatgaaagcaatggtatggccaacaaaaaagtaaatgcccgagaactttggtttaaaatattagacgcgcaaatggaaacgggtactccctatttgttatttaaagatgctgctaatcttaaatctaatcaacaaaatattggtaccatacgctctagtaatctttgtgcagaaattatagaatatagcgataaaaaggaaaccgctgtttgtaatctggctagcattgccctatcacaatttgtagaacataaaaaagttccacaaccaactagcattaaagtgtatagtaaaacaaaatgcaacttttgtaaaatggcaaaagcattattacgggaatttcat

SEQ ID NO: 212123 - DNA, 334 bp, Unknown
  Bacterial polypeptide expressing nucleotide sequence isolated from the Sargasso Sea
caactcccaaaagaaactgtagttgaaataataaaggatgcagttgaaatggaaaaagagtttgtaacagatgctcttcctgttaagctaattgggatgaatgctgaacttatgtgtcaatatattgagtttgtcgcagatagattattggtagaacttgaatgctccagagtttataattcaaaaaatccttttgattttatggatatgatttctcttcaaggaaaaaccaacttttttgaaaaaagagtagccgaatatcaaaaagctggtgttctaaaaaaagacgaagaaaatgataaaccaaaattttcactagacgaagatttttaat

SEQ ID NO: 212124 - DNA, 983 bp, Unknown
  Bacterial polypeptide expressing nucleotide sequence isolated from the Sargasso Sea
tactttgcttttacaactttaataagagcatatttattaaaatttgagaataaaactattgaacgtcctcaagatttatggatgagagtagcattaacagtctcaggagataattttaatattgataaagtaaaagaaacctatgatagtttatcaaatggatattatactcacgcaactccaactttattcaatagtggtctaaaaatgcagcaattatcttcttgttttttaataggaatggaagatgactctattgagggtatctttaatacaattaaagactgtgctctcatttcaaagacagctggtggtatagggatgcatgcacataatatcagaggtagtggaagtagaattaaatcaacaaatggaaaatcaaatggactaataccatttttaaaaatatttaatgaaacagcaaaatctgtagatcaaggaggtggaaaaaggaaaggttcttttgcagtatatttggagccttggcatgctgatatagaaaaatttttagaattaagaaagaatactggtgctgaagaatttagagcacgagatcttttttatgctctatggataccagatttatttatgcaaagagttgaagatgataaagactggacattaatgagtgaacatgaatgtcctggactttctgaaaaatatggtgaggaatttgttaagttgtatgaaaaatatgaaaaagatatgcctcatttagaaaaaattaatgcaagatctctaatgtcaaaaattattgaagcacaaattgaaactgggcaaccatatatgctttacaaagactcaataaataataaatcaaatcaaaaaaatattggtgttataaaatcatctaacttgtgtgctgaaattgttgaatattctgataaatcagaaacatcagtatgcaatctagcttctattgcgctaccaaagtttattaaaaaatctaataaagctaaaacaaaagaatacgactataaagc

SEQ ID NO: 212125 - DNA, 853 bp, Unknown
  Bacterial polypeptide expressing nucleotide sequence isolated from the Sargasso Sea
aagtatgaagaggagggtctagctaccgctaccgtacccgcagctgatgtttggaaagccattctcaaatctcaaaccgagactggaaccccttatatgctttacaaggactcatgcaaccgaaagtctaaccagaaaaatcttggtacgatcaagagttctaacctttgcacagaaattattgaatacactgatgctgacgaaacgtctgtgtgcaatctcgcttctattgcgctccccaaatatgtgaataaggaactcaaaacctttgattttgataagcttcatgaagtcacaaagattgtcacccgcaacttaaatcgtgtcatcgatcgtaacttttacccagttgagactgctaagcgctctaatatgagacaccgccccattggtctaggtgttcagggtctcgcggatgtattcatcatgtgtggtctccccttcgattgcgacgattcacgtacgctgaacgcacatatctttgagactatctatcacgcagctcttgaagccagctccgagcttgcggagacggatggatcctacgagacatttgagggctctccagcatctcaaggcattcttcagccagacatgtgggagggtaagacgaagttcagtggtcgctatgactgggatgcaatgcgagaacgtgtgaagacgaagggtcttaggaacagtcttcttctcgcacctatgcctacagcctctacagcgcagatcctaggcaacaatgagtgctttgaaccctacacgaccaacatttacctgaggcgcacactcgccggtgaatttgtggttgtaaacaatcatctcgtaaatgccctaaaagaacgcggtctctgtcaaaaga

SEQ ID NO: 212126 - DNA, 865 bp, Unknown
  Bacterial polypeptide expressing nucleotide sequence isolated from the Sargasso Sea
aaaacgtttgatttcgaaaagcttcatgcagtcacaaaaactgtcacaaagaacctcaatcgtgtcatcgaccgcaacttttacccggttgaaacggcgcgtcgctccaacatgaagcatcgccctatcggtctgggtgttcagggtctcgcggatgtatttattctgtgtggtcttcccttcgattgtgaggattcacgtacactcaacgcgcacatctttgagactatgtaccacgcagctctcgaggcatcgtccgaactcgcagaagttgatggtacgtacgagagtttcgagggttctccagcctctcaaggtatccttcaaccggatatgtgggagggagtcacgaagtttagtggacggtacgattgggatgcaatgcgtgagcgcgtgaagacgaagggtcttcgtaactctcttctgatggcacccatgcccacggcttctacggcacagattctgggtaataacgagtgcttcgagccatacacaacaaatatctatctccgacgaaccctagccggtgaatttgttgtggtcaataagcacctcgtcgaggacctgaaacgcgtgggtctgtggtctaaagagatgaaggacctcatggtgaaggcgggtgggtctatccaaaacatcgtagatatccccgatgacatcaagaaactgtacaagaccgtgtgggaaatcagtcagaaatgcatcatcgacatggctactgaccgtggtagattcatagaccagagtcagtcaatgaacctcttcatggagagtccgaccctttcgaagctgagctccatgcacatgtacgcttggaaggctgggctcaaaacggggatgtattatttgagatctaaggcaaaag

SEQ ID NO: 212127 - DNA, 409 bp, Unknown
  Bacterial polypeptide expressing nucleotide sequence isolated from the Sargasso Sea
tctcctccccggtttatgttttagtaatgaacttataagcagggacgaaggattacatttagaatttgcaattgaattattcaaaatgttaaagtataaggctcaaccaaacaccgtttatgaaattgtaaaagacgcagtctctatagaaaaatcttttataacagaagcacttccatgcagtcttattggtatgaattccgataaaatgtctgaatacatagaatatgtcgcagatcgattattaaaacaaagtggtcacgataaaatctggaacacaaaaaatccctttgattttatggagaatatatcacttgatggtaaaactaattttttcgaaaaaagagttggtgattatggtaaaatggatgaagattcaacttctattgaatttgacgaagaattttaa

SEQ ID NO: 212128 - DNA, 820 bp, Unknown
  Bacterial polypeptide expressing nucleotide sequence isolated from the Sargasso Sea
aagatttcttggaattacgaaaaaaaccatggagacgaggaaatgcgagcgcgtgatttattctatgccctatggattcctgatctgttcatgaaaaaagtggaacaagatgactattggtatttgatgtgtccaaatatgtgtcccggattatccgattcttacggagaagaatttgagaagttgtataatacatatgtaaatgaaaataaatattcgaaacgaatcaaagctcgggagctgtggtttcaagtattggacagtcaaatggaaactggaactccttacatgctttataaagattcgatcaataagaaatcaaatcagaagaatattggcatcattaaatcttcaaatctatgctgcgaaattacggaatatagtgatgaaaatgagactgccgtgtgcaatctagcgagcattgcattgcctcagtgtgtgaaacaaaaaaacaagttggagaaaaataaacttctgacgatttattcgaagaccaattgtaaatattgcaatatggcaaaagcattgttgaaagagttcaatcagtcttactccgaaatcaatttagatgacaatgagaaacgaaagagtttttacaaagagaaaagtaatcaagaaggaatagaaattaatagcgtaccgcaattgtggaatggcaatcattacattggtggatacgacaaattgaaaaaatatctcttttatcattttgattttgagcatttacaacaagttacagaagtcataaccgaaaatctgaataatatcattgataagaatttctatcctacacaaaagacatttataagcaatacaactc

SEQ ID NO: 212129 - DNA, 320 bp, Unknown
  Bacterial polypeptide expressing nucleotide sequence isolated from the Sargasso Sea
aatgcaaaataaagagcaaaatctagaaccaatactacaagagaacgctgacagattcgtactatttcctattgaacatgatgacatatggcagttttataaaaaagctgaagccagtttttggacggctgaagagattgatttaagtcaagacctaaaagattggggtaatcttaatgatggagaaagacattttataaaacatgttttagcattttttgccgcaagtgatggaattgttaatgaaaaccttgctgaacattttgtttctgacgttcaatatactgaagcaaagtttttttatggattccaaattgcta

SEQ ID NO: 212130 - DNA, 926 bp, Unknown
  Bacterial polypeptide expressing nucleotide sequence isolated from the Sargasso Sea
gtttccgatcaagcatcggaaggtgtgggagatgtataagaaggcggaggcgagcttttggactgcggaggaagtggatctgacgtacgattatagggattggatcacgctcaacgataacgaacaacacttcatatcgcacgtgttggcgtttttcgcggcgagcgacggcatcgtgttggagaatttgtgctctcgtttcatgacggacgtgcaattgcccgaggcgagatctttctatgggtttcagttggcgatcgagaacattcacagcgagatgtactcgttgcttctcgacacgtacatcaaggactcggcgaagaagaaggatttgtttcgcgccattcacacggtgcccaccgtggcgaagaaggctgattgggcaattcgatggatcggcagcgacgcgagcttcgccgaacgtctcgtcgggttcgcgtgcgtggaggggattttctttagcggttcattctgtgctatcttctggctgaaaaagcgaggattgatgcgcggtttgacgttttccaacgagctcatcagccgcgatgaaggattacactgcgactttgcgtgtttgctgtacggcatgctggagaacccgcttcccgagaacctactgcatgagatcgtcggtgacgcggtcaagattgagaaggagttcgtgtgcgatgcgctgagttgtgccctcgtcggcatgaacgccaacttgatgagcacgtacattgaattcgtcgccgaccgactcctcgtgcagctcggagcgtccaagctttaccacgcggtgaacccgttcgactggatggaacttatttctctccagggtaaggctaacttcttcgagcatcgcgtcgatcagtatcagaaggctggcgtcatgcacaccgccgaggataaccacgcctttcgcacggattgcgatttttaag

SEQ ID NO: 212131 - DNA, 804 bp, Unknown
  Bacterial polypeptide expressing nucleotide sequence isolated from the Sargasso Sea
aatttctggactgcagaagaattagatttaagcacagatttaaatgattgggtaaagttaaatgataatgaaaaatactttattaagaatattctagccttcttcgctgcttctgatggcatagttaatgaaaatttagtagaaagattttgtcaagaagttcaaatccttgaagcaaagttcttttatggttttcaaatagcgatggaaaatattcatagtgaaacttattcattactcattgatacatatattaaagatgtacaagaaaaaacaaagctcctaaatgccgtagatcatatcccaagcattaaaaagaaagccgattgggctttaaagtggattaatgatgatgtcgcccctttctcacatcgcgtagtaggatttgctgctgttgaaggaatattcttttcgggtgctttctgctcaatattctggttaaagaagagagggttaatgcctggtttatgtcatagcaatgaattaattagtagagatgaagggttacatacagagttcgctgtattaatgtatcaaaatctagtagataaacctaagccagatataattaaagaaattattattaatgcggtaagtattgagaaagaatttattactgaatccttatcttgcgaattaataggtatgaatgctgaattaatgaatcaatatattcactatgttgcagatagattattacttatgtttggtttagaaaaagtttatcatagtgaaaatccttttgattggatggaaatgatatctgttcagggtaaaacaaatttctttgaaaagcgagtagga

SEQ ID NO: 212132 - DNA, 848 bp, Unknown
  Bacterial polypeptide expressing nucleotide sequence isolated from the Sargasso Sea
tatggataaaaaggaattaaataaagaaaaagtaaatgaaaaaatagatttaaataaagatctcgatcccaatttatctgtcgaagaacctattcttaaagaaaacccaaatagatttgttttattcccaataaaacattctgatatttgggaaatgtataaaaaacaagaagctagcttttggacggcagaggaattagatttatctccagatttagctgattgggataataaattaaatgatgatgagcgctttttcataaaacatgtactagctttttttgctgcatctgatggaattgtcaatgaaaatttagcagaaaattttttaagtgaagttcagtatactgaagctaaattcttttatggatttcaggtaatgatggaaaatattcattcagaaacatactctcttttgattgacacttatattaaagaaactaaagaaaaaaattatttatttaatgcaattgaaacttttgagcctgttaaagaaaaagcacaatgggcactaaagtggattgataatggatcttttgcacaacgtttaattgcttttgcagctgtggaaggtattttcttttctggttctttttgttctattttttggttaaaaaaacgaggattaatgcctgggctaactttttctaatgaattaatttctcgagatgaaggtctacattgtgattttgcatgtatgttatataataaccatttagttaatcaattagaaaaatctgaggttcaaactattattgaacaagcagttgctattgaaaaggaatttattacagaggcactacctgttagactgataggtatgaattcagatcttatgagccaatata

SEQ ID NO: 212133 - DNA, 445 bp, Unknown
  Bacterial polypeptide expressing nucleotide sequence isolated from the Sargasso Sea
ttaaagaaacgtggattaatgccaggtcttacatttagtaacgaacttatttctcgcgatgagggattacatactgaatttgccactgtaatttatagtatgcttaccgagaaattagaaaaatctagacttcaacagattataactgatgctgtagaaattgaaaaggaattcataactgagagtattccatgtagactaatcggaatgaatgctgagttaatgagtaaatatattgaatttgtagcagaccgtcttctcgtacaattgggaaatgaaaaacactataactcagaaaatccattccagtttatggaaatgatttcaatggaaggaaaaacaaacttctttgaaaagagagtagctgattattcaaaggcaaatgtttccgccaacaatacaggtgccgataatgacctttcattcgataatgaagatttctaat

SEQ ID NO: 212134 - DNA, 886 bp, Unknown
  Bacterial polypeptide expressing nucleotide sequence isolated from the Sargasso Sea
aaaaggttcatttgctgtttacttggaaccttggcatgctgatatagaaaagtttttagaactcagaaaaaatacaggtgctgaagagtttagagcaagagatttattttatgctctttggatacctgacttatttatgaaaagagtagaaaatgatgaagaatggaccctgatgagtgaacatcaatgtcctggcttatcagatgtttatggtgatgaatttgaaaaactttacacaaaatatgaaaatgaaaaaaataatttagagaaaattaaagctagagatttaatgtcaaaaattattgaagctcagattgagactggacagccttacatgttatataaagactcaattaataacaaatcaaatcaaaagaatattggtgttattaagtcatcaaatttatgtgcagaaattgtagaatattctgacaaaaatgaaacttctgtttgtaacttagcatcaatagcacttccaaaatttgtaaaaaaaaccgacaagaaaatatcttatgattatgattctctctatgagactgcaaaacttgcaactaagaatttagatgaagttatagatattaatttttatccaacgaataaaaccgaaagatcaaataataaacatagaccaataggcttaggcatacaaggtttagcagatgtttattttaaactaggaattagttatgaatctgaagcagcaaaagaaataaataaactaatttttgaaactatatattttggtgcattagaggcttcatgtgaattggcaaaagaaaaaggtccttataagacatttgcaaattcacctatatcagaagggaagtttcaatttgatctttggaaggttaaaccttcttctaaatgggattgggatacccttcga

SEQ ID NO: 212135 - DNA, 925 bp, Unknown
  Bacterial polypeptide expressing nucleotide sequence isolated from the Sargasso Sea
tgtgctcaaatttcacaatctgctggtggtataggcttttctattcacgacattagggctacaggatcttatattaaaggaactaatggaacttctaacggaattgttccaatgttaagagtttttaacgataccgcaaggtatgtcgatcaaggtggtggaaagagaaaaggatcttttgcgatttatgtagagccatggcatgcagatatttttgattttttagatctgagaaaaaatcatggaaaagaagaacagcgagcaagagatttattttatgcattgtggattccagatttatttatgcagagagttgaagaaaatggcgattggactttaatgtgccctaatgaatgtccaggcttagcagatgttcatggtaaagattttgaaaagctttacaaaaaatatgaatctgatggtaaaggaagaaaatctattaaggctcaagaactttggtttaaaattttagaaagtcaaatagagactggaaccccttacatgttatataaggatgctgctaatgaaaaatcaaatcaaaagaacttaggtacgataaaatcatctaatttatgtacagaaattattgaatatactgctcctgatgaagtagccgtttgtaatttggcctctatagcactacctaaatttgtcatagatggtaattttgatcatgaaaaattatttaaagttgcatacagagtaactaaaaatttagataaagtaattgatgctaattattaccccgttgcagaagcaagaaattctaatatgagacatcgccctattggaataggtgttcaaggactagcagatacttttattcttttgagacaagcctttgaatcaccagaagccaaacaactcaataaagatatttttgaaactatttattatgcggctctaactgctccaaaagatttag

SEQ ID NO: 212136 - DNA, 649 bp, Unknown
  Bacterial polypeptide expressing nucleotide sequence isolated from the Sargasso Sea
atggaagttattaaaagatgtggtaagacagaacctatatattttgataaaataacagtgcgtattaaaaagttatgtacagataaagaattaaaaatattagatattccaatggtagttcaaaagactatatcaaatatttataataaaataaaaacttcagagttagatatattatcagcaaatatatgtgcatcattaattattcttcatccgttatatggtaatttagctgcaaagatatctataagtaatcttcataaagaaacagataatagtttttttaatacaatatcaaaattatataataatgaatcatcattaattactaaagaagtatatgatattgtgaataacaataaggaaaaattagaaactattattaattataaaaatgattataattatacattttttggtttaaaaacgttagaacgttcatatttattaaaaattaataatacaattatagaacgaccacaacatatgttattaagagtaagtttaggtattcataagaataatattgataaagtaatagaaacttataataatatgtctataggtaactttattcatgcttctccaacattatttaatagtggaactaaatttaatcaattaagttcttgttttttgttaggaactg

SEQ ID NO: 212137 - DNA, 912 bp, Unknown
  Bacterial polypeptide expressing nucleotide sequence isolated from the Sargasso Sea
tgcacgctcatacattagaggaagcggtagtagaattaaatcgacaaatggaaaatcaaatggccttataccatttcttaaaatatttaatgaaactgcaaaatcagttgatcaaggtggtggaaaaagaaaaggttcttttgctgtatatttggaaccttggcatgcagatatagaaaaatttttggaacttagaaaaaatactggagcagaagaatttagagctagggatttgttctatgctctttggataccagatctatttatgaaaagagttgaaaatgatgaagagtggactctgatgagtgagcatgagtgtcctggactttccgacgtttatggagacgattttgaaaaaatatatacaaaatatgaaaatgaaaaaaaacatttagaaaaaatcaaagctagggatttaatgtctaaaattatcgaagcacaaatagagacaggccagccctacatgctttataaggattcaattaacaataaatcaaaccaaaaaaatattggtgtcattaaatcatcaaatttatgtgcagaaattgttgagtattctgataaaaacgaaacgtctgtttgcaatctagcatctatcgcacttccaaaatttataaaaagaactgaaaaaaaagcatcatatgattatgatgcactttatgaaacagccaaattagctactaaaaacttagatgaagtcattgatattaatttttatccaactgataaaacagaaagatcaaataataaacataggccgattggattaggtatacaaggattagctgatgtttattttaagcttggcattggatatgaatccgaggaagcgaaagaaataaataaactaatttttgagactatatattttggtgctttagaagcttcatgtgaattagcaaaagaaaaagg

SEQ ID NO: 212138 - DNA, 181 bp, Unknown
  Bacterial polypeptide expressing nucleotide sequence isolated from the Sargasso Sea
tcgacttttgacacaattgggttgtactaaggaatataaatccgcaaatccttttgatttcatggaaatgatatcgcttgaaggcaaaacaaactttttcgagaaaagagtaggcgattatagtttagtttcagatacaaagagtgcggctgtttttgatatgtctaatattgaattctaa

SEQ ID NO: 212139 - DNA, 751 bp, Unknown
  Bacterial polypeptide expressing nucleotide sequence isolated from the Sargasso Sea
attataaataaagaaatttgggatttatacaaaggacatctcgccgtattttggactgttgaagaagttcaattggctaaagatgtaattgattgggaggaaaaattaactgataatgagcgtcaatttattacaaatattctagcgtttttcgctgcaagtgatgctgttgttgctgataatcttcaactcaatttttcagaagagattgacattaaagaagcaaagtatttcttccgatttcaagcaatgattgaagatatacacagtgaaatgtattctcgtatgattgaagcatttattaaagatgaaaatgagcgtgataagatttttaacgctgtattatattatccttgtattaagaaaaaatctgaatggggtaaaaaatggaccgatcctgctaaaaacaccatagctgttcgacttttggcgtttgctcttattgaaggagttcatttttcaggcgcattctgtgctattttctggcttaaaaaacgtaatttaatgccaggtctcacatttagtaatgaatttattagcagagatgagggtcttcacgctcagtttggaacatatatgtttagaaaatgtaaggtaacgccctctcaagaaaaagtttatgaaatagtacgtgaagctgtcgaaattgaaaaagaatttattactgagagtataccatgtgcgttgttgggaatgaatagcgaactcatgaaacaatatattgatttcgtcgctgatcgtcttttggttc

SEQ ID NO: 212140 - DNA, 520 bp, Unknown
  Bacterial polypeptide expressing nucleotide sequence isolated from the Sargasso Sea
atgacattgacaaatgacttcatagagccaattttaaaagagaacaaggatcgttttgttgtttttccaattaaatataatgacatatggaaaatgtacaaaaaagcagaggcaagcttttggacaactgaagaaattgatcttggacaagatcttgaagattggtctaaactcaatgataaagaaaagcattttataaaacatgttttagctttttttgctgcaagtgatggcattgttaatgaaaacttagcaacagagttttatgatgaggttcaatatcctgaagcaaggtgtttttatggttttcaaatagccatagagaatattcattctgaaacttatagcttattaattgatacctatattgatgatgaaaaggaaaaggataagctatttagggcaattgatactgttccgtgtgtgcagaaaaaagctgaatgggcacttaagtggataaataatacaaattcctttgccgaaagagtcattgcttttgctgcagttgaaggtattttct

SEQ ID NO: 212141 - DNA, 946 bp, Unknown
  Bacterial polypeptide expressing nucleotide sequence isolated from the Sargasso Sea
tactctacatttactcatgctacacctactctttttaatgcagggacaccacgaccacagcttagttcttgttttttactttccatgactgatgatagcattgatggtatctttaatacacttaaggaatgcgcgcagatatccaagtgggctggaggtattggacttcacgtccataatattagagctaagggaacgcaaatccgcggaacaaatggcactagtaatggtcttgttcctatgctaaaggtttttaatgatactgctaggtatgtagatcaaggcggtggaaaaagaaacggaagttttgctatttatttagaccccattcatcctgatgttgaagaatttttagagcttaagaaaaatcacggtgatgaggaatcaaaagcccgtgaccttttttatgccttgtggattcctgatttatttatgaaaaaggtagaaaaaaatgactcttggtgtttgttttgtcccgatcagtgtcctggttttagtgatgctgttggagataaatacgaagaattatataacaaatatgaagccgaagaaaagtatgttaaaaaaatacaggcaagagaactgtggtttaaaatcctagatagtcaaatggaaacggggacaccatatcttttatacaaggatgcgtgcaatcttaaatcgaatcagcaaaatttgggtgtgattaaatctagtaatttgtgtactgaaattgttgaatattcatccccagaagaatccgcggtttgtaatcttgctagtgtcgcgttaagtaaatttgttaaagatacaaaagaatttgattatgacaatctacacaaagttgttaaaattatgacacgaaatcttaataaaattattgatattaattattatcctacggataaaacaaagcgctctaattttttgcatcgacctattggtattggggtccaaggtttggctg

SEQ ID NO: 212142 - DNA, 999 bp, Unknown
  Bacterial polypeptide expressing nucleotide sequence isolated from the Sargasso Sea
gatagtattgatggaatctatgatacactaaaacaaacagctaaaatttcacaatctgctggaggaattggtctttcaattcataatataagatctacaggatcatacatatctggaacaaatggtacatcaaatggtattgttccaatgcttagagtttttaatgatactgcaagatatgtagatcagggtggtggaaaaagaaaaggttcttttgctatttatattgaaccatggcactctgatatttatgattttctagatctaaagaaaaatcatggtaaagaggaaatgagagcaagggacttattttatgctatgtggattcctgatctattcatgaaaagagttgaaaataatgaagagtggactttaatgtgtccaaacgagtgtcctggattatatgattgtcacggagacgagtttgataagctttatttaaaatatgaaaagcaatctaagggaagaaagtcaatcaaggcaagagagctttgggaaaagattcttgaatctcaaattgagacaggtactccatatatgctatataaagattctgcaaatagaaaatcaaatcaaaagaatcttgggactattagatcttctaacttatgtacagaaatacttgagtacacctctaaagatgaaatagcggtttgtaatcttgcatcaattgctcttccaatgtttgttgaagatggaaagtttaatcaccaaaaattatatgatgtaacagttagagttaccaaaaacttaaataaagttattgatagaaattactatcctgttaaagaagctgaaaactcaaactttagacacaggccagttggtcttggtgtgcaaggtttagctgatgcatttattctattaaggatgccatttacttctgatgaagcaaaagagcttaatcaagaaatttttgaaactatctattatgctgcacttaatgcttcagttgaggaagctaaaaaagatggagtttatgaatcatataaaggatca

SEQ ID NO: 212143 - DNA, 835 bp, Unknown
  Bacterial polypeptide expressing nucleotide sequence isolated from the Sargasso Sea
aatgttgagtttgtatctacagcccaaatatgactttaatgctttaaaagaggcagcaaaagcaacatgtattaacctaaataaaataattgatataaattactacccaataccagaggccaaattatctaacttaaaacatagacctattggtattggagtacaaggtttagctgatacttattttaagatgcgttttccatttgaaagtgacgaagcacacaatttaaataaggaaatatttgaaacaatatattttggtgctttggaagcaagtatggaactgtcaaaaaatcgcgaagagcaaatattaaattattttaaaaatgaaagtaatgatattaaagactcttcattagcttataaagcagatgatacatttaatcacttttctgaagatattgaaagagaatatgccattggatcataccatacatttattggatctccacttagtcaaggtaagttccaatttgatttgtggaataaaaaacccagcgaccgttgggattggaatgaattaagacaacagattattaaatatggagtaagaaatagtttagtgactgctttaatgccaactgcttcaacgtcgcaaattttaggtaataatgaatgttttgagcctaatactagtaatatgtatacaagacgaactcaagcaggaatatttaaaatgataaataaatatttaataaatgacttgaaaaattacggtatatggtctaatgatttaaagcaaaaaataatatatgataatggatctgttcaaaatttagatataccaaatgaattaaaagatttgtataaaatagtatgggaaattaaacaaaaa

SEQ ID NO: 212144 - DNA, 511 bp, Unknown
  Bacterial polypeptide expressing nucleotide sequence isolated from the Sargasso Sea
cgctgaacgtttaatttctttcgctgctgtagaaggtattttcttctctggctctttttgctctattttttggctcaagaaaaggggcttgatgccaggattaactttttcaaatgaattaatttctagagacgaaggattacactgtgattttgcatgtatgttatacaataaccatttggtaaataaattacctaaggaagaagtccaaaaaattattgcagatgctgtagaaattgaaaaagaatttgttaccgaatctttgccagttagattaataggaatgaatgcagatttaatgtctcagtatatagaatttgttgctgaccgtttacttgtcgagctaggtaatgataaaatttataacacttcaaatccattcgactttatggatatgattaaccttcaaggaaaaacaaacttttttgaaaaaagagttggggaataccaaaaagcaggtgttttgaatcaagaaaacaataccacttttagtttagactcggatttttaa

SEQ ID NO: 212145 - DNA, 640 bp, Unknown
  Bacterial polypeptide expressing nucleotide sequence isolated from the Sargasso Sea
atgtcaaaagtgttcaccgatccactattaactgtagacgataaccggtatgtaatgtttccaataaagaatgaagaaatatggacaatgtataaaaaagcattagaatctttttggagatgtgaagaggtcgatctagcaaaagataatgtagactgggaaagtttgacaagtaatgaacagtatttcattaaaatgatcttggcctttttcgcggcctctgatgggatagtattggagaatttagcgggacgttttatgaatgatgttcaattaagtgaagccagagcattttatggattccaaatagcaatggaaaatatccatagtgaaatgtattcattattaatagagacatatgttaaagatagagaagagaaaacaaagttgttcgaggctttggataatttcccatgtattaaaaaaaaggctgattgggcaatcaagtggataaatgataaacgagcaaattttgcaacacgactaatcgcgtttgcgtgtgtggaagggatattcttctcgggtgcgttttgttcaatcttttggttaaagaaaagagggttaatgcctggattgacgttttcgaacgaattgatttcgcgcgatgaggcattgcacactgagtttgcaattatgttat

SEQ ID NO: 212146 - DNA, 730 bp, Unknown
  Bacterial polypeptide expressing nucleotide sequence isolated from the Sargasso Sea
ggtatttttaatacaattaaagattgtgcattaatatcaaaaactgctggaggaattggtatgcacgctcacaatgttagaggaagtgggagtagaataaaatcaacaaatggaaaatctaatggtctcataccttttctaaaaatatttaatgaaacagcaaaatcagttgatcaaggtgggggaaaaagaaaaggctcctttgcagtctatttagaaccttggcattcagatatagaaaaatttttagaactaagaaagaatactggtgcagaagaatttagagccagggatttattttatgcgctttggataccagatctttttatgaaaagggttgaaaatgatgaagagtggacacttatgagtgaacatcaatgtcctggactgtctaatgtgtatggggatgagtttgaaaaactttatacaaaatacgaaaatgaacaaaagaatttagaaaaaataaaggcaagagatttaatgtcaaaaattattgaggcacaaattgaaactggtcaaccttatatgctttacaaagactcaattaataaaaaatcaaaccaaaaaaatattggcgttattaaatcatcaaatttatgtgctgaaattgttgaatattcagataaaaatgaaacttccgtttgtaatctagcctcaattgcacttcctaaatttgttaaaaaaactgatagaaagctatcttatgattatcaagctctttatgaaactg

SEQ ID NO: 212147 - DNA, 1417 bp, Unknown
  Bacterial polypeptide expressing nucleotide sequence isolated from the Sargasso Sea
tcaaaagagacaccggattatcaatatatggccgcccgtctggccgtattccatttacgtaaaaaagcctatggccagttcgagccaccaaagctgtatgaccatgtggtcaaaatggtggaagagaagcgttatgacgctcacattctggctgactacagtaaagaagaattagagcagctggatagtttcattgtccacagccgcgatttagatttcagctacgctgcggtaaaacagctcgaaggcaaatacctggtacaaaaccgggtgacaggccagatttatgaaagcgcccagttcctttatatgctggttgctgcttgtttgtttgctaattatccaaaagacacccgtttaagttacgtgcgccgtttctatgacgctgtgtctaagtttaagatttcattacctacacctattatgtctggtgtacgtaccccaacccgtcagttcagctcttgtgtgttgattgaatgtggtgacagcttagattccatcaatgccaccagcagcgctatcgtgaaatacgtcagccaacgtgctggtattggtatcaatgcgggtcgtattcgtgccttaggcagcccaatccgtaacggtgaagccttccatacaggttgtatcccgttctacaaacatttccagacggcggtaaaaagctgctctcagggtggtgttcgtggtggcgcagcaactctgttttacccgctgtggcatttggaagtagagtctttgctggttctgaagaacaatcgtggtgtggaagaaaaccgcgtacgtcacttagattacggtgtgcagtttaaccgcctgatgtacacacgcctgattaaagatgaaatgatcaccctgttcagtccttcagacgtgccaggcctgtatgatgcgttttttgaagatcaggaaaaattcgaagagctgtatgtcaaatacgaagcggacgcttctatccgtaagaagcgtattaaagccgttgaactcttcacgttatttatgcaggaacgtgccagcacaggtcgtatctacttacagaacgtcgatcactgcaacacacacagcccatttaatccaaagtttgcctctgttcgtcagagcaatctgtgtttagaaatcgcactgccaactaagccactgaatgacattaacgatccaaatggtgaaattgccctttgtactctgtccgcctttaacttaggtgctatcgagcatttagacgagctggaagaattagctgaactggctgtacgtgctttggatagtttactggattaccaggactaccctatccttgccgcttaccacgccagtatgaaccgccgtactttaggtataggcgtgattaactatgcctattatctggcgaaaaatggtgttaagtactctgacggttcagccaatggcttaacgcatcgta

SEQ ID NO: 212148 - DNA, 1169 bp, Unknown
  Bacterial polypeptide expressing nucleotide sequence isolated from the Sargasso Sea
gttcaacagtggcctaaaaatgcaacaattatcttcatgctttttaattggtatggaggaggactctattgaaggtatttttaacacaattaaagattgtgctctaatttcaaaaacagcaggaggaattggtatgcatgcccataacataagaggaagtgggagtagaataaaatctactaatggaaaatctaatggcctaattccattcttaaaaatatttaatgagactgctaaatcagttgatcaaggtggaggaaaaagaaaaggatcatttgccgtttatttagagccatggcatgctgatattgagcaatttttagaattaagaaaaaatacaggagctgaagagtttagagcaagagacttattttatgctctttggattcctgatttatttatgaaaagagtcgaagaagatggagattggaccttaatgagtgagcatgaatgtcctggtctctcagataaatttggtgatggttttgtagccctgtatgaaaaatatgaaaaagaaataccaaatttagaaaagataaaagcaagagatctaatgtctaaaatcatcgaggcacaaattgaaactggtcaaccttacatgctttataaagattccataaacaacaaatcaaaccaaaaaaatataggtgtaattaaatcttcaaatttatgcgcagagatagttgaatattccgataaatcagaaacatctgtatgtaatcttgcatctatagctcttccaaaatttgttaaaaaaacaaaaaataaaaaatctaaggaatatgattataaagctctctacaaaactgctaaattagcaacaaaaaacttggatgaagttattgatattaatttctatccaactgaaaaaactgaaacatcaaatagcaaacataggcctattggacttggtatacaaggtcttgctgatgttttttttgaacttgatatagcatacgacagtgaagaagctaaaaatataaacacactaatatttgaaacaatatattttggtgcacttgaagcatctcatgaacttgccaaagaaaaaggtatgtattcaacttttaaagggtcaccattatctgaaggaaaatttccatttgatatgtggaatacaaaaccatctgatatgtgggattgggaaacactaagagaaaaaataaaaa

SEQ ID NO: 212149 - DNA, 979 bp, Unknown
  Bacterial polypeptide expressing nucleotide sequence isolated from the Sargasso Sea
catgaaaccagaaccaattttagaagagaataaaaacaggtttgtgatttttccaatcgagcatcacgatctttgggagtggtataaaaagtgtgaggcaagtttttggactgctgaagagatagacctccaccaagatttaactgattggaaaactaaacttaatgatgatgagagatatttcataaaacatatattggctttttttgctgcatctgatgggatcgttaatgagaatcttgcagaaaattttgtgaatgaagttcaatattctgaagcaaagttcttctatggctttcaaataatgatggaaaacattcactctgaaacttactctcttttaattgatacttatgttaaagatgaaaaagagaaagatgtattgtttaaagcaattgataatttccctgcaattaaaaagaaagctgattgggcattaaagtgggtggagtctgattcttttgctgaaagattaattgcgtttgcaggtgttgaaggtatctttttttcaggtgcgttctgttccattttttggctaaagaaaagaggagtaatgccagggctaactttttcaaatgagcttatctcaagagatgaaggggtacattgtgattttgcagttcatcttcacaatgagcatattgtaaataaagtgccaaaagaaagaataagggaaatactagttgatgctcttaatattgaaagagaatttataacagaatcacttcctattagtcttataggaatgaatgctaagcttatgactcagtatctggaatttgtaaccgatagacttctggttgaatttcaatgtgaaaaagaatttaatgttaccaatccttttgattttatggatatgataaatctacaagggaaaacaaatttctttgagaagagagtttcagaatatcaaaaagcaggagttcttaataaggagaagaaggatgattctaagataagtttcgacgacgaattttaa

SEQ ID NO: 212150 - DNA, 2476 bp, Unknown
  Bacterial polypeptide expressing nucleotide sequence isolated from the Sargasso Sea
tatgtacgtattaaaaagagacgggagaaaagagccgataatgttcgataaaattacggctaggattaaaaagctttgctatggctttaatccattagttgatcctgttagggttgccatgagggttattgagggcttatatgatggcgtaacaacatcagaacttgataatcttgctgcagaaattgctgcaacaatgacaacaactcatccagattatgcttctctagctgccagaatttctgtttctaacttacataagaatacattaaaatcattttcagagacaatgaaagatttatatgagtatgttaatcctataactgggaaaaaagctccactgctttcagatgaagtatataaggttattaaaaagaatgctgaagagcttgactcaaaaataatatacaatagagattttggatatgattattttggtttcaaaactcttgagagatcatacctattaaaaataaatggtcaaattgttgaaagaccacaacatatgttaatgagagtttcagtaggaatacatttagatgatttagaagctgtgatagacacttacgagttaatgtcaaaaaaatattttacacatgctaccccaactttatttaattcaggaacgcctaaacctcaaatgtcttcttgttttttacttactatgcaggatgatagtatagatggaatttatgatacactaaagcaaacagcaaaaatatctcaatctgcaggagggattggactatcgattcataatattagatcaacaggttcttatatttctggaacaaatggaacctcaaatggtatcgtccctatgctaagagtttttaatgatactgcaagatatgtggatcaaggtggaggaaaaagaaaaggttcctttgctatttatattgaaccatggcattctgatatttttgattttcttgatcttaaaaagaatcatgggaaagaagagatgagagcaagggatctattttatgctatgtgggttccagatcttttcatgaaaagggttgaggaaaatgctgagtggacattaatgtgtccaaatgaatgtccaggtttatatgattgtcatggcgatgagtttgataaactatatttaaaatatgagaaaaagtctaagggtagaaagacaataaaagcaagagagctatgggaaaagatcctggaatctcaaattgaaacaggaactccttatatgctttacaaggattctgcaaatagaaaatctaatcaaaagaatttaggaacaataagatcatctaacctttgtacagagatattggaatatacttctaaggatgaaatagctgtttgtaatttagcatcaattgctcttccaatgtttgttgaagatggagaatttaaccataagaaactatatgatgtaaccgttagggttactaaaaatttaaataaagttattgatagaaattattaccctgtaaaagaggcagaaaattccaactttagacatagacctataggtctcggggttcaaggtttagcagatgcctttattgagttaaggatgccttttacttctgaaaaagcgaaagaattaaatcaagatatttttgaaactttatattttgctgcacttcaagcttctgttgaagagtcaaagaaagatggaccgtataaaacctataaaggttctccaatatcaaagggagagtttcagcataacatgtgggggattaaagatgaagagttaagtggaagatgggattgggctaaactaagaaaagatgttctaaaacatggtgtacgaaattctcttttagttgctcctatgccaactgcaagtacttcacaaattcttggtaataatgaatgttttgagccttatacttctaatttatacactagaagagttttatccggtgagtttataatcgttaataaacatctactaaaggatctcgttgatttaaacttatggaatgaagacatgaagcatgagcttatgagatctaatggctcaatccaggatattaaacagatcccagatgaattaaaagaattatacaaaactgtttgggagatgagtatgaaagatattatagatatggccagacacagaggttattttattgatcaatctcaatctttaaacttatttatggaaggtgctacaatgtcaaaattaacctctatgcatttttacggttggaaatcaggtcttaaaacaggaatgtattatttaagaactaagtctgcagttgatgctattaagtttacactcgagaaaaaagaaaaagctgaagttgaagaaacagtcgaagttgaagcagtagagactgtagaggcagcagaagaagttaaaattaccagaactgaaaaaactaaagctaaaaaatcaaaagaaaagccagtagctgtagagccattaacacctgaagagcttaaacaaatcatatctcaatctaaagagaacgaagatgatgattgtttaatgtga

SEQ ID NO: 212151 - DNA, 926 bp, Unknown
  Bacterial polypeptide expressing nucleotide sequence isolated from the Sargasso Sea
tgttatgtttccaattgctgacgataacatatggcaaatgtacaaaaaaatgatggattgcttttggcgagccgaagaaattgatttatcaaaagatcctgctcattgggaaaaattaaatgatgatgaaaagcattttattaaaatgattttggcattttttgccgctagcgatggaattgttttagaaaacttgggagaacgttttctatgtgaagtccaattaccagaagcaagagccgcgtatggattccaacttatgatggaaaacgtgcatagtgaaacttatagtttgttaattgatacattaattaaagatgaaacagaaaaaacaaaattatttaaagctcttgaaaattatccttgtataaaaaagaaagctgattgggcaattaaatggattgaagataaaagaagtggattcgcaactagattaattgctttcgcttgtgtagaaggaattttcttttctggagcattctgctcaatttattggttgaaaaaacgcggaatcatgcccggtttaacattttcaaacgaattaatcagtcgcgatgaaggtatgcatactgattttgctgtgttattgttcaaaactttacataataaaactaaaaaagccaaaatatttgaaataataaaagaagctgtagaaatagaaaaagagtttattacagaagccctaccgtgcaaattgataggcatgaatcaaaaattaatgaaacaatacattgaatttgtagcagatagactcgttgttcaattaggatacaataaaatatataaaacatctaatcctttcgattttatggaaatgatctcattggaaggaaaaaccaatttctttgaaaaaagagttggtgattattcattaagttctggtcaaaaatcagacaaagcatttgctattgatgattgtttttaaa

SEQ ID NO: 212152 - DNA, 1303 bp, Unknown
  Bacterial polypeptide expressing nucleotide sequence isolated from the Sargasso Sea
aacactaattagggcatatttgcttaaatttgaaaacaaaacaatagaaagacctcaggatttatggatgagagtggcgctaactgtttcttgtgataattttgattataataaagtaaaagaaacatacgaaagtctctccaatggcttatatactcatgcaacgcctacactttttaatagtggacttaaaatgcaacaactttcttcttgttttttaatagcgatggaagaagattctattgaaggtatatttaatacaataaaggattgtgctttaatttcaaaaacagctggtggtattggtatgcatgcacataatatcagaggtagtggtagtagaattaagtctacaaatggaaaatctaatggcttgatacctttccttaaaatatttaatgaaacagcaaagtctgttgatcaaggaggtggaaagaggaagggatcttttgcagtttatcttgaaccatggcatgcagatatagaaaagtttttagaattaagaaagaatactggggcagaagaatttagagctagagatttgttttatgcgctgtggataccagacctgtttatgaaaagagttgaagaagataaagactggaccttgatgagtgaacatgagtgtcctggactttctgataaatatggaaaagactttgaaacattatatgaaaaatatgaaaaagagtttccacatttagaaaaaattaaagcaaggagcttaatgtcaaaaattattgaagcccagatagaaactggtcagccttacatgctttataaagactcaattaataaaaaatcaaatcaaaaaaatatcggtgttataaaatcatcaaatctttgtgcagaaattgttgaatattcagatggcaaagaaacttcagtttgtaatttagcttcaatagcacttcctcaattcattaagaaaataaataataaaaaagaatatgattatcaaaagttatatgaaactgcaaaacttgctactaaaaatttagaccaagttatcgacattaatttttatccaactaataaaacagaaacgtcaaacaacaaacataggcctataggacttggcattcaagggttagccgatgtatattttaaaatgaacttaccgtatgatagtgaaaaagctaaagaaattaacaagcttatttttgaaactatttactttggagctcttgaggcttcttgtgaattggcgaaagaaaaaggtgtatattccacatttaaaggatcgccgatttctgaaggcaactttcagtttgatctttggaatactgagccatcaaatatg

SEQ ID NO: 212153 - DNA, 1132 bp, Unknown
  Bacterial polypeptide expressing nucleotide sequence isolated from the Sargasso Sea
aaagcagttccaggattatataatgatattacttcaatcgaaattgatacatacctagctgaaactgctgcatctctaacagttgaacatcctgattattcatacttagcagcacgtataaaagctaattctctgcataaagaaacgccaggttttataattgcaacaaaaaatttatttgatgatggtcttttaagagatgattattacaataaagtaatggcaaatgctgaagaaatagaatcgattattgattatgatagagattataattttgattattttgcatttacaactttagtaagggcttatttattaaaatttgaaaacaaaacaatagaacgtcctcaagatttgtggatgagggtggctctaacagtttcctgtgatagttttgatttagaaaaagttaaaagaacatattatagcttatctaacggtttttatactcatgctacacctaccctttttaatagtggtttaaaaatgcaacaattatcatcatgttttttaattggtatggaagatgactcaattgatggtatttttaacacaattaaagattgtgctttaatatcaaaaacagctggtggaataggaatgcatgcacataacataagagcaagtgggagcagaataaaatcaactaacgggaaatctaatggattaattccttttttaaaaatttttaatgaaacagcaaaatcagttgatcaaggtggtggcaaacgcaaaggttcttttgctgtatatttagaaccttggcacgctgatattgaaaaatttttagaactaagaaaaaatactggtgcagaagaatttagagctagggatttattctatgcattatggatacctgatttatttatgaaaagagtggagagtgatgatgattggactcttatgagtgaacatgaatgtcctggtttatctgataaatatggtaaagattttgaagaactatatgaaaaatatgaaaaggaattacctcatttagaaaagattaaagcaagagcattaatgtctaaaatcatagaagctcaaatagaaacaggtcagccttatatgttgtataaagattcgattaataataaatctaaccaaaaaaacataggtgtaattaaatcatcaa

SEQ ID NO: 212154 - DNA, 1132 bp, Unknown
  Bacterial polypeptide expressing nucleotide sequence isolated from the Sargasso Sea
atgacctactctactttttgccaaacacccaacgatgccacccgtgaacccatgttcttcggacaatcggtaaacgtcgcacgttatgaccaacaaaaatatgaagtgtttgaaaaactaattgaaaagcagctgtctttcttctggcgcccagaggaagtcgatgtgagccgcgataaaatcgactacaactcactacccgatcatgaaaagcatatttttatttcgaacctgaaataccaaacgctgctcgattcaattcaaggtcgctcgcctaacgtagcttttttgccactggtgtcactgcctgagttagaaacctggattgaaacctggtcattctccgagaccattcactcgcgctcatacactcatattattcgcaatatcgtcaacgatccttcggtaatttttgacgatatcgtggtaaaccatgagatcctgcgccgtgccacagacattgcagagttctacgatcacctcatcaaattaacccagacatatcatttactcggtgaaggcacccatgtgattgatggtgagcctttagaggtaaatacccgcaccctgaaaaaagcgctatacctgtgcatgatgtcagttaacgcgctcgaagccattcgcttctacgtgagctttgcctgctcatttgccttcgctgagcgtaaacttatggaaggtaacgcgaaaattattcgtcttatcgcccgtgacgaggcgctgcacttaaacagcactcagcatatcttaaccattatgcagggcggcaaagacgatcctgagatggccgagattgccgcagaatgccaacaggaagcctataacctgttcctaaaagccgccgaacaagaaaaagaatgggcgaaatacttgttcaaagacggctcaatgatcggtctaaacgagcagatcctctgccaatatgttgagtacattaccaaccaacggatgaagtcagttaacctgccgctaccttatgcagaacaaactaacccactgccatggatgaaaaactggctagagagtgacgcggtacaagtggctccccaagaagtggaagtgtcatcctatctggtcggccaaattgatgcagccgtcgacagtgatgaatttcttgatttcgatctctaat

SEQ ID NO: 212155 - DNA, 2290 bp, Unknown
  Bacterial polypeptide expressing nucleotide sequence isolated from the Sargasso Sea
atgaatagcaatatgacagttacaaaacgctgtggtgcacgtgagacaattgatctcgacaaaatacaccgcgtaattacttgggcagccaaggggttaaaaaacgtttctgtttctgaagttgaacttcgcacgcatttacagtttttcgatgggatcccaaccgaagctatccacgaaacgatcatcaaatctgcggcggatttaatttcccctgagtcacccgattatcagtttctggctgcgcgtttagccgtattccatttgcgtaagaaggcttttggtcagttcgagccacccaagttatatgaccatgtcactaagctggtagagttgggtaagtatgatatgcatattctgcaggattacacccgcgaagaactcgatattatggatacttatatcgaccattggcgcgatatgaacttctcctacgcagccgtaaaacagcttgaaggtaagtatctggttcaaaaccgcgtcacccacgagatttatgagagcgcccagttcctctatattctggtggcggcctgtttgtttgcccgctatccaaaggcaacgcgtctgcaatacgtcaaagatttttacgacgcagtatcgacttttaagatttcactgccaacgcctatcatggcgggagtgcgtacgccgactcgtcagtttagctcatgcgtactgattgaatgtggcgatagcttggattcaatcaacgcgacagcatcatctatcgtaaaatacgtgagccaacgcgctggtatcggtatcaacgctggtcgtatccgtgcattaggaagcccaatccgtggtggcgaagccttccacacgggttgcttacctttctacaagtatttccaaactgcggtgaaatcgtgctcgcaaggcggcgtgcgcggcggtgcagctaccctcttctatcctatttggcacttagaagttgaatcgctgctagtactgaaaaataaccgtggcgttgaagataaccgtatccgtcatttagactacggcgtgcaactgaataaactcatgtatcaacgtctgatcaaaggcgaaaatatcagcctgttcagcccatcggacgtacccggtctttacgatgccttctttgaagatcaagccgaatttgagcgtttatatctgcaatatgagcaagacagcagcattcgcaaaaagacattaaaagcggtggatctgttctcactgatgatgcaagaacgtgcttcaacgggccgtatctacattcaaaacgtggatcactgtaacacccacagtccatttgactcaaaagttgcaccgatcagacagtctaacctctgccttgaaatcgctctgccgactaagccattgaataacattgacgatccaaacggcgaaatcgccctttgtacactgtcggcattaaacctggggacaattaccgatttagcggaactggagccattagctgatttagccgtgcgagccttagataacctgctggattaccaagattatccaatcaaagcggcgcagatttcgtcgatgaaccgtcgtaccttagggattggtgttatcaacttcgctaactatttagcgaagaatggtatgaagtactccgatggtagcgcgaacaatctgactcacaagacctttgaagcgattcagttttatctgctcaaagcgtcaatgaatctggcgaaagaaaaaggtgcgtgcccattatttaatgagaccacttacgctcaaggtattttacctatcgatacctacaaacgtgacctagataagatttgcagtgagccattgcatttagactgggaagcgctgcgtaacgacattaaagaatacggtttacgtaactcgacattgtctgcactgatgccgtctgagacttcatcacagatctcaaacgccaccaacggtatcgaaccgccacgcggcttgatcagtgtcaaagccagtaaagatggccagttaaagcaagtggtacccgattttgatgagctgaaatacaactacgagctgttatggcaaatgccaagcaacgaaggttacttacagcttgtgggtatcatgcaaaagttcgttgaccaagcgatttcggccaacacaaactatgatccagcgcgttttgagggccgtaaagtcccaatgcagaccctgctaaaagacttactcaatgcctacaagttaggtgtaaaaacactgtactaccataacactcgcgatggtgcatcggatcaacacgatgacattaccaacatagagaaagaagatgacggctgtgctggcggcgcttgcaaaatctaat

SEQ ID NO: 212156 - DNA, 750 bp, Unknown
  Bacterial polypeptide expressing nucleotide sequence isolated from the Sargasso Sea
gtagatgggattggaaaaaattaagaaaagatgttttaaagcatggtgtgataaactctcttttagtggcaccaatgccaactgcaagtacatctcaaattcttggaaataatgaatgttttgaaccttatacttcaaacatttatactagaagagttttatctggtgagtttattattgttaataaacacttactaaatgacctagttgaattaggactttggagtgaagatatgaaacaagatctaatggctgcaaacggatcaattcaagatattgaaggtattcctgatgatttaaaagagctatataaaactgtgtgggagatgagtatgaaggatataattgatatggctagacatagagggtttttcattgaccaatcacaatcacttaatttatttatggaaggtgctactatgtcaaaacttacatctatgcacttctatgcatggaaatctggtcttaaaacaggtatgtattatttaagaactaaatctgctgtcgatgcaatcaagtttacattaaagaaaaaagaatctgttcctgaaaaaacagaagagattaaacttgaagctgagactgaagaggtaggtgaagttcaaattactagaacagaaaaagcagctaaaactaaatccaaggaaaagccagttgctgttgaaccacttactcctgaagagctaaaacaaattatctctcaatctaaagagaatgaggatgatgactgccttatgtgtggttcataat

SEQ ID NO: 212157 - DNA, 1372 bp, Unknown
  Bacterial polypeptide expressing nucleotide sequence isolated from the Sargasso Sea
catgaacaacaacttattagtcaccaaacgcaacggtgaaaaagagtccatcgacttagagaaaatccacaaagtcgtgacatgggcagcgaaaggacttaaaaacgtttctgtttcacaagttgaaatcaaggcacagattcagttctatgatggtattaacaccagtgagatccacgaaaccctgatcaaatcagcagcagatttaatctctaccgatgcgccagattatcaatacctagctgcgcgcttggccattttccaccttcgcaaaaaagcctatggtcaatttgagccgcctgccctacttgagcatgtaggtaagatggttgatatgggcaagtatgataagcacctgcttgaagactacacgcctgaagaatttgctgagatggacacgtacattgaccattggcgagacatgaatttcagctatgccgcagttaagcagcttgaaggcaagtacttggtccaaaaccgtgttactggtgaaatttacgaaagtgcacagttcctatatatcttagtggctgcctgtcttttcgcaaattacgacaaagcgacgcgtatggactacattcgccgcttctatgatgctgcttcaacattcaagctgtcgttgcctacacctattatggctggcgtacgtacgcctactcgccagtttagctcatgtgtacttatcgaaaccggcgacagcctagactcaatcaatgcaaccgcaagtgccattgttaaatacgtaagccagcgtgcgggtatcggtgtaaacgcaggccgtattcgcgcactaggtagccctattcgcggcggtgaagcattccatacgggttgtattccgttctacaaatacttccaaacagccgttaaaagctgttcacaaggtggtgttcgtggtggcgctgctacgctgttctaccctatttggcatatggaagttgaatcactgttagtgcttaagaacaaccgtggtgttgaagaaaaccgtgtacgtcacctagattacggcgttcagttcaacaaactaatgtaccagcgcatgatgaaagacggctatatctcactattcagcccgtctgacgttccaggtctttacgatgctttctttgctgaccaagagaagtttgaagagctatacgttaaatacgaaaacgacgacagcatccgcaaaaagcaaattaaagccatggagctattcagcttgttcatgcaagagcgtgcaagcacaggtcgtatttatcttcaaaacgttgaccactgtaatacgcacagtccgtttaacccagaagttgcgcctgtacgtcaaagcaacctgtgtcttgaaattgcactaccaactaagccattacagcacgttaacgacgaaaatggt

SEQ ID NO: 212158 - DNA, 1681 bp, Unknown
  Bacterial polypeptide expressing nucleotide sequence isolated from the Sargasso Sea
aatggcagacaatctacaggtatcagcaaaaatctcagaagaaaaaagtgtaaatattttaacattaagtgtcgttcgtcgtgacggagctattactcctttcaaatctgataaaatttcaaatgctataaaaaaagctttcttggcacaaacaaaaattagaaatgataaaaataaggaaaaagaacaacaagatggaattcataaaactgttgaagctttaacacataaagttgtctcggctctaacaaggaggattgctgacggtgacatgattcacattgaggatatacaagatcaagtggagttagcacttatgagggatgagcatcataaagttgctagagcatatgttttgtatagagaacaaagagcagcttcaagatatcacactaaaaaactaaaagaacaagttggagaaaaagcttcttcaatgatggtaaccaaaagagatggaagtaaagagccaatttcacttgataaaataaccaatagagtatctgttctatcgactggcttaaatattgatccaattgtcgttgttcaaaaagctgttccaggcctatatagtgatattagttccgttgaaattgatacttatcttgctgaaactgctgctgctttaacagtagaacatcctgattattcttatcttgcagcaagaataaaagtaaactctcttcataaagaaacaccaggtttcatcatagcaacaaaaaatttatacgatgatggattgctaagagaagaatattataaaaaggtgatggagaatgcagatttaatagagtcaataattgactatgacaaagattatacttttgattattttgctctcacaacactaataagagcatatttattaaagtttgataataaaacaattgaaagacctcaggacctttggatgagagtaactttaacagttactggtagcgagtttaacttagataaaataaaagaaacttataaaagtttatcaactggtatgtatacacatgctacaccaacattgtttaatagtggattaaaaatgcaacaattatcttcgtgctttttaataggtatggaggatgattctatcgaaggtatttttaatactattaaagattgtgcactaatatctaaaactgcaggcggtattggtatgcacgctcacaatattagaggtagtggaagtagaataaaatcaacaaatggcaaatctaatggccttattccatttttgaaaatttttaatgaaactgctaaatcagttgatcaaggtggtggtaaaagaaaaggttcttttgcagtatacttagaaccttggcacgccgacattgagaaatttcttgaacttagaaaaaatacaggtgctgaagaatttagggcaagagatttattttacgctttatggataccagatttattcatgaagagagtagaaaatgatgaagagtggacactcatgagtgaacatgaatgtccaggcctttcagatgtgtatggtgacgagtttgaaaaactttacacaaagtatgaaaatgaaatgaagcatttagaaaaaattaaagcaagagatttaatgtctaaaatcatagaagcgcagatagaaacaggacaaccttatatgctttataaagattctatcaataataagtctaatcaaaaaaatattggtgtcattaaatcttcaaac

SEQ ID NO: 212159 - DNA, 1422 bp, Unknown
  Bacterial polypeptide expressing nucleotide sequence isolated from the Sargasso Sea
aatgaacttgtttgtgacgaagcgtaacggccacaaagaacccatcgatctggataaaattcaccgcgtgctcgactgggctgccgagggtctcgacaacgtgtcggtctcccaggtggaactcaagtcccacatccagttctatgacggcatccgtaccgccgatatccacgaaaccgtcatcaaggccgctgctgacctgatctccgagcaaagcccggactaccagtacatggccgcccgcctggccatcttccacctgcgcaagaaggcctacggccagttcgagccgccccacctctatcagcatgtcgccaagctggtggacatgggcaagtacgacaagcatctgctggaagactacagccaggccgaattcgaggagctgaaccagcacctggatcactggcgtgacatggacttctcctacgcggcggtcaagcagctggaaggcaagtacctggtccagaaccgcgtcaccggcgaaatttacgagagcccgcagttcctctatatcctggtagcggcctgcctcttctccaagtacccgaaagatacccgtctggactacatcaagcgcttctatgatgcggtctcgaccttcaagatctcgctgccgaccccgatcatgagcggcgtgcgcaccccgacccgtcagttcagctcctgcgtgctgatcgagtgcgacgacagcctggattccatcaatgccaccgccagcgccatcgtgcgttacgtctcccagcgcgctggcatcggcatcaacgccggccgtatccgtggtctgggcagccccatccgtggcggcgaagcgttccacaccggttgcatccccttctacaagtacttccagactgccgtgaagtgctgctcccagggcggcgtgcgcggcggtgcggccaccctgttctacccgctgtggcacaccgaagtggagagcctgctggtactgaagaacaaccgcggcgtggaagagaaccgggtccgtcacatggactacggcgtgcagatcaacaagctgatgtatcagcgcctcatcaagggcggcgacatcacattgttctccccatccgatgcacctggcctgtacgatgccttcttcgcggatcaggacaagttcgaagcgctctacgtcaagtacgagcaggatccgagcattcgcaagaagaccctcaaggcggtcgatctcttctccctgatgatgcaggagcgcgccggtaccggtcgcatctacatccagaacgtggaccactgcaacacccacagcccgttcgatccgagcgtggcgccggtgcgccagtccaacctctgcctcgagattgcgctgccgaccaagccgctcaacaacgtggatgacgaagagggcgagatcgcgctctgtaccctgtctgccttcaacctgggtgccatcgagaagctgga

SEQ ID NO: 212160 - DNA, 2290 bp, Unknown
  Bacterial polypeptide expressing nucleotide sequence isolated from the Sargasso Sea
aatgaatagcaatatgacagtcacaaaacgctgtggtgcacgtgagacaatcgatctcgacaagatacaccgcgtaattacttgggcagccaagggattaaaaaacgtttctgtttctgaagttgaacttcgcacgcatttacagtttttcgacgggatcccaaccgaagctatccacgaaacgatcatcaaatctgcggcggatttaatttccccagaatcaccggattatcagtttctggctgcgcgcttagccgtattccatttacgtaagaaggcctttggtcagttcgaaccgccaaagttatacgaccatgtgactaaactggtcgagcttggcaagtatgatatgcatattctgcaggattacacccgcgaagaactcgatattatggacagctatatcgaccattggcgcgatatgaacttctcctacgcggcggtaaaacagctcgaaggtaagtatctggtacaaaaccgtgtgacccacgagatctacgagagcgcccagttcctctatattctggtggcggcctgtttgtttgcccgttatccaaaagaaacgcgcctgcaatacgttaaagatttttacgacgcggtatcgacctttaagatttcgctgccaacgccaatcatggcaggtgtacgcacgccaacacgtcaattcagttcatgcgtactgattgaatgtggcgacagcttagattctatcaacgcgaccgcctcttctatcgtgaagtatgtcagccaacgcgcgggtatcggtatcaacgccggtcgtatccgtgcattaggtagtccaatccgtggcggcgaagccttccacaccggttgcttacctttctacaagtatttccaaacggcggtaaaatcttgttcgcaaggcggcgttcgtggtggtgctgcgaccctcttctaccctatttggcacttagaagtggaatcgctgctggtactgaaaaacaaccgcggtgttgaagataaccgtattcgccacttagactacggcgtgcagctcaacaagctgatgtaccaacgtctgatcaaaggcgaaaacattagcctgttcagcccatcggacgtaccaggtctttacgatgccttcttcgaagatcaagacgaattcgaacgtctgtacctgcaatatgagcaagacagcagcattcgtaagaagacattgaaagcggtcgaactgttctcattgatgatgcaagagcgtgcttcaacgggccgtatctacatccaaaacgtcgaccactgtaacacccacagtccgttcgactcgaaagtcgctccgatcagacaatctaacctttgccttgaaatcgcgctgccgaccaagccattgaacaacattgacgatccaaacggtgaaatcgcgctgtgtacactgtcagcgttaaacttaggtgcaatcaaaaacttagccgagcttgagccattagccgatttagcggtacgtgcactggataacctactggattaccaagattatccaatcaaagcggccgaaatttcatcgatgaaccgtcgtaccttaggtattggtgttatcaactttgcgaactacttagcgaagaatggcatgaagtactccgatggtagtgcgaacaacctgactcacaagacctttgaagcgattcagttctatctgctcaaggcgtcaatgaatctggcgaaagagaaaggtgcgtgcccattatttaatgagaccacttacgcccaaggtattttacctatcgatacctacaaacgtgatttagataagatttgcagcgagccattgcatttagactgggaaacactgcgccaagacatcaaacagcacggtttacgtaactcgaccctgtctgcgctgatgccgtctgagacttcatcacagatctcaaacgcgactaacggtatcgaaccgccacgcggtttgatcagtgttaaagcgagtaaagatggccagttaaagcaagtggtgcctgattttgatgagctgaaatacaactacgagctgctatggcaaatgccaagcaacgaaggttacttacagctcgtgggtatcatgcaaaaattcgttgaccaagcgatttcggccaacactaactatgacccaacgcgtttcgaaggccgtaaggttccgatgcagactctgctgaaagacttactcaatgcctataagttaggtgtaaaaacgctgtactaccataacactcgcgatggtgcatcggatcaacacgatgacattaccaacatagagaaagaagatgatggctgtgctggcggcgcctgcaaaatctaa

SEQ ID NO: 212161 - DNA, 1132 bp, Unknown
  Bacterial polypeptide expressing nucleotide sequence isolated from the Sargasso Sea
catgacctactctactttttgccaaacacccaacgatgccacccgtgaacctatgttcttcggacaatcggttaacgtcgctcgttatgaccaacaaaaatatgaagtgtttgaaaaactgattgaaaagcagttgtctttcttctggcgcccagaggaagttgacgtgagccgcgataaaatcgactacaactcactgccagatcatgaaaagcatatttttatttcgaacctgaaataccaaacgctgctcgactctatccaaggccgctcgcctaacgtggcgtttctgcccttagtgtcgctgcccgaattagagacctggattgagacttggtctttctccgagacaattcactcgcgctcatacacgcacattattcgcaatatcgtgaacgatccttcggtgatttttgacgatatcgtggtgaatcaagagatcctacgccgcgcgactgacattgccgaatactacgatcacttgatcaagctgacacaggtttaccacctgttaggcgaaggtacccatgtgatcgatgacgagccgattgaagtcaacactcgcacgctaaagaaagcgttgtacctgtgtatgatgtcagttaacgccctcgaagcgattcgcttctatgtcagttttgcctgctcattcgcatttgcagaacgtaagctcatggaaggtaacgcgaaaattattcgtcttatcgcccgtgacgaagcgctgcacttaaacagcacccagcatatcttaaccattatgcagggcggcaaagacgatcctgaaatggctgagattgccgcagaatgccaacaggaagcgtacaacctgttcctgaaagccgcagagcaagaaaaagaatgggcaaaatacctgttcaaagacggttcgatgatcggtcttaacgagcaaatcctctgccaatacgttgagtacatcaccaaccaacggatgaagtccgttaacctgccactgccttatgccgagcagtctaacccactgccttggatgaagaactggttagagagtgacgcggtacaagtggcgccacaggaagtcgaagtgtcatcttatcttgtcggtcaaatcgattcggccgtcgacagtgacgaattcctcgatttcgatctctaa

SEQ ID NO: 212162 - DNA, 678 bp, Unknown
  Bacterial polypeptide expressing nucleotide sequence isolated from the Sargasso Sea
tatgcagcaagagcctttacttcaagaaaataaagacagatttgtaatctttccaatcaagcatcacgatatatgggagtggtataaaaaatgtgaagcaagtttttggacggcagaagaaattgatttgcatcaagacttgaatgattggagtacaaaattaaatgatgatgaaagatatttcataaagcatattcttgctttctttgcggcttctgatggcattgtaaatgaaaacttagcagaaaactttgtaaatgaggttcaatactcggaagcaaaatttttctatggattccaaattatgatggaaaatattcattcagaaacatattcattactcattgatacttatgttaaggatgataaagaaaaagatactttgttcaaggcaattgagaatttccctgcaattaaaaagaaagctgactgggcattaaaatggatcgagtcagattcttttgctgaaaggctgattgcttttgcaggtgttgaaggagtatttttctcaggctcattttgttcaatattctggcttaagaaaagaggtcttatgccaggtcttacattctcaaatgagttaatctctcgtgatgaaggagttcattgtgattttgcagttcacttgcataataatcacatgatcaataaagtcccaaaggaaagaataaagaaata

SEQ ID NO: 212163 - DNA, 811 bp, Unknown
  Bacterial polypeptide expressing nucleotide sequence isolated from the Sargasso Sea
cgacgagagatattttatcaaaccatccttgctttttttgctgcctcatatggaattgtaaatgagaacttggctgaaaattttgtaaatgaagttcagtactctgaagcaaaatttttctatggttttcagattatgatggagaatattcattccgaaacatattctttacttattgacacttatgttaaagacgataaggaaaaagatactttatttaaagccatagaaaattttccagcaataaagaaaaaagctgactgggctctaaaatggattgagtctgattcctttgctgaaagacttatagcttttgctggagtagaaggtatatttttctcagggtctttctgttcaattttttggttgaaaaagagagggcttatgccaggattaactttttctaacgagttaatttcaagagatgaaggtgtgcattgtgattttgcagttcatcttcataataatcatattattaataaagtacaaaaggaaagaattaaagaaattttaatagatgctcttaatatagaaagagaatttataacagaatcacttccagtaagtttaatcggtatgaatgcaaaactaatgacgcaatatttagaatttgttaccgatagacttttagatcaatttggatgtgaaaaagaatttaatgtttctaatccattcgactttatggatatgattaaccttcaaggtaaaactaatttctttgagaaaagagtttcagaatatcaaaaagcaggtgttctaaataatgataaaaaagaagagtcaaactttgatcttgacgatgacttctaaa

SEQ ID NO: 212164 - DNA, 2482 bp, Unknown
  Bacterial polypeptide expressing nucleotide sequence isolated from the Sargasso Sea
tatgtatgtaattaaaagggacggaagaaaagagcccataatgtttgataaaataaccgcaaggataaagaagctttgttatggttttaacgagttagttgatcctgttagagttgcaatgagggtgattgagggtctttatgatggtgttacaacttcagaattagataacctagcagcagaaattgctgcgactatgacaactactcatccagattatgcatctcttgcagcaagaatttctgtctcaaacttacataaaaataccacaaagtccttctctgatacaatgaaggatcttcacgcatacgttaatccaataactggtaaaaaggctccgctattatcagatgaagtctataaagtgattaagaaaaatgcagagttgcttgactcaaaaattatttacaatagagatttcggatatgattactttggatttaaaactcttgaaagatcataccttttaaaaattaatggaaatatagttgagagaccacaacatatgttgatgagagtctcggtaggtattcatcttgatgatattgatgctgtaattgacacctacgagttaatgtcaaaaaaatattttactcatgcaactccaactttatttaatgcaggtacgcccaaaccacaaatgtcctcatgtttcttactaactatgcaagatgatagtattgatggaatctatgatacactaaaacaaacagctaaaatttctcaatctgctggaggaattggtctttcaattcataatataagatctacaggatcatacatatctggaacaaatggtacatcaaatggtattgttccaatgcttagagtttttaatgatactgcaagatatgtagatcaggggggtggtaaaagaaaaggttcttttgcaatttatattgaaccatggcactctgatatttatgattttctagacctaaagaaaaatcatggtaaagaggaaatgagagcaagggatttattttatgctatgtggattcctgatctattcatgaaaagagttgaaaataatgaagagtggactttaatgtgtccaaacgagtgtcctggattatatgattgtcacggagacgagtttgataagctttatttaaaatatgaaaagcaatcaaagggaagaaagtcaatcaaggcaagagagctttgggaaaagattcttgaatctcaaattgagacaggtactccatatatgctatataaagattctgcaaatagaaaatcaaatcaaaagaatttggggactattagatcttctaacttgtgtacagaaatacttgagtacacttcaaaagatgaaatagcggtttgtaatcttgcatcaattgctcttccaatgtttgttgaagatggaaagtttaatcaccaaaaattatatgatgtaacagttagagttaccaaaaacttaaataaagtaattgacagaaattactatcctgttaaagaagctgagaattctaactttagacacaggccagttggtcttggtgttcaaggtttagctgatgcatttatactattaaggatgccatttacttctgatgaagcaaaagagcttaatcaagaaatttttgaaactatttattatgctgcacttaatgcttcagttgaggaagctaaaaaagatggcgtttatgaatcatataaaggttctccaatttcaaaaggtgaatttcagcataatatgtggggagttgaagatgatgatttaagtggtagatgggattggaaaaaattaagaaaagatgttttaaagcatggtgtgagaaactctcttttagttgcaccaatgccaactgcaagtacatctcaaattcttggaaataatgaatgttttgaaccttatacttcaaacatttatacgagaagagttttatctggtgagtttattattgttaataaacacttactaaatgacctagttgaattaggaatttggagtgaagatatgaaacaagatctaatggctgcaaacggatccattcaagatattgaaggtattccagatgatttaaaagagctatataaaaccgtgtgggagatgagtatgaaggatataatcgatatggctagacatagagggtttttcattgaccaatcacaatcacttaatttatttatggaaggtgctactatgtcaaaacttacatctatgcacttctatgcatggaaatctggtcttaaaacaggtatgtactatttaaggactaaatctgctgttgatgcaattaagtttacacttaagaaaaaagaatctgttcctgaaaaaacagaagagattaaacttgaagcagagactgaagaggtaggtgaagttcaaattactagaacagaaaaagcagctaaaactaaatccaaggaaaagccagttgctgttgaaccacttactcctgaagagctaaaacaaattatctctcaatctaaagagaatgaggatgatgactgccttatgtgtggttcataa

SEQ ID NO: 212165 - DNA, 1375 bp, Unknown
  Bacterial polypeptide expressing nucleotide sequence isolated from the Sargasso Sea
caacaaaaaaatctttttgacgatggtctcctaagagaggattattataacaaggtaatggcaagtgctgaagatatagagtcaattattgattatgacagagattacaattttgattattttgctttcaccacgttaacaagagcttatcttttaaaattcgaaaataaaacaattgaaagaccacaagatttatggatgagagttgcgttaaccgtatcaggaaattcttttaattttgataaagtaaaagaaacttatgacagtctttcaaatggatattatacacatgcaacaccaactcttttcaatagtggacttaaaatgcagcaattatcctcttgttttcttattggtatggaagatgattctattgaaggaatatttaatacaattaaggattgtgcactgatctcaaaaactgcgggtggaattggaatgcatgcacataacataagaggaagtggtagtagaataaaatcaaccaatggtaaatctaatggattaatacctttcttaaaaatattcaatgaaacagcgaaatcagttgatcaaggtggaggaaaaaggaaaggctcttttgctgtatacctcgaaccatggcatgctgatatagaacagtttttagaattaagaaaaaatactggtgctgaggaattcagagctagggatttattttatgctctttggattccagatttgttcatgaaaagagtagaggaagatggagactggactctaatgagcgaacatgagtgtccgggattatctgataattatggtgatgaatttgttagcttgtatgaaaaatatgaaagagaaatgcctaacttagaaaaaatcaaagcaagagaattaatgtcaaaaattattgaagcccaaatcgaaactgggcaaccatatatgctttataaagactcaataaacaaaaaatctaaccaaaaaaatataggtgtaattaagtcatcaaacttgtgtgcagaaatagttgagtattcagataaatcagaaacatctgtatgtaatctagcctcaatagctttacccaaatttgtaaagaaaactaaaaataaaaaaaataaagaatatgattttaaggctctttataaaactgcaaagttagcaacaaaaaacttagatgaagttatagatataaatttttatccaacagataaaactgaaatctcaaatagcaaacatagaccaattggacttggtatacagggtttagcagatgtgttttttgaacttgaaattgcctacgatagtgaagaggcaaagaaaattaataaactaatatttgaaacaatttactttggtgcactggaagcctcacatgaacttgctagagaaaaaggtggtttattctacctta

SEQ ID NO: 212166 - DNA, 1498 bp, Unknown
  Bacterial polypeptide expressing nucleotide sequence isolated from the Sargasso Sea
atgtcagacaattcacaagtatcagcaaagataaaaaacaataatgaaataaatttattaagtttaagtgttgttagaagagatgggtcaattgctcagtttaaatctgaaaaaatatttaatgccataaaaaaagcttttttggctcagactaaaataagaaacaataaagaaaaagataatgaacaaacctcaagtattcacaaaactattgaagttttaacggataaagtagttacagctttaacaagaagaatagctgatggtgatatgatccacatagaagatatacaagatcaagttgaacttgctctaatgagagatgagcatcacaaggttgctagagcttatgtattatatagggaacaaagagcagcttcgaggtatcatacaaaaaaattaaaggagcaaattggggtaaaagtttcttcaatgatggttacaaaacgtgatggaacaaaagaacctgtatctttagacaaaattactaatcgtgtttccgttttatctactggcttatctattgatccaatagttgtggcacaaaaagcaataccaggtttatataatgatattacttctacagagatagataattatctagctgaaacatcagctgctttaactgtagagcatcctgattattctaatttagctgcaagaataaagtccaatgctcttcacaaattaactcctggttttgtgatagcaactaaaaatttatttgaagacggtttattgcatgaaagttactataacaaagttattcaaaatgctgaagaaattgaatctattattgattatgatagagattacagttttgattattttgccttaactactttaataagagcatatcttctaaaatttgaaaatcaaactatagaaaggcctcaagatttatggatgcgtgttgctttaacagtttcaggaaaagaatttaatctatctaagcttaaagaaacttatgactctctatctaatggtctgtatactcatgctactccaactctttttaatagtgggctaaaaatgcaacaattatcttcttgttttcttattggaatggaagatgactctattgaggggatttttaatactattaaggattgtgcattaatatcaaaaactgctggtggtattggaatgcatgcgcacaatatacgcggaagtggaagtagaattaaatcaactaatggaaaatcaaatggccttataccttttttaaaaatatttaatgaaactgcaaaatcagtcgatcaaggtggtggaaaaagaaaaggctcatttgctatttatttagagccatggcatgcagatattgaaaaattcttagaactgagaaaaaatactggtgcagaagaatttagggctcgtgatttattttatgcactctggattcctgatttatttatgcaaagagttgaaaatgatgaggattggaccctaatgagagaacacgaatgtcctggactatctgatagctatggtaaaagtt

SEQ ID NO: 212167 - DNA, 2509 bp, Unknown
  Bacterial polypeptide expressing nucleotide sequence isolated from the Sargasso Sea
atggcagacaatctacaggtatcggcaaaaatcccggaagaaaaaagtgtaaatattttaacattaagtgtcgtacgtcgtgatggagctatcactcccttcaaatcagataaaatttcaaatgctataaaaaaagcattcttagcacaaacaaaaattagaaatgacaaaaataaagaaaaagaacaacaagatggaattcataaaactgttgaagctttaacacataaagttgtctcggctctaacaagaaggattgctgatggtgacatgattcacattgaagatatacaagatcaagtggaattagcacttatgagagatgagcatcacaaagttgctagagcatatgtcctatatagagaacaaagagcagcttcaagatatcacactaaaaaactaaaagagcaagttggggaaaaagcttcttcaatgatggtaactaaaagagatggaagtaaagagccgatttcacttgataaaataaccaacagagtctctgttctatcaactggattaaatattgatccaattgttgttgttcaaaaagctgttccaggattgtatagtgatattagttctgttgaaattgacacttatcttgctgaaactgcagcagctttaacagtagagcatcctgattattcatatcttgccgcaagaataaaagttaattcattacataaagaaaccccaggatttataatagcaacaaaaaatttatacgatgatggtttattaagagaagagtattttaaaaaagtgatggaaaatgctgacgcaatagaatcaataattgattatgacaaagattatacatttgattattttgcccttacaacactaattagagcttatttgttaaagtttgataatagaacaattgaaagacctcaagacctatggatgagggtaactttaacagttacaggtaacgagtttaatttagataaaataaaagaaacctataaaggtctatctagtggtgtgtatacacatgctactccaacattgtttaatagtggattaaagatgcagcaattatcatcatgctttttaataggtatggaagatgattctatcgaaggtatatttaatactatcaaagattgtgcgctaatatcaaaaactgctggcggtatcggaatgcatgctcacaacattagaggaagtggaagtagaataaaatcaacaaatggtaaatctaatggtcttattccatttcttaaaatttttaatgaaactgctaaatcagttgatcaaggtggaggaaaaagaaaaggttctttcgcagtttacttagaaccttggcatgctgacattgagaaatttctagaacttaggaaaaatacaggtgccgaagaatttagagcgagagatttgttttatgctttatggatacctgatttatttatgaaaagagtagaaaatgatgaagaatggacacttatgagtgaacatgaatgtccaggtctttcggatgtatatggcgacgagtttgaaaaactttacactaagtatgaaaatgaaatgaagcatttagaaaaaattaaagcaagagatctaatgtctaaaattatagaagcgcagatagaaacaggacagccttatatgctctataaggactcaatcaataacaagtctaaccaaaaaaatatcggtgttattaaatcttcaaacctgtgtgcagaaatagttgaatactcagataagaatgagacatctgtatgtaacttggcttctatagctctgccaaaatttgtaaaaaaatcagataaaaaattaatatatgactatgatgctctttatgagacagcaaaattggccacaaaaaacttagatgaagtaattgatattaatttttatccaactgataaaacagaaagatctaacaataaacataggcctataggcttagggatacagggacttgcagatgtatactttaaattgggaataccttatgaatctgaggaggccaaagaaataaataaattaatttttgagacaatttactttggagctttagaagcatcatgcgagttagctaaagaaaaaggagcctacgaaacatttaaaaactcaccaatttcggaaggtaagtttcaatttgatctgtggaatgttaatccttcttcaaagtgggattgggattcacttagagctaaaattaaagagcacggtgtaagaaactctttaactacagcttgcatgccaactgcgtcaacaggtattatattaggtaatactgaaacattccaaatacaaacctctaatatatataaaagacaaacactctcaggtgagtttttactcgtaaatagatatttagtgaatgaactttctcaaagaggattgtggaataaagaaatgagagataaaataattttagaaaatggatcggtagaaaacataaatgaaattccagctgaactaaaagaaatttataaaacagtttgggaagtatcacaaaaaactgtaattgatatgtcagcagatagagcaccat

SEQ ID NO: 212168 - DNA, 940 bp, Unknown
  Bacterial polypeptide expressing nucleotide sequence isolated from the Sargasso Sea
atgcttttaccaaccatgaataggtttaccgtgtttccaatcgaacacgaaaatttgtggagcatgtacaaaaaggcacagatgtcgaactggaccgctgaagaagttgatgtatccgccgatatggaagattggaaaaacatgagtgaaaatgaacgacacttcgttaaatatattttagcctttttcgctggttctgatggcattgtttttgagaatataaacaacaactttgccgatgaagttcaattaaccgaagctcggtcgttttatgcataccaggttcataatgagatggttcacggtgaaacgtatagtaaacttattgataaatatatcagggatagtggagagaaaaagcgtctatttgaagcaatcacaacaattgatcccataaaaaagaaagctgaatgggctatgaaatggtttgataattccagacccttttctgagcgtctattagctttcgcgtgtgtcgaaggaatattcttctcgggtagtttctgtgctattttttggttaaagaaacgtggactcatgccgggtctgtgttttagtaacgagttaattagtcgagacgagggtcttcatctcgaattcgccatagaattattcaagatgttgaagaataaaccttcacaagatgttgtacataatatcgtacgtgaagctattgaaattgaaaaatcattcatcatcgaagctcttccatgtagtctcataggaatgaacgcggagaagatgtctgattatattgaatatgtttctgataggttacttaaacaagcggggttcaataaaatctggaatactcaaaatccctttgattttatggaaaatatttccctggatggtaaaactaattttttcgaaaaacgcgtgggtgattatggtaaaatcgacgaaagtacagatgtaacgttcgatgaagatttttaat

SEQ ID NO: 212169 - DNA, 2149 bp, Unknown
  Bacterial polypeptide expressing nucleotide sequence isolated from the Sargasso Sea
atgtttgtagtaaaaagagacggccacaaggagccagtaatgtttgataagataacggcaagaattaaaaagctttgctatagtcttaacccacttgtggatccagtcagagtttcaatgagagttattgaaggtctctatgatggtgtaactacatcagagcttgataaccttgctgcagaagttgctgctacaatgactacaactcatccagactatgctaatttagcttctagaatttctgtttcaaaccttcacaaaaacacaaagaaatcattctcacaaactatggatgatttgtataattatgtgaatccaaggacaaataaaaaagctccattattgtcagacgaggtttataaagtaattaagaaaaatgctgagaaacttgattccacaattatttataacagagatttcaactatgattattttggattcaaaacacttgagagatcatatcttctaaagttaaatggagttactgttgagagacctcaacatatgttgatgagggtttcaattggtattcatttggatgatctagacgctgcaattgaaacatatactttgatgtcaaaaaagtattttactcatgcaactcctacattatttaattcaggaacaccaaagcctcagctatcctcatgttttttattgacaatgcaggatgatagcatagatggtatatacaatacattaaagcaaacagcaaaaatttctcaatcagctggcggtatcggattgtccatacataatattagagcaaccggttcatacatagctgggactaatggtacttcaaatggtatagttcctatgttgagagttttcaatgatacagctagatacgttgatcaaggtggaggaaaacgaaaaggatcatttgcaatatacattgagccgtggcattcagatatatttgactttttagaattaaagaaaaatcatggtaaagaggagatgagagcaagagacttgttttatgcaatgtggattccagacttattcatgaaaagagttgaaagtaatgaagagtggactttaatgtgtccaaacgagtgtcccggattgtatgatacacacagtgaagagtttgaaaaactttatttaaaatacgagaaagatcaaaaaggaagaaagacaattaaggccagagagctttgggaaaaaatattagaagctcaaattgaaactggtactccgtacatgttatacaaggacgcatgtaacagaaagtcaaatcaaaaaaacttaggtacaatcagatcttcaaatctttgtactgaaatattagagtatacatctaaagatgaaattgctgtatgcaacctcgcatcaattgctcttccaatgtttgttaagaataattcttttgaccacaaggaactatttaaagtaactaaaagagttactaagaatttgaataaagtaattgatagaaattattatccagttaaggaagctgagaattcaaatttcagacatagaccaattggattaggagtgcaaggtcttgccgacacattcataaaattaagaatgccttttacatgtgatgatgcaaaaactctaaaccaagaaatttttgaaacaatttattttgccgctttgaccgcatcaatggaagaagcaattaaagagggggcatataaatcttataaagggtctccaatttctaaaggtgaatttcaacacaatatgtggggtattaaggatgatgaattaagcggaagatgggattgggatggccttagaaaagaaattaaaaagaatggcgtgagaaactcattattggttgcacctatgcctactgcttcaaccgctcaaatacttggaaacaatgaatgttttgagccttatacatcaaacatatacacaagaagagttctttcaggtgaatttattgttgtaaataaacatcttttagaagatcttgtaaaattaggtttgtggactgaagagttaaagcaagagttaatgaaagcaaatggatcaatccaacacatagatggaattccggaggatattaaagagctctacagaacagtttgggaactaaaaatgaaagatgtaattgatatggctagacacagaggatatttcattgatcagtctcagtcattaaatttatttatggaaggcgcta

SEQ ID NO: 212170 - DNA, 1580 bp, Unknown
  Bacterial polypeptide expressing nucleotide sequence isolated from the Sargasso Sea
gctaataagagcatatttattaaagttcgataataaaacaattgaaagacctcaggacctttggatgagagtaactttaacagttactggtaatgagtttaatttagataaaataaaagaaacttataaaagtttatcaacaggtatgtatacacatgctactccaacattgtttaatagtggattaaaaatgcagcaattatcttcgtgctttttaataggtatggaggatgactccatagaaggtatttttaacactataaaagattgtgctctaatatctaaaacagctggtggtattggaatgcatgctcacaatatcagaggtagtggaagtagaataaaatctacaaatggcaaatctaatggccttattccatttttgaaaatctttaatgagactgctaaatcagttgatcaaggcggaggtaaaagaaaaggttcttttgcggtttacttagagccatggcactccgacattgagaagtttcttgaacttagaaaaaatacaggtgctgaagaatttagagctagagacttattctacgctttatggataccagatttattcatgaagagagtagaaaacgatgaagaatggacacttatgagtgaacatgaatgcccaggtctttcagatgtgtatggtgatgagtttgaaaaactttacactaaatatgaaaacgaattgaagcatttagaaaaaattaaagcaagagatctaatgtctaaaattatagaagctcagatagaaacaggacaaccctatatgctttataaggactctattaataataaatctaaccaaaagaatattggtatcattaaatcttcaaacctgtgtgcagaaatagttgaatactctgataagaatgagacatctgtatgtaacttggcttctatagctctgccaaaatttgtaaaaaaatcagataagaaattggtatatgattatgatgccctttacgaaactgcaaaattagctacaaaaaacttagatgaagtaattgatattaatttttatccaactgacaaaacggaaaaatctaataataaacataggcctataggtttagggatacagggacttgcagatgtctattttaagttgggaatagcttatgaatctgaggaggctaaagaaataaataaattaatttttgagacaatttactttggagctttagaagcttcatgcgagttagcaaaagataaaggagcctacgaaacatttaaaaattcaccaatttcagaaggcaagtttcaatttgatctatggaatgttaatccttcttcaaagtggaattgggattcactcagaactaaaattaaagagcacggtgtaagaaactctttaaccacagcttgtatgccaactgcgtcaacaggtattatattgggtaatactgaaacattccaaatacaaacctccaatatatataaaagacaaacactctcaggtgagttccttctagtaaatagatatttagtgaatgagctttctcaaagaggactatggaataaagaaatgagagacaaaataatcttagaaaatggatctgttgaaaacataaatgaaa

SEQ ID NO: 212171 - DNA, 1364 bp, Unknown
  Bacterial polypeptide expressing nucleotide sequence isolated from the Sargasso Sea
aatggtaaaatttgtagaaagaccacaacacatgttaatgagagtttcggttggaattcatctggatgatattgatgcagtgattgatacttatgagctaatgtcaaagaaatattttactcatgctacaccaaccctttttaatgccggtacaccaaaacctcagatgtcttcatgtttcctcttgactatgcaagacgatagtattgatggaatatatgatactttaaaacaaactgctaaaatatctcagtcagcaggaggtataggtctttcaattcataacattagatctactggatcttatatatcaggaaccaacggaacatctaatggtattgttcctatgttaagagtttttaatgatactgctagatatgttgatcaaggaggtggaaaaagaaaaggttcttttgctatttatattgagccatggcacgctgatatatatgacttcttagacctaaagaaaaatcatggtaaagaggaaatgagagctagagacctgttctatgcaatgtggatgccagacttgtttatgaagagggttgaaaataatgaagaatggactttaatgtgtccaaacgagtgtcctggactgtatgactgtcatggagatgaatttgataaattatacttaaaatatgaaaagcaatctaaaggcagaaaatcaataaaagcaagggaactatgggaaaagattcttgaatctcaaattgagacaggaactccttacatgctttacaaagattcttgtaatagaaaatcaaatcaaaaaaatcttggtaccataagatcttctaatctttgtaccgagatattagagtacacgtctaaagacgagatagctgtatgtaatcttgcatctattgctctaccaatgtttgttgaagacggggaatttaatcatcaaaaactttttgatgtaacagttagagtgaccaaaaacctaaataaggttattgatagaaattattatccagtaaaagaggctgaaaactcaaactttaggcatagacctgttggacttggtgttcaggggctagctgatgcatttatactgctaaggcttcctttcacttctgataaagcaaaagaattaaatcaagaaatttttgagacaatttactttgcagctcttactgcttctgttgaggaggcaaaaaaagatggtgtttatgaatcttataaaggatcaccaatttcaaagggtgagttgcaacataatatgtggggtgttgaggatgaagatcttagtggaagatgggattggaaagtcttaagaaaaagtatccttaaacatggagtaaggaactctttacttgttgcaccaatgccaaaccccgcaaagtacttctcaaatt

SEQ ID NO: 212172 - DNA, 2186 bp, Unknown
  Bacterial polypeptide expressing nucleotide sequence isolated from the Sargasso Sea
aatggcagacaactcacaggtatcgcaaaatatagcaacggaaaaaagtattaatttattaaatctcaatgttgttagaagggatggctcgattagttcttttaaatcagataaaatatcagaagctataaaaaaggctttcttggctcaaactaaaattagaaacaataaaaataaagaaaaagaacaagaggatggcattcataaaactgtagaggaattaacctataaagttgtttcagctcttacaagaaggatagctgaaggtgatatgattcatatagaagatatccaagatcaagttgagttggcattgatgagagatgaacatcataaagttgcaagggcttatgttttatatagggaacaaagggccgcttctaggtatcatacaaaaaaacttaaagaacaggtaggtgcaaaagcatcttctatggcagttactaaaagaaatggtgaaaaagaacctatatcacttgataaaattacaaatagagtttcagttttatcaacaggactaagtatagacccaattgtagtagtacaaaaagcagttcctggcctttacaacgaaattacttctgcagaaattgacatatatttagctgaaactgctgcctctcttactgttgagcatcctgattactcatatcttgcagcaagaattaaagcaaactcactccacacggatacacctggatttataattgctacaaagaatcttttcgatgatggcctgcttagagaggattattataataaagttatggcaagtgcagaagatatcgaatcaataattgattatgatagggattataattttgattattttgcttttaccactttaacaagagcttatctgttaaaatttgaaaacaaaactatcgaacgtccgcaggatttatggatgagagtagcattgactgtctcaggtgataaattcaattttgataaggttaaggagacttatgatagtctttctaatggatattatacgcatgcaacccctactttatttaacagtggccttaaaatgcaacaattgtcttcttgttttttaattagtatggaagatgactcaatagaaggaatattcaacacaattaaggattgtgctctaatctctaaaactgctggtgggattggaatgcatgcacataatataagaggaagtggtagtagaataaaatctactaatggtaaatctaatggcctaatcccgttcttaaaaatatttaatgaaacagcaaaatcagttgaccaaggtgggggtaaaagaaaaggttcttttgctgtttatctcgagccttggcatgctgatatagaacagtttttagaactaagaaaaaacactggggctgaagaatttagagcaagagatttattttacgcgctttggattcctgatttgtttatgaaaagagttgaggaagatggagattggacgctaatgagtgaacatgaatgtccaggtctttctgacaactatggtgatgaattcgtaagtttgtatgaaaaatatgaaaaagaaattccaaatttagaaaaaattaaggctagagaattaatgtcaaaaattattgaagcgcaaattgaaactggtcaaccatatatgctttacaaagactccattaataataaatcaaatcaaaaaaatataggtgtaattaaatcttcaaatttgtgtgcagaaatagttgaatactctgataaatcagaaacatcagtatgtaatctagcatctattgcattacctaaatttgttaaaaaatcaaaaaacaaaaaaaataaggagtacgactttaaagccctttataaaacttcaaagttagcaacaaaaaacttggatgaagttatagatataaacttttatccaactgaaaaaactgaaacatcaaataataagcataggccaatcggtcttggtatacaaggtctagcagatgtattttttgaacttgaaattgcttatgatagtgaagaagctaaaaaaatcaataaactaatatttgaaacaatttattttggtgcacttgaggcttcccatgaacttgcaaaagaaaaaggtgcgtattctacatttaaagggtctccattatctgaaggaaaatttcaatttgatatgtggaacacaagtccttctgaaatgtgggattgggaaacattaagagaaaaaataaaaaaag

SEQ ID NO: 212173 - DNA, 2002 bp, Unknown
  Bacterial polypeptide expressing nucleotide sequence isolated from the Sargasso Sea
ttgcgcgatgaatattatgaaaaagtaaaagctaacgctgaagagattgaaaaaattattgactacgatcgtgattattactttgattattttgcattgactactttgttcagagcttatcttttacaatcaaacaataaaacagcagaaagacctcaggatttatggatgagagtcgctttatgtgtgtccggagataagtttgatttttatcaggttaagaaaacttatgacagcctatctcagggtttctacacacacgcaacccccactctatttaatagtggtttaaagatgcaacaattgtcgtcctgttttctaattggaatggaagatgactctatcgaaggaatttttaatactgtaaaagactgcgctttaatttcaaaaaccgctggtggcattggtcttcatgctcataacattagaggtggcggtagccgtattaagtcaaccaatggcaagtctaatggattgatacctttccttaaaatttttaatgaaacagcaaggtctgttgatcagggtggaggtaaaagaaagggttcttttgctgtctatttggagccatggcatgcagatattgaggcttttttagagcttagaaaaaatactggagctgaggaatttagagccagagacttattctatgccttatggatccctgatttatttatggaaagagtcgaagaagatgccgattggactctaatgagtgaacacgaatgccctggtttatcggatacatatggcaaggagtttgttgatctttatacaaaatatgaaaatgaaatgcctgacttaaaaagaataaaggcaagagctttaatgtctaaaataatcgaagcccaaattgaaactggtcagccatacatgctttacaaagatgctgtgaataataagtctaaccaaaaaaatattggtgtcattaaatcttctaatctctgtgcagagatagtggagtattctgaaaaagatgaaactgctgtttgtaaccttgcgtcaattgcattaccaaaatttgtaactgatgaaagtaaatttgattatcaaaacttatatcaagttgcaaaactggcgactaagaatttagatcaagttattgatataaatttctatcctactaataaaactgaaaactcaaatagtcgtcaccgtcctattggtcttggtatacagggtttagcagatgtttattttaaaatgaatatcccttatgactctgttcaagcgcaaataattaataaacaaatttttgagacaatttattttggagctttagaagcatcaatggaacttgctactgataaggggccttactctacttttaaaggttcccctctatctgaagggaaattccaatttgatctttggggtgtgaaaccgtcaagtatgtgggactggaagggattaatggagaaaatccaaaagcatggtgttcgaaactctttgaccactgcatgtatgcctacagcctccactggtattatcctaggaaatactgaaacgttccaagtacaaacatcaaacatttataaaagacaaactctctcaggtgaatttttattagtaaatcgtcaccttgttaaagaacttatgaagagaaacttatggagcaaagaattacgtgatcaaattattttggaaaatggctctgtacaaaatattgaaggatttcctgaagacttaaaagatgtttataaaactgtttgggaaacatctcaaaaaacagttatagatatggcagctgatagagcgccatttattgaccaaacccaatccatgaacttatggttggcaacacctacttttggaaaagtaaactccatgcacatgtatgcatggaaaaaaggcttaaaaacaggcatgtattacctgcgaagccgatcagccgtagacgcagttaaagtaacagtgtcttctgaaaaaaaagcaaaagagtcttatgtcaaagaggcgcaatctaatgaacccgaagattgtgtaacatgtagtgcgtaag

SEQ ID NO: 212174 - DNA, 666 bp, Unknown
  Bacterial polypeptide expressing nucleotide sequence isolated from the Sargasso Sea
gctactatgacgatttaatccaatcagtgaacctctatcatttatgtggtgaaggcactcatgttgtggatggtatcagccacaccatcagcctgcgcgagctgaagcgtaagctctatatctgtattttgtcggtcaacgtgctggaagccatccggttttacgtcagcttcgcttgtagttttgcctttgctgagcgggaactgatggagggcaatgccaaaatcatcaaactgattgcccgtgatgaagcactgcatttaaccggcactcagcatatgctgaatattatggccgctggcgaagacgacccggaaatggccattatcgccaaagaatgcgaagacgaagcctatgccatattccgtaaagcggctgagcaggagaaagactgggctgagttcttatttaaagatggttctatgattggcttaaacaaagatattttgtgccagtacgtagagtacatcaccaataacagaatgcaggctgttggcttaaagcccattttcagcacgacacagaaccctattccatggatcaatgcctggctggtgtctgataatgtgcaggtggctccgcaggaatcagaaatcagctcctatttagtaggtcaaatcgacaacgaaatggatggcgctgacttcggcgattttgatctctgat

SEQ ID NO: 212175 - DNA, 1149 bp, Unknown
  Bacterial polypeptide expressing nucleotide sequence isolated from the Sargasso Sea
tgctcttacaacactaatcagggcatatttattaaagtttgataataaaacaattgaaagacctcaagacctatggatgagagtaactttaacagttaccggtaatgagtttaatttagataaaataaaagaaacttataaaaatttatcaactggtacgtatacacatgctacgccaactttgtttaatagtggattaaaaatgcaacaattatcgtcgtgctttttaataggtatggaggatgattctattgaaggtatttttaacaccataaaagattgtgctctaatatctaaaactgcaggtggtattggcatgcacgcacacaacattagaggtagtggaagtagaataaaatcaacaaatggtaaatctaatggtcttattccatttcttaaaatttttaatgagactgctaaatcagttgaccaaggtggaggtaaaagaaaaggttcttttgcagtttacttagagccctggcatgctgacattgagaaatttttagaacttagaaaaaatactggcgccgaagaatttagagcaagagatttgttttacgctttatggataccagatttattcatgaaaagagtagaaaatgatgaagaatggacacttatgagtgaacatgaatgtccaggactttctgatgtttatggtgacgagtttgaaaaactttacactaagtatgaaaatgaaatgaagcatttagaaaaaattaaagcaagagatctaatgtctaaaattatagaagcgcagatagaaacaggacagccttatatgctctataaagactcaatcaataacaagtctaaccaaaaaaatattggtgttattaaatcttcaaacctgtgtgcagaaatagttgaatactcagataagaacgagacatctgtatgtaacttggcttctatagctctgccaaaatttgtaaaaaaatcagataaaaaattaatatatgactatgatgctctttatgaaacagcaaaattggccacaaaaaacttagatgaagtaattgatattaatttttatccaactgataaaacggaaagatctaataataaacacagaccaataggtttaggaatacggggtcttgcagatgtctacttcaagttaggaatagcttatgattctgaagaggc

SEQ ID NO: 212176 - DNA, 1318 bp, Unknown
  Bacterial polypeptide expressing nucleotide sequence isolated from the Sargasso Sea
aagagagctttgggaaaagattctggagtctcagattgagactggtacaccttacatgctttacaaagattctgcaaacagaaaatctaatcaaaaaaatcttggtacaattagatcctcaaatttatgtacagagatattggagtacacatcaaaagatgaaatagctgtttgtaatcttgcatctattgccttgccaatgtttgtagaggacggggaatttaatcatcaaaaactttatgatgttactgtcagagtaacgaagaatttgaataaggttattgatatgaattactatccagtcaaagaggcagaaaattcaaactttagacacagacctgttggtcttggagttcaagggctagctgatgcatttattcttttaagactcccttttacttctgataaagcaaaagagctgaatcaagaaatttttgaaacaatatactatgcagccttaaatgcttcagttgaagaagcaaagaaagatggtgtatatgagtcttataaagggtcgcctatttcaaaaggagaatttcagcataacatgtggggcgttgaagataaagaccttagtggaagatgggattggaaaaaattaagaaaagatgtattaaaacatggagtaagaaactctctgctggtagctccaatgccaactgcgagtacttctcaaattctaggtaacaatgagtgttttgagccttatacatcaaatatatatactagaagagttctttctggagagtttattatagtgaacaagcatcttttaaatgaccttgttgaacttaatttgtggaatgaggatatgaaacaagatcttatggcagcaaacggatcaattcaagatattgaaggtataccagatgatcttaaagaattatataaaacagtttgggaaatgagtatgaaggatataattgatatggctagacacagagggttctttattgatcagtctcaatcacttaatttatttatggaaggtgctacaatgtctaaacttacatcaatgcatttttatgcatggaaatcaggtttaaaaactggaatgtattatctgaggactaagtctgctgtcgatgctatcaaatttactttgaagaaaaaagaatcaaaacctgtagagccaaaagttgaagttgaggcagaagaagtaggagaggttgaaattacaagaacagaaaaagcaacagcatcaaaatctaaagaaaaacctgttgcggttgagccattatcaccggaggaactaaagcaaatcctgtcgcaatcaaaagaaaatgaggatgatgactgccttatgtgtggttcttaa

SEQ ID NO: 212177 - DNA, 957 bp, Unknown
  Bacterial polypeptide expressing nucleotide sequence isolated from the Sargasso Sea
cgccaccgcggtccggcccagatcatcgcccaggtggcgagccacatctatgggcggcaccaccatcaaccgcatcgacgaagtgctggccccctatgtgaccatcagctgggagaagcaccgggaagtggcgctggagtggggcatcagcgatgtggacgcctacgccatggcccgcaccgagaaggagtgttacgacgccttccagtcgctggaatatgaggtgaacaccctgcacaccgccaacggtcagaccccgttcgtcaccttcggctttggcctcggcgacagctggcagtcacgcctgatccagcgcgcgatcttgagcaaccgcatcgccggccttggcaagaacaagaagaccgccgtgttcccgaaactggtgttcgccatcaaggatggcctcaaccacaagcagggcgatcccaactacgacatcaagcagctggcgctggagtgcgcctccaagcggatgtacccggacatcctcaactacgaccaggtggtcaaggtgaccggctccttcaagactcccatgggctgccgctccttcctcggtgcctacgaggagcacggcgagctggtccacgaagggcgcaacaacttaggggtggtgagcctcaacctgccgcgcattgccctgaaatcccgcgatgaagcggatttctgggacaagctggatgccgccttgcgggtagccaagaccgcactgatgtaccgcatcaagcgcctcgacggggtcaaggcccgggtcgcgcccatcctctacatggaaggggcctgcggggtacgcctgaaggcggacgacaatgtcagcgagatcttcaagcacggccgcgcctccatctcccttggctacatcggggtacacgagaccatcaacgccctgtttggcgatcaggtgcacctgtttgacagcgccgaactgcagcagaaaggcatcgccatcattgcgcg

SEQ ID NO: 212178 - DNA, 2119 bp, Unknown
  Bacterial polypeptide expressing nucleotide sequence isolated from the Sargasso Sea
atgccagtcgtgatcaagcgggatggttgccgcacaccttttgatgaaacaaggataagagatgcagtgatagcggctgcaaactcggttgggatagaggatgctgactacgccgcgacggttgccgcctgtgtgagggagcgagtggcgaatctggcagaagtcgagatccaccatttacaggacgcagttgaaaatctcttgatggaaggtccttacaaatccttggcgcgggtctatatcgagtatcgccacgacagagatatttgccgcgatgcgaccagtaagctcaatctcgaaatccgtggtttagtcgagcagagcaatgcggcactgttaaatgaaaacgccaataaagactctaaagtgatcccaacccagcgggatctgctcgcgggtattgtcgcgaagcattacgcaaagagtcatattctgccaaaggatgtcgtggccgcccatgaacttggtgaaatccattatcacgacctcgattattcgccgtttttcccgatgtttaactgcatgttgattgatttggcgggcatgttgacacacggttttaagatgggcaacgccgaaattgagaccccaaaatccatctccaccgctactgctgttactgcgcagattattgcccaagtggcgagccatatttatggcggcaccacgattaaccgtatcgatgaagtgctcgcgccttttgtggcgaagagctatgacaaacactatcaagtggcgctcaactggcagattaaagacgccaaggcctatgcgacggcgctcaccgaaaaagaatgccatgatgcttttcaatcccttgaatatgaagtgaataccttacataccgctaatgggcaaacgccctttgtgacctttggttttggtcttggtacctcgtgggagtcgcgcttaattcaacaatccatgttgaaagtgcgtatgacgggcctcggtaaaaatcgtaagacagccgtgttccctaagttagtgtttgcgattcgtgatggtattaaccacaaggtcggtgattgcaactacgatgtcaaacaaatggccctaaaatgcgccagtatgcgtatgtatccagatattttgaactacgagcaagtggaaaaggtcacgggttcatttaaaaccccaatgggctgtcgcagctttttaggcgcctataaagaaaatggcgaactggtccatgaagggcgcaataaccttggggtggtgagcttaaacttgccccgtgtagccctcgaggccaatggcgatgaagctgaattctatcgcattttagatgagcgtttacaacttgcccgccgcgcattagatacccgcatcgaacgcttaaatggcgttaaagccagagtcgcgccgattctgtatatggaaggcgcctgcggtgtgcgcctgcgcgccgatgatgatatcgcccaaatctttaaaaatggtcgggcatcgatttcattaggttatataggtttgcatgaaaccatcaatgcgctctatggcactgaaactcatgtgtttgatgatgccaagcttcgtgaaaaagcagtggcgattgtcgcacaccttaaagcggctaccgatgcatggaaggcagaaaccggttatgggtttagcctttatagcaccccgagtgagagcctctgcagccgtttctgtaaactcgatgcgcgccaattcggcgtggttgcaggggtcaccgataaaggttattacaccaatagcttccacttggatgtggaaaagcgggtgaatccctacgataaaattgattttgagcagccatatcctgcgatcgccaatggcggatttatttgctacggcgaataccccaatatgcagcacaacattgaagcgctcgaaaatgtgtgggattacagctatagccgcgtgccttactacggcactaacacgccgattgatgaatgctacgactgcggttttaccggtgagtttagctgtaccagtaaaggttttacttgtcctaaatgcggcaaccatgagccaagccgagtatccgtcacccgccgtgtatgcggttatttaggtagccccgacgccagaccattcaaccatggcaagcaagaagaagtgaaacgcaggatcaaacacttgtaac

SEQ ID NO: 212179 - DNA, 2119 bp, Unknown
  Bacterial polypeptide expressing nucleotide sequence isolated from the Sargasso Sea
aatgccagtcgtgatcaagcgggatggttgccgcacaccttttgatgaaacaaggataagagatgcagtggtcgctgctgcaaactcggttgggatagaggacgcagattatgccgcgacggtagccgcttgtgtgagagaacgagtggcgaatatggcagaagttgaaatccaccatctacaggatgcggttgaaaacctattgatggaaggcccttataaatcattggcacgggtctatattgaatatcgtcacgacagagacatttgccgcgatgctaccagtaagctcaatcttgaaatccgtggtttagtcgagcagagcaatgccgcgctgttaaatgaaaacgccaataaagactctaaagtgatcccaactcaacgggatctgctggcgggcatcgtggctaaacattatgccaagagccatattctgcctaaggatgtggtggctgcgcacgaaatcggtgagatccactatcacgatcttgattactcgccctttttcccgatgtttaactgtatgttgattgatttggcgggcatgttgacccatggctttaagatgggcaatgccgaaattgagaccccaaaatcgatctctaccgctacggccgtgacggcgcaaattattgcccaagtggcaagccatatctatggcggcaccacgattaatcgtattgatgaagtgttagcgccttttgtggccaagagttatgacaaacattatcaagtggcactgaattggcagattaaagatgctaaagcctatgccactgctcagactgaaaaagaatgccacgatgctttccaatcccttgaatatgaggtgaataccttacataccgctaatggacaaaccccgtttgtgacctttggtttcggtctaggtacttcgtgggagtcgcgtttaattcaacaatcgatgctgaaagtacgcatggcggggttaggtaaaaatcgtaaaacagcggtgttccctaaattggtgtttgccatccgtgatggtattaaccacaaagtcggcgattgcaattacgatgtaaaacaaatggcccttaaatgcgccagtatgcgcatgtatccagatattttgaactatgagcaagtggaaaaagtgacggggtcgtttaaaacccctatgggttgccgcagctttttaggttcctataaagaaaatggtgaactcgtccatgaagggcgcaataaccttggcgttgttagcttaaacttgccacgtgttgcgctagaagcgaatggcgatgaggctgagttctaccgtattctggatgagcggctattacttgcccgccgcgcattagatacgcgtatcgaacggttaaacggagtgaaagccagagttgcgccgattttgtatatggaaggtgcctgtggcgtgcgcttgcgtgccgatgatgatatcgcccaaatctttaaaaatggtcgggcatcgatttcattaggttatatcggtttacatgaaaccattaatgcgctctatggcactgaaacccatgtgtttgatgatgctaagcttcgtgaaaaagcggtggcgattgttgcgcaccttaaagcggctaccgacgcatggaaggccgaaacgggttatggattcagcctttatagcaccccaagtgagagtctctgcagtcgtttttgtaagctcgatgcgcgccagtttggtgtggttgcgggtgtaaccgataagggctattacaccaatagcttccatttagatgtggaaaagcacgtgaatccttacgataaaatcgattttgagcagccatatcccgccatcgccaatggtggttttatttgctacggcgaatatcctaatatgcagcacaatatcgaagcgctcgaaaatgtctgggattacagctatagccgtgtaccttactacggtactaacacgccgattgacgaatgttatgattgtggttttaccggcgaatttagctgtactagtaaaggatttacttgccctaaatgcggcaaccatgagccaagtcgagtgtctgttacgcgccgtgtgtgtggttacttaggcagtcccgatgccagaccgttcaaccatggtaagcaagaagaagtgaagcgtaggatcaaacacttgtaa

SEQ ID NO: 212180 - DNA, 856 bp, Unknown
  Bacterial polypeptide expressing nucleotide sequence isolated from the Sargasso Sea
aactacgatcaggtggtgaaagtcaccggttcgtttaaaacgccaatgggctgccgcagcttcctcggcgtctatgaagaaaatggcgagcagatccacgacggccgcaacaatatcggcgtgatcagcctgaacctgccgcgcattgcgctggaagcgaaaggggatgaagcgacgttctggaagctgctggataaccgtctggagctggcttacaaagcgctgatgacgcgtattgctcgcctcgaaggggtgaaagcgcgcgtggcaccgatattgtacatggaaggcgcctgcggcgtacgcctgaaggccgacgacgatgtatcagagatctttaaaaacggtcgcgcctccatttcgctgggctatatcggcatccacgaaaccatcaacgcgctgtcgggtaatcagcatatgtacgatagcgacgcgctgcgtgaaaaaggcgtcgccatcgtccgacgtctgcgtgacgccgtcgaccgctggaaagaagagaccggctacggcttcagcctgtacagcacgccgagcgaaaacctctgcgatcgcttctgccgtcttgataccgccgaatttggcgtcattgagggcgtgaccgataagggctactacaccaacagcttccacctcgatgtcgagaaaaaggttaacccgtacgacaagatcgacttcgaagcgccgtatccgccgctcgccaacgggggcttcatttgctacggcgaatacccgaatatccagcacaacctgaaagcgctggaagatgtctgggattacagctaccagcatgtcccctattacggtaccaacacgccgatcgatgagtgctatgagtgcggctttaccggcgagt

SEQ ID NO: 212181 - DNA, 1807 bp, Unknown
  Bacterial polypeptide expressing nucleotide sequence isolated from the Sargasso Sea
cctggtggagcagaccaacgcggccctgctcaacgagaacgccaacaaggactccaaggtgatcccgacccagcgtgacctgctggcgggcatcgtcgccaagcattacgccaccagtcacatgctgccccgcgatgtggtgcaggcccacgagagcggcgatctgcacttccacgatctcgactactcccccttcttccccatgttcaactgcatgttgatcgacctgaaggggatgctgacccacggcttcaagatgggcaacgcggagatcgacactcccaagtccatcagcaccgccaccgcggtcacggcccagatcatcgcccaggtggcgagccacatctatggcggcaccaccatcaaccgcatcgacgaagtgctggccccctatgtgaccatcagctgggagaagcaccgggaagtggcgctggagtggggcatcagcgatgtggacgcctacgccatggcccgcaccgagaaggagtgttacgacgccttccagtcgctggaatatgaggtgaacaccctgcacaccgccaacggtcagaccccgttcgtcaccttcggctttggcctcggcgacagctggcagtcacgcctgatccagcgcgcgatcttgagcaaccgcatcgccggccttggcaagaacaagaagaccgccgtgttcccgaaactggtgttcgccatcaaggatggcctcaaccacaaacagggcgatcccaactacgacatcaagcagctggcgctggagtgcgcctccaagcggatgtacccggacatcctcaactacgaccaggtggtcaaggtgaccggctccttcaagactcccatgggctgccgctccttcctcggtgcctacgaggagcacggcgagctggtccacgaagggcgcaacaacttaggtgtggtgagcctcaacctgccgcgcatcgccctgaaatcccgcgatgaagcggatttctgggacaagctggacgccgccttgcgggtagccaagaccgcactgatgtaccgcatcaagcgcctcgacggggtcaaggcccgggtcgcgcccatcctctacatggaaggggcctgcggggtacgcctgaaggcggacgacaacgtcagcgagatcttcaagcacggtcgcgcctccatttcgcttggctacatcggggtacacgagaccatcaacgccctgtttggcgaccaggtgcacctgtttgacagcgccgaactgcagcagaaggccatcgccatcattgcgcgcctcaaggcggccaccgacgagtggaaggaggagaccggctacggtttcagcctctactccaccccgagcgagaacctctgctcccgcttctgccgcatcgacgccaaggagtttggcgtggtggcgggggtgaccgacaagggctactacaccaacagcttccacctcgacgtggagaaacaggtcaatccgtacgacaagctggacttcgaggcgccctatccgcccatcgccagcggcggcttcatctgctacggcgagtaccccaacatccagcacaacctggaagcgctggagaacgtctgggactacagctatgacaaggtgccctactacggaaccaacacccccatcgacgagtgctacgactgcggcttcaccggcgagttcgagtgcacctccaagggctttacctgcccgcgctgcggcaaccacgacccggccaaggtgtcggtgacccgccgtgtctgcggctacctcggcagcccggatgcgcgccccttcaatgcgggcaagcaggaagaggtgaagcgccgcgtcaaacatatgtag

SEQ ID NO: 212182 - DNA, 2140 bp, Unknown
  Bacterial polypeptide expressing nucleotide sequence isolated from the Sargasso Sea
atgacaccgcatgtgatgaaacgagatggctgtaaagtgccgtttaaatcagagcgcatcaaagaagccattctgcgtgcagctaaagcagcgggagtcgatgacgcagattactgtgccaccgtcgcagaagtcgttagtagccagatgaatgagcgcagccaggtcgatatcaacgagatccagacagcggtagaaaaccagctgatgtctggtccgtacaaacaactcgcccgtgcgtacatcgaatatcgccacgaccgtgatatccagcgtgaaaagcgtggccgtctgaaccaggaaattcgtggtctggttgagcaaaccaactctgctctgctgaacgaaaacgccaacaaagacagcaaagtgatcccgacccagcgtgacctgctggccggtatcgtcgccaaacactatgcgcgtcagcacctgctgccgcgtgatgtcgtccaggcgcacgagcgtggtgatattcactatcacgatctcgactactctccgttcttcccaatgtttaactgcatgctgatcgacctgaaaggcatgctgacgcagggctttaagatgggtaacgcggagattgagccgccaaaatccatctccaccgcgacggccgtcaccgcgcaaattatcgcgcaggttgccagccatatttatggcggtaccaccattaaccgtattgacgaagttctcgcaccattcgtgaccgagagctttaacaagcatcgcaaaaccgctgaagagtggcagatcccggatgccgacggttatgcgcattcccgtaccgagaaagagtgctacgacgcattccagtctctcgagtatgaagtgaataccctgcataccgctaacggtcagacgccgttcgtcaccttcggttttggcctgggaaccagttgggaatcacgtttgatccagcagtccattctgcgtaaccgcattgcgggcctcggtaaaaatcgtaaaaccgctgtgttcccgaaactggtgtttgcgattcgtgacggtctgaaccacaaatttggcgatcctaactacgacatcaaacagctggcgttggagtgcgcgagcaagcgtatgtatccggacatcctgaactacgatcaggtggttaaagtgaccggttcgttcaaaacgccgatgggctgccgtagcttcctcggcgtgtgggaaaacgagaacggcgaacagattcacgacgggcgtaacaacctcggcgttatcagcctcaacctgccgcgtatcgcgctggaagcccacggcgatgaagccaccttctggaaactgctcgacgatcgactggtgctggcacgtaaagcgctgatgacccgtattgcgcgtctggaaggcgtgaaagctcgcgtggcgccaatcctgtatatggaaggtgcctgcggcgtgcgtctgaaagcggacgatgacgtgtctgaaatctttaaaaatggacgcgcgtctatctcgctgggttacatcggcattcacgaaaccattaacgcgctgtttggtgacaaacatctgtacgacagcgagcagcttcgcgccaaagctatcgccattgtcgaacgcctgcgtcaggcagtcgatcagtggaaagacgagaccggctacggcttcagcctgtacagcacgccgagcgaaaacctgtgcgatcgtttctgccgtctggataccgccgagtttggtgtggtgccaggcgtgaccgataaaggttactacaccaacagcttccacctcgacgtggagaaaaaggttaacccgtacgacaagatcgatttcgaagcgccatacccaccgctggcgagtggaggcttcatttgctacggcgaatacccgaatattcaacacaacctgaaagcactggaagacgtctgggattacagctatcagcacgtgccgtattacgggaccaacacgccaattgatgaatgctacgagtgcggctttaccggtgagttcgagtgcaccagcaaaggctttacctgcccgaaatgtggtaaccacgacgccgcgcgcgtgtcggtcacccgccgcgtctgcggttatttaggcagcccggacgcccgtccgtttaacgccggtaagcaggaagaagtgaagcgccgcgttaagcatttgggtaatgggcagataggttaat

SEQ ID NO: 212183 - DNA, 1030 bp, Unknown
  Bacterial polypeptide expressing nucleotide sequence isolated from the Sargasso Sea
tgttgcaccaaaattggttccattattcccgatgaagctagaacatttggaatggagggtttctttcaaaaaataggtatttatgctcatgaaggtcaaaaatatgagccagaggactcagcacaactttcatcttatagagaagaaaaaagtggtcaggtattagaagaaggtattacagaagctggttcaatgtcttcttggatagcagctggaacagcatatacaaatcatgatattgaaatgataccaatttatcttttctattcaatgtttggctttcaaagaattggagattttgcttgggctgcaggagacagtcaagcgagaggctttttaattggtgcgactgcaggaagaacaacacttgcaggagaaggtcttcaacaccaagatggtcatagtcatttgttagcatcaacaattccaaactgtatttcttatgatccaacattccattatgaattagctgtgatttttagagaaggtttacgaaggatgcatgaaaaaaatgaaaatattttttattatattacaacaatgaacgaaaattattcccatcccgcaatgccagatgattgtgaggatggaattctcaagggaatgtataaaattaaagaaacatcaggttctaaagaagcaaaaattcaattattaggctctggaacaatactaagagaaatgatggcagcatcagaaattcttaaaaaagaatatcaggttgatagtgaagtttggagtgttactagttttaatgagttaagaaaaaatggaatggaagttgaaagatttaaccttctaaatcctgcagaaacaaataaaaaatcatatgtagaggaatgtttaggcaaacaacaaggtcctatccttacagccactgactatatgagaataaatgctgatcaaataagaccttttacaaaaaaaagcttttattcattaggaactgacggatatggaagaagtgatacaagaaaaaatttaaaaaatttttttgaagtagataaagaacatatagttgcatatagcc

SEQ ID NO: 212184 - DNA, 256 bp, Unknown
  Bacterial polypeptide expressing nucleotide sequence isolated from the Sargasso Sea
agatacagtaaaaattttagagcaaaaactcgcacatataaaaactcccattactttgtctataattggatgtgttgttaatggaccaggggaagcggccatgacggatattggtataaccggaggtggaaaaggaaataacatgttatatttaaaaggtattcaaacagaaaaattatccaaccaagaaataataaaaaaagtagttgatttagttgagaaaaaagctttggaaatagataataataaaaaatga

SEQ ID NO: 212185 - DNA, 243 bp, Unknown
  Bacterial polypeptide expressing nucleotide sequence isolated from the Sargasso Sea
aaaaattagaagatagattatctcatataaaaactcccatttcgttatctataattggatgcgtagttaatggaccaggtgaggcagctcaaactgatataggtataactggaggaggaaagggtaataatatgctttatttaaatggagtagaaagtgaaaaaatatcaacggacgagatgatttctaaagtggtaagattggttgaagaaaaagctgaagaaattgaaaaaatacaataat

SEQ ID NO: 212186 - DNA, 234 bp, Unknown
  Bacterial polypeptide expressing nucleotide sequence isolated from the Sargasso Sea
aaaagctatcccatataaaaactccaataactctttcaataataggatgtgttgtaaatggacctggtgaggctgctcaaacagatattggtattacaggtggaggtaaagatagtagtatgctttatttaaaaggcttacaaactgaaaaaataaataatcaagaaattgtttcaaagatagttaatctggttgaaaaaaaagctattgaaattgaaaataataagcaatgat

SEQ ID NO: 212187 - DNA, 232 bp, Unknown
  Bacterial polypeptide expressing nucleotide sequence isolated from the Sargasso Sea
aaggacggatcatctaaaaggaataaagatcggtataatggggtgcattgtcaatggacctggggaaatggctgatgcagattatggttatgtagggacaggacctggattgatatctttatacaaaggacaaaatgttatcaaaaaaaatgtgaatgcaaatgaagcagttgatgcattgatccaactaatagactcacatggtgattgggtagaaccaacaaatgtttaa

SEQ ID NO: 212188 - DNA, 214 bp, Unknown
  Bacterial polypeptide expressing nucleotide sequence isolated from the Sargasso Sea
gctggtagttttttgcccaggaagtattaaatcatcaattggtttaggaaatctgcttttagatggtattggagatacaatcagggtttctttatcggatgatcctgttgaggaaattaaaataggcaatgaaatattaaaatctttaaatttaagaaatagaggagtaaagataatttcttgcccttcatgtgcaagacaagcattcaggtaa

SEQ ID NO: 212189 - DNA, 749 bp, Unknown
  Bacterial polypeptide expressing nucleotide sequence isolated from the Sargasso Sea
gatgtttggaggaacaactggaaagctaacagggacaatcaaatcagcattagataacaacccccttgttggcgcaaatatcattattgaaaatacagatctcggaacagcaacagatataagcggagactatgtgattcttaatatcgcacctggcaagtataatgtaacaatacgaatgatcggatacggggtaaagaaatatgagaacattcgaatctctattgataagacaacacgtctgtctgcccagttaaatatcaaagcagtagaaggccaggaggtaattgttagcgctaccagaccactaattgatttcgataaaacaaattcagaggctatagtcacatctgaagaattagaggtgatgcccattgaggatgttttagatgtaatcaaactgcagggcggagtaacacaggatgcaggcggaggcattcacattcgcggaggcagatctagcgaggtagcctatctagttgatggcgtatctgtaacggatgcctatgacggagcaatagccgtcaatatcgaaaatgcaaatatccaagagcttcaggttatcagcggaaccttcaatgcggagtacggaaaagcgatgagcggaattgtaaatatcgtaacgaaggatggtagtgacaaatttgaatcttacctgcaattatattctggagatcaccagtccgatgacaatatgtataaagacctaagctccctacatctaaccaacgatagaaatctaactctta

SEQ ID NO: 212190 - DNA, 365 bp, Unknown
  Bacterial polypeptide expressing nucleotide sequence isolated from the Sargasso Sea
ggcagttgaaataggagccaccactttaattctctcaaatcacggcggtagacaacttgatcagacgatttcaccgatagggttgctcccagaggtgaagagcgcggtcggggatgatgtcgagataattgtagacggcggaattcgtagaggctcagatatctttaaagcaatcgctttgggcgcatctgcctgttcaattggaaggccttatctttatggccttgccgtaaacggcgaagccggtgtcgtgaaatctttagaaatattgcgtgatgaatttacacgcacgatggctctaatgggtgttacttcggtttcgcaaattgatgagagctgtctacggaagcgaaaacggttatgaa

SEQ ID NO: 212191 - DNA, 286 bp, Unknown
  Bacterial polypeptide expressing nucleotide sequence isolated from the Sargasso Sea
tttattactgggaaaagactcagtatatttttatacaggagtagaggggcaatatagcattggtccaatgaatatttcaccaagctttacacctggatattatgaaaaaggaagtggaaaagaccttggtagtgctttagagtttaaaagcgaaattaaagttggcttcgacatattaaaagactcgaaacttggttacagctatagccatatttctaataatgactggggaagtaaaaatcccggtacagataatcaacaaattatatttcaaaccaaattttaa

SEQ ID NO: 212192 - DNA, 388 bp, Unknown
  Bacterial polypeptide expressing nucleotide sequence isolated from the Sargasso Sea
aagaatatctttgtcagatgatccaccaaaagaagcaagaattggaaacgaaattttaaaatctttaaatttaagaaatagaggtgttaaaattatatcttgtccctcatgtgcacggcaagcatttccagttataaatactgttaaaatattagaagaaaaactatctcatataacaacgcctattactttatcagtaattggatgtgtagttaacggtccgggtgaggctgctatgaccgatgttggaattactggaggtggaaaaggaagcaatatgctttacctatctggtattcaatctgaaaaagttttatcggatgatataattacaaaagtagtagatagtgtagaaaaaaaagctagagagctagaaaatagcaaataa

SEQ ID NO: 212193 - DNA, 92 bp, Unknown
  Bacterial polypeptide expressing nucleotide sequence isolated from the Sargasso Sea
aaaagatttacaaaaaaaatatggagaacctaatgcagatgcccttgttgaatcggctctaaggcatgtagaaattttagatagattttaat

SEQ ID NO: 212194 - DNA, 346 bp, Unknown
  Bacterial polypeptide expressing nucleotide sequence isolated from the Sargasso Sea
aggttttgaaattttaaaaagtttaggattaagaaatagaggtgtgaaaattatctcatgcccttcatgcgctagacaacaatttgaagtaataaaaacagttaaaaacttagaaaaaaaattagatgatatttctacaccaataaccgtctcaataattggatgtgtagttaatggtccaggtgaagcaactatgacaaatattggaataactggaggtggaaatgatacacacatgatttatcttgatggtaaaaaaaataatgttgtaaaaaatgttgatttagaaaattatcttgaagatcttataaggaaaaaaactaaagaaatagaaattagtaattaa

SEQ ID NO: 212195 - DNA, 328 bp, Unknown
  Bacterial polypeptide expressing nucleotide sequence isolated from the Sargasso Sea
gatgtttggaggaacaaccggaaagctagcagggacaatcaaatcagcattagataacagcccccttgttggcgcaaatatcattattgaaaatacagatctcggaacagcaacagatataagcggggactatgtgattcttaatatcccacctggcaagtataatgtaacaatacgaatgatcggatacgaggtaaagaaatatgagaatattcgaatctctattgataagacaacacgtctgtctgcccagttaaatattgaagcagtagaaggccaggaagtaattgttagcgctaccagaccactaattgatttcgataaaaca

SEQ ID NO: 212196 - DNA, 331 bp, Unknown
  Bacterial polypeptide expressing nucleotide sequence isolated from the Sargasso Sea
gatgagcatcagaccatttagagatataaaaaggaaaaaaactaaagcagttcaaataggcaatataatattgggtgataataacccaataacagttcaatcaatgacaaatactttaactactgatgtgaaagcaacattaaaacaaattcatgatattgcaaatgaaggagctgagctagtaagagtttccattcccgatgttgaaagcagtaaagctcttaaagaaattgttaaacactcatcagtgcctataatcgcagacatacattaccactacaaaagagcaattgaatctgctgaagcagggagcaaatgtttaagaattaat

SEQ ID NO: 212197 - DNA, 342 bp, Unknown
  Bacterial polypeptide expressing nucleotide sequence isolated from the Sargasso Sea
ttaaagtcggaaatgaaattttaaaatctcttaatttaagaaatagaggtgtaaagattatttcatgtccatcctgtgccagacaagcatttaaagttattgaaacagtcaaagaattagaaaatagattatctcatataaaaaaacctataactttatctattataggatgcgttgttaatgggcctggtgaagctaaacaaacagaaattggaataactggtggtggaaaagataatcacatgttgtatttaaatggtttagaaacagaaaaagtaatgacaaaagatatgatcaataaaattgtttctttagtagaagaaaaagcttcaaatctataac

SEQ ID NO: 212198 - DNA, 850 bp, Unknown
  Bacterial polypeptide expressing nucleotide sequence isolated from the Sargasso Sea
ggtttttttcaaaaagtcgggatatatgctcatgaaggacaaaaatatgaacctgaagattctgctcaattgagttcttatagagaggaaaaaagtggacaagttttagaggaaggaattacagaagccggagcaatgtcatcctggattgctgcaggaacctcatacactaatcatgatattgagatgatacctatatatcttttttattcgatgtttggatttcaaagaataggtgatcttgcatgggctggtgcagatagtcagtctaggggatttttaattggagccacagctggaagaacaactctcgcaggagaaggactacaacatcaagatggtcatagtcatcttatggcatcaacaattccaaactgtgtatcatatgatccgacttttcattatgaattggcagttatttttagagatggattaaaaagaatgcatgaaaaaaaagagaatattttctactacattacaactatgaatgaaaattatcctcatccagctatgccggaagataaatcttgtgaagaaggaattttaaaggggatgtataaaattaaagaatttaataaatataaaaaatctaaaattcaatttttaggatctggtacaattttaagagaaatgattgcaggcgctgaaatattgcagaatgaatatcaaatagatagtgagatttggagtgtaacgagttttaatgagttaagaagagatggtttagaagtagaaagatataatcttttgaatccagataaagaaccaaagaaatcttatgttgaaaaatgtttaggtaaaacagaaggacctgtcttagctgcttcggattacatgagaatgaattcgg

SEQ ID NO: 212199 - DNA, 365 bp, Unknown
  Bacterial polypeptide expressing nucleotide sequence isolated from the Sargasso Sea
tcaagagataaaagtaggaaacgaaattttaaaatctctcaacttacgaaatagaggagtaaaaattatttcttgtccctcctgtgcccggcaagcatttgaagtgatagagacagttaagtccttagaagaaaaactttctcatataaaaacccctattaccctgtcaattataggatgtgtagttaatggaccaggtgaagctgcgcttacagacataggaataacaggaggaggaaaaggcagcaatatgctttatttaaaaggagtacaaacagaaaaactaaacaattccgaaattatttctaaagttgttgggttggttgaaaaaaaagctgaagaaattgagaatgaaaggcaatgat

SEQ ID NO: 212200 - DNA, 333 bp, Unknown
  Bacterial polypeptide expressing nucleotide sequence isolated from the Sargasso Sea
aaatattaaagtctttagggataagatctagaggcgtaaatattatttcttgcccctcctgtgcaagacaagcctttccagtaattgaaacagttaaaactcttgaaaaaaaactctctcatataaccaaaccaattaacctttcaataattggttgtgttgtaaatggaccaggtgaagctgctcaaactgaaattggattaaccggcggtgggcaagataataatttactttatctttcaggacttccacataaaaaggtggcaagctcagaaattattgacaaagttgtgaagcttgttgagaaaaaagtaagagaaactgaacaatgat

SEQ ID NO: 212201 - DNA, 292 bp, Unknown
  Bacterial polypeptide expressing nucleotide sequence isolated from the Sargasso Sea
aataatctcttgtccttcgtgcgcaaggcaagctttcccagtaatagatacggttaaaattttagaagataaactttcgcatataaaaaaacctttaactctttctattataggatgcgtggttaatggacctggagaggcagcacaaacagatatcggtctgaccggaggaggggaaggaaataatttattttatttgtctggaattccacatcataaagttgcaaacaaagaaattattgaaaaagtagtagagttagttgagtctaaagctaaagaaaaagtaaattaa

SEQ ID NO: 212202 - DNA, 388 bp, Unknown
  Bacterial polypeptide expressing nucleotide sequence isolated from the Sargasso Sea
aatgataaaaagacgagatacatataatgttgatgttggcggtgtagtgattggatcttcaaatcctattcgtattcaatctatgactaatacgcctaccgaagatgcttccgcaacagtagatcagataaagtcactatgtgacgctgggtctgaactagtaagagtgactgtaaataatgaaaaaagtgctgaaaatataataaatatcaagaatttactgattaaatctaattataatttacctattattggagattttcactataacgcacacatacttttatctgactatcctgaagctgctactgtgttggataaatatagactgaatcctggaaatattggaacgtctagtaagtatgatgataactttgcaaaaatatag

SEQ ID NO: 212203 - DNA, 259 bp, Unknown
  Bacterial polypeptide expressing nucleotide sequence isolated from the Sargasso Sea
gaagagcgccttgcgcatatcgctgagccgatcacgctgtccatcattggctgtgttgttaatggccccggcgaagcagcgatgacagatctcggcttcaccggcggcggcaaagaaagcggcatgatgtatgtgtcgggacgccccgatcataagctctcaaatgcagacatggttgagcgcatcgtggcgcaggtcgaagagaaagctgagcggctgaaagcgcagcgtgaggctgaagcggtcccagcggaatagc

SEQ ID NO: 212204 - DNA, 214 bp, Unknown
  Bacterial polypeptide expressing nucleotide sequence isolated from the Sargasso Sea
ttcgattattggttgtgtggtaaacgggccgggggaggcccgcgaaactgacattggacttaccggtggcggaaagggcacacatcagatttatctctcgggtatggccgatcatcgcctatcaaacggtgatattgttgaacatgtggttgatcttgttgaggcccgtgttgccgaattaaaagctgccgatgcggcactaaaacaatcgtaa

SEQ ID NO: 212205 - DNA, 398 bp, Unknown
  Bacterial polypeptide expressing nucleotide sequence isolated from the Sargasso Sea
tgttattgacaaagaaggtgatgatcaaaccaatttaataggtatagaacacagaaatccaaatttatttagaagcacttttttgggcaaaattgcacctgttagtggagcttttgttactggtaaaaactcattatatttttatacgggaatagagggacaatataatattggacctatgaatatctctccaagttttacacctggttactatgaaaaaggaagcggaaaggaacttggaagcgcattagaatttaaaagcgagatcaaagttggttttgatattttaaaagattcaactttaggttatagctatagtcatatatcaaataatgattggggtagcacaaatcctggaacagataatcaacaaataacattttcaaaaaagttttaaa

SEQ ID NO: 212206 - DNA, 820 bp, Unknown
  Bacterial polypeptide expressing nucleotide sequence isolated from the Sargasso Sea
gattgcggtccagagcatgaccgccacgtcgacccgcgatgtggaatcgacctcggcgcaagtgaatgcactgcacgcggcgggggccgatgtggtgcggatcgccgtcgatagccgcaaagatgcagaggcggtcgctcaaatccgcaagcgaaccgaagccaacctggcggtggatttgcaggagaactaccgactggccgagcaattggctccccacgtcgataaaattcgctacaacccgggacatctttaccaccacgagcctgacaagccgtggcaggagaaagtgcgacagatcgcagacgtggcggcggcgcacgattgcgcactgcgggtcggtgtcaattgcggaagcgttgacccggaaaaagtggccgcatttgaggagggagactccgtgggaccgatgctgcagagcgcactggatcactgcaactggctcgacgagatcggtttcacgcgatattgcgtttccttaaaggattccaatccccaactggtgatcgaggtcaatcagaagtttgccgcagagcggcccgacgtgcccttgcatttgggggtgaccgaagcgggcctgccacccgatggcatcatcaaaacgcggattgccttcgagcagttgatcagtcgcggcattggagatacggtccgcgtatcgctcaccgtaccgaatgaccggaaaccggaggagatcgtcgcgggccgcgagatccttgccgacatttctgcaggccgcgtgcggtccgtcgtgcagttcaatgccgaccggatcaatattatcagttgcccgagttgctcgcgggtcgagaatgaagcg

SEQ ID NO: 212207 - DNA, 313 bp, Unknown
  Bacterial polypeptide expressing nucleotide sequence isolated from the Sargasso Sea
gagagaggagtcagaataatctcctgtccctcgtgtgcaaggcaaggctttgaagtaattgaaactgttaaaatcttggaaaaaaaactttctcatataaaaaccccaattactttatctgtaattggttgcgtagttaatggtcctggagaagcagctttaacagatgtaggaataactggaggtaaaaaaggaaacaatatgctttatttatctggagtacaatctgaaaaagtttttacaaatgatatgattgataaggtggtaagtgaggtcgaaaaaaaagcttctgaactagagaatttgaaatgat

SEQ ID NO: 212208 - DNA, 230 bp, Unknown
  Bacterial polypeptide expressing nucleotide sequence isolated from the Sargasso Sea
aatgagcataagaccatttagagacatcaaaagaagaaaaacaaaagaaatttctgtaggtaaagttaaagtggggggaaacaatcctattacagtgcaatctatgactaacactcttactacagatataaaagccactattaatcaaataaatgaaattcaaggagagggtgctgatatagttagagtttcttgtccagacgagccgtcatccaaagctttaaaaagaa

SEQ ID NO: 212209 - DNA, 307 bp, Unknown
  Bacterial polypeptide expressing nucleotide sequence isolated from the Sargasso Sea
ggagttaaaataatatctgtcctttcttgtgctagacaaggttttcaagttatagaaacagttaaaattttagaagaaaacttttctcatattaaaactccaataaccctttcaataataggatgtgttgtaaacggtcccggtgaagcatctcaaacagatattgggataactggaggtggtcaaaatagtaatatgctttatttaaaaggagtacaaactgaaaaagtaagtaataaagaaataatatctaaggtagttgaactagttgaaaagaaggctgaagaaattcaatcaaaaaaataat

SEQ ID NO: 212210 - DNA, 397 bp, Unknown
  Bacterial polypeptide expressing nucleotide sequence isolated from the Sargasso Sea
tgatactatcagaatttcgttatcagataatcctgtagaggaagtcaaaattggaaatgaaatactaaaatccttaaatttaagagaaaggggagttaaaataatttcttgcccctcgtgcgcaagacaaggttttgaagtaattgaaactgtaaaaatattagaaaaaaaactttctcatatcaagacaccaattactttatctgtaattggatgtgtagttaatggacctggagaagcggcactaacagatgtggggataaccggaggcaaaaaaggaaataatatgctttacttgtccggagttcagtctgaaaaggtttttacaagtgacatgattgataaagtggttagtgaagtagaaaaaaaggcttctgaattggataattcaaaatga

SEQ ID NO: 212211 - DNA, 237 bp, Unknown
  Bacterial polypeptide expressing nucleotide sequence isolated from the Sargasso Sea
tagaagaaaaactttctcacataaaaacaccaatcaccttgtcaataataggatgtgttgtaaatggacctggagaagcatctatgaccgacataggtattactggaggtggaaaaggtaataatatgctgtatttatctggagttcagagagagaaggttttgaccaaagatatcattgaaaaagttgttacagaagttgaaaaaaaggtatttgagctggaaaacctaaaatgat

SEQ ID NO: 212212 - DNA, 155 bp, Unknown
  Bacterial polypeptide expressing nucleotide sequence isolated from the Sargasso Sea
tatgactgtaagtaagcgacgacaaacaccatcggttgatattggcggaattttaatgggatcagaccacccagtgcgagttcagtcaatgacaaatacagtgaccaataatgcagcggctaccattcagcaaatcaaagaattggcggatgcag

SEQ ID NO: 212213 - DNA, 268 bp, Unknown
  Bacterial polypeptide expressing nucleotide sequence isolated from the Sargasso Sea
aatgagtataagaccatttagagacataaatagaagaaaaaccaaagaaatctttgttggaaacatcaagattggtggagacaatccaattacagtccaatcaatgactaatacattaacaactgatataaagtctacaattttacagattaacagcatagaagaggagggagctgaccttgtaagagtttcgtgtccagatgaagcttcaagtgccgcattaaaacaaatagttaaaaatgtaaacctcccaaattattgcagatat

SEQ ID NO: 212214 - DNA, 327 bp, Unknown
  Bacterial polypeptide expressing nucleotide sequence isolated from the Sargasso Sea
taaaatcattaaacttacgtaatagaggtgttaaaataatatcttgcccctcgtgcgcgagacaagcatttcaggtaatagatacggtcaaaattctggaagaaaaattagcacatataaaaacaccaattacgctctcaataattgggtgtgttgttaatggaccaggagaagcagcaatgactgatgttggaattactggaggaggtaagggcaataatatgctttatctttctggcatacaaaacgaaaaagttttaaccaatgatataattgataaagttgtttatgaggttgagaaaaaagcatctgaactagaaaattaat

SEQ ID NO: 212215 - DNA, 736 bp, Unknown
  Bacterial polypeptide expressing nucleotide sequence isolated from the Sargasso Sea
aatgattgaccgaaccgcaaaatttattttatctgtacttttactttccctcaatctgatgtttggaggaacaaccggaaagctagcaggaacaatcaaatcagcattagataacagcccccttgtgggcgcaaatatcatcattgaagatacagatctcggaacagcaacagatataagcggggactatgtgattcttaatatcccacctggcaagtataatgtaacaatacgaatgatcggatacgaggtaaagaaatatgagaacattcgaatctctattgataagacaacacgtctgtctgcccagttaaatattgaagcagtagaaggccaggaagtaattgttagcgctaccagaccactaattgatttcgataaaacaaattcagaggctatagtcacatctgaagaattagaggtaatgcccattgaggatgttttagatgtaatcaaactgcagggcggagtaacacaggatgcaggcggaggcattcacattcgtggaggcagatctagcgaggtagcctatctagttgatggcgtatctgtaacggatgcctatgacggagcaatagccgtcaatatcgaaaatgcaaatatccaagagcttcaggttatcagcggaaccttcaatgcagagtacggaaaagcgatgagcggaattgtaaatatcgtaacgaaggatggtagtgacaaatttgaatcttacctacaattatattctggagatcac

SEQ ID NO: 212216 - DNA, 250 bp, Unknown
  Bacterial polypeptide expressing nucleotide sequence isolated from the Sargasso Sea
cattgatacagtaaaaattttagaagataaactttctcatatcaagaaacctttaacactatcgattataggatgtgttgttaatgggcctggcgaggcatcacaaactgatattggtcttacaggtggtggagaaggaaataatttattttatttgtcaggaattcctcataataaagttgcaaacaaagatatcattgaaaaagtagtagagctagttgagtcaaaagccgaagaaaaagtaaattaa

SEQ ID NO: 212217 - DNA, 271 bp, Unknown
  Bacterial polypeptide expressing nucleotide sequence isolated from the Sargasso Sea
atggaaataagaccttacagagcaataaagagaaagaaaacgaaaaaaataaaagttgggaatataccaataggtggaaactcatttataagcgtccaatcaatgacaaatacattgacaactgatgttaaaagcacggtaaaacaaattctttctctagaggaagccggagcagatatagttcgagtatcttgtccagatcaagagtcaacaaaagctttaagggaaattgtaaaagagataaaagttccaatagtagccgatattcatt

SEQ ID NO: 212218 - DNA, 157 bp, Unknown
  Bacterial polypeptide expressing nucleotide sequence isolated from the Sargasso Sea
aatgagcttaagaccttttagagatatttttagaagaaaaacaaaagttataaaagttggaaatgtaaaggttggaggtaataatcctataacggttcaatctatgaccaacactttaacaaagaatgtaaaagaaacgttaagtcaaataaataag

SEQ ID NO: 212219 - DNA, 181 bp, Unknown
  Bacterial polypeptide expressing nucleotide sequence isolated from the Sargasso Sea
atgagcattagaccttttagagatataaaaagaagagaaacaagagaaattaatgttggtaaagtgaaagttggaggaggaaatccaataacagttcaatcaatgactaacactcttactactgatataaaggctacaattaaccaaataaatgaaattagctctgagggcgccgacatgt

SEQ ID NO: 212220 - DNA, 217 bp, Unknown
  Bacterial polypeptide expressing nucleotide sequence isolated from the Sargasso Sea
atgaaaattaatcttcaagaatattgcaaagacctatcaaattatcaacgattccccactaggcaggttatggtaggtgatatcccaattggaaaagataatccaatcagaattcaatctatgacaacgactgatactatggatactaaaggtacaatagctcagtctatcagaatgattgatgctggatgtgaaattgttagaattactgctccta

SEQ ID NO: 212221 - DNA, 922 bp, Unknown
  Bacterial polypeptide expressing nucleotide sequence isolated from the Sargasso Sea
ggctttggaatttttaaggatttttgaaaaacataacttttatgacacgattctctcgatgaaatcctccaaccctctggtgatgaaggaagcctatcgtttgttggtgatgaggatggaggaggaatcgatggattatccccttcatcttggggtgactgaagcggggaatggttccgaaggccgaatcaaaagtgcggtcggaataggcggattgctctgccagggacttggcgacacgatccgggtctccttaacagaaccggcagagaatgaaattccagctgccaaagccatccttggaggagtagaaaaactgatcgaaaggatttcaacggctttaggagagaatgaacgatttgaggaaaaatcagtttctgaaacaacgatatcacccaatcagattcaatccaccttaaggattcaatctgagaaaacctctgggagaagtatcctgatgaaaccatcagggtgcaagatcggtgaccgggaaacctttaaattactttcttggaaaaccgaaacagagtttgcagatcccaaaaaagtttttgacgcaaaactcgatcggtcagacggggaacaatttcttcttctcaatgagcaggaaattgagaccggattggataaaaccatcctggatcatttgaaatcgaagctactggttctggaagtcagcaaccctctctatacgctccggaatctgaatcaaaggcatgaaggcaaagctaaaccggctgtgattggatttcaactgcctatcatcgaaaccatggaggatcaccttggacttgcagcggaattgggtgaactgatcagttccagggaacttcatgccctgatctgccgcgatggtgatccggagtcgctttcggcacggtttgcccagaacctgatgcaggcgaccaggggttcgaatgtt

SEQ ID NO: 212222 - DNA, 779 bp, Unknown
  Bacterial polypeptide expressing nucleotide sequence isolated from the Sargasso Sea
tctccatgaggctttttcgcccctcgtgcttcgctgcagtgaacttggacggtccatgcggattggaaccaaccatggttctctttccgacaggattcttaaccgctttggggacacgccccgcggaatggcggaatcggccctcgagttccttcgcatagcccggtcccacggtttcgaggagatgatcctctccatgaaggcaagtaaccccaaggtcatgatcgaggcctatcgtctcgtggtttcactcatgaacgaggaaggcatgaactatccccttcacctcggcgtgaccgaggcaggagacggagaggatgcccgcatcaagagcgccatcgggatcggctctctcctgctcgacggcttgggggacacgatccgggtatccctcaccgaggatcccgtagccgaaattcccgtggctcgtgatctcgtccgcagggcagaggcctggtggagcgatcccggcagtggaaagcccggcccggaagagttgatagaccccttttccttttcccgacgcccatgcggggaaatctccctatctggaaaagtccgtatcggagacaagcatccccccgtagtcctcgtccatgcgcagcatccccttgagcagaccgataagatcatatccgagttcgcccgggcccagagcgccaacaaggatgcccccatcgagggattggtcgtgcacttggaggactcccttcagcttccccacttgcaggttctcatggactcgctcgttggggcggttccgagcatcttcgtggagg

SEQ ID NO: 212223 - DNA, 230 bp, Unknown
  Bacterial polypeptide expressing nucleotide sequence isolated from the Sargasso Sea
taaactttctcacatcaaaacacctgtaacgctatccgttataggatgcgtagttaatggcccaggcgaagctgctatgactgatattggaattacgggtggtggaaaaggcagtaatatgctttatctttctggcattcagtctcaaaagattttaacagaagacataatatccgaagtagttaatcaggtagaaaaaaaagttaaagaaatagaaaaaaatagttaat

SEQ ID NO: 212224 - DNA, 292 bp, Unknown
  Bacterial polypeptide expressing nucleotide sequence isolated from the Sargasso Sea
gataatccaactcaagaggtaaaaataggtaacgaaatattaaaatcactaaatttaagaaatagaggtgtgaagataatatcttgcccatcatgtgcaagacaagcatttcaggtgattgatacagtcaaaattttagaggaaaaattagcccatattaaaacaccaataactctatccattattggctgcgttgttaatggaccaggcgaagctgcaatgacagatattggaattactggatgggggcaaaggcaacaatatgttatatttatctggcgttcagaatgaa

SEQ ID NO: 212225 - DNA, 217 bp, Unknown
  Bacterial polypeptide expressing nucleotide sequence isolated from the Sargasso Sea
ccagtaattgatacagttcgtgagcttgaaaggcgcttgtcacatattaaagatccaataactctctcaattattggctgtgttgtaaacggtccaggagaagcattaaatagtgatataggtgtaaccggtggaggaaaagggaataatatgatttatttatcaggcgttgctgaccataaaataaaaaatcccgaaatagttgatcacgttgtaa

SEQ ID NO: 212226 - DNA, 268 bp, Unknown
  Bacterial polypeptide expressing nucleotide sequence isolated from the Sargasso Sea
aggatttgaagttgttgagacggttaaaattttagaggaaaagctatctcatattaaaacacctttaactctatctataataggctgtgttgttaatggacccggcgaagcatcccaaacagatattggaataactggtggtggaaaagatagtagcatgctttatttaaaagggcttcaaactgaaaaattagataatcgtaatattatttcaaaggtagttcagttagttgaacaaaaagctcaggaaattgaaaaaaaaaaataa

SEQ ID NO: 212227 - DNA, 265 bp, Unknown
  Bacterial polypeptide expressing nucleotide sequence isolated from the Sargasso Sea
caagctttccaagtaattgatactgtaaaaatattagaagaaaaactttctcacataaaaacaccaataactttgtcaataatagggtgtgttgtaaatggacctggagaagcagctatgaccgacataggtattactggaggcggaaaaggtaataatatgctttatttatctggagttcagagtgaaaaggttttgaccaaagatattattgagaaagttgttacagaagttgaaaaaaaagtttctgagctggaaaactaaa

SEQ ID NO: 212228 - DNA, 283 bp, Unknown
  Bacterial polypeptide expressing nucleotide sequence isolated from the Sargasso Sea
catgtgcagacaaggctttgaggtgattgaaactgttaaactattagaagaaaaactctctcatattaagacaccaataactttgtcagttataggatgtgttgtaaatggccctggggaagctgcacttacggatgtaggcattacaggaggcagaaatggaaataatatgctctatctatctggtatacaaaaagaaaaagttttgactaaagatatggtaaatagagtagtcagtgaagttgaaaaaaaagtctctgaaatagaaaacaacttaaaatga

SEQ ID NO: 212229 - DNA, 204 bp, Unknown
  Bacterial polypeptide expressing nucleotide sequence isolated from the Sargasso Sea
cgataattggatgtgtagttaacggaccaggagaagctgccctaactgatataggtataactggtggtggaaaaggcaacaatatgctttatttaaatggaattgagagtgaaaaattaactacagataaaattatttcgaaagttgtaaatttagttgaaaaaaaagctaaagaaattgaaaaattaaataatgcttcctaat

SEQ ID NO: 212230 - DNA, 914 bp, Unknown
  Bacterial polypeptide expressing nucleotide sequence isolated from the Sargasso Sea
gaaaaatagaagaatggaattaggtggctttattccagaaagaacatcatattcaaaaccaattaaaactccaaataaagatatttttgatttcatgaaagtttcaactggtgaaaaacaaatgtcaactacaatggctttagttagactattgactaatttattaagagataaaaatgtggcacctaaattagttcctattattccagatgaggcaagaacttttggtatggaaggtttttttcaaaagataggaatttatgctcacgaaggtcaaaaatatgaaccggaggattctgctcaactttcatcttataaagaagaaaaaagtggacaagttttagaagagggaataaccgaggcaggatcaatgtcctcatggattgctgcaggaacatcttattctaatcatgatattgaaatgataccgatttatctattctactccatgtttggcttccaaagaattggagattttgcttgggcagctggagatagtcaggctagaggattcttaataggagcaacagccggtagaacaactttagctggagaaggtttacagcatcaagatgggcacagtcatctaattgcatcaaccatacctaactgcatatcatatgatcccacttttcattatgagttagcaattatttttagagaaggattaagaagaatgcatgaaaaaaatgaaaatgttttttattatattacaactatgaatgaaaattatactcatccaggcattcctaaggataaagattgtgaagatggaattttaaaaggtatgtataaaattaaagattattcaaactataaaaaaaataaaattcaattattgggatcaggtacaatacttagagaaatgatgtcagctgctgaaattttacaaaaagaattaccacatagatagt

SEQ ID NO: 212231 - DNA, 332 bp, Unknown
  Bacterial polypeptide expressing nucleotide sequence isolated from the Sargasso Sea
atatgaaattttaaaatctttaggaataagatctagaggagtaaatatcatttcatgtccttcctgcgctagacaagcatttccagttattgaaacggtgaagaaattagaaaaaagattatctcatattaaaaagccaattaatttatctataattggttgtgtagttaatggtcctggtgaagcagcgcaaacagaaattggattaactggcggaggacaagataataacctcttgtatctttctggtatccctcattctaaagtagcaagttctgaaatagtagagaaagtagtcaaattagttgaagaaaaaattaaaaattcttaat

SEQ ID NO: 212232 - DNA, 238 bp, Unknown
  Bacterial polypeptide expressing nucleotide sequence isolated from the Sargasso Sea
atggaaataagacctcatagaataattaaaagaaaaaaaacaaaaaaaattaaagttggcaatatttttgttggtggcgactcagtcatatctgttcaatcaatgacaaacacactgacaacagatcacgaagctacgataaaacaaattaaagagctagaagaagcaggtgcagatatagttagagattcatgtccagatgaagagtcaacaaaagcgttaaaaataataacaaaaa

SEQ ID NO: 212233 - DNA, 204 bp, Unknown
  Bacterial polypeptide expressing nucleotide sequence isolated from the Sargasso Sea
ccttttcgagacataaataaaaaaaaaacaaaagtgattaacgttggaaatttgaagataggtggggataatccaatttcagttcaatcaatgacaaatacacttacaaaagatgttaaaggaaccattaagcaaattaatgaaattgcagagacaggagcagacttagtgagggtatcttgtccagatgaagaatctacaaaa

SEQ ID NO: 212234 - DNA, 164 bp, Unknown
  Bacterial polypeptide expressing nucleotide sequence isolated from the Sargasso Sea
catgagcttaagaccattcagagatataaaaagaagaaaaacaaaagtgattagtgtaggaaaagtaaaagtaggcggaaacaatcctatttcagtgcaatcaatgaccaatactttaacaacagatattaaagctactattaaacaaataaatgaaaatcaaa

SEQ ID NO: 212235 - DNA, 575 bp, Unknown
  Bacterial polypeptide expressing nucleotide sequence isolated from the Sargasso Sea
gatgccaaaggacagaaattcaatagttgtaaaaataggtggtgtggccattggtggtggtgagccgattgtcattcaatcaatgacaaatacagataccgctgatataaagaaaacaactcaacagataattgaattatatgaagaaggctcagaaattgtccgaataacagttgaccgagaggaagctgccaaagcggttccatttataagagaaggtttagataaagctggctattctattcccttagtaggtgattttcattacatcggtcataaattattaaaagattaccccgattgtgcgaagactttagataagtacaggataaacccaggaaatgttggctttaaaaataagaaagataagcagttttctgaaatcatagaaatagcgtgtaaaaacgataagcccataagaattggtgctaattggggtagtattgatcaggaattgttaacccttttaatggatgaaaataaccgagctgaagtgaaaaaaagctcagccgaaatattacgcgatgcactgattaaatcagtaatctattccgcgagtagggcagaagaaattg

SEQ ID NO: 212236 - DNA, 949 bp, Unknown
  Bacterial polypeptide expressing nucleotide sequence isolated from the Sargasso Sea
aataaaatatataaaagaaaaaagactcaaacttggaggatttattccagagagaactacttatgcaaaatctattaaagcacctccaaaaaatatttttgataatatgaaagagtcaactggttctaaagaaatgtccactacaatggcattagtaagaatgttaacaaatttattaagagataaaaatgttgcaccaagattggttcctattattcctgatgaagctagaacatttggtatggaaggtttttttcaaaaagttggaatatatgctcatgaaggtcaaaaatatgaaccagaagattctgcacaattgagttcttatagagaggaaaaaagtggacaagttttagaagaaggaattacagaagccggtgctatgtcgtcttggattgccgcaggaacttcttacacaaatcatgatattgaaatgatacctatttatcttttttactcaatgtttggatttcaaagaataggtgactttgcttgggcaggagcagatagccaatctagaggatttctaataggtgccacagctggaaggacaacattagcaggagaaggattgcaacatcaagatggtcacagtcatcttttagcatccacaataccaaattgtatatcatacgatccaacatttcattatgaacttgcggttatttttagagaaggattaagacgtatgcatgaaaaaaaagaaaatgttttttattatattacaaccatgaatgaaaattatcctcaccctgctatacctaaagacaaattatgtgaggaggggattttaaaaggcatgtataaaattaaagaattcaataaaaataaaaaaacaaaaattcaatttttagggtcaggtacaattttaagagaaatgatagctggagcagaaattcttcaaaatgagtatcaaatagatagtgaggtttggagtgttacaagttta

SEQ ID NO: 212237 - DNA, 334 bp, Unknown
  Bacterial polypeptide expressing nucleotide sequence isolated from the Sargasso Sea
ttacgagatactaaaatcattaggaattcgttcaagaggtgttaatataatttcttgcccatcttgtgcaagacaagcttttccagtgattgaaactgttaaacaactggaggaaaaattatcacatattaaagaaccaatcagcctgtcaattataggatgtgttgtgaatggaccaggtgaagctgcacaaactgaaattggcctgactggcgggggacaagacaataatcttttatatctttccggaattcctcataataaagttcccagttctgaaataattgaaaaagttgttcagcttgttgaagaaaaagtaaaaaataagaaataa

SEQ ID NO: 212238 - DNA, 163 bp, Unknown
  Bacterial polypeptide expressing nucleotide sequence isolated from the Sargasso Sea
atgaacattagaccatttagggaaataaaaagaagaaaaacaaaagaaattaatgttggtcatataaaagttggaggagacaatccaatatctgttcaatcaatgactaacacgttaactaaagatgttaaagaaactttaaaacaaattggaacaaattgaa

SEQ ID NO: 212239 - DNA, 178 bp, Unknown
  Bacterial polypeptide expressing nucleotide sequence isolated from the Sargasso Sea
atgacaggtctcgttgatcatttgattgagcgaagaaaaagtatcccggttaaggttggttcggtgacagttggtggtgataaaccgatcgtcgtgcagtcgatgacaaacacggatacggccgatatcgatgggacagtcgaacaggtggaggctctgcatcgcgctggatcggaaa

SEQ ID NO: 212240 - DNA, 454 bp, Unknown
  Bacterial polypeptide expressing nucleotide sequence isolated from the Sargasso Sea
gatgaagggttgtaccttacacgcatgactaaaagtgttaccgtaatccaccgcagagatgaattacgagcaagtaagattcttcagcaaagagcttttgataacccaaaaatgaaattcgtttggaactcagttgttgaagaaattaaaggcaacggtacagtccaaagtatgactttgaaaaaccttaaaaccgatgaattatctgaacatctcactgaagggatttttatttttatcgggttccaccctgtgaatgaatttatgcaaggcataatcgacctagatagtgcagggcatgtgatcaccaacctccaaatggaaacaaatgttcccggagtatttgcagcaggagacgtgcgccaattctccgatcggcaacttgccaatgcagtaggcgacggtgtcgctgctgctttagctgcgtacagatacataaacgaagacgattagg

SEQ ID NO: 212241 - DNA, 313 bp, Unknown
  Bacterial polypeptide expressing nucleotide sequence isolated from the Sargasso Sea
ttaggtattagatcaagaggcgttaatattatttcttgcccctcttgtgctcgtcaggcttttcctgttattgaaactgttaaaaagttagagaaaaaattatctcatataaaaaaaccgatcaacttatctataataggatgtgtagtaaatggccctggagaggcggcgcaaaccgaaattggtttgactggcggtgggaatgacagcaacctattgtatttatctggaattcctcacactaaagtagctagctctgatattataaacaaagttgttaaattagttgaagataaagtaaaagaaaactaat

SEQ ID NO: 212242 - DNA, 265 bp, Unknown
  Bacterial polypeptide expressing nucleotide sequence isolated from the Sargasso Sea
atgagtgttagaccatttagagatatcattagaagaaaaacaaaagtaattaatgttggagatgtcaaaattggtggcgataatccaatttctgttcaatccatgaccaacactttaacaactgatgttaaagcaacaataaatcaaattaatgatattgctgaggaaggagcggatattgttagagtttcgtgtccagatacagagtcgaccaaagctcttaaagaaatagttaaacatatatctatccccagtagtggcagat

SEQ ID NO: 212243 - DNA, 898 bp, Unknown
  Bacterial polypeptide expressing nucleotide sequence isolated from the Sargasso Sea
aaatacttaaaagaatgtagaattaaattaggtggaaacttaccagaaaggtcatcatttgctaaagctataaaaactccaccaaaagatatatttgcaaaaatgaaagaatctacaggagaaaaagaaatgtctacaacaatggtattagttagaatgttgacaaatcttatgagggataaaaatgtagctccaagactagttccaataattccagatgaagctagaacttttggtatggagggtttgtttcaaaaaataggaatatatgctcatgaaggtcaaaaatatgaaccagttgactcagaacaattaagctcttatcgtgaggatataaaaggtcaggttttagaagaaggaataacagaagctggtgctatttcatcctggattgcagccggtacatcatatgtaaatcatgatatctcgatgataccaatatatatattttattctatgtttggctttcaaagaactggcgactttgtttgggctgcaggagataatcaaacaagaggatttttaattggagcgactgcaggacgcacaacactgtcgggagaaggtcttcaacatggtgatggacatagccatatattgtcttctgtagtaccaaattgtatttcatatgatccaactttttcttacgagttagctgtaatttttagagaaggtctaagaagaatgtatgaaaagagagaaaatattttttattatattactacaatgaatgaaaattatcctcatcctgaaataccaaaagaaaaaaatatagaggaagatatcttaaaaggtatgtataaatttaaagaatttaataaaaataaaaaaactaaaatacaattattaggatctgggaccattctaagagaaatattgctgcagcagaaatattaga

SEQ ID NO: 212244 - DNA, 880 bp, Unknown
  Bacterial polypeptide expressing nucleotide sequence isolated from the Sargasso Sea
aaagagtctacaggaaaaaaagaaatgtctactactatgattttagttagaatgttgactagcttattaagagataaaaatgtagcacctcgacttgttccaataattccagacgaggcaagaacatttggtatggaagggtttttccaaaaaatcggtatatatgctcatgaaggccaaaaatatgaaccggtagattatgaacaactaagctcatatagagaggatataaaaggccaagtactagaagaaggcattaccgaggccggtgcgatgtcctcttggatagctgcaggcacctcttatactaatcacgatatttccatgattccaatttatctattttattcaatgtttggttttcaaagaacaggagatttcgcatgggctgccggagataatcaaactagaggttttttaataggtgctacagccggaagaactactttagcaggagaaggattgcagcacgctgacggtcatagtcatataatttcttccgttataccaaattgcaaatcttatgatcctacttttggatatgaattagcggtaattttccgtgaaggtctaagaagaatgtatgaaaaacaagaaaatattttctattacataacaacaatgaatgaaaattattcccatccggctatcccaaaagacaaaacagttgaagatggaatattaaaaggaatgtatctatttaaagaatttaaaaaatataataaaaccaaaattcaattattgggctctggtacaattttaagagaaatgttagctgcagcagaaatattacaaaaagattatcaaatagatagcagtgtatggagcgtcacaagttttaatgagttaagaaaagaagctatagaagtgaaagacaaaa

SEQ ID NO: 212245 - DNA, 253 bp, Unknown
  Bacterial polypeptide expressing nucleotide sequence isolated from the Sargasso Sea
gaaccagctggaagagcggctggaggatgttactgagccgctgacggtgtcagttatcggctgcgtggtaaatggcccgggcgaagcgctggtgtcagatctaggcgtggccggtgccagtaaaaagagtggtttttatattaatggccaacggcagaagctgcggctggacaacgagactgttgctgaacagctggaacagcaggtgcgggagtatttgcagcagaaaatagccgtgcgtcagctggattaa

SEQ ID NO: 212246 - DNA, 964 bp, Unknown
  Bacterial polypeptide expressing nucleotide sequence isolated from the Sargasso Sea
atggccttggtaagaatgcttactgctttgttacgagataaaaatgtatcgccaagattagttccaataattccagatgaagctagaacatttggtatggaaggtttttttcaaaaaataggaatttacgctcacgagggacaaaagtatgaaccagtcgactctgaacaacttagttcatatcgtgaagataagagtggacaggttttagaggaaggaattacagagtcaggggctatgtcatcttggattgcggcaggaacagcgtacacaaatcacgatatagaaatgatacctatatacatattttattctatgtttggatttcagagagttggtgatttggcatgggctgcaggagattctcaagctagaggttttttaattggtgcaactgctggaagaacaactttggctggtgaaggattacaacaccaagacggtcacagtcatcttatggcgtctaatattccaaattgtgtaagttatgatccaacttttgcatatgaaatggcagtaatcttgagagatggaatgaaaaggatgcacgaaaaaaaggaaaatattttttattatattactgcaatgaatgaaaactatccgcatcctgctaaacctaaagatgctgacgaaggtattttaaaaggaatgtatttgcttaaagaaacaagaaataaaggcaacactagagttcaacttctaggatctggtacaatcttgcgtgaggtaatagatgctgctgaaattctttctaaagaatatggaattgactctgatatttggagtgtcacaagttttaatgaactcagaaaagacggtatggaaactgaaagatggaacttattaaatcctgatggaaaagagaagaaatcttatgtagaaaaatgtttagaaaaaagagaaggccctgtgtttgcagcctctgattatattaggtcattttcagatcaactaagaccatatg

SEQ ID NO: 212247 - DNA, 366 bp, Unknown
  Bacterial polypeptide expressing nucleotide sequence isolated from the Sargasso Sea
cagatcctgttgaagaggtaaaagctggttatgaaattttaaaatccttacatataagatctagaggtgtacaaattatttcatgcccttcatgttcacgccaagcttttccagtaattgatactgtaaaagttttagaaaaaaaactctcacatattaaaaaacctataaccttatctattattggatgtgttgttaatggccctggagaagcagcacaaacagaggttggtctaactggcggaggccaaggtaataatttactatatctttcagggataccccatacaaaagtagctagcaactctattatagataaagtcgtagagcttgttgaaaacaaggtcaaagaaaaaaataattaat

SEQ ID NO: 212248 - DNA, 238 bp, Unknown
  Bacterial polypeptide expressing nucleotide sequence isolated from the Sargasso Sea
aatgagcataagaccttttagagatattaatagaaaaaaaacaaaagaaataaatgttggaaatttaaaaattggggggggcaacccaatatctgttcaatccatgactaacaccctaacaaaagatgtcaaatctactattaaacaaataaaagaaattgaaaatgcaggagctgacttagtaagagtttcgtgtcctgataaagaatcaacagaggctttaaagcaaattgtaaaa

SEQ ID NO: 212249 - DNA, 274 bp, Unknown
  Bacterial polypeptide expressing nucleotide sequence isolated from the Sargasso Sea
cgcaagacaaggttttcaagtaattgaaactgttaaagttttagaaaatagactttcgcatataaaggcaccaattactctttctgtaatagggtgtgtagttaatggtcctggagaagcagccatgacagatgttggtataactgggggcaaaaaaggtaataacatgctctatttatcaggaattcaatctaaaaaagttttaacaagcgacatggttgaaaagattgtaagtgaagtagaaaaaaaggcctctgaattagaaagcaaataa

SEQ ID NO: 212250 - DNA, 301 bp, Unknown
  Bacterial polypeptide expressing nucleotide sequence isolated from the Sargasso Sea
aaaaataatttcatgtccatcttgtgcaaggcaaggttttaaagtaattgagactgttaaaattttagagaaaaaactttctcacataaaaacgccaattaccttatcagtaataggttgtgtagttaatggcccaggagaggcagctatgacagatgtaggaattactggcggtcaaaatggtaataatatgctttatttatcaggagtacagtcagaaaaagttttaacaaaggatatgattgaaaaagtggtaagtgaagttgaaaaaaaggtttgtgagttgaatgatttaaaatga

SEQ ID NO: 212251 - DNA, 643 bp, Unknown
  Bacterial polypeptide expressing nucleotide sequence isolated from the Sargasso Sea
ttttggtatggaaggtttttttcaaaaattggtatttacgctcatgaaggccaaaaatatgaaccggtagactctgagcaactaagttcttacagagaagataaaagtggacaggtattagaggaaggaattactgagtcaggtgcaatgtcatcttggattgcagctggcacttcctacacaaatcatgatttagaaatgataccaatttatattttctattctatgtttggatttcaaagagttggagatttagcatgggctgcaggggattctcaagccagaggttttttaattggtgctacagcaggtcgaaccactttagcgggagaaggattgcagcatcaagatggtcatagccatctattagcttctaacattcccaattgtgttagttatgatccaacatttgcttacgagatgggagtaatactcagagatggaattaaaagaatgcacgaaaaaaaggagaatattttttattatattacagcaatgaatgagaattattctcatcctgaaaaaccaaaaggctgcgatgaaggcatcataaaaggaatgtatttgttccatagaaacaataataaaggcaaaacaaaagtccaattattaggttctggaacaattttaagagaaataattg

SEQ ID NO: 212252 - DNA, 208 bp, Unknown
  Bacterial polypeptide expressing nucleotide sequence isolated from the Sargasso Sea
aacctcaataacattgtcaattatagggtgtgtggtcaatggtccaggcgaagcagctatgacagatattggtatcactggcggaggaaaaggaaataatatgttgtatttatcaggtgttcaaagtgaaaaagttttaacaagcgaaattattaataaagtagtttcagaggttgaaaaaaaagttgcagagttagaaaaaaaataa

SEQ ID NO: 212253 - DNA, 369 bp, Unknown
  Bacterial polypeptide expressing nucleotide sequence isolated from the Sargasso Sea
atgatccagttcaagaaataaaaattggaaatgaaatattgaaatctttaaatttacgtaatagaggtgtgaagattatttcctgtccctcatgcgcaagacaaggttttgaggttattaaaactgttaaattattagaggataaactctctcatattaaaacgccaataactctttcagttataggatgtgtcgtgaatggacctggggaggctgcacttacagatgtggggattacgggaggtaagaatggaaacaatatgctttacctatctgggatacaaaaagaaaaagttttgactaaagacatgataagtaaagtagttagtgaagttgaaaaaaaagtctctgaaatagaaaacaactaaa

SEQ ID NO: 212254 - DNA, 276 bp, Unknown
  Bacterial polypeptide expressing nucleotide sequence isolated from the Sargasso Sea
gtgctagacaaggattccccgtaatcgacacagttaaaattttagaagaaaaactttcccatataaaagagccaataacgctatcaataattggatgtgttgttaatggaccaggagaagcttcacagacgcaaataggattaaccggcggaggaaaaggtgatcacatgatgtatctatctggtttacctcatcataaagtcacaagtgataaaatgattgaagaaattataagcttggttgaaaaaaaatcacaagaacttcaaaataattaaa

SEQ ID NO: 212255 - DNA, 198 bp, Unknown
  Bacterial polypeptide expressing nucleotide sequence isolated from the Sargasso Sea
ttaccttgtctataattggatgtgtcgttaatggaccgggagaagcagcccaaacagaaattggtttaacaggaggtggacaggacaataatttattatatttatcaggagtacctcatactaaaatagctagttcaaaaatcatagataaagttgttcaacttgttgaagaaaaagtaaaagaaaaaaataactaaa

SEQ ID NO: 212256 - DNA, 348 bp, Unknown
  Bacterial polypeptide expressing nucleotide sequence isolated from the Sargasso Sea
aaattggaaatgaaattttaaagtcattgggattaagaaacagaggagtaaaaattatatcttgcccatcatgtgcaaggcaagcctcccaagtaattgatacagtaaaaatattagaagaaaaattaaaacatattaaaacccctataacattatctattataggctgtgttgtgaatggcccaggtgaagctgcctttactgatgttggtataactggcggtggaaaaggaaataatatgctttatttatcaggtgttcaaagtaaaaaagttttaactagcgagattattaacaaagtaatctcagaagttgaaaaaaaggcagcagaaatagaaaataaataaa

SEQ ID NO: 212257 - DNA, 230 bp, Unknown
  Bacterial polypeptide expressing nucleotide sequence isolated from the Sargasso Sea
aatgagtattagaccgttcagagatatcaagagaagaaaaacaaaagaaattaatgtaggtaaagttaaagtaggaggagataatcctatatcagtccaatctatgactaatactcttaccacagatataaaagccaccattaatcaaattaatgaaattcaaagtgagggcgctgacattgtaagagtttcatgtccagacgaggcatcatctaaagctttaaaagaaa

SEQ ID NO: 212258 - DNA, 802 bp, Unknown
  Bacterial polypeptide expressing nucleotide sequence isolated from the Sargasso Sea
aaattggttccaattattcccgatgaagctagaacatttggaatggagggtttctttcaaaaaataggtatttatgctcatgaaggtcaaaaatatgagccagaggactcagcacaactttcatcttatagagaagaaaaaagtggtcaggtattagaagaaggtattacagaagctggttcaatgtcttcttggatagcagctggaacagcatatacaaatcatgatattgaaatgataccaatttatcttttctattctatgtttggctttcaaagaattggagattttgcttgggctgcaggagatagtcaagcaagaggctttttgattggtgcgactgcaggaagaacaacacttgcaggagaaggtcttcaacaccaagatggtcatagtcatttgttagcatcaacaattccaaactgcatttcttatgatccaacattccattatgaattagctgtgatttttagagaaggtttaagaaggatgcatgaaaaaaatgaaaatattttttattatattacaacaatgaacgaaaattactctcaccctgcaatgccagatgattgtgaggatggaattcttaagggaatgtataaaattaaagaaacatcaggttctaaagaagcaaaaattcaattattaggctctggaacaatactaagagaaatgatggcagcatcagaaatccttaaaaaagaatatcaggtcgatagtgaagtttggagtgttactagttttaatgagttaagaaaaaatggaatggaagttgaaagatttaaccttctaaatcccacag

SEQ ID NO: 212259 - DNA, 241 bp, Unknown
  Bacterial polypeptide expressing nucleotide sequence isolated from the Sargasso Sea
tctagtaaaagagcatacaaaccatttaaaaggattaaagatttcagtgatgggctgtattgtgaatggacctggagagatggcagatgcggactatggttatgtaggatctggagatggagttatatctttatataaaggcaaagagttagttaaaagaaatatttcaagtgagcaagctgtagatgaattgatacggttaattaaagaaaataacgattgggtcgatcctaaaaattaa

SEQ ID NO: 212260 - DNA, 791 bp, Unknown
  Bacterial polypeptide expressing nucleotide sequence isolated from the Sargasso Sea
agaaggaattacagaagcaggttctatatcgtcttggattgctgcaggcactgcttacactaaccatgacgttgaaatgataccaatttatcttttctattctatgtttggttttcaaagaattggagattttgcttgggctgctggagacagccaagcaagaggatttttaattggtgcaacagctggaagaacaactcttgcaggagaagggcttcaacatcaagatggtcatagtcatttactcgcatctacaattccaaactgtatatcttacgatcctacgttccattatgaattagccgtgatttttagagaaggtttaagaagaatgcatgaaaaaaatgaaaatattttttactatattactacaatgaatgaaaattatcctcatcctaaaatgccaaaagattgtgaagatggaattctcaaagggatgtacaaaataaaagagtcatctagttctaaagaagctaagattcaattgttgggatctggaacaatacttagagaaatgatggcggcatcagatatactcaaaaaagaatatcaggtggacagtgaagtttggagtgttacaagtttcaacgagttaagaaaaaatggaatagaagttgagagacaaaacttattaaacccctcagaaacaaataaaaaatcgtatatagaggagtgcttgggaaaacagcaaggacctatccttgcagctactgattatatgagaattaatgcagatcaaataagatctttcacgaaaaaaagcttttattctctaggtacagacggatatg

SEQ ID NO: 212261 - DNA, 295 bp, Unknown
  Bacterial polypeptide expressing nucleotide sequence isolated from the Sargasso Sea
tcttgtccttcctgtgcaagacaagctttccaagtaattgatactgttaagatattagaagaaaagctatctcacataaaaactccaataacattgtcaattataggatgcgtagtaaatggtcctggtgaagctgctttaactgatattggcataactggtggtggaaaaggaaataatatgctttatttatctggtgttcaaagtgaaaaagtattaacaggcgatatcatagaaaaagtagtttttgaagttgaaaaaaaagcttcagagttagaaaaaataaataaatgat

SEQ ID NO: 212262 - DNA, 949 bp, Unknown
  Bacterial polypeptide expressing nucleotide sequence isolated from the Sargasso Sea
tatgctcatgaaggtcaaaaatatgagccagaggactcagcacaactttcttcttatagagaagaaaaaagtggtcaggtattagaagaaggtattacagaagctggttcaatgtcttcttggatagcagctggaacagcatatacaaatcatgacattgaaatgataccaatttatcttttctattctatgtttggctttcaaagaattggagattttgcttgggctgcaggagatagtcaagcgagaggctttttaattggtgcgactgcgggaagaacaacacttgcaggagaaggacttcaacaccaagatggtcatagtcatttgttagcatcaacaattccaaactgtatttcttatgatccaacattccattatgaattagctgtgatttttagagaaggtttaagaaggatgcatgaaaaaaatgaaaatattttttattatattacaacaatgaacgaaaattactctcaccctgcaatgcctgatgattctgaggatggaattctcaagggaatgtacaaaattaaagagacatcaagttctaaagatgtaaaaattcaattattgggctcaggaacaatactaagagaaatgatggcagcatcagaaattctcaaaaaagaatatcatgtcgatagtgaagtttggagtgttacaagttttaatgagttaagaaaaaatggaatggaagttgaacgatttaaccttctaaatcctgcagaaacaaataaaaaatcatatgtagaggaatgtttaggcaaacaacaaggtcctatccttacagccactgactatatgagaataaatgctgatcaaataagaccttttacaaaaaagagcttttattcattaggtacggatggatatgggagaagtgatacaagaaaaaacttaagaaatttttttgaagtagataaagaacacatagttgcttatagcc

SEQ ID NO: 212263 - DNA, 339 bp, Unknown
  Bacterial polypeptide expressing nucleotide sequence isolated from the Sargasso Sea
gaaatgaaattctaaaatcgttaaatttaagaaatagaggcgtaaaaatcatatcgtgcccctcttgcgcaagacaagctttccaagtaattgatactgtaaaaatattagaagaaaaactttctcacataaaaacaccaataactttgtcaataataggttgtgttgtaaatggacctggagaagcatccatgacagacataggtattactggaggcggaaaaggtaataatatgctttatttatctggagttcagagtgaaaaggttttgactaaagatattattgaaaaagttgttacagaagttgaaaaaaaggtttctgagctgaaaaactaaa

SEQ ID NO: 212264 - DNA, 123 bp, Unknown
  Bacterial polypeptide expressing nucleotide sequence isolated from the Sargasso Sea
aatgagcttaagaccttttagagatatttttagaagaaaaacaaaagttataaaagttggaaacgtaaaggttggaggcaataatcctataacggttcaatctatgaccaacactttaacaaa

SEQ ID NO: 212265 - DNA, 829 bp, Unknown
  Bacterial polypeptide expressing nucleotide sequence isolated from the Sargasso Sea
gattagaattttaactaatttattaagagataaaaatgttgctcaaaaattagttcctattattcctgatgaagcaagaacctttggtatggaaggtttttttcaaaaaatcggcatctacgcacatgaaggtcaaaaatatgaaccagaagatgctgcacaactttcttcttataaagaagaaaaaggtggacaggttttagaagaagggattacagaggcaggatcaatgtcttcttggatagcagcaggaacatcatacacaaaccatgatattgaaatgataccaatatatttattttactctatgtttggattccaaagaataggagattttgcatgggccgcaggagacagtcaagcaagaggttttctaataggagcaacatctggaagaacaactttagctggcgaaggtttacaacatcaagatggtcatagccatttaatttcatcaactattccaaattgtatctcttatgacccgacatttcattatgaattgtctgtaatttttagagaaggtcttagaagaatgcatgaaaaaaatgaaaatattttttattacataacaactatgaatgaaaattatcctcacccaggcattccaaaagataacaatattgaagaagggattttgaaaggtatgtataaaattaaagagtattcaaaatataaaaataccaagattcaattattgggttcgggtacaattttaagggaaatgataaaagcgggggagattttgcagaatgaatataaaattgatagtgaaatatggagtgtaactagttttactgaattaaggagaaatggattggagattgaa

SEQ ID NO: 212266 - DNA, 296 bp, Unknown
  Bacterial polypeptide expressing nucleotide sequence isolated from the Sargasso Sea
aatctcatgtccttcttgtgcaagacaaggttttgaagttattgatgtggtaaaaaaattagaagataaattatctcacattaaaactcctcttacattatctattattggatgtgttgtaaatggccctggagaagcagcttcaactgatataggtattactggtgggggaaaagacagtaatatgctgtatcttaatggaatccaaaaagaaaaacttaggaatgatgaaataatctcaaagattgtatcattagttgaaaaaaaagaaaaagacatcaaaaataaaatttaat

SEQ ID NO: 212267 - DNA, 181 bp, Unknown
  Bacterial polypeptide expressing nucleotide sequence isolated from the Sargasso Sea
atggaaattagacctcatagaattattaaaagaaaaaaaacaaaaaaaataaaagttggaaatgtatttgttggtggagattcaccaattacagttcagtctatgacaaacactttaactactgattatactgcaacaattaatcaaattaataaactcgaagatgcaggagcagatatga

SEQ ID NO: 212268 - DNA, 280 bp, Unknown
  Bacterial polypeptide expressing nucleotide sequence isolated from the Sargasso Sea
tgtgcaagacaggcattcaatgttattgatacagtaaaagtcttagaaaacaagttatcacatattaaaagaccattaactttatctataataggatgcgtagttaatggacctggagaagctgcacaaacagatattggaataactggtggcggaaaaggtaacaacatgctttatttaaaaggggttgtgtctgaaaaaataactaccaaagaaataatttctaaagttgtaaatttagtcgaaaaaaaagtcgaagaaattgaaaaaaatatctgat

SEQ ID NO: 212269 - DNA, 349 bp, Unknown
  Bacterial polypeptide expressing nucleotide sequence isolated from the Sargasso Sea
ataaaagctggatatgaaattttaaaatcattaggaattagatcaagaggtgtaaacattatctcttgcccatcttgtgctcgtcaagcatttccagtaattgagactgtaaaagaattagaaaaaaaactatcacatataaagaaatcaattactctttctatcattggatgtgtagtgaatggtcctggagaagcctcccagactgaaattggtttaactgggggaggacaagacaataatttattatatctttcaggcataccacataccaaagttgcaagtaatgaaataattgagaaagttgttcaacttgtagaagaaaaagtaaaagaaaaaacaaattaaa

SEQ ID NO: 212270 - DNA, 940 bp, Unknown
  Bacterial polypeptide expressing nucleotide sequence isolated from the Sargasso Sea
caatttattaagagataaaaatgttgcaccaaggttagttcctattattcctgatgaagcaagaacatttggcatggaaggtttttttcaaaaagttggtatatatgctcatgaaggtcagaaatatgaaccagaggactctgctcaattgagctcatatagagaggaaaaaggtgggcaagttttagaagaagggattactgaagctggtgctatgtcctcttggattgcagctggaacttcttacacaaatcatgatattgaaatgatacctatctatcttttttattcgatgtttggatttcaaagaataggggattttgcttgggcaggagcagatagtcaatctaggggatttttaattggtgctacagcaggtagaacaactttagctggtgaaggactccagcaccaggatggtcacagtcatctattggcctcaacaataccaaactgtatatcatatgacccaacttttcattatgaacttgcagttatttttagagaaggattgagaaggatgcatgaaaaaaaagaaaacattttttattacataacaactatgaatgaaaactattctcatcctgcaattcctaaagataaattttgcgaagaaggaattttaaaaggaatgtacaaaattaaagaatttaacaagtataagaaaacaaaaatacagtttcttggctcaggtacaattttaagagaaatgttagctggtgctgaaattttgcaaaaagaatatcaaatagatagtgaaatttggagtgttacaagttttaatgaactaagaagggatggcttggaagttgaaagatttaatcttttaaatccagataaagaaaacaaaaaatcatatgttgaaaaatgtttaggtaaaactgaaggtcctatattagctgcttctgattacatgagaatgaattcagatcaaatttag

SEQ ID NO: 212271 - DNA, 888 bp, Unknown
  Bacterial polypeptide expressing nucleotide sequence isolated from the Sargasso Sea
ctcatgaaggacaaaagtatgaacctgtggactctgaacagttaagttcttatagagaagataaaagtggtcaggttttacaggaaggtataaccgaagcgggcgcaatgtcatcttggatagcaggaggcacagcttacacaaatcatgatatagaaatgattccaatttatttattttattcgatgtttggatttcaaagaattggtgatttagcatgggcggctgcggactcacagacaaggggctttttaattggtgctacctctggcaagacaacgcttgctggagaaggtctgcaacaccaagatggtcacagtcatttgttagcttctgcgataccaaactgtgttagttatgatccaactttttcttacgaaatggcagtgattttcagagatgggttaaaacgaatgcacgaaaagaatgaaaatatttattattacattactgcgatgaacgaaaattattctcatcctgaaaaacctgctggatcagatcagggtatacttaagggaatgtacttgtttaaagaatttaaggggagaggaaaaacaaaagtgcaaatgcttggttcaggaactatattgagagagattattaaggctgccgaaattttatcaaaaaatcatggtatcgattgtaaggtttggagtgttacaagttttaatgagctaaagaaggatggaatggaaatagaaagagaaaatcttttgaacccatctgaaaaaccaaaaaaaagctaccttgaaacttgtcttgataaacaagaaggtacggtaatcgctgcttctgactatataagatcttactccgatcaaataagaccttttgttaaaaagccattttattctcttggaacagatgggttggaagaaggacactaga

SEQ ID NO: 212272 - DNA, 217 bp, Unknown
  Bacterial polypeptide expressing nucleotide sequence isolated from the Sargasso Sea
tatcgaactcccataacgttgtctataataggttgtgtagtcaatggccctggtgaagctaggaaggctgatattggcttgactggtggtggacaaggtacccatcaaatttatttgaacggtgtgaccgatcatcgaatatctgataagggcatcgcggatcatatagtggagctagtcgaaaggaaagccgccgaagtagagggccaggcttgac

SEQ ID NO: 212273 - DNA, 164 bp, Unknown
  Bacterial polypeptide expressing nucleotide sequence isolated from the Sargasso Sea
tatgagccttaggccttttagaaatattgatagaaaaaaaactaaagtaattaatgtaggccatgtaaaagttggaggagataatccaatttcagtccaatctatgaccaatacattaacaactgatgtgtcagcaacaataaaacaaattcaagaaattcatg

SEQ ID NO: 212274 - DNA, 248 bp, Unknown
  Bacterial polypeptide expressing nucleotide sequence isolated from the Sargasso Sea
tatgaacattagaccctttagagaaataaaaagaagaaaaacaaaagaaattaatgtcggcaatgtaaaagttggaggagataatccaatttctgttcaatcaatgactaatacattaactaaagatgttaaaaaaactatagatcaaattgagcaaattaaagaagtaggagctgatattgttagggtatcatgtccagatgaagactcgacgaaagctcttaaggatataattaaaaatatttcaa

SEQ ID NO: 212275 - DNA, 129 bp, Unknown
  Bacterial polypeptide expressing nucleotide sequence isolated from the Sargasso Sea
tatgaacataagaccgtttagggaaattaaaagaagaaaaacaaaagaaattaatgttggtgatgtaaaagttggaggagataatccaatttctgttcaatcaatgactaatacaataactaaaaatgt

SEQ ID NO: 212276 - DNA, 721 bp, Unknown
  Bacterial polypeptide expressing nucleotide sequence isolated from the Sargasso Sea
aatgaaaaatttatttataacaatattgatatatctattaatgacaactgttcattccttagctgaaacaggaaaaaaaaggggtgttatggaaaagttaaaaactgccacttgtgagggtttcttttttggtataaaggcaggaaaagattgtcataaaagaattaaagccacttctgaaatagataagattaaggaaaaaaaatctaaaagagaagcgaaaaaatcaaaatttaagaaaaaggtttgcgagggttatttttttggaatcaaggcgggaaaagactgtgataaatttttgaaacaagaaaaaaaaatagctaaaaaaaacatcgaaaagtactcctacgataaaagtttgtccgagactgatctttcattatacacaggaacatttgatgttatagataaagagggtgatgatcaaacaaccttagtaggtgtagagcatagaaatcccaacttatttagaaatacttttttaggaaaattagctccagtaactggtgcgtttgtgactggtaataactcattatatttctatactgggatagaggggcagtacagcttaggtccattaaatatttcaccaagttttacacctggatattatgaaaaaggtgatggtaaagatctaggaagcgcaatggaatttaaaagtgaaataaaagttggctttgatattcttaaggactctaagttaggttatagctacagtcac

SEQ ID NO: 212277 - DNA, 1216 bp, Unknown
  Bacterial polypeptide expressing nucleotide sequence isolated from the Sargasso Sea
tatgaaatcaacaggcgaaaaagaaatgtctactactatggcattggttagaatgttaactacactattgagagataagaatgtttcaccaagacttgttcctattataccagatgaagcaagaacctttggtatggaaggattctttcaaaaaattggaatttatgctcatgaagggcaaaaatatgaaccggtagactctgaacaattaagttcttatcgtgaagataaaagtggtcaagtgttagaagaaggtattacagaatctggagcgatgtcgtcttggatagctgcaggaacggcatacacaaatcatgatatagaaatgataccaatctatatattctattctatgtttggatttcaaagagttggagatttagcttgggcggccggagactctcaagctagaggttttttaattggcgctacagcagggagaactactttagctggagaaggtttacagcaccaagatggtcatagtcaccttatggcatcaaacattccaaactgtgtaagctatgatccaacttttgcttatgagatggctgtaattttaagagatggaataaaaagaatgcacgaaaaaaaagaaaatattttttactatattactgcaatgaatgaaaattatcctcacccggcaaaaccaaaagatgtagatgatggaatattgaaaggtatgtatcttcttaaagaaaataataataaaggaaaaacaaaagtacagcttttaggctcaggtaccattttacgtgaggttattggagctgcagatattctttccaaagaatacggtatagactctgatatctggagtgtcactagtttcaatgaattaagaaaagatggaatggaaacagaaagatggaatttacttaatccagatgaaaaaaagaaaaagtcgtatgtagaaaaatgtctagaaaaaagagatgggccagtaatagctgtttcggattatgtaagatctttctcagaccaattaagaccatatgttcaaaaacctttctactcatttggtacagatggatatggaagaagtgatacaagaaaaaaacttagaaaattctttgaggttgataaagaacatatagttgcttacactctaagtgccttagctaaagaacagctaattgcaattaaacatgcagaaaaagcgattaaaaaatacaaaatagataaagaaaaagcttttccgactaaactttaa

SEQ ID NO: 212278 - DNA, 1195 bp, Unknown
  Bacterial polypeptide expressing nucleotide sequence isolated from the Sargasso Sea
gaaatgtcaactacaatggcattagtaagaatgttaactaatcttttgagagataaaaatgttgcaccaaaattggttccaattattcccgatgaagctagaacatttggaatggagggtttctttcaaaaaataggtatttatgctcatgaaggtcaaaaatatgagccagaggactcagcacaactttcatcttatagagaagaaaaaagtggtcaggtattagaagaaggtattaccgaagcaggttctatgtcatcctggatagcagcaggaacagcatatacaaatcatgatattgaaatgataccaatttatcttttctattctatgtttggctttcaaagaattggagattttgcttgggctgcaggagatagtcaagcgagaggctttttaattggtgcgactgcaggaagaacaacacttgcaggagaaggtcttcaacaccaagatggtcatagtcatttgttagcatcaacaattccaaactgcatttcttatgatccaacattccattatgaattagctgtgatttttagagaaggtttaagaaggatgcatgaaaaaaatgaaaatattttttattatattacaacaatgaacgaaaattactctcaccctgcaatgccagatgattgtgaggatggaattctcaagggaatgtataaaattaaagaaacatcaggttctaaagaagcaaaaattcaattattaggctctggaacaatactaagagaaatgatggcagcatcagaaattcttaaaaaagaatatcaggtcgatagtgaagtttggagtgttactagttttaatgagttaagaaaaaatggaatggaagttgaaagatttaaccttctaaatcctgcagaaacaaataaaaaatcatatgtagaggaatgtttaggaaaacaacaaggtcctatccttacagccactgactatatgagaataaatgctgatcaaataagaccttttacaaaaaagagcttttattcattaggtacggatggatatggaagaagtgatacaagaaaaaacttaagaaatttttttgaagtagataaagaacacatagttgcttatagccttagcgtcttagccaatgaacagcttgttgcatcaaagtatgctgaagatgcattcaaaaagtataaaattgataaaaacaaacccatgccaacaaaaatgtaaa

SEQ ID NO: 212279 - DNA, 1230 bp, Unknown
  Bacterial polypeptide expressing nucleotide sequence isolated from the Sargasso Sea
aatgggtaaatccggagaaagtattaataccacccatcaacaaaaaaaattggatgtagacgatttactttattacagagatcgatttgatgttcccttaactgacgagcaggtaaaaaatattgagtactacagaccaaaagaagactcacaagaaataaaatatttaaaagagagaagacttcagcttggaggtttcattcctgaaagatcatcttttgcaaaatcaattaaagttcctacaaaagacatcttcgatgtgatgaaacaatcaacaggcactaaagaaatgtctacgactatggcactggttagaatgttaacaaacctcttaagagataaaaatgtttcacctaaattagttcctataattcctgatgaggctagaacatttggtatggagggtttttttcaaaaaatcggtatttacgcgcatgaaggtcaaaagtatgagcctgtagacgcaaaactactttcatcttacagggaagataaatcaggacaggtgttagaggagggaataacggaggctggttccatgtcatcttggatagcagcaggaacatcatacactaatcatgatatagaaatgattccaatatatttgttctattcaatgtttggttttcaaagagttggtgatttcgcctgggccgcaggtgatagtcaggcaagaggatttcttataggtgctacatctgggagaacaactttggctggagaaggattacaacatcaagatggacatagtcatctacttgcttccacaataccaaattgtgtttcctatgacccaacctttgcttatgagttagctgtaatattcagagatggtttaagaagaatgtatgaaaaaaaggaaaatgttttttattatattacaacaatgaatgaaaattatcctcatccagcaataccaaaagataaaaatattgaagaagcaatcttaaaaggaatgtataaaattaaacaaatttcaaaaaacaaaaaaacaaaaattcaactattaggatctggaactattttaagagaaatgatgcaggcagcagacatattggataaagattttaaaattgattgtgatatatggagtgtcacaagttttaatgaattaagaaaagatggcatggaagtggagagacataatctcttaaatccaaatgaaaaaccaaaaaaagcatatgttgagaattgcttaaaagacgctgaaggccctatactagctgcatc

SEQ ID NO: 212280 - DNA, 1192 bp, Unknown
  Bacterial polypeptide expressing nucleotide sequence isolated from the Sargasso Sea
aatgtccacaacaatggcattagtaagaatgctaacaaatcttttgagagataaaaatgttgcaccaaaattggttccaattattcccgatgaagctagaacatttggaatggaaggtttctttcaaagaataggtatttatgctcatgaaggtcaaaaatatgagccagaggactcggcacaactttcatcttatagagaagagaaaagtggtcaggtattagaagaaggtattactgaagcaggttctatgtcatcttggatagcggcaggaacagcatatacaaatcatgatattgaaatgataccaatttatcttttctattctatgtttggctttcaaagaatcggagattttgcttgggctgcaggagatagtcaagcgagaggcttcttaattggtgcgactgcaggaagaacaacacttgcaggagaaggtcttcaacaccaagatggtcatagtcatttgttagcatcaacaattccaaactgcatttcttatgatccaacattccattatgaattagctgtcatttttagagaaggtttaagaaggatgcacgaaaaaaatgaaaatattttttattatattactacaatgaatgaaaattactctcaccctgaaatgccaaaggattgtgaggatggaattctcaagggaatgtacaaaattaaagaaacatcaggctctaaagatgcaaaaattcaattattaggctctggaacaatactaagagaaatgatggcagcatcagaaattctcaaaaatgaatatcaggtcgatagtgaagtatggagtgttactagttttaatgagttaagaaaaaatggaatggaagtcgaaagatttaaccttctaaatcccgcagaaacaaataaaaaatcatatgtagaggaatgtttaggcaaacaacaaggtcctatccttacagccactgactatatgagaataaatgctgatcaaataagaccttttacaaaaaagagcttttattcattaggtactgatggatatggaagaagcgatacaagaaaaaacttaagaaatttttttgaagtagataaagaacacatagttgcttatagccttagtattttagcaaacgagcagcttgttgcatcaaagtatgctgaagatgcaatcaaaaagtataaaattgacaaaaacaaacccatgccaacaaaaatgtaa

SEQ ID NO: 212281 - DNA, 229 bp, Unknown
  Bacterial polypeptide expressing nucleotide sequence isolated from the Sargasso Sea
aagaagctagaacacataaaaactcctatgtctctttctataattggttgcgttgttaacggtccaggtgaagcgttaatgacagatataggcttcactggaggtggtgcaggaagcggaatgatttataggttagggaaaactgatcataaattagataatgataagatgatcgatcatattgttgacctcgttgaaaaacgagcagaagaactttctgaaaaatagt

SEQ ID NO: 212282 - DNA, 1249 bp, Unknown
  Bacterial polypeptide expressing nucleotide sequence isolated from the Sargasso Sea
atgtttggaggaacaaccggaaagctagcagggacaatcaaatcagcattagataacagcccccttgttggcgcaaatatcatcattgaaaatacagatctcggaacagcaacagatataagcggagactatgtgattcttaatatcgcacctggcaagtttaatgtaacaatacgaatgatcggatacggggtaaagaaatatgagaacattcgaatctctattgataagacaacacgtctgtctgcccagttaaatattgaagcagtagaaggccaggaggtaattgttagcgctaccagaccactaattgatttcgataaaacaaattcagaggctatagtcacatctgaagagttagaggtaatgcccattgaggatgttttagatgtaatcaaactgcagggcggagtaacacaggatgcaggcggaggcattcacattcgcggaggcagatctagcgaggtagcctatctagttgatggcgtatctgtaacggatgcctatgacggagcaatagccgtcaatatcgaaaatgcaaacatccaagagcttcaggttatcagcggaaccttcaatgcagagtacggaaaagcgatgagcggaattgtaaatatcgtaacgaaggatggtagtgacaaatttgaatcttacctacaattatattctggagatcaccagtccgacaacaaaatgtataaagacctaagctcctacaacctaaccaacgatagaaatctaactcttaacctgagcgggccgatcataaaacaaaagcttaacttttttatttctgcaaggtcctacgcttctgatggctggctaaatggaatgcaaacctttaccatgtacggtgatacgatccacaatgataataacctgaatggatattttgattcttcagatgttaaaaaggagccatactacaggccaatgaattggcgtgataaatactctcttcagacaaagctaacctacaaactaaaccctaaactgatcctgcgcctgaactctatcacaagcgatgaacaatgggagaactacaaccactacagacaaatggctcaagacgggcaaaaaacaaactacgcgcgagggacttttacaggtataaaactctcccagtcattttcttctaaaacattttatgatatcaacataaaccagtctgttcatgagtatgagacctatttatttaaaaatccgctggatcttagatacataacccctgaccacttatcggcgaaac

SEQ ID NO: 212283 - DNA, 151 bp, Unknown
  Bacterial polypeptide expressing nucleotide sequence isolated from the Sargasso Sea
gatttcactacctgggactggcgaagaacctgcagcgccagtatttgttgatggaaataagttcaaaatactcagaggtaaaaatatagcagatgattttaaaaaaattctgtataattacatcgatgagaactatgaaaaaaatatttag

SEQ ID NO: 212284 - DNA, 273 bp, Unknown
  Bacterial polypeptide expressing nucleotide sequence isolated from the Sargasso Sea
aatggaaattagacctcatagaataataaaaagaaaaattactaaagaaatcaaggttggtaaattgacagttggtggtaaggcaccaattagtgttcaatctatgactaacacattaacaactgacgttaaagaaacaattaatcaaattcatgatctagaagaagctggggttgatattgttagagtttcatgtcctgatgaaaagtcaactaaagcattaaaagaaataattagtgaggtttcagtcccaatcgtagctgatattcattt

SEQ ID NO: 212285 - DNA, 154 bp, Unknown
  Bacterial polypeptide expressing nucleotide sequence isolated from the Sargasso Sea
aatgagtctaagaccatttagagatattcacagacgtaaaacaaaagtaatccacgtaggcaatgttaaaatcggaggggataacccaatttctgttcaatcaatgactaatacaattacttcaaatacaaaagaaactataaaatcaaattaa

SEQ ID NO: 212286 - DNA, 133 bp, Unknown
  Bacterial polypeptide expressing nucleotide sequence isolated from the Sargasso Sea
atgagcataagaccatttagagacattcacagaaaaaaaacaaaggtaataaatgtaggtggagtcaaaattggaggcaataatccaatttcagttcagtcaatgacaaatactttgacaagaaaatactaag

SEQ ID NO: 212287 - DNA, 233 bp, Unknown
  Bacterial polypeptide expressing nucleotide sequence isolated from the Sargasso Sea
agtacagaaattagaagcaaggttatcacatataaaaactccaatgtctctttcaattattggttgtgttgttaatggtccaggtgaagctcttatgactgatgttggttttactggtggaggagcaggttctggtatggtttatttggctggaaaggcctctcataaaatgtctaatgaagaaatgatagatcatattgttcagctagttgaaaaaaaagtaagaaattaaa

SEQ ID NO: 212288 - DNA, 230 bp, Unknown
  Bacterial polypeptide expressing nucleotide sequence isolated from the Sargasso Sea
aaagctttctcatataaaaactccaataactctctttttaataggatgtgttgtaaatgggcccggggaggcagctcaaacagatataggtatcacaggaggaggtaaggacagcagtatgctttatttaaaaggtgttcaaactgaaaaattaaataataatgatattgtttcaaagatagtcaaccttgttgaaaaaaaagctgaagaaattgaaattaaaaaataat

SEQ ID NO: 212289 - DNA, 178 bp, Unknown
  Bacterial polypeptide expressing nucleotide sequence isolated from the Sargasso Sea
atgagcattagaccatttcgagacataaatagaagaaaaacaaaagttattaatgttgggaaggtaaaaattggaggtgataatccaatttcagttcagtctatgactaatactttaacgacagatatcaaaagcactataaaacaaatcgatgaaattcaaaatgagggtgctgatt

SEQ ID NO: 212290 - DNA, 160 bp, Unknown
  Bacterial polypeptide expressing nucleotide sequence isolated from the Sargasso Sea
tatgaacattagaccatttagggaaataaaaagaagaaaaacaaaagaaattaatgttggttatgtcaaagttggaggagataatccaatttctgttcaatcaatgactaatacgttaactaaagatgttaaggaaactgtaaaacagatgaaaaaatga

SEQ ID NO: 212291 - DNA, 222 bp, Unknown
  Bacterial polypeptide expressing nucleotide sequence isolated from the Sargasso Sea
atataaaaacaccaataactctctcaataataggatgtgttgtaaatgggcctggcgaagcatccctaacagacataggaattacaggaggaggcaaagatagcagcatgctttatttaaaaggtgtacaaactgaaaaattagataatcaagaaattgtttcaaaggtagttgatttagttgaaaaaaaagcctctgaaattgataaacaacaaaaatgat

SEQ ID NO: 212292 - DNA, 248 bp, Unknown
  Bacterial polypeptide expressing nucleotide sequence isolated from the Sargasso Sea
tgttatcggtacagtaaaaaagttagaagaacgtttatcaagtatttctgagccatttacaatttctgtaattggttgtgtagttaatggccctggtgaagctactatgtcagatgtaggatttactggtggtggaaatgacagtggaatgctttatgtcgatggaaagcaacttgcaaaacgaaataatgatgagttaattgactcaattgttagtgaagttgaaaaaaaaataaaacagaaataaa

SEQ ID NO: 212293 - DNA, 150 bp, Unknown
  Bacterial polypeptide expressing nucleotide sequence isolated from the Sargasso Sea
gatgttcaacagaagaaaaacttctcaaattcaagtaggtaaagttggaattggttctaattaccctatatcagtgcagtctatgacaactactaagactagagatgtagacggaacacttgcacagatttatgaaattgcctcaaatga

SEQ ID NO: 212294 - DNA, 1045 bp, Unknown
  Bacterial polypeptide expressing nucleotide sequence isolated from the Sargasso Sea
aaatatttaaaagaaagaagactaaaattaggaggatatcttccagaacggtctacatttgcaaaaccaatcaaagccccacctgaagatatttttgacgtaatgatgaaatcaactggagacaaggagatgtcaactacaatggctttagttagaatgctaacaaatcttttaagagataaaaatgttgcatctagattggttccaataattcctgatgaagctagaacttttggtatggaaggtttttttcaaaaaattggaatatatgctcatgaaggtcaaaaatatgagcctgtagattcagaacaattaagttcatacagagaggataaaaaaggacaggtcttagaggaaggaataacagaagcagggtcaatgtcttcttggatagcagccggcacatcttacacaaaccatgacatagaaatgatacctatttatttattttattcaatgtttggatttcaaagagttggagattttgcttgggccgcaggagatagtcaagcaagaggttttttaataggggcaacttcaggcagaacaactttggctggagaaggtttgcaacatcaggatggacacagtcatcttctatcatcaacaattcctaattgtgtatcttatgacccaacctttgcttacgagttagcagttatatttagagacggactcaagagaatgcatgaaaaaaaagaaaatattttctactacatcacaacgatgaatgaaaactatcctcatccagaaatacccaaagatagcgaaaagggtatacttagaggaatgtataaaattaaagaattttcaaaatataaaaaaacaaagattcagttacttggttcaggaacaattttaagagaaatgataaatgctgctgaaatgttacaaaaagattatcaaatagatagtgaggtttggagtgtaacaagttttagtgagttgagaaaaaatggaatggaagtagaaagatacaatttattacatccagataaaaaaaagaaaaagtcctatattgaggagtgtttaggcagttcagagg

SEQ ID NO: 212295 - DNA, 271 bp, Unknown
  Bacterial polypeptide expressing nucleotide sequence isolated from the Sargasso Sea
aatggaagtaagaccacacagaattattaaaagaaaaaaaactaaattaataaaagtaggcaaagtcagtgttggaggggagtctattataagtgttcaatcaatgactaatactttgaccacaaacattaaagaaactataaatcaaatacattctttagaagaggcaggagcagatattgtaagggtatcgtgtcctgacgaaggttcgactaaagcattaaaaaatattgttaaagaaatttcagttccactagttgctgatatacat

SEQ ID NO: 212296 - DNA, 171 bp, Unknown
  Bacterial polypeptide expressing nucleotide sequence isolated from the Sargasso Sea
gatggataaaagaagtaaaacatattctgttaaggttggtgatatatatattggatcagagcaccctataagagttcaatcaatgactaataccaatacatcaaatatagcagatactgttagtcaaattatcgaattatatgatgctggctctgaattggttagagtaac

SEQ ID NO: 212297 - DNA, 169 bp, Unknown
  Bacterial polypeptide expressing nucleotide sequence isolated from the Sargasso Sea
tatgattgaaagaaagaaaactaaagaagttagaattggcaatgttatgattggtggtgatcatgcggttaccgttcaatcaatgacaaccacaaaaacgcatgatgtgacggctactctaaaagaagttgagcgacttgaagaggctggttgtcatttaattcgcatc

SEQ ID NO: 212298 - DNA, 247 bp, Unknown
  Bacterial polypeptide expressing nucleotide sequence isolated from the Sargasso Sea
tatggaaataagacctcatagaataattaaaagaaaaaaaacaaaaaaaattaaagttggtaatatttttgttggcggtgactcagtcatatctgttcaatcaatgacaaacacactgacaacagatcacgaagctacgataaaacaaattaaagagttagaagaagcaggtgcagatttagtcagagtttcatgtccagatgaagaatcaacaaaagcgttaaaaataataacaaaaaaaactaga

SEQ ID NO: 212299 - DNA, 216 bp, Unknown
  Bacterial polypeptide expressing nucleotide sequence isolated from the Sargasso Sea
aatggaaactagacctcatagaattataaagagaaaaaaaacaagaaaaatcactgtaggtaatattaatgtgggaggggactcccaaataagcgttcagtcaatgacgaacactttgacaacagatataaaaaaaacaataaaccaaataaactctttaaaagaagctggagcagatattgttcgcgtttcttgtccagatgaagactcaacaaa

SEQ ID NO: 212300 - DNA, 410 bp, Unknown
  Bacterial polypeptide expressing nucleotide sequence isolated from the Sargasso Sea
tagtttattattagatgggattggagatactgtaagagtatcactttccgatgatcctgtggaagaaattaaagttggcaatgaaattttaaaatctctaaacttaagaaatagaggtgtaaaaattatttcatgtccgtcatgtgctagacaggcttttgaggttattaaaaccgtgaaagaattagagaaaagattatctcatataaaaaaaccaattacattatccatcattggttgtgttgttaatggaccaggggaagcaaaacaaacagaaattggcattacaggcggtggtaaagataatcacatgttatatttgaatggcttagaaacagaaaaagtaatgacaaaagatatgattaataaaattgtttctttagtggaagaaaaagcctcaaacttataat

SEQ ID NO: 212301 - DNA, 131 bp, Unknown
  Bacterial polypeptide expressing nucleotide sequence isolated from the Sargasso Sea
catgcattgcgaatcgccgatcaagcgtcgactgtcgcgcaagatctgggttggctcggtaccggtgggcggcgatgcaccgatcgcggtgcagagcatgaccaacaccgacaccaacgatgggctgctac

SEQ ID NO: 212302 - DNA, 455 bp, Unknown
  Bacterial polypeptide expressing nucleotide sequence isolated from the Sargasso Sea
tacgataaaatcgtcaataggatttggatcgttattgctggatggaataggtgatactataagagtttctttatctgacgatcctgttaaagaaataaacgttggaaatgagatattgaagtctttaaatctaagaaataggggggttagaataatctcatgtccttcatgtgcaagacaagcattcgaagtaattaatacagttaaagtgttagaggagcgactatctcatattaaaactcctataacattatctataattgggtgtgtggttaacggccctggagaggctgctcaaacagatataggaataactgggggaggtaaaggaaaccatatgctctatataaatggtgttgaaagtgaaaaaattaaaagtgaagaaattatttcaaaagtagtaacaatggttgaaaaaaaagctgctgaaattgaaaataatccaaaaaaataat

SEQ ID NO: 212303 - DNA, 115 bp, Unknown
  Bacterial polypeptide expressing nucleotide sequence isolated from the Sargasso Sea
atgagtataagaccctggagagatatacaaagaaaaaaaacaaaaaagattaaagttggaaatgttgaaataggaggtgatgctccaatttctgtgcagtcaatgactaacaccc

SEQ ID NO: 212304 - DNA, 961 bp, Unknown
  Bacterial polypeptide expressing nucleotide sequence isolated from the Sargasso Sea
atggagatacaccattgggtatgtagaatcagcaatggaatttttaaggatctgtggatattggaattaccatgaagttatactttcaatgaaggctagtaatactcaggtcatggtacaggcctatagattattggtgaagaaaatggtagatgagggtatgaactatccgttgcatttgggagttacagaggcaggagatggggaggatggtagaataaaatcttcagttggtattggcgcactgcttgaggatggaataggggatacaattagagtttcattaacggaagaaccagaatttgaaattccagtggcaaaattaatggctcagcgatataaagaaggctttacattggaacctttagaaaaaattgtatctctaccttatgatccatttttccattctagaagaaaaactactaatatcaatggcattggttcagactatgtaccccgagttttttcagatctctcaagacgtgataatattcgtcctgaggaccttgcccctttaggatatctatattcaaaggaacaggacaagtggcatctatcagagcaggcagtggattatttatatgtaggagataataaaattgaatttgagttaccaggaactctttcaattattcaaaactctaaaatttggaaagaaaatgaccaaatctatcctgtttttaatttggataattatcgaactgcatctaaacgttcaaatcaaatgaattttttatttatagatggtaaaacaatcacagatgaattgaaactgatcttaaatcaagataagacaatagtgctcattttaagaaactctgatgaacatagtgtaatggttcatcgaaaattcataattgatatggttgatttgggaattaagactccagtaatactaaatagatcttataatgatatctcaaacttagattttcaaatcaaaagttcgatagatgtcgat

SEQ ID NO: 212305 - DNA, 784 bp, Unknown
  Bacterial polypeptide expressing nucleotide sequence isolated from the Sargasso Sea
gatggggaggaggaggaagaccctgggggcgagaggacgacgaggggcggtgacgccgcgcgcgcaggcggtgtcccaggagtacgcgatgaacgaggagggagtgttgatgcccacggggaagtattgcgtcaatcacgcggaaaccgtgcgaagaaagacgcgaacggtgaacgtcgggaacgtgaagattgggagcgagcacccgatcgtgaagcagacaatgacgacgtcggacacgcgggacgtcgaggcgacggtcgcggaagtgattcggtgcgccgatgccggcgctgaaatggtgcgaatcaccgttcagggcatgcaagaggccaaggcgtgcaaggagatcaaggagacgctcgtcgcgcgagggtacgacacgccgctcatcgcggatatccacttcgcgcccaaggtcgcgatgatggtcgccgagtgcttcgataagattcgcgtgaatccgggtaactttgcggatggacgtaagaagttcgaagacatcttatacgagacggacgaggaatacaacgccgagctcgaggagattgaaaagatcttcacgcctctcgttttgaagtgcaaggagcgcggcgtggcgatgcgcatcggtaccaaccacggctctttgtccgcgcgcaccttgtcccgttacggtgacaccccgatgggtatggttgaatctgcgttcgaattcgctcgcatctgccgcaagcacgattaccacaactttgtgttctccatgaaggcttcgaaccctctcgtcatggttcaagcgtaccgt

SEQ ID NO: 212306 - DNA, 287 bp, Unknown
  Bacterial polypeptide expressing nucleotide sequence isolated from the Sargasso Sea
aatggaaataagaccttatagaaaaattaaaagaagaaaaactaaactaattaaagttggaaaagtcgaagtaggtggaaattcaaaaattacagttcaatctatgacgaatactttaacgactgatataaaagaaacaataaatcaaatattggagctagagaaatctggcgcagatattgttcgtgtatcttgtcctgacgaagcttctactgcagctttaaaagacattacaaaagagattaatgtaccaattgttgctgatatacattttcatcataaaagag

SEQ ID NO: 212307 - DNA, 460 bp, Unknown
  Bacterial polypeptide expressing nucleotide sequence isolated from the Sargasso Sea
tttgagaaagttgcaatagatgcttcaattgatttaggttcaattttattagaaggaatggggaatggaatatggattcaagcaatggattttgaatcaaaaataaatgaactttcatttcttatattgcaaaatactagaactagaatttttaagactgattatatatcatgtccttcatgcggaagaacaaaatttgatttacaagaaacaacagctttagttaaaaaacatacaaatcatttaaaaggattaaaaatttcagtaatgggttgtattgttaatggaccaggggaaatggcagatgcggactatggttatgttggatctggagatggtataatatcactttataagggtaaagaattagttaaaagaaacatttctagtgaagatgctgtggatgaattgatactcttaatcaaagaaaatgacgattgggtcgatcctaaaaattaac

SEQ ID NO: 212308 - DNA, 326 bp, Unknown
  Bacterial polypeptide expressing nucleotide sequence isolated from the Sargasso Sea
aatgtttcaggcagatttcatttcctgtccttcctgcggcaggaccttcttcgatcttcaacaaaccacggaacagattaagcgtaaaacagcacacctgacgggagtcaaaattgctgttatgggttgtgtggtcaatgggcccggggaaatggccgatgcggattacggttacgtgggggctggtcctggcaagatccatctctatcgcggacagcaatgcgtgcaacgcaacatcccgagtcacgatgctgtcgataaactcatcgaattgatccggatcgaaggcagatggatcgaaccggtcgaagcatcagcagcctagc

SEQ ID NO: 212309 - DNA, 407 bp, Unknown
  Bacterial polypeptide expressing nucleotide sequence isolated from the Sargasso Sea
aatgatatctgaaataagaccatttagaaatataaatagaaagaagaccaaagagataagtgttgggaaaatcaaggttggaggtaataatcctataacagtccagacaatgacaaatactttaactactgatcataaatccacagttgaacaaattaataaagttacagaagcaggtgcagatatcgtgagagtttcatgtcccgatagcaaatcaacacaagctttaaaaacaataattaaacatgtagatgttccaatagtagcagatatacattttcattataaaagagcaattgaagccgcagaaaatggagcagattgccttagaataaatccaggaaacataggcgatgtaaagagaatatcagaagttatttctgctgcaaaaaataataactgttcca

SEQ ID NO: 212310 - DNA, 659 bp, Unknown
  Bacterial polypeptide expressing nucleotide sequence isolated from the Sargasso Sea
catgagaagaaaaactttaagtgttaaaataggtaaggtctttattggaagcgatcatagcatcaaaacccaatctatgacaacagcatctaccatggatactgataagagtgttgatgaagccataagaatcattcaagcaggtggaaaactagttagatttacagctccaaatattaatgaagcaaaaaatttattaaacattaaaaatgctttggttgcaaagggttatgatgatccactagttgctgatattcattttactccaaatgctgcattagaagcatcaaaaattgtggaaaaagtaagaattaatcctggaaattatgtagataagaaaaaatttgaagtcaaagaatacgatgataaatcttatcaagatgagcttttaaaaattgaagagaaatttattcctctaattaattcctgtaaggaaaataaagtagctatgagaattggtactaatcatggatcattgtcagatagagtaatgaatagatttggtgatactccattaggcatggttgaatcagcaatggagtttttaaggatttgcaaaaaaaatgactacgatcaaattgttttatcaatgaagtcaagcaatccaattgtaatgatacatgcatatagattgcttgttaagtctatggaaaatgaaa

SEQ ID NO: 212311 - DNA, 339 bp, Unknown
  Bacterial polypeptide expressing nucleotide sequence isolated from the Sargasso Sea
caagggttatatcatgcccagggtgtggaagaacaagtaatagttattttgtagaactatcgaaatctattaagtcttatatttcaagccaaatgccagattggaagagacaatatcccggtatagaagacatgaatatagctgtgatgggatgtatagttaatggtccgggagaatccaaacatgcaaatattggcattagcttgccaggtaataacgaagacccttctgctcctgtgtatatagatggtaaaaagtttacgacgctacaaggtgataacattgataatcaatttattgatattttacagtcatatatagaagataagtatagttaat

SEQ ID NO: 212312 - DNA, 828 bp, Unknown
  Bacterial polypeptide expressing nucleotide sequence isolated from the Sargasso Sea
catggttcaagcgtaccgtttgctttcacacgaaatgtacaagctcggctgggattacccgcttcacctcggcgtcactgaagccggtgaaggtgaggacggtcgcatgaagtcttccatcggtatcggtgctctcttgctcgatggtctcggagataccattcgtgtttctctcaccgaagcgtccgagctcgaaatcgagccgtgcactcgcttggccaaccttggcatgaaggcttgcgccgacaacatcggtgttgagcagttcgatgaaaccgtccgcgatttcaagactttcacccgccgaactggtgatcttccggagcaaaaggatagcgacaccatcgatttccgcaacattcttcaccgcgacggttcggtgctcgccgccgttaccaccgcccaactcgcgtccgaagatggcttctaccgcgaattgggtacgaagcttgctgtcggtatgccccttcgcgatatcgccacgtgcgattctattttgctcagcgaagttcccgcggcttccgaggagaaggctctccgctccattcgtcgactccaagaaatcggtgtcggtgtcatcgtcccggctgctgccttgaaggcgactccgttggagaacgcgattgccctcgtcactgctgatgaagtgggtgaagcgttgccggctggtgccggtcgcaaggctgtcaccttgaacggctttgagacgaccgagcaactcaaggccgtcgcggcttctgacgccgtgatggttctcgtcaagaccaaggatggtgagtctcgtctacactcctctcgccgcatcgccaaagaactggcccaaattgg

SEQ ID NO: 212313 - DNA, 709 bp, Unknown
  Bacterial polypeptide expressing nucleotide sequence isolated from the Sargasso Sea
aatgaagcgtagaatcactcaaccagtatatgtaggagatgttcagattggagggaattccccaatctcaattcaatctatgacaaaaacagatactagagacgttaaatctactgtaaaacagataaaagaattagaagaagcgggttgtgacatcatcagatgtgctgttccagacaaagaagctgctacagcattgaaagatattaaatctaagattaaaatccctctgattgccgatatacatttccattatcaattagctcttgaatctttaaaaagtggcgtagactgcctgagattaaatccaggtaatataagagataaagaaaaagtatctgaaatagtaaatgaggcaaaaaaattgaaggttccaatcagaattggagttaattttgggagcttgccacctgtaggtaaaataggcgcaacgagaggtatatcaaggcataatgacggagtcaatttactagagaaaggattagggcaagaagaaaaagagtattctgtagttgaccatatggtagcaacaggattatgggaaataaaaatacttgaagatcttgattttgatatgatcaaaatttctctcaaagcctttgatcttgatactacaattgaggcatacagaaagatgtcaaaactagttccttatcctcttcatttaggaataacagaggcaggtactgcaaaatccggtagtattaga

SEQ ID NO: 212314 - DNA, 437 bp, Unknown
  Bacterial polypeptide expressing nucleotide sequence isolated from the Sargasso Sea
aatgtcattaactcaatctaaagaggttaatagtctctccaaaaggtattcaactcatattgagagaaggataactagaacagtaatggtgggtgatatagctattggaagtgattatccagtaagagttcaatcgatgataaatgaagatactatggatgtcgaaaatgcttacttagctatcaaaagacttcatgatgtgggttgtgaaatagtaaggttaactgtcccttccttagcacatgccaaagcagtaggagatataaaggtaaaattactagaaaataatatcaatacccccttggtggctgatgttcaccataatggtatgaaaattgcaatggaagttgcaaaacatgtagataaagtaagaattaatcctggattgtttgtttttgaaaaatcagaccctacaagaactgaatatacagatgagg

SEQ ID NO: 212315 - DNA, 340 bp, Unknown
  Bacterial polypeptide expressing nucleotide sequence isolated from the Sargasso Sea
tatgagcgttcgcccatatcgcgatatcgaacggcgcaagagccgtcagatcatggtcggagacgtgcccgtcggcggagacgcgccgattaccgttcagtcgatgactaatacacggaccactgacgtggccggcacgatagaacagattcggacgctcgaggtcgcgggcgccgatattgtccgtgtttcctgtccggacgaggacagtacgcttgctctgcgcgagatcatccccgaggtgacggtcccgatcgttgcggatatccattttcactatcagcgcgcgatcgaggccgccgaagccggcgccgcatgcctgcggctcaacccgggcaat

SEQ ID NO: 212316 - DNA, 298 bp, Unknown
  Bacterial polypeptide expressing nucleotide sequence isolated from the Sargasso Sea
ccttcctgcggcaggaccttcttcgaccttcagcaaaccacggaacagatcaagcgtaaaacggcacacctgatgggagtcaaaattgccgtcatgggttgtgtggtcaatgggcccggggaaatggctgatgcggattacggatacgtgggcgctggtcctggtaagatccatctctatcgtggacagcaatgcgtgcaacgcaacatcccgagtcacgatgctgtcgacaaactcatcgaattgatccggagcgaagacagatggatcgaaccggtcgaagcatcagcagcctagg

SEQ ID NO: 212317 - DNA, 318 bp, Unknown
  Bacterial polypeptide expressing nucleotide sequence isolated from the Sargasso Sea
tatgagcattagaccttttagagatattaagcgaaggaaaacaaaagtaattaatgtaggaaatgtaaaaattggtggtgataacccaatttctgttcagtctatgacaaatacattaacaacagatattaagggcacgattaatcaaattaatgatattgcaaaagagggggctgacatagttagagtttcttgtccagatgaagattccagttttgcactcaaagaaatagtaaaacatgtgcctgtacctatcgttgcagatattcattttcattataaaagagcaatagaggccgctgaaaatggagcaaaatg

SEQ ID NO: 212318 - DNA, 300 bp, Unknown
  Bacterial polypeptide expressing nucleotide sequence isolated from the Sargasso Sea
acacatactttgtcgaactatcaaagtcaattaagaatcatattaataaacaaatgcctttatggaaaaataaatatcaaggagttgaagatttaaatattgcagtgatgggctgtattgttaatggtccgggtgaatcaaaacatgcgaacataggtataagtctacccggtaataatgaggatccctctgcacctgtattcatcgatggcaaaaaatataaaactttacatggaaataatattgaagatcagtttttagatatattacaatcatatatagatgaaaagtacagttaat

SEQ ID NO: 212319 - DNA, 457 bp, Unknown
  Bacterial polypeptide expressing nucleotide sequence isolated from the Sargasso Sea
cctgggaagtattaaatcttcaataggacttggtaatttattaatggatggtattggagataccatcagagtatcgctatcagacgatccagttgaagaggtgaaaattggcaatgaaattctcaagtcaattggtttgagaaataggggagtaaaaataatatcttgtccatcatgtgcgagacaagggtttcaagtgatagaaacagtaaaaatattagaagataaactttctcacattaaggagcatataaccatatcgatcattggatgtgtcgttaacggtccaggggaagcctcgcagacagatattggtattactggtggagggggagatagtaatatgctttatttaaatggtctacaaagtgaaaaattaagtaataatgaaataatttcaaaggttgttcaacaagttgaaaagaaagcaagtgaaattcaaaaaaaaggtaaatga

SEQ ID NO: 212320 - DNA, 432 bp, Unknown
  Bacterial polypeptide expressing nucleotide sequence isolated from the Sargasso Sea
aatgatatctgaaattagaccatttagaaatattaacagaaagaaaacaaaagaaataaaagttgggaaagttaaagttggtggaaataacccaattacagttcaaacaatgactaatacattgaccaccgatcacaaatccacgatagaacagatcaataaagttacagaggctggtgcagatattgtaagagtttcatgccctgatagtaattcgacagattcgttaaaaactatattaaaacatgtggatattccaatagtagcagatatccactttcattataagagagcaattgaagcggcggagaatggagcagactgtcttcgaataaatccaaggaatataggagacataaaaagagtagcagaaattatctcagcagctaaaaataataattgttctataaggattggagttaacgcaggatc

SEQ ID NO: 212321 - DNA, 466 bp, Unknown
  Bacterial polypeptide expressing nucleotide sequence isolated from the Sargasso Sea
gctgggaggatttgtatctgggagtataaaatcttcaattgggttgggcacattacttttagacggcataggtgatacgattagaatttctttatcagatgatccagtcaaagaagtccaaattggaaatgaaatattaaaatctctcaatttgagagaaagaggagttaaaattatctcttgtccttcgtgtgcaagacaaggttttgaggtcattgaaactgtaaaagtattagaaaaaaggctttcgcacattaaaactccaatcactctttcagtaattggatgtgtagtaaatggtccaggagaggcagcgatgacagatgttggaataactggtggtaaaaaaggaaacaacatgctttatttgtcaggaatacagtcagaaaaagttcttacaagtgacatgattgaaaaggttgtaagcgaagttgaaaaaaaagcctctgagttagaaaatagttga

SEQ ID NO: 212322 - DNA, 795 bp, Unknown
  Bacterial polypeptide expressing nucleotide sequence isolated from the Sargasso Sea
attggaacctttagaaaaaattgtatctctaccttatgatccatttttccattctagaagaagaactactaatatcaatggcattggatctgattctgttccccgagttttttcagacctatcaagaattgacaatatccgccctgaagaccttgcccctttaggatatctatattcagaggaacaggacaagtggcatttatcagaacaggcagtagattatttatatgtaggaaataataaaattgaatttgagttaccaggaactctttcaattattcaaaactctaaaatttggaaagaaaatgaccaaagctatcctgtttttaatttggataattatcgaactacatctaagcgttcaaatcaaatgaattttttatttatggatggtaaaacaatcacagatgaattgaaactgatcttaaatcaagataagacaatagtgctcattttaagaaactctgatgaacatagtgtaatggttcatcgaaaattcataattgatatggtcgatttgggaattaagacaccagtaatactaaatagatcttataatgatatctcaaacttagattttcaaatcaaaagttcgatagatatcggatcgctttacatcgatggtcttggagatggagtttgggttgattttggctctgagtatggtgttgttaatcaaacggtgtttggaattttgcaggcatcaagaatgcgtatatctaaaaccgaatatatttcttgtccatcatgcggcagaacgttatttgatctgcaagaaacaactagcaaaatcag

SEQ ID NO: 212323 - DNA, 253 bp, Unknown
  Bacterial polypeptide expressing nucleotide sequence isolated from the Sargasso Sea
ccataaaattcaaaatgaaggtgctgatttagtaagggtttcttgtccagatgaatcttcatcaaaagccttaaaagaaattgttaaacatattgatattcccttaattgcagatattcattttcattttaaaagagctattgaagcagcagagaatggagcaagttgtctgagaattaatccaggaaatattggagataaaaaaaaaattcatgatgttttaaaagctgcaaaaaataatgattgttcaata

SEQ ID NO: 212324 - DNA, 403 bp, Unknown
  Bacterial polypeptide expressing nucleotide sequence isolated from the Sargasso Sea
atgtcattaactcaatcaaaagaggttaatagtctctccaaaagatattcaactcatattgagagaaggataactagaacagtaatggttggtgatgtagctattggaagtgattatccagtaagagttcaatcgatgataaatgaagatacgatggatgtcgaaaatgcttacttagctatcaaaagacttcatgatgtgggttgtgaaatagtaaggttaactgtcccttcgttagcacatgccaaagcagtaggagatataaaggcaaaattactagaaaataatatcaatacccccttggtggctgatgttcaccataatggtatgaaaattgcaatggaagttgcaaaacatgttgataaagtaagaattaatcctggattgtttgtttttgaaaaat

SEQ ID NO: 212325 - DNA, 428 bp, Unknown
  Bacterial polypeptide expressing nucleotide sequence isolated from the Sargasso Sea
aataggtattgggaaacttttatctcaaggcataggagatactataagggtatctttaactgctgatcctatagaagaagtaaaagttgggtttgagatcttaaagagtttaaatcttagatctaaaggggtaaaaattatttcttgtccttcttgtgccagacaagcatttccagtaatagaaactgttaagactttagaaaagagattatctcacattacaaaacctcttactctttcgataataggttgtgttgttaatggaccaggtgaggcaatgaatagtgacataggtgttactggaggagggaagaatacaaatatgatttacttatcaggtgtagcagatcacaagatatctaattctgagatagtcgatcatgtagttaaattagttgaagaaaaagttagtttattaaatgattaaa

SEQ ID NO: 212326 - DNA, 768 bp, Unknown
  Bacterial polypeptide expressing nucleotide sequence isolated from the Sargasso Sea
gatgaaagcttcaggatacaagatcggtgaccgggaaacctttaaattactttcttggaaaaccggtacagagtttacagatcccaaaaaagtttttgatgcaaaacttgatcggtcagacggggaacaagttctgcttctcaatgagcaggaaatcgagaccggatcggataaaaccatcctagatcatttgaaatcgaagctactggttctggaagtcagcaaccctctctatacgatccggaatctgaatcaaaggcttgaaggcaaagctaaaccggctgcgattggatttcaactgcctatcatcgaaaccatggaggatcaccttggacttgcagcggaactgggagaactgatcagctccagggaactacatgccctgatctgccgggatggagatcccgagtcgctttcggcacggtttgcccaaaacctcatgcaggcggccagggttcgaatgtttcaggcagatttcatttcctgcccttcttgtggtaggaccttcttcgaccttcaacaaaccacggaacagattaagcgtaaaacagcacacctgacgggagtcaaaattgccgtcatgggttgtgtggtcaatgggccaggagaaatggccgatgcggattacggatacgtgggcgctggtcctggcaagatccatctctatcgcggacagcaatgcgtgcagcgcaacatcccgagtcatgatgctgtcgacaaactcatcgatttgatcgggagtgaaggcagatggatcgaaccggtcga

SEQ ID NO: 212327 - DNA, 370 bp, Unknown
  Bacterial polypeptide expressing nucleotide sequence isolated from the Sargasso Sea
ggtttcgatattctgaaaagcctgaacctgcgcaaaaaaggcgtgaacatcattgcctgccctagctgttcacggcaaaactttgatgtgatcaaaaccgtgaacgagctggaagcgcgtctggaagacatcaatgaatccgtcgacctggcggtgattggctgtttggtaaatggccccggcgaagcccgtgaagtggatgtggggctcaccggcggcacgcccaataatttagcctaccgtgacggtgaaaaaagccaccacattaccgctgacgatctggtcgacgagcttgagcgaatggtgcgcgccaaggtcaagaaacagcgcgaagacgaagaaaaaggcattatcgcccgtagtgaataga

SEQ ID NO: 212328 - DNA, 325 bp, Unknown
  Bacterial polypeptide expressing nucleotide sequence isolated from the Sargasso Sea
tatgagtcattactctcaaaataaaataatccgcaggcgtacaaagaagattaaggttggaagtgtagaagttgctggtgatgcaaaaatttctgtgcaatcaatgacaaacacgcttacatcagatgtcgatgcaacagtaaaacaaatcaatgatttagtatctgaaggtgcagatatcgttagagtatcttgccctgaccaagagtctacaaaatctcttaaagagatcattaattatgtgaatgtttcaatcgttgcagatattcattttcactacaagcgagcgatcgaagccgctgatgcgggcgctgcttgcttaaga

SEQ ID NO: 212329 - DNA, 346 bp, Unknown
  Bacterial polypeptide expressing nucleotide sequence isolated from the Sargasso Sea
aatgagtattagacctttcagagatattaaaagaaaaaaaacaaaagaaattaatgtgggtaaagtcaaagttggaggcaataatcctatttcagtacagtcaatgaccaatactctaacaacagatattaaagccacaattaatcaaataaatgaaattcatagtgaaggtgctgacatagttagagtttcgtgcccagatgagtcatcaactaagtctttaaaagagataatccaacatgttgatgtacctgtagttgctgacatccattttcattataaaagagcaattgaagccgcagagagtggagcaagttgtttaagaataaatcctggaaatatggag

SEQ ID NO: 212330 - DNA, 457 bp, Unknown
  Bacterial polypeptide expressing nucleotide sequence isolated from the Sargasso Sea
catggagcgtcaatatcaaaaaattgatagaagaaaatcaaatatcattaaagttgggaatgttaatattggaggtaactctcctataagcgttcaaactatgaccaatacaatcacttctgatattaaatcaaccatagatcaaataaatagagtaacaaaagtaggagcagatcttgtaagagtttcaataccagatcaagattcttcaaccgctttaaaagaaatttgtaaagaatctaaaatacctattatagctgatattcactttcactataaaagagcaattgaatcagctgtcaatggagcatcttgtttaaggattaatccaggcaatataggttcaaaagaaaaaattaaagaagttataaaagctgccaaagataataattgttcaatgagaattggagtgaatgggggaagtttagaaaaaaagattttagaaaaatataaagaa

SEQ ID NO: 212331 - DNA, 277 bp, Unknown
  Bacterial polypeptide expressing nucleotide sequence isolated from the Sargasso Sea
tatgagcttaagaccatatagagatataaataaaagaaaaactaaagaaattaaggtcggagatgtaaaaataggtgggtcgaatcctatcactgttcagtcaatgacaaacactctgactactgacgttaccgctacaattaatcagattgaaaagcttaccaatgaaggggcagatttagttcgagtatcttgtccagatgaagcatcctcaaaatcacttaaagaaatatgcaaacattctaaagtaccgattatcgcagatatacatttccat

SEQ ID NO: 212332 - DNA, 244 bp, Unknown
  Bacterial polypeptide expressing nucleotide sequence isolated from the Sargasso Sea
tttgcgtaaattggtcgaagaaacagaaaaaagaatagttgaccttaaaccaaaaagatcattaaaggtcgcaatactaggatgtgttgttaatggacctggagaagcctcagatgcagatattggaattgctggaggcagatttggaaagggtcaaatttataagaacggtaaactttttaaatcatgtgaagaaagtgaattggtagatatattagttgaggagatcaaaaatttaaattga

SEQ ID NO: 212333 - DNA, 367 bp, Unknown
  Bacterial polypeptide expressing nucleotide sequence isolated from the Sargasso Sea
ttgcagatattcattttcattataagagagtcagttgaagcagcaatttcaggagctgattgtttaagaattaatccgggcaatataggctccaaagaaaaggtcaaagaaattcttaaggcagcaaaagataataactgttctgtaagagttggaataaatgcgggctctctagaaaaaaaaatattagaaaaatataaagaaccatgcccggaagcacttgttgaaagtgctttaaacaatataaaaattttggaagatgcagatttttttaattttaaaataagtgtaaaatcatcagatgtttttttatcgataaaggcatacaggtccctctcggaagtttgtaattaccctttgcatttag

SEQ ID NO: 212334 - DNA, 295 bp, Unknown
  Bacterial polypeptide expressing nucleotide sequence isolated from the Sargasso Sea
atgagcattagaccatttagagatatcgtcagaaaaaaaactaagaaaattaaagttggtaatgttgaggtgggtggcaatgcaccaatatcagttcaatctatgaccaatactttaacaaccaatatagaacaaacggtaaaacagattaatgaattaaaagaagcaggagccgatattgttagggtttcatgtcctgatcaagattcttctttgtcactaaaaaaaattataaagcaagtgaaagttccaatagttgcagatattcattttcattataagagagtcagttgaa

SEQ ID NO: 212335 - DNA, 451 bp, Unknown
  Bacterial polypeptide expressing nucleotide sequence isolated from the Sargasso Sea
attagcgggaagtattaaatcatccattggaattggacatttactaatgaaaggaataggagacacaattagagtttctttatctgcgaatcctgaagaagaaattaaagcaggatatgatattttaaaatcactgaacttgcggtctagaggagtaaagattatctcttgcccatcgtgtgctcgtcaagcatttccagttattgaaactgtaaaaagattagaagaaaaattatctcatatcaaaaagccaataacactgtctattataggatgtgtagtaaatggtccaggtgaggcttctcaaacagaaataggccttactggaggtggaaatgatagtaacttactctatctgtctggaattcctcataaaaaagttataaatgaaaatataataagccaagtagtaaaattagtggaagaaaaagctaaagaaaaaaaactttaa

SEQ ID NO: 212336 - DNA, 448 bp, Unknown
  Bacterial polypeptide expressing nucleotide sequence isolated from the Sargasso Sea
taaatctgcaattggactgggcagcttattgtggatggggataggagatacggttcgtgtatctttgtctgcagatccagttcaggaagtaaaagtcggatatgaaatcttgaaatcgcttggattgagacatagaggtgtaaatataatttcttgcccatcgtgtgctcggcaggggttcgatgtaataaaaacagttgaaattttagaacaaaagctcgaacacataaaaactcccatgagcttgtctataatagggtgcgttgtaaatggcccaggtgaagctctaatgacggatgtaggctttacaggtggtggtgcaggaaatggaatggtttattgggcgggaaaacaagaccatagaatagaaaacaccaaaatgattgaccatattgtagaattggtggagcaaagagcattagaactcagttcagaagaaaaagtttga

SEQ ID NO: 212337 - DNA, 442 bp, Unknown
  Bacterial polypeptide expressing nucleotide sequence isolated from the Sargasso Sea
catgagaagaaaaactttaagtgttaaaataggtaatatctttattggtagcgatcatagtatcaaaacccaatctatgacaacagcgtcaactatggataccgatcgaagtgtcaatgaagccataaggatcattcaggcaggtggaaagctagttagatttaccgctccaaatatcaatgaagcaaaaaatttgttaaatattaaaaatactttggttgcaaaaggttataaagatcctctagttgctgatattcattttactccaaatgctgcattagaagcatcaaaaattgtagaaaaagtaagaattaatcctggaaactatgtagataagaaaaaatttgaagttaaagaatatgatgatgaatcgtatcaagacgagcttttaaaaattaaagagaaatttattcctttaattaattcttgtaaagaaaatgga

SEQ ID NO: 212338 - DNA, 143 bp, Unknown
  Bacterial polypeptide expressing nucleotide sequence isolated from the Sargasso Sea
tccagtggttgcggatattcactttcattttaaaagagctatagaggccgcagaaaatggagctcactgtttaagaattaatccaggaaatattggtgaaaaaaagaaaatttctcaagtttatttcagcggcaaaaaataat

SEQ ID NO: 212339 - DNA, 418 bp, Unknown
  Bacterial polypeptide expressing nucleotide sequence isolated from the Sargasso Sea
tcttcttatggaaggataggggacacaattagagtatctttgtcagataatccaactaaagagatcaagattggtaatgaaattttaaaatctttaaatttgaggaatagaggagttaaagtcatttcttgcccatcttgtgcaagacaagcatttccagttatagatacagtaagaattttagaggaaaaactttcacatattaaagccccaattacactatctataattggttgtgtagttaatggcccaggagaagcagcgctaaccgacattggaattacaggaggaggtaaaaatagcaacatgctctacctaaaaggtattcaatcggaaaaactttctaacgatgaaataatatccaaagtagtctctctagtagagaaaaaagctgaagaactagaaaaaataagttaat

SEQ ID NO: 212340 - DNA, 261 bp, Unknown
  Bacterial polypeptide expressing nucleotide sequence isolated from the Sargasso Sea
aatgaacggcccctttcaaagcgcaaccggccccagcgtccgccgccacagtatccccgtgaaggttggacatgtaaccatcgggggtggctctccgattgtagtacagtccatgacgaatactgataccgccgatatcaagggtacggtcgaacaggtcgcagaactggcccgcgctgggtccgagatcgtccgtatcaccgttgatcggagagaagccgctgcggccgtaccgcatatccgtgacgaactgcaccgcaa

SEQ ID NO: 212341 - DNA, 229 bp, Unknown
  Bacterial polypeptide expressing nucleotide sequence isolated from the Sargasso Sea
attggataaacagcctgttcaaagaaaaattacgaaaaaaatttgggttggtgatgtaccagttggcggaggttcaccagtatctgttcaatcaatgacaaatactgaaacattggatgtttcagcaacagttaatcaaattaaagaattggaggacgcgggggcagatatagtaagagtttctgtacccagcatggatgctgcagaagcattcaaacatataagagaa

SEQ ID NO: 212342 - DNA, 326 bp, Unknown
  Bacterial polypeptide expressing nucleotide sequence isolated from the Sargasso Sea
tatgaatattagaccatttagggaaataaaaagaagaaaaactaaagaaattaatgttggtcatgttaaggttggaggagataatccaatttctgttcaatcaatgactaatactttaactaaagatgttaaagcaactataaaacaaatcgaacaaattgaagaagcgggagccgatattgttagagtatcatgtccagacgaagaatcaacgaaagctctaaaaaatattattagaaatacatctctaccaatagttgccgatatacattttcattataaaagagcaatagaggcagcagaaagtggagctgcttgtcttagaa

SEQ ID NO: 212343 - DNA, 439 bp, Unknown
  Bacterial polypeptide expressing nucleotide sequence isolated from the Sargasso Sea
tcttctattggattgggaacattacttttggaaggtattggtgacactataagaatttctttatctgaccatccagtagaagaagtaaaaattggaaatgaaatactaaaatccttaaatttaagggaaaggggagttaaaataatttcttgtccctcgtgtgcaagacaaggatttgaagtaattgaaactgttaaaatattagaaaaaaaactttctcatataaggacaccaattactttatctgtgattggttgtgtagttaatggtcctggagaagcagctcaaacagacataggaataactggaggcaaaaaaggaaacaacatgctttacctatctggagttcagtctgaaaaagtttttacaaatgatatgattgataaagtagtaagggaagttgaaaaaaaggcttctgagttagataattcaaaatgat

SEQ ID NO: 212344 - DNA, 787 bp, Unknown
  Bacterial polypeptide expressing nucleotide sequence isolated from the Sargasso Sea
ctgataaaaccttcaggatgtaagattggtgaccgggaaacatttaaattactttcttggaaaaccgatacagagtttacagatcccaaaaaagtttttgatgcaaaactcgatcggtcagacggggaacaaattcttgttctcaatgagcaggaaattgagaccggattggataacaccatcctggatcatttgaaatcgaagctactggttctggaagtcagcaaccctctctatacgatccggaatctgaatcaaaggtttgaaggcaatgcaaaaccggctgcgattggatttcaactgcctttcattgaaaccatagaggatcacctcggacttgcagcggaattgggagaactgatcagttccagggaactgcatgccctgatctgccgggatggtgatcccgagtcaatttcggcacggtttgcccagaacctgatgcaggcgacaagggttcgaatgtttcaggcagatttcatttcctgcccttcctgcggtaggaccttcttcgaccttcaacaaaccaccgaacagattaagagtaagacggcacacctgacgggagtcaaaattgccgtcatgggttgtgtggtcaatgggccaggagaaatggccgatgcggattacggatacgtgggcgctggtcctggtaagatccatctctatcgtggacagcaatgcgtgcagcgcaacatcccgagtcatgatgctgtcgacaaactcatcgatttgatccggagtgaaggcagatggatcgaaccagtcgaagcatcagcagcctagc

SEQ ID NO: 212345 - DNA, 262 bp, Unknown
  Bacterial polypeptide expressing nucleotide sequence isolated from the Sargasso Sea
aatgaagaacgtggaaaaaacaaggcatataacgaaagttgtcaaagtgggtaatgtatcgattggcggcatgaaccctattgtagtgcagtcgatgacgaacacggatacagccgatgttaagggtacgtttgagcaggtaaaagatcttgtagatgcaggatcggagatagtcagaattaccgttaacactgaaaaagcagcaatagccgttccaaatattcaggaaaaatatttaaaattggctatgatgttccgttag

SEQ ID NO: 212346 - DNA, 388 bp, Unknown
  Bacterial polypeptide expressing nucleotide sequence isolated from the Sargasso Sea
catgagtataagaccttttagggatataaaaagaagagtcaccagagttattaacgtaggtaaagtaaaagttggtggcaacaatcctatttctgtacaatcaatgacaaatactttaaccaaagatgcaaaagatactttgagacagattaataatatttctgaagttggtggagatattgtaagagtttcttgtccagatgaagattctacttttgctataaaagaaattaccaaacattcacctataccgatagttgctgatattcattttcattataaaagggctattgaagcagcagagaatggcgctgactgtttaagaataaaccctggcaaaaaaggagaaaaagaaaaaattttagaagttattcagcagcaaaaaata

SEQ ID NO: 212347 - DNA, 379 bp, Unknown
  Bacterial polypeptide expressing nucleotide sequence isolated from the Sargasso Sea
atgttaagatcttaccaaaaaataaaaagaagaaaaacgcgcgtaataaatgttggtgatatcttaattggaggaaataatcctatttcagttcaaacaatgactaacactctaactattgatactaaatcaactattaaacaaattgataaagtctttaaagctggtgcagatttagttcgtgtatcaataccagataaggagtcatcaaaaagtttaaaaaaaattgtcaaagaaagcaagattccaattattgcagatatacattttcattataaaagagcaattgaggcagctgaaaatggagctagctgtcttagaattaaccctggaaatataggttctttagaaaaagtaaaagaggttataaagcagccaa

SEQ ID NO: 212348 - DNA, 269 bp, Unknown
  Bacterial polypeptide expressing nucleotide sequence isolated from the Sargasso Sea
aatgagcattagaccatttagagatataaaaagaagaaagactaaaaaaattaaagtcggcaaagttgaagttggtggagatgcgccaatatcagtgcagtccatgactaatactttaactactgatataaaagctacaactaaacaaattaatgaacttgctgaggcaggagcagatatcgtaagagtatcctgtcctgacaaagattcttcattatcattaaaaaaaattttaaaaacatgtaaacgttcctatagttgcagatata

SEQ ID NO: 212349 - DNA, 574 bp, Unknown
  Bacterial polypeptide expressing nucleotide sequence isolated from the Sargasso Sea
aatgtcattaactcaatcaaaagaggttaatagtctctccaaaagatattcaactcatattgaaagaaggataactagaacagtaatggttggtgatatcgctattggaagtaattatccagtaagagttcaatcgatgataaatgaagatactatggatgtcgaaaatgcttacttagctatcaaaagacttcatgatgtaggttgtgaaatagtaagattaactgtcccttccttggcgcatgcaaaagcagtaggagatattaaagcaaaattattagaaaatgatatcaacatccccttggtggctgatgttcatcataatggtatgaaaattgcaatggaggttgcaaaacatgttgataaagtaagaattaatccaggattgtttgtgtttgaaaaatcagaccctacaagaactgaatatacagatgaggaatttgaaactattaaacaaacaatacttaaaagatttacccctttagttgaagttttaaaggctgaaaacaaagctctaaggattggagttaatcatggatctctatctgagaggatgctttttacttatggagat

SEQ ID NO: 212350 - DNA, 316 bp, Unknown
  Bacterial polypeptide expressing nucleotide sequence isolated from the Sargasso Sea
aatgcaaatcagaccacatagaattattaaaagaaaaagaactaaagagataaaagtaggcaaggtatctgttggaggaaattcgaaaatcaccgtccaatcaatgacaaatactttaacaacagatgttaaaaatactattattcaaataaatcaattagaagaggccggtgcagatattgtgcgagtatcttgccctgatgaaaattcttcgaaatctttaaaggaaattataaaaaatgtagaagtaccaattgtagctgatatccattttcattacaagagagctattgaagctgcacaaatgggagcaagc

SEQ ID NO: 212351 - DNA, 321 bp, Unknown
  Bacterial polypeptide expressing nucleotide sequence isolated from the Sargasso Sea
aatgagcataaggccattcagagatattaatagaagaaagactaaggtgattaatgttggtaatgtaaaagttggtggagaaaaccctattacagtgcaatccatgacaaatactttaacaaaagattcgtattcaacaataaaacaaataaataaaattgctgagcaaggagccgacataataagagtttcttgtccagatgaagactcaactttatcattaaaagaaattgtaaagcatgttgatgtacctttggtagctgatattcattttcactacaaaagggcaatagaggctgcagaaaatggagcaaaatgctt

SEQ ID NO: 212352 - DNA, 280 bp, Unknown
  Bacterial polypeptide expressing nucleotide sequence isolated from the Sargasso Sea
aatgagtattagaccttttagggatattaaacgaaaaattactaaagttattaatgtaggaaaagttaaagttggaggtaataattctatttcggttcaatctatgacgaatactttaactagtaacgttaaagaaacattaaatcaaattaataaaatatcagaagtcgggggtgacatcgtgagagtttcttgtccagatgaacagtctactaatgcttttaagggaatcaccaaacattctccaataccagttgttgcagatattcattttcattac

SEQ ID NO: 212353 - DNA, 316 bp, Unknown
  Bacterial polypeptide expressing nucleotide sequence isolated from the Sargasso Sea
atgagcttaagaccattcagagatattcaaagaagaaaaacaaaagaaataaaagttggtaaaattaaaattggtgcaaataatccaatagcggtgcaatcaatgactaatacaaaaactacagatataaaatcaactattgaacaaataaataaaattgaggaagaaggcgctgatcttgtaagagtttcatgtcccgatgaagaatcttccttggctctaaaagaaataacaaaacatgttaatctaccagtcatagcagatatacatttccattataaaagagctatgaagcagcagctaatggtgcggcatg

SEQ ID NO: 212354 - DNA, 121 bp, Unknown
  Bacterial polypeptide expressing nucleotide sequence isolated from the Sargasso Sea
aataaaaaaagctacaaatatacctcttgtatctgatattcattttgattacaaaattgcattaaaagtgctcgagtatgatgttgattgtgtaagaattaatcctggcaacatcggcagc

SEQ ID NO: 212355 - DNA, 397 bp, Unknown
  Bacterial polypeptide expressing nucleotide sequence isolated from the Sargasso Sea
atgagcataagaccgtttagagatatcaatagaaaaaaaacaaaacctgttcgagttggaaatattattattggagacaatcaaccggtatcggtacaatcaatgaccaataccttaacaacagatataaaagctacattaaaacaaattaatgatattataagtgaaggtggcgatttagttagagtttccgtgcccgacaaagatagcagcgatgctcttaaagaaataacaaaaaattcttcagtaccaattatagcagacgtgcactaccattataaaagagcgatagaatccgcagaaaatggtgcaaaatgtttgagaattaatcctggaaacatcggagatgtaaaaaaaataagagaaataatttctgctgcaaaaaataatgattgtg

SEQ ID NO: 212356 - DNA, 442 bp, Unknown
  Bacterial polypeptide expressing nucleotide sequence isolated from the Sargasso Sea
tataaaatcatctataggtttgggtaacttattattagatggaataggagatacaattagagtttcgctttctgatgatccagttgaagaaatcaaaataggtaatgagattttaaaatcactaaacctaagaaatagaggagttagaataatatcttgtccttcatgtgcaagacaaggctttcaggtaataaatactgttaaaatactagaagaaaaactttctcatattaaaactccaataactctttcaattatcggatgtgtagtaaatggacctggtgaagcagcactaactgacattggggtaactggaggtggcaaaaatagtaacatgctatatttaaaaggtgttcaaacagaaaaattagataatcaagatattatttcaagggtggttgagctagtggaaaaaaaagctgaagaaattgaaataaagtaa

SEQ ID NO: 212357 - DNA, 618 bp, Unknown
  Bacterial polypeptide expressing nucleotide sequence isolated from the Sargasso Sea
taactaacactattatgcaaacattctcaaataatgttgtaatagttttaaatgttgataatgcaaatagacatgatttattaagcgcttttaattttctcgaagaaaaacgaataaaaattccagttattttaaaaggtagttatcaaagttcagactttgagaaagttgcaatagatgcctctatcgatataggttcaattttgttggaagggatgggaaatggaatatggattcaaacaaaagattttgattcaaagataaatgaactttcatttttgattttacaaaatactagaaccagaatatttaaaactgactatatatcatgtccttcatgtggaagaacaaaatttgatttacaagaaactacagctttagtaaaagaacatacaaatcatttgaaaggattaaaaatttcagtgatgggttgtattgtcaatggacctggagaaatggcagatgcggactatggttatgtagggtctggagatggagttatatctctttataaaggcaaagaattagttaaaagaaatatttcaagtgagcaagctgtggatgaattgattcagttgattaaagaaaatgacgattgggtcgatcccaaaaattaac

SEQ ID NO: 212358 - DNA, 343 bp, Unknown
  Bacterial polypeptide expressing nucleotide sequence isolated from the Sargasso Sea
catgagaagaaaaactttaagtgttaaaataggtaaggtctttattggaagcgatcatagcatcaaaacccaatctatgacaacagcatctaccatggatactgataaaagcgtagatgaagccataagaatcattcaagcaggcggaaaactagttagatttacagctccaaatattaatgaagcaaaaaatttattaaacatcaaagatgctttggttgcaaaaggttatgatgatccactagttgctgatattcattttactccaaatgctgcattagaagcatcaaaaatagtggaaaaagtaagaattaatcctggaaattatgttgataagaaaaaa

SEQ ID NO: 212359 - DNA, 671 bp, Unknown
  Bacterial polypeptide expressing nucleotide sequence isolated from the Sargasso Sea
attgaacaatacctataataatcatttatttaattacaaaagaagaaaatctttatctgtttctatcggtgattcagcaataggtggtagtaatcctattagaattcaatccatgactacttctgatacaatggatactaatgaaactgttgaagaatcaataagaatgatcaattccggttctgaatatattagaattactgctccaagtattaatgaagctaaaaatttaagaaatataaaaaaagaactaagtaatagaggttataatattcctttgattgctgatattcattttacacctaatgcagcagaaattgctgctaaaatagttgaaaaggttcgaataaatcctgggaattatgctgataaaaaaagttttaaaaaaatagaatatgacgataattcctataatgctgagattgagaggatttatgaaagagtttctccgttaattaaaatatgtaaaagtaatggaacagctatgagaataggcactaaccatggttcattatctgatagaattatgagtaggtttggtgacacacctttaggtatggttgagtctgctttagaatacttgagaatatgcgaagatcatagtttttacaacattgttttatcaatgaaagcaagcaaccctcttgtaatggtccatgcttacagattac

SEQ ID NO: 212360 - DNA, 487 bp, Unknown
  Bacterial polypeptide expressing nucleotide sequence isolated from the Sargasso Sea
aatgtcattaactcaatctaaagaggttaatagtctctccaaaagatattcaactcatattgagagaaggataactagaacagtaatggtgggtgatatagctattggaagtgattatccagtaagagttcaatcgatgataaacgaagatactatggatgtcgaaaatgcttacttagctataaaaagacttcatgatgtgggttgtgaaatagtaaggttaactgtcccttccttagcacatgccaaagcagtaggagatataaaggcaaaattactagaaaataatatcaatacccccttggtggctgatgttcaccataatggtatgaaaattgcaatggaagttgcaaaacatgttgataaagtaagaattaatcctggattgtttgtttttgaaaaatcagaccctacaagaactgaatatacagatgaggaatttgaaactattaagcaaacaatacttaaaagatttacccctttagtt

SEQ ID NO: 212361 - DNA, 319 bp, Unknown
  Bacterial polypeptide expressing nucleotide sequence isolated from the Sargasso Sea
aatgagtttaagaccttttagagatattaaaagaagaaaaacaaaagtaataaatgttggaacagtaaaaattggtggtgataatccaatttctgttcaatcaatgacaaatactttaacaacagatattaaatcaacaataagtcagattaataaaatagctgaggagggtgctgatattgtcagggtatcttgtcctgataaagattctactaatgctttgaaagaaataacaaaacacgtctccataccagtggttgcagatatacattttcattataaaagagcaattgaggctgctgaaaatggagcaaatgtt

SEQ ID NO: 212362 - DNA, 352 bp, Unknown
  Bacterial polypeptide expressing nucleotide sequence isolated from the Sargasso Sea
aatggaacgttcatatcaaaaaattgataggcgtaaaacacgtactataaatgttgggaaattaaaaattggtggtaataatccaatattagttcaaactatgactaatacacctactgttgatattaaatctaccttagcacaaatcaaaagagttacagatattggtgctgatatagtgagagtatctgttccagataaaaattcatccgaggctttaaaagaaatttgcaaagtatctcaggtacctattattgctgatattcattttcattatttaagagctgtagagtcagctaaaaatggtgcatcttgtttaagaattaatccaggtaatattggttcaaaagaa

SEQ ID NO: 212363 - DNA, 295 bp, Unknown
  Bacterial polypeptide expressing nucleotide sequence isolated from the Sargasso Sea
atgaacattagaccatttagagatattaaaagaagaaaaactaaaaagattaaagttggaaaagttgatattggaggagatgctccaatatcagtacaatctatgacaaacactttaacaactgatgtagaagctacgattaaacaaattaacaaactaaccgaagcaggagcagatattgtgagagtatcttgtccagataaagattcttcacttgcgttaaaaaaaatttctaaacgtatcgaagttcctatagtggcagatattcattttaactacaaacttgctatttagc

SEQ ID NO: 212364 - DNA, 457 bp, Unknown
  Bacterial polypeptide expressing nucleotide sequence isolated from the Sargasso Sea
tgagaaagttgcaatagaagcctcaatcgatataggttcaattttgttagaggggatgggaaatggtatatggattcagacaaaagattttgattcgaagataaatgaactttcatttttgattttacaaaataccagaacaagaatatttaaaactgactatatatcatgcccttcatgtggaagaacaaaatttgatttacaagaaaccacagctttagtcaaagagcatacaaaccatttaaaaggacttaagatttcagttatgggctgtattgttaatggacctggagagatggcagatgcggattatggttatgtaggttctggagacggagttatatcattatataaaggcaaagaattagtaaaaagaaatatttcaagtgagtatgctgttgatgaattgatacagttaattaaagaaaatgacgattggatcgatcctaaaaattaa

SEQ ID NO: 212365 - DNA, 583 bp, Unknown
  Bacterial polypeptide expressing nucleotide sequence isolated from the Sargasso Sea
aaattttgataattttaaaataagcgtgaaagcttcaaatgtttttacagcagtagagtcatatagaatgttatctaatttttgtgactatcctcttcatttaggtattactgaggcaggaagttattttagtggttcaataaaatcatcgataggtctaggattacttctttatgatggtattggtgatacagtgagagtttcactttcagaccatccaactcaagaggttaaggtagggtttgagatgttaaaatcattaaatttaagagattatggtgtaacaataatatcttgcccatcttgcgcaagacagcaatttgatgttattgagacagttaaaaatgttgagaaaaaactttctcatattaagaaacctattacagtctctattatcggatgtgttgtcaatggaccaggagaagctacaatgactaacataggtataactggtggtggaaataatacacatatggtttatgtcgacggagaaaaaagccatcgaattcataacgaagatttagttgagtacttagttaaaactatagaaaataaagttgatcagattcatcatttaaaatga

SEQ ID NO: 212366 - DNA, 361 bp, Unknown
  Bacterial polypeptide expressing nucleotide sequence isolated from the Sargasso Sea
atgagtattagaccttttagagatattaaaagaagaaaaacaaaagtaataaatgttggaaatgtaaagattgggggcaataatccaatttctgttcaatccatgacaaatactttaaccacagatgttaaagcaactataaaacaaattaatgatatagctgaggagggtgctgatattgtaagagtttcttgtcctgatgaagcatcaacatcagctttaaaagaaataataaaacatgtttcaataccagtagttgcagatatccactttcattataaaagagctattgaagcagcagaaaatggagcaagctgtttaagaattaatcctaggacaatattggtgatgaatcgaaaat

SEQ ID NO: 212367 - DNA, 184 bp, Unknown
  Bacterial polypeptide expressing nucleotide sequence isolated from the Sargasso Sea
tttgacttcgttgcaaaggataccaaggcgaaaaagccggcagattaaggttggagatgttcttgtaggaggcggggctccgatatcagtccagtcaatgacaaatactgttacggcagatatcgcagctacgatccagcaagtgcaggcactcgagggggctggggcagatatcgttagagtt

SEQ ID NO: 212368 - DNA, 313 bp, Unknown
  Bacterial polypeptide expressing nucleotide sequence isolated from the Sargasso Sea
atgagtgttagaccatttagagatatcagtagaagaaaaacaaaagtaataaatgttggagatgtcaaaattggtggtgataatccaatttctgttcaatccatgaccaacactttaacaacggatgttaaagcaacaataaatcaaattaatgatattgctcaggaaggagccgatatagttagagtttcgtgtccagatacagagtcaaccaaagctcttaaagaaatagttaaacatgtatctatcccagtagtagcggatattcattttcattataaaagagcgatcgaagcagctgaaaacggagcca

SEQ ID NO: 212369 - DNA, 325 bp, Unknown
  Bacterial polypeptide expressing nucleotide sequence isolated from the Sargasso Sea
atggaaataagaccacatagaaaaataaatagaaaaaagacaaaagttattaaagtcggaaatatctttattggtggagaccatccaataagtgttcagtcaatgactaatactttgacgtatgattcaaaagcaacaattaaacaaattaatagtctagaggaaaaaggcgcagatattgtaagggtttcctgcccagatgaggagtcaactcttgctttaaaaacaataattaaaaatgttaatgtaccaattgttgcagatattcattttcactacaaaagagctattgaagcagctaaaaatggagcatcttgtttaagaa

SEQ ID NO: 212370 - DNA, 355 bp, Unknown
  Bacterial polypeptide expressing nucleotide sequence isolated from the Sargasso Sea
aatgagtattagaccatttagagacattaaaagaaaaataacaaaagaaataaatgtaggagaagtaaaagttggaggcaacaatcctatttctgttcaatcgatgactaatactctgactaaagatattaaaaaaactgtaagtcaaataaatcaaatctcagaagtgggtgcggacattgtaagggtctcgtgtccagacgaagattctaccaaagctttaaaagaaatagttaaacatgtttcagtaccaatagtagctgatattcattttcattataaaagagcaattgaagcagcagaaaatggagcaaaatgtttaagaataaatcctgaaaatattggtgatgagaat

SEQ ID NO: 212371 - DNA, 184 bp, Unknown
  Bacterial polypeptide expressing nucleotide sequence isolated from the Sargasso Sea
aatgaataatccttatgggatagatattaacaggaataagacaagaaaaatatatgtcggagatatacctgtcggaggtgatgcgcctattagtgttcagtcaatgacaaatactgatacacgggacatcaaatcaacaataaaacaagtattggatttagaggatgcaggcgctgacattgtt

SEQ ID NO: 212372 - DNA, 611 bp, Unknown
  Bacterial polypeptide expressing nucleotide sequence isolated from the Sargasso Sea
aatgttaagatcttaccaaaaaatcaatagaagaaaaacgcgcgtaataaatgttggtgatgtattaattggaggtaataatcctatttcagttcaaacaatgactaatacacttactattgattctaaatcaactattaaccaaattggtaaagtttttaaagctggcgcagacttggttcgagtatcaataccagatagagagtcatcagaaagtttaaaaaaaattgtcaaagaaagcaagattccaattattgcagacatacattttcattacaaaagagcaatagaggcagctgaaaatggagctagctgtcttagaattaaccctggaaatataggttctttagaaaaagtaaaagatgttattaaagcagctaaagataataattgttcaatcagaataggcgtcaatggtggtagtcttgaaaaaaaaattttagaaaaatattctgaaccaaatcctgaagcacttattgagagtgcgctaaacaatataaaaatcttagaagataatgatttttttaactttaaaatcagtgtgaaatcatctgacatcttcatggcgataggagcatacgaaggtcttgcagaaatttgtgattatccac

SEQ ID NO: 212373 - DNA, 531 bp, Unknown
  Bacterial polypeptide expressing nucleotide sequence isolated from the Sargasso Sea
catgagaagaaaaactttaagtgttaaaataggtaaggtctttattggaagcgatcatagcatcaaaacccaatctatgacaacagcatctaccatggatactgataaaagcgtagatgaagccataagaatcattcaagcaggcggaaaactagttagatttacagctccaaatattaatgaagcaaaaaatttattaaacatcaaagatgctttggttgcaaaaggttatgatgatccactagttgctgatattcattttactccaaatgctgcattagaagcatcaaaaatagtggaaaaagtaagaattaatcctggaaattatgttgataagaaaaaatttcaagtcaaagaatacaatgataaatcttatcaagatgagcttttaaaaattgaaaagaaatttattcctcttataaattcctgtaaaaaaaataatgttgccatgagaattggtacgaatcatggatcattgtcggatagagtaatgaatagatttggtgataccccattagggatggttgaatc

SEQ ID NO: 212374 - DNA, 466 bp, Unknown
  Bacterial polypeptide expressing nucleotide sequence isolated from the Sargasso Sea
aagcaggaggattatttactgggaagtatcaaatcatccataggaattggtagacttctaatgaaaggcatcggagacaccataagagtttcattgtctgcaaatcctgtagaagaagttaaggctggtttcgaaatacttaatgcgttgggtattagatccagaggtgttcaaataatttcatgtccatcttgcgcaagacaagcatttcctgtgattgataccgtaaaaatcttagaaaagaaactatctcatataaaaaaacctatgactctttctataattggatgtgttgtaaatggaccaggcgaagccgcacaaacagatattggcttaactggagggggagatggaagcaatctgctttatttatctggtataccccacaacaaagttgccagccaggatattgttaataaagttgtaaacttggtagaatctaaggcaaaagaaaatagtaactaaa

SEQ ID NO: 212375 - DNA, 496 bp, Unknown
  Bacterial polypeptide expressing nucleotide sequence isolated from the Sargasso Sea
attactgaagcgggtggtttcagatctggaactgtcaaatctgcaatgggtctgggctctttactaatggacggcataggggatactatcagaatttctctggcctctgatccggttgatgaaataaaagtagggtgggatatcttgagaggcttgaaaataagatccagaggaataaatttcattgcttgtccaagttgttcacgaatgaactttgatgtgattggaacaatgaaccaattggaatctaggctggaagacataaaagaagacattgatgttgctgttataggttgttacgtaaatggtcccggagaatctaaacatactgatataggtgttacaggcggatctcctaaaaatctaatatacatagacggtaaaccagatcataaagttgaaagtgccgacctcgcggactatcttgaaaaaataattcgagaaaaggttaaagaaaaatctaaaacacaagagaacttaattgcaaaaatataat

SEQ ID NO: 212376 - DNA, 243 bp, Unknown
  Bacterial polypeptide expressing nucleotide sequence isolated from the Sargasso Sea
catgaccgagcccggcctgttcgaaactgtcaaacgccgccagagcgtgcccgtcgatgtcggcggcgtaaccgtcggtggcggcgtgccgatcgtagtccagtccatgaccaacaccgataccgcggatgttgaatcgacggcgaagcaggtcgcagaccttgcccgcgcgggttcggaaattgtccgcattacagtcgaccgggatgaagccgccaaggccgtgccccatatccgcgaccg

SEQ ID NO: 212377 - DNA, 400 bp, Unknown
  Bacterial polypeptide expressing nucleotide sequence isolated from the Sargasso Sea
gatgggagacactatcagggtttctcttacggagccctctgaaaatgaaatacccgttgctaagtcaattttgcaggcaactcgatcaagaatttataatacagattttatttcctgtccttcctgtggcagaactttttttgacttggaaagtacaacagaaaaaataaagtcacatacgtctcatctaaaaggtgtgaaaatagcaatcatggggtgtgtggtcaatggtccgggagaaatggcagacgcagattttggctacgtaggctctggtcctgacaagattaacttgttccatgggaaaacatgcgtacaacgtaatatacctgcagagcatgctgtggagagtttaatcgagctcatccaagactgcggtatgtggtctgatccgccttga

SEQ ID NO: 212378 - DNA, 424 bp, Unknown
  Bacterial polypeptide expressing nucleotide sequence isolated from the Sargasso Sea
ggcacattacttttagatggaattggtgacacaataagaatttctttatctgataaccctgttgaagaagttagaattgggaatgagatattgaaatctctaaatttacgtgaaagaggagttaaaataatctcttgcccttcgtgtgcaagacaaggatttaaggtaattgaaactgttaaagttttagaaaaaaaactctcacatattaagaccccaattactctctctgtaataggatgtgtagttaatggtcccggagaagcggccatgacagatgttggaattactggcggtaaaaagggaaataatatgctttatttatcaggagttcagtctgagaaagtttcaaccactgacatgatagataaaattgtaagtgaagttgaaaaaaaagctttagaaatagagaaatcaaaatgat

SEQ ID NO: 212379 - DNA, 382 bp, Unknown
  Bacterial polypeptide expressing nucleotide sequence isolated from the Sargasso Sea
ttctctatctgatgatccagttgaggaagtgaaagttggtaatgaaatattaaaatcactcaacctaagaaagcgaggtgtaatgatagtttcatgcccttcttgtgcaagacaagcatttcaagtaattgatacagttaaaatattagaggaaaaactatcccatatcaagacaccaataacattatcaattattgggtgtgtagttaatggacctggcgaagcttcgcaaactgatattggtataactggcggcggcaaaggtagcaacatgctgtatttaaaaggaattgagacagaaaaaatacctactgagagtattatttctaaagttgtaaatttagttgaaaaaaaagcaaaagaaattgaaaaaaataattaa

SEQ ID NO: 212380 - DNA, 592 bp, Unknown
  Bacterial polypeptide expressing nucleotide sequence isolated from the Sargasso Sea
gagatactgctcaaaaacaattatgagaattttaaattaagcattaaatcttcggatatttttatggcagttgagagttacgaaaaaatatcggatttgatagaacaacctttgcatcttggcattacagaatctggatctttaaagacaggaacagttaaatcatctataggtctaggacgattattgatgcagggaattggcgacactataagagtttctcttgcttcagaccctattgatgaaataaaggttggctgggaaatgttaaagtccttgaaaattagatcaagaggtgtgaaaattgtcgcctgcccgagctgctcaagacaaaattttcaggtaatcaatacagtgaataagcttgaaaatgatttgtcagagctaaaagaagaagtaactcttgctgttataggttgctatgtaaatggtccaggagagtcaaaaatagcagatgtaggggtaacgggagcagcaccgaaacatttgatctatttaaatggaaaaccagcgtataaagttgaaactaaagacctagaaaaagctctaataaaagaggtggaagaaatagcagagaaaaaacgtaatacaa

SEQ ID NO: 212381 - DNA, 445 bp, Unknown
  Bacterial polypeptide expressing nucleotide sequence isolated from the Sargasso Sea
tttgcctggcagtatcaaaacttcaataggatttggtaatttaatattagatgggattggagacaccataagagtatcactatcagacgacccagttgaagaaattaatgttggaaatgaaattttaaaatctctgaatttaaggaacaggggagtaaaaataatttcgtgcccatcttgtgctcgacaagcttttcaagtaattgaaactgtaaaacaattagaaaaaagactttcacatattaaaaagccaataactttatcgattataggatgtgttgttaatggacctggtgaagctaaacagaccgaaataggtattactggaggtggaaaagataaccacatgttatatttaaatggtttagaaacggaaaaagtaatgacaaaagatatgataaataagattgttactttggttgaagaaaaagcttcagatttataa

SEQ ID NO: 212382 - DNA, 459 bp, Unknown
  Bacterial polypeptide expressing nucleotide sequence isolated from the Sargasso Sea
ctgtaaaatcttcaattggtgttggaatgttgttgtctgagggtattggagataccattagaatatctcttgcatcagatcccgttgatgaaataaaggttgggtgggatattctaaaaagtcttaatctcagaagtagaggcgtaaaaataattgcttgcccaagctgctctaggcagaattttaatgttattgaggtagttaatgagcttgaatcaagatttgaggatatttcagaagacttagaagtagcgataattggatgttatgtaaacggtccaggagaatctaaagcagctgacataggtctcacaggagcaagtccaaataatcttttgtatattaatgggctaccctctaaaaaactcacaaatgaagagcttgtagatgaaatagagtcacaggtaagagataaaattaattcaccatcatctgatacaattattgcaagaggctaat

SEQ ID NO: 212383 - DNA, 394 bp, Unknown
  Bacterial polypeptide expressing nucleotide sequence isolated from the Sargasso Sea
atgtcattaactcaatctaaagaggttaatagtctctccaaaagatattcaactcatattgagagaaggataactagaacagtaatggtgggtgatatagctattggaagtgattatccagtaagagttcaatcgatgataaatgaagatactatggatgtcgaaaatgcttacttagctatcaaaagacttcatgatgtgggttgtgaaatagtaaggttaactgtcccttccttagcacatgccaaagcagtaggagatataaaggcaaaattactagaaaataatatcaatacccccttggtggctgatgttcaccataatggtatgaaaattgcaatggaagttgcaaaacatgttgataaagtaagaattaatcctggattgtttgttt

SEQ ID NO: 212384 - DNA, 442 bp, Unknown
  Bacterial polypeptide expressing nucleotide sequence isolated from the Sargasso Sea
aatggtattgcgggatacaataagagtttctttatcagctgatcctgtagaagaagtgaaagttgcttttgatcttttgaaggctcttgatatcagaaatagaggtgtcaaagttatatcatgcccttcctgcagcagacagcaatttgatgtaatttcaacggtgagtgaaattgagcgaaggttaagccatattaaacaatctttaactgtatctattattggttgtgttgttaatggtccaggggaagctaaaacagcagacattggtttaacaggtggaggaaaagacacacatcaaatatatatttctggagtggctaaccataggttaaaagataaaaatattgtggatcatattgtagagctggttgaaaagtacattgctgaaatgaataacaaaacaagttcagacaatcaagaaaagcaattaattgcctaa

SEQ ID NO: 212385 - DNA, 487 bp, Unknown
  Bacterial polypeptide expressing nucleotide sequence isolated from the Sargasso Sea
ttgcatttaggaattacagaagcaggaggttttgtacccggcagtataaagtcctctattggattaggcacattacttttagatggtataggtgacacaataaggatttctctatcggatgaccctgttgaagaagttaaaattggaaatgagatattaaaatctcttaacttaagagaaagaggtgtaaaaataatttcttgcccctcatgcgcaagacagggatttgaggtaattgagacagttaaagttttagagaagaaactttcccacataaaaactcctattactttatctgtgataggttgtgtagtaaatggtcctggggaagctgccatgacagacgtaggaattaccggaggcaaaaaaggaaacaatatgctttacttatcaggtgtgcaaactgaaaaagttttaacaagtgaaatgatagaaaaagtcgtgttagaggttgaaaaaaaagctgctgagctagaaaataattaaa

SEQ ID NO: 212386 - DNA, 802 bp, Unknown
  Bacterial polypeptide expressing nucleotide sequence isolated from the Sargasso Sea
gattatttatttatcgatgaacttgataatcttgacgactcaaaaaaatatattattgagggcaaagattggaatgaaaatctttcaaaaaatatttttccttattttaattctttaaaagattttagaaagtctgaagctatttcaaatactttaaatttcattgagattgaattgtcaaaaataactaaaactattatgcaaacattctcaaataatattgtaatagttttaaatgttaataatgcaaatagacatgatttattaagcgcttttaattttctcgaagaaaaacgaataaaaattccagttattttaaaaggcagttatcaaagttcagactttgagaaagttgcaatagatgcctctatcgatataggttcaattttattggaagggatgggaaatggaatatggattcaaacaaaagattttgattcaaaaataaatgaactatcatttttgattttacaaaatactagaaccagaatatttaaaactgactatatatcatgtccttcatgtggaagaacaaaatttgatttacaagaaactacagctttagtaaaagaatatacaaatcatttgaaaggattaaaaatttcagtgatgggttgcattgttaatggacctggagaaatggcagatgcggactatggttatgtagggtctggaaatggagttatatctctttataaaggcaaagaattagttaaaagaaatatttcaagtgagcaagctgtggatgaattgattcagttaattaaagaaaatgacgattgggtcgatcccaaaaattaac

SEQ ID NO: 212387 - DNA, 283 bp, Unknown
  Bacterial polypeptide expressing nucleotide sequence isolated from the Sargasso Sea
atgagtttacgaccgtttagagatataaaaagaagaaagactaaagtaattagcgtaggcgacgttaaggttggtggtgataaccctatatcggttcagtctatgacaaatactttaacgactgacataaaatctacaatcaatcaaattaataacatagcagctgaaggagctgatattgtaagagtttcctgtccagataaagactcaacatctgctttaaaagaaattattaaacacgtgtcagtacctattgttgctgatattcattttcatttataga

SEQ ID NO: 212388 - DNA, 271 bp, Unknown
  Bacterial polypeptide expressing nucleotide sequence isolated from the Sargasso Sea
ctgggaattgtagtgaatttagaacaccaaatagttagaaagaagaccagaaagatactcattggtgatgtgcctgtagggggagatgctcctatttctgttcagagtatgaccaatacactaacttctgattcagaatcaaccatcaatcaaataaaacaattatcagaagcaggtgcagacattgttcgagtttctgttccagatcaggaagcagcagattctttcaagattataaaagagaattctccagttcccctagttgctgata

SEQ ID NO: 212389 - DNA, 332 bp, Unknown
  Bacterial polypeptide expressing nucleotide sequence isolated from the Sargasso Sea
tcgtggaataaacttcattgcatgtcctagctgttcgcgaatgaactttgatgttataggtaccatgaatcaactagaacaaagattggaagatgtaaaagaagatttagatgtggctgttataggttgttatgttaatggaccaggcgaatcaaaacatgtaagtataggtgttacaggtgcttctcctagaaaccttatatatatagatggaaaaccagaccataaaattgaaagtgaagatttagttgatcatttagaaaaccttataagagaaaaaatatctaaagattcttctgatgaagcctctataatagctaaagaagtttagc

SEQ ID NO: 212390 - DNA, 463 bp, Unknown
  Bacterial polypeptide expressing nucleotide sequence isolated from the Sargasso Sea
gcaggacctgcaaaatctggcactatcaaatcctcagtaggcatcggatcgcttttatcaaaaggtattggtgatactatcagagttagcttgacagaagacccagttgaagaggtccatgttgggtttgaaatattaaaaagcttaggactcgctagtaaaggtgttacaattgtatcttgccctacatgtggaagacttgaagtggatttgtttaaaatagctggtgaggtagaagaggaattaaaagatgttaaaactccaatgacattagctttgatgggttgcgctgttaatggtcctggagaagccacacatacagatcttggtattgcatttggaaaaggtgcaggtcatttgtattataaaggaaaaagaagaaagcgcgtaaaagagaaaaatgctattggtgaattaaaaaaaatgatttctgaatttgaggctgaaaaagaaaatgaataaa

SEQ ID NO: 212391 - DNA, 292 bp, Unknown
  Bacterial polypeptide expressing nucleotide sequence isolated from the Sargasso Sea
ccgccaggagttcgatgtcatcggcacggtcaacgccctggaagagcggctggaagacatcatcaccccgatggatgtctccatcatcggttgcgtggtgaacggcccgggcgaggcgttggtctcggatctgggtctggcgggggcggccaacaagagcgccttctacgaggggggtcagcgggtggaccggctcgacaacaaggatctcatcccgaccctggagcgccgcattcgcgcccgggccgccatgctggatccggccaaccagatccaggtggacgagggttga

SEQ ID NO: 212392 - DNA, 392 bp, Unknown
  Bacterial polypeptide expressing nucleotide sequence isolated from the Sargasso Sea
tatgagtgaaagaagacaaacatcgcaaatccaagttggaaaagttggagtaggttctgactatccagtatctgttcagtcaatgacaactacgaaaactagagatactgatgagactttagggcaagtttatgaactagctaataatggtgcagatattgttagagttacatgcaatgaaatagaagctgctgaatctcttgtaaaaatttgtgcaagaagtccggtaccaattgttgcagatattcattttcaatataaattagctcttgcagctgttgaagcaggtgtacatggtttaaggctaaatccaggaaatataagaaatgaaaaacaaattaaagaagtagctagagaatgtttaaatgcaaatatcccgatacgtataggag

SEQ ID NO: 212393 - DNA, 450 bp, Unknown
  Bacterial polypeptide expressing nucleotide sequence isolated from the Sargasso Sea
aatgaaaagaacttatcaaaaaattaaaagaagatattcacgcgtaataaatgtaggcaatgtaaaaatcggtggtgataatcccatcgctgttcagactatgacaaatactttaacaacaaactcaaaagatacaatttcacaaattgaaagatctgcaaagcttggtgccgatattgttagagtttcaattccagataaagactcatctaattcacttaaagaaattgtcaaacatagcactgttcctatagttgctgatattcattttcattataaaagagctattgagtcagctaataatggcgcatcatgtattagaataaatccaggcaatattggaagtgtcgaaagaataaaagaagttataaaagctgcaaaagataatgattgttcaataagagtaggtgtaaatgctggaagtttagaaagacaaattttagaaaaata

SEQ ID NO: 212394 - DNA, 360 bp, Unknown
  Bacterial polypeptide expressing nucleotide sequence isolated from the Sargasso Sea
tagaagaagttaaagtaggttttgaaatacttaaaagtcttgatttaagaaccaggggtgtaaagattgtttcttgtccttcgtgcgcaaggcagggttttcctgttatagatactgttaagattttggagcaaaaattaagtcatattaaagagccgctcacaatttctattataggttgtgtcgttaatggtccaggtgaggctttaaaaagtgagattggtctaaccggtgggggtaaagatacaaatatggtttatctttctggagtggcggatcataaaattaataactcagatattgtcgatcacattgttcaattggttgaggacaagatttcaaaaaatgataaaaactgaa

SEQ ID NO: 212395 - DNA, 441 bp, Unknown
  Bacterial polypeptide expressing nucleotide sequence isolated from the Sargasso Sea
aatggaactgcgaccacacagaataattgaaagaagaaggaccagggaaattaaagtaggaaatgtttctgtaggcggaacatcaaaaataagtgttcaatcaatgacaaatactcttactacagatatcaaaggcactataaatcaaattcaatctttagaagaagcaggtgcagatatcgtgagagtttcatgccctgatgaagcttctacaaaagctcttaaagatatagttaaagaagtaaaagcgccaatagttgcagatattcactttcattacaaaagagcaattgaagctgcatcaatgggtgcaagttgtctaagaataaatccaggatatataggctcaaaagaaaggatactagaggtagttaaagctgctaaagataataattgttcaataagaattggcgttaacgcacgttctttagataaatcttt

SEQ ID NO: 212396 - DNA, 902 bp, Unknown
  Bacterial polypeptide expressing nucleotide sequence isolated from the Sargasso Sea
ttcttgtcctgacgaggagtcgtcaaaatctctaaaagagatagttgatcaaactaatgttccaatagttgctgatattcattttcattataaaagggcaatagaagcagcagaatctggtgcatcatgtttaagaattaatccaggcaatattggatctattgatagggttaaagaagtcgttaaggctgccaaagataacgattgttcaattagaataggtgttaatggcggatctttagaaaaaaatatacttgaaaaatataaaggaccttcgccatcagcaatggttgagagtgcattattccatgaaaatattttaagagatttagattttaataattttaagatatctgtaaaaacttcaaatgttttacttacagttgagtcatataaagagttatcaaaagtaaccgatgctcctcttcatttaggcattaccgaagctggtggattaatggatggcacaattaaatcttccattggcattggtcagcttctggctcaaggaattggtgatacattaagagtttcactatctgcagacccagttgaagaaataaaagttggttttagtattttaaaaagtcttggattaagacatcgaggagttaatataatttcgtgcccttcatgcgcgagacaaggttttgatgttatcggtacagtaaaaaagttagaagaccgtttatcaagtatttctgaaccatttacaatttctgtaattggttgtgtagttaatggccctggagaagctactatgtcagatgtaggatttactggcggtggaaatgacagtggaatgctttatgtcgatggaaagcaacttgcaaaacgaaataatgatgaattaattgactcaattgttagtgaagttgaaaaaaaaataaaacaaaaataaa

SEQ ID NO: 212397 - DNA, 703 bp, Unknown
  Bacterial polypeptide expressing nucleotide sequence isolated from the Sargasso Sea
agattccaatataccaattagaataggagttaattccggctctcttgaaaaagatttacttgaaaaatatggctatccttctgcagatgcacttgttgaaagtgcggaaagacatctatcaatattagatgagttggatttcaaaaatgttaaggtttctgttaaatcaagtaatgtaaatataatgattgatgcttacagaaaacttgcaaaaaaaactgatgttccatttcatttaggtgttaccgagtctggtacatatgagattggatccgtaaaatcctcaattggtattggtagcctaatttctgagggcattggggatacaattagagtttcgttaacggatgatcctataaaagaagtaaaaatggggaaaaacatattaaaagcattgggccattttgagaatggaattgagttgataacttgcccaggctgtgggagacttgaaattgatttacagtccttagtggaagatgtagaaaaaagaattgaaaaaatcaaaattaaaaagactttaaaggtatcaatactcggctgtgttgtaaatgggcctggggaagccttaggttctgatattggtatagcaggtggtagaggtaaaggacaaatatataaaaatggaaaaatttataaatcttgtaaggaatctgaaatagtggatattcttgtcgaagagatagaaaaaattaacttatga

SEQ ID NO: 212398 - DNA, 707 bp, Unknown
  Bacterial polypeptide expressing nucleotide sequence isolated from the Sargasso Sea
tgagagaaaaattttggataaatatatagagcctaactcagacgcaatggtgaaaagtgctcttttccattctcaaattttaaaagaaaatgattttcacgattttaaaattagtgttaaagcctcagatgtttttttaacaattgatgcttataaaaaattagctgaaaaaactgatgcgccttttcatattggaataactgaagctggcggattaagagcaggcacagttaaatcttcaattggattgggttatttgttgcttaatggtattggagatacaataagagtttctttatcagctgaccctgtggaagaagtgaaagttgcatttgatcttttgaaggctcttgatatcaggaatagaggtgtcaaagttatatcgtgcccttcctgcagcaggcagcaatttgatgtgatttcaactgtgagtgaaattgaacgaaggttaagccatattaaacaatctttaactgtatctattattggttgtgttgttaatggtccaggggaagctaaaacagcagacattggtttaacaggtggtggaaaaaacactcatcaaatatatatttctggtgtggctaatcataggttaaaagataaaaatattgtagatcatattgtagagcttgtggaaaaatacattgctgaaaaaaataaaaatacaagtccaaataatcaagaaaaacaattaattgcctaaa

SEQ ID NO: 212399 - DNA, 763 bp, Unknown
  Bacterial polypeptide expressing nucleotide sequence isolated from the Sargasso Sea
aaaaaaagtgatagaggttataaatgctgcaaagcataatggagttccaataagagttggtgtaaatgcaggctctcttgagaaagaccttcaaaagaaatatggagaaccaaactcagatgctttagttgaatcggcacaaaggcatatagatattcttgcaaaacatgatttcgatcactataaaattagtcttaaggcatctaatattgaaatgaccgttgatgcatataggaaaatatcagatttaatagatcagcctcttcatttaggaataactgaagccggaagcttcaggggaggaactgtaaaatcttcaattggtgttggaatgttgttgtctgaggggattggagacaccattagaatatctcttgcatcagatcccgttgatgaaataaaggttgggtgggatattcttaaaagtctaaatctaagaagtagaggtgtaaaaataattgcttgcccaagctgctctaggcagaattttaatgttattgaggtggttaatgagcttgaatcaagatttgaggatatttcagaagatttagaggtagctataattggatgttatgttaatggtccaggagagtctaaagcagctgacataggtcttactggggcaagtccaaataatcttttatatatcaatgggcttccttctaaaaaactcacaaatgaagagcttgttgatgaaattgagtcacaagtaagagataaaattaattcatcatcatctgatacaattattgcaagaggctaa

SEQ ID NO: 212400 - DNA, 879 bp, Unknown
  Bacterial polypeptide expressing nucleotide sequence isolated from the Sargasso Sea
gatgagcattagaccgtttagggatataaagcgaagagtcacaaaagcaataaatgtaggaaaagtaaaagttggtggggacaatcctatttcagttcagtcaatgacaaatactttgactaaagatgtaaaaaatactttaaaacaaattaataatatatctgaagttggtggagatattgtaagagtttcttgtccagatgaagaatctaccagtgcgctaaaagaaattactaaacattcaacaattccaatagttgctgatattcattttcattataaaagggcagttgaagcagcagaaaatggcgcagattgtttaagaataaatcctggtaatattggtgaaaaagataaaattgaacaagttatttcagcagcaaaaaataataattgctcaataagaattggagtaaattctggatctttagagaaagatattttagaaaagtacaaagaaccatgtccagaagcattagttgagagcgcaattagaaatattaaaattttagaggatctaaatttttttaattttaaaataagcgttaaatcttctgacgtatttttatcagtaaaagcttatagggaactttcgaaagttacagattatccacttcacttaggtattactgaggcaggaagcttcgttccaggaactataaaatcttctataggattaggcaatttattaatggatggtataggtgatactattagaatatcactttcagatgaccctgttgaagaaattaaagttggtaatgaaattttaaaatctttaaatttacgaaatagaggtgtaaagatcatatcttgtccctcatgtgcaagacaaggttttcaagttattgatactgttaaaattttagaagaaaagct

SEQ ID NO: 212401 - DNA, 865 bp, Unknown
  Bacterial polypeptide expressing nucleotide sequence isolated from the Sargasso Sea
gcattcatcgatgttgacttcggaaactacggaccttgactccgtgatgctcgaaattcaggctctgcatcgtgcttcctgtgaaatgatccgcattaccatccccaaccgcaaagcgttggatgcgattccggaagtgcgcagaaggatgtctgatgaaggaatcgaacgtcccctgatcgcagatatccacttcaatccccagttggctgtcgatagttgtgaatttttcgaaaaagtccgtatcaatcctggcaattatgctgaccggaagaaatttgaaatccgggaatacagcgatcttcaatatgccgaagagttggaaaggatcgaagaaactcttttgcccctggttaaaaatctgaaaatttatcaacgttgtttgaggattggggcgaatcatggctccctttctgaccgtgtcatgaaccgattcggagattctcccgaaggcatggttcaatcggctttggaatttttaaggatttttgaaaaacataacttttacgatacgattctctcgatgaaatcttccaaccctctggtgatgaaggaagcctatcgtttgttggtgatgaggatggaggaggaatcgatggattatccccttcatcttggggtgactgaagcggggaatggttccgagggccgaattaaaagtgcggtcggaataggcggattgctctgccagggactcggcgacacgatccgggtttccttaacagaaccggcagagaatgaaattccagctgccaaagccatccttggaggagtagaaaaactgatcgaaaggatttcaacggatttaggagagaatgaacgatttgaggaaaaatcagtttccgaaacaacgatatcacccaat

SEQ ID NO: 212402 - DNA, 371 bp, Unknown
  Bacterial polypeptide expressing nucleotide sequence isolated from the Sargasso Sea
tatgaacattagaccatttagggaaattaaaagaagaaaaacaaaagaaattaatgttgggcatgtaaaagttggaggagataatccaatttctgttcaatcaatgactaataccctaactaaagatgttaaagaaactgtaaaacaaattgaacaaattgaagaagcaggagccgatattgtaagggtatcatgtccagatgaagactcaacgacagcacttaaagaaattattaaaaatacttctattccaatagttgccgatatacattttcactacaaaagagcaatagaggcagcagagagtggagctgcttgtcttagaattaacccaggaaatattggagataaaaaaaaaattaaagaggtaa

SEQ ID NO: 212403 - DNA, 364 bp, Unknown
  Bacterial polypeptide expressing nucleotide sequence isolated from the Sargasso Sea
atgagcataagaccttttagggatataaaaagaagacctactaaagttataaatgtagggaaagtaaaagttggaggaaacaatcctatctcagttcaatctatgacaaatacattaacaaagaatgttaaagaaactttaaatcaaataaacaaaatttccgaagccggtggtgatattgtaagagtttcttgccccgatgaagattcttcacgttctctaaaagaaattaaaaagcattctccaattccaattgttgcggatattcattttcactttaaaagagctatagaagccgcagaaaatggtgcagactgtttaagaatcaatccaggtaatataggagataaaaataaaatttcac

SEQ ID NO: 212404 - DNA, 865 bp, Unknown
  Bacterial polypeptide expressing nucleotide sequence isolated from the Sargasso Sea
gaacgtccagcaagtatgatgataatttttgcaaaaattatagaaattgccattaaaaatgataaacctatacgtataggcggaaattggggtagcttaagtaaacaatatcttgagaatactgttattgaaggtcaaaaagcagatgattatgagcatatcattaaaaaaggtttaatagattctgttcttaaatctgcaagttatgctgaaaaactagggttatcatctaacaagattatattgtcatgtaaggtgtcatctgtgcctcaacttatagatgtttacactgaaatagcttcaaaatgcaaatatccacttcatttgggcttaactgaagccggtatgggtgatgaagccgttgtctcatcggttgcagcattatctattttacttaatcagggtattggggatacgatcagggtttctcttactcctgataagatgggagtaagaactaaagaagtcgaagtttgcagaaatatactatctagtcttaagcttaaacaatataaacctaaggtaatttcttgccctggctgtggtagaacgtctagtaactattttatagatttaaccaaagatataaataatcacataaataacagcatgatagactggaaatctaaatatattggtgttgaggaaataaatattgcagttatgggctgcatagtaaacgggccaggtgaatcaaaacatgcaaatataggcataagtctgccaggaacgaatgaatcccctagcgcacctgtttttgtagatggcgaaaaagtgacaacacttaaaggtgatagtatcaaggatgaatttatagccttaatcgaagaatatatagctaaaaattacaagaaagttagctagg

SEQ ID NO: 212405 - DNA, 801 bp, Unknown
  Bacterial polypeptide expressing nucleotide sequence isolated from the Sargasso Sea
aaaatataggttctttagaaagaataaaggaggttattaaagctgcaaaaaataataattgctcaatgagaattggtgtaaatgctggttctcttgagaggagaattttagataagtatagagagcctaatgcagatgctatggttgaaagtgctctgtttcattctcaaatattaaatgaaaatgattttcatgattttaaaattagtgttaaagcctcagatgtttttttaacaattgatgcttataaaaaattagctgagaaaacagatgcccctttccatattggaataactgaagctggcggcttaagagcaggcacagttaaatcttcagttgggttaggttatttgttgcttaatggtattggagatacaataagagtttccttatcagctgatccagttgaagaagtaagagttgcatatgatcttttaaaggcacttgatatcagaaataggggtgtcaaagtaatatcctgtccttcgtgtagtagacagcaatttgatgtaatttcaactgtaagtgaaattgaaaaaaggttaagtcatattaaccaatctttaaccgtatcgataataggatgcgttgttaatggtccaggagaagcaaaaactgcagatattggattaactggtggaggaagaaatactcatcaagtatatatttctggagtggctaatcaccgtttaaaagataaagatattgttcaacatattgtggacctcgttgagaaatatattgctgaaataaatgaaaataaaaatactagtaatcaagaaaaacaattaattgcctaga

SEQ ID NO: 212406 - DNA, 502 bp, Unknown
  Bacterial polypeptide expressing nucleotide sequence isolated from the Sargasso Sea
cctgggtattaccgaagcgggtggtttgcgaggtggtacggtgaagtcctctatcggccttggtttgcttctttgggatggtattggcgacactattcgcgtgtctcttgctgctgatccggtagaagaagtgaaggtgggctgggatatgctcaagtcactgaagctgcgctcccgtggtattaactttattgcgtgcccaagctgttcacgtcagaactttgatgtgatcaaaaccatgaacgagctggaaatgcgcgtcgaagatatccgtaccgatatggacgttgctgtcattggctgtgtcgtgaacggaccgggcgaagccaaagaagtcgatctgggtttgactggtggtcagccgaatctcgtatacatcgatggtaaaccagctggcaaactgaccaacgacggtcttgtcgatgacctggagagaatgatccgggaacgtgcggcgaccctcgacgaagaacgcaaagacctgattaccagcgttaaataa

SEQ ID NO: 212407 - DNA, 496 bp, Unknown
  Bacterial polypeptide expressing nucleotide sequence isolated from the Sargasso Sea
ttatcctcttcatttgggaattactgaggcaggaagtttcgttccaggtagcataaaatcttctataggattaggtaatttattaatggatggtataggtgatactattagaatatcactatcagatgaccctgtcgaagaaattaaagttggtaatgaaattttaaaatctttgaatttacgcgatagaggcgtgaagataatatcttgcccttcatgtgcaagacaaggttttcaggttatagatactgttaaagttttagaggaaaagctatctcatataaaaactccaataactctctcaataataggatgtgttgtaaatggaccaggtgaggccgctcaaacagatataggtatcacaggtggaggtaaagatagcagcatgctttatttaaaaggcgtacaaactgaaaaaataaacaatcaagaaattgtttcaaagatagttaatctggttgaaaaaaaagctattgaaattgaaaataacaagtaa

SEQ ID NO: 212408 - DNA, 731 bp, Unknown
  Bacterial polypeptide expressing nucleotide sequence isolated from the Sargasso Sea
aatgagtaattggataaaacgaaagaataccaaggttgtaaatgttggtaatgttccagttggcggtggaaatccgatttctattcagtcaatgacaaatactgacactaaggatgttgtatcaactattaaacaaattaagaatcttgaattagccggtgcagatattgtaagagtctcagttccaggttttgaggaagcacaagcatttaaagagataaaaaagggcgcagatattcctttagttgcagatattcatttcgattataaaattgctttagaagtagctgatacggctgattgtttaagaataaatccaggcaacattggaaaagagaatagggtcaaggaagtcataaactctgcaattgataataatattcctataagagttggtgtaaatgctggttcattagaaaaagatctgcaaaaaaaatatggagagccaaatgctgatgctcttgttgagtctgctcttcggcacgtagaaatactcgataagttcaattttgaaaattacaaaatgagtcttaaagcttcaaatattgaaatgactgtagatgcatacagaaaaatctctacactcataaatcaacctctccatcttggaataactgaggccggaagcttcagagctggaactgtaaagtcttcaataggagtaggcatgcttttgtcagagggtatcggtgacactataagaatctcattagcttcagatcccattgatg

SEQ ID NO: 212409 - DNA, 718 bp, Unknown
  Bacterial polypeptide expressing nucleotide sequence isolated from the Sargasso Sea
aaaaacgagagagattaatgttggcaaagtaaaagttggaggagaaaatcctatatcagttcaatcaatgaccaacactcttaccacagatgtaaaagctacaattaatcaaattaatgaaattagctctgagggagctgatatagtaagagtctcttgtcccgatgagtcatcatccaaagcattaaaagatataattaaacatgttgatgtacctatagtcgctgatattcattttcattataagagagctatagaggcagcagagaatggagctagctgtttaagaataaatcctgggaatataggaaatattaataagataaaagaggtagtgaaagctgctcatgataataattgttctattcgggttggagttaatgccggatctttagaaaaagatattttagaaaaatataaagaaccttgtccggaagctttagtcgaaagtgccttaaataatataaagattcttgaggatgcgaattttgataatttaaaaataagtgtaaaatcttctgatgtttttttatctattcaggcttatcgtcaactttcaaaagttactgattatcctcttcatttagggattactgaggcgggaggatttgtgccagggagtgtaaaatcctcaatcggcctaggaacattacttttagatggcattggtgatacgataagaatttctttatctgataatcagttgaggagggttaga

SEQ ID NO: 212410 - DNA, 820 bp, Unknown
  Bacterial polypeptide expressing nucleotide sequence isolated from the Sargasso Sea
gacaaacactctaacaactgatgtgaaatctacaataaaccaaattaataatatttcagctgaaggggctgatattgtaagagtttcttgtccagataaagactctacaaccgctttaaaagaaattattaaacatgtatcagtccctattattgcagacattcattttcattataaaagagctatagaagcggcagaaaatggagcaaagtgtttaagaattaatccaggaaatataggagataaaaaaaaagtacaagagattgtttcctctgcaaaaaataataattgttcaattagaattggtgtaaacgccggttcactcgaaagagacatattagaaaagtacaaagaaccatgtccagaagcacttgtggaaagtgctttacgaaatattaaaattttagaggatcaagatttttttaatttcaagattagtgttaaatcttcagatgtttttttgtctatagcagcctatagacaactttctaaagtctgcgattatccacttcatttaggaattacagaggcaggtagttttatctcaggaagtataaaatcatcaataggcttgggtactcttttaatggatggaattggagatacaataagagtatctttatcagacgaaccatctaaagaggcgaggattggaaatgaaattttaaaatcattgaatttaagaaataggggagttaaaatcatatcttgcccttcatgtgcaagacaggcgtttccagtaataaatactgttaaaatattagaggaaaaactttctcatataaaaacacctataactttatctattattggctgtgta

SEQ ID NO: 212411 - DNA, 727 bp, Unknown
  Bacterial polypeptide expressing nucleotide sequence isolated from the Sargasso Sea
agtagtgaaggcagcgaaagatataattgttcaattagaataggtgtaaacgcagggtctttagacaaatcattgttagaaaaatataaagagccttgtcctgaggctttagttgagagcgctcaatataatattaaacttttagaagacaatgatttttttaattttaagataagtgtaaaatcatctgatatttttttgacagtaaaagcatacagagaattatcaaaattatgtgactacccactacatttaggtgtaacagaggcaggcggattatttactggtagcattaaatcttctataggaattggacagttactcatggagggtattggcgatacaataagagtctccttatcttcagatccagtcgatgaagtaaaggcagcatttgaaattttaaaatcactaaatataagatctagaggtgtaaatataatttcttgtccttcatgtgcaaggcaagcttttccagtaattgagactgtaaaacaattagaaaaaaaattatcacatattaaaaagccaataaatttatccataattggatgtgtagtaaatggtccaggcgaagctgcacaaacagagattggtttaactggaggcggtcaagatagtaatcttttatacttatcaggaattcctcactccaaagtcgctagcccagatatagttgataaagtggtagaactcgttgaacaaaaagttgaagagcttaattaac

SEQ ID NO: 212412 - DNA, 816 bp, Unknown
  Bacterial polypeptide expressing nucleotide sequence isolated from the Sargasso Sea
tcaactggggcagcctcgaccaggacctgctcgcgaagatgatggacgaaaacgccgcgcgttccacgccgtgggaagcgcagagcgtgatgtacgaagcgctgatccagtcggcgatcggctcggctgagcgcgccgtggaaatcggcctgccgcgcaacaagatcattctgtcgtgcaaggttagtggcgtgcaggatctgatcgcggtgtatcgtgaactcgcgcgccgttgcgaattcgcgctgcatcttggcttgaccgaagccggcatgggctccaagggcatcgtggcgtcaaccgctgccttgtccgtattgctgcagcagggcatcggcgacacgatccgcatctcgctgacgccggaaccgggcggcccgcgcaccggcgaggtggtcgtcggtcaggaaatcctgcagaccatgggtctgcgctcgttcacgccgatggtgatcgcgtgcccgggttgtggccgcaccaccagcacactgttccaggaactggcgtcgcaaatccagacctatctgcgtacgcagatgccggtgtggcgcgatcagtatcctggcgtcgagaagatgcacgtggcggtgatgggctgtatcgtcaacggtccgggcgagtcgaagcaggcgaatatcggcatcagcttgccggggtcgggagagaatcctgccgcgccggtgttcatcgacggcgagaaggtcaagacactgcgcggcgagaacatcgcgcaagaattccagcaaatcgtgagtgactatgtcgagcgccgctacggccgcgccgaagccggccgcgccgaagcactcaactaaa

SEQ ID NO: 212413 - DNA, 582 bp, Unknown
  Bacterial polypeptide expressing nucleotide sequence isolated from the Sargasso Sea
tatggattataaaagtaaactacaaaaatattgctcaagtcttacttcatatcagaggtggcccacgagagaggtaaaggtaggtagtgtagctgttggaaagaaaaatccaattcgaatacagtcaatgaccacaacagatacgatggatacggaaaatacgatcagccaatctattaggatgatagaagctggttgtgagatagtacgtataactgcaccaagtattaaagaagcgaaaaatttaaaatacatacgtcaaggtattagaaaaaagggttatgatacccccttggttgcagacattcattttacacctaatgcagccgaagttgctgccagaatagtagaaaaggtcaggataaatcctggtaattttgctgacagaaagaaatttgaggcacacgaatattctgacaaagcttatgaaaatgagattgaaagaataaacaataaattttctccattggttaaagtgtgtaaagagtatggtacagccatgcgcattggtacaaatcatggttcactatcagacaggatacttagtcgatatggagatacaccattaggtatggtagaatc

SEQ ID NO: 212414 - DNA, 730 bp, Unknown
  Bacterial polypeptide expressing nucleotide sequence isolated from the Sargasso Sea
atgagcataagaccatttagggatattaaaagaaagataactaaagaagtttcgattggaaatgtaaaagttggaaatcaaaacccgattgttgtacaatccatgactaatactttgacatctaatccttctgaaacaataaaacaaattatagatatttcaaatgaaggagcggggttggttagagtttctgttccagatattgaaagtagcaaggctcttaaagaaataaccaaacactcacccgttccaataattgctgatattcattaccattacaaaagggcaatagagtcagcagaaaatggtgcaaaatgtttgagaataaacccaggcaatattggtgataaaaaaaaaatcaaagaagtaatatctgcagcaaaaaataatgattgtgcaattagaattggagtaaatgcaggatcgcttgaaaaagatattttagaaaaatataaagaaccgtgcccagaagctttagttgaaagcgctatcagaaatatacaaattatcgaagatgaagatttttataactttaaagtaagtgtaaaatcatctgatatttttttatcaatcggagcatataaacaattatcaagaataaccaattaccctctacatttaggtattactgagtctggaagttttgttcctgggagcattaaatcatctatagggatgggaatactgttgctagaaggtattggtgatacaattagagtatctttatcag

SEQ ID NO: 212415 - DNA, 436 bp, Unknown
  Bacterial polypeptide expressing nucleotide sequence isolated from the Sargasso Sea
atgagtgttagaccttggagagatatacagcgaaaaaaaacaaaggggattaaggttggtaatgtgaaagtgggaggcgatgctccaatttcagttcaatcaatgacgaataccctaacaactgatattgaagccacagttgagcaagtaagaggtttagaagatgctggagcagatctagttagaatatcatgtcctgatgaagattctacaactgccttaaaatcaataatcaagaaagttaatgttccaataattgcagatatacactttcattataaaagagcaattgaagcagctaaggcgggtgctgcttgccttagaattaaccctggtaatataggtaatgaggaaaaagttaaagaagttgtccaagctgctaaagatttcaattgttcgatgagaataggcgtaaatgctggaagcttagaacgag

SEQ ID NO: 212416 - DNA, 940 bp, Unknown
  Bacterial polypeptide expressing nucleotide sequence isolated from the Sargasso Sea
gccgatattgtaagattttcagtaccaactatggatgctgctggtgcgtttaagaagattaaatctaaagttaaattacctgttgttgcagatatacattttgattacaaaattgcacttgcagtagctgattcagcagattgcttgagaataaatcctggaaatataggtaaagctgagaagattagagaagttataaatgcagccaaatccaatgatatacccataagagttggtgttaacgcaggctctcttgaaaaacatttacaaaaaaaatatggtgaaccaaattcggacgctctagtagaatctgcaatgaagcaaattgatattttagaaaaaaataactttgataactttaagttaagcttgaaggcttcaaatattgatatgactgttgagagttaccgaaagatttctaaaaaaattgatcaaccattacatttaggtattaccgaatcaggaacatttcgcgcaggatcagtaaaatcttcaattggcataggaatgcttttgtcagagggtattggggatacgattagaatctcacttgcttcggatcccgtcgacgaggttaaagttggttgggatattttaaaatccttaaaccttagaagtagaggtgtaaaaattgtagcctgtccaagttgttcaaggcaaaattttgatgtaattaaagttgttaatgaacttgagacaaggttggaagatatttcagaagatattgaggtagcaatcattggttgttatgtgaatggcccaggagaatctaaagttgccgatattggtctaacaggagctgcaaataaaagtttattgtatgtatctggttcaccaaataagaaacttgataatttagatctagtaaatcagctagaaaacgaagtaagaaacaaattggcagagaggggaacaggagcaagcgatattattgctgtcg

SEQ ID NO: 212417 - DNA, 710 bp, Unknown
  Bacterial polypeptide expressing nucleotide sequence isolated from the Sargasso Sea
ttttgattgtgcaatcagaattggcgtaaatgcaggttctttagagaaaaatattcttgaaaaatatagggaaccatctccagaagcaatgttagagtcagctttaatgcatacaaagattttacaagataatgattttcataattttaaaattagtgtcaaagcttcggatgtatttttagcagtatcagcatatgaattattatctaaacaaattgattatcctttacatgtaggaattacagaagcgggtagtttaatagcaggtactgttaaatcatcaattggtatagggaatcttctttggaaaggtattggagataccattagggtttcattgtcagcagatccgtcagaggaggtaaaagttgcttatgaaattcttaagtcattaggacttagaagaaagggtgttactattgtatcttgtccatcatgcgcaagacaacaatttgatgtcataaaaacagttcaagaagtagaaaaaagattagaatacattaatactcatattacagtttcaattattggatgcgttgtaaatggacccggagaagcaaaagagacagatattggtattactggtggaggaaaaggaactcatcaaatttatatatctgggttaacaaaccatattataaaaaatgaagatattgttgatcatttggtaaggcaagtagaagataaaattgctcaaatgaatatttaat

SEQ ID NO: 212418 - DNA, 534 bp, Unknown
  Bacterial polypeptide expressing nucleotide sequence isolated from the Sargasso Sea
tatgttaagaccttaccaaaaaattaatagaagaaaaacgcgtattgtaaatgtcggtaacattttagtaggtggtgataatcctataacagttcaaacaatgaccaatacattaacaacagatatagtttctactaatagacaaattgatagagcagttaatgctggtgcagacttagttagagtgtcagtgcctgataaagaatcaacacttgctttaaaagaaattactaaacatagcaaagttccaattattgcagatattcattttcattataaaagagccatagaggctgcagataatggagcaagttgtcttagaataaatcctggtaatattggttctaaagaaagggttaaggatgttattaaagctgctaaaaataacaattgttcaattagaataggtgtaaatgcagggagtttggaaaaaaaaatattagaaaaatattctgagcctaatcctgaggcactagttgaaagcgctaaagataatgttaaaattctagaagataatgatttttttaactttaa

SEQ ID NO: 212419 - DNA, 592 bp, Unknown
  Bacterial polypeptide expressing nucleotide sequence isolated from the Sargasso Sea
aatgagcattagaccttttagggatataaagcgtagagttacaaaagttataagtgtaggaaacgtaaaagttggtggaaacaacccaatttctgttcagtcaatgactaatacattaacaaaaaatgttaaagaaactttaattcaaattaataaaatttctgaggttggaggtgatatcgtaagagtttcttgtcctgatgaagactctacaactgctttaaaagaaattacaaaacattctccaattcctgtcgttgctgatatccattttcattttaaaagagccatagaagctgctgataatggtgctgactgtttaagaattaacccaggtaatattggggataaaaataaaattgcagaagttatttctgcagcaaaaaataataattgttcaataagaataggagtaaactctggctcattagaaaaggacatattagaaaagtttaaagagccctgtcctgaggctctagctgaaagcgcaattagaaatattaaaattttagaagatttaagattttttaattttaaaaatagtgtcaaatcttcagacgtatttctatctataaaagcatatagagagctt

SEQ ID NO: 212420 - DNA, 697 bp, Unknown
  Bacterial polypeptide expressing nucleotide sequence isolated from the Sargasso Sea
aatgattaatgttggcaatgtaaaagttggtggcgatgcaaaaatcactgttcaatcaatgaccaatactttaactacagatattgacgccacagtctctcaaatcaattcattagttgaagaaggtgctgacattgtcagggtttcttgtccagataaagagtctaccgaatctctcaaagagttagtaaatcaatcaagtgttccaattgtagctgatatacactttcattataaacgtgccatagaagctgcagaagctggtgcagcctgtttaagagttaatcctggaaacattgggaaagaaaaaattattgaagtgatagaagctgcaaagcaaaacaatatcagtatgcgagttggagttaatgcaggatcaatagatgaacaaatattaactaaatataaagagccatgttcggatgcgttagttgaaagtgcgttagaaaatataaagttgttggaagataacaattttgaaaactttaagattagcgtaaaagcatctgatgtatttataacaattgaatcttacgaaaagcttgctcaattatgtgattatccatttcatgtaggtctaacagaggcaggtacatatttatctgggtcaattaaatcctcaataagcattggtactcttttatcaaagggcataggagatacgataagagtatcacttactgccgatccagtggaa

SEQ ID NO: 212421 - DNA, 781 bp, Unknown
  Bacterial polypeptide expressing nucleotide sequence isolated from the Sargasso Sea
taatgtccctattattgccgatattcattttcactatttaagagctatagagtcagctaaaaatggagcttcctgtttaagaattaatccgggtaatattggttcaaaagaaaaaataaaagaagtaattaaggcagcaaaggataatgattgttctattaggataggtgtaaatggcggaagtttagaaaaaaaaattctagaaaaatattctgagcctaaccctgatgcccttattgaaagtgcaatgaataatataaaaattttagaagaccatgatttttataattttaaaataagtgtaaaagcctcagatatttttttagctattaaatcttatgaaggtttatctgaactttgtgattatccttttcatcttggtataacagaggcaggtggaagaaggagtggatctgtcaaatcatcaatgggcattggtcagttgttgcttagaggtataggggacactttaagagtatctctatcagatgagccagaagaagaagtaagagtaggttatgagatattgaaaggtttaggtattagaaatagaggtgtgaaaattatttcttgcccatcatgtgcaagacagcaatttcctgttatagaaacagttaaaaaactagaatcttctttggaggatattaatgttccaatgacagtatctataattggatgtgtagttaatggtcctggagaggcaacgatgacagaagtaggaattaccggaggaggcaatgatacacacatgatatatattaatggtaaaaaagatcataga

SEQ ID NO: 212422 - DNA, 779 bp, Unknown
  Bacterial polypeptide expressing nucleotide sequence isolated from the Sargasso Sea
ttcttgtccagacgagaactcaacaaatgctcttaaagaaattgttaaacatatagatatccctttagtggcagatattcactttcattataaaagagctatagaagcagcggagagtggagctgactgcttaagaattaatcccggcaacattggggataaaaaaaaaatcaaagaagtcataatggcagcaaaaaataataattgttcaataagaattggcgtcaatgctggttccttagaaaaagatattcttgaaaagtacaaagagccatgcccagaagccttagttgaaagtgcattaagaaatataaaaattttagaggatttagattttcaaaattttaaaattagtgtgaaatcctcagatgtttttttatcagtgaaatcttatagacttctatctcaacaaactacatacccactccaccttggcatcacagaggcaggaagttacctgcctgggagcattaaatcatcaataggacttggcaatttattgatggatggtattggagataccataagagtatcattatcagatgatccagttgaggaggtaaaaattggaaatgaaattttaaaatcaataggtttaagaaatagaggtgttaaaattatatcttgtccatcttgtgcaagacaaggatttgaagtaattgaaactgtaaaaatactagaggataaactttcgcacataaaagaacctatcactctgtctattatcggatgtgttgttaatggacctggagaggcatcacaaacagatatggaataac

SEQ ID NO: 212423 - DNA, 766 bp, Unknown
  Bacterial polypeptide expressing nucleotide sequence isolated from the Sargasso Sea
agttgaatcagcattaaaagaattaaagtacttagaagatgttgggttctatgatataaaaatatcagtaaagcactcaaatgtaccattgatgattgagtcctatcgtttattagctgaaaaagttgattatcctctacatcttggtgttacagaagctggaccgctacctggcggattaataaaatcaactgcaggaattggaacattattaagtgaaggtatcggtgatacgattcgttattccttgacgactgatccagttgaagaagcaaaaagtggcagagcattattagagtatcttggcctaagggaaagaaactcattagatcttattgcatgtccaagttgtggtagagcagaggttgatgtaattaaagttgcagaagaggctcaaaatgttctagataatgaaaacattccattacaagttgctgttatgggttgtgttgtaaatggtcctggtgaagctagatctgcagatttaggtattgcagctggcaaaaataaagggcacttatttataaaaggtgaagttgtaagagttgttaatgaaaaagaaatggtcgatgctcttctaaaagaagccaggttaatagttgaagagggtatagaagctaggcttgcagctgcagataaaaatgcacctgaaatagcccaaaaagatgtaaatgagcttataaattctcaaggagatataaacaacttcttggaaagaaaaaaatcagttgtcgagatatcttcaaatactgatattgaaaattaa

SEQ ID NO: 212424 - DNA, 633 bp, Unknown
  Bacterial polypeptide expressing nucleotide sequence isolated from the Sargasso Sea
tatgagcgtaagaccctttagggatataagtagaaaaaaaaccaaagtaataaatgttggtacagttaaaattggaggagataatccaatttctgttcaatcaatgacaaatactttgactactgatgttaaagcaacaattaaacaaatacatgatatttgtgaagaaggagcagatctagtcagagtctcgtgtccagatgaagaatcaactttttctttaaaagaaattacgaagcatgcgccattaccaattattgctgatattcactttcattataaaagagctatagaggcagctgaaaatggtgcaaaatgtttaaggattaatccaggcaatattggcagcaaagaaaaaatatatgaagttttaagtgcagcaaaaaataacgattgctcgataagaattggtgttaatgcgggatctttagaaaaagatattttagaaaaacataaagagccttgtccagaagcacttgttgaaagtgctttaagaaatataaaaattttagaagatcaaaatttttttaattttaaagtaagtgtcaaatcttcagatgttttttttgtcattggcgcatatagacagttatcaaatgtttgtgactaccctttgcatctcggcattactga

SEQ ID NO: 212425 - DNA, 574 bp, Unknown
  Bacterial polypeptide expressing nucleotide sequence isolated from the Sargasso Sea
atgagtaactggatcaaaagaaaaaaaactaaagtcgtaaaggttggtaatgtccctgttggaggcaataatccaatatcaattcaatctatgacaaacacagacacctgtgatgaggtttcaactataaaccaaattaaggatcttgaagcagcaggcgcagatattgttagagtctctgttccaggatttgaagaagcaaaagcatttaaaaagatcaaaaatgcagtaaatattccattggtagctgatattcattttgattataaaatagctctagaagttgcagattctgcggattgtcttcgaataaatcctggtaatattggaaaagaagacagagtaaaagaagttataagcgctgcaattgataatgatattccaatcagggtaggagttaatgctggttcactagaaaaagatcttcaaaaaaaatatggtgaaccaaatgcagatgctttagtagagtctgcgcttaggcatgttgatattttagataaatttaacttcgaaaattacaaaatgagtcttaaggcatcaaatattgaaatgacagtagaagcatacagaaaaa

SEQ ID NO: 212426 - DNA, 594 bp, Unknown
  Bacterial polypeptide expressing nucleotide sequence isolated from the Sargasso Sea
tatggaagaaaataatctctctcagcgatatagcaccagaattattcgtagagatactaggccagtaatggtcggtgatattggcatcggtggagataatccagtgcgtgttcaatcaatgattaatgaagatacgatggatatcgagggttcaacggccgcaataaggagattgcatgaagttggatgtgagattgtcagattaacagtgccaactcttgcaagtgcaaaagctgtgggggaaatcaagaaacttctagctagcacttatcaaccagttcctttagtagccgatgttcaccataatggaatgaaaatagctttagaagtagctaagcatgtagataaagttcgtatcaaccctggattattcgtttttgaaaaacctgatcccaatagaactgaatttactaaagatgaaattgatgaaattaaagagaagatcatacaaaaattcaaaccaattgttaatactttaaaagagcaaaataaggcactcagaataggcgttaaccatggatctttgtctgaaagaatgttatttgcttatggagatactccatttggaatggttgaatcagctatgggatttat

SEQ ID NO: 212427 - DNA, 899 bp, Unknown
  Bacterial polypeptide expressing nucleotide sequence isolated from the Sargasso Sea
tatgagtgtaagaagacaaacatcgcaaatacaaattggaaaagtcggagtaggttcggactatccagtaactgttcagtctatgacaactacaaagactagaaatacagatgagacattagggcaaatttatgaactagcaaataatggagcagatattgttagagttacgtgtaatgaaatagaagctgcagaatctcttgtaaaaatatgtgcaagaagtccggtaccaattgtcgcagatattcattttcaatataaattagctcttgcagctgttgaagcaggtgtgcatggtttgaggctaaatccaggaaatattagaaatgaaaaacaaataaaagaagtagctagagaatgtttaaatgcaaatattccaatacgaataggtgttaatgcaggttccttagataaagacattttagaaaaatatggtgatgctgttcctaaagcacttgttgaatctgcattattagaagcaagatatcttgaggatgttgattttcatgatattaagatttctgtaaaacattctaatgtccctttaatgatcgaatcttatagacttcttgcggcatcagttgaataccctttacatttaggtgtcactgaagcaggccctttacctggtggtttaattaaatctatcgctggaatttctactcttctttctgaaggcattggggataccatcagactgtcgcttacaacagatccagtagaagaagctaaatatggccgacaattactagagtacttaaatctaagagaaagaaagtcacttgacttgatagcttgccctagttgcggtagagctgaagttgatgttataaaaattgctgcagaagcacagaaagttcttggaaaaagaaggtcttccaattcaagtagctgttatg

SEQ ID NO: 212428 - DNA, 529 bp, Unknown
  Bacterial polypeptide expressing nucleotide sequence isolated from the Sargasso Sea
atcaattggtgcttacagacaattatctaaagtatgcgattatcctcttcatttaggcattactgaggctggaagctttgtatctggaagtataaagtcttctatagggcttgggagtcttttaatggatggaattggagacacaataaggatttctttatcagataatcctacaaaagaagtaataataggaaatgaaattctaaaatcattaaatctaagaaatagaggtgtaaaaataatatcatgcccctcttgcgcaagacaagctttccaagtaattgatactgtaaaaatattagaagataaactttctcacataaaaacaccaataaccttgtcaataataggatgtgttgtaaatggacctggagaagcagctatgaccgacataggtattactggaggtggaaaaggtaataatatgctttatttatctggagttcagagtgaaaaggtcttgaccaaagatattattgaaaaagtcgttacagaagttgaaaaaaaagtttctgagctggaaaagtaa

SEQ ID NO: 212429 - DNA, 855 bp, Unknown
  Bacterial polypeptide expressing nucleotide sequence isolated from the Sargasso Sea
tgtgcctgttccgatagttgctgatattcattttcattataaaagagcaatagaggctgcagaaaatggagcggcatgcttaagaataaatcctggaaacattggaagtgtaaataaaattaaagaagtaattaatgcagcaaaaaataataattgttcaataagaattggtgtaaactctggatctctagaaaaagatatattagaaaaatttaaggaaccttgtccggaagctcttgttgagagcgctttaagaaatattagtattgttgaagaagaagatttttttaattttaaaataagtgttaaatcttcagatgtttttttatctatagcagcatatagacaattatcagataaaatagattatcctttgcaccttggtattactgaagcaggcagttttttaccaggaagcatcaagtcgtctataggttttggcgcattattactagatggaattggtgatactatcagagtttctttatccgatgaccctgtagaagaaataaaagttggaaatgaaatattgaaatctctaaatcttagagaacgtggagtaaaaattatatcctgcccgtcttgtgcaagacaagcatttcaagttattgataccgtaaaaaaattagaattaagcctatctcatattaaaacgccaataacgctttcaataattgggtgtgtggttaatggtccaggagaagcctctcaaaccgatatcggtataacaggaggtggaaaaggcaataatatgctttacttaaatggtattgagacagaaaaaatagctacaaaagatattattgataaaattgtgagcttagttgaaaaaaaagctcaagaaatagaaaaaaa

SEQ ID NO: 212430 - DNA, 544 bp, Unknown
  Bacterial polypeptide expressing nucleotide sequence isolated from the Sargasso Sea
gatgtctttctttcaattgcagcatataggttattatctaaaaaaactgattatccacttcatctaggtataacagaagcaggaagttatctgcctggaagtgtaaaaacttcaataggatttggtaatttgttgttagatggaattggtgatacaataagagtttcactatcagatgatccaattgaagaaataaaagttggaaatgaaattttaaaatctttaagccttagaagtagaggtgtaaaaataatttcatgcccatcatgtgccagacaagcttttcaagttatagaaaccgtaaaaatcttagaaaaaaaactatcccatattaaagagccaattacactctctattattggttgtgtagtcaatgggcctggtgaagccaaacaaacagacattggtataacaggaggcggaaaagacaatcatatgctttatttgaatggcttagatacagaaaaagtaacaacaaataacatgattgataaaattgttgctatggttgaggaaaaagttgcaaatattagaaataattaaa

SEQ ID NO: 212431 - DNA, 777 bp, Unknown
  Bacterial polypeptide expressing nucleotide sequence isolated from the Sargasso Sea
aaagatatatgtaaacattctcaagttccaattattgcggatattcattatcattataaaagagctttagaagctgcggataatggagcaaaatgtttaagaattaaccctgggaatattggtgacaaaaaaaaaattaaagaagttatatctgcagcaaaaaataatgattgtgcgataagagttggagttaacgcaggttcattagaagaagatttactgaataagtataaagaaccatgtcccgaagctttggttgaaagtgctatgagaaatataagtttattagaagatgaggattttttaaactttaaaattagcgttaaatcatcagatgtttttttagcaatcgctgcttataaacaattatcaaaaaaagtagactatcctctgcatttgggtattacggagtctggaagttatatacctggtagtatcaagtcttcaattggcataggcactttacttttagatggtattggtgacacaattagagtctcgctttcggatgatcctgttaaagaggtaaaaattgcaaatgaaatactaaaatcacttaatttaagaaataaaggtgttaaaatcatttcctgcccatcatgtgccagacaaggttttgatgtcattaaaacggtaaaaattttagaggagaaactttcacatattaaaacaccaattactttatccattataggatgtgtagtaaatggacctggtgaagcatcccagactgacgtaggtataactggtggaggaaaagatagtaatatgctatat

SEQ ID NO: 212432 - DNA, 361 bp, Unknown
  Bacterial polypeptide expressing nucleotide sequence isolated from the Sargasso Sea
aatgagtattagaccatttagagatattaaaagaagaaaaacaaaaacaataagtttaggaaatgttaaagtaggtggtgataatcctatatcagttcagtctatgaccaatacattaacaactgatgtgaaaggtactatcaaacaaattaatgaaattcaaaatgaaggtgctgatttagttagagtttcatgtccagatgaggcttcatcaaaagctttaaaagaaattgttagaaatgtggatgtaccaataatagctgatattcattttcactataaaagagctatagaagctgctgaaagtggtgcaagctgtttaagaataaatccaggaaatattggagataaaaaaaaataa

SEQ ID NO: 212433 - DNA, 669 bp, Unknown
  Bacterial polypeptide expressing nucleotide sequence isolated from the Sargasso Sea
tatcaaaaaattaaaagaagaaaaacgcgtgttgtaaatgtaggcgatgttttaataggtgggaataaccctatttcagttcaaacaatgactaatactattacttctgatgtcaaagctacatctaaacaaatagaaagggttgttagcgctggtgcagatttagttagagtctctgttcctgatgaagagtctgcgattgcgcttaaacatataactaaaaatagtaacgtcccaatcatagcagatatacattttcactataaaagagctatagagtctgccgaaaatggtgcaagttgtctgagaattaatccaggtaatattggatcaaaaactaaggttaaagatgtaatcaatgctgctaaaaataataattgctctattaggattggtgtaaatgctggaagtttgaataaaaatattctagaaaaatattctgaacctaatcctgaggcattaatagaaagtgctatggacaatatcaaacttttagaggacaacgatttttttaactttaaaataagtgtaaaatcctctgatatttttatgggaataaaagcatatgaaggtctctctaaacaatgtgattatccacttcatattgggattaccgaagctggtagtaaaagagctggatctataaaatcatccataggaatgggcaat

SEQ ID NO: 212434 - DNA, 478 bp, Unknown
  Bacterial polypeptide expressing nucleotide sequence isolated from the Sargasso Sea
ggaatcacggaagcgggaagttttttaccttgggagtataaaatcatctattggttttggatcacttcttatgagtggtattggtgatacaataagggtttctttatctgatgatccagtagaggagataaaagttggaaatgaaatacttaaatcactaaatttgagaaatagaggagtaaaaattatttcttgtccatcctgtgctagacaagcttttaatgtaatagagactgttaaaaagcttgaagataaattatcccatataaaaactcccatttctttatctataattggatgtgtagttaatggaccaggcgaggcagctcaaactgatttaggtataacgggaggaggaaaaggtaacaatatgctttacttaaatggaattgagtttgaaaaaatatcaagtgatgaaatgatttctaaagtggtcagactggttgaggaaaaggctgaagaaatcgaaaacgcataa

SEQ ID NO: 212435 - DNA, 693 bp, Unknown
  Bacterial polypeptide expressing nucleotide sequence isolated from the Sargasso Sea
aatgagtgttagaccatttagagatatcagtagaagaaaaacaaaagtaataaatgttggagatgtcaaaattggtggagataatccaatttctgttcaatccatgaccaacactttaacaacggatgttaaagcaacaataaatcaaattaatgatattgctgaggaaggagctgacctagttagagtttcgtgtccagatacagagtcaaccaaagctcttaaagaaatagttaaacatgtatctattccagtagtagcggatattcattttcattataaaagagcgatcgaagcagctgaaaacggagctaaatgtttaaggattaatcctggtaatattggcgaggagtcaaaaattcatgatgttcttagtgctgcgaagaataatggttgttcagttagaattggagtaaatgctggatcattagaaaaagatatattagataagtttaaagagccctgtccagaagccctggtggaaagtgctttaagaaatataaaaatattagaagataaagatttttttaattttaaaataagtgttaaatcttcagatgttttcttatcaattggtgcttatagacaattatccaaagtctgtgattatcctcttcatttaggcatcactgaggctgggagttttgtatctggaagtataaagtcttctataggacttggaagtctattaat

SEQ ID NO: 212436 - DNA, 697 bp, Unknown
  Bacterial polypeptide expressing nucleotide sequence isolated from the Sargasso Sea
caaattcactcattagaagaagtcggagcagatatagttagagtatcttgtcccgatgaagactcaacaaaagctttaaaagatatagttaaagaagttaaggttccaattgtagcagacatacactttcattataaaagagctattgaagcagcaaaaatgggagctagctgtttaagaattaatccaggaaacataggttctcgtgatagaattttagaagtagtcaaagctgctaaagactataattgttcaataagaatcggagtaaatgctggttcactagataaaactttgttggaaaaatataaagagccttgtccagaggcacttgtagagagtgcgatgtataatgtaaaacttcttgaggataatgatttcttcaattttaaaattagcgttaaatcctcagatgtttttttgacagtcaaatcttatagaaaattatcgaaagcatgtgattatccattacatctaggaatcacagaagcgggaggacttatgactggtagtataagatcatcgataggaattggccagctacttatggatggaataggagatacaataagagtttctctttcttcagatcctatcgatgaaataaaatctggctatgaaattttaaaatcattaggcattagagcaagaggggtaaatattatttcttgtccatcttgtgctcgtcaagcctttc

SEQ ID NO: 212437 - DNA, 755 bp, Unknown
  Bacterial polypeptide expressing nucleotide sequence isolated from the Sargasso Sea
aatgagtcttagaccatttagagatatccacagaaaaaaaactaaaataattagagtaggaaatgttaaaattggaggcgatagtccaatttcagttcagtcaatgacaaatacacttactaaagattcaaaagcaacaattagccaaattaacgaattggcaaatcaaggagctgatcttgttagagtttcgtgtccagatgaagactctacaatagctctaaaagaaatagcaaaacattctgttgttccaataattgcggatatacattttcattataaacgagctatagagtccgcagataatggtgctaagtgtttgagaataaatcctggaaatataggagacagaaaaaaaattaaagacataattttggcggcaaaaaataatgactgcgcaataagaattggagttaatgctggctccttagaaaaagatattttagaaaagttcaaggaaccttgcccagaagctttggtagaaagtgctttaagaaatattaaaattattgaggatgaggattttttcaattttaaaattagtgtaaaatcatcagatgtttttttatcaataggcgcctatagacaactctcaaaacttactgattaccctttacatttaggaataacagaggccggatcatatttgccgggtagtataaaatcttcgatcggtttagggaaccttttattggatggtattggagatacaataagggtttcgttatcagatgatcctatacaagagataaaag

SEQ ID NO: 212438 - DNA, 649 bp, Unknown
  Bacterial polypeptide expressing nucleotide sequence isolated from the Sargasso Sea
taaagaaccttgtccagaagcgttagttgaaagtgccctgagaaatattaagatacttgaggatgaaaattttcaaaatttaaaagtaagcgttaagtcatcagatgtttttttatcaattgaggcatacaggcaattgtcaaaatctactgattatccccttcatttaggaattacagaggcaggaggctttttacctggaagcattaaatcctctattggattgggaacattacttttagaaggtattggtgacactataagaatttctttatcagataatccagtaaaagaagtaaaaattggaaatgaaatactaaaatccctaaatttaagggaaaggggagttagaataatttcttgtccttcgtgtgcaagacaaggatttgaagtaattgaaactgtaaaaatattagaaaaaaaactttctcatataaggacaccaattaccttatctgtaattggttgtgtagttaatggccctggagaggcggccttgacagatgtgggaataacgggaggtaaaaaaggcaataatatgctttatttatctggagttcagtctgaaaaagtttttacgaatgatataattgataaagtagttagggaagttgaaaaaaaggcttctgagttagataattcaaaatga

SEQ ID NO: 212439 - DNA, 683 bp, Unknown
  Bacterial polypeptide expressing nucleotide sequence isolated from the Sargasso Sea
aattaaatctgtaattgattcagctaatatggctcaagaaataggattggcggctaacaaaattattctttcgtgtaaaactagcaacataacctcgcttgtagatatatatcgcgaactttcaaaaacagattatcctcttcatttaggtttaacggaggcgggaatgggaacagacggcataattgcgtctacgtctgctctatcaatactcttgtacgaaggcataggtgatactatcagagtatctttgactccagaatccgacaaagatcgagtaaatgaagtttttacttgtaaggaaattttatcatcattgaatctaagaaaatttaaacctagagttgtgtcatgtccaggatgcggacgaactagtagcgactatttcataaaattatctcgcaatatcaatcaattagtggagaataaaatgtctgaatggaagaatatttatccaggcgttgagtctatgaccatagctgtgatgggatgtattgttaatggccctggtgaatcaaaacatgcagatattggtatcagcctacctggtgataatgaggatcctcacgcccctgtttttattgatggaaaaaaatttaaaacccttagtggcccagacatagagggtgaatttattaatattttacaaggttatatcgagactaaatatagtaaaacttaat

SEQ ID NO: 212440 - DNA, 852 bp, Unknown
  Bacterial polypeptide expressing nucleotide sequence isolated from the Sargasso Sea
aatgaacgaatattgccatagtcttacacgttatgaacgttttgaaacacgctgtgtaatggttggcgatgttggagttggtgggaataatccaattcgtattcagtccatgacaaccacagatacgatgaatacagataagacgatcgcacagtcaattagaatgatcgaggctgggtgcgagatcgtacgcattacagctccaagcgttaatgaggctaagaacctaaagcctatattggatggtattagatctagaggatatagaactcctttagtagcagatatacatttcactcctaatgcagctgagatcgctgcaaccatagtagaaaaagttcgtataaacccaggaaactatgctgatagaaaaaagtttgaggaacatgaatattctgatttctcctatgcagaggaattggagaggatcagggctcggttcactccactggttaagatatgcaaagaaaatggtactgccatgagaattggaacaaatcatggctctctttcagatcgaattctaagtcgatatggtgatactcctattgggatggttgaatcggctttggagtttatccgcatcgctgaagatgaaagctaccacgatatgatcctaagcatgaaggcgagtaatacgcaggtagttgttcaggcctataggcttctggtaaataaaatgattgaagagggtatgaattatccacttcacttaggcgttacagaagcaggagaagcagaagatggaagaataaagtcagcattaggaattggtgcgcttcttgaagatggactcggagatacaatacgggtgtcgctaactgaagaaccagaggcggagattcctgttgc

SEQ ID NO: 212441 - DNA, 541 bp, Unknown
  Bacterial polypeptide expressing nucleotide sequence isolated from the Sargasso Sea
atgagtattagaccttttagggatataaagcgaagagtcactaaagttattaatgtaggcaatgtaaaaattggaggggataatcctatttcagttcaatccatgacaaatacattaacaaaaaatgttaaagaaactttaaatcaaattaacaaaatttcagaagctggtggtgatattgtaagagtttcttgccctgatgaagaatctactaatgctttaaaagaaatttcaaaacattctacaattcctattgtagcagatattcattttcattttaaaagagccatagaagctgcagagaatggtgcaaattgtttaagaatcaacccaggtaatattggtgataaaaataaaattgctcaggtaatttctgcagctaaaaataacaattgctcgataagagtaggagtaaatgctggctcattagaaaaagatattttggaaaaatttaaagagccttgcccggaagctttagtagaaagcgcaattagaaatataaacattgttgaagatttagatttttttaattttaaaataa

SEQ ID NO: 212442 - DNA, 445 bp, Unknown
  Bacterial polypeptide expressing nucleotide sequence isolated from the Sargasso Sea
atgaacggcccctttgacagaccgaccggccccagcgcccgccgccagagtgtccccgtcaaggttggacacgtgaccatcggtgggggcttgccgattgtcgtgcagtctatgacgaatacggatacggccgacatcaagggcacggccgaacaggtcgcacaactggcccgcgccgggtctgagatcgttcggattaccgtcgatcgcaaagaggccgccgccgccgtgccgcatatccgcgacgaactggaccgtaggggcgtgaatgtgcccctcgtaggcgattttcattacatcggacacagcctgctcacggaatttccggcctgcgccaaggcgctggctaaatatcggatcaatccgggtaatgtgggacatcgcgaaaagcgcgattcgcagttttcgacaatggtgggaaatcgccgctcaatacgaaaaaccg

SEQ ID NO: 212443 - DNA, 514 bp, Unknown
  Bacterial polypeptide expressing nucleotide sequence isolated from the Sargasso Sea
aattttgtcaagtaagtgcgattatcctttgcacctgggaattacagaagcgggcagtttaaagtcaggaagtgttaagtcatctattggaatgggaatgttactaatggagggaattggagataccatacgagtatcgctatcggaagatccagttgaagaagtaaaaataggttttgaaatattaaagtctctaaacttaagacataggggagtaaatattatttcatgtccatcttgcgcgcggcaagctttcccagtaatagatactgtaaaaattttagaacaaaaactctctcacataaaaacaccaataacaatttcagtaattggttgtgtagttaatggacctggagaagcttctcaaactcaaattggacttactggagggggccaaggaaatcacatgatgtatctttctgggataccgcatcataaagtagctagtgatagtataatagatgaaattgttaatttagtagaagaaaaaacaaaagaattaatcaataattaa

SEQ ID NO: 212444 - DNA, 489 bp, Unknown
  Bacterial polypeptide expressing nucleotide sequence isolated from the Sargasso Sea
aatgagtgttagaccatttagagatatcattagaagaaaaacaaaagtaataaatgttggagatgtcaaaattggtggtgataatccaatttctgttcaatccatgaccaacactttaacaactgatgttaaagcaacaataaatcaaattaatgatattgctgaggaaggagcggatattgttagagtttcgtgtccagatgcagagtcgaccaaagctcttaaagaaatagttaaacatatatctatcccagtagtggcagatattcattttcattataaaagagcgatcgaagcagctgaaaacggagctaaatgtttaagaataaatcctggtaatattggtgaggagtcaaaaattcatgatgttcttagcgccgcaaagaataatggttgttcagttagaattggagtaaatgctggatcattagaaaaagatatattagataagtttaaagagccttgtccagaagccctagtcgaaagtgc

SEQ ID NO: 212445 - DNA, 658 bp, Unknown
  Bacterial polypeptide expressing nucleotide sequence isolated from the Sargasso Sea
gagaaatataaagaaccttgtccagaagctttggtggagagcgccttaagaaatataagcattgttgaggacttagatttttttaactttaaagtaagcgttaaatcttctgatgtatttttatctattgaagcctataggcaactttctaaggttactgactatccattacacctaggtatcactgaggcaggaacttttttaccaggtagtataaaatcatctattggttttggatcacttctaatgagtggtattggagacaccataagagtttccttatctgatgatccagtagaggagataaaagttggcaatgaaatacttaaatcactaaatttaagaaatagaggggtaaaaattatttcttgcccatcttgtgcaagacaagcctttaatgtaatcgaaactgttaaaaagttagaagacagactatctcatataaaaactcctatttctttatccataattggatgcgtagtgaatggtcctggtgaggcagcacaaacggatttaggtattactgggggtggaaaaggaaataatatgctctatttaaatggaatcgagtctgagaaaattacaagtgatgagatgatttctaaagtggtaagattggtcgaattaaaagccgaagaaattgaaaaagccaaataat

SEQ ID NO: 212446 - DNA, 601 bp, Unknown
  Bacterial polypeptide expressing nucleotide sequence isolated from the Sargasso Sea
atgagcataagaccatttagagatatcataagaaaaaaaacaaaagagattaacgttggtaaagtattagttggaggcaacaatccaatttcggtacagtcaatgacaaatactttaacaaaagatataaaatcaaccataaatcaaataaatgctattgaaaaagaaggcgcagatttagttagggtgtcatgtcctgatgaggagtcttcgaagtcacttaagcaaataacaaaaaatgtaaaaattccaattattgccgatattcattttcattataaaagagctatagaggctgcagaaaatggagctagttgtctaagaattaatccaggaaatattggagaaaaaaaaaaaataaaagaagtagtttcagctgctaaaaataataattgctcaattagaattggagtaaatgctggttctctagaaaaagatattttagagaaatataaagaaccttgcccagaagcattggttgaaagcgctttaagaaatattagcttaattgagaatgaaaactttaataaccttaaagtaagtgtaaaatcttcagatgtctttttatcaataggagcttaccgtaaactctcgaaagcga

SEQ ID NO: 212447 - DNA, 845 bp, Unknown
  Bacterial polypeptide expressing nucleotide sequence isolated from the Sargasso Sea
tagacgtaaaacacgtactataaatggtaggagatttaaaaattgggaggtaaaaatccaatattgggtccaaacaatgactaatactccaacagtcgatattaaatctactttagcgcagattaaaagagttgcagatattggcgcggatatagtaagagtttcagttccggataaaaattcaacagatgctttaaaagaaatttgcaaaaaatcaaaagtacctattatagcagatattcactttcattatttaagagctgtagagtcagctaaaaatggtgcttcctgtctaagaattaatccaggtaatattggttcaaaagaaaaaattaaagaagtgattaaggctgctaaggataatgaatgttctattcgaataggagtaaatgggggaagtttagaaaaaaagattctagaaaaatatgctgagcctaatccagatgctctaattgaaagtgcgatgaataatataaaaattttagaagatcatgatttttataattttaaaataagtgtaaaggcctcagatatttttttagctattaaatcttatgaaggattatctgaactttgtgattacccgcttcatcttggtataacagaggctggcggacgaagaagtggatctgtcaaatcttcaatggggattggccaattattacttaaaggtattggagatacattacgagtttctttatctgatgaaccagaagaagaagttagagtaggctatgaaatacttaaaagtctaggtattagaaatagaggagttaaaataatctcttgcccatcatgtgcaagacagcaatttcctgttatagaaacagttaaaaaactagaat

SEQ ID NO: 212448 - DNA, 715 bp, Unknown
  Bacterial polypeptide expressing nucleotide sequence isolated from the Sargasso Sea
atgagtttacggccgtttagagatataaaaagaagaaaaacaaaagagatatctgtaggaaatattaaaattggaggtagtaatccaatttctgttcaatcgatgacaaatactttaactacagatatagaagctacaataagccaaataaattctttagctgaagaaggtgcagatttagtaagagtttcatgtccagataaagattctacaaaatcacttaaagaaattataaaacattcaaaagttcctattgttgcagatatacattttcattataaaagagctatagaagcagcagaaaacggagcgaagtgtttaagaattaatcctggaaatattggtgaaaaagaaaaaatatcatctgttgttttagcagcaaaaaataatgattgtgctataagaattggagttaatgcaggttcacttgaaaaagatattttagaaaaatataaagaaccatgcccagaagctcttgtagaaagcgcactaagaaatattaaaattattgaagatcttaatttttataattttaaagtaagtgtaaaatcttctgatgtatttttatctatagcagcttatagagaactctcaaaagttacagattatccacttcatcttggaataacagaagcaggtagttttcttccaggaagtataaaatcttctattggttttgggaatttaatcttagatggcattggtgatacaattc

SEQ ID NO: 212449 - DNA, 637 bp, Unknown
  Bacterial polypeptide expressing nucleotide sequence isolated from the Sargasso Sea
atggaaataagaccttacagagaagttaaaaggaagaaaacaaaagtaattaaagtgggtaaagttttagttggaggtgactcaccaattagtgtgcagtctatgacgaatactttaacgaccgatataaaatctactattgatcaagtcaatagactagaagaaaaaggagcagatattgttagaatatcttgtccagatgaaagttcgacacaatgtttaaaagatataactaacaatgtaaatgtgcctatagttgcagacatacattttcactataagcgagctattgaggctgcaaaaaatggtgcagcatgtttaagaataaatcccggcaatattggatcaaaagagcgaattttagatgtggtaaaagcagctaaagattatgattgttcaataagagtaggagtaaatgctggatctctagaaaaaaaattattagataaatataaagaaccttgcccagaagctcttgttgagagtgcaatttataatattaaattgtttgaagacaataatttttttaattttaagctaagtgttaaatcatcagatatctttttagcaattaaatcttacgaattattatcggaaaaatgtgattatccgttacaccttggtataaccgaggcag

SEQ ID NO: 212450 - DNA, 704 bp, Unknown
  Bacterial polypeptide expressing nucleotide sequence isolated from the Sargasso Sea
ttcaataagaattggagtaaatgcaggatctcttgaaaaagatattttagaaaaatttaaagagccatgtcctgaagctctagttgaaagtgctttaagaaatattaagatattagaggataaagatttttttaattttaaaataagcgtaaaatcctccgatgtttttttatcaattggagcatatagacaactctcaaatgtttgtgattacccccttcatctaggaattactgaagcaggaagcttcattccagggagtataaaatcatctatcggaattggatctcttttattagacggtataggtgatacaattcgaatttctctatctgatgatccgattaaagaaatcaaaattggtaatgagatattgaaatctttaaatttaagaaaccgcggtgtgaaaataatttcatgcccttcatgcgccagacaagggtttgaagtgatagatactgtaaaaattttagaaaaaaagctatcacacataaaaacacctattacattatctattatcggttgcgttgtgaatggacctggcgaagctgctcagacagatatcggtatcacgggaggtaaaaaaggcagtaacatgctttatttatctggcgttcaatctgaaaaagtttcgactgaagacatgattaataaggtagttcttgaagttgaaaaaaaagtatctgaattaaaaaataactaaa

SEQ ID NO: 212451 - DNA, 501 bp, Unknown
  Bacterial polypeptide expressing nucleotide sequence isolated from the Sargasso Sea
tatgagccttaggccttttagaaatattgatagaaaaaaaactaaagttattaatgtaggtgatgtaaaaattggaggagataatccaatttcagttcaatctatgactaatacattgacaagtgatgtgtcagcaacaataaaacaaattcaagaaattcatgaggaaggtgctgatattgtaagagtgtcttgtccagatgaagaatcgtcaaaagctttaaaagacatcaccaaaaatattcaaatccctgtaattgctgatatccattttcattataaaagagctatagaggctgcagaaaatggtgcaaaatgtttgagaattaatccaggaaacattggtgataaaacaaaaattcatgatgttttaaaagccgcaaaagataatgattgttcaattagaataggcgttaatgctggatctttagaaagagatattcttgaaaaatataaagaaccttgtccagaagcattggtagaaagtgctttgaggaatat

SEQ ID NO: 212452 - DNA, 687 bp, Unknown
  Bacterial polypeptide expressing nucleotide sequence isolated from the Sargasso Sea
tcaaaaaaaaattaaagaagttatatctgcagcaaaaaataatgattgtgcaatacgagttggagttaatgcgggttcattagaggaagatttgctaaacaagtacaaagaaccatgtcctgaagctttagttgaaagtgcaatgagaaatataagttttttagaagatgaggatttttttaattttaaaattagcgttaaatcatctgatgtttttttagctatcgctgcttataaacaattatcagataaggtagactatcctttgcatttaggaatcacggagtcaggcagttatataccaggtagcattaagtcttcaattggaataggttcgttacttttagatggtattggtgatacaattagagtctcactttctgatgatcccgttaaagagataaaaattgcaaatgaaatattaaaatcactaaatttaagaaataaaggcgtaaaaatcatttcctgcccatcatgtgctagacaagggtttgacgtaattgaaacggtaaaaattttggaagaaaaactctcacatattaaaaagccaattacattatctattattggatgtgtagtaaatggacctggtgaggcatcccagaccgacattggtgtaacagggggtggtaaagatagtaatatgctatacatacatggggtacaaaatagaaaaatttctaacaa

SEQ ID NO: 212453 - DNA, 556 bp, Unknown
  Bacterial polypeptide expressing nucleotide sequence isolated from the Sargasso Sea
catgagcataaggccgtttagagatataaaaagaaaaaaaactaaagttattaatgttggtaatataaaaataggtggagataatccaatatcatgccaaactatgactaatactttaacaaccgatgttaaagcaactatagaacaaataaatgaagttgttaatgaaggagctgatctagtaagagtatcttgtcctgatgaagagtctacaaaagctttaaaagaaataacaaaacattctcaagtaccaataattgctgatatacattttcattacaaaagagccattgaagcagcacagaatggtgcaaaatgtttaagaattaacccaggaaacataggtgataaaaaaaaaattcatgatgttttaagtgcagctaaagattatggttgcgcaattagaataggagttaatgcaggttctttagaagaagatattttagaaaaatataaagagccatgtccagaagctttagtagaaagtgcattaagaaatataaaaatattagaagatcaaaactttttaaattttaaaattagtgtcaaatcgtca

SEQ ID NO: 212454 - DNA, 591 bp, Unknown
  Bacterial polypeptide expressing nucleotide sequence isolated from the Sargasso Sea
catgagtataagaccttttagggatataaaaagaagagtcaccagagttattaacgtaggtaaagtaaaaattggtggcgacaatcctatttcagttcagtcaatgacaaatactttaacaagagacccaaaagatactttgaaacaaattaataatatttctgaagttggcggagacatcgtaagagtttcttgtccagacgaagaatctacttttgctcttaaagaaattactaaacattcacccattccaatagttgctgatattcattttcattataaaagagctattgaagcagcagaaaatggagcagattgcttgagaataaaccctggtaacatcggtgaaaaagaaaaaattttacaagttatttcagcagcgaaaaataataattgctcaataagaattggagtaaattctgggtctttagaaaaagatattttagaaaagtataaagaaccatgccctgaagcattagtagagagcgcagttagaaatattaaaattatagaagatcttgatttttttaactttaaaataagtgttaaatcttctgacgtattcttatcagtaaaagcttacaaagaact

SEQ ID NO: 212455 - DNA, 373 bp, Unknown
  Bacterial polypeptide expressing nucleotide sequence isolated from the Sargasso Sea
atgagcattagaccttttagagacattaagagaaaaaaaaccaaagaaattaatgttggctcaataaaggtaggaggtaacaatcctatatccgttcaatctatgactaatactcttacaaccgatgtggaagcaactgtaaaacaaattaacgaaattcaaatggaaggcgctgatatagtaagagtttcatgtcctgatgaattatcaactaaagctctgaaagaaattgtaaagcatgtagatatacctattgtcgctgatattcattttcattataaaagagctattgaggctgctgaaaatggagcaagttgtttaagaattaatccaggaaatatagggaatgtaaataaaattagagaagtttaaa

SEQ ID NO: 212456 - DNA, 722 bp, Unknown
  Bacterial polypeptide expressing nucleotide sequence isolated from the Sargasso Sea
agcagctaaaaataataattgctcaatcagaatcggtgtaaatggagggagtcttgaaaaaaaaattttagaaaagtattcagagccaaatcctgacgcattgatagaaagtgcactgaataatattaaaattttagaagataatgatttttttaattttaaaattagtgttaaatcctcggatatttttatggctatcgaagcttataaaggtcttgcagaattgtgtgattatccacttcatctaggaattactgaagcaggtggtaaaagagcagggtctatcaagtcatcaattggtatgggtaatcttttgctaaatggaattggtgatacaatcagagtttctctatcagatgatccagaggaagaggtaagagttggctttgaaattttaaaaagtttaggaataagaaacagaggggtaaaaattatttcatgcccttcatgtgccagacagcaatttcaagttattgatttagtaaaaaaattagaaaaatctctggaagatgtgaaagagtcaattactgtttcaataataggctgtgttgttaatggaccaggtgaagcaaatatgacaaatataggaatcacagggggaggtaataatacacatatgatatatattgatggaaaaaaagatcatatagttaaagacgaaaatttagcattttatctagatgatataattagaaaaaaagttaaaaaaagtagtatataga

SEQ ID NO: 212457 - DNA, 493 bp, Unknown
  Bacterial polypeptide expressing nucleotide sequence isolated from the Sargasso Sea
attgcatttgggaataactgaagcaggtggaaaaagaacaggatctataaaatcttctattggcattggtcaattattacttaaaggaataggagatacaatccgggtatctttatctgatgaacctgaagaagaagttattgttggttacgaaattttaaaaagtttaggtattcgaaatagaggagtaaaaataatttcatgcccttcttgtgctcggcaacaatttccagttattgaaacggttaaaaaattagaagagtcattgcaagacattactacacctttaactgtttcaatcataggttgtgttgttaatggtcctggagaagcttctactactcaaataggtgttactggtggtggaaatgatacacatatgatttatgtaaatggcaaaaaagatcatcgaattaaaaataaagaactacctgcttatttagaatctattataagaaaaactgctttagaagaaaaaaacaaaacattatga

SEQ ID NO: 212458 - DNA, 950 bp, Unknown
  Bacterial polypeptide expressing nucleotide sequence isolated from the Sargasso Sea
attaacaaaaaatgtaaaggagactttaaatcaaataaataggatttctgaagtgggaggtgatatagtaagagtatcatgtcctgatgaggattccacaaaagcacttaaagaaattactaaacattcaggagtccctattgttgctgatatacattttcattacaaaagagcaattgaagcagcagaaaatggcgcagattgtctaagaataaatccaggcaacataggtgatataaaaaaaattaaagaagttattttagcagcaaaaaataataattgttctataagagttggagttaatgctggatctcttgaaaaagatattttagaaaaatataaagaaccttgccccgaatctttggttgaaagtgctattagaaatataaaaattatagaagatttagatttttttaattttaaagtaagtgttaaatcttcagatgtatttttatctattaaagcttataaagaactttcaaaagttactgactatccgctccatttaggaataacagaagctggctcttttttacctggaagtattaagtcatcaataggaataggtagtttattaataaatggaattggtgatacaataagagtttctttatccgatgatccagttgaagagataaaagtaggaaacgaaattttaaaatctttaaatttgagaaacagaggggtaaaaattatttcctgcccttcctgcgctaggcaagcatttcaagttatagacatagttaaatctttagaggaaaaactttctcatataaaaacaccaattactttgtcaattataggttgtgtagtgaacggaccaggtgaggccgcacttacagatataggtattaccggaggaggaaagggcagcagcatgctttactttaaaggaatacaaacagaaaaaataagtaatgcagatattatttctaaagtggtcagtatag

SEQ ID NO: 212459 - DNA, 520 bp, Unknown
  Bacterial polypeptide expressing nucleotide sequence isolated from the Sargasso Sea
tatgagcataaggccttatagagacattaaaagaagaaaaacaaaagtagttaatgtaggaaatgtaaaagttggtggggataatcccataacagtacaatctatgactaatactttaacaactgatgttgttgcgactataaaacaaattaattcaatccaagaagaaggtgcagatttggtcagagtttcatgtccagacgaatcatcatccaaagcattaaaagaaatcgttaaacatgtagatatacctgtcattgctgatattcattttcattacaaaagagctatagaagctgctgaaagtggagccagttgtttaagaatcaatccaggaaatataggagataaaaaaaaaatttatgaagttttacaagctgcaaaaaataataattgttcagtaagaattggtgttaatgcgggctctcttgaaaaagatatacttgagaagtttaaagaaccatgccctgaggcattagttgaaagtgctctaagaaatattaaaattttagaagatcaa

SEQ ID NO: 212460 - DNA, 688 bp, Unknown
  Bacterial polypeptide expressing nucleotide sequence isolated from the Sargasso Sea
aaatggtgcagattgtttaagaattaatccaggcaatattggaaataaaaataaaatttcacaagttatatctgcagccaaaaataacaattgttcaataagaataggtgtaaactctggatcattggaaaaagatatattagaaaaatttaaagaaccttgccctgaggctttagcggaaagtgcaataaggaatataaaaattttagaagatttagatttttttaactttaaaattagcgttaagtcttcagatgtatttttatctataaaagcatatagagagctttcaaaaattactgattatcctttacatttaggaataacagaagcaggaagcttcattccaggaagtataaaatcatctataggactaggtaatttattattagatggaattggagatacaattagaatctcgctttcagacgatccagttgaagaaattaaagtaggaaatgaaattttaaaatcattaaacctgagaaacagaggagtaaaaataatatcttgcccttcttgtgcaaggcaaggtttccaagttatagaaacagtgaaaattttagaggaaaaactatctcatattaaaactccaataactctctcgataataggatgtgttgttaatggcccaggtgaggcagcacttactgatataggtattactggaggaggaaaaaatagcaat

SEQ ID NO: 212461 - DNA, 935 bp, Unknown
  Bacterial polypeptide expressing nucleotide sequence isolated from the Sargasso Sea
tcattctttagaagaagcaggtgcagacatcgtacgggtctcttgtccttatgaaaagtctacaaaggctctaaaagatattgtgagagaagtatcaatcccgattgttgcagatattcattttcactataaaagagcgatagaggctgctgaaatgggagcaagttgtcttagaattaatccgggaaatatcggggctgacaaaagaattatagacgttgttaaagctgctaaaaataataattgttcaattaggattggagtgaatgccggttcattggaaaaaaatttattagaaaagtataaagaaccttgtcccgaggctttagttgaaagtgctcaacataatataaaactcttagaggataatgacttttttaattttaaaataagtgttaaatcgtcggatatttttttaactgttaaagcttacaaaaaattatcggaaatttgcaattatccattacacttaggagttacagaagcaggaggcttacttactggcagtataaaatcttcaattggaataggacagctcttaatgaatggaataggagatacaattagagtttcactatcgtctgatcctgtagatgaaattaaagctggatttgaaattttaaaatctttaggaattagatctaggggagtgaatataatatcttgcccttcatgtgctagacaagcttttccggtgattcaaactgtaaagatcttagaggaaaaattatctcatataaaaaaaccaattagtttgtctataattggttgtgtagtaaacggtccaggcgaggctgctcaaacagaaataggtcttactgggggaggacaagacaataaccttttatatctctctggtgttcctcacactaaagttcctagctcaaaaataattgataagattgtaaaacttgttgaagaaaaaacaaaagatt

SEQ ID NO: 212462 - DNA, 901 bp, Unknown
  Bacterial polypeptide expressing nucleotide sequence isolated from the Sargasso Sea
gaattaagaccttacagagaagtaaaaagaaaaaaaactaaaacttttaaagtaggaaaagttttagttggtggaagcgcaccaattagcgtgcagtctatgactaatactcttacaacagacgtgaaggctacaatagagcaaattaatagattagtagaaaaaggggcagatatagtgagagtgtcttgtccagatgagagttcaacaaaatcactgaaattaataaccaaggaagtcgatgtgcctatagtagcagatatacattttcattttaaaagagctatcgaagctgcaaaaaatggtgcagcatgcctcaggataaatccaggaaacataggaactaaagatagagtattagaagtagttaaagctgcaaaggattataattgctctattagaattggagtcaatgcgggctcattagaaaaaactttattagacaaatataaagagccctgcccagaagctttagtagaaagtgctatgtacaacgtaaaattatttgaagataacaatttctacaattttaaattaagcgtaaaatcttcagatatttttttagcaattaaatcatatgagatgctgtctgataggtgcgattatcctttacacattggagttaccgaggcaggaggacttatctcaggaagcataaaatcatctataggcataggatctttgttaatgaaaggcattggagataccataagagtttctctttcagcagatcctgaggaagaggtaaaagcaggttacgaaattttaaaatcactaaatttgcggtctcgaggtgttaaaataatttcttgcccttcttgtgctagacaagccttccctgtaattgaaactgttaaagttttagagcaaaaattatctcacataaaaaaaccaattactt

SEQ ID NO: 212463 - DNA, 873 bp, Unknown
  Bacterial polypeptide expressing nucleotide sequence isolated from the Sargasso Sea
aatgagtattaggccttttagagatattaatagaaatcaaactaaagaaatcaaagtgggagatgtattaattggggacaaaaatcctatttctgttcaatctatgactaacactcttacaactgatgtaaatgcaactattaaacaaattgatcaaataattgaaaaaggaggagatctagttcgagtttcagtaccagacgaagatagtagcaaagctctaaaagaaataacaagacattcttctattcctattattgcggatgtacactatcactacaaaagggccttggaggcagctgataatggcgcaaaatgtctaagaataaacccaggaaatattggagacaaaaataagattaaggaaataattaaagcagcaaaaaataatgattgtgcaataagagttggtgttaatgcgggatcactagagagagagttgctagagaaatataaagagccttgccccgaagctcttgttgatagtgctttaagaaatataaagattcttgaagatgaggatttttttaatataaaagtaagtgtcaaatcttcagatgtatttctttcagttaatgcgtaccgacaactatcgaaaaaaacaaattatcctttacatttaggaattaccgagtcaggtagtttcatccctggtagcattaaatcttctattgggcttggtattcttttaatggaaggaattggagacaccataagaatatcattatctgatgaaccttacaaagaaattgaaattggaaacgagattttaaaatctttaaatttgagaaatagaggagtaaaaattatctcctgcccatcgtgcgcacggcaaggttttgaggttattaatactgtaaaaattcttgaaaa

SEQ ID NO: 212464 - DNA, 490 bp, Unknown
  Bacterial polypeptide expressing nucleotide sequence isolated from the Sargasso Sea
tttgcatcttggaataaccgagtcaggcagctttttgccaggaagtattaaatcttctataggaatgggcactcttttattagaaggtataggagatacgataagagtatcactttcggatgatccagtaaaagaagtaacaattggtaatgaaatactaaaatctctaaaccttagaaatagaggagttagaataatttcctgcccgtcgtgtgcaaggcaaggttttgaagtaattaatactgttaaattgttagagcaaaaactttctcatattaaaactccgattaccctatcaattattggatgtgtggttaatggcccaggagaagctgctttaacagacataggaattactggaggaggcaaagatagcagcatgctatatataaaaggagtacagatagaaaaaatttcaaataatgaaataatatctaaagtaattcaacttgtcgaaaaaaaatctgaagaaatagaaaaaaataaataa

SEQ ID NO: 212465 - DNA, 910 bp, Unknown
  Bacterial polypeptide expressing nucleotide sequence isolated from the Sargasso Sea
gacgactgacgttaaaggtacaataaatcagattaactctttagaagaagcaggtgcagatattgtgagagtatcttgtcctgatgaggattctactaaagctcttaaaactataactaaagatattaatgttcccttggttgcagacattcactttcattacaaaagagctatcgaggcagctaaaatgggggcaagttgtataagaattaatcctggaaatattggaactagagataggattttagaagttatgaaggcagcaaaagacaataattgttctttacgtattggagtaaatgctggttcattagataagtcaattttagaaaagtataaagaaccttgcccagaagctttagtagaaagcgcggattataatattaaacttttagaagataatgatttttttaattttaaattaagtgtaaaatcatctgatattttcttaactgtcaaagcttatagaaaactttctgaaatttgcaactaccctttacatttaggtgtaactgaggcaggaagtttatttactggaagcataaagtcatcaattggaattggtcaacttttaatggaaggaataggtgacacaatcagggtttcgctatcatcggatccagttgatgaaattaaagcaggattcgaaatattgaaatctttaggaattagatcaagaggagtaaatataatttcctgtccatcatgtgcgcgacaagccttcccagtaattgagaccgtaaaaaaattagaggaaagactttcccatattaaaaaaccaattaatctctcaataattggttgtgtagttaatggaccaggtgaagctgctcaaacagagataggtttaactggaggcggacaagacagcaacttattatatctatcaggagtgcctcatactaaagtg

SEQ ID NO: 212466 - DNA, 682 bp, Unknown
  Bacterial polypeptide expressing nucleotide sequence isolated from the Sargasso Sea
aggatctctagaaaaagatttattagaaaagtataaagaaccctgtccagaggcactagtggagagcgcattaagaaatattagtattgttgaagactttgacttttataaatttaaagtaagtgttaaatcctctgatgtatttttatctattgaggcctataggcaactttctaaagttactgattatccactacatttaggtatcaccgaagcaggaacatttttacctggtagtattaaatcttcaattggttttggatctcttctaatgagtggtattggagacaccataagagtttctttatctgacgatccgtcagaggagataaaagttggaaatgaaatactcaaatcactcaatttaagaaatagaggggtaaaaattatttcttgtccatcttgtgctagacaagcttttaatgttatcgaaactgttaaaaaattagaagaaagattatcccacataaaaactcctatttctttatctataattggatgtgtagtgaacggacctggtgaggcagcacaaacggatataggcatcactgggggtggaaaaggcaataatatgctttatttaaatggaattgagtctgaaaaaattacaagtgatgagatgatttctaaagtggtgagattggttgaagtaaaagctgaagaaattgaaaaagccaaataa

SEQ ID NO: 212467 - DNA, 427 bp, Unknown
  Bacterial polypeptide expressing nucleotide sequence isolated from the Sargasso Sea
tggtagtttattaatgaatggaattggcgacacaataagagtttctttatctgatgacccagttgaagaaataaaagtaggaaatgaaattttaaaatccttaaatttgagaaacagaggagtaaaaattatttcctgtccatcatgtgctagacaagcatttcaagttatagacacagttaaggctttagaggaaaaactttctcatataaaaacaccaattactttatcaattataggctgtgtagttaatggaccaggtgaagctgcactcacagatataggtgttactggaggaggaaagggtagtaatatgctttatctaaaaggaatacaaaaagaaaaattaagtaatgcagaaattatttctaaagtagttggcatagttgaaaaaaaggctaaagaaattgaaaataaaaaggaatga

SEQ ID NO: 212468 - DNA, 625 bp, Unknown
  Bacterial polypeptide expressing nucleotide sequence isolated from the Sargasso Sea
catgagcattagacctttcagggatataaagcgcagagtcacaaaagttataagtgtaggaaatgttaaagttggtggaaacaatccaatttctgttcagtcaatgaccaatacattgacaaaaaatgttaaagaaactttaaatcaaattaataaaatttctgaagttggaggtgatattgtaagagtttcttgccccgatgaagaatctacacatgctttaaaagaaattaccaaacattctccagttcctattgttgctgatatccattttcattttaaaagagctatagaagctgcagaaaatggtgcagactgcttaagaattaacccaggaaatattggagataaaaataaaattgcagaagttatttctgcagcaaaaagtaataattgttcaataagaataggggtaaactctggttcgcttgaaaaggatatattagaaaaatttaaagagccctgccccgaagctctggctgaaagtgcaattagaaatataaaaattttagaagatttagatttttttaattttaaaattagtgttaaatcttcagatgtatttttatctataaaggcatatagagagctttcaaaggcaacagactatcctttgcatttaggt

SEQ ID NO: 212469 - DNA, 570 bp, Unknown
  Bacterial polypeptide expressing nucleotide sequence isolated from the Sargasso Sea
ttaaatttaaaataagtgtcaaatcatccgatatctttatggcaataaaagcttacgaaagtctttcagaactttgtgattacccacttcatctaggaattactgaagcaggagctaaaagaacaggcacaataaaatcatctattggtatgggtaatcttttattaaatggtattggtgacacaataagagtttctctatctgatgaaccagaagaggaggttagggttggttttgaaatattaaagagtataggagcaagaaacaggggtgtaaaaattatatcatgtccttcatgtgcaaggcaacaatttgaagtaattgatttagtgaaaaaattagaaaaatctctagaggatattgaaaaaactattacagtttctattattggttgtgtagtaaatggtccaggggaagcaaatatgacaaatattggaataactggtggtggtaataacactcatatgatttatgttgatggaaaaaaagatcatattgtcaaagatagagatttagccccctatctcgaagatataattagaaaaaaagtaaaaaatgatagtatataga

SEQ ID NO: 212470 - DNA, 562 bp, Unknown
  Bacterial polypeptide expressing nucleotide sequence isolated from the Sargasso Sea
atgcaaattagaccacacagaattattaataggcgtaaaaccaaaaaaattaaagttggcaaagtgtcaattggaggagactctcctatttcagttcaatcaatgacaaatacaattacctcggacgaaacatcaactataaaccaggttaatcaactaaaagaagttggagcagatttagtaagaatttcttgtccagatcaagacgcaactaaagcattaaaaaatattataaaaaaaacagatattccaattattgctgatattcactttcactataaaagagcaatagaggctgctaaatcaggtgccgattgtctaagaattaatccgggaaatattggatcaaacgagagagtaaaagaagtaattaaagctgcaaaagattataattgtgcagttagaattggcgtaaacgccggttcactcgaaaagaaaattttagaaaaatataaagaaccatgtcccgaggctttagttgaaagtgctacttataatataaaattattggaggataatgatttttttaattttaaaattagtgtcaaatcttcagatgttt

SEQ ID NO: 212471 - DNA, 814 bp, Unknown
  Bacterial polypeptide expressing nucleotide sequence isolated from the Sargasso Sea
aaaactaaagtcgttcaggttggaaatgttcctgttggaggcaataatccaatatcaattcaatctatgacaaatacagacacctgtgatgaggtttcaacaataaaccaaattaaggatcttgaagcagcaggcgcagatattgttagagtctctgttccaggatttgaagaggcaaaagcatttaaaaagatcaaaaatgcagtgaatattccattggtagctgatattcattttgattataaaatagctctagaagttgcagattctgcagattgtcttcgaataaatcctggtaatattggaaaagaagacagagtaaaagaagttataagtgctgcaattgataatgatattccaatcagggtaggagttaatgctggttcactagaaaaagacctacaaaaaaaatatggtgaaccaaatgcagatgctttagtagagtctgcgctaagacatgttgatattttagataaatttaacttcgaaaattacaaaatgagtcttaaggcgtcaaatattgaaatgacagtagaagcatacagaaaaatctcaaatataattgatcagcctcttcatctaggaattactgaggctggaagttacagagctggaacggtaaagtcatctataggtgttgggatgcttttgtcagagggaattggagacactatacgaatttctctagcatctgatcctgtagatgaaattaagattggatgggatatattgaagagcctcaacataagaagtagaggagttaaaattaaagcatgtccaagttgctcaagacaaaactttaatgttattgaag

SEQ ID NO: 212472 - DNA, 976 bp, Unknown
  Bacterial polypeptide expressing nucleotide sequence isolated from the Sargasso Sea
tgaatataagcgaagagaaacggaggaggtactgaattttggaaaagaaaatgtacctcgggtgatgcccgatttctccaaagtcagcaaagtggagatgaaagatctaaagtcgattgggcattcgtatttgccggaactggataagtgggggatgaatgacctgggtgctgactatatctacacaggttcaaatccgattgaatttatgctgccgaatgggttgaaagaggtgatggattatgaggtttggaaaaactgcagcgataaagtaaataaattcccatatatctctgatttagaaaaagttgaatcccctgatgagaagttaaactttataggagtcgatacggataattacgaccaaacaatctttggtttgttggaaaaaacgtccaatacagtgcttatactgcattctgatcagcctcatgctactgcaagtgtcagaagatttgtcgtagagctcatgaaccgtgaaatccatgctccggtagtgctaaatcaggaatatgatgagcgaacacaggatgaattgatcgtgcacgcatctactgatgctggtacattgatgatagatggaattggtgatgggatcatgctatctccaacttttactccatctattgatctcttgaagttgtataataatacggcctttggaatactgcaggcagcacgtactcgaataactaagacggaatacatctcttgcccatcctgtggccgaacgctctttgatcttcaggaaaccacagcgatgattcgcaagcgaacagaccatctcaaaggagtgaagatcggaatcatgggttgtattgtgaatggcccgggagaaatggcggatgccgactttggatatgtaggttccgggaaaggaaagattaccctctacaaagggcaggaagtcgtgaagcgaggcgtaccttccgagcatgcattggatgagctcatcgagctgatcaaagaacatggg

SEQ ID NO: 212473 - DNA, 863 bp, Unknown
  Bacterial polypeptide expressing nucleotide sequence isolated from the Sargasso Sea
gtctctcagaagatattcaactcatattgagagaaggataactagaactgtaatggttggagatattggaattggtagtgactatccaataagggtccaatcaatgataaatgaagatactatggatgtgaataattcttacttagcaattaaaagacttcatgatgtaggttgtgaaatagtaagacttacagttccctctttagctcatgcaaaagctgttggagatattaaaaaaaaattaattgcaaataatataaataccccattagttgcagatgttcatcataatggaatgaaaattgcaatggaagttgcaaaacatgttgataaagtaaggattaatccaggattatttgtttttgagaaatcagatcctaaaagaacagaatataccgatgaggaatttaagcttattaaaaacacaattctaaaaaggtttactccacttgtagaagttttgaagttggagaataaagctttaagaattggggtaaatcatggctctttatccgagagaatgctttttacttatggagatacacctttaggaatgaccgaatcagcaatggaatttgtaaaaatttgtgatgagcttgattttcataacatcataatttctatgaaggcttcaagagcgcctgtgatgctggccgcatataggatgattgcagatagattggatgctgaaggatataactaccctttgcatttaggggttacagaggcgggagatggagattatggaaggattaaaagcacagctggtataggaacacttcttgcagagggtctcggagatactatcagagtctctttaactgaagctcctgaaaaagaaataccggtttgctattcaattt

SEQ ID NO: 212474 - DNA, 589 bp, Unknown
  Bacterial polypeptide expressing nucleotide sequence isolated from the Sargasso Sea
tacaaaatgagtcttaaggcgtcaaatattgaaatgacagtagaagcatacagaaaaatctcaaatataattgatcagcctcttcatctaggaattactgaggctggaagttacagagctggaacggtaaagtcatctataggtgttgggatgcttttgtcagagggaattggagacactatacgaatttctctagcatctgatcctgtagatgaaattaagattggatgggatatattgaagagcctcaacataagaagtagaggagttaaaattgtagcatgtccaagttgctcaagacaaaactttaatgttattgaagttgttaacgaacttgaacaaaggttagaggatatttcagatgatatagaggttgctattattggttgttacgtgaatggtccaggtgaaagcaaggcggcaaccattggactaactggagcaagcccaaataatcttttgtatattgatggcactcccaacaaaaaaatttcaaatgaggatcttgttgatgagcttgaagaacaggtgagatccaaaatctcaaaacaaaaaattgaatctgaaaagatcattctgagaagttaat

SEQ ID NO: 212475 - DNA, 877 bp, Unknown
  Bacterial polypeptide expressing nucleotide sequence isolated from the Sargasso Sea
aatggttggtttcaaagaaaaaaaagatattcaattttcatcaatgattgaaactgcagctaagaataataaaccagttagaataggagtgaattggggaagcttagatcaagaattactagcagatttaatggataaaaattcaaaattaaaaaaacctttagatgctgataacgtaacaaagcaagctttgatagaatctgcattgaatagtgcaaaaagagcagaagaactaggtttaaaaaaagaacaaataattatttcatgtaaagtaagtgagcttcatgctttgatcgacgtttatgatgaattagcagaaaaaagtaattattctctacatttaggcttaactgaagcaggaatgggaataaaaggaattgtttcttcaacagctgcattatctttaatactttctaaaggaattggtgatacgattagaatttccttaacacctaaacctgatggagatagaagagaagaagtttatgttgctcaagagatattacaaaatcttggtataagatcttttgttccaaaagtaactgcgtgtcctggttgtggcagaactactagtaaagtttttcaggaattagctgaagatatacaaatgtatattagaaatcaaatgccaaactggaaaaaaaaatatgaaggggttgaagctttgaaacttgctgttatgggatgtattgtaaatggacctggagaaagtaaaaatgcggatctaggtattagtttaccaggtacaggagaaagtccaacaatgccagtttttattgatggaaaaaaatctcataatttaaaaggaaaaaatataacagaagatttcaaaaagattattcatgaatatatcgaaaaaaggtataaaaaaagatga

SEQ ID NO: 212476 - DNA, 310 bp, Unknown
  Bacterial polypeptide expressing nucleotide sequence isolated from the Sargasso Sea
atgagtaactggattaaaagaaaaaaaactaaaactattaaagttggtgatgtttctgttggtggaggtaacccaatatcagttcagtctatgaccaataccgatacttgcgatgtcttatcgactgttaagcaaataaatgatttagaatctgctggcgctgatattgtaagagtttctgttccaggctttgatgaggctaaagcttttaaagaaataaaaagtgctgtaaatattcctttagtagccgatattcattttgattataaaattgctctagaagttgcagatactgcagattgcttaagaa

SEQ ID NO: 212477 - DNA, 532 bp, Unknown
  Bacterial polypeptide expressing nucleotide sequence isolated from the Sargasso Sea
aggaaaatatcaaatttaatagatcagcctcttcatttagggataactgaggccggaagcttcaggggaggaactgtaaaatcttcaattggtgttggaatgttattgtctgagggtattggagataccattagaatatctcttgcatcagatcccgttgatgaaataaaggttgggtgggatattctaaaaagtcttaatcttagaagtagaggcgtaaaaataattgcttgcccaagctgctctaggcagaattttaatgttattgaggtagttaatgagcttgaatcaagatttgaggatatttcagaagacttagaggtagcgataattggatgctatgtaaacggtccaggagaatctaaagcagctgacattggtctcacaggagcaagtccaaataatcttttgtatattaatggactcccctctaaaaaactcacaaatgaagagcttgtagatgaaatagagtcacaggtaagagataaaattaattcaccatcatctgatacaattattgcaagaggctaat

SEQ ID NO: 212478 - DNA, 882 bp, Unknown
  Bacterial polypeptide expressing nucleotide sequence isolated from the Sargasso Sea
aatgactaatactttaacaacagatgttaaatcaacaataaatcaaattaatgatattgcagaggaaggagcagacatagttagagtttcatgtccagatgcagattcaactaaagctcttaaagaaatagtaaaacatgtttctattccaattgtagcagacattcattttcattataaaagggcaatagaggcagcagaaagcggagctaagtgtttaagaataaatccaggaaatattggtgaagaatcaaaaattcatgatgttcttagttctgctaagaacaatggttgttcaataagaataggagtaaatgctggatcattagaaaaagatatattggacaaatttaaagaaccttgtccagaggctttagttgaaagtgctttaagaaatataaaaatattagaggataaagatttttttaattttaaaattagtgttaaatcctctgatgtttttctatcaattgctgcttacagacaattatctaaagcatgtgattatcctcttcatttaggcattacagaagcagggagttttgtgtcaggaagtataaagtcttctataggacttggtagtctattaatggacggaatcggtgacacaataaggatttctttatctgacaatcctacaaaagaagtcacaataggaaatgaaattttaaaatcattgaatctaagaaatagaggagttaaaattatatcttgcccgtcttgcgcaagacaagctttccaagtaattgataccgttaaaatattagaagaaaagctatctcatataaaagcacctataactctgtcaataattggttgtgttgtaaatggacctggagaagcagctatgacagatataggtattactggaggcggaaaagg

SEQ ID NO: 212479 - DNA, 449 bp, Unknown
  Bacterial polypeptide expressing nucleotide sequence isolated from the Sargasso Sea
gatggaaatacgacctcatagaataataaagagaaaaaaaacaagaaaaataaaagttggagacttgtatgttggaggagactctcccatttcggttcagtcaatgaccaatactcttacaacagattataaagctacaataaaacaaattaaagaactagaggactctggagcagatatagttagagtttcctgtcccgatgaagattctacaaaagccttaaaaaaaattacgaaagaaagcaaagtacctatagttgctgacatacactttcattataaaagagcaattgaatctgccaagtctggagcaaaatgtttaagaataaatcctggaaatattgggtccaaagatagagtgaaggaagttataaaagcagcaaaagattacgagtgtgcaattagaattggagttaatgcagggtcgttagagaaaaatattttagaaa

SEQ ID NO: 212480 - DNA, 544 bp, Unknown
  Bacterial polypeptide expressing nucleotide sequence isolated from the Sargasso Sea
ttatgttttcttatcaattcaagcctatcgccaattatcaaaagctacagattatcctatccatttagggatcactgaagcgggaagttttatacccgggagtataaaatcctcaattggattgggtacattacttttagatggtataggtgacacaataagagtttctttatcagataacccagtcgaagaagttaaaattggaaatgagatattaaaatctcttaatttaagagaaagaggagttaaaataatttcttgcccctcgtgtgctagacaagggtttcaagtaattgaaacagttaaggttttggaaaaaaatctttcacatattaaagcaccaattactctatctgtaatagggtgtgttgttaatggtcctggagaggcagcgatgacagatgtgggaataactggaggtaaaaacggaaacaatatgctttatttgtcaggagtacagtctaaaaaagttttaaccaccgacatgattgaaaagattgtaattgaagttgaaaaaaaagcttctgaatttgaaaataaataa

SEQ ID NO: 212481 - DNA, 747 bp, Unknown
  Bacterial polypeptide expressing nucleotide sequence isolated from the Sargasso Sea
acaaaatccactattaaacaaattaacgagttaaaagaggtcggggctgatattgttagagtttcatgccctgatgaagagtcaacattgaacttaaaggagattataaaaaatgttgacgtgccgatagtggctgatattcattttcactatcaaagagctatcgaagctgcaaagaacggcgcaagttgtttaagaattaatccaggtaacattggttctagagaaagggttttagaagttgtaaaagcagcaaaagattttaattgctcaattagaataggggtgaatgctggatctcttgataaaaacttattagaaaaatttaaagaaccatgtccagaggctttagtcgaaagtgcaaaatataatatcaaattattagaggataatgatttttttaatttcaaaataagcgtaaaatcttcagatgtttttttatcaatcaaggcatatgagcaactctcagcagtttgtgactatccgctccatttaggtattactgaagcaggaggtctttttacaggtagtataaaatcatcaattggtataggtcagctactaatgaaaggtattggtgatactataagggtgtcgctttctgctgatccagtggaggaagttaaagctggatatgaaattttaaaatcgttaaatattaggtccagaggagtaaaaattatttcatgcccctcatgtgctagacaagcttttccagttattgagactgttaaaattttagaaaaa

SEQ ID NO: 212482 - DNA, 619 bp, Unknown
  Bacterial polypeptide expressing nucleotide sequence isolated from the Sargasso Sea
atgagtaactggatcaaaagaaaaaaaactaaagtcgtaaaggttggtaatgtccctgttggaggcaataatccaatatcaattcaatctatgacaaacacagacacctgtgatgaggtttcaactataaaccaaatcaaggatcttgaagcagcaggcgcagatattgttagagtttctgttccaggatttgaagaagcaaaagcatttaaaaagatcaaaaatgcagtaaatattccattggtagctgatattcattttgattataaaatagctctagaagttgcagattctgcagattgtcttcgaataaatcctggtaatattggaaaagaaaacagagtaaaagaagttataagcgctgcaattgataatgatattccaatcagggttggagttaatgctggttcactagaaaaagatcttcaaaaaaaatatggtgaaccaaatgcagatgctttagtagagtctgcgcttaggcatgttgatattttagataaatttaacttcgaaaattacaaaatgagtcttaaggcgtcaaatattgaaatgacagtagaagcatacagaaaaatctcaaatataattgatcagcctcttcatcttggaattactgaag

SEQ ID NO: 212483 - DNA, 901 bp, Unknown
  Bacterial polypeptide expressing nucleotide sequence isolated from the Sargasso Sea
tgaagactcaacgaaatctcttagagatattattaaaaatacttctataccaatagttgctgatatacattttcactacaaaagagcaatagaggcagcagagagtggagctgcttgtcttagaattaaccctggcaatattggagataaaaaaaaaattaaagaagtaatttctgcagcaaaaaataacaattgttcaattagaattggtgtaaatgcaggatctttagaaaaagacatattagaaaagtataaagaaccttgtccagaagctctagtagagagcgcattaagaaatattaatattgtcgaagactttgacttttatgaatttaaagtgagtgtcaaatcttctgatgtatttttgtctattgaagcttacagacaactttctaaagctactgattatccactacatctaggaatcactgaggcaggaacatttttacctggtagtataaaatcttccattggatttggatcacttcttatgagtggtattggagataccgtaagagtttctttatctgacgatccggtggaggagataaatgttggaaatgaaatacttaaatcacttaatttacgaaatagaggggtaaaaattatttcttgtccatcttgtgctagacaagctttcaatgtaatagaaactgttaaaaaattagaatacagactatcccatataaaaactcctatttctttgtctataattggatgtgtggtgaatggacctggtgaggcagcacaaacagatataggtattactgggggcggaaagggcaataacatgctttatttaaatggagttgaaagtgaaaaaatatcaactgatgagatgatttcaaaggttgtaaaattggttgaagaaaaagcaaaagaaatcgaaaaagccaaataa

SEQ ID NO: 212484 - DNA, 451 bp, Unknown
  Bacterial polypeptide expressing nucleotide sequence isolated from the Sargasso Sea
agcgtaaagtcggcaattggactgggaaatttattaatggagggtataggggatacaataagagtgtctttgtcagccgatcccgttgaagaagtaaagattggtaacgaaattcttaagtcaatcgggttaaaaagtcgaggagttaaaattatatcttgcccatcttgtgcaagacaaggttttaaagtgattgatactgtaaaaacattagaggaaaagctatcacacattaaggaaccaataactttgtcgattatcggctgtgttgtaaatggtcccggtgaggctgcatttacagatattggcattacaggaggggggaaagatagcaatatgctttatctaaatggaacacaaacagaaaagttaaataataaggaaatcatttcaaaagtagtagacctagttgagaaaaaagctgaggaaattcaaaataataataaatgat

SEQ ID NO: 212485 - DNA, 841 bp, Unknown
  Bacterial polypeptide expressing nucleotide sequence isolated from the Sargasso Sea
gttgaagaaggtgctgacattgttagggtttcctgtccagacaaagggtctactgagtctcttaaagaggtagtaaatcaatcaagtgttccgatcgttgcagatatacactttcattataaacgtgcaatagaagcggcagaagctggtgcggcctgtttgagagtgaatcctggaaatattggaaaagaaaaaattattgaagtgattgaggctgcaaaacaaaacaatattagtatgagaataggagttaatgcaggatcaatagacgaaaaaatactaatgaaatacaaagaaccatgctcagatgcattagttgaaagtgcgttagaaaatataaagttattggaagataataattttgaaaactttaaaataagcgttaaagcttctgatgtatttataactattgaatcatacgaaaagcttgctcaattatgtgattatccatttcatgttgggctaaccgaggcaggcacttatttatctggttcaattaaatcctcgataagcattggtaatcttttatcaaaaggcattggagatacgataagagtatcacttactgctgatccagtagaagaaattaaagttggttatgaaatattaaaaagtttagatttaggttcaagaggaataaagattatctcttgtccttcatgtgcgagacaagcttttccagtgattgaaacagtcaaaaagttagaacaaagacttgcacatataaaaacacctctcacactttcaattattggatgtgttgttaacggtccaggagaggcactcaaaagtgacattggtcttactggaggaggtaagggtaataatatgatttattgtc

SEQ ID NO: 212486 - DNA, 801 bp, Unknown
  Bacterial polypeptide expressing nucleotide sequence isolated from the Sargasso Sea
aatgatatcagatattagaccatttagaaaaattataagaaaaaggaccaaagaagtaaaagttggaaaaataaaagttggtggagataatccaattactgttcaaactatgacaaatacattgacaacagatcataaatcaacaatcgagcaaattaataaagtaaccgaggccggtgcagatatagttagagtttcttgtcctgatcagaattcaactaagtctttaaaaactattattaaaaatgttgatgtaccaatagttgctgatattcatttccattataaaagggcaatagaagctgctgaaaatggcgcagattgtcttcgtattaatccaggtaatatcggagacataaaaagaatagcagaagttatatctgctgcaaaaaacaataattgctcaattagaattggtgtcaacgcaggctcacttgaacgtgatatacttgaaaaatatagagagccatgcccagaagctttagtggagagtgctttaagaaatattgaaatattagaaaacatgaattttacaaatttaaaagttagcgttaaatcatcagacgtttttttatctattgctgcttatagattgctttcagaaaaaacagattatccacttcatcttggaattactgaggcaggtagttatttacctggcagcatcaaaacctcaataggatttggaagtttattgttagatggaataggtgacacaattagagtatctctttcagatgatcctattgaagaaattaaagttggaaatgaaatattaaaatctttaaacttgagaaacag

SEQ ID NO: 212487 - DNA, 838 bp, Unknown
  Bacterial polypeptide expressing nucleotide sequence isolated from the Sargasso Sea
gatatccattttcattataaaagagctatgaaagctgctgagaatggtgcaaagtgtctaagaatcaatccaggaaatattggcgataaaaaaaaaattcatgatgttctaaaagccgcaaaagataatgattgttctattagaataggcgttaatgctggatctttagaaagagatattcttgaaaaatacaaagaaccgtgcccagaggcattggtagaaagtgctttgagaaatattaaaattttagaggatgaggatttttttaattttaaagtaagtgtcaaatcttctgatgtatttttatcaattgcagcttacagacaactttctaaggccatgaattacccattacacttaggaataacagaagcaggaggttttgttcctggcagcgttaagtcttccataggtcttggatcacttctcttggatggtattggtgacactataagagtatctttatctgatgaacctgtaaaagaagttaaaattggaaatgaaattttaaagtcgttgggattaagaaacagaggagtaaaaattatatcttgcccatcatgtgcaaggcaagctttccaagtaattgatacagtaaaaatactagaggaaaaattatcccatataaaaactccaataacactgtctattataggctgtgttgttaatggcccaggtgaggctgccttgactgatattggcattactggcggtggaaaagggaataatatgctttatttatcaggtgttcaaagtgaaaaagttttaactagcgaaattataaataaagtaatttcagaagttgaaaaaaaggcagcagaaatagaaaataaataaa

SEQ ID NO: 212488 - DNA, 586 bp, Unknown
  Bacterial polypeptide expressing nucleotide sequence isolated from the Sargasso Sea
tagagaagacaatgcgcatggtatggcagaacaacgaagagctattatagatttaatgttgttcatggtgagctgtccacttgtgatcaaaaggtcgtatcaccatcttgatgaggagagttttcaattgttcagttcaacagatttgggggggttgttgattgatggcttaggagacgggatttggatagatgcgaatgattgttgtagcaaacaacaacttgtttctacagcttttggaatccttcaagcgacgagaacacgaatctcaaaaacagagtatatatcttgcccttcttgtggaagaactttatttgacttacaagaaacgacagcaaaaattagaaatgaaaccgcgcatttaaaaggggttaaaattgggatcatgggttgcattgtaaatggccctggggaaatggcagatgctgattatggctatgttgggacagggcctggtaaaattaccctctacagagagaaagaggtggtacgtcgaaatgttccagaaaatgaggcggttgaagcacttattgatttaattagagagcatggagattggatagaagcacctgcacttgaacattag

SEQ ID NO: 212489 - DNA, 638 bp, Unknown
  Bacterial polypeptide expressing nucleotide sequence isolated from the Sargasso Sea
atgtcctgaggctttagtggacagtgcgctcagaaatattaggatattagaggatgaggatttttttaatcttaaagtaagtgtgaaatcctcagatgtttttctatctataggtgcatacagacaattgtcaaaaaagataaattatccactacatattggaataacagaagctggaagttttttgccaggtacaataaaatcatctataggatttggagctttgcttttagatggtattggagacacaataagagtctcattatctgatgatccagtaaaagaagtgcatgttggaaatgagatacttaaatcattaaatttaaagcatcgaggggtaaaaattatttcttgtccatcttgtgctagacaaggatttgaagtcattgatactgttaaaattttggaggagaagctctcacatatcaaaactcctatcactttatctattataggctgtgttgtaaatggaccaggtgaagctgccatgactgatattgggattacggggggtggaaaaggaagtaacatgctttatttgtctggcgtgcaaacagaaaaagttttaacaaaaaatataattgataaagttgtagaagaagtagaaaaaaaagcctctgaaatagaaaataattaaa

SEQ ID NO: 212490 - DNA, 514 bp, Unknown
  Bacterial polypeptide expressing nucleotide sequence isolated from the Sargasso Sea
aatgagcatcagaccttttagagatataattagaaaaaaaacaaaagtaattaaagttggaaaagtaaatgtaggagggagcaatcctatcagcgtacaatcaatgactaacacattgactaatgacataaaagctacgattaaacaaattcaagaaatttcaaaagctggagctgatattgttcgagtatcatgtcctgatcaagactcttcaaaagctttaaaagaaattgtaaaacatattgatatccctttagttgcagatattcattttcattataaaagagctatagaggccgcagaaaacggtgctgattgtcttagaataaatcctggaaatattggagacagaaacaaaatcaaagaggttataaattctgcaaaaaataacaattgttcaattagaattggggttaatgctggatcattagagagagatattttagaaaaatttaaagaaccatgtccggaggcattagtagaaagtgctttaagaaatattaaaattattgag

SEQ ID NO: 212491 - DNA, 631 bp, Unknown
  Bacterial polypeptide expressing nucleotide sequence isolated from the Sargasso Sea
gacagaatctgctatggagtttgtcaaatttgtgatgagcttgattttcataacataattatttctatgaaagcttcaagggctccggttatgatggcggcctacagaatgattgcagataggcttgactcggaaggatacaactatcccttacatctgggagtgaccgaagctggagatggtgattatggaaggattaaaagtactgccggaatcggaacgcttctagctgagggattaggagataccattagggtttctttaacagaagccccagaaaaagaaatacctgtgtgctattcaattttgcaatctttaggattaagaaaaacgatggttgaatatatcagttgccctagttgtgggagaacacttttcaatttagaggaagttgtagacaaagtaaggaacgctacttcacatttgactggtttagatatagcaataatgggatgtatcgttaatggaccaggagaaatggcagatgctgattatggttatgttgggaaaggtaaaggaactattgctttatatagaagaaaagaggagataaagagagtacctgaagatgagggggttaatgctttaatccaacttattaaggatgatggaaaatggattgatccttaag

SEQ ID NO: 212492 - DNA, 493 bp, Unknown
  Bacterial polypeptide expressing nucleotide sequence isolated from the Sargasso Sea
ccactgcatattgggattactgaagcaggaggtaaaagaacaggatcaataaagtcttcaataggtatgggcaatcttttattaaaaggcattggagatactatcagagtttctctatccgatgaccccgaagaagaggttaaagttggctttgaaattttaaaaagtttgggagttagaaataggggagttaaaatagtttcatgtccatcatgtgcaagacaacagtttcaggtcattgatctggttaaaaaattagaaaaatcacttgaagatattcaaaaacccttgactgtttctattattggttgtgttgtaaatgggccaggagaagcaaatatgactaatataggtataacaggaggaggaaataacacgcacatgatatatgttgatggaaataaagaccatatagttaaagataaagatttagctccatatcttgaagatataattagaaaaaaagctgaaaataagagtataaagaaataat

SEQ ID NO: 212493 - DNA, 467 bp, Unknown
  Bacterial polypeptide expressing nucleotide sequence isolated from the Sargasso Sea
tatgagtattagaccctttagagatatcaagagaagagaaacacttgaggtaaaagttggaaatgtaaaaattggaggaaaaaatccaatatctgttcaatcaatgacaaatacgctgacaactaatattaaagaaactttaaatcagattcaaaatattgctaatgaaggggcagatttagttagagtttctattcctgatcaggatagtagcaaagctttaaaggtaataactaaaaattctcccgttcccattgtcgccgatatacattttcattacaaaagagcacttgagtctgcagataatggagcaaaatgtttgaggataaatcctggaaatattggagatttaaaaaaaattcaagaaattgtaaaagctgcaaaaaataatgattgtgcaataagaataggtgttaattctggttctcttgaaagagatattttagaaaagtttaaagaaccttgtc

SEQ ID NO: 212494 - DNA, 751 bp, Unknown
  Bacterial polypeptide expressing nucleotide sequence isolated from the Sargasso Sea
atctcgtgatagaattttagaagtagtcaaagctgccaaagacaataattgctcattaagaattggagtaaatgccggttcattagataaaactttgttggaaaaatacaaagagccttgccctgatgcactagtagaaagcgcaatgtataatgtgaaattattagaagataatgatttttttaattttaaaattagcgttaagtcatcagatgtttttttaactgtaaaatcgtataaaaaactatcaaagatttgtgactatcctttacatctgggaattactgaggcaggaggtctgctatctggcagtataagatcatcaataggtattggtcaacttttaatggacggcataggagatacgataagagtttctctatcttctgatcctgtagatgaaataaaatctggatatgaaattctaaaatctttaggtattagagctagaggtgtaaatattatttcttgcccgtcttgcgctcgtcaagcttttcctgtgatagaaactgtaaaagaattagaaaaaaaattagcgcatgtaaaaaaaccaattactttatctataattggatgtgtagttaacggaccaggagaagctgctcaaactgaaattggtttaacagggggagggcaagatagtaatcttttatatttgtcaggtttacctcacactaaagtagcaagctctgaaataattgataaagttgtgaatctggttgaagaaaaagttaaagaaaaaactaattaa

SEQ ID NO: 212495 - DNA, 856 bp, Unknown
  Bacterial polypeptide expressing nucleotide sequence isolated from the Sargasso Sea
aatgctaagaccatatcaaaaaataaatagacgaaagtcgcacgtaattaccgtaggtaaagtaaaaataggcggtaataatccaattgctgttcaaaccatgactaatactctaacaacaaatactaaagaaactattctacaaattgaaaggtctgcaaaacttggggcagatatagttagagtttctgttcctgatgaagaatcatctaattcgctaaaagagattgtaaaacatagttctgtacctattgttgcagatatccactttcatcataaaagagcaatagaatcagcaaaaaatggagcggcatgtattagaataaatccaggtaatattggaagtactgaaagaataaaagaagtaattaaagctgcaaaagataacaattgttctatacgagtaggcgtaaactcaggtagtttagaaaaacaagttttagacaaatattctgaaccaaacccagaagcattagttgaaagtgcaaaattaaatataaagattcttgaagacaatgactttactaattttaaaataagtgtgaaatcttcagatatttttatgtcaattaaagcatacaacgaaattgcaagcttctgtgaatatcctttacatctaggcataactgaagctggaggtaaaagaacaggatcaataaaatcttcaattggtattggtaatttacttctaagtggaattggtgatacaattagagtctccctatcagatgaacctgaagaagaagtaagagttggatttgaaattttgaaaagtttaggtttacgaaacagaggtgttaaaattatttcttgtccatcatgcgctagacaacaatttcaagtaattgatactgta

SEQ ID NO: 212496 - DNA, 451 bp, Unknown
  Bacterial polypeptide expressing nucleotide sequence isolated from the Sargasso Sea
actatcaggatatctcttacccctgaaccaaacggtagtcggactagagaagtgattgtggcacaagagttgctccagtccatgggtcttagatcttttcttcctcaaatagcagcgtgcccagggtgcggacggacaacaagtacagtatttcaggagttagccagagatattcagctatatgtaaggaaaaagatgccggagtggaaggtgtcatatatgggtgtggaggacatgcaggtggcggttatgggttgtattgttaatggccctggagaaagtaagcatgccaatattgggatcagtttgccgggtacgggtgaggatccatctgcgcctgtgtttattgatggaaaaaagaaattaacattgcggggcgatgacctagccttgcaatttcagcatattgtagacaagtatgtcgactcacactatcctctgcgcagttagt

SEQ ID NO: 212497 - DNA, 739 bp, Unknown
  Bacterial polypeptide expressing nucleotide sequence isolated from the Sargasso Sea
actgtaaaacaaatcgaaaaaattgaagaagcgggagccgatatcgtaagagtatcatgtccagatgaagactcaacgaaagcacttaaagatattgttaaaaatacttctattccaatagttgctgacatacattttcattataaaagagcaatagaggcggcagagagtggagcggcatgtcttagaataaatccaggaaatataggagataaaaacaaaatcaaagaaataatttctgctgcaaaaaataataactgttctattagaattggtgttaatgcaggatctctagaaaaagatttgttagaaaagttcaaagaaccctgtccagaagcaatggtggagagcgcattaagaaatattagtattattgaagactttgacttttataaatttaaagtaagtgttaaatcctctgatgtttttttatctattgaagcttatagacaactttcgaaggttactgattatccactacatctaggtataactgaagctggaacttttttacctggtagtataaaatcttctattggttttggatcgcttcttatgagtggtattggagatactataagagtttctttatctgacgatccagtacaagagataaaagtaggaaatgaaatacttaaatcattaaatttacgaaatagaggggtaaaaattatttcctgtccatcttgtgctagacaggcttttaatgttatagaaactgtcaaaaagttagaagata

SEQ ID NO: 212498 - DNA, 665 bp, Unknown
  Bacterial polypeptide expressing nucleotide sequence isolated from the Sargasso Sea
tatggaaattagacctcacagaatcattaacagaaaaaagacaaaaaaaatcaaagttggaagcattttcgtaggaggagactctcctatttcagttcaatctatgactaacacgttaaccactgatcacaagtcaactattaatcaaataaaagaacttgaagaagctggagctgacatagtcagagtttcatgtccagatgaagagtccacaaaagctttaaaaaaaataacaaaagaaactaaagtacctatagttgccgacatacattttcattataagagagcaatagaatcagcaagatctggagcaaagtgtttgagaattaatccaggcaacattggctctaaagaaagaatcaaagaagtaattaaagcagccaaggattatgattgtgcgattagaattggcgtaaatgctggatcactagaaaaaaaaattttggaaaaatataaagaaccttgtccagatgctttagtagaaagtgcaacacacaacatcaagcttttagaagataatgatttttttaactttaagatcagcgttaagtcatcagatgtttttttagctgtcaaagcttatgaaagtttatctaatttatatgactatcctttgcacttaggaattacagaagcaggaggattatttactggaagtatcaaat

SEQ ID NO: 212499 - DNA, 289 bp, Unknown
  Bacterial polypeptide expressing nucleotide sequence isolated from the Sargasso Sea
atgtttgcagaaaatcccattaaacgccgtcagagtacgcaaatccgtgtcggaaacgtactgattggtggtgatgcacctatagcggtgcagtctatgacaaatacccgtactactgatgttgcggcaacggtggcacaaatacaggcgattgccaaagccggggctgatttggtgcgcgtgtctgtgccgacaatggaagcggcagaagcctttaaactgataaagcagcagtctccaattccgttggtggcagatattcatttcgattaccgcatcgcgctgaaag

SEQ ID NO: 212500 - DNA, 634 bp, Unknown
  Bacterial polypeptide expressing nucleotide sequence isolated from the Sargasso Sea
agaagctctagtggaaagtgctttaagaaatataaaaatattagaagataaagatttttataattttaaaataagcgttaagtcttcagatgttttcttatcaattggcgcttatagacaattatctaaagtctgtgattatcctcttcatttaggcatcactgaggctgggagttttgtatctggaagtattaagtcttctataggacttgggagtcttttaatggatggaataggagacacaataaggatttctttgtcagataatcctacaaaagaagtaacaattggaaatgaaattctaaaatcattaaatctaagaaatagaggtgtaaaaattatatcatgcccctcttgcgcaagacaagctttccaagtaattgatactgtaaaaatattagaagagaaactttcccacataaaaacaccaataactttgtcaataataggatgtgttgtaaatggacctggagaagcagctatgacagacataggtattactggaggcggaaagggaaacaatatgctctatttatctggagttcagagtgaaaaggttttgaccaaagatattattgaaaaagttgttacagaagttgaaaacaaagtttctgagctggaaaacttaaaatga

SEQ ID NO: 212501 - DNA, 589 bp, Unknown
  Bacterial polypeptide expressing nucleotide sequence isolated from the Sargasso Sea
tttaaacttcaataatttaaaaattagtgtgaaatcgtcagatgtcttcttatcaatcaaatcctacgaacttttatctcagaaaactgactacccccttcatcttggcataaccgaggctggtagttttattccaggcagcataaaatcagctattgggttgggcagcttattaatggaaggtattggagatactattagagtttctttgtctgatgatcctgtacaagaggtaaaaataggtaacgagattttaaaatcaataggtttaagaaaaagaggagtaaaaataatatcttgcccatcatgtgcaagacaaggttttgaggttattgaaactgttaaaattctagaagaaaaactctctcatatacaagaatctataacactatcgataataggctgtgtagtaaatggtcccggagaagcagcatttactgacattggtattactggcggaggcagagaaagcaatatgttatatttaaacggagtacaaacagaaaagttaggtaacaaagatatcatttctaaagttatagatttagtagaaaaaaaggctgaggaaattcaaaacaaagataaatga

SEQ ID NO: 212502 - DNA, 860 bp, Unknown
  Bacterial polypeptide expressing nucleotide sequence isolated from the Sargasso Sea
tcaagctctaaaggaaattgttaaattatccccaatacctattgtggccgacatacattttcattatttgagagcaattgaagcagctgatgctggtgctgcttgtttaagaattaatcccggtaatataggtaatataaaaaaagtcaaagaagttattagtgctgctaaacaaaatgaaacttcaataagaataggtgtgaacgccggctctttagaaaaaaatatcttagaaaaatacggtgaaccaacacctgaagctcttgtagagtcggcattagaccatattcggatattaaaagagcatgacttccatgattataaaataagtgtaaaagcttcagacgtttttctagcagttgcagcttatactcaattagcagacatagataattgtcctctgcacataggtattacagaagcaggaagccttagagcaggaacagttaagtcatcaattggtcttggtaatttgttatggtctggaataggagataccattagggtctcattgtctgcgcatccttctgaagaagttaaagtcggttacgaaatgttaaagtcattaggattaagaagaaggggagtaaccgttatttcttgtccttcatgtgctagacaacaatttgatgttattaaaactgttcaagaagtagaacaaaggctcgagcatatttctgagtcaatcactgtatcaattattggctgtattgtgaatggtccaggagaagctaaagaaacagatattggattgacaggtggtgggaaaggtacccatcaaatttatgtaaatggcatcacggatcacataattagaaatgaaaatgttgctgattatatagtaaattttgttcaaaata

SEQ ID NO: 212503 - DNA, 541 bp, Unknown
  Bacterial polypeptide expressing nucleotide sequence isolated from the Sargasso Sea
atttttatctatagcagcttatagacagttatcaaaagtttgtgattatcccttgcatttaggaattactgaagcaggaagttttatttctgggagtattaaatcttcggtgggtttaggaacgttattattggaaggaataggagatactattagagtttcattatcagacgatccaacgaaagagatccagataggaaatgaaatattaaaatcattaaaccttagaaatagaggagttaaaataatttcttgcccatcttgtgctagacaagcttttcaagtaattgatacagttaaaatattagaggaaaaactctcacatattaaaacccctataagcttatctattataggatgtgtagttaatggccccggtgaagcttcaatgaccgatattggtattaccggaggaggcaaaggaaacaatatgttatatttatcaggcgtacaaactgaaaaggttcttacagaagaaattattgctaaagtagttagtgaagtagaaaaaaaagcagaagaaattgaaaataaaaattaa

SEQ ID NO: 212504 - DNA, 748 bp, Unknown
  Bacterial polypeptide expressing nucleotide sequence isolated from the Sargasso Sea
tatggaagttaggcctcatagaactatctttaggaagaaaacgaaagtaataaaagtaggtaatgtagccgttggtggaaattctataattagtgttcagtccatgactaatacacttacaaccgatataaaaagcacaatcaatcaaataaattctttagaggaggcaggagctgatattgtcagagtttcttgtcccgatgagggctctactaaatctcttaatgaaatagttaaagaggtcaacgtaccgatagtagcagatattcattttcattataaaagagctatagaagcagctaaaagtggagcgagttgtttgagaattaatccgggtaacataggatccaaagatagagtcttagaaattgtaaaagcagctaaggataatgattgttcaataagaattggtgttaacgcaggatctttagataaaattttattagataaatataaagaaccatgtccggaagctttagttgaaagtgcgcaatataatataagattattagaagataatgatttttttaattttaagataagcgtgaaatcatcagatatctttttaactgtgaaagcatataaaaaactctcagagatttgcaattatcctttacacttgggagtaactgaggcaggcggattactaacagggagtataaaatcatcaattgggataggacagctcctaatggatggaattggagatacaataagagtatcattatcttcagacccagttgatgaa

SEQ ID NO: 212505 - DNA, 405 bp, Unknown
  Bacterial polypeptide expressing nucleotide sequence isolated from the Sargasso Sea
aatggttggtaatagacacaaaacccacaaagttaagattggaaatatctatatgggcggagatgcaaatatagttgttcaatcaatgaccaatacagataccgctgatgccgctgcaacagcaaaccaaattatggagcttgccaatgcgggttctgaagtggtgcgcatcaccgttaataccgaagaagctgcagccgcagttagtaaaattaaagaaattctggtaaaaaataactgtaatgtgccattagtaggggattttcactataatggtcacaaactactaactgattaccaggaatgtgcagaaattcttgataaataccgtataaatccaggtaatgtagggtttggcgagaaaagagataagcagtttgaaaacatgattgaacaagctttaaa

SEQ ID NO: 212506 - DNA, 397 bp, Unknown
  Bacterial polypeptide expressing nucleotide sequence isolated from the Sargasso Sea
atgagtgttagacctttcagagatataaaaagaagaaaaacaaaagtaattaatgtcggaactgtaaaaattggtggagacaaccctattactgtacagtctatgacaaatacattaacaacaaacgcaaaagctacgattaatcaaattaatgatattgtaaatgaaggagctgatattgtcagagtttcttgtcctgataaagattccacccttgctcttaaagaaatagtcaaaaatgtatctgtacccattgttgcggatattcattttcattacaaaagagcaatagaagctgctgaaaatggagcaaaatgtttaagaataaatccaggaaatattggcgataaagtaaaaattcatgaagtgcttagtgctgcaaaaaataatgattgtt

SEQ ID NO: 212507 - DNA, 793 bp, Unknown
  Bacterial polypeptide expressing nucleotide sequence isolated from the Sargasso Sea
tatgaaatattctcattcaataaagagaaaaaaaacaaaaaaaattcaaattggtaatatttttgttggtggagactctccaattacggttcagacaatgacaaatacccttacccatgatattgatgcaacacttgagcagatatttcttattgaacaagagggatgcgatatagtcagagtttcagttcctgacgaaaaatcatctcaagccttaaagaaaataattccagaaattaatatacctttagttgccgatatacattttcattataaaagagcattagaggcagcagaaaatggagcacattgtcttcgaataaatccaggtaatattggctccaaggaaaaaattaaagaggttgttgaagccgccaagcagaataaaatacctataagaataggggttaattctggaagtttagaaaaatcaatattagaaaaatataaaagtccaacctctgaggcattatttgaaagtgctaagttaaatataaaacttttagaggatctaaattttgataattttaaaataagtgttaaagcttcaaatgtttttacatcagtagagtcatatagaatgttatctaattattgtgattatcctattcatttaggtattactgaagcaggaagttattttagtggatcaataaaatcatctataggtcttggaatgcttctttatgatggtatcggggataccgtaagagtttcactttcagatcatccaactcaagaagaaaaggttggatttgaaatgttaaaatcattaaatttaagagattatgga

SEQ ID NO: 212508 - DNA, 786 bp, Unknown
  Bacterial polypeptide expressing nucleotide sequence isolated from the Sargasso Sea
aatgactaataccttaacatcagatgttaagagtacaattaaacaaattcaagaaatacaatctgaaggagctgacattgttagagtttcttgtcctgatgagtcgtcatctaaagcacttaaagaaattacaaaacacgttaatattccaatagttgctgatatacatttccattacaagagagcaattgaagcagcagaaaatggagcaagttgtttgagaataaatcctggaaatattggagataaaaaaaaaattgttgaagtaattaaatctgctagaaataataattgttcaattagagtaggcgttaacgctggttcattagagaaagatatactagaaagatttaaagaaccttgtccggaggcactggtagaaagtgcaataagaaatattgaaattttagaggatatggatttttcaaatttaaaagtaagcgtaaaatcttctgacgtctttttatctgtagaagcctatcgtcaactttctaagaaaatagattatccacttcacttgggaatcactgaagctggtagttttatatcagggagtattaaatcctcaataggcttaggaattctccttaaagagggaattggagatacaattagagtgtctctttctgatgatccagtaaaagaggtggcgattggaaatgagatactaaaatcattgaatcttagaaatagaggagtaaagatcatttcctgtccgtcctgtgcaagacaaggttttcaagtaattgatactgtgagaatcttagaggaaaaattatcacatat

SEQ ID NO: 212509 - DNA, 601 bp, Unknown
  Bacterial polypeptide expressing nucleotide sequence isolated from the Sargasso Sea
tatgaaatttaatagaagaaaaacacgacaaattcaaataggtaaagttggaattgggtcagattttcctatatctgttcaatctatgactacaacaaaaactaaagatgttgaatctacgctctcgcagatttatgaacttgcttctaatggtgctgatatcgtaagagtaacttgtaatgaagtagatgctgctactgggttggttgaaatcacacaaagaagcccggttccaatagttgctgatgtacactttcaatacaaactagcacttgcagctattgatgctggcgttaatggcttaagacttaaccctggaaacattagaaaagaacaacagattaaggaagtggccaaagaagctttgtcagcaaacataccaattagaattggtgttaatggcgggtctcttgataaagatttactcgagaaatatggtgatgctacacctgaagctctagttgaatctgctctaaaagaattaaagtatctagaagatgttggttttttcgatataaaaatttccgttaaacattcgaacgtaccattaatgattgaatcatataggcttttagctgaaaaagtaggattaccctctgca

SEQ ID NO: 212510 - DNA, 353 bp, Unknown
  Bacterial polypeptide expressing nucleotide sequence isolated from the Sargasso Sea
tatgaacattagaccatttagggaaattaaaagaagaaaaacaaaagaaattaatgttggtcatgtaaaagttggaggagataatccaatttctgttcaatcaatgaccaatacattaactaaagaaattagacaaactataaatcaaattcaacaaattgaagaggcgggagctgatattgtaagagtatcatgtccagatgaagactcaacaaaagctctaaaagatattattaaaaatacttctttaccaatagttgctgatattcattttcactataaaagagctatagaggcagcagagagtggagccgcttgcctgagaattaaccctggaaatattggagataaaa

SEQ ID NO: 212511 - DNA, 562 bp, Unknown
  Bacterial polypeptide expressing nucleotide sequence isolated from the Sargasso Sea
atgagtattaggccatttagagatattaaaagaaaacttacaaaggaaataagtgttggaaacgttaaaattggtggaaataatcctatttctgttcaatcaatgactaatactttaactaaagatataaaaaaaacagttaatcaaataaatcaaatagcagaagtaggagcggatttagtgagagtatcttgtccagatgaaaattctactaaagctttaaaagaaatagtcaaacatgtttctgtcccaataattgctgatattcattttcattataaaagagcaattgaagctgcagataatggggccagttgtctaagaataaatcctggaaatattggaaatgaaaataaaattaaagaagtaattaatgcagcaaagaataataattgctcaattagaattggagtgaatgccggatctcttgagagggatattttagaaaaatataaggaaccttgcccagaagctcttgttgaaagtgcgataagaaatattggtattattgaaaatgaggatttttacaatcttaaagtaagcgtaaaatcatccgatgttt

SEQ ID NO: 212512 - DNA, 493 bp, Unknown
  Bacterial polypeptide expressing nucleotide sequence isolated from the Sargasso Sea
tatccactgcatttaggtattactgaggcaggaggatttataccaggtagtattaaatcttccattggattaggaactttacttctagatggaataggggatacaattagaatttcattatcagatgatccagtgaaagaggtcaaaatcggaaatgagatattaaaatccttaaatttaagagaaagaggggtgagaataatttcatgcccatcttgtgcaagacaaggttttcaagtgatcgaaacggttaagattttagaacaaaaactatctcatattaaaacaccaataactctctctgtaattggatgtgtggttaatggtcctggagaagcagcaatgactgatgtgggaattacaggaggtaaaaaaggtaataacatgctttatttgtcaggagtacagtcggaaaaagttttaacaaacgatatgattgaaaaagttgtaagtgaagttgaaaaaaaagcctctgaattagaaaaaaaataaa

SEQ ID NO: 212513 - DNA, 643 bp, Unknown
  Bacterial polypeptide expressing nucleotide sequence isolated from the Sargasso Sea
gatgctatcttccaattttattaagcgaagaaaaagtcgaaaagtcatggtaggtaatgttgctgtgggtggggatgctccaatttctgtgcagagtatgaccaatactgagaccacagatgtcaagtcgaccgtcgctcaaatacatcgattggagaaggttggagcagatattatcagagtttcagtgccgacaatggatgcagccgatgcattcaaaaccattcgaggacaagttcaaactccattagttgctgatatccactttgattatcgaatcgcgttaaaggtacttgaatatggagcagactgtttgagaattaatcctgggaatattggaaacgtcgaaagggtgaaagcaatcgtagactctgctaaggataaatctatccctcttcgtatcggtgtgaacgctgggtcgctaggtaaatcgcttcttcgaaaatataaagaaccatgtgctgaggccatggttgaatcggcgttaaaccaaatagacacacttgataaactagattttcatcagtttaaaatcagtttaaaagcatcagaaatctttatgactttacaggcctgtcgggagcttgcaggccaagtggatcagcctttccatttaggcatcactgaagcagggggtcagcgg

SEQ ID NO: 212514 - DNA, 541 bp, Unknown
  Bacterial polypeptide expressing nucleotide sequence isolated from the Sargasso Sea
aatgacatctgaaattagaccttttagaaaaattaatagaaagaaaaccaaagaaataaatgttggtaaaattaaagttggaggtgataatccaattacagttcagacaatgactaatacattaactagcgatcataaatctacaatagaacaaataaataaagtaacagaagctggtgcagatatcgttagagtttcatgtcctgacagtagatctacagaatctttaaaaaccataattaaacacgtagatgttcctatagtcgcagatattcatttccattataagagagcaattgaagcagcagagaacggcgcagattgtcttcgtataaaccctggaaatatcggagatgaaaaaaaaatcgcagaaattatcgctgcagcaaaaaataataattgctcaattagaattggtgttaatgcgggatcactcgagaaagatattcttgaaagatatagagaaccatgtcctgaagcattggtagatagtgctttaagaaatataagaataattgaggacatggattttttaatttaa

SEQ ID NO: 212515 - DNA, 868 bp, Unknown
  Bacterial polypeptide expressing nucleotide sequence isolated from the Sargasso Sea
gatgttcaacagaagaaaaacttctcaaattcaagtaggtaaagttggaattggttctaatttccctatatcagtgcagtctatgacaactactaagactagagatgtagacggaacacttgcacagatttatgaaattgcctctaatggagcagacattgtcagggttacttgcaatgaggttgaagctgctgaaggtcttgttgagattacccaaagaagtccagtccctattattgctgacatacattttcagtataagttagcacttgctgcaattgatgcaggtgtagatgggcttagacttaatcctggaaacattagaaaagaatcgcagattaaagaagtagctaaagcagcattaagtgcaaatatcccaattcgaattggggtaaatggtggatcacttgataaagatttgcttgagaaatatggagacgctactcctgaagctttggttgagtcagctatgacagaattaaagtaccttgaggatgttgacttctttaatataaagatttctgtgaaacattcaaatgtgccactaatgattgagtcatacagattgcttgcagagaaagttgagtaccctttacatttaggggtaaccgaagcaggcccacttccaggaggacttataaaatcaacggcgggtatatcaacattattaaatgaagggattggagatacaataaggtattcattaaccgctgaccctatagaagaagccaaaagtggtagacagttactcgaatatttaggactcagagagagaaattctcttgatttgattgcatgtccaagctgcggcagggcagaagttgatgttattaaagttgctgaagaagcacaggaggcattgaataaa

SEQ ID NO: 212516 - DNA, 891 bp, Unknown
  Bacterial polypeptide expressing nucleotide sequence isolated from the Sargasso Sea
cgggcgtcaagatcgccatggaagtggcgcagcacgtcgacaaggtgcgcatcaaccccgggttgttcgtctttgacaagccggatcccaaccgtcaggagttcagcgatgaggaattcgcggccattggtgcgcggatccgcgagacgttcgaacctttggtcaccttgttgagggatcagaacaaggccctgcgcatcggtgtgaaccacggctccctggcggagcggatgctgttcacctacggcgatacccccaaggggatggtggagtcggcgatggaattcgtgcgcatctgcgatgagctcgacttccacaacattgtgatttcgatgaaggcgtcgcgggcgccggtgatgttggcggcctatcgcttgatggcggacacgatggacaaggaggggttcaactaccccctccacctcggtgtcaccgaagccggtgatggtgattacggccgcgtcaagagcacggcggggatcgcgaccctgctcgccgatggccttggcgacaccatccgggtgtcgttaaccgaggctccggaacgggaaatccccgtctgctattcgatcctgcaatcccttggtctgcgcaagaccatggttgagtacgtggcctgccccagctgcggccgcaccctgttcaatctcgaggaggtgctgcacaaggtgcgggatgcgacgtcccatctcacagggctcgacattgccgtgatggggtgcatcgtcaacggccccggcgagatggcggatgcggactatggctatgtcggaaagacaccgggtgtgatttcgctgtaccggggacgggacgagatccgcaaggtgcccgaagaggagggcgtcaatgctttgatcctagttgatcaaagaggacgggcgctgggttgag

SEQ ID NO: 212517 - DNA, 790 bp, Unknown
  Bacterial polypeptide expressing nucleotide sequence isolated from the Sargasso Sea
tatgagccttaggccttttagaaatattgatagaaaaaaaactaaagtaattaatgtaggtgatgtaaaagttggaggagataatccaatttcagttcaatctatgaccaacacattgacaaccgatgtatcagcaacaataaaacaaattcaagaaattcatgatgaaggtgctgatatcgtaagagtgtcttgtccagatgaagattcatcaaaagcattaaaggaaataactaaaaatgttcaaatacctattgttgcagatattcatttccattacaaaagggctatcgaagctgctgagaatggtgcaaagtgtttaagaataaatccaggaaacataggtgataaaaaaaaaatttatgatgttttaaaagctgcaaaagataacgattgttcaattagaataggcgttaatgctggatctttagaaagagatattcttgaaaaatataaagaaccgtgtccagaggcgttggtagaaagtgctttgaggaatataaaaattttagaggatgaagatttttttaattttaaagtaagtgttaaatcttctgatgtatttttatcaattgcagcttatagacaactttctaaggtcatgaattatccattacacctaggaataactgaggcaggaggttttgttacaggcagtgtaaagtctgctataggtcttggatcgcttctcttggatggcattggagacaccataagagtatctttatctgacgaccctgtaaaagaagtcaaaattggaaatgaaattttaaagtctctaggattaaga

SEQ ID NO: 212518 - DNA, 813 bp, Unknown
  Bacterial polypeptide expressing nucleotide sequence isolated from the Sargasso Sea
tatgttaagaccttatcaaaaaataaatagaagaaaaacgcgtgtaataaatgtaggtagcgttttagtaggtggaaataatccaatatcagtacaaacaatgacaaatacattaacgactgatgtaaagtctactagcaatcaaattaatagagctgtaagtgctggtgttgacttagttagagtatcagtgcctgataaagaatcaacagaagcattaaaagaaatcacaaaacacagtaaggttccaataattgctgatattcatttccactataaaagagcaattgaagcagcaaataatggagctagttgtttaagaatcaacccaggaaatattggatcaaaagaaagagttaaagaaattattaaggctgctaaggataataattgttccataagagtgggtgtaaatgctggcagtcttgatagaaaaattttagaaaaatattctgaacctaatccagaggcattagttgagagtgctaaagagaatataaaaattcttgaggataatgatttttataattttaaaataagtgttaagtcttcagatatttttatggcaattaaagcatatgagttacttgcaaatgaatgcgattacccacttcatttgggtatcacagaagctggaggcaaaagaacaggatctataaaatcatcaattggcatgggtaatcttttattaaatggaattggtgacaccataagagtatctttgtcagatgagcctgaggaggaagtcaaagtaggctttgaaattttaaaaagtttaggtgttagaaacagaggagttaaaattgtatcctg

SEQ ID NO: 212519 - DNA, 907 bp, Unknown
  Bacterial polypeptide expressing nucleotide sequence isolated from the Sargasso Sea
atgagtattaggcctttcagagatataaaaagaagaaaaacaaaagtgattacagtcggaaatgttaaaataggaggagacaatcctatctctgttcagtcaatgacaaatacacttacaaaagatattaaggcaactttaaatcaaataaaccaagtagcaaatgaaggagctgatcttgtaagagtttcatgtccagatgaagattcaacaaaagctttaaaagaaatagttaaacattcgagtgtacctataattgcagatattcattatcattacaaaagagctcttgaatctgcagataatggggcaaagtgtttaagaataaatcctggcaatataggagataaaaaaaaaataaaagaaataattaatgctgcaaaaaataacggatgctcaataagaatcggagtaaatgctggttcgctagaaagagatatactagaaaaatataaagaaccttgtccagaagcattagtcgaaagtgctttaagaaatattgaaattattgaaaatgaagacttttttaattttaaagttagcgtaaaatcttcagatgtatttttgtcaattggtgcatataaaaagctttctaaaaaaacagaatatcctttacatttaggaataaccgaagctggttcatatttacctgggagcataaaatcatcaattggtcttggaaatttattattagatggaataggtgatacaataagagtttcactttccgatgatcctgtagaagaaattaaaataggtaatgaaattcttaaatctctaaaccttagagaaagaggtgtaaaaattatttcgtgcccttcttgcgcaagacaagcatttcaagttattgatactgtaaaagtattagaggataagttatcacatatcaaaacaccaattacatgtc

SEQ ID NO: 212520 - DNA, 406 bp, Unknown
  Bacterial polypeptide expressing nucleotide sequence isolated from the Sargasso Sea
atgagcattagaccattcagagatattaagagaagaaaaacaaaagaaattaatgtaggcaaagttaaagtaggagggaacaatcctatatcagtccaatctatgactaatactcttaccacagatataaaagctaccattaatcaaattaatgaaattcagactgagggtgctgatattgtaagggtttcgtgtccagatgaggaatcgtctaaagccttaaaagaaatagtcaaacacgttgatatacctatagttgctgatattcattttcattttaagagagctattgaggctgcagaaaatggcgcaagttgtctaagaataaatcctggaaatataggtaacatagataaaattaaagaggttgtaaaagcagctcacaataataattgttctataagag

SEQ ID NO: 212521 - DNA, 673 bp, Unknown
  Bacterial polypeptide expressing nucleotide sequence isolated from the Sargasso Sea
aaagtacggtgagccttgtccagaggctatggttgaaagcggtttagatcacataaaaattttggaagacaatgattttcacgaatttaaaataagcgtcaaagcatctgatgtatttttatcagcagcagcttatcagactctcgcagacgctaccgatgcacctttacatctagggattactgaagcaggcggattgatgagcggcacgataaaatcatctattgggttaggcagccttctttggttgggtataggtgatactatcagagtttctttgtcagctgatcctgtagaagaagtaaaagttggctatgatatattaaagtcgcttgggcttcggcataggggcgtaaatattatttcatgtccatcctgcgcaaggcaaggctttaacgttatcgaaaccgttaaaattttagaagaccgtcttgctcatgtcaaaacaccaatgagcttatcaataatcggttgtgtagttaatggtccgggagaagccctcatgacagatattggttttacaggcggtggagcaggaaatggtatgatctattgggctggaaaacaggaccaccgaattggtaatgatgctatggtcgaccatattgttgaccttgttgaaaaacgcgcaaaagaaattgatgccgaaaaaattcaagaagccgctgaataa

SEQ ID NO: 212522 - DNA, 637 bp, Unknown
  Bacterial polypeptide expressing nucleotide sequence isolated from the Sargasso Sea
atgagtattagacctttcagggacattaaacgtagagtcacaaaagttataaatgtaggaaatgtgaaaattggaggagaaaatccaatttcggttcaatctatgacaaatacattaacaaaaaatgtcaaagaaactttaaatcaaattaataaaatttctgaagctggaggcgatattgtaagagtttcttgtcccgacgaagaatccactgatgctttaaaagaaataaaaaaacattcaccaattcctattgttgccgatattcattttcattttaaaagagctatagaagctgctgaaaatggtgcagattgtttaagaattaacccaggcaatattggtgataaaaataaaatagcacaagttatttctgctgcaaaaaataataaatgttcaataaggataggagtgaattctggatcactagaaaaagatatattagaaaaatttaaagaaccttgccctgaagctctagcagaaagtgcaattagaaacataaaaattttagaagatttggatttttttaattttaaaataagtgttaaatcttcagatgtatttttatctataaaagcatatagagagctttcaaaagttacaaattatcctttacatctgggtattactgaggcag

SEQ ID NO: 212523 - DNA, 530 bp, Unknown
  Bacterial polypeptide expressing nucleotide sequence isolated from the Sargasso Sea
cgactatccgctccatatcggagtcacggaagcgggcggcctgcgctcgggcaccgtgaaatcatccgtcggcctcggcatgctattgtggtcgggtatcggcgacacgctgcgggtctcgctttcggccgacccggtggaagaggtcaaggtcgggttcgaccttctcaaatcgctggggctgcgtcaccgcggtgtcaacgtcgtgtcctgtccgtcctgcgcccgccagcagttcgacgtgatcgagaccgtgaaggtcctggaggcccggttgtcccacatcacgaccccgatgaccgtttccgtgatcggctgcgtcgtcaatggtcccggcgaggccacgatgacggatatcggtttcaccggcggcggacgcgggacccatcaggtctatatcgccggacagccgcaccaccggctgcaggacgaggatatcgtcgatcatctcgtgcatctcgtcgaggaaaaggctactgccatcgaggcagacgtcgggcgcgacgacataccctcggccgccgaatagt

SEQ ID NO: 212524 - DNA, 597 bp, Unknown
  Bacterial polypeptide expressing nucleotide sequence isolated from the Sargasso Sea
gttgaactttttaaagattaaaagacgaaattctctaaaaattaaagtcggcaatgtagaaattggtggcaatgctccaatcagtgttcaaagcatgacgaacactaaaacagaggatgtccaagcgacattagaccaagtaaaacagcttgaatatgctggagcagatttagtcagaatttcagtaccaaatgaggaagcagcaacggctttcaagttgataaaaaaagattccaatgttcctctcattgcagatatacactttgattataagatgggtattctggctgccaaaaacggagctgattgcttacgaattaatcctggcaacattggcaatatcgatagagttaaagaggtggttaaatgtgcggaagataaagatattccaattagagttggcgtcaatgctggttccctagagaaaaaactacaaaaaaaatatggtgagcccacgcctgaagccttagtcgaatcagccatgaatcacgtggatatattagaatctcttaattttcaaaattttaagctcagcattaaggcatctgatgtaggcatgatggtagaaagctataggattattgcagaaatgataaa

SEQ ID NO: 212525 - DNA, 871 bp, Unknown
  Bacterial polypeptide expressing nucleotide sequence isolated from the Sargasso Sea
tggaggaggaatccaatatcggtgcaatcaatgaccaatactcttacaacagatataaaatctacaattaatcagattaatgaaataagctctgaaggagctgatatagtgagggtttcttgtcctgatgagcaatcatcaagagcactaaaagagataatcaaacatgttgatatacctgtggttgccgatattcattttcattataagagagcaatcgaagctgctgaaagtggtgcaagctgtttaagaataaatcctgggaacattggaaataaagataaaataaaagaagttgttaaagctgcaattgataataattgttcgattagagtaggagttaatgcaggttctttagaaaaagatatcttagagaaatataaagagccttgtccggaagccttagttgaaagtgctttaaggaatattaagatacttgaggacgaaaattttcaaaatttaaagataagtgttaagtcatcagatgtttttttatcagttgaagcatacagacaattgtcgaaatccactgattatccgttacacttaggaattacagaggcaggaggctttatacctgggagtgtgaaatcctccattggtcttggaacattacttttagagggtattggtgacaccatcagaatttctttatcggataatcctattgaagaagtcaaaattggaaatgaaatactgaaatctttaaatttaagagagaggggtgtcaaaattatttcctgtccttcttgtgcaagacaaggctttgaagttattgaaactgtaaaaatattagaaaaaaaactttctcatataaaaactccaataactttatctgtaattggttgcgtagttaatggtcccggagaag

SEQ ID NO: 212526 - DNA, 361 bp, Unknown
  Bacterial polypeptide expressing nucleotide sequence isolated from the Sargasso Sea
tatgagcattagaccttttagagatattaatagaaaaaaaacaaaagttataaatgttgggaatgtgaaaattggaggtgacaatcctatctctgtccaatcaatgactaacacccttacaaaagattttaaggcaacaattaaacaaattaacgaaatcacggatgcaggcgcagatttagtcagagtatcctgtccagacaaggagtccacagaagcattaaaaaagatagttcattctgtaaatattccaattatcgcagatattcattttcattataaaagagcgattgaggctgctaaaaatggtgcagactgtttaagaataaatccaggaaatattggaaatgaaataaaataa

SEQ ID NO: 212527 - DNA, 478 bp, Unknown
  Bacterial polypeptide expressing nucleotide sequence isolated from the Sargasso Sea
tttaggaattactgaggcagggacttatttaccaggcagtatcaaatcgtcaataggatttgggactttgttgttggatgggatcggagataccataagagtgtcgctttctgatgatcctgttgaagaaataaaagtgggaaatgaaattttaaaatcattaggtctgagaaatagaggtgttaagataatctcgtgcccctcatgcgcaagacaagcttttcaagtgatagatacagttaaaaaacttgaaaaaaaattatcccatattaaagaacctataacgctctcgatcataggctgtgttgtaaatggtccaggtgaggctaaacaaacagaaataggtattactggtggaggaaaagataatcacatgctctatcttaacggtctagaatcggaaaaaataacaacgaaagatatgatagataaaattgtaactttaatagaagaaaaggttgctaaattacaaaactaa

SEQ ID NO: 212528 - DNA, 604 bp, Unknown
  Bacterial polypeptide expressing nucleotide sequence isolated from the Sargasso Sea
aatgagcataagaccttttagagatattaatagaaaaaaaacaaaagaaataaatgttggatatttgaaaattgggggagataatccaatatcagttcaatccatgactaatactctaacaaaagatgttaaatctaccattaaacaaataaaacaaattgaaaatgcgggagctgatttagtaagggtttcatgtcctgataaagaatcaacagaggctttgaagcaaatcataaaacaagttaaagttccaatagttgcagatattcattttcattataaaagagcaattgaggctgcagaaaatggtgcgcattgtttaagaattaatcctggaaatattggtgacagacaaaaaattaaagaagttatcaaagctgcacaaaataatggttgtgcgattagagttggtgtgaacgcaggatcgcttgaaaaagatattcttgaaaaatatagagaaccttgtcctgaggcacttgttgaaagtgctttaagaaatatcgaaatattagaaaatgagaatttttttaatttaaaagttagtgttaaatcatctgatgtatttttgtcaattggagcttataaacaattgtcccaaaaaata

SEQ ID NO: 212529 - DNA, 674 bp, Unknown
  Bacterial polypeptide expressing nucleotide sequence isolated from the Sargasso Sea
tatgttaagaccataccaaaaaataaatagaagaatatcacgtgtaattaaagtaggaagcgtaagtataggaggtagtaataaaattgccgttcaaacaatgacaaatactctaacttctaatgcaaaagaaactatagctcaaattgaaagatcagcaaaactaggagctgatttagtacgcgtctctattccagacaaagaatctgcaaattctcttaaagacatagttaagcatagtccagtacctgttatagcagatatacattttcactacaaaagaggtattgaagctgcttgtaacggtgctagttgtatcagaataaaccctggaaatattggaagtattgataggataaaagagctaattaaagcagcaaaagataataattgctcaataagaattggagtaaatgctggaagtttagaaaaacaaattttagataaatattctgaacctaaccctgaagctttagtagaaagtgctaaattaaatattaaaatcctagaggacaatgactttaccaattttaaaataagtgtaaaatcttctgatatctttatgtctattatggcatatgagaaattggcatcaatctgtgattatccactgcatttaggcattactgaagctggtggaaaacgaacaggatcgataaagtcttcaattggaa

SEQ ID NO: 212530 - DNA, 784 bp, Unknown
  Bacterial polypeptide expressing nucleotide sequence isolated from the Sargasso Sea
atggaaataagacctcatagaaaaattaagagaaaaactacaaaaaaaattaaagttggaaatgttagtgtgggtggcaactctcaaataagtgttcaatcaatgacaaatactttaactactgatattaaaggaacaataaatcaaattctatctttagaggaagcgggagcagatatagtaagagtttcttgtcctgatgaagagtcaactaaagcattaaaaagcattgttaaaaaagtttcagtccctattgttgcagatattcactttcattataaaagagctattgaagctgcagaaatgggagcaagttgtttaagaataaatcctggaaacataggaacaaatcaaagagttttggaggttatcaaagcagccaaagataatgattgctcaattcgaattggcgtcaacgcaggttctttagataaaaaattgttagaaaaatacaaagaaccctgtcccgaagcattagtagagagtgcccagcataacattaaactgcttgaagataatgatttttttaattttaaaataagcgtaaaatcttcagatatatttttaactgtaaaagcctataaaaaattatcagaaatttgtgattatcctttacacttaggggtaaccgaagcgggaggattattaactggaagcattaaatcttcaattggaataggtcaacttttaatggaaggcattggtgacactataagaatttcattatcttcagatcctgtggatgaagtaaaagcaggctatgaaattcttaaatctttaggaa

SEQ ID NO: 212531 - DNA, 647 bp, Unknown
  Bacterial polypeptide expressing nucleotide sequence isolated from the Sargasso Sea
atttaaagaaccttgtccggaagctttagttgaaagcgctttaagaaatattaagattttagaggataaagatttctttaatttcaaaataagcgttaaatcatcagatgtttttctctcaataggagcatatagacagctctcaaatttaacagattatccattacatcttggaattacagaagctggcagttttgtttctgggagcataaaatcttcaattggtctaggaagtttattgatggatggaattggagatacaataagaatctcgttatcagataacccaactaaggaagtaaaaataggtaatgagatactaagatcattaaacttacgtaataggggtgtaaaaattatatcttgtccatcctgtgcgagacaagcctttaaggtaatagatacagttaaaattttagaagaaaaattagcacatataaaaacaccaattacactctcaattattggatgtgttgtcaatggaccaggagaagctgcaatgactgatattggaattactggaggaggtaagggtaataatatgctttatttatcaggcgttcaaaatgaaaaagttttaacaagcgatataatcgataaagtcgtatatgaggttgagaaaaaagcatctgaattagaaaactaat

SEQ ID NO: 212532 - DNA, 523 bp, Unknown
  Bacterial polypeptide expressing nucleotide sequence isolated from the Sargasso Sea
aatgagtgttaggccatttagagatatcaacagaagaaaaacaaaagtaattaatgttggtgatgttaaaattgggggagataacccaatttcagttcaatcaatgacaaacactttaacaactgatgttaaagcaacaataaatcaaattaatgatattgcagaggaaggtgctgatatagtcagagtttcatgcccagatccagattcaactaaagcacttaaagaaatagttaaacatgtatcaataccggtagttgcagatattcattttcattacaaaagagcaatcgaagcggctgaaaatggagctaaatgtttaagaataaatcctggaaatatcggtgaggagtcaaagattcacgatgttcttagtgccgcaaaaaataatggttgctctgttagaattggagtaaatgcaggttcattagaaaaagatatattagacaagtttaaagaaccttgtcctgaagctcttgttgaaagcgcattaagaaatataaaaattttagaggataaagat

SEQ ID NO: 212533 - DNA, 814 bp, Unknown
  Bacterial polypeptide expressing nucleotide sequence isolated from the Sargasso Sea
agagcaattgaagcagcagagtcgggtgcaagttgtttaagaattaacccgggcaatataggatctaaagacagaataaaagaagtaattaaagctgcgaaagaccatgattgtgcaattagaataggtgtgaatgcaggttcattagagaaaaaaattttagaaaagtataaggagccttgcccagaagctctggtcgagagcgcaacacacaatatcaagcttttagaagagaataatttttttaattttaagattagtgttaaatcgtcagatgtttttttgtcagtgaaagcctatgaaagtttatctaaactatatgattatcctttacatcttggaattacagaggcaggaggattatttactggcagcataaaatcttccataggaattggaaaacttttaatgcagggaatcggagatacaataagagtttccttatctgcagatccagtagaagaagttaaagcgggttttgaaatactaagttcgttaggtattagagcaagaggggttcaaataatttcgtgtccatcttgtgctagacaggcatttccagtaattgatacggttaaaattttggaaaaaaaactatcccacataaaaaagcccatgacactatctataatagggtgtgttgtgaatggtccaggcgaagctgcccagacagatattggcttaaccggcggaggagatggtaataatttactatacttgtctggtattccacacaataaagttgctagcaaagatattataaataaagttgtaaacttagtagaatccaaggccaaagaaatcaacaactaaa

SEQ ID NO: 212534 - DNA, 841 bp, Unknown
  Bacterial polypeptide expressing nucleotide sequence isolated from the Sargasso Sea
tatggaaataagaccacatagatcaattacaagaagaaagacgaaagtaatacaagtaggaaatgttaaagttgggggaaatgaaataataagtgttcaatcaatgactaacacgttaactccggacgtaaaatccacgttaaaacaaatcgaagaactaaaagatgctggtgcagatattgttagagtttcatgtccagatgaagagtccactagagcattaaaaaaaatcacaaaggaaacaacgataccaatagttgctgatatacattttcactataaacgagccatagaagcagcaaaatatggcgctgcatgtttgcgtatcaatccaggaaatattggttcaaaggatagaattattgaagttattaaagctgcaaaagattataatacctcgattagaataggagttaatgctggatcgttagataaatctttacttgaaaaatataaagaaccttgtccagaggctttagttgaaagtgccatgtacaatgtaaggcttctagaagataataattttacaaattttaagattagcgtaaaatcatcagacgttttcttagcaataaaatcttacgagcaattatcaaaaatttgcaattacccattacatttaggaataacggaggcaggtagtttattttctggcagtataaaatcatcaatagggatagggcagctgcttatgaaaggtattggcgatactataagggtttcattgtccgacgatcctgtgcaagaggttaaagcgggttatgaaattttaaaatcactgaacataagatcaaggggagtaaaaattatttcttgtccttcttgcgctagacaggctttt

SEQ ID NO: 212535 - DNA, 739 bp, Unknown
  Bacterial polypeptide expressing nucleotide sequence isolated from the Sargasso Sea
tgattataaaatagctttagaggttgcggattctgcagattgtcttcgaataaatcctggtaacattggaaaagaagacagagtaaaagaggttataagtgctgcaattgataatgatataccaatcagagtaggagttaatgctggttcactagaaaaagatcttcaaaaaaaatatggtgaaccaaatgctgatgctttggtagagtctgcattgaggcatgttgatattttagataaatttaatttcgaaaattataaaatgagtcttaaggcgtctaatattgaaatgacggtagatgcatacagaaaaatctcaaatataattgatcagcctcttcatcttggtattaccgaggctggaagttatagagctggaacggtaaagtcatctatcggtgttgggatgcttttatcagaaggaattggagacactatacgaatttctctagcatctgatcctgtagatgaaattaaaattggatgggatatattaaaaagccttaacataagaagtagaggagtaaaaattgttgcatgtccaagttgttcaagacaaaactttaatgttatcgaagttgttaacgaacttgaacaaagattagaggatatttcagatgatatagaggtcgctattattggttgttacgtgaacggtccaggtgaaagcaaggcagcaaacattggacttacaggagccagtccaaataatcttttgtatattgacggtactccaaat

SEQ ID NO: 212536 - DNA, 523 bp, Unknown
  Bacterial polypeptide expressing nucleotide sequence isolated from the Sargasso Sea
gcttacagatctttatcatcagcatgcgattatcctttacatttaggcgttaccgaagcaggaggatttgttactgggagcattaaatcttcaattggtattggcatgttgttaagtgaaggaataggcgacacaataagagtttctttatcagccgatccagttgaagaagttagagtaggttacgaaattttaaaaagcttaaatttaagacataaaggggttaatattatatcctgtccgtcttgcgcaaggcagggatttcccgttatagaaactgttaaaaaacttgaagaaaaacttgcacatataaaagagtccattactctgtcaataataggatgtgtagtaaatggacctggagaagcatcacaaacacaaatcggattaaccggtggaggtcaaaacaatcacatgatgtatttatctggagtgccacataaaaaagtagctagtgataagataattaaagaaatagttactctagttgaaaaaaaatctaaagaattaagaaaaaattaaa

SEQ ID NO: 212537 - DNA, 573 bp, Unknown
  Bacterial polypeptide expressing nucleotide sequence isolated from the Sargasso Sea
cactcctaatgcagctgagatcgctgcaaccatagtagaaaaagttcgtataaatccaggaaactatgctgatagaaaaaagtttgaagtacatgaatattctgattcctcctattcagaggaattggagaggatcagggctcgattcactccactgattaagatatgcaaagaaaatggtactgccatgaggattggaacaaatcacggctctctttcagatcgaattctaagtcgatatggtgatactcctcttgggatggttgaatcggctttggaatttattcgcatcgctgaggatgaaagctaccatgatatgatcctaagcatgaaggcgagtaatacacaggtagttgttcaggcctatagacttctggttaataaaatgattgaagagggtatgaattatccacttcacttaggtgttacagaagcaggagaagcagaagatggaagaataaagtcagcattaggaattggtgcgcttcttgaagatggactaggagatacaatacgggtgtcgctaactgaagaaccagaggcggagattcctgtcgcaaaggtgatagcaga

SEQ ID NO: 212538 - DNA, 373 bp, Unknown
  Bacterial polypeptide expressing nucleotide sequence isolated from the Sargasso Sea
gatgaaaacaaattggattaaaagaaaaaaaactaaaaccatttatgttggtaatgttcctgttggcggaaataatcctatttcagttcaatccatgactaacacagatacttgtgatgttgtttcaactataaaccaaataaatgatttaaagaaagcaggtgctgatattgttagagtttcagtgccaggttttgatgaagccaaagcattcaaagaaattaaaaatgcagtaaatattccattggttgctgatatacattttgattataagatagctttggaggttgcagatacagcagactgtctgagaattaacccaggcaatattggaaaagaagatcgtgttcaagaggtaataaatgctgctctt

SEQ ID NO: 212539 - DNA, 499 bp, Unknown
  Bacterial polypeptide expressing nucleotide sequence isolated from the Sargasso Sea
atggaaataagaccttacagggaagtaaaaagaaaaaaaactagagtaattaaagtaggaaaagtttcagtcggaggaaactcacctatcagcgtgcaatcaatgactaacactttaaccacagatgcaaaatctacaattaatcaaattaacaacttagaagaaaggggagctgatatcgttagggtatcctgtccagatgaaagctctaccaaatcgttgaaggaaataactaaaaatgtgaatgttcctatagtcgcagacattcattttcattataagagagcaatcgaggcagcaaaaaatggagctgcatgtcttagaattaatccaggcaatattggagcaaaagatcgtattttggatgttgtaaaggctgcaaaagattttaattgttcaataaggattggagtaaatgcaggatctttagaaaaaaagttattagataagtataaagaaccatgcccagaagcactagtgaaagtgcgattacaatgta

SEQ ID NO: 212540 - DNA, 788 bp, Unknown
  Bacterial polypeptide expressing nucleotide sequence isolated from the Sargasso Sea
tatgaacattagaccttttagggaaattaaaagaagaaaaacaaaagaaattaatgttgggcatataaaagttggaggagataatccaatttctgttcagtcaatgacaaatacgttaactaaagatgttaaagaaactgttaaacaaatcgaacaaattgaagaagcgggagccgatatcgtaagggtgtcatgtccagatgaagactcaacgaaggcgcttaaagatattattaaaaatacctcgattccaatagttgctgacatacattttcattacaaaagagcaatagaggcggcagagagtggagctgcttgtctaagaattaatccaggaaatattggagataaaaaaaaaattaaagaggtaatttcagctgcaaaaaataacaattgttctattagaattggtgttaatgctggatctcttgaaaaagatttattagaaaagtataaagaaccttgtccagaagctttagtggagagcgcattaagaaatattagtattgtagaagaacttgattttaataaatttaaagtaagcgttaaatcctctgatgtatttttatccattgaggcatacagacaactttctaaggttactgattatccacttcacctaggtatcaccgaggcaggatcctttttaccgggtagtataaaatcatctataggtttcggatcactccttatgagtggtattggagacactataagagtctctttatctgatgatccagttgaggagataaaagttggaaatgaaattctcaaatcattaaatctaa

SEQ ID NO: 212541 - DNA, 535 bp, Unknown
  Bacterial polypeptide expressing nucleotide sequence isolated from the Sargasso Sea
atatttcttaccgtcaaggcttacagaaagttatcgaatatttgcaactatcctttacatttaggagtgacagaagctggaggtttgtttaccggcagcattaaatcttcaattgggattggtcaacttctaatggagggcattggtgatacaataagagtgtccctatcttctgatccggtagacgaagtcaaggctggttttgaaatccttaaatctttgggcattcgatcaagaggagtgaatataatatcttgtccttcttgtgctagacaagcatttccagttattgagactgtaaaaatattagaagaaaaactcgctcatataaaaaaaccaataaatatttctattataggatgtgttgtaaatggacctggtgaggctgcacaaacagaaattggtttaaccggcggtggtcaagataacaaccttttgtacttatcaggaatacctcacacaaaaattccaagctcagaaattattgataaagtcgtaaaacttgtcgaagaaaagactaaagagcaaaagtaac

SEQ ID NO: 212542 - DNA, 877 bp, Unknown
  Bacterial polypeptide expressing nucleotide sequence isolated from the Sargasso Sea
taataaactcgaagatgcaggagcagatattgtaagagtatcctgcccagatgaggagtcaactcaagctttaagaaaaattacaaaagaagtaaaagttcctatagttgcagatattcattttcactataaaagagctattgagtccgcggtttcaggagcaaagtgtttaagaattaatccaggcaacattggttctaacgaaaggataaaagaagttataaaagcagcaaaagattatgattgcgcaatcagaataggtgtaaacgcaggatctttagaaaaaaaaattttagaaaaatataaagaaccttgtccagaagctttagttgaaagtgcatctcataatatcaaacttctagaagataacgacttttttaatttcaagataagcgtaaaatcttcagatgtttttttagcagtaaaagcatatgaaattttatcaaaatcctgcaattatccacttcatcttggaataaccgaggcaggtggattgttaactggaagtataaagtcatctattggtattggaaaacttttaatgcaaggtataggtgacaccataagggtttctctatcggcagaccctatcgaagaagtaaaagctggttttgaaattttaaagtctctaggaattagatcacgaggtgttcagataatctcatgcccatcatgcgccagacaagcatttcctgtaattgatactgtaaaaattttagaaaaaaaactttctcatataaaaaaaccaatgacactctcgataataggatgtgttgtaaatggaccaggggaagcatctcaaacagacataggtttaaccggaggtggagatggaaacaatttactttatttatctggcatacctcacaacaaagtg

SEQ ID NO: 212543 - DNA, 486 bp, Unknown
  Bacterial polypeptide expressing nucleotide sequence isolated from the Sargasso Sea
taggaataactgaggctggaagttttgttccaggaagcatcaaatcctcaataggtttgggaagtttattacttgatggaattggagatacaataagagtttcattgtctgatgatcctgtaaaagaggttagaattggaaatgaaatattaaaatctctaaatttgagaaacagaggagtaaaaattattgcttgtccatcatgtgcaagacaaggttttgaagtcattaaaacagttaaaattttagaggaaaaacttgcacatataaaaacaccaatatctttatcaattattggctgtgtagttaatggtcctggggaagcagcgttcacagatgttggaataaccggaggcggaaaagatagcaatatgctttatataaaaggattacaaaaggaaaaaatctcaaataaagagataatttcaaaggttattgagttagttgaaaataaagtcaaggaaatagattccaaaaaaatatgat

SEQ ID NO: 212544 - DNA, 709 bp, Unknown
  Bacterial polypeptide expressing nucleotide sequence isolated from the Sargasso Sea
ttcagcttatcattaattgaaatttcatcattgggaggtattaaagaattttctgataatttaaattttataagggtatgttcaaatgaattagaattacttaagagcagtaacttaccaaataatactgtattaattcttcattctaaaaatgatcattttatgcctgatatgaggtctttttttctttctacatctgtcagcctacccattatagtaagtaaaagctatgattttagttattccgataagttaattgtacaatcatctacagacttagggggaatatttattcaaggcatgggtgatggtatatttttaagatctagtaaaaaatcagatataaattataatagacttaattctcttagctttaaaattttgcaggctgctcgtgtaagagttacatcaaccgattttatatcctgtccatcttgtggaaggacattatttgatctacaaaaaacaacagctatgataagagaaaagacaaatcatcttaaagggttaaaaatagggataatgggatgtattgttaatggtcctggagaaatggcagatgcagattatggttatgtgggttcaggtaaagataaaatcaccttatatcgaggacaagaagtcgttaagcgtgcaataaattatgaacatggtgttaatgagctcattgaactaataaaagatgatggcaattggattgacccttaaa

SEQ ID NO: 212545 - DNA, 751 bp, Unknown
  Bacterial polypeptide expressing nucleotide sequence isolated from the Sargasso Sea
atgtttgcagaaagccctattaagcgcagaaagtctacgcgtattaatgtaggtaacgtccccattggtgatggcgctcccattgctgttcaatctatgacgaatacgcggaccacagatgtggcagcgaccgtcgatcaaataaaccgtattgttgcagtgggtggcgagatcgttcgagtatctgtgcccacgatggaagcggctgaagcatttaaagaaattaaaaagcaggtgagtgtgccactcgttgcagacattcatttcgactaccgtatcgcacttaaggttgctgaatacggcgtagattgtctgcgtattaacccaggtaacataggtaatatggagcgtgtgcgctctgtggtcgattgtgcaaaagacaaaaatattcctattcgcattggtgtgaacggtggctcgttagaaaaagacttacaagagaagtacggtgagccaacgccagaagcgctggttgaatcggcaatgcgtcatgtggatattctcgacaagcttaactttgatcaattcaaagtcagcgttaaagcgtcagatgttttcttagctgttggcgcctatcgtttattggcacaaaaaatagaccagccgcttcacttaggtattaccgaagccggtggtcagcgcgccggcgccgtgaagagtgcagttggcttaggtatgctattggctgaaggtattggtgatacgttgcgcgtatcgttagccgctgatccggggaagaaatcaaggtagg

SEQ ID NO: 212546 - DNA, 509 bp, Unknown
  Bacterial polypeptide expressing nucleotide sequence isolated from the Sargasso Sea
gatgcaagtaaggccacatagaataattaacagaaaaaaaactagagaaattaaagtaggaaatatttcagtaggtggtgggtcgcctataagcgtgcaatcaatgacgaacaccaaaacaagtgatgtaaaaagcactgttaaacaaattttatccctagaggaagctggtgctgatatcgttagagtttcttgtccagacgaaagttctaccaaagctcttaaacatatcgttaaagaagtcaaagctcctatagttgcagatatacattttcattataaaagagctatagaagcagcagaaatgggagctagttgcttgagaattaatcccgggaatattggttcaagaaatagagtattagaagtagttaaagctgcaaaaaataacaactgttctatcagagtaggtataaacgctggttcactagacaagtctttattggaaaaatacaaggaaccctgcccagaagctctagttgaaagcgctaaatacaatattaaattat

SEQ ID NO: 212547 - DNA, 875 bp, Unknown
  Bacterial polypeptide expressing nucleotide sequence isolated from the Sargasso Sea
taatgttcctcttgtcggtgattttcattttatcgggcaccgtttgcttcgagattttccagaacttgccgcgacactggccaagtttaggatcaatcctggcaatgttggacggggcgtgaggcacgacgaaaacttcgccacgttcatcgatatagctaaagatcttggaaagcccgttcgtatcggtgtgaacgcaggtagtctggaccctgatctcatggccctgaagatggatgaaaactctcggatatcggaaccgttggattctgaacaagtagaaaaccatgccttagtcgagagcgctctaaaaagcgctgaggcggctctcgatatcgggttgacacctaatcagatcattatctcctgcaaggtttcgaggttcccgcagatggttagtgtttatcgggagctttccgaacggtctgatttccctttgcaccttggtcttacagaagcgggtatgggtcagaaaggaatagtagccactacagcagccttgagcacactccttgagcagggtattggagatacgattcgtgcttccttaactcctgaagtcggtggtgataggtcgacggaagttcggctctgccaagatattcttcaagcaattggtcttcgcagatttcgaccagcagttacggcctgtcccggttgtggtcgtactacctcgacattgtttcgtgaacttgcacaggatattcaggctcatatcgatgagaaattgcctgaatggcaaagccgtcataaaggttcggaatccttgcaagttgctgttatggggtgtgttgtgaatggtcccggcgagtcgagagcagccaacattggcatatctcttccaggtgccggtgaagagcctagagcgccgggtt

SEQ ID NO: 212548 - DNA, 958 bp, Unknown
  Bacterial polypeptide expressing nucleotide sequence isolated from the Sargasso Sea
attaattcttgtaaagaaaatggagtagctatgagaattggtactaatcatggatcattatctgatcgaataatgaatagatatggcgatactccattaggtatggttgaatcagcaatggagtttttaaggatttgtaaagaaaatgactatgatcaaattattttgtcgatgaaatcaagtaatccaattgtaatgattcatgcatataggttgctggttaaatctatggaaaatgaaaacatgcattatccgcttcatttaggagttactgaagcaggagatggacttgatggaaggattaagtctgcattaggtataggaaccctattaactgaaggtataggagatactattcgagtgtcattaaccgaagatccggagtttgaaattcctgcagcagaaaaaattcttgaaagaatagataatatttcaaaaaaagtaagactcaaaaatactgataaaagagctttttcattttttaaaagagaaactgaatctatcaaaaatattggagagaaaaatccacccattgtaatttcaaatagtttaaatgattttgaagggaatgttccagattatttatttatagataatctcgataatcttaatgactcaaaaaaatatattattgatggcaaagattggaatgaaaatctttcaaaaaatatttttccttattttaattctttaaaagattttagaaagtctgaatctgtttcaaatactttgaattttgttgagattgaattaacaaaaataactaacactattacacaaacgttctcaaataatgttgtaatagttttgaatgttgataatgctattaggaatgatatcttgagtgcttttaattttttggaagaaaaactaataaaaattccaattattttaaaaggtagttatcaaagttcagacttcgagaaagttgcaatagatgcctcaatcgatataggtc

SEQ ID NO: 212549 - DNA, 849 bp, Unknown
  Bacterial polypeptide expressing nucleotide sequence isolated from the Sargasso Sea
aagtttcaatacctattgttgctgatattcactttcactataaaagagcaattgaagccgcggaaaatggagcaagttgtttaagaataaacccagggaacattggatcaaatcagagagttttagaagttattaaagctgctaaagataataattgtgcgatacgaattggggtaaacgcaggatctttagacaaagatcttttagaaaaatataaggaaccttgtccagaagcgcttgttgaaagtgctcaaaaaaatataaaacttcttgaggacaatgatttttttaattttaaaataagtgtaaaatcttcagatatatttttaactgttaaatcttacaaaaaattatcagaaatttgtaactatcctttacacgtaggagtgacagaggctggaggtttgcttactggaagtataaagtcttcaatcggaataggccagcttttaatggaaggaataggagatactataagggtttctttatcatcagatcctttagatgaaatcaaagccgggtatgaaattttaaaatctttaggcattcgttcaagaggagtaaatataatatcttgtccatcttgtgcaagacaagcatttccggtgattgaaactgtaaaaatattggaggaaaaactagcccatataaaaaaacctattaatatttctataattggctgtgttgttaacggacctggagaagcagcacaaacagaaattggtttaactggcggcggtcaagataataatcttttatacctttctggcgttccacattcgaaagttccaagcccagatataattaaaaaagttgtggaacttgttgaagaaaaagttaaagagtaaa

SEQ ID NO: 212550 - DNA, 472 bp, Unknown
  Bacterial polypeptide expressing nucleotide sequence isolated from the Sargasso Sea
cctaggcgtcacagaagcaggagggttattttctggaactataaaatcctcaatcggggttggccaacttcttatggaaggtattggcgatacaataagagtttctttatcatcagatcctgtggatgaagtaaaagcagggttcgaaattcttaaatctttaggtatacgatcaagaggagtaaatataatatcctgcccttcttgtgcaaggcaagcattcccagtgattgaaactgtaaaaatattagagaaaaaactagcacacataacaaaacctataaatttgtctattattggttgcgtggtaaatggacctggcgaagcagctcaaacagaaattggtttaactggaggtggtcaagataataatcttctatatctttcaggagttccccacagtaaagtccctagttctgagatcataaaaagaattgtaaagctggtggaagaaaaaacaaaagatatctaa

SEQ ID NO: 212551 - DNA, 511 bp, Unknown
  Bacterial polypeptide expressing nucleotide sequence isolated from the Sargasso Sea
gatggatataagaccacatagagtaattagaagaaagaaaaccagagaaattaaagtaggcaatgtttctgttggaggcgactcgattattagtgttcagtctatgactaacactttaacaacagatattaaagcaacagttaaacaaattaacgatcttgaggatgctggagcagatattgtaagagtttcttgtcctgacgaagaatcaacaaaatctcttaaacacatcatcaaagaagtaaatgttccagtagttgctgatattcattttcattataaaagagcgctagaagcagcaaaagttggtgcggggtgtttgagaattaaccctggtaacattggatcaaaaaatagaattattgaagtaatcaaagcagcaaaagataataattgttcaataagaataggtgttaatgccggttccttggataaaaccttacttgagaagtataaagaaccgtgccctgaagccttggtagaaagtgcgaaatacaatattagattattt

SEQ ID NO: 212552 - DNA, 946 bp, Unknown
  Bacterial polypeptide expressing nucleotide sequence isolated from the Sargasso Sea
caatcaatgactaatacgttaactaaagatgttaaagaaactgtaaaacaaatcgaacaaattgagaagcggggagccgatatcgtaagggtatcatgtccagatgaagactcaactaaagcacttaaagatattgttaaaaatacttatattccaatagttgctgatatacattttcactacaaaagagcaatagaggcggcagagagtggagctgcttgtctaagaattaatccaggaaatattggagataaaaaaaaaattaaagaagtaatttctgctgcaaaaaataacaattgttcaattagaattggcgttaatgctggatctctagaaaaagacttgttagaaaagtataaagaaccttgtccagaagctttagtagagagtgcattaagaaatattagtattgttgaagattttgactttaatgaatttaaagtaagtgttaaatcctctgatgtatttttgtctattgaagcttacagacaactttctaaggttactgattatccactacatctaggtatcaccgaggcaggaacatttttacctggtagtataaaatcttctattggttttggatcacttctaatgagtggtattggggataccttaagagtttctttatctgatgatccggtagaggagataaaagtaggaaatgaaatacttaaatcacttaatttacgaaatagaggggtaaaaattatttcctgtccgtcttgtgctagacaagcttttaatgtgatcgaaactgtaaaaaagttagaagacagactatcccacataaaaacttctatttctttatctataattggatgtgtagtaaatggacccggcgaggcatcacaaacagatataggtatcactggtggaggaaagggcaataacatgctttatttaaatggagttgaaagtaaaaaaatatcaagtgatgagatga

SEQ ID NO: 212553 - DNA, 481 bp, Unknown
  Bacterial polypeptide expressing nucleotide sequence isolated from the Sargasso Sea
gggagttacagaagcaggaagttttattcctggtagcattaaatcatcaattggtcttggaactctgttgcttgaaggaattggagacaccataagaatctcactttcagacgatccaattcaagaagtaaaaataggaaatgagatattaaaatcattaaaccttaggaatagaggtgtaaaaattatatcttgtccgacatgtgcacgacaagcattccaggtaattgacacagtaaaagaactagaaaaaaaactttctcatataaaaaccccaattactctatctataattggctgtgttgttaatggaccaggtgaagcggctcaaaccgatataggtattacaggaggtggcaagggaaacaatatgctttatttaaatggtattcagacaaaaaaaatacctagtgagtctattatatcaaaagttgtggaattagttgaggaaaaagctctagaaatagaaaataataaataa

SEQ ID NO: 212554 - DNA, 445 bp, Unknown
  Bacterial polypeptide expressing nucleotide sequence isolated from the Sargasso Sea
tatggaagtaagacctcacagaattataaaaagaaaaaaaacaaaaaagataaaggtgggaaatatatatgttggtggagacgcacctgtttctgtgcaatctatgacaaatactttaacaacagatcataaagccacgatcaaacagattaaggagctcgaggaagctggagcagatatagtaagagtttcctgccccgatgaggagtctacaaaagccctaaaaattataacaaaagaaactgacttaccaattgttgctgatatacattttcattttaaaagggcgatagagtcagctgtatcaggagcaaaatgcttgagaatcaatccgggaaatattggctctaaagaaagaataaaagaagttattaaagcagcaaaagattatggctgcgcaataagaataggcgttaacgctggttcattggagaaaaaaatttag

SEQ ID NO: 212555 - DNA, 685 bp, Unknown
  Bacterial polypeptide expressing nucleotide sequence isolated from the Sargasso Sea
agatattttagagaaattcaaagagccatgtcctgaggcacttgtagaaagtgcgattagaaatatagaaatattagaaaacgaggatttcacaaaccttaaagtaagtgtcaaatcctccgatgtttttctatcaatcggtgcttacagacaactatcaaaaaaaattaattatcctcttcacattgggattaccgaggcaggaagttttctgcctggaacaataaaatcttcgattggttttggtgctttattaatggacggaataggtgacacaattagagtctctttatcagatgatccagttgaagaagttaaagttggaaatgaaatactaaaatcactaaatttaagacacagaggagttaaaattatatcctgcccctcgtgtgcaagacaaggatttgaggtaataaaaactgtgaaaatattagaggaaaaacttgcccatatcaaaacacctttaactttatctattataggatgtgttgttaatggacctggagaagctgcattaactgatattggaataacaggtggaggcaaaggaaacaatatgctttatttgtctggtattcagaaagaacaggtaatgaccaataatattataaataaagttgtagatgaagtcgaaaaaaagattttagagatagaaagagaaaatgataccacgcaaaactgttga

SEQ ID NO: 212556 - DNA, 703 bp, Unknown
  Bacterial polypeptide expressing nucleotide sequence isolated from the Sargasso Sea
acgaatacactaactactgatgtaaaaaatacaattaaacagattcactcattagaagaggccggagttgacattgtacgagtttcttgtccggatgaaagctcaactaaatctcttaaacaaatagtaaaagatattaatgtgccaatagtagcagatatacattttcattataaaagagctattgaagcagcggaaatgggagccagctgtttaagaataaatcctggcaatattggttcaaaagaaagaatacttgaagttgttaaagccgctaaagataataattgttcaattaggattggagtaaatgcaggctctttggacaaatcattattggagaaatataaagagccttgcccagaagcattagtagaaagtgcgcagcataatataaaacttttagaagataataatttttttgatttcaaaataagtgtaaagtcttctgatatatttttaacagtaaaagcatacaaacaactttctgaaatatgcgattaccctcttcatttaggaataacagaagctggaggtttattaactggaagcattaaatcatctattgggataggacaacttctgatgaatggaataggtgacactattagagtatcattatcttcagatcctgtggatgaggtcaaagctggatttgaaatacttaaatctttaggcataagatctagagggattaatataa

SEQ ID NO: 212557 - DNA, 439 bp, Unknown
  Bacterial polypeptide expressing nucleotide sequence isolated from the Sargasso Sea
tattcaatcatctattggattaggaaaattattatggtcaggtataggtgatacaattagggtttcattatctgcagacccagtagaagaagtaaaagcaggctttcaaattcttaaatcattaggtataagaaataaaggcgttacaataatatcttgtccttcctgtgcaagacaaaattttgatgttattaatacagtaaaaattatagaagaaaagttgtcacatattaaagaaactatttccttatctattattggctgtgtggtaaatgggccaggagaagctagagaaactaatataggcataactggaggaggtaaaaaatttcaccaaatatatatagatggtaatattagccataggatggagcaaaaagactttattaatcatgttattaatttagtagaagaatatgcggaaagattgagaaaataa

SEQ ID NO: 212558 - DNA, 445 bp, Unknown
  Bacterial polypeptide expressing nucleotide sequence isolated from the Sargasso Sea
aatggagataagaccacatcgcacaataaaaagaaggaagacaaaaacaataaaagttggaaatgttagcataggaggagattctgttatctctgtacagtctatgactaatacgttaaccacagatactaaagcaacaataaaacaaattaacgaattgcaagaatctggcgcagacatagtaagagtctcttgtcctgatgaaaagtcaacaaaaaatttaaaagaaataacaaaagagacctcagtgccaatagttgctgacatacattttcattataaacgtgctattgaggcagcaaaaaatggcgcaaactgtttaaggattaatcctggtaatataggttcttcagaaagagttcttgaagtagttaaggcagcaaaggatcacaattgttctattagaattggagtaaatgctggttctttagataaagttttattg

SEQ ID NO: 212559 - DNA, 844 bp, Unknown
  Bacterial polypeptide expressing nucleotide sequence isolated from the Sargasso Sea
tgctgatattcattttcattataaaagagcaatagaagcagcagacaatggcgcatcttgtatacgtatcaatccaggaaacataggttcacaagatagaataaaagaagttattaaagcagcaaaaagcaataattgttcaataagggtaggtgtaaatgctggaagtttagaaaaacaagttcttgataaatactcagaaccgaatccagatgccctcgttgagagcgcaatattaaatataaaaattcttgaagataatgattttactaattttaaaattagtgtgaaatcttcagatatttttatgtctgtaaaggcatatcaagatcttgcaaaactttgtgattatcctttgcacttaggaattactgaagctgggggtaggaggtctggatctataaaatcatcaattggcataggtaatttacttttacagggtattggtgacactattcgtgtttcattatcagatgaacctgaagaggaggttcgggtaggctttgaaattctaaaaagtttaggattaagaaacagaggtgttaaaattatttcatgtccttcttgtgcaagacagcagtttcaagttattgatacagtaaaaagtttggaaaaaagattggatgacattacaacgccaatgactgtttcaataattgggtgtgtagtcaatggacctggtgaggccacaatgaccgatattggaattactggaggtggcaatgatacccatatgatttatcttaatggtaaaaaaaataatatagttaaaaatgttgatttagagaattatcttgaaaaacttattcgagaaaggtctaaggaactacaaatagttgaataa

SEQ ID NO: 212560 - DNA, 529 bp, Unknown
  Bacterial polypeptide expressing nucleotide sequence isolated from the Sargasso Sea
atgcataaccaggctccgattcaacgtagaaaatcaaagcgaatttacgttgggaatgtgccgattggcgatggcgctcccatcgccgtacagtcgatgacaaacacgcgcaccaccgatgtggcggcgacggtaaatcaaattaaagcccttgagcgcgttggcgcggatatcgtgcgcgtttcggtgccaacgatggacgcggcggaagcgttcaagcttatcaaacagcaggttagcgtaccgctggttgccgatatccacttcgattaccgcattgccctgaaggtagcggaatacggcgttgattgcctgcgcattaacccgggcaatatcggcaacgaagagcgtatccgcatggtggtggactgcgctcgcgataaaaacatccctatccgtatcggggtgaacgccggctctctggaaaaagatctccaggaaaaatacggtgaacccaccccgcaggcgctgctggaatcggcaatgcgccatgtcgatcacctcgatcgtctcaacttcgatcagttaa

SEQ ID NO: 212561 - DNA, 892 bp, Unknown
  Bacterial polypeptide expressing nucleotide sequence isolated from the Sargasso Sea
aatgaccaatacactaaccacagacgtaaaaagtacaattgaacaagtagttgctgcttctgaagccggcgcggatcttgtaagggtttcagtgcctgatcttgagagtagcaaagcattgaaagagattgtcaaagaaagcccagtaccaatcgttgctgacattcactttcattacaaaagaggcatagaggctgcagaagccggagcagcctgcttgagaataaatccaggaaacattggttctgaggaaagggttaaagaggtaattcgagcggcaaaggacaataattgctctatgcgaattggtgtaaatgctggatcattagaaaaagatttgcttgaaaagtatcgtgaaccttgtccagaggcaatggtagaaagcggattggatcatattaaaattttagaagataatgatttccacgaatttaaaataagcgtcaaagcatctgatgtttttttatctgcggcagcttatcaggctcttgcagacgctactgatgcgccgttacatctggggattactgaagcagggggcttaatgagcggtactataaagtcttctattggtttaggcagccttctttggttaggcataggtgatactattagagtttctttgtccgccgatcctgtagaagaggtaaaagttggctatgatatattgaaatcccttgggctaaggcatcggggcgtgaatataatttcatgcccatcctgcgctaggcaaggctttaacgttatagaaacggttcaaattttagaagaccgtcttgcccacgttaaaacaccaatgagcctatcaataatcggatgcgttgttaatggcccaggagaaactctaatgacagatatagggtttacgggtggtggagccggaaatggtatg

SEQ ID NO: 212562 - DNA, 574 bp, Unknown
  Bacterial polypeptide expressing nucleotide sequence isolated from the Sargasso Sea
gatttctttaattttaaaattaagcgttaaatcatctgatatttttttgacagttaaagcttatcaacaattatctgaaatttgtaattatcctttacacttaggagtcacagaagccggaggcttgtttacaggtagcattaaatcatcaattgggataggacagcttctaatgagtggtatcggtgatacaataagagtgtctctctcatctgatccaatagatgaaataaaagctggttacgaaattttaaaatcactaggtataagatctagaggagttaatattatttcatgtccgtcgtgtgcacgccaagcatttccagttattgaaactgttaaagaattagaaaaaaaactttcacatatcaaaaaaccaataaacttatcaataataggatgtgtagttaacggccctggtgaagctgctcaaactgaaataggtttaacaggcggtggtcaagatagtaatttattgtatctttcaggaatacctcattctaaagtcgctagctcagaaattattgataaggttgttaagcttgtagaagacaaagcaaaagaaataatttaa

SEQ ID NO: 212563 - DNA, 373 bp, Unknown
  Bacterial polypeptide expressing nucleotide sequence isolated from the Sargasso Sea
aatgagcattagaccatttagggatattaaaagaaaaaaaactaatgtaatttctgttgggaatgttaaaattggtggagacaatcctatctctgttcaatcaatgacaaataccgtaactaaagatacaaaatctacaattaatcaaattaataatatagcaagtgagggcgcagatctagtcagagtctcttgccctgacaaagaaagcacatcagcactaaaagagatagcaaaacattcaagtattccaattattgctgatatacattttcactatcttagagcaatagagtctgcagaaaatggtgctaaatgtttaagaataaatccaggaaatattggcgacagaaagaaaattaaagatatagta

SEQ ID NO: 212564 - DNA, 715 bp, Unknown
  Bacterial polypeptide expressing nucleotide sequence isolated from the Sargasso Sea
atgagcataagaccatttcgagatattaaaagaaaaaaaacaagaaaaataaaggttggaaaagttgaagttggaggggatgccccgatatcagtccagtcgatgacaaatactttaacaacaaatatagatgcgactataaaacaggtaaatgaactaaaagaggccggagcagatatagttagaatttcgtgtccagataaagaatcgtccacagcattaaaaaaaattataagtcaagttgatgtacctattatagctgatattcattttcattataaaagagctattgaagcagctatgtcaggcgctcactgtttaagaataaatcctggtaacattggttcaaaagaaaaagtaaaagatgtattaaaagcagcaaaagattataattgctcaataagagtcggggttaatgccggatctttagaaaaaattttgttagaaaaatataaagaaccatgcccagaagcattagttgagagtgcagttaataatataaagttattagaagatgaaaatttttttaattttaaaataagtgtaaaatcatccgatatttttttaactacaaaagcatatagatctttgtcatcagtttgcgactatcctttacacctaggtattacggaagctggaagcttaactaccggaagtgttaaatcttcacttggaattggcttgttacttatggaaggaataggagatactataa

SEQ ID NO: 212565 - DNA, 667 bp, Unknown
  Bacterial polypeptide expressing nucleotide sequence isolated from the Sargasso Sea
atgacgcggaatagacgccataccattgctgttaaggtcggttcagtcacaattggtggtaataatccaatcattgttcaatcgatgaccaatactgatactgctgacgtagatgcgacaacaaaacaagtgcaagagcttgcaattgcaggctcagaactggtaagaataactgttaataccagcgaagctgccgcaaaggttgcaactataagagagaaactcgatggtcttggctgttatgtgcctttagttggcgacttccactacaacggacataaattactaattgattatcctgaatgcgctcaagcgctaggtaaatatcgtattaatccaggaaatgttgggtttggtaaaaagaaggataatcagtttgcaattatgatcgaacaggctattaagtatggtaaaccagttcgaattggtgttaattggggtagcttagatcaagacctattaacaaaaatgatggatgataatgccaagcggtcggcaccattagatacagatgaagtaatgcaagaagcattaattatttctgcgttaaatagcgctgagcgtgctgttgaacttgggctacctaaagatcatatagttttgtcatgtaaagtgagcggagttcaaaaattaatttcggtttatagagatatttcgcaaagatgcg

SEQ ID NO: 212566 - DNA, 673 bp, Unknown
  Bacterial polypeptide expressing nucleotide sequence isolated from the Sargasso Sea
ttggtgaaaaaaagaaaatttctcaagtttatttcagcggcaaaaaataataattgttctataagaattggtgtcaattcaggttcattagaaaaagatattttagaaaaatttaaagaaccttgtccagaagctttagtagaaagtgctatcaggaatgttaaaattttagaagatttagatttttttaattttaaagtaagtgttaaatcttcagatgtatttttatcaataaaagcatatagagaactttcaaaaattatagattatcctcttcacttaggaatcacagaagcaggaagttttatccccggaagtataaaatcctctattggcttaggaaatttattgttagatggtattggcgacactataagagtctctctttctgatgatccagttgaagaaataaaaataggaaatgaaattttaaaatcattgaaccttagaaacagaggagttaagataatttcatgcccttcatgtgctagacaaggttttgaagttatagatacagttaaaattttagaagaaaaactgtcgcacataaagactccaattactttatctattatagggtgtgttgttaatggcccaggtgaggcagcacaaacagatattggaataactggaggtggtcaaaatagtaacatgctttatttaaaaggagtcc

SEQ ID NO: 212567 - DNA, 817 bp, Unknown
  Bacterial polypeptide expressing nucleotide sequence isolated from the Sargasso Sea
gacgaacactttaactacagatgttaaagcaaccataaatcaaattaatgatatagctgaggaaggtgctgatattgtaagagtatcttgtccagatgagaattcttcaaaagcattaaaagaaataataaaacatgtatcaataccagtagttgcagatatacattttcattataaaagagctattgaggcagcagaaaatggtgctagctgtttaagaatcaatccaggtaatattggagatgaaacaaagatacatgaggtattgaaagccgcaaagaataataattgttcaataagaatcggagtaaatgcaggctctctggaaaaagatattttagaggaatttaaagagccttgtccagaagcattagttaaaagcgctttgagaaatattaaaattctagaagataaagatttttttaattttaagataagtgttaaatcatcggatgtattcctttcgatagcagcatatagacaactatctaaagttatagattatcctttacaccttggaatcacagaggcaggaagttttgtatctgggagtataaaatcatctataggtcttggtagtttattaatggacggaattggagatactattagaatttctttatctgataacccaactcaagaagtgaaaattggtaatgaaatattaaaatcactcaatctgagaaatagaggagtaaagatcatttcttgcccttcttgtgcaagacaagcatttcaggtaatcgatactgtcaaaatattggaagagaaactagctcatataaaaacaccaataacactatcaattattggctgt

SEQ ID NO: 212568 - DNA, 844 bp, Unknown
  Bacterial polypeptide expressing nucleotide sequence isolated from the Sargasso Sea
ttaaaaaaaatagcaaaagatagtaaagttcctattattgctgatattcattttcactacaaaagagctatagaggcagctaaaagcggagcaaaatgtttaagaataaacccaggtaacattggtcaaaaagaaaaaattaaacaagtaatagcagccgcaaaagattatggttgtgcattaaggattggagtaaatgctggatctttagaaaaagatattttggaaaaatataaaggaccttgtccagatgctttagtagaaagcgcattgagaaatattaagattatagaggatgaggatttttttaattttaaagttagtgttaaatcatcagatgtgtttttgtcggtagcttcatatagacttctttcaaataagacagattaccccttacacttaggtgtgacagagtctggtagttttgtgccaggaagtgtcaaaacatcaataggcttaggcttgcttttgatggaaggaatcggtgatacaattagggtttctttatccgatgatcctattaaagaagttaaaataggtaatgaaattttaaaatccttaaatttaagaaataggggagtaaaagttatttcatgtccttcttgcgcacgtcaaggttttgaagtaattgatgtggtaaaaaagttggaagaaaaattatctcatataaaaacacctttaactttatcgataattggatgtgttgttaatggccctggagaagcagcattgactgatatcggaattaccggcgggggcaaggatagcaatatgttatatctgaatggtatacaaaaagaaaaattgaaaaatgacgagataattccaaagttgttgctttagt

SEQ ID NO: 212569 - DNA, 462 bp, Unknown
  Bacterial polypeptide expressing nucleotide sequence isolated from the Sargasso Sea
aatgagcataaggccctttagagacataaaaagaagaaaaactaaaaaaatcaaagttggtaatatagaagttggtggagattcaccaatatcagtccagtctatgacaaatacattaactacggatgttaagaaaactataaaacaaataaatgccctagaagaagctggcgcggatatagtaagagtttcttgcccggaccaagaatcttgtttttctctaaaaaatattaaaaaagatattaatgtaccgatagttgctgacatacattttcattataaaagagcaatcgaagcagcgaaatatggagcaaattgtttaagaatcaatcctggaaatataggatcaaaagaaaaaattaaggaggtacttaaagcggcaaaagataatggctgttcaataagaattggtgttaacgctggttcattaggtagagaaattttagaaaaatataaagaacc

SEQ ID NO: 212570 - DNA, 602 bp, Unknown
  Bacterial polypeptide expressing nucleotide sequence isolated from the Sargasso Sea
tatgaacttaaattcaataagaccctggcgaaatatagacagaagatcatctagaaaaattatggttggttcagtaccggtaggagcagattctcctattacagttcaaactatgacaaatactttgactactgatattaaatcaacaattaatcaaatcatatcctgtactgatgcaggtgcagacataataagagtttcttgtccggacttagaaagtactaagtcgttgaagactattgttaaggaaagcccaattccaatagtcgctgatattcattttcattataaaagagctatagaagcagctgaagctggtgctgcatgtttaagaataaaccctggtaatataggatcaaatacaagaattaaagaagttataaaagctgctaaagattttggttgttcaataagaataggggtaaacgctggcagtctagaaaaaaaacttcttgataaatatggtgagccttgtccagaggcaatgatcgaaagtggattagcacatattaagttattagaagataacgatttttttgagtttaagatttctgtaaaagcttcagatgtttttttagcagcggcagcatatcaaggtctct

SEQ ID NO: 212571 - DNA, 754 bp, Unknown
  Bacterial polypeptide expressing nucleotide sequence isolated from the Sargasso Sea
ataaaccaaattaatgaaatccaaaatgaaggtgcagatttagtcagagtttcttgtccagatgaatcttcatcaaaagcgctcaaagaaattactaaatatgttgatgttcctataatagcggatatacacttccattataagcgagcaatagaagctgcagaaaatggagctagctgtttaagaataaatcctggaaacataggaaatgaaaaaaaaatccgtgatgtactattagctgcaaaagataatgaatgttctataagaattggtgtgaacgctggttcacttgaaaaagatattcttgataaatataaagaaccttgtccagaagctttagttgagagtgctcttagaaatataaaaatattggaagatcaagatttttttaattttaagataagtgtaaaatcttcagatgtatttttatcaataaaagcatatagacaactctcagaagtcactaactatcctttgcatcttggaattacagaggcggggagttttgtttctggtagcatcaaatcttctattggggtagggacgcttcttttagatggaattggtgatacaataagaatttctttgtctgatgaccctgttaaagaagttaaaataggcaacgagattttaaaatctttaaatttaagaaccaagggagttaaaattatttcttgcccatcatgtgcgagacagggttttcaagtaatagatacagtaaagatattagaagaaaagttatcacatattaaaa

SEQ ID NO: 212572 - DNA, 694 bp, Unknown
  Bacterial polypeptide expressing nucleotide sequence isolated from the Sargasso Sea
atgccttctcctgaaatccagatgccgtcgagcttactccccagaaaatccacccagcaggttcgggtaggcaaaattcttgtcggcggagacgcgcccatagtcgtccagtcgatgaccaataccgataccgctgatgtggacgcgaccgttcgccaggtaattgagttggcagaggcaggatcagagattgtgcggatcaccgtgaacaacgacgacgccgcgaaggcagtgcccgtgatcaggactcggctggacatggcccactgttcggtaccgctggtcggagattttcactacaacggtcataccctgttacaggagtacagcgactgcgccgacgtacttgataaataccgcatcaaccccggcaacgtcggtcagggtgaaaaacgggatatacgcttttgccaaatgattgagcaagcctgccttcgaaacaaacccgttcgcatcggtgtgaactggggctccctcgatccccaactgcttgcgcgcaagctggataagaatgcggccctcgcctcgcctcggtcattggagaccgtcacccgagaggcgctggtcgactccgccttgaacagtgctgaactcgctcagcgcgagggactcagaccggaccaaatcattctttccgcgaaagtgagtgccgtgcccgagttggtagcggtttaccggcagttggctgaacgat

SEQ ID NO: 212573 - DNA, 594 bp, Unknown
  Bacterial polypeptide expressing nucleotide sequence isolated from the Sargasso Sea
gatgagcataagaccatttcgagatataaaaagaaaaaaaacaaaaaaaatcaaagttggaaaagttgaagttgggggagattctccaatatcagtacaatcaatgacaaacactttaacacaaaatataaaagatactgttaaacaaacgaatgaactaagtgaggctggggcagatattgttagaatttcatgtccagacaaagaatcttccatgtcattaaaaaaaattgttagtgaagtagatgtacctattgttgctgatattcatttccattataaaagagccatacaggcagctggggcaggagcaagctgtttaagaatcaatcctggtaatataggttcggttagtcgcgtacatgaaatacttaaggccgcaaaagataataattgctcgataagagttggaataaatgctggatctttagaaaaagatttattagaaaaatataaagagccttgtccagaagcactttgcgaaagcgctcttagaaatattaaaattcttgaagataaggattttttcaattttaaagttagtgttaagtcatccgatgtttttttatctattaaagcatataaacttttgtc

SEQ ID NO: 212574 - DNA, 721 bp, Unknown
  Bacterial polypeptide expressing nucleotide sequence isolated from the Sargasso Sea
aatgagtataagaccgtttagagatattaaaagaagaaaaacaaaaaaaattaaagtcggaaaagttgagatcggcggagatgctccaatatctgttcaatcaatgactaacactttaacgactgatataaaaaaaactatagatcaaattaataatcttgctgatgcgggagctgatattgtaagagtttcgtgtccagaccaagaatcatcttacgctattaaaaaaattattaaaaatgtaaaagtcccattagtagcagacattcactatcattataaaagagcgatcgaagctgcaaattctggcgcaaactgtcttagaattaacccaggtaatatcggttcaaaagatagagtaaaagaagtgctcaaagctgcaaaagataataattgttccttaagaattggtgtgaatgcgggatctttagataagacaattttagaaaaatataaagagccctgccccgaagctttagtcgaaagcgctataaacaatatcaaacttcttgaagatgaaaatttttttaattttaaaataagcgttaaatcttcagatgtttttttagcaacaaaagcttacagaattttatcgagcaagtgtgattatcctcttcatttgggaatcaccgaggctggtagtttaaaatctggaagcgtaaaatcttccattggcatgggtattttattaatggagggaattggagatactattagggtt

SEQ ID NO: 212575 - DNA, 742 bp, Unknown
  Bacterial polypeptide expressing nucleotide sequence isolated from the Sargasso Sea
atgagcattcgcccctatagagacatttatagaaaaaaaacaaaagttattaaggtaggtagtttgaatattggtggtgacaatcctatttcagttcaatctatgacaaatactcttacaaaagataaaagggcaacaattgatcaaattaacagaatagaggaggcaggtgcagacttagtaagagtttcatgtccagatgaagcttcaacaaaagcactaaaagaaataaaaagatcgacaaatattcctatagtagctgatatccattttcattatcaaagagcaatagaggcagcaatcaacggcgcagactgtttaagaataaatcctggaaatattggtgataaaaaaaaaataaaagaggttattaaagctgcaaaagataataattgttcaattagagttggggttaatgctggttcactagaaaaagatattttagagagttataaagaaccgtgtcctgaagctttagtggatagtgcaattagaaatattaggatattagaggatgaagatttttttaatcttaaagtaagtgtaaaatcttctgatgttttcctatctataggtgcttatagacaattatcaaaaaaaattaattatcccctacatattggaataacagaggctggaagttttttaccaggtacaataaaatcatctataggatttggagccctacttttagacggtattggagacacgataagagtttcattatctgatgatccggtaa

SEQ ID NO: 212576 - DNA, 769 bp, Unknown
  Bacterial polypeptide expressing nucleotide sequence isolated from the Sargasso Sea
ctgctagaaaatggtgcttcatgtttaagaataaatccaggtaatattggatctaaggaaaaagtcaaagatgttatcaaagcagcaaaggattttaattgctctatcagaattggcgttaatggtggaagtttagaaaaaaaaatacttgaaaaatattcagaacctaatcctgaagctatggttgaaagtgcgatcgaaaatataaaactattagaagacaatgatttttttaattttaaaatcagtgttaaagcttcagatatttttttaacaatcaaatcatatgaaaaattatcaaaattgtgcgattatccattacacctaggtataactgaagctggaagtaataaaacaggctctataaaatcctctataggaattggacaattactattacagggtataggcgatactattagggtttcactatctgatgaaccagaagaagaagttaaagtaggatatgaaattcttaaaagtttaggattaagaaataggggtgttaaaattatttcttgtccttcatgcgctagacaacaattccccgttattgaaacagtaaaaaaattagaaaaatccctagaaaatatagatattccaatgactatttcaattattggctgtgttgtcaacggtccaggtgaagccaatatgacccaaattggtattactgggggtggcaatgatacacacatgatatatatagatggaaaaaaagatcatagaattaagaatgaaaatattccttcatattggaaaaaataat

SEQ ID NO: 212577 - DNA, 853 bp, Unknown
  Bacterial polypeptide expressing nucleotide sequence isolated from the Sargasso Sea
agtcattaatgttggtgaagtaaaaataggtggagataatccaatatctgttcagtctatgacgaatactttaacaactgacaccaaatcaacaattgaacaaataaataaaatttgtgaagaaggagcagatttagtaagagtttcttgtcccgatacaagctctacaaaagcattaaaagaaataacaaaacattctcaagttcctattattgcagatatacattttcattataaaagggcaattgaagctgctgaaaatggagcaaagtgcttaagaattaatcctggcaatataggagatgaaaaaaaaatatacgaagtgctgagtgcagcaaaaaataataattgttcaataagaataggagtaaatgctggatcattagaaaaagatattttggaaaaatacaaagaaccttgtccagaggctttagttgaaagtgcagaaagaaacataaaaattctagaagataaagatttttttaatttcaaaataagcgtaaaatcttcagatgtttttttatcaatagcttcttatcgattgctatctaaaaaatgcaattatcctttgcatttaggaattactgaggctggagcttttattcctggaagtataaagtcttcaattggccttggcgctcttcttttagaaggaataggagacacaataagaatctctctttcagatgacccgattcaggaagttaaaataggaaatgaaattttaaaatctttaaatttaagaaataggggcgttaaaataatttcgtgccctacatgtgctagacaagcatttcaagtaattgacactgtaaagcttttggaggaaaaactttctcatataaaaacaccg

SEQ ID NO: 212578 - DNA, 754 bp, Unknown
  Bacterial polypeptide expressing nucleotide sequence isolated from the Sargasso Sea
attcatttccattataaaagagggatagaagctgcaaataatggtgcttcttgtattagaataaatcctggtaatattggaagtattgaaaggataaaagaagttataaaagctgcaaaagataataattgctcaattagagtaggtgttaatgcaggaagtttagaaaaacaaattttagaaaaattttctgaacctaatccagaagctttagttgaaagtgctaaattaaatataaagatacttgaagataatgatttcaccaatttcaaaatcagtgtgaaatcttcagatatatttatgtctataaaagcatatgaacaattagctgaattatgtgattatccattgcatttaggtattacagaagcaggaggaaaaagaactggttcaattaaatcttcaattggagttggcaacttactgttgagaggaataggggacacgattagaatatcattatcagatgagcctgaggaagaggtaagggttggttttgaaatcttaaaaagcttaggattaaggaatagaggtgtaaaaattatttcatgcccttcatgtgctagacaacaatttgaagtaataaaaactgtaaaaaatttagaaaaaaaattagatgatatttccacgcctataacagtttcaataattggatgtgttgttaatggtcctggcgaagcaactatgacaaatatcggaataactggaggtggaaatgatacacacatgatttatcttgatggtaaaaaaaaca

SEQ ID NO: 212579 - DNA, 854 bp, Unknown
  Bacterial polypeptide expressing nucleotide sequence isolated from the Sargasso Sea
attaatgaactagaaagtgcaggtgcagatatagttagagtttcatgtccagataaagaatcaacgaaagcattaaaaaaaataacaaaaaagactaaagtgcctatagttgcggatattcattttcattacaaaagagcaatagagtcagctatttctggggcaaaatgtttaagaataaatccaggtaatattggctccaaagaaagagtcaaagaggttgtgaaagctgcaaaagattacgattgtgccatcagaataggagtaaatgcaggctcactagataaaaatattttagaaaagtataaggagccttgtcctgaggcattaattgaaagtgcagagcaaaatataaaactattagaggacaatgatttttttaatttcaaaataagtgttaaatcttcagatgtatttttagcaattaaggcttatgaaggtttgtcaaattcatatgattatcctttacaccttggtattacagaagcaggtggtttagttactggcagtattaaatcatcaataggtattggtaaacttttaatgcaaggaattggagatacaataagagtgtctctatctgctgatccagttgaggaagttaaagcaggttatgaaattttaaaagcactaggtattagatcaaggggggttcaaattatttcttgcccatcttgcgcaagacaagcttttccagttatagatactgttaaaattttggaagataaactttcacacatcaaaaaacctcttacactttcaattataggatgcgttgttaacggacctggtgaggcagctcaaacagatattggtcttacagggggtggtgaaggtaataatttgttttattt

SEQ ID NO: 212580 - DNA, 466 bp, Unknown
  Bacterial polypeptide expressing nucleotide sequence isolated from the Sargasso Sea
acagaggctggtggtttaataactggaagcattaaatcatccataggtattggaaaacttttgatgcagggaattggtgatacaattagagtttctttatcagcagaccctgtagaggaagtaaaagcaggttttgaaattttaagttcgctaggaataagatctagaggtgttcaaattatttcttgtccgtcatgtgccagacaggcttttccagtaatagatactgtaaaaattctagagaaaaaactatcacacataaaaaagccaatgacattatctataataggatgtgtagttaatggaccaggagaagcatctcaaaccgatattggtttaactggaggaggagatggaaacaatcttctttatatttctggcataccgcacaacaaggtagttagccaagatataattaataaagttgttaacctagttgagagcaaagccaaagaaaatagttaat

SEQ ID NO: 212581 - DNA, 598 bp, Unknown
  Bacterial polypeptide expressing nucleotide sequence isolated from the Sargasso Sea
aatggaaattagaccacatagagttattaaaagaaataaaacaagaaaaataaaaataggaaatatttcaataggaggcgactcacctatttcagtacaatctatgacaaatacacttacaacagattatgttggtacaataaaacaaattaatcttttagaggaagcaggtgccgatattgttagagtttcatgcccagatgaagattcaacagcatctcttaaaaaaattgttaaagaaaccaatgtaccaatagttgccgatattcattttcactataaaagggcaattgagtctgcaaagtctggagcaaaatgtttgagaataaatcctggaaatattggatctaaagatagagtaaaagatgtaatcaaagctgcgaaagattacgattgtgcaattagaataggagttaacgcaggctcacttgaaagaaaaattttagaaaaatataaggaaccctgtccagatgcattaattgaaagtgcaatgcatcatattaaaattcttgaggataatgatttttttaaatttaaagtcagcgttaaatcctcagatgtttttttagctgtaaaagcatatgagggtttatcgaaa

SEQ ID NO: 212582 - DNA, 640 bp, Unknown
  Bacterial polypeptide expressing nucleotide sequence isolated from the Sargasso Sea
gaaccatgtcctgaggcattagtcgaaagcgctatgtttaatgttaaattatttgaggacaacgatttttttaattttaaattaagtgtgaaatcttctgatgtatttttagctaccaaatcttatgaaattttatcgcaaagttgtgactatccacttcatcttggtattacagaagctggtggcttaaagtcaggtagtatcaaatcgtctataggaataggttatcttcttatgaaaggaataggagacactataagagtatctctttcagcagatccaatagaagaaattaaagcgggatttgatattttaaagtctttaaatttaagatctaggggcataaatataatatcttgtccctcatgtgctagacaagcttttccagtgattgaaacagttcaaaaacttgaaaaaaaattagctcacataaaaaaacctatcacactatctataatcggttgcgttgttaatggacctggtgaggcctcccaaactgaaattggtttaactggtggtggcaatgataataatctattatatatctctggaattcctcataaaaagattgttaatgatgaaataatcaatcaagtagttaaattggtagaagaaaaagttaacgaaaaaaaccgataaa

SEQ ID NO: 212583 - DNA, 386 bp, Unknown
  Bacterial polypeptide expressing nucleotide sequence isolated from the Sargasso Sea
agatactaaaaatgaatccggttttataaatgaaactatttttggagtccttcaggcaagtcgaatgagaatatctaagactgagtatatttcctgcccatcttgtgggaggacattatttgatttacaagagactaccggaaaaataagagaacgaacttcacacctaaaaggaattaaaattggggtaatgggctgcattgtaaatggcccgggtgaaatggctgatgctgactatggttatgtaggcactggtgaaggaaaaatttcattatacaaaggacaaaatctggtgaagcgtggcatcccaagtgaaaaggctgtagatgaactggtcaatcttattagtgaaaatggagattggatagatccacctcatgtttagc

SEQ ID NO: 212584 - DNA, 893 bp, Unknown
  Bacterial polypeptide expressing nucleotide sequence isolated from the Sargasso Sea
aaaaggccttagacaaagagggtatacaactccaattgttgccgatatccattttaccccaaatgctgcaaaaattgctgcaaaaattgttgaaaaagtaagaattaatcccggtaattatgcagatagaaaaaaattccaaacgtatgaatacaccgaccaatcctatattgaggagttagaacgtatacgagaccgttttgtacctctggttcagatctgtaaagaaaatggaacttcgatgagaataggtaccaatcatggatctctttctgatcgcataatgagtcgctatggcgatacgccactgggtatggtagagtcggcaatggaattcatacgaatagcagaggatgaaggataccaagatattattttatccatgaagtcgagcaatactcaagtgatggtccaggcatatcgtttattagtaaaaacaatgaatgatgaaggtatgaactatccacttcatctgggagttacggaagcaggtgaggccgaagatggtaggattaagtctgcagtgggaataggtacactgcttgaagatggtctaggagacaccataagggtatcactaacggaagaacctgaaagggagattcccgttgcaaaaatattatctgatcgttatctgaagatggataagaatcaaaaggtaattccaaagatagatgcattgccctacgatccatttttctataaaagaagaaaaacaaattccatttttaatattggagatcaacaagtgccacgggtagttggaaatctttcatccaaggatttcatatcttatgatgatttagcgccatttggctatatatatgctccaaaacaggataagtggcatgtctcggatcaggcagttgactatctttatttaggtaaaaaaa

SEQ ID NO: 212585 - DNA, 469 bp, Unknown
  Bacterial polypeptide expressing nucleotide sequence isolated from the Sargasso Sea
aatgagcatcagaccttttagagacataaaaagacgaaagaccaaaactatcaatgtaggcaatgtcaaagttggaggtgaaaatcctatatcagtgcaatctatgactaatactttaacgtcagatattaagagtacaattaaacaaattcaagaaatacaatctgaaggagctgacatagttagagtttcttgtcctgatgagtcatcttcaaaagcacttaaggaaattatcaaacatgttgatattcccatagtcgcagacatacatttccattataaaagagcaattgaagctgcagaaaatggagcaagttgtttaagaataaatcctggaaatattggggataaaaaaaaaattattgaagtaattcaatctgctaaagataataattgttcaattagagtaggtgttaatgctggttcattagagaaagatatattagaaaaattcaaagaaccttgcccg

SEQ ID NO: 212586 - DNA, 687 bp, Unknown
  Bacterial polypeptide expressing nucleotide sequence isolated from the Sargasso Sea
aatgagcataagaccatttagagacatcaaaagaagaaaaacaaaagtaattaatgtaggtaaagttaaagtaggaggagataatcctatatctgtgcaatcgatgactaatactctcactacagatataaaagccactattaatcaaatcaatgaaatttacagtgaaggtgccgacatagtaagagtttcttgtccggacgagtcatcttctaaagctttaaaagaaattatcaaacatgttgatgtgcctatagtagctgatattcattttcattacaaaagagcgattgaggcagcaaagagtggagcaagttgtttaagaataaatcctggaaatattggcaatataaataagattaaagaagtggtaaaggcagcaagagataataattgctctattagagtaggtgttaatgctggatctttagaaaaagatattttagaaaaatacagagaaccttgtcctgaagctttagttgagagtgcattgagaaatattaagatactagaagatgaggatttcaataatttaaaaataagtgttaaatcttctgatgttttcttatcaatagaagcctatcgtcagttgtcaaaggctactgattatcctcttcatttaggaattacagaggcaggaggttttatacctgggagcataaaatcctcaattggattaggtacatt

SEQ ID NO: 212587 - DNA, 601 bp, Unknown
  Bacterial polypeptide expressing nucleotide sequence isolated from the Sargasso Sea
atggaacgttcatatcaaaaaattgatagacgtaaaacacgtactataaatgttggaggtttaaaaattggaggtaagaatccaatattagtccaaactatgactaatacaccaacagttgatattaaatccaccttagcacagataaaaagggttacagatattggtgctgatatagttagagtatcagttccagataaaagttcaacagaggctttaaaagaaatttgtaagaaatcccaagtacctattattgctgatattcattttcattatttaagagctgtggagtcagcaaaaaatggcgcatcctgtttaagaattaatccaggtaatataggctctaaagaaaagattaaggaagtaattaaagcagctaaggataatgaatgttctattcgaataggtgtaaatggaggaagtctagaaaagaaaattttagaaaaatattctgaacctaaccctgatgctcttattgagagtgcaataaataatattaaaatattagaagatcatgatttttataatttcaaaataagtgttaaggcctctgatatttttttagctactaaatcttatgaaggtttatctgagctttgtg

SEQ ID NO: 212588 - DNA, 853 bp, Unknown
  Bacterial polypeptide expressing nucleotide sequence isolated from the Sargasso Sea
taaagatattgatgtacctattgtagctgatattcattttccttttaaaagagcaattgaagcagcagtaaatggagccagttgtttaagaattaaccctggtaatattgggagtatcaataaaataagagaagtaattaaagctgcaagagataacaattgctccataagggtaggagtaaacgctggttctttggaaaaagatattttagataaatataaagaaccttgtccagaagctttggtggaaagtgctttaagaaatattaaaattttagaggatgaggactttagcaatttaaaaataagtgtgaaatcttcagatgtgttcttgtctatagaagcatatcgtcaattatcaaaagctactgattatccgttacatttaggaataactgaggcgggaagctttataccagggagcataaaatcctctattgggataggttcgttactgttagagggcataggtgatacaataagaatttccttatcagataacccagtagaggaggtaaaaattggaaatgagatattaaaatccttaaatttaagggagagaggtgtaaaaataatttcatgcccgtcatgtgcgagacaagggtttcaagtaatagaaactgttaaaattttagaggagaaactttcacacattaaaacacccattactctttctgtgattggatgtgttgtaaatggtcctggtgaagcagcaatgacagatgtaggaattactggaggtaataaaggtagcaatatgctttatttgtcaggtgtccaatctgaaaaagtaatgactaaagacatgatcgataaagtagtgactgaggtagaaaaaaagcctctgagttaa

SEQ ID NO: 212589 - DNA, 762 bp, Unknown
  Bacterial polypeptide expressing nucleotide sequence isolated from the Sargasso Sea
gactaatacactaacgaaagatattagtagtacaattaatcaaatagaaagaatagttaattgtggagctgatttagttagattatctatacctgacaaagattcttcagaagcattaagatatatttgtaaggagactaaaattccgattatagctgatatacattttcattacaaacgtgccctagaagcagcagataatggagcagcatgtttgcgaatcaatccaggaaatataggttcaatagaaaaaattaaagaagtaataagggcggcaaaaaataataattgttctattcgtataggcgttaatggtggaagtttagaaaaaaaaatacttgaaaaattttcagaaccaaatccacaagctttaatagaaagtgcaattttaaatatgaaaatattagaagataatgattttaccaatttcaaaattagcgttaaatcttctgatgtatttatgactataaaagcatatgaaggtttggcagatatttgtgattatccacttcatattggaattactgaagctggaggtttaagagccggttcaattaagtcatctattgggttaggcaatttgttaatgaaaggtattggagatacaattagggtttctttatctgatgagcctgaagaagaaataaaagtaggatttgaaatcttaaaaagtttaagtttgcgaaatagaggaataaagataattgcttgtccgtcatgtgcaagacaacaattcccagttattgatacagtaaaaaaatt

SEQ ID NO: 212590 - DNA, 376 bp, Unknown
  Bacterial polypeptide expressing nucleotide sequence isolated from the Sargasso Sea
aatgagcataagaccatatagagatataaaaagaaaaaaaacaaaagttataaatgttggtaaagtaaaaattggaggcgataatcctatatcggtccaatcaatgactaacactttaactactgatataaaaaaaactataattcaaataaatgaaattcaaagtgaaggtgctgatttagtcagagtttcttgtccagatgaagaatcatcaaaatctttaaaagaaattactaagcatgttgatataccaataattgctgacattcattttcattataaaagagcaatcgaggctgctgaaaatggagctagctgtcttagaattaatccaggcaacataggagatgaaaaaaaaattcacgatgttttacaa

SEQ ID NO: 212591 - DNA, 772 bp, Unknown
  Bacterial polypeptide expressing nucleotide sequence isolated from the Sargasso Sea
gggaatattggagataaaaaaaaaattggttgaagtaattaaatctgctaaagataataattgttcaattagagtaggagtcaatgctggttcattagagaaagatatactagaaaaatttaaagaaccttgtccggaggcattggtagaaagtgcaataagaaatattgaaattttagaggatatggatttttcaaatttaaaagtaagcgtaaaatcttctgacgtctttttatccgtagaggcttatcgtcaactttcaaagaaaatagattatccacttcacttgggaatcactgaagctggtagttttatatcagggagtattaaatcctcaattggcctaggaattctccttaaagagggaattggagacacaataagggtgtctctttctgatgatccagtaaaggaggtggcgattggaaatgagatacttaaatcattgaatcttagaaataggggagtaaagattatttcctgtccatcctgtgcaagacaaggttttcaagtaattgatactgtaaagatcttagaggaaaaattatcacatattaagacaccaatcactctctcaattatcggatgtgttgttaatggtcctggggaggctgcgatgacagatataggaataacaggtgggcaaaaaggaagtaatatgctttacctttctggtgttcaaagtgaaaaagttatgacagacgaaatgataacgagagtgattcatgaagttgaaaagaaagcttccgaattagagaacaattcaaaatga

SEQ ID NO: 212592 - DNA, 844 bp, Unknown
  Bacterial polypeptide expressing nucleotide sequence isolated from the Sargasso Sea
atgagtataagaccatttagagatattaagagaaaaaaaacaaaagttattaatgtaggcaaagtaaaagtaggtggagataatccaatatctgttcaatctatgaccaatactttaactactgatgtcaaagctacaataaaacaaattaatgaaattcaaagtgaaggagctgaccttgtaagagtttcttgcccagatgaatcatcatcaaaagctttaaaagaaattattaaacatgttgatatacctgtaattgcggatattcattttcattataaaagagcgattgaagctgcagaaagtggtgctagctgtttaagaataaatccaggtaatataggagataaaaaaaaaattcatgacattttacaagctgcaaaagataataaatgctctattagaattggggttaattcagggtctcttgaaaaagatattttggaaaaatataaggagccttgtccagaggctttagtagaaagtgccttaagaaatataaagattttagaagatcagaatttttttaattttaagataagcgttaaatcatcagatgtatttttatctatcgaagcttacaggcaactttcaagagtcactgattatcctttacaccttggaattactgaagcaggaagctttatttcaggtagtattaaatcttcaataggcttaggctcacttttattggatgggattggtgatactattagaatttctttatctgatgacccagttaaagaggtcacaattggtaatgaaattttaaagtcattaaatttaaggaatagaggtgtaaaaattatatcttgtccatcatgcgcaagacaagcttttcagg

SEQ ID NO: 212593 - DNA, 393 bp, Unknown
  Bacterial polypeptide expressing nucleotide sequence isolated from the Sargasso Sea
aatgaacataagaccatttcgagatattaaaagaaaaaaaactaaaaaaattaaagttggtaaaattgaagtaggtggtgatgcacctatatcagtccaatcaatgacaaatactttaacaacagatgtagacgcaacaattaaacaaataaatgaactaaccgaagccggagcggatatagtcagagtgtcatgtcctgacaaagattcatctttatcactaaaaaaaattataaaacaagtagatgtaccaatagtagctgatattcactaccattatgctagggcaatagaggctgcagagtccggtgcacattgtttaagaataaatcctggtaatattggttctaaaaaaagagttcaagaaattattaaggcagcaaaagataataa

SEQ ID NO: 212594 - DNA, 439 bp, Unknown
  Bacterial polypeptide expressing nucleotide sequence isolated from the Sargasso Sea
atgagcataagaccttttagagatattaaaagaagaaaaacaaaagtaataaatgttggaaaagtaaagatcggtggtgataaccctatttctgtgcaatcgatgaccaatactttaactacagatgttaaagcaaccataaatcaaattaatgatatagccgaagagggcgctgatattgtaagagtttcttgtcctgatgagggctcaacattagccttgaaggaaataataaaacacgtttcaataccagtagttgcagacattcattttcattacaaacgagctattgaggcagctgaaaatggagctagctgtttaagaattaatccaggaaatattggggatgaatcaaagatttatgaggttttgaaagctgcaaagaataatgattgttcaataagaagtggagtaaatgcaggttctttagaaaaagata

SEQ ID NO: 212595 - DNA, 907 bp, Unknown
  Bacterial polypeptide expressing nucleotide sequence isolated from the Sargasso Sea
cggtgctgatatagtgagggtttcagtgccaggatttgacgaagctaaagcattcaaagaaattaaaaaattatccaagattccattagtagctgatatacattttgattataaaatagctctcgaggttgcagatacagcggattgtttaagaataaacccaggtaatattggtaaagaagatagagttaaggaagtaattagcgcagcaattgataataatgttccaataagggttggagtaaatgcaggatctttagaaaaagatctacaaaaaaagtatggagaacctaatgcagatgccttagtagaatcagctttgaggcatgtagaaatattagataagtttaattttgataactataagatgagccttaaagcttcaaatatagagatgacggttgatgcatatcgcaaaatatcgaatcttattgatcaacctttacacttaggaattactgaagcaggaagctatagggctggtacagttaaatcatccattggtgttggaatgctgctttcagaaggtataggcgatacaattagaatatcattggcatcagaccctgttgatgaaattaaaattggatgggatatcttaaaaagtttaaatataagaagtaggggggtcaagattgttgcttgtccaagctgttcaagacaaaattttaatgtgatcaaagtagtcaatgagcttgaacaaagacttgaagatgtttctgaggatatagaagtagctattattgggtgttatgtaaatggaccaggagagagcaaggctgcgaatattggattaacaggagcaagtccaagtaatcttttatatgttgacggctctcctaataaaaaaatttcaaatgaaaatcttgtagatgagctagaagagcaagttaggaataagatataa

SEQ ID NO: 212596 - DNA, 691 bp, Unknown
  Bacterial polypeptide expressing nucleotide sequence isolated from the Sargasso Sea
aatgagtgttaggccatttagagatatcaacagaagaaaaacaaaagtaataaatgttggtgatgttaaaatagggggagacaacccaatttcggttcaatcaatgaccaacactttaacaactgatgttaaagcaacaataaatcaaattaatgatattgcagaggaaggggcagatattgttagagtttcatgcccagatgtagagtcaacaaaagcacttaaagaaatagttaaacatgtatcgatcccggtagtagcagatatccattttcattataaaagggcaattgaagcagctgaaaatggagctaaatgtttaagaataaatcctggaaatattggtgatgagtcaaaaattcatgatgttctaagtgctgcaaagaataatggctgttcggtaagaataggagtaaatgccggatcattagaaaaagatatattagataggtttaaagaaccttgtcccgaagctcttgttgaaagcgctttaagaaatatgaaaatattagaagataaaaattttttcaatttcaaaataagcgttaagtcttctgatgtttttttatctattggtgcttacagacaattatctaaagtatgtgactatcctctccatttaggaattactgaggctggaagttttgtgtcaggaagtataaagtcctctattggacttggtagtctatta

SEQ ID NO: 212597 - DNA, 859 bp, Unknown
  Bacterial polypeptide expressing nucleotide sequence isolated from the Sargasso Sea
aatgtgagtattggtggaaataatcaaattgcagttcaaacaatgactaatactttaacttctaatgcaaaagacactttagagcaaattgaaagatctgcaaaacttggtgttgatatagtacgtgtttctgtgccagacaaagaatcctcaaattctttaaaggaaatagctaagcatagttctgttccaattattgcagatatacattttcattatcaaagaggaattgaggcagcaaataatggagcgtcatgtattagaatcaatcctgggaacattggtagtattgatagaataaaagaagttataaaagctgcaaaggataataattgttcaataagagttggcgtgaatgcaggtagtttagaaaaacaaattttagaaaaattttcagaacctacaccagaagcgttagtagaaagtgctaaattgaatattaagatacttgaagataatgatttcactaattttaaaattagtgtgaaatcttcagatatatttatgtctataaaagcatatgagcaattagccgaattatgtgattatccattgcatttaggtatcacggaagctggaggaaaaagaacaggttcaattaaatcttcaattggagtaggaaatctacttctgaaaggaataggagatactattagaatatccctgtcagatgaaccagaagaagaggtaagagttggttttgaaatcttaaaaagcttaggattaaggaataggggtgtaaaaattatatcatgcccttcatgtgctagacaacaatttgaagtaataaaaactgtaaaaaatttagaaagaaaattagatgatatttcaactcccataacagtatcaataattggat

SEQ ID NO: 212598 - DNA, 481 bp, Unknown
  Bacterial polypeptide expressing nucleotide sequence isolated from the Sargasso Sea
atggaaatcaggcctcatagaataatccacagaaggaaaacaagaaaaattaaagtaggcaatatttctattggaggaaactcacctataagcattcagtctatgacaaatactctcactactgatattaagaaaacaatcaatcaaattcactcgttagaagatgctggagtagatattgtgagagtttcctgtccagatgagaattcaacaaaatctctaagagaaattgtaaaagaagttaaatcacctatagtagcagatatacattttcattataaaagagcaattgaggctgcggaaatgggagccagctgtttaagaattaatcctggaaatattggatctaaaaatagagttctggaggttgtgaaagctgcaaaagataataattgttctatcagaattggagtaaacgcagggtctttagataaagaacttcttgaaaagtataaagaaccatgtcctgaagctttagttg

SEQ ID NO: 212599 - DNA, 784 bp, Unknown
  Bacterial polypeptide expressing nucleotide sequence isolated from the Sargasso Sea
aattctaaagttattaatgtaggtgaagtaaaagttggtggagataatccaatatctgttcaatctatgacaaatactttaactactgacaccaaatcaactattgaacaaataaataaaatttgtgaagagggtgcggacttagtaagagtttcttgccctgatacaagttctacaaaagcattgaaagaaatcacaaaacattctcaagttcctattattgcagatatacattttcattataaaagagcaattgaagctgctgagaatggtgcaaagtgcttaagaattaatcctggcaatataggagatgaaaaaaaaatacatgaagtactgagtgcagcaaaaaataacaattgttcaataagaataggagtaaacgccgggtcattagaaaaagatattttggaaaaatataaagaaccttgtccagaagccttagttgaaagcgcagaaagaaatataaaaattcttgaagataaagatttttttaatttcaaaataagcgtaaaatcttcagatgtatttttatcaatagcttcttatcgattactatctaaaaaatgtaattatcccttgcatttaggcattactgaggctggagcgtttattcctggaagtataaaatcatcaattggtcttggtgctcttcttttagaaggaataggggacacaataagagtatctctttcagacgatccaattcaggaagtcaaaattggaaacgaaattttaaaatctttaaatttgagagataggggagttaaaataattgcatgtccta

SEQ ID NO: 212600 - DNA, 790 bp, Unknown
  Bacterial polypeptide expressing nucleotide sequence isolated from the Sargasso Sea
tcttgtattagaattaatcctggtaacattgggaatattgaaagaataaaagaagtcatcaaagctgcaaaagataataattgctcaattagagtaggtgtcaatgcaggaagtttagaaaaacaaattttagaaaaattttctgaacctaatccagaagccttagttgaaagtgctaaattaaatataaagatacttgaagataatgattttaccaacttcaaaatcagtgtgaaatcctcagatatttttatgtctataaaagcatatgagcaattggctgaattatgtgattatccattgcatttaggtattacagaggcaggaggaaaaagaacaggctcaattaaatcttcaattggagttggaaatttacttttgaaaggaataggggatacaatcagaatatcattatcagatgagccagaagaagaggtaagagtaggttttgaaatattaaaaagccttggattaaggaatagaggtgtaaaaattatatcatgcccttcatgtgctagacaacaatttgaagtaataaaaacagtaaaaaacttagaaaaaaaattagatgatattgccacgccgataacagtgtcaataataggatgtgttgttaatggtccaggtgaagcaactatgacaaatattggaataactggcggtggaaatgatacacatatgatttatcttgatggtaaaaaaaataatgttgtaaaaaatgttgatttagaaaattatcttgaagatctaattagaaaaaaaacaaaagaaatagaacttagtaattaat

SEQ ID NO: 212601 - DNA, 535 bp, Unknown
  Bacterial polypeptide expressing nucleotide sequence isolated from the Sargasso Sea
gtcccgcaaggcacgaagaaggacgagctcgccctgtcgttgggcatgcgcgccggcgctttactaggggatggcttgggagacgggttactggtcgagccggacgaccacagcgactttgatttgaactacctgcgggagacgtccttcgcgctgctgcaggggtcgcgcatgcgcaacacgaaaaccgaattcgtgtcctgtccgtcctgcgggcgcacgttatttgatctccaggaagtcacggcccagatctcggagaagaccggtcatctccccggcgtggccatcgcgatcatgggctgcatcgtcaacggcccgggcgagatggccgacgccgacttcggctacgtcggcggcgcgccgggcaaggtcgacctgtacgtgggcaaggaggtcgtccagaaggcgatcccgaacgaggaggcctgcgacgcgctcgtcgagctcatcaaggagcatggcatgtgggtggacaagccggatcaggccgaggaggacgcgcccgtcgaggccgagctcgcggccgcgtgag

SEQ ID NO: 212602 - DNA, 708 bp, Unknown
  Bacterial polypeptide expressing nucleotide sequence isolated from the Sargasso Sea
gctcaatcagagtaggtgttaatgcaggaagtttagaaaaacaaattttagaaaaattttctgaacctaatccagaagctttagttgaaagtgctaagttaaatataaagatacttgaagataatgatttcactaatttcaaaataagtgtgaaatcctctgatatatttatgtctattaaagcatatgagcaattagctaaattatgtgattatccattgcatttaggtattacagaagcaggaggaaaaagaacaggttcaattaaatcttcaattggagttggaaatttacttttgagaggaataggagatacaattagaatatcattatcagatgagcctgaggaagaggtaagagttggttttgaaatcttaaaaagcttaggattaaggaatagaggtgtaaaaattatatcatgcccttcatgtgctagacaacaatttgaagtaataaaaactgttaaaaatttagaaaaaaaattagatgatatttcaacacctataacagtgtcaataattggatgtgttgtgaatggaccaggtgaagcaactatgacaaatattggaataactggcggtggaaatgatacacatatgatttatcttgatggtaaaaaaaataatgttgtaaaaaatgttgatttagaaaattatcttgaggatctaattagaaaaaaaactaaagaaatagaacttactaattaat

SEQ ID NO: 212603 - DNA, 871 bp, Unknown
  Bacterial polypeptide expressing nucleotide sequence isolated from the Sargasso Sea
ggatacaatccaatttcagttcaatctatgaccaatacattgacaactgatgtgttggcaacaattaaacaaattcaagaaattcatgaggaaggtgctgatattgttagagtgtcttgtccagatgaagactcttcaaaagctttaaaagaaatcactaaaaatgttcaaattccaataattgcggatattcatttccattataaaagggctattgaagctgcagaaaatggcgcaaagtgcttgaggattaatcctggaaatattggtgaaaaaaataaaatttatgatgttttgaaagccgcaaaagataatgattgctcagttagaataggtgttaatgctggttctttagaaaaagatatacttgaaaagtataaagaaccatgtccagaagcattagtggagagtgctttaagaaatataaaaattttagaagataaagatttttttaattttaaagtaagtgttaaatcttcagatgtatttttatctatcgcagcttacagacagctttctaaagtaacggagtatccattacatttaggaataacagaagctggaagttttgttacaggaagcgtcaagtcttcaataggtcttggttcattacttttagatggtattggtgatactataagagtgtctttatctgatgatcctgtacaagaagtaaaaattggaaatgaaatacttaagtctctgggattaagaaatagaggtgtaaaaataatatcttgtccatcttgtgctagacaggcttttcaagttattgacacagtaaaaatattagaagaaaaattatcccacataaaaacacctataacactgtcaattattggttgtgttgtaaatggaccaggagaagccg

SEQ ID NO: 212604 - DNA, 580 bp, Unknown
  Bacterial polypeptide expressing nucleotide sequence isolated from the Sargasso Sea
aatggcaaatcattctccaataactagacggccaagcagacagattatggtgggcaatgtccctgtcggtggtgatgccccgatcgcagttcagagtatgacaaacaccgagacttgtgacgttagtgctacagttaatcaggtaaacgatatcgctggtgctggcgccgacatggttagagtctctgtacccagcatggaagcagcagaagcgtttagggaaattaggcggcaagtttcagtcccgctaattgcagatatacattttgatcacaaaatcgcgctaaaggtagccgagtatggtgtggactgtcttcgaattaatccgggaaatatcgggcgggacaataaggttagagaggttatagattgcgccagagacaaggggattcctatacgaattggtgttaatgcaggatcccttggaaaggaactattgcggaagtatgctgaacctaacgccgaggccttggttgaatcagcactgaggcacgtatcgattttagacaaattcgattatcaagatttcaaagtcagtgtgaaagcctcagatgtatttatggccgttgatgcctatcgc

SEQ ID NO: 212605 - DNA, 709 bp, Unknown
  Bacterial polypeptide expressing nucleotide sequence isolated from the Sargasso Sea
cgcaccgctggtcaccctgttgagggatcagaacaaggctctgcgcatcggggtgaaccatggctccctggcggagcgaatgctgttcacctacggcgacacccccaagggcatggtcgagtcggccatggaattcgtgcgcatctgcgatgagctcgacttccacaacatcgtgatttcgatgaaggcgtcgagggcgccggtgatgttggcggcctaccgcctgatggcggacaccatggacaaagagggattcaactaccccctgcatctcggtgtgaccgaagccggtgacggcgattacggccgcgtcaagagcacggcgggaattgcgacgttgctggccgatggacttggcgacaccatccgggtgtccctaaccgaggcgccggaacgggaaatccccgtctgttactcgattcttcaatcccttggtctgcgcaagaccatggttgagtacgtggcctgccccagctgcggccgcaccttgttcaatctcgaagaggtgctgcataaggtccgggaagccacgtcccatctcacgggactggacatcgccgttatgggctgcatcgtcaacggcccaggtgagatggcagatgcggactatggctatgtcggcaagacaccgggtgtgatttcgctgtaccggggtcgcgacgagatccgcaaggtgcccgaggaggacggcgtcacggctttgatccag

SEQ ID NO: 212606 - DNA, 847 bp, Unknown
  Bacterial polypeptide expressing nucleotide sequence isolated from the Sargasso Sea
gtctccgttccgacgatggatgcagcggaagcgttcaggcttatcaagcagcaggtcaacgtcccgctggtcgccgatatccactttgactaccgtatcgccctgaaagtggcggagtacggtgtggactgtctgcgtatcaacccgggcaacatcggtaacgaagaacgtatccgcatggtggttgattgcgcccgcgataaaaacattcctatccgtatcggcgtcaacgccggttcgctggaaaaagatctgcaggaaaagtacggcgaaccaacgccgcaggcgctgctggaatcagctatgcgccatgtcgatcatctcgatcgtctcaattttgatgagtttaaagtcagcgtgaaggcctccgatgttttcctggcggtagaatcgtatcgtctgctggcgaaacagatcgatcagccgctgcaccttgggatcactgaagccggcggcgcgcgtagcggcgcggtgaagtcggcgatcggcctggggctgctgctgtctgaagggatcggcgacaccctgcgcgtttccctggcggcggatccggttgaagagatcaaggtcggtttcgacatactgaaatccctgcgcatccgcgctcgcgggatcaacttcatcgcttgcccgacctgttcgcgtcaggagttcgacgttatcggcaccgttaacgcgctggaacagcgtctggaagacattattacgccgatggatatttcgattatcggctgcgtggtgaacggtccgggcgaagcgctggtttcgacgcttggcgtgaccggcggcaataaaaaaagaggcctctatgaagatggcgtgcgtagagacaggctgacaacgacga

SEQ ID NO: 212607 - DNA, 407 bp, Unknown
  Bacterial polypeptide expressing nucleotide sequence isolated from the Sargasso Sea
aatgaatataagaccatttagagaaataataagaagaaaaactaaagaaataaatgttgggcatgttaaagttggcggagataatccaatttcagtccaatcaatgacaaacactattacaaaaaatgttaaagaaactgttaatcaaattcaaagaatagagcaagagggggctgatattgtaagagtatcctgtccagatcaagattctacaaaagctctaaaagatataattaagcatacctcattaccaatagttgcagatattcactttcattataaaagagctatagaggcagcagaaagtggagctgcttgtcttagaataaatccagggaatattggagatcgaaacaaaatcaaggaaataatctctgctgcaaaaaataataattgtgcaattagaa

SEQ ID NO: 212608 - DNA, 766 bp, Unknown
  Bacterial polypeptide expressing nucleotide sequence isolated from the Sargasso Sea
aatgagcattagaccttatagagatattaaaaggaaaaaaaccaaagtaattaaagttggaaatgtaaagattggtggaaacaatcccatttctgttcagtcaatgacaaatactttaacaacaaataccgctgcaaccattaaacaaattaatgaaattcaaaatgagggagctgatatagtaagagtttcatgtcctgatgagtcttcatcaatagctttaaaagaaattataaaaaatgtagatatacccatcattgctgatattcattttcactataaaagagcaattgaagctgcgaaaagtggtgcaagttgtttaagaattaatccaggaaatattggagataaaaaaaaaatttatgaagtattacaatcagcaaaagataataattgctcgattagaataggtgtcaatgctggatcactcgaaaaagatattcttgagaaatataaagaaccttgcccagaagctttagtagaaagtgctttaagaaatattaaaatattagaagatcaagattttttaaactttaaaattagtgttaagtcttcagatgtttttttgtcaatagaggcctataggcaattatctaaagtgactaattatccattacatttaggaattacagaagcaggtagttttacatctggcagtgttaaatcttcaataggtataggatctctcttattagatgggataggtgatacaataagagtatctttgtctgatgatcctgtaaaagaggtaaaaaattggaaatga

SEQ ID NO: 212609 - DNA, 849 bp, Unknown
  Bacterial polypeptide expressing nucleotide sequence isolated from the Sargasso Sea
caataattgcagacattcatttccatcatatgcgagctattgaagctgcagaaaatggagctaaatgtttaagaataaacccaggaaatattggagataaaaaaaaaatttatgacgttttaagtgcagcaaaaaataataattgttcgataagaattggagttaatgcaggatctttagaaaaagatattttggaaaaatttaaagaaccatgccctgaagcactggtagaaagtgctttaagaaatattaaaatattagaggatcaaaacttcagtaactttaaaataagcgttaaatcatcggacgtttttttatcaattgcagcttacaagcaattatctaaagttactgattatccccttcatcttggaataaccgaggctggaagctttgtaagtggaagtataaaatcatctattggattaggaactcttttattagatggaattggagacacaattagagtctccttatccgatgatccagtacatgaggtaaaaataggaaatgagattttaaagtcattaaatttgagaaatagaggggtaaaaataattgcatgtccatcatgtgctagacaagcattccaagtaattgatacagttaaaatacttgaggaaaaactctcacatataaaaactccaataacactatcaattataggatgtgttgtaaatggacctggcgaagctgctatgactgacataggaattaccggaggaggcaaaggaagcaatatgctttatctctctggaatccaatcggaaaaagttctaactaaaaatataatatccaaagttgtaagtgaagtagaaaaaaaagcatctgagctagaaaaaaaataaa

SEQ ID NO: 212610 - DNA, 493 bp, Unknown
  Bacterial polypeptide expressing nucleotide sequence isolated from the Sargasso Sea
gggttgcggtcgggtacgattaaatcagccattggtctaggcaatcttttatgggcaggcatcggtgacacgatccgcgtgtcgttgtctgctgatccagttgaagaagtaaaagccgggtatgaaatgttgaaatcgctgggcttgcggcgccgcggggtcacggtgatttcttgtccatcttgtgcgcgccaacagtttgacgtgattaaaacggtgcaaattatagaagagcgtctcgaacatattgacttacccattaccgtatcgattatcggttgtgtggtaaatggtcctggagaggcacgtgagactgatattggtttgactggtggcggcaaaggcacgcaccagatttatctctcaggcatggctgatcatcggttaacaaatggcgacattgtcgaacatgtcgtcgatttggtggaaacgcgcgttgcggaaataaaggcggcggttgccgctgcagatatcagtgaaaaggcgtcgtaaa

SEQ ID NO: 212611 - DNA, 880 bp, Unknown
  Bacterial polypeptide expressing nucleotide sequence isolated from the Sargasso Sea
aatgagtattagaccatttagggatattaaaagaaaaaagactaaagaagttaaagttggaaatgttttcataggcaatgataatccgattacagttcaatctatgacaaacacacttacaacagatgtgaaacaaaccttaaatcagattaatgatatagctaacgaaggagctgatttagtaagagtttccattccagatgaaagtagctctaaagccctaaaagaaattgtaaaacattcatcaatcccaataattgcagatatacactatcactacaaaagagctttagagtcagctgacaatggtgccaaatgtttgagaattaatccaggaaatattggagacataaaaaaaattagagaagtaatttctgctgcaaaaaataatgactgtgcaataagaataggagttaacgctgggtcattagaaaaagatattttagaaaagtacaaagaaccatgtccagaagctttagtagaaagtgctttgcaaaatattaaaattattgaagatcaaaatttttttaattttaaagtaagtgttaaatcttcagatgtttttttatctatagctgcatatagacagttatcaaaagtaacagattatccccttcatcttggaataactgaatctggaagttttatacctggaagtataaaatcatcaataggtcttggaatattacttttagaggggataggagacacaattagagtatctttatcagacgacccagtaaaagaagttaaaattggtaacgaaattttaaaatcattaaatctaagagataaaggagtaaaaataatttcgtgcccttcatgtgctagacaaggatttgaagtaataaatacggttaaaatattagaagaaaagctt

SEQ ID NO: 212612 - DNA, 277 bp, Unknown
  Bacterial polypeptide expressing nucleotide sequence isolated from the Sargasso Sea
ctgcgggcacaaatgcccgtgtggcgtgtgcgatatccgggcgtggagactttacgggtggcggtcatgggttgcatcgtcaacggcccgggtgaaagcaagcacgcggacatcggtatcagccttccaggcacgggagaggcgccagccgccccggtctttatcgacggggaaaaggcaatgaccctgcgcggcgacgacattgccaatgagtttcatcgcatcgtcgagcagtacatcgaaaagcgttttggcgctggagtcgctgctgtttgaa

SEQ ID NO: 212613 - DNA, 988 bp, Unknown
  Bacterial polypeptide expressing nucleotide sequence isolated from the Sargasso Sea
gaggttgggggccgatatagttagagtatcttgtcccgacgaagactcaacaaaagctcttaaagatatagttaatgaagttaaagttccaattgtagcagacatacattttcattataaaagagctatagaggcagcaaaaatgggagcaagttgtttaagaattaatccagggaatattggatctaaagatagaattttagaagtagttaaagctgccaaagaccataattgttccataagaattggagtaaatgcaggttcattagataaagctttactagaaaaatacaaagagccctgtccagatgcacttgtagagagtgcaatgtataatgtaaaactattagaagataatgatttctttaattttaaaattagcgttaaatcatcggatgtttttttaacagtcaaagcttatagaaaattatcaaaagaatgcaattatcccttgcatctaggaatcactgaagccggggggcttattactggcagcataagatcctcaattggaattggtcaattacttatggatggtataggagatacgataagagtttcactttcttctgatcctgtagatgaaataaaatcaggctatgaaattttaaaatcattaggaatcagatcaagaggagtaaatattatctcctgtccatcttgtgctcgtcaagcttttccagtaattgagacggtaaaagagttagaaaaaaaattatctcatgtaaaaaaaccaataaccttatctataataggatgtgttgttaatggcccaggtgaggcagcacaaaccgaaattggtttaacaggcggaggtcaagataataatcttttatatttatcaggtataccacatactaaagtagccagcactgagataatagacaaagtcgtccagctagttgaagagaaagttaaagaaaaaactaaattaataatgatacccaaagataaagtggcagaattattgcaaagcatgatgatttag

SEQ ID NO: 212614 - DNA, 538 bp, Unknown
  Bacterial polypeptide expressing nucleotide sequence isolated from the Sargasso Sea
atgagcataagaccttttagagatataattagaaaaaataccaaagtaattaaagttggaaaagttaaagttggaggcgataacccaatttcagtccagtcaatgacaaatacattaaccaaagatgttaaaaaaactgttgagcaaataaataatatgtcagaagctggagctgatattgttagagtctcatgccctgatgaggaatcaacaaaatcattgaaagaaataattaagaatgtagatgtgccaattgttgcagatatacattttcattataaaagagctatcgaggctgcggaaaatggtgcagcatgtcttcgaattaatcctggtaatattggcgatgaaaataaaataaatgaaattataaaagctgccaaaaataatgaatgttcaattagagttggagtaaacgctggctctttagaaaaagatatattggaaaaatttaaagaaccatgtccagaagctttagtagaaagtgccttaagaaatattaaaattttagaagataaagatttttataattttaaat

SEQ ID NO: 212615 - DNA, 958 bp, Unknown
  Bacterial polypeptide expressing nucleotide sequence isolated from the Sargasso Sea
tcagatgttctagctactgttaatcaaattaatgaattacaagcagcaggtgctgacatagtcagagtatctgttcctggttttgacgaagccaaagcctttaaagaaataaaaagtattgtaactattcctttagttgctgatattcattttgattacaagattgccattgaggttgctgattctgctgactgtttaagaatcaatcctgggaatattggaaaagaatcaaaaattaaagaagttattactgctgcattagataatgatgttccaataagagtaggagtaaatgctggctcgcttgaaaaagatctacaaaaaaaatacggcgaacccaatgctgatgcattggttgaatcagctctaagacatgtagacatattagatagatttaactttgataactacaaaatgagtcttaaggcttcaaatattgagatgactgttgatgcatatagaaaaatatctaatttgattaatcagcctcttcatttaggcattactgaggcgggcagttttcgtgccggtacagtaaaatcttctattggagttggaatgcttttatctgagggcataggagatactattagaatatcactagcatctaatccggttgatgagattaaagttggttgggatattttaaaaagtcttaacatcagaagcaggggagtaaaaattattgcatgtccaagctgttctaggcaaaactttaatgtaattgaggttgttaatgagttagaagagagattagaggacatatctgatgatattgaggttgcagttataggttgctacgtaaatggtcctggagaaagcaaggcagcagaaattggtttaactggagcaagtccaaaaaatttactttatgttgatggtatgccagataaaaaaattagcagtgagaacttagtcaaagagatagaagaaaaagttagagaaaaactgtactaag

SEQ ID NO: 212616 - DNA, 436 bp, Unknown
  Bacterial polypeptide expressing nucleotide sequence isolated from the Sargasso Sea
atgagtttaagaccttacagagatatattaaaaagaaaaactaaagaaattagtgtaggcaacgtcaaaattggaggtcaaaatccaatatcagtacaatcaatgacaaatacacttactacagacataagtgcaactatgaaacaaattgaagaccttatagatgagggagcagacttggtaagagtgtcttgtcctgacgaaggatcgactaaagctcttaaagaaatatgtaagcattctaaagtaccaataattgccgacattcattttcattataaaagagctttggaggccgcagataacggagcaaaatgtttacgagttaatccaggtaatattggtaataaagataaattaaaagagattattaaatctgcaaaatataacgattgctcaataagaattggggtaaatgctggatctttagagcaag

SEQ ID NO: 212617 - DNA, 625 bp, Unknown
  Bacterial polypeptide expressing nucleotide sequence isolated from the Sargasso Sea
atggagtctaaatgtttaaggataaatcctggtaatataggtgaggagtcaaaaattcatgatgttctcagtgccgcaaagaataatggttgctcggttagaattggagtaaatgctggatctttagaaaaagatatattggataagtttaaagaaccttgtcctgaagctctcgtggaaagtgctttaagaaacataaaaatattagaagataaagatttttttaattttaaaataagcgttaagtcttcagatgttttcttatcaattggtgcttacagacaattatctaaagcatgtgattatcctcttcatttaggcatcactgaggctgggagttttgtatctggaagtataaagtcttctataggacttgggagtcttttaatggacggaatcggtgacacaataagaatttctttatcagataatcctataaaagaaataacaataggaaatgaaattctaaaatcattaaatctaagaaatagaggcgttaaaatcatatcatgtccctcttgcgcaagacaagctttccaagtaattgatactgtaaaaatattagaaaaaaaactttctcacataaaaacacctataaccttgtcaataataggatgcgtgtaaa

SEQ ID NO: 212618 - DNA, 289 bp, Unknown
  Bacterial polypeptide expressing nucleotide sequence isolated from the Sargasso Sea
gatggccgaagacatcacgtcatatattcgtgagatgatgcctagctggaagaaatccttccccggtgtcgaacagatggatgtagctgtcatgggttgtgtggtgaacggacccggagagtctaagcacgccaacatcgggatctctctgccgggcacatttgaagagcccaaggctccggtctacatcgatggagagcacaaactcacattgaagggcgaggggttggtggaggatttcaaagagatcctccatgattatgtcgtcaggacatatgggcaggcctga

SEQ ID NO: 212619 - DNA, 850 bp, Unknown
  Bacterial polypeptide expressing nucleotide sequence isolated from the Sargasso Sea
aaaaaaacaaaagaaataagagtaggaaaagttaaagttggtggaaacaatcctatttcagtgcaatcgatgaccaatactcttaccacagatattaaaggtactattaaacaaataaatgaaatttgtgctgagggggcggacatagtaagagtttcttgccctgatgagccatcatcaaaagccttgaaagagatagctaagcatgttgatgttccaatagttgctgacatccattttcattataaaagagcaattgaggctgcagaaaatggagctagttgtttaagaataaatcctggtaatattggaagcaaaaataagataaaagaagtaattaaagcagcacgagataataattgctccattagagtcggagtaaacgcaggatcacttgaaaaagatattttagaaaaatataaagagccttgtcctgaagctttagttgagagtgctttaagaaatatcaaaattttagaggatgagtattttgataatcttaaagtgagcgtaaaatcatctgatgtttttttatcaattgaagcttatcgtcagttatccaagcttactgattaccctttgcatttaggcatcactgaggcaggaggctttttacctggaagcataaaatcatctattggattaggtgcattacttttaaacggtataggcgatacaataagagtttctttatcagataatccagtcgaagaggtaaaaattggaaatgagatattaaaatcattaagtttgagagagaggggggttaaaattatttcttgtccttcgtgtgctagacaaggatttcaggtaattgaaactgtaaaagttttagagaaaaaactatctc

SEQ ID NO: 212620 - DNA, 808 bp, Unknown
  Bacterial polypeptide expressing nucleotide sequence isolated from the Sargasso Sea
ggcaataatcaaattgcggttcaaacaatgacaaacactctaacctctaattcaaaagatactattgctcaaatagaaaggtctgcaaaactaggagttgatttagttcgtgtttctgtcccagatagagaatcttcatattctttaaaagaaattgttaaacatagtcctgtacctattattgcggatatacattttcattataaaagaggaatcgaagcagcaaataatggcgcttcttgtattagaataaatccgggtaatatcggcagcattgaaagaataaaagaggttataagagcagcaaaagataataattgttcaattagagtaggagttaatgcgggaagtttagaaaaacaaattttagaaaaattttctgagcctaatccagaagccttagttgaaagtgctaaactaaatataaagatacttgaagataatgatttcactaattttaaaatcagtgtgaaatcttcagatatatttatgtctataaaagcatatgagcaattagctgaattatgtgattatccattgcatttaggaattactgaggcaggaggaaaaagatcaggttcaattaaatcttcaattggagttggaaatttacttttgagagggataggagatacaatcagaatatcactatcagacgaaccagaggaagaagtaagagtaggttttgaaattttaaaaagtttaggattaagaaatagaggtgtaaaaattatatcttgcccttcatgtgctagacaacaatttgaagtaataaaaacagtaaaaaatttagaaaaaaaattagatg

SEQ ID NO: 212621 - DNA, 757 bp, Unknown
  Bacterial polypeptide expressing nucleotide sequence isolated from the Sargasso Sea
aatgagtattagaccttttagagatattaaaagacgaaaaacaaaagtaataaatgttggaaaaataaagataggtggtgataacccgatttcagtgcaatcaatgacgaatactttgacctcagatgttaaaggaacaattaagcaaattaatgatatagctgaagagggtgctgatattgtaagagtttcatgtcccgatgagggttctacattagctttaaaggaaataataaaacacgtttcaataccagtagttgcagatattcattttcattacaaaagagcaattgaagcagcggaaaatggagctagttgtttaagaattaatcccggaaatattggggatgaaacaaagatacatgaggtattaaaagccgcaaagaataatgactgttctataagaattggagtaaacgcgggttctttagaaaaagatattttagaagaatttaaagaaccttgtccagaagccttagtgcaaagtgccaaaagaaatataaaaattttagaagataaagatttttttaattttaagataagcgttaaatcatcagatgtttttctttcaatagcagcatataggcagttatcaaaagtaacagattatcctttacaccttggtataacagaggcagggggttttgtttctggaagtataaaatcatctataggcttaggaagtttattgatggatggaattggagatacaataagaatttccttatctgacaatccaactcaagaagttaaatag

SEQ ID NO: 212622 - DNA, 670 bp, Unknown
  Bacterial polypeptide expressing nucleotide sequence isolated from the Sargasso Sea
gatgaacttgagaccatttaggcatattgaaagaagaaaatcaaaagtcattaatgttggtgaagtaaaaataggtggagataacccaatatctgttcagtctatgacgaatactttaacaactgacaccaaatcaacaattgaacaaataaataaaatttgtgaagagggcgcagatttagtaagagtttcttgtcctgacacaagctctacaaaagcattgaaagaaatcacaaaacattctcaagttcctattattgcggatatacactttcattataaaagagcaattgaagctgctgagaatggagcaaagtgtttaagaattaatcctggtaatataggagatgaaaaaaaaatacatgaagtactaagtgcagcaaaaaataataattgctcaataagaataggagtaaatgctggatcattagaaaaagatattttggaaaaatacaaagaaccctgtccagaggctttagtggaaagtgcagaaagaaacataaaaattctagaagataaagatttttttaattttaaaataagcgtaaaatcttcggatgtttttttatcaatcgcctcttatcgattgctatctaaaaaatgtaattatcctttgcatttaggaattacggaggctggagcttttattcctggaagtataaagtcttca

SEQ ID NO: 212623 - DNA, 501 bp, Unknown
  Bacterial polypeptide expressing nucleotide sequence isolated from the Sargasso Sea
tttgaatacttctaaagttaaaagaaaaaaaactaaaaagatttgggttggagatgtacctgttggaggtgatgctccaatatccgtccaatcgatgacaaacacaaatactgaagacattgaatctacagtcaaacagataaatgggataagtgaagctggaggagatattgtaagagtatcaatcccaacctttgaggctgctaattctcttatcgagataaaaaagcaaacaaaaattccaatcgtcgcagacattcattttgattataagatagcactggaatccctcagaaatggagtcgattgtgttcgaattaatcctggaaatattgggtctgaaaaaaaaattagagaagtaatattagctgcggaagataaaggagttccaataagaattggaataaatgctggctctctcgaaaaagaacttcaaactaagtatggcgaaccaaatgctgatgcattagtggagtcggcaatgaaacacgttgaaattct

SEQ ID NO: 212624 - DNA, 883 bp, Unknown
  Bacterial polypeptide expressing nucleotide sequence isolated from the Sargasso Sea
atcaagaagttggaagacgctggtgcagatatagtcagagtttcttgtcctgatgaggagtccaccaaagctttaaaaaaaataacaaaaaaaataaaattaccaattgttgctgatatacattttcattacaaaagagcaatagagtctgccgtatcaggagcaaaatgcttaagaattaatcctggcaatatcggttcaaaagaaagggtaaaagaagtaattaaagcagctaaagattatgattgtgcaattagaattggagtaaatgctggatcactagaaaaaaatattttggaaaagtacaaagaaccatgtcctgaagctctaattgagagcgctaatcacaatataaaacttttggaagacaacgatttttttaattttaagataagcgttaaatcatcagatgtttttttggctgtcaaagcttatgaaggtttgtcaaattcttatgattatcctttacacttaggaatcactgaagctggaggattatttaccggaagtataaaatcctcaataggaattggaaaacttttaatgcagggaataggcgacactgtgagagtttctttatctgcagatccagtagaagaagttaaagcaggttttgaaatattaagtgcgctaggtataagatctagaggcgttcagataatttcatgcccatcctgtgcaagacaagcatttcctgtaattgatactgttaaaattttggaaaagaaactttctcacataaagaaacctatgacactttcaataataggatgtgttgttaatggaccaggtgaagctgcacagacagatattgggttaacaggtggtggggacggaagtaatttactttacttatcaggagttccccataacaaagtgtagc

SEQ ID NO: 212625 - DNA, 929 bp, Unknown
  Bacterial polypeptide expressing nucleotide sequence isolated from the Sargasso Sea
agagaagaaagcaaaaattgtttctgtcggcaaagtaaaaatcggtggtgactttcctattgcagttcagtcaatgacgaatactttaacaaccgatgcaaaagccacaattattcaaattaataaattgcgtgaagtaggtgcggatattgttagggtatcttgccctgataaagaatcttccttagctttaaaagaaataatcaaaaatacagaaactccaatagttgcagatgttcattttcactataagagagcaattgaagcggcagaatcaggagctaactgtttaagaattaatccaggaaatattggttccaaagaaagagtttatgaaattttaaaatcagcaaaggacaataactgttctattcggattggagttaatgcaggttctttagaaaaaaaatttttagaaaaatacaaagagccatgtccagaagcaatggtagaaagtgctttagaaaaaataaaaatttttgaagataaagatttctttaatttcaagataagcgtcaagtcttcggatgtatttttatcagtaaaggcttatagggctttatcaaaacagtgcgattatcctttgcacctaggaataacagaggcaggaagcttaataccaggaagtgtaaaatcttctattggaataggtatgcttcttatggaaggtattggtgatacaattagagtatctttatctgatgatccagttcaagaaataaaagtgggctttgaaatattaaaatcattaaatttaagacacaggggagttaatattatttcttgcccttcttgtgccaggcaagcatttcctgtgattgaaactgtaaaaaatttagaaaaaaggttagcacatataaatactccattaacactgtctataattggatgtgtggtgaatggcccaggagaggctgctcaaacacaaa

SEQ ID NO: 212626 - DNA, 790 bp, Unknown
  Bacterial polypeptide expressing nucleotide sequence isolated from the Sargasso Sea
aataaatcctgggaaatatttggagataagaaaaaaattaaagaaatcgtttctgcagcaaaaaataacgattgtgcaataagaattggtgtgaatgcaggatcactcgagcaagatattttggaaaaatacaaagagccttgtccagaggcattagtagaaagtgctttaagaaatattaaaattattgaagacgaagatttttttaatttcaaagtaagcgttaaatcttctgatgtttttttatctattggcgcttataaacagctttcaaaacttacagaatatccattacacctgggaataacagaggctggatcatttttaccaggtagtattaaatcttctattggtttaggaaatctgctgttagacggcattggtgatacaattagagtttcattgtcagacgatcctgtaaatgaagtaaaagtgggtaacgaaatattaaaatctttaaatcttagaaatagaggagtaaaaattatatcctgcccatcatgtgccagacaagcttttcaagtaattgatactgtaaaaatactagaagagaagctttcacatataaaagttcctattacattatctataataggatgtgttgtaaatggaccaggagaagcagcctatactgacataggtattactggaggaggcaaaggaagtaacatgctatatttaaaaggtgtacaaacaaaaaaaatctcaaatgatgaaataatttcaaaagttatagaacttgtagaaaaagaagcagaaaaaataaaaattaatgataccaataaataaa

SEQ ID NO: 212627 - DNA, 640 bp, Unknown
  Bacterial polypeptide expressing nucleotide sequence isolated from the Sargasso Sea
gaaccttgtccagaggctatggttgagtcagctttaaaccatgtaaagattcttgaggataatgatttctttgaattcaaaataagttgtaaggcgtctgatgtttttttagctgttgcagcatattatggaatatctgatgcttgtgattatccaatccatttaggtattactgaggctggtggtatgatacctggaacaataaaatcttctataggaatgggatcgttgctatgggcaggtattggagatactattagagtctctttatccgctgatcctgtagaagagattaaggttgggtttaatatgcttaagtctttaaatttaagacacagaggtgttaatataatttcttgtccctcatgtgctcgccaaaactttaacgtgattagcactgtgggggaactggaaaaaaggttagaacatataaccacaccaatgacattatcggtgattggttgtgttgtaaatggtcctggggaagccaaagaaactgatataggattaactgggggtaagaatcatcaaatatatcttgatggtgagaaacatcatatactgagagaaggaaatatgatagatcatttagttgagttgtgtgaaaaaaaacagaaagaattattaagtaaaagctaaa

SEQ ID NO: 212628 - DNA, 606 bp, Unknown
  Bacterial polypeptide expressing nucleotide sequence isolated from the Sargasso Sea
tgtataatgtaaaattgttggaagataatgaattttttaattttaaaattagcgttaagtcctcagatgtttttctaactgttaaatcttataaaaaattatctgagatatgtgaatatcccttacatttaggaataacagaagctggaggtctcctttcaggcagcataagatcttcgataggaataggtcagctcttaatggatggaataggagatactataagggtttcactctcttcagatccagtagatgaaataaaatctggttttgaaatcttaaaatctttaggcattagatccagaggagtaaacattatttcttgcccctcttgtgctagacaagctttcccagttattgagacggtaaaagaattagaaaaaaaactatcccacgtaaaaaaaccaattacactatctataattgggtgtgtagttaatggacctggagaagcagcccagactgaaataggcttaactggtggaggtcaagatagcaaccttttatacttatcaggcatacctcacacaaaggtagcgagctcaaaaataatagataaagttgttcaacttgtagaagaaaaagtaaaagaaaaaaataattaaa

SEQ ID NO: 212629 - DNA, 780 bp, Unknown
  Bacterial polypeptide expressing nucleotide sequence isolated from the Sargasso Sea
aatgagcataagaccttttagagatataagtagaaaaaaaacaaaagaaattaatgttggaaatttaaaaattgggggagataatccaatatcagttcaatccatgaccaataccctgacaaaagattctaaatccactattaaacaaataaaagatttagaaaacgctggagctgatttagtgagggtttcatgtcctgataaagagtcaacagaggctttgaagcaaattgtaaaacaagttaaagttccaatagttgcagatattcattttcattataaaagagcaattgaggcagctgaaaatggtgcacattgtttaagaattaaccctggaaatataggtgacctacaaaaagttaaagaggttattaaagctgcaaaaaataatggttgtgcgattagagttggcgtaaatgccggatcgcttgaaaaagatattcttgaaaaatataaggaaccttgccccgaggctctcgttgaaagcgcattaagaaatattaaaatattagagaatgaagatttttttaattttaaagtaagtgttaaatcatctgatgtatttttatcaattggagcttacaaacaattatccgccaaaatagattatcctcttcacattggcataacagaggcaggcagttttttacctggcacaataaaatcatcaattggttttggatcactccttttagatggaataggtgatactataagagtatctctctctgatgatccagtaaaagagataaatgttggtaatgagattttaaaatcact

SEQ ID NO: 212630 - DNA, 611 bp, Unknown
  Bacterial polypeptide expressing nucleotide sequence isolated from the Sargasso Sea
aatgaataatccttatgggatagatattaaaaggaataagacaagaaaaatatatgtcggagacatacctgtcggaggtgatgcgcctattagtgttcaatcaatgacaaatactgatacacgggacatcaaatcaacaataaaacaagtattggacttagaggatgcaggtgctgatattgttagaatttcttgtcctgacgaggagtcgtcaaaagctctaaaagagatagttgatcaaacaaatgttccaatagttgctgatattcattttcattataaaagggcaatagaagcagcagaatctggtgcatcatgtttaagaattaatccaggtaatattggatctattgatagggttaaagaagtcgttaaggctgccaaagataacgattgttcaattagaataggtgttaatggcggatccttagaaaaaaatatacttgaaaaatataaagggccttcaccatcagcaatggttgagagtgcattattccatgaaaatattttaagagatttagattttaataattttaagatatctgtaaaaacttcaaatgttttacttacagttgagtcatataaagagttatcaaaagtaactgatgctc

SEQ ID NO: 212631 - DNA, 670 bp, Unknown
  Bacterial polypeptide expressing nucleotide sequence isolated from the Sargasso Sea
ggatattcttgaaaagtataaagaaccatgtccagaagctttagttgaaagcgcatcaagaaatataaaaattttagaagatttagatttccaaaattttaaaattagtgtgaaatcctcagatgtttttttgtctgtgaaatcttataaacttttatctcagcaaactaaatatccattgcatcttggtataaccgaagcagggagttacttgcccggtagtataaaatcatcaataggacttggtaatttattgatggatggtattggggatacgatcagggtatcgttatcagatgatcctgttgaagaggttaaaattggaaatgaaattttaaagtcaataggtttaagaaatagaggtgtaaaaattatatcttgtccatcttgtgcaagacaagggtttgaagtaatcgaaactgtaaaaatactagaagataaactttctcacataaaggaacctattactttatctattattggatgtgtggttaatggtccgggcgaagcttcacaaacagatattggaataacaggcggtggaggagatagtaacatgctttatttaaacggaactcaaacaaaaaaattaaataacaaagaaataatttctaaagttgttgaacaagttgaaaagaaggctagcgaaattcaaaaaaaagctaaatga

SEQ ID NO: 212632 - DNA, 452 bp, Unknown
  Bacterial polypeptide expressing nucleotide sequence isolated from the Sargasso Sea
aatgagcataagaccatttagagatataaaaaggaaaaaaaccaaaaagataaaggttggaaatgtagaaattggcggtgatgcccctatatcagttcagtcaatgacaaatactttaactaccgacgtagaggctacaattaaacaaataaatgacctcgataatgcaggtgcagatatagttagagtatcttgtccagatcaggaatcttcattatctttaaaaaaaattttaaaacatgttaatgttccaatagttgcagatatacattttcattataaaagagcaattgaatgtgcaagctctggggcaagctgtctaagaattaatccaggtaacattggctcaaaagaaaaagttaaagaaattcttaaggcagcaaaagataataattgttcaattagaataggtgttaatgcaggatctcttgaaaaatctttattggaaaaat

SEQ ID NO: 212633 - DNA, 704 bp, Unknown
  Bacterial polypeptide expressing nucleotide sequence isolated from the Sargasso Sea
aatgcaaatctattgtccaagtttaactagataccagcgttttaaaacacgttgtgtcatggttggagaggttggtgttgggggtgataatccaattcgtgtacagtcaatgacgacgacagatactatggatactgagatgacgatagcacaatcaattaggatgatagaggcagggtgcgagatcgttcgcattaccgctccaagcattaaagaagccaaaaacctcaggcctatacttgatggtattagggaaaaaggttacaaaactcccctagtcgcagacattcatttcacccctaatgcagctgagatagctgctactatagtagaaaaagtgcgtattaatcctggaaattatgctgatagaaaaaaattcgagacccatgaatattcggacaagtcctatgcggaagaattagaaagaataagggaacgattcataccacttgttaagatatgcaaagagaatggtactgcaatgaggatagggacgaaccacggttctctatcagatcgtatattaagtcgatacggtgatactccacttggcatggtcgaatcaggaatggaatttattcgtattgcagaaagtgaaggctatcatgacatgatcttgtctatgaaagctagtaatactcaagtcgtggtccaggcctatagattattgatcaataaaatgattgaagaagggatgaattatc

SEQ ID NO: 212634 - DNA, 717 bp, Unknown
  Bacterial polypeptide expressing nucleotide sequence isolated from the Sargasso Sea
ataataattgttcaatcagaataggtgtaaatgcaggctctttagaaaaagatatacttgaaaaatataaagagccatgtcctgaagctcttgtagaaagtgctttaagaaatattaaaattttagaaaatcaagatttttttaattttaaaataagcgttaaatcatctgatgtttttttatctatagcagcatacagacaactttctaaagtatgtgactaccctttgcatctaggcattactgaggcaggcagttttatttctggaagtgtaaaatcatcaataggacttggctcactgttaatggatggtattggagacacaataagaatttcattatcagacgatccatcgaaagaggcaaaaattggaaatgaaattctaaagtctttaagtttaagaaatagaggagttaaaattatatcttgtccatcgtgcgcaagacaggcgtttccagtaatcaacatagttaagatattagaagataagctttctcatattaaaacacctatgacgctatctattattggatgtgtagtaaatggaccaggtgaagctgctatgactgatataggaattacaggaggaggaaagggaaataatatgctttatctctctggtattcagtctgaaaaagttttgacagaagatataatatcgagggtaatcactgaagtcgaaaaaaaagctaaagaaatagaaaacagcaaataat

SEQ ID NO: 212635 - DNA, 369 bp, Unknown
  Bacterial polypeptide expressing nucleotide sequence isolated from the Sargasso Sea
catgaaacaggattccccgattatcagacgcaaatcccgccagatcatggtgggcaatgttcctgtgggtggtgacgcgccgattgcggtgcagagcatgaccaacaccgaaacctgtgacgtagaggccaccgttggccagatcaaggcattgcaggaggcaggtgcggacatagtgcgtgtttccgttccgtccatggacgccgctgaggcgttcgggaagattcgtgagcaggtatccctgccgttggtcgccgacatccacttcgattacaagatcgccctcagggtggcggagctgggtgtcgactgtcttcgtatcaacccggggtacatcggccgcgatgaccgcgtcagtgccgttatcag

SEQ ID NO: 212636 - DNA, 440 bp, Unknown
  Bacterial polypeptide expressing nucleotide sequence isolated from the Sargasso Sea
aatggaaattagacctcacagaattataaaaagaaaaaaaactaaaaagataaaggttggttcaattagtgttggcggggactctcccataacggttcagtctatgactaatactttaactacagatgccaaagctacaattaaacaaatacaccaacttgaagagtctggtgtggatattgttagagtttcatgtcccgatacagactccacaaaaaaacttaaggaaatagtaaaagaagtttcagctcctatagttgcagatatacatttccaccataaaagagcaattgaagcagcaaaaaatggagccagttgcttgagaataaatcctggaaatattggatcctcagatagagttttagaaattattaaagctgctaaagatcataattgttcgataagaattggagtaaatgctggttccctagaccaaactt

SEQ ID NO: 212637 - DNA, 436 bp, Unknown
  Bacterial polypeptide expressing nucleotide sequence isolated from the Sargasso Sea
tatgttttcagaatcaccaattaaacgcagaaaatccacccgtattaatgtaggcaatgtgcctattggcgacggcgctccaattgccgtgcagtcgatgactaataccgacaccatggacgttgatgcaaccgttgcacaaattcaagccatccaagatgctggcgccgacatagtacgagtatcggtaccgactatggacgcagctgaagcgtttaaaagtataaaagagcaagtaagtattccgcttgttgccgacattcattttgattaccgcatagccctaaaagtggcaaagtatggcgtagattgtttacgtataaaccctggtaatatcggaagcgaagagcgcattagagctgttgttgattcagctcgcgagcacaatatccctattcgtaaaggtgtaaacggtggctcacttgagcgcgattta

SEQ ID NO: 212638 - DNA, 640 bp, Unknown
  Bacterial polypeptide expressing nucleotide sequence isolated from the Sargasso Sea
tgagtatcctttacatcttggagttactgaagctggtccattaccaggcggtttaattaagtctgttgctggaatatctacattattatcagaaggcataggggatactattagactttctttgactactgatcctgtagatgaagctaaatatggaagacagttattagaatatcttaatttaagagaacgaaaatccttagatcttattgcttgtcctagttgcggaagagcagaagttgatgtaattaaggtagccaatgaagctcaagaagctttagaagaaaaaggttttcctattcaagttgctgttatgggttgtgttgttaatggtcctggtgaagctaaatctgcagatttaggtattgctgctggtagaaataagggacatttatttattaaaggccaggtagttaaagttgtagatgaaaaagatatggtaagttctttagtaaaagaaggtgaactcattacaaatgagggaatcgaagcaaggttagctgctgctgataaagacgccgcaaaaatagcacaagaagatgtcgaagcgttaattgatatacaaggcgatattaataattttaaattaaaatctaagtctgtagtagagattacatcaaatgaagatattgacacttaa

SEQ ID NO: 212639 - DNA, 673 bp, Unknown
  Bacterial polypeptide expressing nucleotide sequence isolated from the Sargasso Sea
aatggaaattagacctcatagaaaaataactagaaaaaaaaccagaaaaataatggtaggtaaagttccagtaggaggtgattcaccaataagtgttcaatcaatgacaaatactctaacaacagatgtaaaagcaactattaatcaaattaatgatttagagcaagcaggggctgacatagtaagagtctcatgtcctgatgaaaattctactaaatcattagaagagattattaaacaagtaaatcttccagttgtggcagatattcattttcattataagagagcaatcgaagcagcaaagatgggggcaagctgtttgagaattaaccctggtaatattggatctaaagatagggtggtagaagtaataaaagctgcaaaagattataattgttctataaggataggtgttaacgcagggtctttagataaaacattattagaaaaatataaagaaccatgtccggaagctttagttgaaagtgcaggttataacataaaattattagaggacaatgattttttcaattttaaaataagcgtaaaatcttcagatattttcttaactgtaaaagcatacaaaaaattatcagaaatatgtaattatcctttacatttaggtgttactgaggctgggagtttactaactggaagcattaaatcttcaata

SEQ ID NO: 212640 - DNA, 577 bp, Unknown
  Bacterial polypeptide expressing nucleotide sequence isolated from the Sargasso Sea
ttttaattttaaagtaagtgtaaaatcatcagatgtttttttatctattcaagcttataaacaactttctaaactaactgagtatcctcttcatttaggaataacagaggctggctcatacttgcctgggagtataaaatcatcaattggccttggtactttattattaaatggtattggcgatacaattagagtttctttatccgacaaccccgttcaggaggtaaaaataggaaatgaaatattaaaatctttaaatcttagaaatagaggtgttaaaattatttcttgcccttcgtgtgcgaggcaagcatttaatgtcatagaaactgttaaaattttggaagaaaaactttcacatattaaaactccgataactttatcaataataggatgtgtagttaatgggccaggagaggctactcaaacacaaataggcattactggtggaggaaagggcaataacatgttgtatcttaacggtattcaatcagaaaaaatctcaaatgacgcaataatcgcaaaagttgtagatcttgttgaaaataaagtcaaagaattacaaaacaaaaaataa

SEQ ID NO: 212641 - DNA, 538 bp, Unknown
  Bacterial polypeptide expressing nucleotide sequence isolated from the Sargasso Sea
ttttttatctacaaaagcttaccaacaactttcaaaagtttgtgattaccctttgcatttaggaattaccgaagcaggaagcttaacttctggtagcattaaatcatcaattggaatgggtattttattaatggaaggaataggtgacaccattagggtttcattgtcagcaaatccagttgaagaagtgaaaattggatatgaaattttaaaatctttaaacttaaggcatcgaggagtaaatattatatcttgcccatcttgtgccagacaaggttttcctgttattaacacggttaaaattttagaagaaaaacttgcgcacattaaagaaccaataactttatctgtaatagggtgtgtagttaatggacctggagaagcttcacaaactcaaattggattaaccggcggtggtaaagatgatcatatgatgtacatttcaggattacctcatcataaagttgctagtgaaaaaataatagaagaagtagtttcaatggttgaaaacaaatcaaaagaattaaaaaatacttaa

SEQ ID NO: 212642 - DNA, 974 bp, Unknown
  Bacterial polypeptide expressing nucleotide sequence isolated from the Sargasso Sea
ggatataaggctcctatagttggagattttcattataatggtcatattttattatctaagtgtcctaactcagcaaaaatgttatctaaatatagaataaaccccggtaatgttggcaaaaaagataaacacgataaaaactttgctcaaatgatagaaattgcaattgcaaataataaagctgttcgaattggtgtaaatggcggatctttagatgaagaactattaacacaactcatggataaaaatgcaacattagcaaagcctcaagatgctaaatcggttttttatgaggcgatggttcagagtgccttgcaaagtgcagaacttgctgaaaaaataggcttacctaaaaataaaattattttaagtacaaaattgtcagatgttcaagatatgatatatgtgtatcaaaaacttgcagcactttcagattattcacttcacttaggcttaactgaagccggcgggagtattaagggaattagtgcgtcatctgctgctctgggagtgctacttcatcagggtattggagataccattcgagtgtcattgaccccagaacctggtgtcggaagagatctggaggtaaaggtttgtaaatatttattacaatcgatgggtgtgcgttactttatgccaatggtgacgagttgtccgggttgtggtagaacaaactcagataaatttgtatatttagcaaaagatgtcacaacttatattgagacaaatatgccaaaatggaaattaaagtacccaggtgtagaaacgctcaacatcgctgttatgggatgcgttgtaaacggacctggagaaagtaaacatgctgatattggaattagtttgccaggaagctccgaagcaccaggtgttcctatttatcaagatggaaaattatttactgtgctaaagggatcacaaattaaagaagagtttattcaattgctagattcgtatattcacacccgtttttc

SEQ ID NO: 212643 - DNA, 705 bp, Unknown
  Bacterial polypeptide expressing nucleotide sequence isolated from the Sargasso Sea
ttcattagaagaaaatggcgctgatatagtaagagtatcttgtccagatgaaagctcaacaaaagctcttaaattaattgttaaagaggttaatgttcctattgtagcggatatacattttcattatcaaagagctatcgaagcagcaaaaatgggagcaagttgtttgagaattaatccgggaaacattgggtctaaagatagaatactagaagtagtgaaggcagcaaaagactatgattgctcgataaggataggagttaacgctggttctttagataaagctttgcttgaaaaatataaagaaccttgtcctgatgctttggttgaaagcgccatgtacaatgtaaaacttctagaagataacgatttttttaattttaaaatcagtgttaagtcttcagatgtttttttatctgttaaatcttatttacaactttctgagatttgtgcatatcctttacatcttggaataacagaggcaggtggactttttactggcagcataaaatcctcgattggaataggtcaacttttaatgcaaggtataggagatacaataagagtttctttgtcttcagatcctatagacgaagtaaaagcaggttatgaaattttaaaatctttaggcattagagctagaggagtaaatataatttcttgcccttcatgtgctcgtcaagcatttcctgttattgaaacggt

SEQ ID NO: 212644 - DNA, 371 bp, Unknown
  Bacterial polypeptide expressing nucleotide sequence isolated from the Sargasso Sea
gatgaaaacaaattggattaaaagaaaaaaaactaaaaccatttatgttggtagtgttcctgtcggcggaaataatcctatttcagttcaatccatgactaacacagatacttgtgatgttgtttcaactataaaccaaataaatgatttaaaaaaagcaggcgctgacattgttagagtttcggtgccaggttttgatgaggctaaggcattcaaagaaattaaaaacgcagtaaatattccattggttgctgatatacattttgattataagattgctttggaggttgcaaatacagcagactgtttgagaattaacccaggcaatattggaaaagaagatcgtattcaagaggtaataaatgctgcta

SEQ ID NO: 212645 - DNA, 460 bp, Unknown
  Bacterial polypeptide expressing nucleotide sequence isolated from the Sargasso Sea
atgagcttaagaccattcagagatatttttagaagaaaaacaaaagttataaaggtcggaaaagtaaaagtaggaggtaacaatcctataacagttcaatctatgactaatacattaacaaagaatataaaagagacattaaatcaaataaatagaatttctgaagttggaggtgatatagtaagagtatcatgccctgatgaagattctacaaaagcacttaaagaaattactaaacattcaggtattcctattgttgccgatatacattttcattataaaagagcaattgaagcagcagaaaatggtgcagattgtttaagaataaatccaggcaacataggtgacacaaaaaaaatcgaagaagtaatttcagcagcgaaaaataataattgctccattagagtaggagttaatgcagggtctcttgaaaaagatattttagaaaaatacaaagaac

SEQ ID NO: 212646 - DNA, 796 bp, Unknown
  Bacterial polypeptide expressing nucleotide sequence isolated from the Sargasso Sea
atgaatattaggccatttagggaaattaaaagaagaaaaacaaaagaaattaatgttggtcatataaaagttggaggagataatccaatttctgttcaatcaatgactaatacgttaactaaagatgttaaagaaactgtaaaacaaatcgagcaaatcgaagaggcgggagctgacattgtaagggtatcatgtccagataaagactcaacgaaagctctcaaaaatattgttaaaaatacttctatcccaatagttgctgacatacattttcactataaaagagcaatagaggcggcagagaatggagcggcatgtcttagaataaatccaggaaatataggagataaaaaaaaaattaaagaggtaatttctgctgcaaaaaataataactgttcaattagaattggtgttaatgcaggatctctagaaaaagacttattagaaaagtataaagaaccatgtccagaagcgctagtggagagtgcattgagaaatattagcattgttgaagactttgacttttataaatttaaagtaagtgttaaatcctctgatgtatttttatctattgaagcttatagacaactttctaaagttactgattatccactgcatctaggtattacggaggcaggaacatttttacccggtagtataaaatcttctattggttttggatctcttctaatgagtggtataggtgacactataagagtttctttatctgacgatccagtagagaagattagagttggaaatgaaatacttaaatcactaaatttaagaaatagag

SEQ ID NO: 212647 - DNA, 703 bp, Unknown
  Bacterial polypeptide expressing nucleotide sequence isolated from the Sargasso Sea
gatggaaattagaccacatagaataatcaaaagaaagaagacaaaaaaaataaaagtaggaaaagttttcgttggaggggactccccaattacagtccaatctatgacaaacactttaacaaccgatgtaaaaaatactattaagcaaatcaatcttttagaggagtcaggtgcagatattgttagagtttcttgtcctgatgaagactcaactaaagctttgaaagatatagtgaaagaagtaaaggttccaatcgttgctgatatacattttcactataaaagagctattgaagcagctaaaatgggagcaagttgtttgagaatcaatccgggaaatataggttctaaagaaagagttttagaagttattagggcagcaaaagacaatgattgttctttaagaataggtgtaaacgctggatctctagataaatctcttttagaaaaatacaaagaaccttgcccagaggctttagttgaaagcgcaaaatataacatacagctatgtgaagataatgatttttttaattttaagataagtgttaaatcgtcagatatttttttaaccgtgaaagcatacaaacaactttcagaaatctgcgattatccattacatcttggtgtaactgaagctggcggtttattaaatggaagcattaaatcgtcaataggcataggacagcttttaatgattggaata

SEQ ID NO: 212648 - DNA, 549 bp, Unknown
  Bacterial polypeptide expressing nucleotide sequence isolated from the Sargasso Sea
aatcttcagatgtatttttagctatcaaggcttatgagggcctatcaaatttgtacgattatcccttacatttaggtattaccgaagcaggtggattagtaactggaagtataaaatcctctattggaattggaaaactcttaatgcagggaattggtgacacaattagagtatcattatctgctgaccctattgaagaaataaaagctggttatgaaatattaaatgctcttgggataagatctagaggagttcaaataatttcttgcccatcttgtgcaagacaagcttttccagttatagacacagttaaaattttggaaaataaactttcccatattaaaaaaccactaactctctcaattattggatgtgtagtaaatggtcctggagaagcagctcaaacagatataggtcttacaggaggcggtgagggcaataatttattttatttatctggaataccccatcacaaagtagctaataaggaaattattgaaaaagtggtggagttagttgagtctaaagctaaagaaaaagtaaattaaa

SEQ ID NO: 212649 - DNA, 489 bp, Unknown
  Bacterial polypeptide expressing nucleotide sequence isolated from the Sargasso Sea
tccatttaggaatcacagaggcaggaagttttcttccaggtagtataaagtcttcaattggtctaggaaacttattaatggatggtataggggatactattagaatatcactttcagatgaccctgttgaagaaattaaagtaggcaatgaaattttaaaatcgttaaacttgcgtaacaggggtgtcaaaataatatcttgtccttcatgtgcaaggcaaggatttcaagtaatagatactgttaaaattttagaggaaaagctttctcatatacaaactccaataactctctcaataataggatgtgttgtaaatgggcctggggaggcagctcaaacagatataggcattacaggaggaggaaaggacagtagtatgctttatttaaaaggtgttcaaactgaaaaattaaataataatgaaattgtttcaaagatagttaatcttgttgaaaaaaaagttgaagagattgaaattaaaaaataat

SEQ ID NO: 212650 - DNA, 791 bp, Unknown
  Bacterial polypeptide expressing nucleotide sequence isolated from the Sargasso Sea
aaatgaaggttgtgatattgtaagggtttcaattccagatgaaaaatcctcaaccgcgctaaaaaaaataattccaaatatttcaattcctctcatagcagatattcattttcattataaaagagcattggaggcggcagaaaatggtgctgattgtttgcgtattaatcccggaaatataggatcagttgaaaagataaaagaagttatcgaggcagctaaacagaataatatccccattcgagtgggagtgaatgcaggcagtttagaaaaacaaatattagaaaagcataaaagtccaacagctcaagctttatttgagagtgctaaattaaatattcaattattagaagatcaaaattttgataatttcaaaattagtgtaaaggcctctaacatttttacctcagtagaagcgtatcaacttttgtcaaactactgtaattatcctcttcatttgggaattactgaagctggcagttattttagtggttctataaaatcgtctataggtcttggaatgcttttatatcagggtattggtgacacaattcgagtatctctatcagaccatccaacacaagaagttaaagttggcttcgaaatgttaaaatctcttaatttaagggattatggagtaactattatttcctgcccctcctgtgcgcgccagcaatttgatgtcattaaaacagttaaaagtgttgagagtcgcctatctcatatcaagaaacctataacggtatctattattggttgtgttgttaatggaccaggagaggcaactatga

SEQ ID NO: 212651 - DNA, 914 bp, Unknown
  Bacterial polypeptide expressing nucleotide sequence isolated from the Sargasso Sea
aatgagtgttagaccatttagagatatcaatagaagaaaaacaaaagtaataaatgttggagatgtcaaaattggtggtgataatccaatttctgttcaatccatgaccaacactttaacaacggatgttaaagcaacaataaatcaaattaatgatattgctgaggaaggagccgatatagttagagtttcgtgtccagatacagagtcaactaaagctcttaaagaaatagttaaacatgtatctatcccagtagtagcagatattcattttcattataaaagagcgatcgaagcagctgaaaacggagccaaatgtttaaggataaatcctggtaatattggtgaggagtcaaaaattcatgatgttcttagtgctgcaaagaataatgattgttcagttagaattggagtaaatgctggatcattagaaaaagatatattagataagtttaaagagccttgtccagaagccctagtggaaagtgctttaagaaatataaaaatattagaagataaagatttttttaattttaaaataagcgttaagtcttcagatgttttcttatcaattggtgcttatagacaattatccaaagtctgtgattatcctcttcatttaggcatcactgaggctgggagttttgtatctggaagtataaagtcttctataggacttggaagtctattaatggatggaataggagatacaataaggatttctttatcagataatcctacaaaagaagtaacaattggaaatgaaattctaaaatcgttaaatctaagaaatagaggtgtaaaaatcatatcatgcccctcttgcgcaagacaagctttccaagtaattgatactgtaaaaatattagaagaaaaactttctcacattaaaacacaaataactttgtcaataa

SEQ ID NO: 212652 - DNA, 637 bp, Unknown
  Bacterial polypeptide expressing nucleotide sequence isolated from the Sargasso Sea
aatgagtcttagaccgttcagagatattcatagaaggaaaaccaaagtaattaatgtgggaaacattaaaattggaggtgataatccaatttcagttcagtctatgacaaatactttaacaaaagatgcaaaagcaactataaaacaaattaatgatatagcaaatgaaggagcagatcttgttagagtttcttgtccagatgaagattccacattagctttaaaagaaattgtaaaacattctagtattccaataattgccgatattcattttcactacaaaagagcattagagtcggcagataatggggcaaagtgtttaagaataaatcctggaaatataggagataaaaaaaaaataaaagagataatttcagcagcaaaaaataatgattgcgcaataagaataggagttaacgcaggttctttggaaaaagatattttggaaaaatataaagaaccttgtccggaggcacttgtagagagcgcacaaagaaatattcaaattattgaagatgaagatttttttaactttaaagttagtgttaaatcatctgatgtttttttatcaataggtgcatacaggcaactttccaaaattagtgaatatcctttgcacttagggataacagaggca

SEQ ID NO: 212653 - DNA, 468 bp, Unknown
  Bacterial polypeptide expressing nucleotide sequence isolated from the Sargasso Sea
catgaaccagccttcgcccataaagcgccgcgcaagtagacagattcaggtggggaatgtgccgattggcggcgatgcgcccatcgccgttcaaagcatgaccaacaccgagacctgcgatgtcgaggcaacggtcgcacagatccatgccatcgccgcggcaggggccgatttagtgagggtttccgtgcccagcatggaggctgccgaggctttcaaggagattcgcccaagagccggtgtcccggtggtggctgacattcacttcgatcacaaaattgcgctcaaggtcgccgagtatggcgtcgactgtctgcggatcaatcccggcaatatcgggcgtgaggccaaggtgaaagaggtcatcgccgcgtgccaggatcgcggtatcccaattcgtatcggcgtgaacgcgggttccctgggtaaagagctgttgcgcaagtatcccgagccgaatgccgacgc

SEQ ID NO: 212654 - DNA, 553 bp, Unknown
  Bacterial polypeptide expressing nucleotide sequence isolated from the Sargasso Sea
atgagtgttaggccatttagagatatcaaaagaagaaaaacaaaagtaattaatgttggtgatgttaaaattggaggagacaacccaatttcagttcaatcaatgactaatactttaacaactgatgttaaagcaacaataaatcaaattaacgatatttcagaggaaggggctgatatagtcagagtttcatgcccagatgtagagtcaactaaagcacttaaagaaatagttaaacatgtatctatcccggtagtagcagatattcattttcattataaaagggctatcgaagcagctgaaaatggagctaaatgtttgagaataaatcctggaaatattggtgagaagtcaaaaattcacgatgttctcagtgctgcaaagaataatggttgctcagttagaattggagtaaatgccggatcattagaaaaagatatattagataagttcaaagaaccttgtccagaagcacttgttgagagcgctttaagaaatataaaaatactagaagataaagatttttttaatttcaagataagcgtaaaatctt

SEQ ID NO: 212655 - DNA, 824 bp, Unknown
  Bacterial polypeptide expressing nucleotide sequence isolated from the Sargasso Sea
attgggaaataataatgtacctagggttattgttgatatttcatatttaaatagtattgatcgtaaagtattaaataatttaggctatacatattacgaaaatgaggataaatggggtattggtgattttgcttgtgattatatttttattggagataatgaggttaaatttaatattcctggcactttaaatataattcagtcgtactctagatggataatagataaggattcttcaaggattcctttgctaaatcttgctgattatctgaatggttgtgtttgtcacccttcaattaattttctaaatcttacattaaatgaattatctgattctctaatagaaaaattaatttttgataagacggtggttttgataattgaaacagataataaacatggtctggcagaacaaagaaaattttttatagatttgttgaaaataaaattggaaattcctgtaataattaaaagatcttatagtaatatgtctattgaatcatttcagttacattctgctactgattttggtggattattaattgatggtttaggtgatggcatttttatttcttctaagaattgtggccccttaatagaaataaatcatacatcttttggaattcttcaagcttctcgaactagaatttcaaaaacagaatatatttcttgtccttcttgtgggcgcaccttatttgacttgcaagaaactacagcgatgattagaagcaagactagtcacctaaaaggtgtgaaaattggtattatgggatgcattgttaatgggcctggagagatggctgatgctgattatggatacgttg

SEQ ID NO: 212656 - DNA, 461 bp, Unknown
  Bacterial polypeptide expressing nucleotide sequence isolated from the Sargasso Sea
aagctttgtaactggtagcgttaagtctgcaattggtattggttcactcttattagatggaatcggtgacacaataagggtatctttatctgatgatccagtaaaagaagttaaaattggaaatgaaatattaaagtcgttgggattaagaaacagaggtgtaaaaataatctcttgcccttcttgtgcaagacaagcttttcaagtaattgatactgtgaaaaaattggaggaaaaattatctcacataaaaacaccaataacactgtcaattataggctgtgttgtaaatggtccaggagaagcagctcttacggatattggtataactggcggaggtaagggaaataatatgctttatttatctggagttcaaagagaaaaagttttaacaagcgaaattataaacaaaatagtttctgaagttgaaaaaaaggcagcagagatagaaaaaaaataaa

SEQ ID NO: 212657 - DNA, 823 bp, Unknown
  Bacterial polypeptide expressing nucleotide sequence isolated from the Sargasso Sea
attggggggagataatccaatatcagttcaatccatgaccaatactctaacaaaagatgtcaaatctaccattaaacaaataaaagaaattgaaaatgcaggagctgacttagtaagggtttcatgtcctgataaagaatcaacagaggctctgagtcaaattgtaaaacaagttaaagttccaatagttgcagatattcattttcattttaaaagagcaattgaggcagcagaaaatggcgcacattgtttaagaattaatcctggaaatataggtgacctgcaaaaagttaaagaggttattaaagctgcaaaaaataataattgtgcaattagaattggtgtgaatgcaggatcacttgaaaaagatattcttgaaaaatataaagaaccttgcccagaggctcttgtcgagagtgcattgagaaacattgaaatattagagaatgaagatttttttaatttaaaggtaagcgttaaatcatctgatgtatttttgtcaattggagcttacagacaattatccaataaaatagattatccacttcacattggaataacggaagcaggcagcttcttacctggtactataaagtcatcaattggttttggatcacttcttctagatggaatcggtgatactataagagtatctctctctgatgacccagtaaaagagataaatgttggtaatgagattttaaaatcacttaatctgagaaacagaggtgttagaattatttcatgcccatcttgtgctagacaagcatttgaagtaattgatacagttaagattttagaggaaaaactttctcatatttaa

SEQ ID NO: 212658 - DNA, 604 bp, Unknown
  Bacterial polypeptide expressing nucleotide sequence isolated from the Sargasso Sea
catataaaaattttagaagatgaagatttttttaactttaagataagtgtaaaatcatctgatgtttttttaacaactaaagcttatagagctttagctttagcttgtgactatcctttgcatttaggcattaccgaagcaggcagttttgtttcaggaagtataaaatcctcaattggtattggcatgttgttaagtgaaggtattggagatactataagagtatctttatcagctgaccctatagaagaagtaaaaattggctatgaaattttaaaaagcttacacttaagacataaaggggttaatattatttcttgtccatcttgtgctaggcaaggatttcccgttatagaaaccgttaaaatattagaagaaaaacttgcccatattaaagaaccaataacattatcgataataggctgtgtcgtaaatggccctggagaggcttctcaaacacaaataggattaacaggtggaggccaagataaccatatgatgtacttatctggattgccacataaaaaagtagcaagtggtaagttaatcgaggaagtagttgctttagttgaaaataaatctaaagaatttaaaaaaaattaaa

SEQ ID NO: 212659 - DNA, 533 bp, Unknown
  Bacterial polypeptide expressing nucleotide sequence isolated from the Sargasso Sea
aatgagcattagaccatttagagacattaagagaaaaaaaacaaaagtaatttctgttggaaagataaaaattggtggagataatccaatttctgtgcaatcaatgaccaatactttaaccactgatgtcaaatcaacaataaagcaaattaatgacatacagaatgaaggagcagatttagtaagagtttcctgtcctgacgagtcttcctcgaaggcattgaaagaaattgtaaaacatattgatataccaattatcgcagacatacattttcattttaaaagagctattgaagcagctgaaaatggcgcaagttgtttgagaataaatcctggaaatataggagataaaaaaaaaattcatgacgttttatcagcggcaaaaaataatggatgttctgtaagaataggagttaacgcaggttctcttgagaaagatattcttgaaaaatataaagagccttgccctgaggctttagtagaaagtgcactaagaaatatcaaaatatttagaggatcaagatttcttaaat

SEQ ID NO: 212660 - DNA, 562 bp, Unknown
  Bacterial polypeptide expressing nucleotide sequence isolated from the Sargasso Sea
gtgttaaatcttcagacatttttatggcaattaaatgcatatgagttactttctgaacaatgtaattatcctctgcatttaggaattaccgaggcaggaggtaaaaggacaggctcaattaaatcatctataggcatgggtaatcttttattaaagggtataggtgatactataagagtctctttatctgatgaacctgaggaggaaataagagtcggttttgaaattttaaaaagtttaggtataagaaacagaggtgtaaaaattgtttcatgcccatcatgtgcaagacaacaatttcaagtaattgatttagttaaaaaattggaaaattctctagaagatatagaaaaacctctgacagtttctattataggatgtgtagtaaatggtcctggagaagctaatatgacaaacattggaattacaggtggaggaaataatacccacatgatatatgttgatggtaaaaaaaaccacatagttaaagataaagatctggcagtttatttagaaaatataattagaaataaagttgataatataagtatagagaattaat

SEQ ID NO: 212661 - DNA, 792 bp, Unknown
  Bacterial polypeptide expressing nucleotide sequence isolated from the Sargasso Sea
aatgacaaataccgatactgctgatgctatatccactgcaaaacagattcaaagtctagccactgcaggctcagagctcgtcaggattacagtaaacaatgaggaatcagctaaacaggttccaaaaataaaaaatctacttgaagctaccgggtgcaaaattcccatcatcggtgattttcattataacggccacgaactactaaaaaaatatccagaatgtgccgaatcactgtccaaatacagaataaatcctggcaacgttgggtttggtaggaagaaggattcacaattcagcgcgatgatagaagccgctatccgacacaagaaacctgtccgaatcggagtcaattggggcagcttagatcctgccttgattgccaaaatgatggatgaaaatgcttcacttaaaaaccctaaaacatccagagaggtaacccatgacgcgcttattcaatctgccttgaccagtgctcagagagccgaagatataggcctcaataagaatcagattattgtttcatgcaaagtaagcgaggtgcaagatttgatctcagtctacggccgcctggctcaaaaatgcgagtaccctcttcaccttggattaaccgaggcgggaatgggctcgaaaggaatagttgcatcgtctgtctcaattggagtactgcttcagcaaggaatcggagatactgttagagtatccttaaccccagagcccgacggagatcgttcagaagaggtgattgtcgcccaagagcttcttcaaacaatggggtattcgatccttctccc

SEQ ID NO: 212662 - DNA, 476 bp, Unknown
  Bacterial polypeptide expressing nucleotide sequence isolated from the Sargasso Sea
tatggaaattagacctcatagaactatcaaaagaaaaaaaacgaaaaaaattaaagttggaaacgtttctataggcggagactcaattatttctgtacaatctatgacaaatactctaacgactaaccacgaggccactttaaaacaaataaagcaattagaagaggccggagctgatttagtccgtgtttcttgccctgacgaagattctactaaggcattaaaaataataacgaaacaaagtaagttgcctataattgctgatatacattttcattataaaagggcaatagagtcagccatgtcaggtgcaaaatgtttaaggattaaccctggaaacattggctcaaatgaaagaattaaagaagtaattaaagcggcgaaagattatgattgcgcaataagaattggagttaatgccggttcattagaaaagaaaattctagaaaaatataagggaccttgcccagaggcat

SEQ ID NO: 212663 - DNA, 471 bp, Unknown
  Bacterial polypeptide expressing nucleotide sequence isolated from the Sargasso Sea
aagcaggaggaattagaacaggttcaattaaatcatcaataggaatgggaaatctgttattaaatgggataggggatactatcagagtttctctatcagatgatcctgtagaagaagttaaagttggttatgaaatacttaaaagtctaggaattagaaatagaggagttaagattgtttcttgcccttcatgcgcaagacagcaatttgaagttattgatttagtaaaaaaattagaaaaatctcttgaagatattgaaaatcctataaccgtttcaataataggatgtgtagttaatggccctggtgaagcaaatatgaccaatattggaataactggtggaggaaataatactcacatgatatatgtagatggaaagaaagatcacattgttaaaaataaagatttggcaccttatttagaagacataattagaaaaaaatctaaaaataatagtataaagatataaa

SEQ ID NO: 212664 - DNA, 469 bp, Unknown
  Bacterial polypeptide expressing nucleotide sequence isolated from the Sargasso Sea
aatgcaaattagaccgcatagaattattaatagacgcagaactagaaagattaaagtcggaaaagtatttattggaggagactctcccatttctgtgcaatcaatgacaaacacaattacttcagatgaaacatcaactataaatcaagttaatcaattaaaagaagtcggagcagacctggttagaatttcttgtccagaccaagattcaacaaaagcattaaaaaatataataaaaaaaactgacatcccaattattgcagatattcattttcattataagagagcaatagaggctgctaaatcaggtgcagattgccttaggataaacccgggaaatattggatcaaatgaaagagtaaaagaagtaattaaggcagctaaagattataattgtgcaataagaataggtgtaaatgctggttctcttgaaaaaaaaattttagaaaaatacaaggaaccttgccca

SEQ ID NO: 212665 - DNA, 604 bp, Unknown
  Bacterial polypeptide expressing nucleotide sequence isolated from the Sargasso Sea
atgagcataagaccttttagagatattaaaagaagaaaaactagagaaataaatgtaggtaaagtaaaagtaggtggaaataatcctatttcagttcagtcaatgacaaatactttgaccacagatataaaagctacgattaatcaaataaatgatattcacagtgagggtgctgacattgtaagggtctcttgtccagacgaagcatcaacaaaagcacttaaagagattgtaaatcatgtagacattcctatagttgcagatattcattttcatttcaaacgagcaatagaagctgctgaaaacggagctagctgtttaagaataaatcctggaaatattggaaatgtaagtagaattaaagaggtagtaagagcggcttctcaaaacaactgctctataagagtaggtgttaatgctggctctttagaaaaagatattttagaaaaatttagagaaccttgtcctgaggcattagttgaaagtgctttaagaaatataaaaattttagaggacgaaaattttcataatataaaggtaagtgtaaaatcttcagatttattcttatccattatggcttatcgccaacttcaaagaaaataga

SEQ ID NO: 212666 - DNA, 907 bp, Unknown
  Bacterial polypeptide expressing nucleotide sequence isolated from the Sargasso Sea
tcgtgccctgacgaaggttctacaaaagcacttaaaaatataattaaagaaattaaagttccaattgtagcggacatacactttcattataaaagagctatcgaagctgctaaaatgggagctagctgtttaagaatcaatcctgggaatataggttctagcgatagagtcttagaagtacttaaagctgccaaagattttaattgctctattagaattggagtgaatgctggttcattagacaaagctttactagaaaaatacaaagagccttgtccagatgctttagtagagagcgctatgtataatgtaaaactattagaggataatgatttctttaatttcaaaattagcgttaaatcttccgatgtttttttaacagtgaaatcttatagaaaactatctaagatttgtgactatcctttacacctaggtgtaacagaagctggtggtcttctttctggtagcattagatcatcaattggaataggacaacttttgatggaaggtataggagatactataagagtttcactttcttctgatccagtagatgaaataaaatcaggttttgaaattttaaaatcactaggcattagggctagaggggtaaacattatttcttgtccatcttgcgctcgccaagcctttccagtcattgagaccgtaaaagaattggaaaaaaagctgtctcatataaaaaaaccaattaccctatctataataggatgcgtggttaatggacctggagaagcagcccaaaccgaaatcggtcttactggtggaggtcaagacaataatctattatatttatctggcatacctcactctaaagtagctagctcaaaaataataaataaagttgttcaacttgttgaagaaaaagtaaaagaaaaaaataattaaa

SEQ ID NO: 212667 - DNA, 826 bp, Unknown
  Bacterial polypeptide expressing nucleotide sequence isolated from the Sargasso Sea
gatattgtaagagtttcatgtccggatgaagactctacaaaatctttaaaagatattgttagggaggtaaataccccaattgttgctgacatacattttcattacaaaagagccatcgaggctgcaaaaatgggagcaagttgtttaagaataaatcctggcaatattggttcaaaggaaagagtgctagatgttttaaaagccgcaaaggataacaactgttcaataaggataggagttaatgcaggttctctagataaaactttattagaaaaatataaagaaccatgtcctgaagctttagtggaaagtgctgaatacaatataaaattatttgaagataatgatttttttaattttaaaattagtgttaaatcttctgacatatttttaactgtgaaatcttatcttaaactttcaaaaatatgtgattatccattacatcttggtgtaactgaagctggtggtttatttactggcagtataaaatcttcaattggaattggacaacttttaatgcaaggaattggtgatactattcgagtttctctgtcctcagatccggttgatgaggtaaaagcaggttttgagatattaaaatctttaggaattagatcaagaggggttaatataatttcttgtccttcctgtgccagacaagctttcccagtcatagaaactgttaaagaattagaaaaaagattatcacatataacaaagccaataaatttatctattatagggtgtgtagttaatggtccaggtgaagcagcacaaacaaaaattgggttaactggcggaggccaagatagcaatttgttatatc

SEQ ID NO: 212668 - DNA, 756 bp, Unknown
  Bacterial polypeptide expressing nucleotide sequence isolated from the Sargasso Sea
actactgatcatgtttcaactataaagcaaataaaggatctagaggaagctggagcagacatagtgagagtgtcttgtcccgatgaagcttcaacaaagtctttaaaaaaaatagtaaaagaaattaaagttccaatagttgctgatattcattttcactataagagagcgattgagtctgcaatttcgggcgcaaaatgtttgagaataaatccaggaaatattggctcaaaagagagaattaaagaagtagtaaaagccgcaaaggattacgactgcgcaattagaataggagttaatgcaggatctttggagaaaagcatcttggaaaaatataaagagccttgtccggaagctttagttgagagcgcaacacacaatattaaacttctagaggatagtgatttttttaattttaaagttagcgtaaaatcatcagatgtttttttagcagttaaagcatacgagaaattatctaaattgtatgactatccccttcatcttggtatcactgaggcaggaggtttacttactggaagtataaagtcttccatagggcttggtagacttctaatggaaggaattggagacactataagagtttctttatctgcagatcctatagaagaggttaaggcaggttttgaaatattaaaagctttaggaatcagatcaaggggagtgcaaataatttcatgtccatcatgtgcaaggcaagctttccctgtcattgacaccgtaaagattttagagaaa

SEQ ID NO: 212669 - DNA, 530 bp, Unknown
  Bacterial polypeptide expressing nucleotide sequence isolated from the Sargasso Sea
gatgctaagaccgtatcaacaaattcatagaagaaaatcgcgcgtaattaaagttggtgatgtaagtatcggcggaaataatcaaatcgcagttcaaacaatgacaaatactttaacctctaacgcaaaagatactattgctcaaatagaaagatctgcaaaacttggagttgatttagttcgagtttccgtaccagataaagagtcttcacattctttaaaagaaattgttaaacatagccctgtgccaattattgcagatatacatttccattataaaagaggaatcgaagcagcaaataacggtgcttcttgtattagaataaatcctggtaatattggaagtattgaaagaataaaagaagttattaaagctgctaaagataataattgctcaattagagtaggtgttaatgcaggaagcttagaaaaacaaattttagaaaaattctctgaacctaatcctgaagctttagttgaaagtgctaaattaaatataaaaatacttgaagataatgatttcactaatt

SEQ ID NO: 212670 - DNA, 763 bp, Unknown
  Bacterial polypeptide expressing nucleotide sequence isolated from the Sargasso Sea
attggaaataaagataaaataaaagaagttgttaaagctgcagttgataacaattgttcgattagagtaggagtaaatgcaggatctttagaaaaagatatcttagaaaaatataaagaaccttgtccagaagctttagttgaaagtgctctaaggaatatcaagatacttgaggatgaaaattttcaaaatttaaaggtaagtgtaaagtcatcagatgtttttttatcgatacaagcatacaaacaattgtcaaaatccactgattatccattgcatttaggaattacagaggcaggaggctttatacctgggagtgtaaaatcctctattgggctaggaacattgcttttagagggtattggcgacactatcagaatttctttatcagataatcctgttgaagaagtaaaaattggaaatgaaatactaaaatctctaaatttaagggaaagaggagtcaaaataatttcttgtccttcttgtgcaagacaaggctttgaagtgatcgaaactgttaaaattttggaaaaaaaactttctcatataaaaactcctataactttatctgtaattggttgcgtagttaacggacctggagaagcggcgcaaacagatgtggggataactggaggtaacaaaggaaataatatgctttatttatccggagtacagtctgaaaaagttttaacgcgtgatatgatcgataaagttgtaagtgaggttgagaaaaaagcttctgaattggataattcaaaatgat

SEQ ID NO: 212671 - DNA, 892 bp, Unknown
  Bacterial polypeptide expressing nucleotide sequence isolated from the Sargasso Sea
atgagcataaggcctttcagagacataaatagaagaaaaacaaaagttataaatgttggtgatgttaaagtaggtggtgacaatcctatatcagttcaatctatgactaatactttaactaccaacgttaaagctacagtaaatcaaattatagaaatacaaaatgaaggagctgatttggtaagggtttcatgtcctgatgaggactcaacaaaggcattaaaagaaatagctaagcaagtaaaaatacctattatagcagatattcattttcattataaacgtgctgttgaagcagcaatcagtggagctagttgcttaaggataaatccaggaaacattggagacaaaaaaaaaataaaagaagttattaagtctgctaaagataatgattgttctattagagttggtgtaaatgctggttcgttagaaaaagatattttagaaaaatataaagaaccttgcccagaggcattggtagagagtgcacttagaaacattaaaattttggaggatgaagatttctttaatttgaaagtaagcgtaaaatcctcagatgtttttttatctgttgaagcatatagacagctctcaaagatatcagactaccccctacatcttggaattacggaagcaggaagttttataagtggaagcattaaatcctcaatcggaataggttcgcttcttcatagtgggataggcgatacaatcagagtctcattatcagataatcccgttaaagaggtaaccataggtaatgaaattttaaaatctttaaatttaagaaatagaggcgttaaaataatagcttgtccatcatgtgccagacaaggatttgaagtaattaatacagttaaattattagaagagaaactgtcccatataaaga

SEQ ID NO: 212672 - DNA, 933 bp, Unknown
  Bacterial polypeptide expressing nucleotide sequence isolated from the Sargasso Sea
tataacagtgcaatcaatgactaacactccgactactaatgtcaaatctacaataaatcaaattaacagtttagaggaaaaaggagcggacatagtaagagtatcttgtccagatgaaagctcgactcaatctttgaaaaatataataaaaaatgtaaatgttccaatagttgctgatattcattttcattataaaagggctattgaagcagcgaaaaatggagcagcatgcctaagaattaatcccggcaatatcggatccaaagatagagttttagatgttgtaaaagccgctaaggattataattgctcaataagaattggagtaaatgctggatcattagaaaaaaaattattagataagtacaaggagccatgtccagaggcacttgttgaaagcgctatctataacgtaaagttgttcgaggataatgatttttataactttaaacttagtgtaaagtcttctgatattttcttagcaataaaatcttatgaaatgctgtcggaaaaatgtaattacccattacatcttggaatcacagaagcagggggtttaattacgggtagtattaaatcttctattggaatgggacatttattaatgaatggaattggtgatactattagagtctcactttcagctgatcctcaagaagaggtaaaagcaggttatgaaattttaaaatctcttaatataagatcgagaggtgtcaaaataatttcttgtccatcttgcgctagacaagcttttcctgtaatcgaaacagtaaaagccttggaagaaaaattatctcatattaaaacaccaataactttatccataatcggttgcgtagtaaacggtccaggtgaagcttcgcaaacggaaataggtctcaccggcggaggtaatgatagtaatttacttttatttgtcggtatacctcataa

SEQ ID NO: 212673 - DNA, 552 bp, Unknown
  Bacterial polypeptide expressing nucleotide sequence isolated from the Sargasso Sea
aatgagcattagacctttcagagatattaaaagaagaaaaacaaaagaaattaacgtaggcaaggtcaaagtaggggcaaataatcctattacagttcaatcaatgacaaatactcttacaactgatgttaaagccacaataaaacaaataaatgaaattcataatgaaggtgcagatattgttagagtatcttgtccagatgagtcatcaactaaagctttgaaagaaatcattaagagcgttgaagtacctattgttgcagatattcattttcattataaaagagcaatcgaggcagcagtaaatggagctagttgtttaagaattaatcctggcaatatagggagtgcacacaaaataaaagagataattaaagctgcgagagacaataattgctctataagagtaggagtaaacgctggttctttagaaaaagatattttagacaaatataaagaaccttgtccagaagctttagtagaaagtgctttgagaaacataaaaattttagaagatgaggaattttacaatttaaaaataagcgtgaaatc

SEQ ID NO: 212674 - DNA, 734 bp, Unknown
  Bacterial polypeptide expressing nucleotide sequence isolated from the Sargasso Sea
gtcatgtcctgaccaagcttcaacacaaaatctcagagaaatcgttagagagtccccggtacccttagtggcagatatacacttccactatcgtaggggtatagaagctgcagaagctggggtagcatgtttaaggataaatccaggcaatattggtgtttcagataaagttaaggaggtagtgaaagctgctgtcgataacgattgttctatgcgcataggagttaatggaggaagcttagaaagacacttgcttgagaagtacaacgaaccgtgccctgatgctatggtagagagcgccttggaacacgctcgtttactagaggacaacgatttttttaactttaagataagtgtaaaagcatcaaacgtttttcttgcaacagcggcttatcaaaaactagctgaggtgaccgattatccgctgcacctcggtataaccgaggcgggcagttttagagccggaactgtaaaatcggcaataggcatgggtatgttattattgaatggcattggagatacaatccgcgtatctctatctgctgatcctgtggaagaggtccgagtagggtttgatatattgaaatcccttaatctcagacatcgaggagtaaacataatttcgtgcccatcttgtgctcgacaacagttcgatgtgatcgataccgttaaaagtttggaagagcggttgtctcatataactacacccataacattatctattatcggatgtg

SEQ ID NO: 212675 - DNA, 649 bp, Unknown
  Bacterial polypeptide expressing nucleotide sequence isolated from the Sargasso Sea
aatgagtaactggatcaaaagaaaaaaaactaaagtcgtaaaggttggtaatgtctctgttggaggcaataatccaatatcaattcaatctatgacaaacacagacacctgtgatgaggtttcaactataaaccaaattaaggatcttgaagcagcaggtgcagatattgttagagtctctgttccaggatttgaagaagcaaaagcatttaaaaagatcaaaaatgcagtaaatattccattggtagctgatattcattttgattataaaatagctctagaagttgcagattctgcagattgtcttcgaataaatcctggtaatattggaaaagaagacagagtaaaagaagttataagcgctgcaattgataatgatattccaatcagggtaggagttaatgctggttcactagaaaaagatcttcaaaaaaaatatggtgaaccaaatgcagatgctttagtagagtctgcgcttaggcatgttgatattttagataaatttaacttcgaaaattacaaaatgagtcttaaggcgtcaaatattgaaatgacagtagaagcatacagaaaaatctcaaatataattgatcagcctcttcatcttggaattactgaagctggaagttacagagctggaaacggtaag

SEQ ID NO: 212676 - DNA, 529 bp, Unknown
  Bacterial polypeptide expressing nucleotide sequence isolated from the Sargasso Sea
aatggaattaaggcctcatagaattattaaaagaaagaaaactagagaaattaaagttggaaaagttttagttggaggtaggtcaaaaattagtgttcaatcaatgactaatactttaacaactgatattaaaagtactatttctcaaataaacattctagaggactcaggggcagatatagtaagagtttcatgtcctgacgaagagtcaacaaaagcccttaaagatattgtaaagaatgttaacgtccctatagttgctgatatacactttcattataagcgagctattgaggctgcaaaaatgggtgctgcttgtttaagaattaatccaggcaatattggatcaaaagagagaattttagaagtggtcaaagcagcaaaagattttaattgttcaattagaattggagtaaatgctggttcattagataaatctttattagaaaaatataaagaaccttgcccagaagcattagttgaaagtgcaagctataatataaaattattagaagataatgatttttca

SEQ ID NO: 212677 - DNA, 775 bp, Unknown
  Bacterial polypeptide expressing nucleotide sequence isolated from the Sargasso Sea
taaagaaagcaaagttaaagaagttatagatgctgctaaacataataatgttccaataagagttggagtgaatgcaggatcactagagaaagaccttcaaaaaaaatatggtgaaccaaatgctgatgctttggttgaatccgcattgagacatgttgatatattagataagtttaactttgataattataaaatgagtttaaaagcatcaaatattgaaatgactgtagaagcatatcgcaaaatctctaaaataattgatcaaccacttcatcttggaataacagaagcaggcagctatagagcaggaactgtaaaatcatctattggtgtaggtatgctactttcagaaggtattggagatacaatacgaatatcactcgcctctgaccctgttgatgagatcaaagtcggttgggatattcttaaaagtttaaacataaggagcagaggagtaaaaatagtcgcatgcccaagttgttctagacaaaatttcaatgttattaaggttgttaatgaccttgagcaaaggctagaagatatatcagatgatattgaagtagctattataggttgttatgttaatggacctggtgaaagcaaggcagctgacataggtcttaccggagcaagtccgagcaatcttttatatattgatggatcgccaaatatcaaaattaaaaatgataacttagtcgatgaacttgaaaaacaagtaagacaaaaagtttcagacaataaacttttatctgaaaagataattgctaggagctaa

SEQ ID NO: 212678 - DNA, 712 bp, Unknown
  Bacterial polypeptide expressing nucleotide sequence isolated from the Sargasso Sea
gattcggatcggcgtcaacgccgggtcgctggaaaaggacttacagaaaaagtacggcgagccgacaccggctgcgctggtcgagtcggcgatgcgtcacgtcgagcacttggatcgcctggactttcaggattttaaggtcagcgtgaaggcttccgacgtgtttatggctgtcgatgcctatcgcttgctggccacgcaaattgaacagcctctgcacctggggattaccgaagccggtggcttgcgctctggtacggtgaagtccgcggtcgggcttggcatgctgctggccgagggcattggtgacaccatccgcatctcgctggccgctgatccggtcgaggagatccgtgtcggtttcgatatcctcaagtccctgcgcctgcgttcacgtggtatcaacttcatcgcctgcccgagctgctcgcggcagaactttgatgtggtcaagaccatgaacgagctggagacgcggctcgaggatgtgctgaccccgatggacgtggccgtgattggctgcgtggtcaatggcccgggtgaagccaaagaggccgatatcggcttgaccggcggtacgccgaacaacttgatctatcaggacggcaagccggaccagaaggtggataacctggagctggtcgaccggctggaaaaaatgattcgagacaaggtcgcagccaagcaggcggcggaagccaataccatcgcc

SEQ ID NO: 212679 - DNA, 594 bp, Unknown
  Bacterial polypeptide expressing nucleotide sequence isolated from the Sargasso Sea
aatgagcgtaagaccatttagaaatattaagagaagaaaaactaaagagataaaagttggaaatgtaaaggttggtggagataatcctatttctgttcaatcaatgaccaacactttgaccactgataccaaagcaacgattaatcaaattaacaaaattactgaggagggagcagatattgttagagtttcttgtccagatgaaagttcgacttttgctcttaaagaaatagttaagcatgtatcagtgccaattgtagcagatattcattttcattataagagagccattgaggcagcaaaaaatggagctaaatgtttaagaattaatccaggaaacattggagatgaatcaaaaataaatgaagttataaatgcagctaaagacaatgattgttctataagagttggagtcaatgccgggtctttagaaagagatattttagaaaaatttaaagagccttgcccagaagctctggttgagagtgctcttagaaacataaagattttagaggataaaaattttttaaattttaaaattagtgtcaaatcatcagatgtttttctttctacatctgcctacagacagctttc

SEQ ID NO: 212680 - DNA, 652 bp, Unknown
  Bacterial polypeptide expressing nucleotide sequence isolated from the Sargasso Sea
aatgaacttaagaccatttagacatattgaaagaagaaaatctaaagtcattaatgttggtgaagtaaaaataggtggagataatccaatatctgttcagtctatgacgaatactttaacaactgacaccaaatcaacaattgaacaaataaataaaatttgtgaagaaggagcagatttagtaagagtttcttgtcccgatacaagctctacaaaagcattaaaagaaataacaaaacattctcaagttcctattattgcagatatacattttcattataaaagggcaattgaagctgctgaaaatggagcaaagtgcttaagaattaatcctggcaatataggagatgaaaaaaaaatatacgaagtgctgagtgcagcaaaaaataataattgttcaataagaataggagtaaatgctggatcattagaaaaagatattttggaaaaatacaaagaaccttgtccagaggctttagttgaaagtgcagaaagaaacataaaaattctagaagataaagatttttttaatttcaaaataagcgtaaaatcttcagatgtttttttatcaatagcttcttatcgattgctatctaaaaaatgcaattatcctttgcatttaggaattactgaggctggagcttttattcct

SEQ ID NO: 212681 - DNA, 637 bp, Unknown
  Bacterial polypeptide expressing nucleotide sequence isolated from the Sargasso Sea
atgaaaattaatattcaagaatattgcaaagatatctcagattatcaaagattcccaactagagaggttatgttaggtgatattgcaattggaaaagataatccaatcagagttcaatctatgaccactactgatacaatggacaccaaaggtacgatagctcagtctatcaggatgatagatgctggatgcgaaattgttagaattactgctcctagtatcaaagaggcaaaaaaccttaaaatgattcgtgatgggctaagagataaaggctataaaacacctttggtagctgacattcatttcactccgaatgctgctgaagtagcggcagagattgtagaaaaagtaaggattaatcctggaaattttgttgacaagaaaaaatttgagatgcttgactattctaatcgagattatgaagatgaattagttagaatttcagagaggttttctccattaataaagatttgtaaagataattccactgctatgagaatagggacaaatcatggttctctttctgatagaatacttagtagatatggagatactcctttaggaatggttgaatcagcaatggaatttatacgtatatgcgaatattggaattatcatgatattatactaagtagaa

SEQ ID NO: 212682 - DNA, 922 bp, Unknown
  Bacterial polypeptide expressing nucleotide sequence isolated from the Sargasso Sea
acagaagcaggcgcagatattgtaagagtatctgccccagatgaagattctacgcttgcattaaaagatattgtgaaacatgtttctgttccagtagttgcggatattcattttcattataaaagagcgatagaagctgcagaaaatggagcaaagtgtttaagaataaaccccggtaacattggagaagaaaataaaattaaagaagtagtaagtgcagcaaaaaataatgattgtgcaataagaattggtgtaaatgcaggatctcttgaaaaagatattttagaaaaatataaagaaccttgcccagaagctttagttgagagcgctcttagaaatatagatattattgaaaaccaaaatttttttaattttaaagttagtgttaaatcttctgatgtttttttatcaatagaagcttacagacaattatcaaaggtaactaaatacccgctacatcttggaattactgaagcgggtagttttttacctggaagcataaagtcgtcgattggatttggaacattattattggaaggaattggagatactattagagtttctttatcagacaatcctgttgaagaagttaaagtaggaaacgaaatattaaaatcgttaaatttaagaaatagaggagtaaaaatcatatcttgcccatcttgtgcaaggcaagcttttcaagtaattgaaacagtaaaaatactagaagaaaaattatctcacataaaagcaccaatatcattgtcaattattggatgcgtagtaaatggaccgggagaagctgcacaaactgatattggaattacaggaggtggaaaaggcaataatatgctttatttaagtggtattgagagtgaaaaaataactacagaagaaattatttctaaagttgtaagattagtagaaaaaaaagctgaag

SEQ ID NO: 212683 - DNA, 820 bp, Unknown
  Bacterial polypeptide expressing nucleotide sequence isolated from the Sargasso Sea
ggcgactttcattacaacggacataaattattaattgattatcctgaatgtgctcaggcattagataaatatcgcattaatccaggaaatgttgggtttggtaaaaagaaggataatcagtatgcaattatgatcgaacaggctattaagtatgataaaccaattcgaattggcgttaattggggtagcttagatcaagatttattaacaaaaatgatggacgataatgccaagcggtcggcgccattagacacagatgaagtaatgcaagaagcattaattatttctgcactaaatagtgctgagcgtgctgttgaacttggtttacctaaagatcatatagttttgtcatgtaaagtgagcggagttcaaaaattaatttcagtttatagagatatctcgcaaagatgcgaatacgcattacatcttggcttaaccgaagcaggcatgggatcaaaagggattgttgcttctactgcttcacttggtgttctactacaagaaggaatcggcgacacaatccgaatttcactgactcccgaacccaacggggatagatgtaacgaggttattgttgcccaagaaatattacaaacaatgggccttcgttcatttaccccactggtaacagcttgtcctggatgtggaagaacaacgagtacggttttccaggagttggcggaaaatattcaagcttatgtgcgtggtcaaatgccaatatggcgtaagaaatatattggagttgaagatatgaatcttgctgtaatgggttgcattgttaatggacctggcgaaagtaaacatgcggatattggtataa

SEQ ID NO: 212684 - DNA, 488 bp, Unknown
  Bacterial polypeptide expressing nucleotide sequence isolated from the Sargasso Sea
tcctttacatttaggtatcactgaggctggaagttttatatctggaagtataaaatcttcaattggacttggtagtcttttgatggatggaattggtgatactataaggatttctttatctgataatcctacaaaagaagttacaataggaaatgaaattttaaaatcgttaaatttaaggaatagaggagttaaaattatatcttgcccttcttgtgcaagacaagcttttcaagtaattgatacagttaagttattagaggaaaaactatctcatataaaaacacctataactctttctgtaattggttgtgttgtaaatggacctggagaggcagccatgactgatgtaggtattactggaggtggaaaaggtaataatatgctttatttatctggagttcaaaatgaaaaagttttgaccaaagatattattgaaaaagttgttacagaagttgaaaagagggcatctgagttggaaaactaaa

SEQ ID NO: 212685 - DNA, 431 bp, Unknown
  Bacterial polypeptide expressing nucleotide sequence isolated from the Sargasso Sea
gatgatccctgaacgcaggaagaccgtggctgtcgatgttggaggtgtccgcataggcggcgatgctccggtgatagttcagtccatgacgaacacagacactgcagacgtgcagtcgacgtgcgatcagatttcacttctagccgaagcaggtagtcagttagttcggataaccgtcaacaatcacgaggcggcacaagccgtcccagagattatatcgcgccttcgagaagcaggtaacgaaacaccgatcgtgggagactttcattataacggtcatcttctgctgactcagtaccccgaatgtgctcggtctctagctaaattgcgcatcaaccccggaaacgtaggaacaaaacaccgggacgctaatttcacgcaaatcgtggaggtggcgatagaatacgacaagcctgtgcgcataggtgtca

SEQ ID NO: 212686 - DNA, 550 bp, Unknown
  Bacterial polypeptide expressing nucleotide sequence isolated from the Sargasso Sea
atgcagcatcagtcgcccgtcaagcggcgcgtttcccggcagatcaaggtaggctcggtactggttggtggtgatgcgccaatctcggtacagagcatgaccaacaccgaaacctgcgacgtggccgccaccgtggcccagatacggcgcctggaagaggtgggtgccgatatcgtgcgggtatcggtgccgagcatggaggccgccgaagcctttggcgagattcgcaagcaggtgggcatcgccctggtcgcggatattcacttcgactacaagattgccctgcgcgtggccgacctgggtgtcgactgtctgcgcatcaacccgggcaatatcggtcgcgaggaccgcgtcaaggcggtggtggacgcagcccgtcacaacggcattccgatccgcatcggcgtcaacgccgggtcgctggaaaaggacctgcagaaaaagtacggcgagccgacgcctgcggcgctggtcgagtcggccatgcgtcatgtcgagcacctggatcgcctggactttcaggattttaaggtcagcgtgaaggcctccg

SEQ ID NO: 212687 - DNA, 691 bp, Unknown
  Bacterial polypeptide expressing nucleotide sequence isolated from the Sargasso Sea
ttcagccccgaagaatttgctgccatcggccagcgcatccgtgagacgtttgagcccttggtgaccctgctgcgggaccagaacaaagcgcttcgaatcggtgtgaaccatggctccctggcggagcggatgctgttcacctacggcgacacccctgaggggatggtcgaatcagcgatggaattcgtgcgcatctgccacgagcttgatttccacaacatcgtgatttcgatgaaggcctcgcgggctcctgtgatgctcgcggcttaccgcctgatggcggacaccatggacaaggaaggcttcaattaccccttgcacctgggcgtgaccgaagccggcgatggtgattacggccgcatcaagagcaccgcaggcattgccactctgctggccgatggattgggagacaccctccgggtctccctgacggaggcccccgaaaaagaaatccccgtctgttactcgattctccaatccctgggtctgcgcaagaccatggtcgagtacgtcgcctgccccagctgcggtcgcaccctgttcaatctggaggaggtgttgcacaaggttcgcaacgccacatcccacctcacgggtctggacatcgccgtgatggggtgcatcgtcaatggccctggcgagatggccgacgctgattacggctacgtcggcaaaacccctggcgtgattt

SEQ ID NO: 212688 - DNA, 769 bp, Unknown
  Bacterial polypeptide expressing nucleotide sequence isolated from the Sargasso Sea
atggaaataagacctcatagaattattaaaagaagaaagacaaaaaaaattaagctgggaaatatttttgttggtggtgattcccctatctcagtgcaatctatgacaaatactcttacaacagattataaagctacgataaaacaaataagagatttagaggaagcaggcattgacatagtaagagtatcatgtcctgatgaagactcgactaaagctttaaaaaaaattacaaaagaaataaagatcccaatagttgccgacattcattttcattataaaagagcaattgagtcagcagtgtcaggggcaaaatgtttaagaataaatcccggaaatattggatctaaagatagagtcaaagaggttattaaagctgcaaaagattatgattgcgcaataagaataggagttaatgcaggttcactagataaaaaagttttagagaaatacaaagaaccttgccctgaggctttaattgaaagcgcaatacacaatattaaacttttggaggataatgacttttttaattttaaaattagcgtgaagtcttctgatgtttttttagctgttaaggcttatgaaggtttgtctaaacgatttgattatccacttcatctaggtattactgaagcaggaggattatttacagggagtataaagtcgtcaattggtattggaaaattattaatgcaaggaattggagacactataagagtttcactatcagcaaatccagtggaggaagtcaaggcaggatttgaaatat

SEQ ID NO: 212689 - DNA, 472 bp, Unknown
  Bacterial polypeptide expressing nucleotide sequence isolated from the Sargasso Sea
aatggaagttagaccacacagaactattaaaagaaggaagacaaaaaagattaaagtaggaaatgtatctatcggaggagaatcgattatttctgtacagtcaatgaccaacacaataacttcggatgtagcctcgactgtaaaacagataaatgaattaaaagaagcaggcgcggatttagtaagagtttcatgtcctgacgaagagtcaacagaggccttaaaaaaaatagttaaagcaacagatattcctattattgcggatattcattttcattataaaagagcaattgagtctgccaagtcaggtgctagttgtttaagaataaatcctggcaatataggatccacagaaaggataaaagaagtaattaaagctgccaaagatcatggatgttctattagaattggagtaaacgctggatctcttgaaaaaaaaattttagaaaagtataaagaacctgtccagagg

SEQ ID NO: 212690 - DNA, 629 bp, Unknown
  Bacterial polypeptide expressing nucleotide sequence isolated from the Sargasso Sea
agccttagttgaaagtgctttaagaaatataagattaattgaggatatggatttttcaaattttaaagttagtgttaaatcctcagatgtatttttgtcaatagctgcatataaattattatcagataaaacagattatccacttcacttgggaattacagaggcaggaagttatttacctggaagtattaaaacaactattggatttggaaatttattattaagtggtattggtgatacaattagagtgtcactttccgatgatccagttgaggaaattaaagttggaaatgaaatattaaaatccttaaatttaagaaatagaggtgtaaagatcatttcatgcccttcatgtgccagacaggcttttcaagttattgaaactgtaaaacaattagagaagaaattatctcacattaaagaaccaataactttgtcaattataggatgtgtagttaacggaccaggagaagctaaacagacagaaataggtgttactggcggtggaaaagataatcatatgctttatttgaatggattagaaaccgaaaaagttacaacaaatgatatgattgataaaattgtaactttagttgaagaaaaagtatctaatttacaaaataaataaa

SEQ ID NO: 212691 - DNA, 487 bp, Unknown
  Bacterial polypeptide expressing nucleotide sequence isolated from the Sargasso Sea
ttgggtataacagaagctggctcttttttaccaggaagtattaagtcatcaataggaatgggcagtttattaatgaatggaattggtgacacaataagagtttctttatccgacgacccagttgaagagataaaagtaggaaatgaaattttaaaatctttaaatttgagaaacagaggggtaaaaattatttcctgtccttcctgcgcgagacaggcatttcaagttatagatacagtaaaatctttagaagaaaaactttctcatataaaaacaccaattactttatcaattataggctgtgtagttaacggaccaggtgaggcagcgctcacagatataggtattactggaggaggaaagggcagtaatatgctttacttaaaaggaatacaaacagaaaaattaggtaatgcagaaattatctctaaagtggttagcatagttgaaaaaaaggcagaagaaattgaaaataaaaaaaaatgat

SEQ ID NO: 212692 - DNA, 547 bp, Unknown
  Bacterial polypeptide expressing nucleotide sequence isolated from the Sargasso Sea
agaaagttatagaaaaatatctaaactcattgatcaaccacttcatttgggaattaccgaagcaggtggttatagatcggggactgttaaatcttcagtagggctaggatctcttcttttagaaggcatcggagacacaataagaatttctttagcttctgacccggtcgatgaggtcaaagtgggatgggatattttaaaaagtcttaaaattagatccagaggtattaattttatagcttgtcctagttgctcgagaatgaattttgatgttattggcactatgaataaattagagtctagactagaggacataaaagaagatttggatgtggctgtaataggttgttatgttaatggtcctggggaatctaaacatacagctataggtgtaactggcggatcccctaagaacttaatttatattgatggaaaacctgaccataaggtcgatagcactgaactagcagagcacctagaaagtctaattagggataaaatagaaaaaaataaagaacaagaaaataacctaattttaaaaagttaa

SEQ ID NO: 212693 - DNA, 981 bp, Unknown
  Bacterial polypeptide expressing nucleotide sequence isolated from the Sargasso Sea
agatcaaagcgcttgaacgtgtgggcgctgatattgttcgtgtctccgtccccacgatggatgccgcagaagccttcaaactgatcaagcaacaggtttcggttccgctggtcgccgacattcacttcgactaccgtattgcgcttaaagtggcggagtacggcgttgattgcctgcgtattaaccctggcaatatcggtaacgaagagcgtatccgcatggtagtggattgcgcccgtgacaaaaacatcccgattcgcatcggtgttaacgccggatcgctggaaaaagatctacaggaaaagtacggcgaaccgacgccgcaggctttgctggaatcggcaatgcgccatgtggatcatctcgatcgtctgaattttgatcagttcaaggtcagtgtaaaagcatctgatgttttcctcgccgttgaatcctatcgcctgctggcaaagcaaatcgatcaaccgctgcatttagggatcaccgaagccggtggtgcgcgtagcggtgcggtgaaatcggcgatcggtcttggcctgctgttgtctgaagggattggcgatacattgcgagtttcgctggcagccgatccggtggaagagatcaaagttggcttcgatatcctgaagtctctgcgcatccgcgctcgcgggatcaacttcatcgcctgtccgacctgttcgcgccaggagtttgacgtgatcggtacggttaacgcgctggagcagcgtctggaagacatcattacgccaatggatgtctccatcatcggctgtgtggttaacgggccgggtgaagcgctggtgtccacgctgggtgtgaccggcggcaacaagaaaagtggtctctatgaagatggcgttcgcaaagatcgtctggataatagcgatatgattgaccagcttgaagcccgcattcgtgccaaagcgacgatgctcgacgaagcacagcgtattaacgtgcagcaggttgaaaaataat

SEQ ID NO: 212694 - DNA, 1033 bp, Unknown
  Bacterial polypeptide expressing nucleotide sequence isolated from the Sargasso Sea
taaagttggaggaaataatcctatatcagtccaatcgatgaccaatactcttacaacggatacaaatgcaactattaaacaaataaacgaaattcaaagtgaaggtgctgacatagtaagagtttcttgtccagatgaatcatcgtctaaagctttaaaagaaattactaaacatatagatgtaccgatagttgctgatattcattttcactataaaagggcaatcgaggctgcagctaatggagcaagttgtttaagaataaatcctggaaatattggtaatataaataaaattaaggaagttgtaaaagcagcacgagataacaattgttctataagagtaggtgttaatgccggatctctagaaaaagatattttagagaaatatagagaaccttgtcctgaagcattagttgaaagtgctttgagaaatattaaaattcttgaggatgagaattttgataatttaaaaataagtgttaaatcttcagatgtttttttatccatagaagcttatcgtcagttatcaaagtcaactgattatcctcttcatttaggtataacagaggcaggtggatttatacctggtagtattaaatcttcaattgggttaggtacattacttttagaaggtataggagatacaataagaatttcattatcagataatccagttgaagaggtaaaaattggtaatgaaatattaaaatctcttaatttgagggaaagaggagttaaaataatttcctgtccctcctgtgcaagacaggggtttcaagtaattgaaaccgttaaagttttagaacaaaaactttcacatattaaaactccaattactctatcagtaatagggtgtgtagttaatggtccgggagaagcagcgatgaccgatgtgggaataactggaggaaaaaaaggaaacaatatgctctatttgtcaggagtgcagtctgaaaaagttttaactagagacatgattgaaaaaatcgtaagtgaagttgaaaaaaaagcttctgaattagaaaattcctaa

SEQ ID NO: 212695 - DNA, 1099 bp, Unknown
  Bacterial polypeptide expressing nucleotide sequence isolated from the Sargasso Sea
aatgagtattagacctttcagggatataaaacgtagagtcacaaaagttataaacgtaggaaatgtgaaagttggtggaaataatccaatttctgttcaatcaatgactaatacaataacaaaaaatattaaagatactttaaatcaaattaatcaaatttctgaagttggaggcgacatcgtaagagtttcttgtccagatgaagattccacaagtgctctaaaagaaattacaaaacactctccaattcctgttgtagctgatatacattttcattttaaaagagccatagaagccgcagagaatggtgcagactgcttaagaattaatccaggcaacataggagataaaaataaaatttcagaagttatttctgcagcaaaaaataataactgttcaataagaataggggtaaactctggttcattagaaaaagatatattagaaaaattcaaagagccttgccctgaggcgctagcggaaagcgcaattagaaatataaaaattctagaagatttagatttttttaattttaaaattagtgttaaatcctctgatgtgtttctatctattaaagcatatagggaactctcaaaagctacagactatcctttgcatttaggcattactgaagcaggaagtttcgttcctggaagcgtaaagtcctctataggtttaggaaatttattattagatggtattggtgatactatcaggatttcactttcggatgacccagtggaagaaataaaagtaggtaatgaaattttaaaatcattaaatctaagaaatagaggagttaaaataatatcttgtccctcatgtgcgagacaaggttttcaggttatagatactgttaaaattttagaagaaaaactatctcacattaaaactccaataacgctttcaattattggatgtgttgtaaatggacctggagaggcagcattaactgatataggcataactggaggtggcaaaaatagcaatatgctttatttaaatggtgttcaaactgaaaaattagacaatcaagatattatttcaaaagttgttgagttagtggaaaaaaaggctgaagaaattgaaaaacaataa

SEQ ID NO: 212696 - DNA, 1096 bp, Unknown
  Bacterial polypeptide expressing nucleotide sequence isolated from the Sargasso Sea
atgaaatattcccactcaataaagagaaaaaaaacaaaaaaaattcaaattggaaatatttacgttgggggagactcgccaatcacagttcaaacaatgacaaatactcttacacatgacattgatgcaacgctcgagcagatatcacaaatcgaacaagaaggatgtgacatagttagagtttcagttcctgatgaaaaatcatcacaagcattaaaaaaaataattccagaaataaatattcctttagtagctgatatacactttcattataaaagagcacttgaggcagcagaaaatggagcacattgtttacgaataaatcctggtaacattggctctaaagataaggtaagagaggtcgttgaggccgctaaacagaataaaatacctattagaataggtgttaatgctggaagcttagaaaaaacaattttagaaaaatataaaagcccaaccgctgaagctttatttgaaagtgctaaattaaatattaaactattagaggatcttaattttgataatttcaaaataagtgttaaagcctcaaatgttttcactgctgtagagtcttatagaatgttatctaatttttgtgaatatccccttcatttaggtattactgaggctggaagttattttagtggttctattaagtcatctattggtcttgggttactcctttatgatggtatcggtgatactgtgagagtctcactttctgatcatccaacacaagaagttaaggtgggatttgaaatgttaaaatcattaaatttaagagactatggtgttaccataatatcatgcccgtcctgtgctagacagcagtttgatgtgattgagacagttaagagcgttgaaaaaaaactttctcatattaaaaaacctattacagtttctattatcggatgtgttgttaacggacctggagaggccaccatgacaaacataggtattacagggggtggtaataatactcatatggtctacgtggatggtgaaaaaagtcatcgaattcaaaatgaagatttagttgagtacttggttgaaactatcgaagataaagttgaacagatacatcatttaaaatgaa

SEQ ID NO: 212697 - DNA, 1072 bp, Unknown
  Bacterial polypeptide expressing nucleotide sequence isolated from the Sargasso Sea
tgatagaaaaaaaactaaagaaattaatgtaggtgatgtaaaagttggaggtgataatccaatttcagttcaatctatgaccaatacattgacaactgatgtgacagccacaataaaacaaattcaagaaattcatgaagaaggtgctgacattgtaagagtgtcttgtccagatgaagactcttcgaaagctttaaaagaaatcaccaaaaatgttcaaatccctgtaattgctgatattcattttcattataaaagagctattgaagctgcagagaatggcgcaaagtgtttaagaatcaatccaggaaatattggagataaaaaaaaaattcatgatgttttaaaagctgcaaaagataatgattgttcaattagaataggtgttaatgctggatctttagaaagagatattcttgaaaaatataaagaaccgtgtccagaggcattagtagaaagtgctttgagaaatataaaaattttagaggatgaagatttttttaattttaaagtaagtgtcaaatcttcagatgtatttttgtcaattgcagcttacagacaactttctaaggtcatgaattacccattacatctaggaataacagaagcaggaggttttgttactggcagtgttaagtctgctataggtcttggatcattactcttggatggtattggtgatacaataagagtatctttatctgatgatcctgtaaaagaagttaaaattggaaatgaaattttaaagtcgttgggattaagaaacagaggagtaaaaattatatcttgcccatcttgtgcaaggcaagctttccaagtaattgatacagtaaaaatactagaggaaaaattatctcatataaaaactccaataacactgtctattataggctgtgttgttaatggtccaggtgaagctgctttgaccgatattggtataactggcggtggaaaaggaaataatatgctttatttatcaggcgttcaaagtgaaaaggttttaacaggtgaaattataaataaagtagtatcagaagtcgaaaaaaaagtagctgaaatagaaaaaaaataa

SEQ ID NO: 212698 - DNA, 854 bp, Unknown
  Bacterial polypeptide expressing nucleotide sequence isolated from the Sargasso Sea
atctatcccagtagtggcagatattcattttcattataaaagagcgatcgaagcagctgaaaacggagctaaatgtttaagaataaatcctggtaatattggtgaggagtcaaaaattcatgatgttcttagcgccgcaaagaataatggttgttcagttagaattggagtaaatgctggatcattagaaaaagatatattagataagtttaaagagccttgtccagaagccctagtcgaaagtgctttaagaaatataaaaatattagaagataaagatttttttaattttaaaataagtgttaagtcttcagatgttttcttatcaattggtgcttatagacaattatccaaagtctgtgattatcctcttcatttaggcatcactgaggctgggagttttatatctggaagtataaagtcttctataggacttggaagtctattaatggatggaattggagatacaataagaatttctttatcagataatcctacaaaagaagtaacaattggaaatgaaattctaaaatcattaaatctaagaaatagaggtgttaaaattatatcatgcccctcttgtgcaagacaagctttccaagtaattgatactgttaaaatattagaagaaaaactttctcacataaaaacaccaataactttgtcaataatagggtgtgttgtaaatggacctggagaagcagccatgacagacataggtattactggaggcggaaagggtaataatatgctttatttatctggagttcagagtgaaaaggttttgaccaaagatattattgaaaaagttattacagaagttgaaaaaaaagtttctgagctggaaaactaaa

SEQ ID NO: 212699 - DNA, 1111 bp, Unknown
  Bacterial polypeptide expressing nucleotide sequence isolated from the Sargasso Sea
atgctaagaccatatcaaaaaataaatcgaagaaaatctcgtactattaatgttggaaaagtaaatattggaggagagaatccaattgcagttcaaacaatgacaaacactctaacctcagatgctaaaaatactatttcccaaattgaaaggtcagctaaattaggtgcagacatagtaagagtttctgtaccagataaagattcatcaacttctttaaaagaaattgtaaaacatagccctgtaccaattgtagcagatatacattttcattatctgagagcaattgaagctgctgaaaatggagcagcatgtattaggattaatccaggaaatattggtaatcaagatcgcatacaagaagttataaaagcagctaaaaataataattgttcaatacgtgtaggtgtaaatgctggtagtctagaaagacaaattttagaaaaatattcagaaccaactcctgaagcacttgtagaaagtgcaaaattaaatattaaaattttagaagataatgactttactaatttcaaaatcagtgtgaagtcatcagatatatttatgtcaattaatgcttatgacaaattagctaagctttgcgactatcccttacatcttggaataacagaagctggtgggaaaagaacagggtctatcaaatcatcgattggtatcggtaatttacttttacaagggattggagacactattcgtgtttctttatctgatgagcctgaagaagaggtaagagtaggttttgaaattttaaaaagtttaggattaagaaatagaggtgttaaaattatatcctgcccatcttgtgcaagacaacagtttcaagttatagaaactgtaaaaaatcttgaaaaaaaattggatgatgtatcaacaccaattactgtttcaattattggatgtgtagtaaatggtccaggagaagctacaatgactgatattggagttactggaggtggaaatggaacacatatgatttatttagatggaaaaaaaaataatgtaattaaaaatgttgatcttgaaacttacttagaaaaattaataagaaaaaaatcagaacaaattcaaataagtgaattaaatgaaacttaga

SEQ ID NO: 212700 - DNA, 982 bp, Unknown
  Bacterial polypeptide expressing nucleotide sequence isolated from the Sargasso Sea
atgagcataagaccttttagagatataaaaagaaaaataactaaagaagttagaataggaaatattgttttgggaaataataatcctattgttgtacaatctatgacaaacactttaacatctaatgcttcagaaacattaaaacaaattgtcaatatatcaaaagagggtgcggggttagttagagtatcagtgccagatgttgatagcagcaaatctcttaaggagataactaaacactcacctgtcccaataatagcagatatacattatcattataaaagagccatagagtctgctgaaaatggtgctaaatgtttaagaattaatcctggaaatattggagataagaaaaaaatcaaagaaattatatctgctgcaaaaaataacgattgtgcaatcagaattggagtgaatgctggatcacttgaaaaagatattctagaaaaatacaaagaaccttgtccagaggctttagttgaaagtgctgtaagaaatattaaaataattgaagaagaagatttttttaattttaaagttagtgtcaaatcttcagatatttttttatcaattggtgcatataaacaattatcaaaaattaccgactatccacttcacttgggtattacagaatctggtagttttgtaccaggtagtgtaaaatcttcaattggaatgggattattattactagagggtattggtgatacaattagagtatctttatcagatgatcctattaaggaagtcaagataggtaatgaaattttaaaatctttaaaccttcttaatagaggtgtaaaaattatttcttgtccttcatgcgctagacaaggatttaatgtaattgatacagtaagaatattagaagagaaactagctcacatacaaaccccaattactctctcaataattggatgtgtggtaaatggacctggcgaggcagctttaacagacataggtattactggggggcggtaaa

SEQ ID NO: 212701 - DNA, 1096 bp, Unknown
  Bacterial polypeptide expressing nucleotide sequence isolated from the Sargasso Sea
aatgcaaataagaccacacagaataattaatagaagaaaaacaaaaaaaattaaagttggaaatatatttgttggaggcgactctccaatttctgtacagtcaatgacaaatacgattacctctgactcagattctacaattagacaaattaatcaattacaagaggctggagcagacatagtaagagtctcttgccccgacgaagagtcaacagctgctctttcaaaaatagttaagtccacaaatatacctatagttgccgatatacattttcactacaaaagagcgatcgagtctgcaaaatctggagcaagttgcctcagaattaatcctggaaatattggatcaaaagaaagaataaaagaggtaatcaaggccgccaaggactatgattgcgcaattagagttggagtaaatgctgggtctttagaaaaaaatattcttgaaaaatataaagaaccctgtcctgaagctttagtagaaagcgccacttataatgttaaatttttagaagataatgatttttttaattttaagataagcgttaaatcttcagatgtttttttagccgtaaaagcatatgaaatgttatcgaaactttatgattatccacttcacttgggaattacagaagcaggtggtcttttaactgggagcataaaatcgtccattggtattggcggtctcttaatgaaaggtattggagatacgattagagtttcattatcagcagatcccattgaggaaatcaaagctggatttgaaatactcggagctttaggaatacgctctagaggtgttcaaataatttcttgtccttcgtgtgcacgtcaagcttttccagtaattgaaactgttaaaattttagaaaataagttatctcatataaaaaaacctattactttgtcaattattggatgtgtggttaacggtcctggtgaggcatctcaaactgacattggtttaacaggtggaggagagggaaacaatttattatatctctcaggtatccctcataataaagttgctagccagtccataatagaaaaagttgttgatctagtcgaatcaaaagccaacgaaataaaaaattaa

SEQ ID NO: 212702 - DNA, 931 bp, Unknown
  Bacterial polypeptide expressing nucleotide sequence isolated from the Sargasso Sea
gtctctgttccaggatttgaagaggcaaaagcatttaaaaagatcaaaaatgcagtaaatattccattggtagctgatattcattttgattataaaatagctctagaagttgcagattctgcagattgtcttcgaataaatcctggtaacattggaaaagaagacagagttaagcaagttataagcgctgcaattgataatgatattccaatcagggtaggagttaatgctggttcactagaaaaagatcttcaaaaaaaatatggtgaaccaaatgcagatgccttagtagaatcagcgcttaggcatgttgatattttagataaatttaacttcgaaaattataaaatgagtcttaaggcatcaaatattgaaatgacagtagaagcatacagaaaaatttcaaatattattgatcagcctcttcatcttggaattactgaggctggaagttatagagctggaacggtaaagtcatctatcggtgttggaatgcttttgtcagagggaattggagacacaataagaatttctctagcatctgatcctgtagatgaaattaaaatcggatgggatatattgaagagcctcaatataagaagtagaggggttaaaattgttgcatgtccaagttgttcgagacaaaactttaatgttattgaagttgttaacgaacttgaacaaaggttagaggatatttcagatgatatagaggttgctattatcggttgttatgtgaacggtccaggtgaaagcaaggcggcaaccattggactaactggagcaagtccaaataatcttttgtatattgatggtactcccaacaaaaaaatttcaaatgaggatcttgttgatgagcttgaagaacaggtgagatccaaaatctcaaaacaaaaaattgaatctgaaaagatcattctgagaagttaat

SEQ ID NO: 212703 - DNA, 1099 bp, Unknown
  Bacterial polypeptide expressing nucleotide sequence isolated from the Sargasso Sea
tatgagtctaagacccttcagggatattagtagaaaaaaaactaaggtaattaatgttggcaatgttaaaattggaggagataatccaatttctgttcaatcaatgaccaatactttgactacaaatgttaaagcaacgattaaacaaattaatgatatttgtgaagagggagcggatttagttagagtttcatgtccagatgaaaagtcaacttttgccttaaaagaaatttcaaagcacgcaccagtaccaattattgctgatattcactttcattataaaagagctatagaggcagctgaaaatggagcaaagtgtttaagaataaatccaggaaatattggaaacaaagaaaaaatttatgaagttttaagcgcagcaaaaaataacgattgttcaattagaattggtgttaatgcgggatctctagaaaaagatattttagataaatataaagaaccttgccctgaagcacttgttgaaagtgcgataagaaatataaaaattttagaagataataatttttttaattttaaagtgagtgttaaatcttctgatgtttttttgtcaattgctgcttatagacaattgtctaagatttgtgattatcctctacatcttgggatcactgaagcgggaagttttgcttcaggaagcataaaatcatccataggtcttggaacattattgttagatggcattggagatacaattagagtttctttatctgacgatccagtaaaagaaataaaagtaggaaatgaaattttgaagtctttaaatttgcgaaatagaggagttaaaataatatcctgcccatcttgtgccaggcaggcttttcaagtgattgaaactgtaaaaatattagaaaataaactttcacacattaaaacaccaattacattatctgttattggctgtgtagttaatggcccaggagaagcggcctcaactgatattggtattacagggggtggaaaaggaagtaacatgctatatttatcaggcatccaaacagaaaaaattttaacaaaagaaataatatcaaaggtagttagtttagttgaaaaaaaggcttctgaaattaaaaatatataa

SEQ ID NO: 212704 - DNA, 397 bp, Unknown
  Bacterial polypeptide expressing nucleotide sequence isolated from the Sargasso Sea
agatggtattggagatacaataagagtatctctttcagacgatcctatagaagaaataaaagttggaaacgaaattttaaaatccctaaatttaagagaaagaggtgtaaaaataatttcatgcccatcgtgcgctcgacaagcttttcaagttattgatacagtgaaagaattagaaaaaagactatcacacataaaaaaacctattacattatcgattattggttgtgttgttaatggtccaggagaagcaaaacaaactgagataggaatcactggtggtggaaaagataatcatatgctttatttaaatggtctagaaactgaaaaagtaatgacaagagatatgattgataaaattgttaatctggtcgaagaaaaagtttctagtttataa

SEQ ID NO: 212705 - DNA, 994 bp, Unknown
  Bacterial polypeptide expressing nucleotide sequence isolated from the Sargasso Sea
acaaatacacaaactacagatactaaagcgactattactcaaatcaataatttagcaaaagagggggcagatttagttagagtttcagttccagacaaagaaagctcagtagctttaaaagaaatagtaaaatattccaatgtaccaataatagcagatattcattatcattacaaaagagctttagaatcagcggacaatggagcgaaatgtttgagaattaatcccgggaatatcggaagtaaaaacaaggttcaagaaattattaaagcagcaaaaaataataattgtgctttaagaataggcgttaatgctggatcattagaaaaagatattttagaaaagtataaagaaccttgtcctgaggctttagttgaaagcgcattaagaaatatcaatttaattgaagacgaagatttttttaattttaaaattagtgtaaaatcctctgatgtttttctttcaattggtgcatatagaaaattatcagaagtaactaattatccactacacttaggtattaccgaggcaggtggatttgtacccgggagcattaaatctgcaataggtgttggctcattgttgatggagggtataggagatactattaggatttctttatcagacgaccctatcaatgaagttaaaataggaaatgagatactaaaatcattgtctttaagagaaagaggagtaaagattatatcttgtccttcatgcgctagacaaggctttgaggttataaaaacagttaaagttttggaggaaaaattatctcacattaaagagcctctaacattatctattatcggctgtgtcgttaatggacctggtgaagccgcacagaccgatattggtataactggtggtggaaaagatagcagtatgctttatttaaaaggtgtgcaaactgaaaaagttttaaatgatgaaattgtttctaaaattgttgatctcgtagagcaaaaagcaaaagagataaaatataaataat

SEQ ID NO: 212706 - DNA, 559 bp, Unknown
  Bacterial polypeptide expressing nucleotide sequence isolated from the Sargasso Sea
cctgttcacgaacatcctcgccgccggttcttccgtgccggtgattcaccacatccagttcaccgacgccgacgtcaaggacgacatcgtcatccagtcgggctcccaggttggcggcctgctctgcgacggcctcggcgacggcgtcctcatcgagcaccccaccgcggagctcgactacctccgccgcacctccttcggcctcctccagggttcgcgcatgcgcaacaccaagacggagtacgtctcgtgcccgtcctgcggccgcacgctcttcgacctgcaggaggtgaccgccgccatctccgagcgcaccgggcacctccccggcgtcgccatcgcggtcatgggctgcatcgtgaacggcccgggcgagatggccgacgcggatttcggctacgtcggcggagcgcctggtaagattgacctctacgtcgggaaggaggtggtgaagaggggcatcgacaacgacacggcgtgcgatgagctcatccagctcatcaaggaccacgggaggtgggtggacaaggaggaggaggaggaggcggtggcggcctaa

SEQ ID NO: 212707 - DNA, 883 bp, Unknown
  Bacterial polypeptide expressing nucleotide sequence isolated from the Sargasso Sea
aatggaaataagacctcatagaataataaagagaaaaactactaaaaaggttaaggtagggaatataagtgttggaggagactcaccaataagtgttcaatcaatgacaaatactttaacgacagatataaaaggtactattgaacagataaattctctacaagaagcaggggctgaaatagtcagagtttcttgtccggataaagaatctactaaggctttaaaaaatattattaaagaagtttcagttccaatagttgcagatattcattttcattataaacgggccatcgaggctgcagacatgggtgcgagttgtttaagaataaacccagggaatataggaactaaacaaagagttttagaagttattaaggcagctaaagataacgattgttcaatccgaattggagttaacgcaggttctctagatagtaaactattagaaaaatataaggagccttgtcctgaggcattagtagaaagcgctcaagataatattaaactcctcgaagataacgatttttttaattttaaaataagtgttaaatcttcagacatatttttaactgttaaagcttacaaaaaattgtcggatatttgcgattatcctctgcacttaggagttactgaagcaggaggattatttacaggcagtattaaatcctcaattggaattggccaacttttaatggagggtataggagatacgataagggtttcattgtcttcagacccagtggatgaaattaaagcaggatatgaaattttgaaatctttaggaattcgttcacgtggcgtaaatattatttcttgcccatcttgtgccagacaagcatttccagtaattgaaactgtaaaaatattagaaagaaaactagct

SEQ ID NO: 212708 - DNA, 709 bp, Unknown
  Bacterial polypeptide expressing nucleotide sequence isolated from the Sargasso Sea
atgagcataagaccctttagagatattaaaagaaaaaaaacaaaagagataagtgttggaaaagttaaggtaggaggtaataatccaatatcagttcaatcaatgaccaatactcctactacaaatattcaggccactataaaacaaatacatgaaattcaaggtgaaggagctgacatagtaagagtttcttgcccagatgagtcttcatctaaagctttgaaagaaattattaaacatgtcgatgtaccaatagtagctgatattcattttcattataaaagggcgattgaggccgcagaaagcggagcaagttgtttaagaattaaccccggtaatattggtaatttaaataaaattaaagaagtaattaaagctgccaaaaataataattgttcaattagggtaggagttaatgctggatctttagaaaaagatattctagagaaatataaagaaccttgtccagaagctttagttgagagtgctttaagaaatatcaaaattttagaggacgaaaattttgataaaatgaaaataagtgtgaaatcatcagatgtttttttatcaatagcagcttatcgtgaactatctaaagtgactaattatccttttgcatttaggaattacagaagcaggaggttttgtacccggcagtataaagtcctctattggattaggcacattacttttagatggtataggtgac

SEQ ID NO: 212709 - DNA, 772 bp, Unknown
  Bacterial polypeptide expressing nucleotide sequence isolated from the Sargasso Sea
taaaaagaaaatttatgaagttttaaaggctgctaaaaataataattgttctattagaattggggtcaatgcaggatcactagaaaaagatattttagaaaaatttaaagaaccttgtccagaggctttagtagaaagcgctttgagaaatataaaaattttagaagaccaagatttttttaattttaaaataagtgttaaatcttcagatgtatttttatcagtgaatgcatataaacaattatcagcagcttgcgattaccctctacatttaggaattacggaggcgggaagctttattccgggaagcataaaatcttctgtaggtttgggaatgcttttagtgcaaggaattggcgacacaataagaatttctttatcagatgatccagtgaaagaggtacaaattggaaatgaaatattaaagtcgttgagcttgagaaacagaggagtgaagattatttcgtgcccatcttgtgctagacaagcatttccagttatcgaaactgtaaaaattcttgaagaaaaactcgcacatataaaaactcctattactttatcagttattggctgtgtggtaaatggaccaggagaagcagcatcaacagacattggaataactggaggaggaaagggaactaatatgctgtatttatccggagttcaaacctctaaagtaccttcggaaaaaattatatctgaggttatatcccaggttgaaaaaaaagctttggaaatagaaaaagataatgcttccactaaaaacaattga

SEQ ID NO: 212710 - DNA, 892 bp, Unknown
  Bacterial polypeptide expressing nucleotide sequence isolated from the Sargasso Sea
tcacattctttaaaagaaattgtgaaacatagtcctgtacctataattgctgatatacattttcattataaaagaggtattgaagcagcaaacaacggtgcttcttgtattagaattaatcctggtaacattgggagtgctgaaagaataaaagaagttataaaagccgcaaaagataataattgctcaattagagtaggtgtaaatgcaggaagtttagaaaaacaaattttagaaaaattttctgaacctaatccagaagctttagttgaaagtgccaaattaaatataaagatacttgaggataatgattttaccaattttaaaatcagtgtgaaatcttcagatatatttatgtctataaaagcatatgagcaattagctgaattatgtgattatccattgcatttaggtattacagaggctggaggaaaaagaacaggttcaattaaatcttcaattggagttggaaatttacttttgagaggaataggtgatacaattagaatatcattgtcagatgagcctgaggaagaggtaagagttggttttgaaatcttaaaaagcttagggttaaggaatagaggtgtaaaaattatatcatgcccttcatgtgctagacaacaatttgaagtaataaaaactgtaaaaaacttagaaaaaaaattagatgatatttcaacccctataacagtgtcaataattggatgtgttgttaatggtccaggtgaagcaactatgacaaatattggaataactggcggtggtaatgatacacacatgatttatattgatggtaaaaaaaataatgttgtaaaaaatgttgatttagaaaattatcttgaagatctaattagaaaaaaaactaaagaaatagaactaagagattaat

SEQ ID NO: 212711 - DNA, 1096 bp, Unknown
  Bacterial polypeptide expressing nucleotide sequence isolated from the Sargasso Sea
tatgaaatattctcattcgataaagagaaaaaaaacaaaaaaaattcaaattggaaatatttttgttggtggagactctccaattacggttcagacaatgacaaatacccttacacatgatattgatgcaacacttgagcagatatctctcattgaacaagaaggatgtgatatagtcagagtttcagttcctgacgagaaatcatcaaaagcgttaaaaaaaataattcctgaaattaagatccctttagtcgctgatattcactttcattttaaaagagcacttgaggccgcagaaaatggagcacattgccttcgaataaatccaggtaatattggctccaaggaaaaagtaaaagaggttgttgaagctgctaagcagaacaaaatacctataagaataggtgttaattctggaagtttagaaaaatcaatattagaaaaatacaaaagcccaacctctgaggcattatttgaaagtgctaagctaaatataaaacttttagaggatctaaattttgataattttaaaattagtgttaaagcttctaatgtttttacagcagtagagtcatatagaaagttatctaatttttgtgattatcctcttcatttaggtattactgaagcaggaagttattttagtggatcaataaaatcttctataggtcttggattacttctttatgatggtattggcgatacagtgagagtttcactttcagatcatccaactcaagaggtcaaagtagggtttgaaatgttaaaatcactaaatttaagagattatggtgtaacaataatatcttgcccatcttgcgcaagacagcaatttgatgttattgagacagttaaaaatgttgagaaaaaactttctcacattaaaaaacctataacagtttcaattattggatgtgttgttaatgggccaggtgaagctacaatgactaacataggcataacaggtggtggaaataacacacatatggtatacgtcgatggagaaaaaagccatagaatacaagacgaagatttagttgagtacttagttaaaactatagaaaataaagttgatcagattcatcatttaaaatga

SEQ ID NO: 212712 - DNA, 544 bp, Unknown
  Bacterial polypeptide expressing nucleotide sequence isolated from the Sargasso Sea
tatgagcattaggccgtttagagatattcaaagaaaaataacaaaagaaataaatgttggtgaggtaaaaattggcggaaacaatcccatcagcgtgcaatctatgactaacacagttactcaagatgttaaaaatacaataaatcaaataaatgaaatttcagaagccggtgcggacattgttagagtctcttgtcccgatgaagattctacaaaagcattaaaagaaataactaaacatgctgctgtaccaatagtagctgatattcattttcactataaaagagcaattgaagcagcagaaaatggagcaaaatgtttaagaataaatccaggaaatattggagatcaaaagaaaataaaagaagtaattaattctgcaaagaataataattgttctataagaattggagtaaatgcaggatctctcgaaagagatatacttgaaaaatataaagaaccctgtcctgaagcattagtagaaagcgcattaagaaatattagtattattgagaatgaagatttttttaattttaaagtaagc

SEQ ID NO: 212713 - DNA, 1123 bp, Unknown
  Bacterial polypeptide expressing nucleotide sequence isolated from the Sargasso Sea
catgagcattagaccctttagggatataaaaagaagagtcactagagttattaatgttggcaaagtaaaaattggcggtgataatcctatttctgttcagtcaatgacaaatactttaacaagagatgcaaaaaatactttaaaacaaattaatagtatttctgaagttggtggcgatattgtaagagtttcttgtcccgatgaagaatctacttttgctttaaaagaaattaccaaacattcaaccatcccaatagttgctgatattcattttcattacaagagggctattgaagcagctgaaaatggagcagactgtttaagaataaatcctggtaacattggtgaaaaagaaaaaatttcacaagttatttcagctgcaaaaaataataattgttcaataagaattggagtaaattcaggatctttagaaaaagatattttagaaaagtataaagaaccatgccccgaagcactagttgagagcgcaattagaaatattaaaatcttagaagaccttgatttttttaattttaaaataagtgttaaatcctcagacgtattcttatctgtaaaagcttataaagaactttcaaaagttacagattacccacttcatttgggaattactgaagcaggaagtttcattccaggtagtataaaatcttccataggccttggaaatttattaatggagggtataggcgatactattagaatatcactttcagatgatcctgttgaagaaatcaaagtaggtaatgaaattttaaaatctttgaatttacgtaataggggcgtgaagataatatcttgtccttcatgtgctagacaaggttttcaagttatagatactgttaaaattttggaagaaaaactatctcatataaaaactccaataacactctcaataataggatgtgttgtaaatggacctggtgaggcagctcaaacagacataggtataacagggggaggcaaagatagcagtatgttgtatttaaaaggtatacaaaccgaaaaactagataatcaagaaattatttcaaaggtagttaatttagttgaaacaaaagcatctgaaattgaaaaaaataaaaatgattcccttaaaaaaagttga

SEQ ID NO: 212714 - DNA, 1106 bp, Unknown
  Bacterial polypeptide expressing nucleotide sequence isolated from the Sargasso Sea
tttgggatttatccgcatcgctgaagatgaaagctaccacgatatgatcctaagcatgaaggcgagtaatacgcaggtagttgttcaggcctataggcttctggtaaataaaatgattgaagagggtatgaattatccacttcacttaggcgttacagaagcaggagaagcagaagatggaagaataaagtcagcattaggaattggtgcgcttcttgaagatggactcggagatacaatacgagtgtcgctaactgaagaaccagaggcggagattcctgttgcaaaggtgatagcagataggtatagtagtatagaaacccaagaaaacaatttagaagaaataaattcgcttccttatgatccttttttttataagaggagatcaacaagacaattaacaaatattggctcagataatgtgccaagagtaataggcgacctgtcaaagaatcgatctatcaagtacgaagatttaggccaatttggctatttatactctccagagcaagataagtggcatgtatctgaccttgctatcgattttctttatataggatcaaattctattgattttgaattaccgggtacaatcaatgtaattcatgacccttctaatatcaaaaagaacgatgggtattacacactatacaccaatgaagatattggatctatacctaaaaatgatatatctttcctgatctgtaaagatattgacaatatttttcctgaacttttatcattaaaaaaatgtatcatcgttttagacacggacaattcaaatggatacaggtcacagaggaaattttttgtcgaatgtctgaataataaaatagacaaccctattattattaaacgaagatatagcgaactaccaaaagataagctgatgcttaattcagctatagatataggcgcacttcaaatagatggactaggagatggtatttggctttcgtctgaacatgagcacagcattgtaaatgaaattgcatttggaatattgcaggcaagtaggaccagaatatctaaaacagaatatatttcctgtccttcatgtggtagaaccttatttgatctccaggaaacaacagcgaaagatccgt

SEQ ID NO: 212715 - DNA, 900 bp, Unknown
  Bacterial polypeptide expressing nucleotide sequence isolated from the Sargasso Sea
cattagcccttagagaaatcacaaaaaatgttagtttaccagtagtggctgatatacattttcattataaaagagctttagaagctgctgaaaatggagcatcatgtctaagaattaatccgggtaatattggtgataaaaaaaaagtaaaagaggtaattagtgctgccaaaaataataattgttctattagaattggagtaaatgcaggatctcttgagaaagatattttagaaaaatataaagaaccatgtccagaagcgttagttgaaagcgccatacgaaatattaaaattattgaagatcaaaacttttcaaatctaaaagttagcgtgaaatcatctgatgtatttttatctttatgggcatatagacaactctcaaaaaaaattgattatcctttgcatcttgggattacagaggcgggaagttttatacctggaagtataaaatcttcaattgggctaggaactttattattagaaggcattggtgatacaataagagtttcattgtctgatgatccagttaaggaagttcaaattggaaatgaaatcctaaaatcattaaatttaaaacaaagaggagttaaaattatttcttgtccatcgtgtgctagacaagggtttgatgtaattgatacagtaaaaacattagaagataagctttcacatataaaaactccaattactctatctataattggctgtgtagttaatggccccggggaggcagcatatacagatcttggggtaacgggaggtggtggcaataatcatatgttatacattaatgggaatcagacaaaaaaaatttcaacacaagaaatggtagataaagtaattgcattaatagagaaaaaagaactagaaatcaaaaataaatctacaaataaataac

SEQ ID NO: 212716 - DNA, 1066 bp, Unknown
  Bacterial polypeptide expressing nucleotide sequence isolated from the Sargasso Sea
atggcctatagattattgatcaataaaatgattgaagaagggatgaattatccgcttcacctaggagtgacagaagccggagaagcagaagatggtagaataaagtcagctctgggcattggtgcgcttcttgaggatggattaggagatacaataagagtatccctcacggaggagcccgaagccgagatacctgttgcagaggctttagtagaaagatataatgaccttcaagaggaagaaaatagtttagctaatataaagtcacttccctatgatccattcttttataaaagacggtctaccattgacctattaaactttggttcaaaagaggttccaagggtaattggggacctatcaatgaattcatctataaaatatgaggatctaggccagtttggttatttatattccccagaacaagataaatggcatgtatctgacgttgccatcgattttctatatatcggtacgaattcgatcgattttgagctacctggtaccataggagtaataaaagatcattctgtaagcgaggatagagatggctattattcgctttacacattggaccatatcgatgctatctcatccaaagatacatccttcattatttgtaaagatgaagataagatctttacagagctcttatacttaaaaaactgtattatcattttagagacagaccaatatcatggttacagatcactaaggaaattctttattgagtgccaaaataaaggattaaaaaaccctattatcattaaagggtcctatcatggccttccaaaagaaaagctgatgctttattcagctatagatattggttctctattcatagatggtctaggggatggtatttggctttcctctgaacacgagcatagttttataaatgaaacagcttttggtatacttcaggcaagtaggacccgaatatctaagacagagtatatctcttgtccatcatgtggaagaactttatttgatttacaggagacaacggctatgatacgtgctagaacagatcatctaaagggaattaaaattggtattatggggt

SEQ ID NO: 212717 - DNA, 1120 bp, Unknown
  Bacterial polypeptide expressing nucleotide sequence isolated from the Sargasso Sea
gatgtttgcagaaagccctattaagcgcagaaagtctacgcgtattaatgtaggtaacgtccccattggtgatggcgctcccattgctgttcaatctatgacgaatacgcggaccactgatgtggcagcgaccgtcgatcaaataaaccgtattgttgcagtgggtggggagatcgttcgagtatctgtgcccacgatggaagcggctgaagcatttaaagaaattaaaaagcaggtgagtgtgccactcgttgcagacattcattttgactaccgtatcgcacttaaggttgctgaatacggcgtagattgtctgcgtattaacccaggtaacataggtaatatggagcgtgtgcgctctgtggtcgattgtgcaaaagacaaaaatattcctattcgcattggtgtgaacggtggctcgttagaaaaagatttacaagagaagtacggtgagccaacgccagaagcgctggttgaatccgcaatgcgtcatgtggatattctcgacaaacttaactttgatcaattcaaagtcagcgttaaagcgtcagatgttttcttagctgttggcgcctatcgtttattggcacaaaaaatagaccagccgcttcacttaggtattaccgaagccggtggtcagcgcgccggcgccgtgaagagtgcagttggcttagggatgctattggctgaaggtattggtgatacacttcgtgtttcgttagcggccgatccagtggaagaaattaaagtaggcttcgatatattaaagtcactgagtattcgttcgcgcggtataaactttattgcttgcccgagttgttcacgacaagagttcgatgtaatcggcacagtgaatgctcttgagcagcgattggaagatattcttacgccaatggatgtctctatcatcggttgcgtggttaacggcccaggcgaagcagaagtgtctgatttgggcctcactggcgcacgtaacatgagtggcctatacgaagacggtaagcgcgttaaagaacgtcttcctaacgacgatcttgtggataagcttgaagctaagattcgcgccaaagcatcgcgtatgagtgagcaaaataaaattcaggtctcggttaaagactga

SEQ ID NO: 212718 - DNA, 1099 bp, Unknown
  Bacterial polypeptide expressing nucleotide sequence isolated from the Sargasso Sea
catgagcattagaccatttagagacattaagagaaaaaaaacaaaagtaatttctgttggaaaagttatgattggtggcaataatccaatatcagtacaatcaatgactaataccaaaactactgatactaaatcaactatagaacaaattaataaagtagaggaggcaggagctgacttaataagagtttcttgtccggatgaagagtcatcttcagcattaaaggaaataataaaaaatataaatttaccagtaattgctgatatacactttcattataaaagagctctggaagctgcaaaaaatggagcatcatgtttaagaattaatccaggaaacattggagatcagaaaaaaattaaagaaattgttaaggcagccaaagataataactgtgcaattagggttggagtaaatgctggatctttagaaaaagatattttagaaaaatacagagaaccttgtccagaagcattagttgaaagcgccttgagaaatattaagattttagaggatgaggattttaataatttaaaaataagtgttaaatcttcagatgtttttttatcaatagaagcgtatcgtcaattgtcaaaggctactgattatcctcttcatttaggaattacagaagctggaggttttatacctgggagcataaaatcttcaattggattgggtacattacttttagaaggcataggtgatacaataagaatttctttatcagataacccagttgaagaagttaaaattggaaatgagatattaaaatctcttaatttaagggaaagaggagttaaaataatttcttgcccttcatgtgcaagacaggggtttcaagtaattgaaactgttaaagttttagaacaaaagctttcacatattaaaacaccaattactctttctgtaatagggtgtgtggtaaatggtcctggagaagctgcgatgacagatgtaggaataactgggggtaaaaaaggaaacaatatgctgtatttgtcaggagtgcagtctgaaaaagttttaaccagtgacatgattgaaaagattgtaagtgaagttgaaaaaaaagcttctgagctagaaaataattaa

SEQ ID NO: 212719 - DNA, 1090 bp, Unknown
  Bacterial polypeptide expressing nucleotide sequence isolated from the Sargasso Sea
atgagtaatccttatggcatagatattaaaaggaagaaaacaagacaaatatttgttggtgatgttcctgttggaggtaattcaccaatcagcgtccaatctatgacaaataccgatactcgagatattaaatcaacggttgatcaagtaattggtcttcaagatgcaggcgctgatttagttagaatatcttgtccagatgaagaatcctctattgctctcaaaacaataattgatgaaacaaatgttcctatagttgcagatattcattttcattataaaagagcaattgaagcagcagaatcgggagcatcttgtttaagaattaatcctggtaatatcggatcaattgatagagttaaggaagttgttaaagctgcaaaagacaataattgctcaataagaattggagttaatggcggatctttggaaaaaaaaataattgagaaatataagggtccttctccagcggctatggttgaaagtgcattatttcatgaaaatattttaagggatctggatttccataattttaaagtatctgtcaaaacctcaaatgttttacttacggttgaatcttataaagagttatcaaaagtaaccgatgcacctcttcatcttggtattacagaagccggaggattgatggatgggacaattaagtcctcaattggtattggtcaacttttagctcaaggtattggtgatacattgcgggtttctctatcggctgatcctgtggaagaaataaaagtaggttttagtatattaaaaagtcttgggttgcgacatagaggcgttaatataatttcttgcccatcatgtgcaagacaaggttttgatgttattgatactgtaaaaaaactagaggatcgtctatcaaatatttctgaaccttttacaatttctataattggttgtgttgtaaatggtccgggagaagctaccatgtcagacattggattcactggaggtggaaacaatagtggtatgctctatgttgacggtaaacagcttgcaaaaaagaacaatggggaactaattgaatcaattgttaatgaagttgaaaaaaaaataaaacaaaaataag

SEQ ID NO: 212720 - DNA, 610 bp, Unknown
  Bacterial polypeptide expressing nucleotide sequence isolated from the Sargasso Sea
atgaataatccttatgggatagatattaaaaggaataagacaagaaaaatatatgtcggagacatacctgttggaggtgatgcgcctattagtgttcagtcaatgacaaatactgatacacgggacatcaaatcaacaataaaacaagtattggatttagaggatgcaggcgctgacattgttagaatttcttgtcctgacgaagagtcttcaaaagctttaaaagagatagttgagcaaacaaatgttcctatagttgctgatattcattttcattataaaagggcaatagaggcagcagaatctggcgcatcatgtttaagaattaatccaggcaatattggatctattgatagagttaaagaagtcgttaaagcggccaaagataatgattgctcaattagaataggtgttaatggcggatctttagaaaaaaatatacttgaaaaatataaaggaccttcgccatcagcaatggttgagagcgcattatttcatgaaaatattttaagagatttagattttaataactttaagatatctgtaaagacttcaaatgttttacttacagttgagtcatataaagagttatcaaaagtaactgatgctc

SEQ ID NO: 212721 - DNA, 1027 bp, Unknown
  Bacterial polypeptide expressing nucleotide sequence isolated from the Sargasso Sea
atgagcataagaccttttagagatattcaaagaagaaaaaccaatgtaattaaagttggtaaagtaaacattggtggtgataatcctattagtgttcaatctatgactaatactttaactaatgatgtaaaaagcacaataaaacaaattcaagaaatatctaaagcaggtgcagatattgtacgtgtttcatgtccggattcagaatctacaaaagctttaaaagaaattttaaaacatatagatattcctttggtggccgacattcattttcattataaaagagcaatagaggcagctgagaacggagctgattgtttaaggattaatcctggtaatataggtgatttgaataaaataaaagaggttattaagtcagcaaaaaataataattgttctataagaattggagtgaatgctggatctttggaaaaagacattttagaaaaatttaaagaaccatgccctgaggctttggtagaaagcgccatgagaaatattaaaattttagaagatttagattttagaaattttaaaattagcgtaaaatcatcagatgtttttctatctgtaaaatcttataagcaattatcagaaaaaacagattatccacttcatcttggtatcactgaagcgggaagttatattccaggtagcattaaatctgcaattggattaggcaatttgctgatggagggaattggcgatactataagagtttcattatcagatgatcctgttcaagaggtaaaaatcggaaatgaaattcttaaatctattggtctaagaagtcgaggagtaaaaattatatcttgtccttcctgtgctaggcagggatttaaagttattgatactgtaaaaatattagaggataaactttctcatatagacgaacctattacactctctataattggctgtgttgtaaacggcccaggagaagcggcatttacagatattggtgtcacaggcggaggtaaagaaagcaatatgctttatttaaatggagttcaactgaaaagttaag

SEQ ID NO: 212722 - DNA, 1099 bp, Unknown
  Bacterial polypeptide expressing nucleotide sequence isolated from the Sargasso Sea
tttgatcgaatcagtaattaaaagaaaaaaaacaagaaaaatttgggttggtgatgttccagttggtggaaattcaccaatatctgttcaatcaatgacaaatactgatactgatgatgtggtatcaactgtaaagcaaattcatcagttgcaggatgctggagctgatattgtaagggtttcagtgccaactcttgaagcagctgaatctttcaaaaaaataaggacacaagtaaatattccactagtttctgatattcattttgattacaaaattgcacttgctgtactaaataatggtgttgactgcttaagaataaatccaggtaatattggtaatgaaaagaaaataaaagaggtcatagcttcagcaaaagataaaaatatacctattagagtaggtgtaaatgcaggttccctagaaaaagatttacaaatgaaatatggagagcctaatgctgatgctctagtagaatctggaatgaggcatgttgaaatacttaaaaaaaataactatgaaaattttaaacttagcattaagtcttcagatatttttatggctgtggaaagttacgagaagatttccaatttaattgatcagccattacatcttgggattacagaatctggttcacttaaaactggaacagtaaaatcatcaatagggctcggatcactcttaatgaaggggattggagatactataagggtttcgttagcttcagatcctatagatgaggtcaaagttggttgggaaatgctaaagtccttgaaaatcagatcaagaggtgtaaaaattgtcgcctgcccaagctgttcaagacagaactttcaggtgattagcacagtaaataaacttgaaacagaactatctgagcttaaggaagaagtaacattggctgtaatagggtgctatgtcaatggccctggagagtcaaagattgcggatgttggtgtcactggagcagatccaaagcacttaatttatcttggaggaaagccagcatataaagttgaaactaaagacctagaaaaagctttagtaaaagaagtgatgaaagttgccgaaaataaaagaaatacaattttaaaacaatga

SEQ ID NO: 212723 - DNA, 1105 bp, Unknown
  Bacterial polypeptide expressing nucleotide sequence isolated from the Sargasso Sea
atgagcaactggattaagcgaaataaaaccaagaccatcatggttggaaatattcctgttggaggcaataatcctatttcaattcaatcgatgacgaatacagatacgtgtgatgtagtatcaactgtcaatcaaattaaagatttggagtcagcaggtgccgatatagtaagagtttctgtaccagggtatgacgaagcaaatgcgttcaaagaaataaaaaaagcagtgaatatacctctggttgctgacattcattttgattataagattgccttagaggttgctgatacagctgactgtttaagaattaatccaggtaatattggaaaagaagaacgtataagagaagttattaatgccgctcttcacaacaatgttccaattagggttggtgttaatgctggctctttagaaaaagacttacaaaaaaaatatggtgaacctaatgctgatgctttagttgaatcagctctaaggcatgttgaaattttagataaatttaattttgacaattataaaatgagtcttaaggcttcaaacatagaaatgactgtggaagcatatcgaaaaatatcaaaattaattgatcagccgttgcatcttggaataactgaagcaggaagttacagagctggaactgtaaagtcttcgataggaattgggatgcttttgactgaaggtattggagatacaattaggatttccttagcttcagatcctgttgatgagataaaaattggttgggacatactaaaaagcttaaatattagaagcaggggtgtaaaaattattgcttgtccaagctgttctagacaaaactttaatgtaattaatgtagttaatgagctcgaagagcgtcttgaggatatttcagatgatatagaaattgctattattggatgttatgtaaatggacctggagaaagtaaagctgctagtattggacttactggagcaagccctaaaaatcttttgtatattgatggaacgcctaacaaaaaaatttcaaatgatgatttggttaatgaacttgagaaacaagtaagaaaaaaaattagtaaaaataaaacagaatctgaacagataattttaaggagttaag

SEQ ID NO: 212724 - DNA, 1213 bp, Unknown
  Bacterial polypeptide expressing nucleotide sequence isolated from the Sargasso Sea
aatggataaacgtaaaaaaacgaattcagttcaagttgggaatatcaaaatcggctcagaacacccaattgtgattcagtcgatgactagcactcctacgtccgatgttaataggacggttgaacaaattatacggttaaatgaagcagggtctgaggttataaggatgacagttaatgactctaaggccgcggaatctgtggtttctatcaaaaatagacttattcagagcaactgtaatgttccattagttggggactttcattttaatgggcatatacttctagcagagtatcaagaaactgcctcaattttagacaaatatcgtatcaatcctggaaatattggtacttcgaataaatatgacgctaattttgaatcaattatcaatatagcaatagccaacgacaaacccatcagaataggtggaaattgggggagtataaataagagcatcttaaatgatatgatcatagagaaagaaagtcataaaagctctataagttattcagatttaataaaaaaagccttaattaaatctgtaattgattcagctaatatggctcaagaaataggattgccagccaataaaattattctttcatgtaaaactagcgatatagcctcacttgtagatatatatcgtgaactttcgaaaacagactatcctcttcatttaggtttaacggaagccggaatgggaaaagacggtatgattgcatctacatctgctctatcaatactcctatacgaaggtataggtgacactattagagtatctttgactccagaatctgatgaagagcgagtaaatgaagtttttgtttgcaaggaaattttatcatcattaaatctaagaaaatttaaaccaagagttgtgtcatgtccgggatgtggacgaactagcagtgattatttcataaaattatctcgtaatatcaatcaattagttgagaataaaatgtctgaatggaagaatatttatccaggcgtcgagtctatgaccatagctgtgatgggatgtattgttaatggccctggcgaatcaaaacatgcagatattggcatcagcctacctggcgataatgaggatccacatgcccccgtttttattgatggaaaaaaatttaaaacccttagtggcccagatatagagggtgaatttattaatatattacaaggttatatcgagactaaatatagaaataattaa

SEQ ID NO: 212725 - DNA, 1306 bp, Unknown
  Bacterial polypeptide expressing nucleotide sequence isolated from the Sargasso Sea
atgcaatccgaagctcaatccccacgcagcagtcagatttgttcaaccgagccggtgttcggcgggcacaagccgcgccgtgtatcgcatgcggtggatgtccgctggggcgggcagctcgtgacgatcggcggcgacgcgccggtgcgcgtgcagtcgatgacgaataccgacacggccgacgcgatcggcacggcaatccagatcaaggaactcgcgaacgcgggctccgaactggtgcgcatcacggtcaacacgcccgaggccgcggccgccgtgccggcgatccgcgagcagctcgatcgcatgggcgtgaccgtgccgctcgtcggcgatttccactacaacggccacctgctgctgcgtgactacccgggctgcgccgagtcgctgtcgaagtaccggatcaacccgggcaacgtcggccagggtgcgaagcgcgatacgcagttcgcgcagatgatcgaggccgcggccaagtacgacaagccggtgcggatcggcgtgaactggggcagtctcgaccaggacctgctcgcgcgcatgatggacgagaacggtgcgcgtgcgcagccgtgggatgcgcagagcgtgatgtacgaggcgctgatccagtcggcgatcggctcggccgagcgtgcggtcgaactgggcctcggccgcgaccgcatcattctgtcgtgcaaggtcagcggcgtgcaggacctgatcgccgtgtaccgcgaactcagccgccgctgcggcttcgcgctgcaccttgggctgaccgaggccggcatgggctcgaagggcatcgtcgcgtcgacggctgcactcggcgtgctgctgcaggaagggatcggcgacacgatccgcatctcgctgacgccggaaccgggcgcgtcgcgcacgggtgaggtgatcgtcggccaggaaatcctgcagacgatgggcctgcgttcgttcgcaccgatggtgatcgcgtgcccgggctgcggccgtacgacgagcacgctgttccaggaactcgcgatgcagatccagacctacctgcgcgaacagatgccggtctggcgcaaggcgtatccgggcgtcgagaaaatgaacgtcgcggtgatgggctgcatcgtcaacggcccgggcgaatcgaagcacgcgaacatcggcatcagcctgccgggctcgggcgagaacccggccgcgcctgtcttcatcgacggcgagaaggtcaagacgctgcgcggcgagcggatcgccgaggaattccagcagatcgtcagcgactacgtcgaacgcaactacggccgcgctgaggccacgaactaat

SEQ ID NO: 212726 - DNA, 694 bp, Unknown
  Bacterial polypeptide expressing nucleotide sequence isolated from the Sargasso Sea
aatgagcataagacctttcagggatataaaaagaagactcaccaaagttattaaagtaggaaaagttaaaattggaggcaataatgcaatttcagttcaatctatgacaaatactttaacaagaaatgcaaaagaaactttaaatcaaattggtaagatagctgaagttggaggtgatattgttagagtttcatgccccgatgaagaatctactcatgctctaaaagaaataacaaaacattctcctatacctatagttgcagatattcattttcattttaaaagagcgatagaggcagcagagaacgggtcagactgtttaagaattaatcctggtaacataggagatataaataaaatttcccaggttatatctgctgcaaaaaataataattgttcaataagaatcggtgtaaattctggttcattagaaaaagatattttagaaaaatttaaagaaccttgtcctgaagcccttgtagaaagtgcaattagaaatataaaaattctggaagacttagatttttttaattttaaaataagtgttaaatcttcagatgtatttttatctataaaagcatatagagaactttcaaaggttactgattatccacttcacttaggaattacagaggcaggaagctttattcctggaagtataaaatcttctattggtttaggaaatctactatta

SEQ ID NO: 212727 - DNA, 1219 bp, Unknown
  Bacterial polypeptide expressing nucleotide sequence isolated from the Sargasso Sea
tatgaaaagaagacaaactaaacaaataaaagtaggaaaagtaggtgttggatctgactatccaataactgttcagtcaatgactacaaccaaaactaaagatacagaaaagacactagaacaagtttatgaactagcaagtaatggagcagatatagtaagggtcacatgtaatgaagttgatgctgctacttcattgattaagatttctacaagaagcccagtacctataattgctgatatacactttcaatacaaacttgcattagctgctattgaagcaggagttcaaggcttacgtttgaatcctggaaatataagagatgaaaaacatattaaggaagttgctaaagaggctttactagcagaaattcctattagagtaggtgtaaatgcaggctccttagacaaggacatagcaaaaaaatatcctgaatcatcacctgaagccctagttgaatcagcattaaaagaaattagatatttagaggaagttgacttttacaatataaaaatatcagtaaaacattcaaatgttccgttaatgattgaagcgtatagattattagcagaaaaagttcaatatcctttacatcttggagttactgaagctggtcctttacctggtggtttaattaagtctgttgctggaatatctacattattatcagaaggcataggggatacaattagactttctttaactactgatcctgtagatgaagctaaatatggaagacaattattagaataccttaatttaagagatcgaaaatcattagatcttattgcttgtcctagttgtggaagagcagaagttgatgtaattaaggtcgccaatgaagcacaagaatcactagagaaaaaaggctttcctattcaagttgctgtaatggggtgtgtagtaaatggccctggtgaagcgaaatctgcagatttaggtattgctgcgggtagaaataagggacatttatttattaaaggtcaagtagtaaaagttgttgatgaaaaagatatggtaagttctttagtaaaagaagctgaacttattacaaacgaaggtatcgaagcgaggttagctgctgctgataaagatgccgcaaaaatagcccaagaagatgcggaagcgttaattgatatacaaggcgatattaataattttaaattaaaatctaagtctgtagtagagattacatcaaatgaagatattgacacttaa

SEQ ID NO: 212728 - DNA, 469 bp, Unknown
  Bacterial polypeptide expressing nucleotide sequence isolated from the Sargasso Sea
gatgttcaacagaagaaaaacttcacaaattcaagtaggtaaagttggagttggttctaatttccccatatcagtgcagtcgatgacaactactaagactagagatgtagacgggacacttgcacaaatttatgaaattgcctcaaatggagctgacattgtcagagttacgtgcaatgaggttgaagctgctgaaggtcttgttgagattacccaaagaagcccagtccctattattgctgacatacattttcagtataagttagcacttgctgcaattgatgcaggtgtagatgggcttagacttaatcctggaaacattagaaaagaatcgcagattaaagaagtagctaaagcagcattaagtgcaaatatcccaattcgaattggggtaaatggtggatcacttgataaagatttgcttgagaaatatggagacgctactcctgaagctttggttgagtcagct

SEQ ID NO: 212729 - DNA, 724 bp, Unknown
  Bacterial polypeptide expressing nucleotide sequence isolated from the Sargasso Sea
tatgaaaagtaatatcaaaagaagaaaaacacgtgttataaatgttggagatgtatccgttggatataactctaatatttcagttcagtccatgacgaatacaaatacacaagatagctttgcaacacttgatcaaattgaaaaaattgcagatgctggggctgatttagttagagtttcatgtcctgaccaggatagcacaaatgctcttagaactattgttaaaaattcacctattcctataattgcagatatacactttcactataaaagagcaattgaggctgcagatgcaggtgcagcttgtttaagaattaatcctggaaatattggttctgtagataggataaaagaagtaattaatgctgcaaaaagcaatgattgctcaataagaattggtgtaaatgccggttctcttgagagaaagattttagataaatataaagagcctaactcagacgcaatggttgaaagtgctcttttccattctcaaatattaaaagaaaatgattttcacgattttaaaattagtgttaaagcctcagatgtttttttaacaattgatgcttataaaaaattagctgaaaaaactgatgcaccttttcatattggaataactgaagctggtggattaagagcaggcacagtgaaatcttcgattggattgggttatttgttgcttaatggtattgcgggatacaataagagtttctttatcagctga

SEQ ID NO: 212730 - DNA, 949 bp, Unknown
  Bacterial polypeptide expressing nucleotide sequence isolated from the Sargasso Sea
atgaataactcctggataaaaagaaaaaagactaatcatatttttgtcggtgatgtaggtgttggtggcgatcatcctatatctattcagtctatgacaaatacgaatacagctgatgttgaagcaacagttaatcaagttgaacaacttcaagcagctggcgctgacattgtaagagtttcagttcctgacggcgattgcgcaaaagcattcaaaaaaattaaagaatctgtttcaattccgttagtcgcagatattcactttgactataaaattgccttgctagtagcggactctgctgattgcctaagaattaatccaggaaatataggcaaagaaaataaagttaaagaaatcatccaggctgctaatgacaataatattcctataagaataggggttaatgctggctcccttgaaaaagatcttcaaaaaaaatacggagagccaaactctgatgcgttagttgaatctgcgctgcgacatgtagatattttagatagacatgatttttctaattttaaactaagtctcaaggcttcaaatattcaaatgacagttgaaagctatagaaagatttcagatttgcttgatcagccattacatcttggaattacagaatctggcagttatagagcgggctcagttaaatcatctattggtttgggtatgcttttatcagaaggtataggagatacagtcagagtatctttggcctctgatccagtagatgagataaaagttggctgggatattttaaaaagtcttaatttgaggagccgtggcataagaatagttgcatgtccaagttgctcaagacaaaactttaatgttattgaggtggtcaatgaacttgaatcaagatttgaaggaatttctgaggatcttgaagtcgcaataattggttgttacgtgaatgggcctggtgagtccaaggcggcagatgtgg

SEQ ID NO: 212731 - DNA, 765 bp, Unknown
  Bacterial polypeptide expressing nucleotide sequence isolated from the Sargasso Sea
aattattaaattctaaaatggatgaaaatatcaaacttaaaattcccaaaagtgctgaagagattgaatctgatgcattaataacaagtgcattattatcatatgaaaaagcactagatttaggattaggtaaggataaaataattatttcctgtaaggtttctaggttaaatcagatggtaaattgttacagagaaatctctaaaaattgttctgctcctttgcatttgggcttaactgaggctggaatggggatgaaatcaattgttgcaacaactgctgcattgtctattcttcttgaacaaggtattggagatacgattagatcttcattaactcctgaagttggttctccaaggtcaagagaagtagagctttgtcaagaaattttacaatctttggctattagaagttataaaccagaagttacttcatgtcccggatgtggaagaacaacatcaacctattttagagaattagcatcagaaataaatctatttcttgataataaaaaaaagaattgggctgacaaatatccaggttcagagagtctaaaagttgctgtgatgggatgcgttgttaacggccctggagaatcaaaagcagcaaatataggtgtatctttaccagggtcaggcgaaagtccagttgctccagtttacgttgatgggaaaaaacttaaagtacttaaaggagataatatttctggtgagtttataaatatggttgagtcttatgtcgaaaaaaaatggggaaataaatgaa

SEQ ID NO: 212732 - DNA, 1102 bp, Unknown
  Bacterial polypeptide expressing nucleotide sequence isolated from the Sargasso Sea
tatgaacattagaccctttagggaaataaaaagaagaaaaacaaaagaaattaatgttggcaatataaaagttggaggagataatccaatttctgttcaatcaatgaccaatactttaacaaaagatgttaaagaaactgtaaatcaaatcaagcaaattgaggaagcgggagcagatattgtacgggtatcatgtccagatcaagactcaacgaaagctcttaaagatattattaaaaatacttctataccaatagttgctgacattcactttcactataaaagggcaatagaagcagctgagagtggtgctgcttgtcttagaattaatcctggaaatattggagacaaaaaaaaaattaaagaagtaatctctgctgcaaaaaataataattgttcaattagaattggtgttaatgctggatctttagaaaaagacttattagaaaaatataaagaaccatgtccagaagctctagtagagagcgcattaagaaatattagtattgttgaagactttgacttttatgaatttaaagtgagcgtcaaatcctctgatgtatttttatctattgaagcttatagacaactttctaaggtaactaattatccattgcatctaggtatcactgaagcagggacatttttacctgggagtataaaatcctctattggttttggatcacttcttatgagtggtattggagacactataagagtatctttatcggacgacccggtagaagaaataaaagttggaaatgaaatacttaaatcacttaatttacgaaatagaggggtaaaaattatttcctgtccatcttgtgctaggcaagcttttaatgtaattgaaactgttaaaaagctagaagatagactgtctcatataaaaactcctatttctttgtctataattggatgtgtagttaatggaccaggggaagcagctcaaacggatattggtattactggaggaggaaagggtaataacatgctttatttaaatggagttgaaagtaaaaaaatatcaagtgaagagatgatttctaaagttgtacgattggtagaagaaaaagcagaagaaatcgaaaaagccaaataa

SEQ ID NO: 212733 - DNA, 1412 bp, Unknown
  Bacterial polypeptide expressing nucleotide sequence isolated from the Sargasso Sea
gatgattaaagaatatctccgaagaaagacccggaccgtgatggtgggaaaggttggagtgggctcggctgaacccgtccgcattcaatcgatgttaacttcggaaaccactgaccttgattccgtgatgctcgaaattcaggctctgcaacgtgcttcctgtgaaatgatccgcatcaccatccccaaccgcaaagcgttggatgcgattccggaagtgcgcagaaggatgtctgaggaaggtatcgaacgtcccctgatcgcagatatccacttcaatccccagttggctgtcgatagttgtgagtttttcgaaaaagtccgtatcaatcctggcaattatgctgaccggaagaaatttgaaatccgggaatacagcgatcttcaatatgccgaagagctggaaaggatcgaagaaactcttttgcccctggttaaaaatctgaaaatttatcaacgttgtttgaggattgggaccaatcatggttccctttctgaccgtgtcatgaaccgattcggagattctcccgaaggcatggttcaatcggctttggaatttttaaggatttttgaaaaacatgacttttatgacacgattctctcgatgaaatcatccaatcctctggtgatgaaagaagcctatcgtttgttggtgatgaggatggaggaggaatcgatggattatcccctgcatcttggggtgactgaagcgggtaatggttccgaaggccgaatcaaaagtgcggtcggaataggcggattgctctgccagggacttggcgacacgatccgggtctccttaacagaaccggcagagaatgaaattccagctgccaaagccatccttggaggagtagaaaaactgatcgaaaggatttcaaaggatttagaaaagaataaacgatttgaggaaaaatcagtttccgaacctacgatatcacccaatcagaatcaatccaccttaaggattcaatctgagaaaacctccgggaggagcatcctgatgaaaccctcaggatgtaagatcggtgaccgggaaacatttaaattactttcttggaaaaccgaaacagagtttacagatcccaaaaaagtttttgatgcaaaactcgatcggtcagacggggaacaagttcttcttctcaatgagcaggaaatcgagaccggattggataaaaccatcctggatcatttgaaatcgaagctactggttctggaagtcagcaaccctctctatatgatctggaatctgaatcaaaggtttgaaggcagtgcaaaaccggctgcgattggatttcaactgcctatcatcgaatccacggaggatcacctcggacttgcatcggaactgggagaactgatcagttccggggaacttcatgccctgatctgccgggatggtgatcccgagt

SEQ ID NO: 212734 - DNA, 481 bp, Unknown
  Bacterial polypeptide expressing nucleotide sequence isolated from the Sargasso Sea
cttgggattacagaagcaggaagttttgcatcaggaagcataaaatcatccataggtcttggaacattattgctagatggcattggagatacaattagagtttcattatctgatgatccagtaaaagaaataaaaacaggcaatgaaatattgaagtctttaaatttgcgaaacagaggggttaaaataatatcttgcccatcttgtgctagacaagcttttcaagtaattgacactgtaaaaatattagaaagtaaactttcgcacattaaagcaccaattacattatctgttattggatgtgtagttaatggtccaggagaagcagcctcaactgatattggtattacaggaggtggaaagggaagtaacatgctctatttatcagggattcaaacagaaaaaattttaacagaagaaataatatcaaaggtagtaagtttagttgaaaaaaaagcctctgaaatccaaaatatataat

SEQ ID NO: 212735 - DNA, 910 bp, Unknown
  Bacterial polypeptide expressing nucleotide sequence isolated from the Sargasso Sea
atgttaagatcttatcaaaaaatttatagaagaaaaacgcgtgtagtaaatgttggtgaagtattgataggaggtgataatccaatatctgttcagaccatgaccaacactttgacaacagacattgttgcaacaagcagacaaattgatagagcaataagtgctggtgcagatttagttagagtatcggtaccagataaagaatctacccaggcattaaaagaaattataaagcatagcaaagttccaattatagctgatattcattttcattataaaagagcaatagagtcagctgagaatggagcagggtgtcttagaattaatcctggtaatattggctcaaaagaaaaagttaaagatgttataaaagctgcaaaaaataataattgctcaataagaattggtgtaaatgctggtagcttagataaaaaaattttagataaatattctgaacctaatccagaagcattaattgaaagtgctctagataatataaaaattttagaggataatgatttttttaattttaaaataagtgttaaatcctctgatatttttatggcaataaaagcatatgaaggtcttgcagaaaaatgtgattatcctcttcatattggtattactgaagcagggggtaaaagaacgggatcaataaaatcttcgattggtatgggaaatcttttactaaatggtatcggagatacaattagagtttctctttcagatgaaccagaagaggaggttaaagttggttttgaaattttaaaaagtttaggagttagaaataggggggttaaaatagtttcatgcccatcatgtgctagacaacaatttcaggtcattgatcttgttaaaaaattagaaaaatctcttgaagatattcaaatacctctgactgtttctatta

SEQ ID NO: 212736 - DNA, 510 bp, Unknown
  Bacterial polypeptide expressing nucleotide sequence isolated from the Sargasso Sea
gatgagcattagaccatttagagatataaaaaggaaaaaaactaaagtagttaaaataggcaatataacattgggtgataataacccaataactgttcaatcaatgacaaatactttaactactgatgtaaaagcaacattaaaacaaattaatgatattgcaaatgaaggggcagagttagtaagagtttctgttcctgatattgaaagtagtaaagctcttaaagaaattgttaaacactcatcagtacctataatcgcagatatacattaccactacaaaagagctattgagtctgctgaggcaggagcaaaatgtctaagaattaatcctggaaacataggtgaagtaaaaaaaataaaagaagttatttcagcagcaaaaaataataattgtgctctaagaattggagttaatgctggttctttggaaaaagatattctggaaaaatataaagaaccttgcccagaagctttagtagagagtgcactaagaaatataaaaatagt

SEQ ID NO: 212737 - DNA, 1096 bp, Unknown
  Bacterial polypeptide expressing nucleotide sequence isolated from the Sargasso Sea
aatgagtgttagaccatttagagatatcaagagaagaaaaacaaaagtaataaatgttggagacgtcaaaattggtggtgataatccaatttctgttcaatccatgaccaacactttaacaacggatgttaaagcaacaataaatcaaattaatgatattgctgaggaaggagctgacctagttagagtttcgtgtccagatacagagtcaaccaaagctcttaaagaaatagttaaacatgtatctattccagtagtagcggatattcattttcattataaaagagcgatcgaagcagctgaaaacggagctaaatgtttaaggattaatcctggtaatattggcgaggagtcaaaaattcatgatgttcttagtgctgcgaagaataatggttgttcagttagaattggagtaaatgctggatcattagaaaaagatatcttagataagtttaaagaaccttgtccagaagctctagtggaaagtgctttaagaaatataaaaatattagaagataaagatttttataattttaaaataagcgttaagtcttcagatgttttcttatcaattggcgcttatagacaattatctaaagtctgtgattatcctcttcatttaggcatcactgaggctgggagttttgtatctggaagtattaagtcttctataggacttgggagtcttttaatggatggaataggagacacaataaggatttctttgtcagataatcctacaaaagaagtaacaattggaaatgaaattctaaaatcattaaatctaagaaatagaggtgtaaaaattatatcatgcccctcttgcgcaagacaagctttccaagtaattgatactgtaaaaatattagaagagaaactttctcacataaaaacaccaataacattgtcaataataggatgtgttgtaaatggacctggagaagcagctatgacagacataggtattactggaggcggaaaaggtaacaatatgctctatttatctggagttcagagtgaaaaggttttgaccaaagatattattgaaaaagttgttacagaagttgaaaaaaaagtttctgagctggaaaactaa

SEQ ID NO: 212738 - DNA, 934 bp, Unknown
  Bacterial polypeptide expressing nucleotide sequence isolated from the Sargasso Sea
aatgagcataaggccatttagagatatccaaagaaaattaacaaaagaaattaatgttggaaatgttaaaatcggaggaaacaatcctatttctgtccaatctatgacaaatactaataccaaagatattaaaaaaactattaagcaaattaataatatttccgagttaggtgcagatattgtgagagtatcatgtccagatgaagattcaaccaaggcattaaaagaaatagttaaacatagtcaagttccaatagttgcagatattcattttcactataaaagggcaatcgaggctgctgagaatggagcaaaatgtttgagaattaatcctggaaacataggtgatcaaaaaagaatcaaagaagttattagcgctgcaaagaacaacaattgttcaataagaattggtgtaaatgcaggatctcttgaaaaggatattttagagaaatacaaagaaccttgtcccgaagctcttgttgaaagtgcattaaggaatataagtattattgaaaatgaagatttttttaattttaaattaagcgtaaaatcatctgatgtttttttgtctattgctgcttataggcaattatcatcaaaaactgattatcctttgcacctaggaattacagaagctggaagttttttgcctggtagtattaaatcttctataggatttggcgctttgctattggatggaattggagatacaattagagtttccttatcagatgatccggcagaagaagtaaaagttggaaatgaaattttaaaatcactaaatttaagaaatagaggagtaaaaataatttcatgcccctcttgcgctagacaagcatttcaagttattgatactgttaaggttttagaagaaaagttatctcatattaaaactcccaataactttgtcgataattggttgtgtagtaaatga

SEQ ID NO: 212739 - DNA, 1102 bp, Unknown
  Bacterial polypeptide expressing nucleotide sequence isolated from the Sargasso Sea
atgaatatcagaccattcagaaatatttctagaaaaaaaactaaagttataaatgttggtgatgttaaagtaggtggtgataatccaataacagttcagtcaatgacaaatactttaacgaaagatgttaaagcaactattaagcaaattaatagtatttcagaagttggaggagacatagttagagtttcttgtccagatgaggactctaccaaagcactaaaagaaattgcaaaacatactgctgttcctttggtagcagatattcattttcattataaaagagctgttgaggcagcatcaaatggtgcaagctgtttgagaataaatccaggaaatattggagataaaaataaaattaaagaagttatcctagcagcaaaagataacaattgttcaattaggattggagtaaacgcaggatccttggaaagagatattttagaaaaatataaagagccatgtccagaagctttagtcgagagcgctataagaaatataaaaattattgaagatttagatttttttaattttaaaattagtgtcaaatcatcagatgttttcttatcgatcaacgcttatcgaaaactttcaaaagttacagattatcctctacatttaggtataacagaagcaggtagctttttaccaggaagtattaaatcatctattggtttaggtaatttattaatagacggaataggcgatacaatacgagtttcattatctgacgatcctgttgaagaggttaaagttggaaacgaaatattaaaatctttaggtttaagaaacagaggtgtaaaaataatatcttgcccctcctgtgctagacaaggttttcaagttatcgatactgtaaaaattttggaagaaaaactatcacatataaaaacccctattactttgtctataattggttgtgttgtaaacgggccgggcgaagctgctcttactgatatcggtattacaggcggtggaaggaatagtaatatgctatacttaaaaggtgttcaatctgaaaaactaggtaatgatgagattatatcaaaagtaattgagcttgtagagaaaaaggctgaggaaatcgaaaagattaaataat

SEQ ID NO: 212740 - DNA, 1219 bp, Unknown
  Bacterial polypeptide expressing nucleotide sequence isolated from the Sargasso Sea
atgtcattaactcaatctaaagaggttaatagtctctccaaaagatattcaactcatattgagagaaggataactagaacagtaatggtgggtgatatagctattggaagtgattatccagtaagagttcaatcgatgataaatgaagatactatggatgtcgaaaatgcttacttagctatcaaaagacttcatgatgtgggttgtgaaatagtaaggttaactgtcccttccttagcacatgccaaagcagtaggagatataaaggcaaaattactagaaaataatatcaatacccccttggtggctgatgttcaccataatggtatgaaaattgcaatggaagttgcaaaacatgttgataaagtaagaattaatcctggattgtttgtttttgaaaaatcagaccctacaagaactgaatatacagatgaggaatttgaaactattaagcaaacaatacttaaaagatttacccctttagttgaagttttaaaggctgaaaacaaagctctaaggattggagttaatcatgggtctctatctgagaggatgctttttacttatggagatacgccattaggaatgacagaatctgcgatggagttcgtcaaaatttgtgatgagcttgattttcataacataattatttctatgaaagcttctagggctccggtcatgatggcagcttacagaatgattgcagataggcttgactcagaaggatataactatcccttacatttaggagtgaccgaagctggtgatggtgattatggaaggattaaaagtactgctggaattggaacgcttttagcagagggattaggagataccatcagggtttccttaacagaagctccagaaaaggaaataccagtgtgctattcaattttgcaatctttaggattaagaaaaacaatggttgaatacatcagttgccctagttgtggtagaacacttttcaatctagaagaagttgtagataaagttaggaacgctacctcacatttgacgggtctagatatagcaataatgggatgtattgttaatgggccaggagaaatggcagatgctgattatggttatgttggaaaaggtaaaggaactattgccttatatagaagaaaagaagagataaaaagagtacctgaagatgagggtgttaatgctttaatccaacttattaaggatgatgggaagtggattgatccttaag

SEQ ID NO: 212741 - DNA, 1108 bp, Unknown
  Bacterial polypeptide expressing nucleotide sequence isolated from the Sargasso Sea
gatgaaaacaagttggattaaaagaaaaaaaactaaaaccatttatgttggaaatgttcctgtaggtggaaataaccctatttcagtccaatctatgactaacacagatacatgtgatgttgtttcaactgtaaagcaaataaatgatttaaagaaagcgggtgctgatattgttagagtttcggtgccaggttttgatgaggccaaagcattcaaagaaattaaaaatgcagtaaatattccattggttgctgatatacattttgattataagatagctttggaggttgcagatacagcagactgtctgagaattaaccctggcaatattggaaaagaagatcgtgttcaagaggtaataaatgctgctcttgataacaatgttccaataagagttggggtaaatgcaggttctttggaaaaagatttgcaaaagaagtatggagagccaaatgcagatgcgcttgttgaatctgcattaagacatgttgaaatccttgataaatataatttcgaaaattataaaatgagcctaaaagcatctaacatagaaatgacagttgaagcttatagaaaaatttcaaaggttattgatcagcctcttcatttaggcattactgaggcaggaagttatagagcaggtacggtcaagtcttcaattggtgtgggtatgctacttacagaaggcattggagatacaattaggatttccctagcttcagatcctgttgatgaaatcaaaattggatgggatatcttaaaaagcttaaatattagaagtagaggagtcaaaatagttgcatgtccaagttgttctcgtcaaaactttaacgtcataaaggtggtaaacgatttagaacaaagactggaagatatttctgatgatattgaagtagctattataggatgttacgttaatggcccaggagaaagtaaggcagctgacattggactcaccggagcaagcccaagcaatcttttgtatatagatggctctcctaataaaaaaattaaaaatgataatcttgttgatgagcttgaaaagcaagtcagaattaagattgaagataatagaattaaatcagataagattatattgaggagttaa

SEQ ID NO: 212742 - DNA, 316 bp, Unknown
  Bacterial polypeptide expressing nucleotide sequence isolated from the Sargasso Sea
attgaaagaacatactattcaaagaaaaaaaacaaaaaaaatatgggttggtgatgtacctgtcggtggaggatcaccagtttctgtacagtcaatgaccaatacagagactacagatgtaaaagctactataaatcaaataaaagacctagaagatgcaggcgcagatattgttagagtttcagtgcctactatggaagcagctgaagcctttaaagaaataaaaaaagctagcaatatacctcttgtatctgatattcattttgattacaaaattgcattaaaagtgctcgagtatgatgttgattgcgtaaga

SEQ ID NO: 212743 - DNA, 796 bp, Unknown
  Bacterial polypeptide expressing nucleotide sequence isolated from the Sargasso Sea
ctgtctgcggatcaacccgggcaatatcgggcgcgctgaccgggtccgcgaagtgatcagcgcggcacgcgaccatggctgttcgatgcggatcggtgtcaatgccggctcgctcgagaaacatcttctggagaaatacgccgaaccctgtccggaggcgcttgttgaatcggcgctcgaacacgcgcgcatacttcaggacaatgacttccatgaattcaagatttcggtgaaggcatccgatgtatttcttgccgtcgccgcctaccatcaccttgccgacgccatcgactgcccgctccatatcggcatcaccgaggcaggcggcatgcgctctggcaccgtcaaatccgcgatcggcctcggcgggctgttgtgggccggcatcggggatacggtgcgggtctccctgtcagccgatccgaccgaagaggttcgcgttgcttacgagatgctgaagtcgcttggtctgcggcgtcgcggcgtgacggtaatctcctgtccgtcctgcgcgcgccagcagtttgacgtcataagcacggtccagaccatcgaggaacggctcgagcatatcgacattccgatgacggtttccatcatcggttgtatcgtcaacggacccggtgaagcccgtgagaccgatatcgggcttacgggtggtggccgtggcacccaccaggtttatatatccggtcttgctgatcaccggttgacggatggcgacatcgtcgagcatgttgtcggcctcgtcgaggcacgtgccgcggcgatcaagtcgggcgagatcgaaggctag

SEQ ID NO: 212744 - DNA, 1102 bp, Unknown
  Bacterial polypeptide expressing nucleotide sequence isolated from the Sargasso Sea
aatgagcataagaccctttagagatatcaatagaaaaaaaacaaaagagattaatgttggaaaagtaaaagtaggtggcaataatccaatctctgttcagtcaatgaccaatacacttactacaaatgtcaaagcaaccataaatcaaattaatttaatagcaaatgaaggggcggacattgtgagggtatcatgtccagatgaaggctcaactgaagctctaaaggaaataattaagaatgtctcagtaccaatagttgcagatatacattttcactataaaagagctgtggaagctgcaaaaaacggagcgcactgtttgagaatcaatccaggtaatattggaagtaaaatcaaaattaaagaggtattaaatgcagctaaagacaatcaatgttcaattaggattggagtaaacgctggttcattagaaaaagatattttagaaaaatataaagaaccatgccctgaagcattagttgaaagcgcgttaagaaatatcaaaattctcgaggatgaggatttttttaattttaaagtaagtgtaaaatcatctgatgtttttctttcaatagaggcatataagcaattatctgaagtaacagactatcctttgcatcttgggatcacagaggcaggaagttatgtgcctggaagtattaagtcgtcaataggtattggaaatttattattaagaggaattggagatacaattaggatatcattgtcagatgatccagttcaagaaataaaaattggcaacgagattttaaaatcactaggtttaagatatcgaggtgtaaaaattatttcatgtccatcatgtgccagacaaggttttccagtaatagaaacagtaaaaaaactagaggaaagactttcacatataaaaaccccattaactttgtcaataattggatgtgtggttaatgggcctggcgaagcttctatgacagatatcggtcttacggggggtggaaaagggaataatatgctttacttatccggcgttcaatcaaatattataaccaatgaaaatattttaactgaaataattaaacaagttgaaaaaaaagctgaagaaattgaaacttctaagtaa

SEQ ID NO: 212745 - DNA, 1260 bp, Unknown
  Bacterial polypeptide expressing nucleotide sequence isolated from the Sargasso Sea
cagcaaatgattataattgttctattaggattggagttaacggaggatcattggagaaagatattttagaaaaatataaagagccctgtccagaagctttagtagaaagtgctttaaaaaatataagaattttagaagataacaatttttttaattttaaaattagtgtcaaagcgtctgacatttttttagcagttaactcatatagaaaactagccgaaacatgtgattatcctttgcacttaggaattactgaagctggcggttatttcccaggtaccgttaaatcttcaatcggcctaggtttgcttttaatggagggaattggagatacaataagagtttctttatcagcgagtccagtcgaggaagttaaagcaggcttagagatactaaaaagtttaaatttaaaaaacagaggagtaaaaattatttcgtgcccatcatgtgcaagacaagcttttgaagttataaaaacagtagaaattttagaacaaagattatctcatattaaagagtcattaactttatcaataataggttgcgtggttaatggaccaggagaagcttcccaaactgatattggcctaacaggaggaggcaagggcaataatatggtttatttatccggactacaaaatcataaggtcccttctgaaaatattatcgatcatatcgttgagttagtagaaaaaaaagcagaaagaattaagaaattcataaatatgattccgctagagaaagtaaacagtattattttaagatatgacgaacttgaaaaacttttatcaaaaacaaatatcgataaaaaagaatttgtaaaaaactccaaggagtattcatcaataggatcaataataaaagaagctaaagagtaccaaaaaattttaaaagataaagatgaactaagattaatcttaaatgatcaaaaatcagataaggatttgaaaatgatggctgaaagtgaacttaacgaggcaaaaaaaaaagagctcattttagaaaagaaaattaaatattttatgttaccaaaggatgaagcagatgaaaaaaatgccattattgaaatccgagctggaactggagggctagaggcatcattatttgcatctgatttattttctatgtaccagaaggtatcatcaaaaaataattggaaaatagaaatattaaatacttcccagagtgatgcaggcggatttaaggagatcatttttctggtaaacggtaaaaatgttttttcgaaaattaaaatttgag

SEQ ID NO: 212746 - DNA, 670 bp, Unknown
  Bacterial polypeptide expressing nucleotide sequence isolated from the Sargasso Sea
tatgaacataagaccatttagggaaataaaaagaagaaaaactaaagaaattaatgttggtcatgtcaaagttggaggagataatccaatttcagttcaatcaatgactaatacgttaactaaagacgttaaagaaactgtaaaacaaattaaacaaattgaagaagcaggagctgatattgtaagagtatcgtgtccagacgaggactcaacaaaagctcttaaagatattattaaaaatatttctattccaattgttgctgatatacatttccactataagagagctatagaggcagcagagagtggagctgcttgtctcagaatcaaccctggaaatatcggagataaaaaaaaaataaaggaagtaatttctgctgcaaaaagtaacaattgttcaattagaattggtgttaatgctggatctctagaaaaagatttattagaaaagtataaagaaccttgcccagaagccttagtagagagtgcattaagaaatattagtattattgaagactttgactttaatagattaaaggtgagcgtcaaatcctctgatgtatttttatctattgaagcttatagacaactttctaaggttactaattatccacttcatctaggtatcactgaggcaggaacatttttacctggcagtataaaatcttct

SEQ ID NO: 212747 - DNA, 1219 bp, Unknown
  Bacterial polypeptide expressing nucleotide sequence isolated from the Sargasso Sea
aatgaaaagaagaaaaactaaacaaataaaaataggaaaagtaggtgttggatcagattatccaataactgttcagtcaatgacaacaaccaagactaaagatacagaaaaaacactacaacaaatttatgaacttgcaagcaatggagcagatatagtaagagtcacatgtaatgaagttgatgctgctacttcattgattgagatatctacaagaagtccagtgcctataattgctgatatacattttcaatacaaacttgcattagctgctattgaagcaggagttcatggcttgcgtttaaatcctggaaatataagagatgaaaaacatattaaggaagttgccagagaagcgttattagcaaaaattccaattagagttggtgtaaatgcaggctctttagataaggacatagcaaaaaaatatcctgaatcctcacctgaagcactggttgaatcagcattaaaggaaattagatatttagaagaagttgacttttacaatataaaaatatctgtgaaacattcaaatgtaccgttaatgattgaatcatatagattattagcagataaagttgaatatcctttacatcttggagttactgaagctggtccattacctggtggtttgataaagtctgttgctggtatatctacattactatctgaaggcataggggatacaattagactttctttaactactgatcctgtagatgaagctaaatatggtagacaattattagaataccttaatttaagagatcgaaaatctttagatcttattgcttgtcctagttgtggaagagcggaagttgatgtaattaaggttgctaacgaagctcaagaagctttggaagaaaaaggttttcctattcaagttgctgttatggggtgtgttgtaaatggtcctggtgaagctaaatctgcagatttaggaattgcggctggtagaaataagggacatttatttattaaaggtcaggtagtcaaagttgttgatgaaaaagatatggtaagttctttagtaaaagaaggtgaacttattacaaacgaaggtattgaagcaagattagctgcagctgataagaatgctgcaaaaatagcccaagaagatgtggatgcattaattaacatacaaggtgatattaataattttaaattaaaatctaagtctgtagtagagattacatcaaatgaagatattgaaacttaa

SEQ ID NO: 212748 - DNA, 1222 bp, Unknown
  Bacterial polypeptide expressing nucleotide sequence isolated from the Sargasso Sea
atgaaaataaatagaagaaaaactacacaattatccgtaggtaaagtcggagttggttctgactttccaatctctgttcaatccatgacaacaacaaaaacaaaagatgttgagggaactctttcacaaatttatgagatagcttcaaatggagcagatattgtaagggtgacatgtaatgatattgatgctgctaaaggacttgttgaaattactcaaagaagtccagtgccaataattgctgacattcattttcaatataaacttgcacttgcagctatacaagcaggggtggatggtttgaggttaaatcctggaaacatacgcaaagaatcacaaataaaagatgtagctaaagcagccttagatgcaaatataccgattcgaattggtgtaaatggtggctccctagataaagatttgcttgaaaaatatggagattctacaccagaggcgttagtagagtcagcgctcaaggaacttaggtatttagaagatgtggattttaatgacataaaaatttctgtgaaacattcaaatgttcgattaatgattgagtcttatcgtttattagctgaaaaagtaaattatccattacatcttggagttaccgaagcaggccctcttccaggcggattaattaaatcaacagcaggtattggaacattattaaatgagggaatcggtgacactattcgttattcattaaccacagatccagtagaagaagcaaagagtggtcgccaattattagagtatttaggcttacgtgaaagaaattctttagatcttattgcttgcccaagttgtggtagggcagaagttgatgtcatcaaagtcgctgaagaagctcaaaatgtgcttaacaatgaaaacattcctcttcaagttgcagtgatgggatgtgttgtaaacggaccaggagaggctaggtctgctgatttaggtattgctgctggaaagaataagggtcatctttttataaaaggtgaagtagtaagagttgttaatgaaaaggaaatggtttcatctcttttggatgaagctagattaattgttgaagaaggcattgaagcaagacttgccaaagctgatgaaaatgcagcggaaattgcacaaaaagatgttgatgatttgttaagttcccaaggtgacataaataattttcttgaaagaaaaaaatcagtagtggagattacttcaaatcaagataatgaatagt

SEQ ID NO: 212749 - DNA, 442 bp, Unknown
  Bacterial polypeptide expressing nucleotide sequence isolated from the Sargasso Sea
atgggtttttcgatgcaatccgaagctcaatcccaatccagtagcaagattgtttcaaacgaaccggtgttcggcggccacgctgcgcggcgcaagtcgcacgcggtcgatgtccgttggggcggacagctcgtcaccatcggcggcgatgcgcccgtgcgcgtccagtcgatgacgaacaccgacaccgctgacgctatcggcaccgcaatccagatcaaggaacttgcgcaagccggttctgagttggtgcgtatcacggtcaatacgccggaagcggcggcggccgtgccggcggttcgcgagcaactcgaccgcatgggtgtgtcggtgccgctggtcggcgattttcattacaacggtcatttgctgttgcgcgattaccccgcgtgcgcggagtcgctgtcgaagtaccggatcaacccgggcaacgtcggccacg

SEQ ID NO: 212750 - DNA, 1105 bp, Unknown
  Bacterial polypeptide expressing nucleotide sequence isolated from the Sargasso Sea
tatgactgattggattaaaagaaaaactacaaaagttattgatgtaggtggggtgcttgtaggtggaaacaatccaatatctattcaatcaatgactaatactaatacaagcgatgttgtctcaacagtaaaacaaataaaagatttagaagatgctggggcagatatagttcgggtatcggttccagggtttgatgaggcaaaagcatttaaggaaattaagaaactagtagaaatcccattagttgctgatatacattttgactacaagattgcacttgaagtagcagatacagccgattgcttaagaattaatccaggaaatattggcaaggaagtaagggttaaggaagttatatcagcagcaattgataacaatattcctatcagagtcggagtgaatgccggctctttagaaaaagacttgcaaaaaaaatatggagagcctaatgcagatgctctcgttgagtcggctctaagacatgtcgaaattttagatagatttaattttgataattataaaatgagtctcaaagcttcaaatatagaaatgacagttgatgcatatagaaaaatatctaatattatttctcagccgcttcatcttggcattacagaagcaggaagttacagagctgggacggtaaaatcatcaatcggtgttggaatgcttttatcagagggtattggagataccataagaatatcgttagcttctgatcctattgacgaaatcaaaattggctgggatatattaaaaagtttaaatttaaggagtagaggagtaaagatcgttgcatgcccaagttgctcaagacaaaactttaatgttattaaggtagttaatgagcttgaacaaagacttgaagatatctctgaagatatagaagtagctattattggatgttatgttaatgggccaggagaaagcaaggctgctaacattggattaacaggtgcaagcccaaataatctcctatatattgatggtactccaaataaaaaagtttcaaatgacaatcttgtagatgaacttgaagaacaggttagaagtaaggttttaataaagaaagaagagtctgaaaaaattatattaaggagttaa

SEQ ID NO: 212751 - DNA, 819 bp, Unknown
  Bacterial polypeptide expressing nucleotide sequence isolated from the Sargasso Sea
tttgagcgtgtcgatcgacagtattaggccgtggcgtcagatttcaagaagaaaatcaagagagataaatgttggtaatgtaaaaataggtggagacaacccaatctcggttcaaacaatgactaatacgaatacagctgatgccaatgctactattttgcaggtcaataaatgtgcggaagctggggcagaaatcgtacgagtatcatgcccagatattgagagcacgaaagctcttaaagaaatttgtagaattagttctgttccaatagttgcagacatacactttcattataaaagagcaattgaagcagctgaggctggcgcagcttgtttacgtattaatcctggaaatataggtaataatgataaaattagagaggtaattaaagctgctaaggactttgggagttcaattagaatagggattaatgccggaagtatagaaaaagatcttttggaaaagtatagagagccctgccctgaagctttattagaaagcgctaaaagaaatattgggatactgcaagataatgatttttttgaatttaaaatatctgttaaagcgtctgatgtttttttagcagttgccgcttattcggatcttgtaacaattactgatgctccatttcatataggaataacagaagctggatcactcttctctggtactgtaaagtcggcaatagggcttggaaatttattatgggcaggattaggagatactatcagggtttcattgtctgctgatcctgttgaagaggtaaaggcgggattcgaaattttaaagtctttgaaccttagacaccaggggtgtgc

SEQ ID NO: 212752 - DNA, 1124 bp, Unknown
  Bacterial polypeptide expressing nucleotide sequence isolated from the Sargasso Sea
aggagatacaattagagtatcattaacggaagaaccagaatttgaaattccagtggcaaaattaatagctcagcgatataaagaaggctttatgttggaacctttagaaaaaattgtatctctaccttatgatccatttttccattctagaagaaaaactactaatatcaatggcattggttctgactatgtaccccgagttttttcagatctatcaagaattgataatatccgtcctaaagaccttgcccctttaggatatctatattcagaggaacaggacaagtggcatctatcagaacaggcagtagattatttatatgtaggaaataataaaattgaatttgagctaccaggaactctttcaattattcaaaactctaaaatttggaaagaaaatgaccaaagctatcctgtttttaatttggataattatcgaactacatctaaacgttcaaatcaaatgaattttttatttatagatgataaaaccattacagatgaattgaaactcatcttaaaggaagataagacaatagtgctcattttaagaaaatctgatgtgcatagtgtaatgcttcatcgaaaatttataattgatatgtttgatttaggtattacggctccggtaattctaaataggtcttataatgatatctcaaacttagattttcaaatcaaaagttcaatagatatcggatcgctttacatcgatggtcttggagatggagtgtgggttgatttcggctctgaatatggtatcgttaatcaaacggtgtttggaattctgcaggcatcaagaatgcgtatatctaaaacagaatatatttcttgtccatcgtgtggcagaacgttatttgatctgcaagaaacaactagcaaaatcagagaggtaaccaaccatttaaaaggggtaaaaattggaatcatgggttgtattgttaacggccctggagaaatggctgacgcggattatggctatgtgggtacggggaatggttatatctcactctataaaggtcaagaagtagtcaaaagaaatatccctactgatggagctgtagaggctttgatttcactaataaaagagcacggagattggattgatcctgtatcggtttagc

SEQ ID NO: 212753 - DNA, 780 bp, Unknown
  Bacterial polypeptide expressing nucleotide sequence isolated from the Sargasso Sea
cggatcgtgaagatcgcgtcaaggcggtggtcgaggctgctcgtgacaagggcatcccgatccgtatcggcgtcaacgccggttccctggaaaaggatctgcagaagaagtacggcgagcccactcccgctgcgctggtagaatccgcgctgcgtcatgtcgagcacctggatcgcctgaacttccccgacttcaaggtcagcgtgaaggcctccgatgtgttcatggccgtcgaggcctatcgcctgctggccaagcagatcgagcaaccgctgcacctgggcattaccgaagcgggcggcctgcgctccagtaccgtgaagtcggcagtcggcctgggcatgctgctggccgaggggattggcgataccatccgcatctcgctggccgccgacccggtggaagagatcaaggtcggtttcgatatcctcaagtctctgcgcctgcgttcgcgtggcatcaacttcatcgcctgcccgagctgctcgcggcagaacttcgatgtggtcaagaccatgaacgagctggaagcccgcgtcgaggacctgctggtgccgctggacgtggccgtgatcggctgcgtggtcaacggccccggcgaagccaaggaggcgcatatcggcctcactggcggcagcccgaacaacctggtctatatcgatggcaaaccggcctcgaagctgaccaacgaaaacctggtggacgagctggaaaagctcattcgcgacaaggcagccgaaaaggtcgccgctgatgccgctgtgatcgtgcgcggctgat

SEQ ID NO: 212754 - DNA, 571 bp, Unknown
  Bacterial polypeptide expressing nucleotide sequence isolated from the Sargasso Sea
ttttaacttcaagataagtgttaaatcatcggatgttttcttagcggtcaaagcatatgagggtttatctaatttatacgattatccattacatcttggtattacagaagcaggaggcctgtttactggtagcataaaatcttctattggaatcggaagactcttaatgcaaggtattggtgatacaataagagtttcattatccgcagatcccgtagaagaagttaaagcgggttttgaaatattaaatgccctaggtattagatctagaggtgttcaaataatttcatgcccgtcttgtgcaagacaagcatttcctgtgatcgatactgtaaaaattttagaaaaaaaactttcccatattaaaagaccaatgactctttcaataataggatgtgtagtgaatggtccaggtgaagctgcccagacagatattggtttaaccggaggaggagatggtaataatttactttacttatcgggcatacctcataacaaagtagttagcgaagatatcataagcaaagttgtaagcttggtagaagctaaggccaaagaaaccaacagttaa

SEQ ID NO: 212755 - DNA, 1114 bp, Unknown
  Bacterial polypeptide expressing nucleotide sequence isolated from the Sargasso Sea
gatgtcgaaaaaaactgaaattaaaagaagaaaatcgaaaaaaatcttcgtaggcaatttagcggtcggcggcagctctcctatctcagttcagagtatgactaataccgatactgaagatgttaaagccacagtaaaccaaataatagctcttgaaaccgccggcgccgatttagtcagagtttctacgcctacaatgtcttcggtggaggcttttaaggaaattaaaaaattaacaaacgttcctttaatagctgacattcattttgattataaaattgctttggaagttgctaatgctggagctgattgtttgagaattaatcccggaaatataggatctgcaacaaaagtaaatactgtaataaaatgtgccgaagatcacgatatccctataagaataggagtaaacgcagggtcgcttgaaaaaaaactccaaaaaaaatacggagaaccttgccctgaagccctagttgaatcagctatgggccacgttgaaattttgaagaaaaataactttgaaaactttaagttaagtattaaagcatccgatatagatttaatgactgaaagttatcgtttgattgcaaaagaaatagatcaaccattgcatcttggcttaacagaggcaggaggcttcaggtctggtaccgttaaatcaacaatagcaatcagccaattattaaaagaaggaattggggatacgctcagagtttctttagcctcagatccagtcgatgaaataaaagttggttttgacatactcaaatctttaaaactcagaaaaaaaggaataaattttattgcttgtccaagctgctctagacaaaactttgatgtcattaaaacgatgaacgagttagaagtgaggcttgaagatataaaagaaagtatcgatgtcgcagtcattggctgttatgtaaatggtcccggcgaatctaaggcagctcacgtaggcctcactggagctagtccaaaaagtttaatttacgttgacggaactccagatgagaaaataagtaacgatcaaatagtcgatcaaatagaaaaaaaagtaagaataaagattaaggaaatggcttcaaaaaaagaaaaattaattgcaagctcctaa

SEQ ID NO: 212756 - DNA, 1936 bp, Unknown
  Bacterial polypeptide expressing nucleotide sequence isolated from the Sargasso Sea
tatggatcataaaagtaaactacaagaatattgctcaagtcttacctcatatcagaggtggcccacgagggaggtcatggtaggtagtgtagctgttggaaagaaaaatccaattcgcatacagtcaatgaccaccacagatacgatggacacagaaaatacgatcaaacaatctattaggatgataaaagctggttgcgagatagtacgtataaccgcacccagtattaaagaagcaaaaaatttaaaatacatacgacaaggtattagaaaaaagggatatgatactcccttggttgcagatatccattttacacctaatgcagctgaagttgctgccaggatagtagaaaaggtcaggattaatccaggtaacttcgttgacagaaaaaaatttgagactcacgaatactctgaaaaagattatgaaaatgagatagaaagattgaaagataaattctctccattggttaaagtgtgtaaagagtatggtacagccatgcgcattggtacaaatcatggttcactatcagataggatacttagtcgatatggagatacgccattgggtatggtagaatcagcaatggaatttttaaggatatgtggatattggaattaccatgaagttatactgtcaatgaaagctagtaatactcaggtcatggtacaggcctatagattgttagtaaagaaaatggtagatgaaggcatgaactatccgttgcacttgggagttacagaggccggagatggggaggatggtagaataaaatcttcagttggcattggcacgttgcttgaggatggaataggggatacaattagagtttcattaacggaagaaccagaatttgaaattccagtggcaaaattaatggctcagcgatataaagaaggctttacattggtacctttagaaaaaattgtatctctaccttatgatccatttttccattctagaagaaaaactactaatatcaatggaattggatctgattctgttccccgagttttttcagacctatcaagaattgacaatatccgccctgaagaccttgcccctttaggatatctatattcagaggaacaggacaagtggcatttatcagaacaggcagtagattatttatatgtaggaaataataaaattgaatttgagttaccaggaactctttcaattattcaaaactctaaaatttggaaagaaaatgaccaaagctatcctgtttttaatttggataattatcgaactacatctaaacgttcaaatcaaatgaattttttatttatagatgataaaacaattacagatgaattgaaactgatcttaaaggcagataagacaatagtgctcattttaagaaattctgatgaacatagtgtaatgcttcatcgaaaattcataattgatatgtttgatttgggaattaccgctccagtaatactaaataggtcttataatgatatctcaaacttagattttcaaatcaaaagttcgatagatatcggatcgctttacattgatggtcttggagatggagtttgggttgatttcggctctgaatatggtatcgttaatcaaacggtatttggaattctgcaggcatcaagaatgcgtatatctaaaaccgaatatattagttgtccatcatgtggcagaacgttatttgatctgcaagaaacgaccagtaagatcagagaggtaaccaatcatttaaaaggggtaaaaattggtataatgggctgtattgttaacggtcctggcgaaatggctgacgcagattatggctatgtgggtacgggaaatggttatatctcactctataaaggtcaagaagtagtcaaaagaaacatccctactgatggagctgtagaggccttgatcgggctaataaaagagcacggagattggattgatcctgtatcggtttag

SEQ ID NO: 212757 - DNA, 958 bp, Unknown
  Bacterial polypeptide expressing nucleotide sequence isolated from the Sargasso Sea
aatgattaaaaggcgagagacatataatgtagatgtaggtggagtcattataggctcttcacaccctatcagaattcagtctatgactaacacccaaacggaggacagtctcaaaactgcatcacaaattaaagaactgtatgatagcggctccgagctagtgcgcataacagtcaataatgaagatagtgctaaaagtgtcataaaaatcaaggatttattagtgaaatctaattataacctccccttgattggagattttcattataacggccacacccttttggcatgctaccctgaagctgcatctattttagataaatacagaattaatcctgggaatgtcggctcctcagataataaaaatttcactgaaatcataaatattgccaagaaatatgataaggcagtaagaataggaggaaactggggtagcttaagtagatcatacctagaaaagacgatagtagatggtaaaaaatctgatatgtatgaggatattatcaaagacgcgttaatcgactctgtcctaaaatcggcggagctagctgaagaactaggattagctagtaataagattatattgtcctgcaaggtatcatcagtcactcagcttgttgaggtatacacaaaaattgcgaaaaaatgtaggtatccacttcatctcggcctcacagaggctggaatgggtgacgaggcaatagtctcctctgtagctgcattatccatactaataaatcagggtatcggagacacgataagagtgtcattgactccagataaaatgggtgcaagaacacaggaggtcgatgtttgtaaaaatatacttgctagcttggggctaaaacaatacaaacctaaagttgtttcatgtccaggttgcggcaggacatccagtaactattttatagagttgactaaggatataaataatcacatagaaaacaatatgataact

SEQ ID NO: 212758 - DNA, 380 bp, Unknown
  Bacterial polypeptide expressing nucleotide sequence isolated from the Sargasso Sea
aatgagtaactggatcaaaagaaaaaaaactaaagtcgtaaaggttggtaatgtccctgttggaggcaataatccaatatcaattcaatctatgacaaacacagacacctgtgatgaggtttcaactataaaccaaattaaggatcttgaagcagcaggcgcagatattgttagagtctctgttccaggatttgaagaagcaaaagcatttaaaaagatcaaaaatgcagtaaatattccattggtagctgatattcattttgattataaaatagctctagaagttgcagattctgcagattgtcttcgaataaatcctggtaatattggaaaagaagacagagtaaaagaagttataagcgctgcaattgataatgata

SEQ ID NO: 212759 - DNA, 733 bp, Unknown
  Bacterial polypeptide expressing nucleotide sequence isolated from the Sargasso Sea
aaagataatgaatgttctattcgaataggtgtaaatggaggaagtctagaaaaaaaaattttagaaaaatattctgaacctaaccctgatgcccttattgaaagtgcaatgaataatgttaaaattttagaagaccttgatttttataattttaaaataagtgtaaaggcctctgatatttttttggctattaaatcttatgaaggtttatctgaactttgtgattatcctcttcatcttggtataacggaggcgggtggaagaagaagtggatctgtcaaatcttcaatgggtattggccagttgttacttaaaggcataggtgatactttaagagtatctttatctgatgagccagaagaagaagtgagagtaggctatgaaatactcaaaggtttaggtattagaaatagaggagtcaaaattatatcttgtccatcatgtgcaagacaacaatttcctgttatagaaacagttaaaaaactagaatcttctttggaggatattaatgtgcctataaccgtatctataattggatgtgttgttaatggtcctggagaagcaacaatgacacaagttggaattactggaggagggaatggcactcatatgatatatattaatggcaaaaaagatcatagaattaacaacgaagaacttccttcatatttagaaagcataataagaaaaaaagctgatgaaattatgaatataaaaaagagtcagttatgaa

SEQ ID NO: 212760 - DNA, 1096 bp, Unknown
  Bacterial polypeptide expressing nucleotide sequence isolated from the Sargasso Sea
tatttcccgaagaaaaacccgaaaaatcatggtaggtaatgtcgccgttggtggtgatgctccgatttctgtccagagcatgactaatactgaaacaacggacgtcaaagcaacagttgagcaaatccatcgattggagaaggctggagttgatattgtcagagtctcggtaccaaccatggatgcggctgatgcctttaaaagtatacgagcccaaattaaaacacctttggtagctgatattcattttgattaccgaatcgcgttaaaagtgctcaaatatggagcagactgtctaagaattaaccctggaaatattggtagcgtcgagagggttaaagcgattgttgattcggcaaaggataaatcgattcctcttcgtattggagtgaatgctggttctctaggtaagtcacttctaagaaagtataaagagccctgcgctgaagctatgattgaatcagcattgacccaaattgatactcttgacaagttggattttcatgaattcaaggttagcttaaaagcatccgaaatatttatgactctgcaggcctgtcgggaactttcccggcaagtggatcagccttttcatcttggtattacagaggcagggggtcaacgttcaggcactgtaaagtcatcgataggattaggatcattattgatggaaggcattggagatacaatacgggtttcacttgcttccgaccctgttgaagaagtcaaagtaggctcagacttgcttaaagctctaggattgagacatcgaggagtcaatctagtggcttgtcctagctgttctagacaaaatttcgatgtcatatcagtggttaacgagttagagacaagattagaggatattattgaaccaattgatgttgcgataattggttgtatcgtgaatgggccgggagaagcaaaaggggctgagatcggcttgactggcgcaagtccaaaaaatttggtttacgttgatggaattcctgatcataaggtttctaatgctaatctcgtggatgaacttgaagctatggttcgcaaacgtattgaatcaaagcagtctcaaagcaaagacataatcgcaacggattga

SEQ ID NO: 212761 - DNA, 664 bp, Unknown
  Bacterial polypeptide expressing nucleotide sequence isolated from the Sargasso Sea
atgcatatctattgtccaagtttaactagataccagcgttttaaaacacgttctgtcatggtcggtgaggttggtgttgggggtgataatccaattcgtgtacagtcaatgacaacgacagatactatggatactgaggcgacgattgcacaatcaattagaatgatagaggcagggtgcgagatcgttcgcattaccgctccaagcattaaagaagccaagaatcttaggcctattcttaatggtatcagggcaaaaggttacaaaactcccctagttgcagatattcatttcacccctaatgcagctgagatagctgccacaatagtagaaaaggtgcgtattaatcctggaaattatgctgacagaaaaaaattcgagacccatgaatattcggacaagtcctatgcggaagaattagaaagaataagggaacgattcataccacttgttaagacatgcaaagagaatggtaccgcaatgaggatagggacgaaccacggttctctatcagatcgtatattaagtcgatacggtgatactccacttggcatggtcgaatcaggaatggaatttattcgtattgcagaaagtgaaggctatcatgacatgatcttgtctatgaaagctagtaatactcaagtcgtggtccatggcctataga

SEQ ID NO: 212762 - DNA, 1099 bp, Unknown
  Bacterial polypeptide expressing nucleotide sequence isolated from the Sargasso Sea
ttgaaagaacagaccatccagagaaaaaaaacgaaacaaatttgggttggtgatgtgccggtaggtggaggtgctccaatatctgtgcagtcaatgaccaacacagaaactactgacataaagtcgactgtaaaacagattcaagagctagaagatgcaggtgcagatattgttagagtttcagtgccaaccatggaagcagctgaagcttttaaagaaataaaaaaagccagcaatatacccctagtatccgatatccattttgactataagatcgcattaaaagtgctggactatggtgttgattgcgtaagaataaatccaggtaatattggcagcgaaaaaaagattaaagaagtaattgcatcagctaaagataaaagcatacctattagggtaggtgtaaatgccggctcattagagaaagatctacaaatgaaatatggagaacctaatgcagatgcattagttgaatctgcaatgagacatgttgaaatactgcttaagaacaattatgaaaattttaaattaagtattaaatcctcagatatctttatggcagtagagagctatgaaaaaatttcagacttaatagagcaacctttgcatcttggaattacagaatctggatctttaaaaacaggaacagttaagtcatcgatagggctaggtcaacttttgatgcagggaattggcgatactattagggtttctcttgcttctgatcctatagatgaagtaaaagttgcatgggagatgttaaagtccttgaaaattaggtcaagaggtgtaaaaattgtcgcctgcccgagctgctcaagacaaaattttcaggtaattgatacagtaaataagcttgaaaatgaattatcagagctaaaagaagaagtaactcttgctgttataggttgttatgtaaatggtccaggtgaatcaaaagttgcagatgttggtgtgactggagcaacaccgaaacatttaatctatttaaatggaaaaccagcttataaagttgaaactaaagatcttgaaaaagctctaataaaagaggtggtagaaatagcagagaaaaaacgtaatacaatagtgaaacaatgag

SEQ ID NO: 212763 - DNA, 661 bp, Unknown
  Bacterial polypeptide expressing nucleotide sequence isolated from the Sargasso Sea
tatgaacattagaccctttagggaaataaaaagaagaaaaacaaaagaaattaatgttggcaatataaaagttggaggagataatccaatttctgttcaatcaatgaccaatactttaacaaaagacgttaaagaaactgtaaatcaaatcaagcaaattgaggaagcgggagcagatattgtacgggtatcatgtccagatcaagattcaacgaaagctcttaaagatattattaaaaatacttctataccaatagttgctgacattcactttcactataaaagagcaatagaggcagctgagagtggcgctgcttgtcttagaattaatcctggaaatattggagacaaaaaaaaaattaaagaagtaatctctgctgcaaaaaataataattgttcaattagaattggtgttaatgctggatctttagaaaaagacttattagaaaaatataaagaaccatgtccagaagctctagtagagagcgcattaagaaatattaatattgttgaagactttgacttttatgaatttaaagtgagcgtcaaatcctctgatgtatttttatctattgaagcttacagacaactttctaaggtaactaattacccattgcatttaggtatcactgaagcagggacatttttacctgggagtaaa

SEQ ID NO: 212764 - DNA, 496 bp, Unknown
  Bacterial polypeptide expressing nucleotide sequence isolated from the Sargasso Sea
taaaaaaacagattatcctcttcaccttggaataacagaagctggtagctatttacctggtagtattaaaacctcaataggctttggtagtttattgttagatggaattggagatacaataagagtatcactttctgatgatcctattgaagaagtcaatgttggtaatgaaattttaaaatcacttaatttaagaaatagaggagttaagattatttcatgcccttcttgtgctagacaagcatttcaagttattgatactgttaaacaattagaaaaaagactatcacatataaaaaaacccataacattatctataataggttgtgttgttaatgggcctggggaggcaaaacaaacggagataggtatcacaggcggtggaaaagataatcatatgttgtatttaaatggtttagaaacagaaaaagtaatgacaaaagatatgataaataaaattgttactttagtagaagaaaaagcttcaaatttataa

SEQ ID NO: 212765 - DNA, 1165 bp, Unknown
  Bacterial polypeptide expressing nucleotide sequence isolated from the Sargasso Sea
gctgcctttaagaagacattccaagactgtttcaataggatcaatcaagattggtggtaatgaaccgataagaatacagtcaatgctaacttgtgatacctcagatgttgattcatgcgttgaagaaataacacgtttggacgcggtggattgtgaaatcattcgcttaactgttccaaatcagaaatcagttgatagtgtgcctttgattcgtgaggaaatgcgaaataggggcattgaaaggcctattgttgcagatgtacatttcaatcccaatctggctgtaaatgtgtgtgaatttgtagacaaggtacgcataaatcctggtaattatgcagacaggaaaaaatttgaagtccgtgaatacacggaaactcagtaccaggaagaactggatagaattgagcagaaattaattccgttgattaaaaacatgaaaaaatatgggaattcattgagggttggcacaaaccatggctctctttcagaccgcttgatgaaccgttatggagatactccagaaggaatggttgaatctgctatggagtttttgcgaatacttaggaaacatgattttgaagaaacagtattatcgatgaaatcttcaaatccattggtgatgatcgactcatatcgtcagcttgtaaaaaaaatggataaggaagatatgcattatccactgcacttaggagttactgaagcagggaatgagctagatggccgtataaaaagtgcaattggaatcggcaccctactttgtgagggactgggagacactatcagggtttctcttacagaaccttctgaaaatgaaattcctgttgccaagtcaattctacagtcaacgcgatctcgcatttataacactgattttatttcctgcccttcctgcggcagaacattttttgacttggcaagtactacagataaaataaagtcacgcactagtcatctaaaaggcgtgaaaatagcaatcatgggatgcgtggtaaatggtcctggtgaaatggccgatgctgattttggatacgttggttctggagtagacaagataaatctatttcacggaaagaaatgtgttagccgtaacattcctgcagatctcgcagtggatcgtttaatcgaactcatccaaaagagtggaatgtggtctgatccaccttaa

SEQ ID NO: 212766 - DNA, 1102 bp, Unknown
  Bacterial polypeptide expressing nucleotide sequence isolated from the Sargasso Sea
aatgagcatcagaccgtttagagatataaatagaaaaaaaacaaaatcagttcgagttggaaatgttattattggagatgatcaaccggtatcagtacaatcaatgactaatactttaacaactgatgtaaaagctacattaaagcaaattaacgatattataaatgaaggaggtgatttagttagagtttctgtacccgataaagatagtagtgatgctcttaaagaaataacaaaacattcttcagtaccaattatcgcagacgtacactatcattataaaagagcgattgaatccgcagaaaacggtgcaaagtgcttgagaattaatcctggcaatattggagatgtaaaaaaaatcagagagataatttctgccgcaaaaaataatgattgtgcaattcgaattggtgttaatgctggatctttagaaaaagacatattagaaaaatataaagaaccttgcccagaagctcttgttgaaagcgcattaagaaatattaaaataattgaagatgaagatttttttaactttaaggtaagtgtaaaatcatcagatgtatttttatcagttgcagcatatagacaactttcaaaggttacaaattatcctttacatcttggaataacagagtcaggcagttttttaccaggaagtattaaatcttctataggaatgggcactcttttattagagggcataggagatacgataagagtatcactttcggatgatccagtaaaagaagtaacaattggtaatgaaatactaaaatctctaaacctcagaaatagaggagttagaataatttcctgcccatcgtgtgcaaggcaaggttttgaagtaataaatactgttaaattattagagcaaaaactttcacatattaaaacaccaatcaccctatcaattattggatgtgtagttaatggtcctggagaagctgctttaacagacataggaattacaggaggaggcaaagatagtagcatgctatatataaaaggattacagacagaaaaaatttctaataatgaaataatatccaaagtaattcaacttgtcgaaaaaaaatctgaagaaatagaaaaaaataaataa

SEQ ID NO: 212767 - DNA, 532 bp, Unknown
  Bacterial polypeptide expressing nucleotide sequence isolated from the Sargasso Sea
atgaataaacgaagacaaacatcgcaaatatatgttggaaatgttggagtaggttctgattttcctgtatctgttcagtctatgacaacaactaagactagagatactgatgaaactttggaacaaatttatgaattagccaataatggtgcagatattgtaagggttacgtgtaatgaaatagaagctgcagaatcacttgtaaaaatatgtgccagaagtccagtaccaattgttgctgatattcattttcaatataaattagctcttgcagctgttgaagcaggagtacatggtttgaggctaaaccctggaaatatcagaaatgaaaaacaaataaaagaagtagctaaagaatgtttgaatgcaaatattccaattcgtataggagttaacgctggttccttggataaagagattttagaaaaatatggtgatgctgttccagaagcacttgttgagtccgctttattagaagcaagatatcttgaagatgtagaatttcataatattaaaatatctgtaaaacatt

SEQ ID NO: 212768 - DNA, 527 bp, Unknown
  Bacterial polypeptide expressing nucleotide sequence isolated from the Sargasso Sea
tgaggcatatagacaactttctaaagtttgtgattatccacttcatctaggtatcactgaggctgggacttttttacctggcagtataaaatcatcaattggatttggatcgcttcttctcagtggaattggagatactataagagtttctttgtctgatgatccagtggaagagattaaggttggtaacgaaatactcaaatccttaaatttaaggaacagaggggtaaaaataatttcatgtccatcatgtgctaggcaagcttttgatgttattgagactgttaaaaaattagaacagaatctttcgcacattaaaaccccaatttcattgtctataattggatgtgttgtaaatggaccaggcgaggcagcacaaacagatattggtattactggaggtggaaaaggcaacaatatgctttatttaaatggaattgagagcaataaaatatcaagtaatgaaatgatctctaaagtagtaaaattagttgaggaaaaagcaaaagaaattgaaaacgcttaat

SEQ ID NO: 212769 - DNA, 871 bp, Unknown
  Bacterial polypeptide expressing nucleotide sequence isolated from the Sargasso Sea
aatgagtataagaccatatagggatataaaaagaagaaaaacaaaagtagtaaatgttggaaatgtaaagattggaggagacaatccaatttctgttcaatccatgactaatactttaactactgatgtcaaagcaacaattaatcaaattaatgatatcgctgaggagggtgcagatattgtaagagtttcttgtcctgatgtagaatcaactgcagctttaaaagaaatattaaaacatgtttcaataccagtagttgcggatattcattttcattacaaaagagccattgaggcagcagaaaatggagcgaattgtttaaggatcaatccaggcaatattggaaacgaaaagaatatatatgaagttttaagtgctgcaaaaaataatggttgctcagtaagaatcggagtaaatgcaggttccttagaaaaggatatcttggaaaaatttaaagaaccatgtccagaggctttagttgaaagtgctttaagaaatattaatattttagaagataaagattttttcaattttaaaataagcgttaaatcatcagatgttttcctttcaatagaagcgtacaggcaactatcaaaagcaacagattatcctttacaccttggtataactgaggcaggaagttttgttactgggagtataaaatcatctattggtattggaagtttattaatggatggaatcggagatacaataagaatttccttgtctgatgatcctacaaaagaaataaaaataggtaatgaaatacttaaatcactcaatctgcgtgaaaggggagtaaaaattatatcctgcccatcctgtgcaagacaagcatttcaggtgatagatacagttaaaattttggag

SEQ ID NO: 212770 - DNA, 1068 bp, Unknown
  Bacterial polypeptide expressing nucleotide sequence isolated from the Sargasso Sea
tagtgtcggtggggttcttggtcgggggagacaatccaatatcaattcaatcaatgacaaatacgaacacttgtgatgttgtttcaacagtaaatcaaataaaagatttagaggatgccggagctgatatagtgagagtttcagtgcctggatttgaagaagctaaagcatttaaggaaattaagaaattatccaaaattccattagtggcagatatacattttgattacaaaatagctctcgaggttgcagatacagcagattgtttaagaataaacccaggtaatattggtaaagaagatagagttaaggaagtaattagcgcagcaattaataataatgttccaataagggttggagtaaatgcaggatctttagaaaaagatttacaaaaaaagtatggagaacctaatgcagatgccttagtagaatcagctttaaggcatgtagaaatattagataagtttaattttgataactataagatgagtcttaaagcttcaaatatagagatgacggttgatgcatatcgcaaaatatcgaatcttattgatcagcctttacacttaggaattactgaagcaggaagctacagggctggtacagttaaatcatccattggtgtcggaatgctgctttcagaaggtataggcgatacaattagaatatcattggcatcagaccctgttgatgaaattaaaattggatgggatattctaaaaagtttaaatataagaagtagaggggtcaagattattgcttgtccaagctgttcaagacaaaattttaatgttatcaaagtagtcaatgagcttgaacaaagacttgaagatgtttctgatgatatagaagtagctattattggatgttatgtaaatggaccaggagagagcaaggctgcaaacattggattaacaggagctagcccaaacaatcttttatatgttgatggctctcctaataaaaaaatttcaaataataatcttgtagatgagttagaagaacaagttagagataagatacttaaaaataaaaacgaatctgaaaagattatattaaggagttaaa

SEQ ID NO: 212771 - DNA, 574 bp, Unknown
  Bacterial polypeptide expressing nucleotide sequence isolated from the Sargasso Sea
atgagtattaggccatttagagatattaaaagaaaacttacaaaagaaataagtgtaggaaacgttaaaattggtgggaataatcctatttctgttcaatcaatgactaatactttaactaaagatataaaaaaaacagttaatcaaataaatcaaatagcagaagtaggtgcggatttagtgagagtatcttgtccagatgaaaattctactaaagctttaaaagaaatagttaaacatgtttctgtcccaataattgctgatattcattttcattataaaagagcaattgaagctgcagataatggggctagttgtctaagaataaatcctggaaatattggaaatgaaaataaaattaaagaagtaattaatgcagcaaagaataataactgctcaattagaattggagtgaatgccggatctcttgagagggatattttagaaaaatataaggaaccttgcccagaagctcttgttgaaagtgcgataagaaatattggtattattgaaaatgaggatttttacaatcttaaagtaagcgtaaaatcatccgatgtttttttatccatag

SEQ ID NO: 212772 - DNA, 1117 bp, Unknown
  Bacterial polypeptide expressing nucleotide sequence isolated from the Sargasso Sea
atgtataacgaaacacccattaagagacgtccttcaacccgcatttatgtgggcaatgtacccattggtgatggtgcaccgattgcagtgcagtcaatgaccaacactaaaacgactgatgttgaggcgaccattgcccaaattcgcgccttagaaaaagtgggtgccgacattgtgcgtgtctctgtgccgaccatggacgcggccgaggcttttaaagtgattaagcaatcggtgtcagtgcccttggttgccgatatccacttcgattaccgtatcgccttaaaagtggcggaatatggggtggactgtttgcgtatcaacccaggcaatattggtaacgaagagcgtatccgcagtgtggtggagtgcgcccgtgataaaaacattccaattcgtatcggggttaatggtggttcattagagaaagatctgatggacaaatacaaagaacctacgccagaagccctgctcgaatcggccatgcgccatgtggacattctcgaccgtttgaacttcgaccaatttaaggtcagcgtaaaagcctccgatgtgttcttagcggtagaatcctatcgtttattggctaagcaaattcgccagccattgcatttaggtattactgaagcgggtggtgcccgtgccggtgcagtgaaatcagccgtaggcttaggcatgctgcttgccgagggcattggtgatacgctgcgtatttccttggcggccgatccggtggaagaaatcaaagtcggctttgatattctaaagtcactgcgtatccgtagccgtggcattaactttattgcgtgtccttcttgctcacgtcaagagttcgatgtgatcagcacagtaaacgagttagaacgccgcctcgaagatgtgacgaccgcgatggatgtgtctatcatcggctgtgtggtcaatggcccaggtgaagccttagtgtcgcacattggcttaacgggtggtcatcgtaagagtggttactacgatgaaggtgagcgtcaaaaagagcgtttcgacaatgataacctagtcgattccctcgaagcgaaaattcgcgctaaggcgagccaaatggctaaccgcatccaagtgaaagacacgactgagtaac

SEQ ID NO: 212773 - DNA, 1099 bp, Unknown
  Bacterial polypeptide expressing nucleotide sequence isolated from the Sargasso Sea
atgagtattagaccatttagagacataaaaagaagaaaaacaaaagttataacagtaggtgatgtaaaaattggaggtgataaccccatatctgttcaatcaatgactaacactttaactacggatgtaaaagccactattaagcaaattaatgaaattcatagtgaaggagctgatcttgtgagagtttcttgtccagatgaatcatcatctaaagcattgaaagaaattataagacacattgatataccattaattgcagatattcactttcattataaacgagcaattgaagctgcagaaaatggggctagctgcttaagaataaacccaggaaatattggtagtaaaaaaaaaataaaagaagttataaaatcagcaaaagataataattgttctataaggattggtgtaaattcaggatctttagaaaaagatattttagaaaaatttaaagaaccttgtccagaggctttagttgaaagtgctattagaaatattaaaattttagaggatgaagatttttttaatttaaaagtaagtgttaaatcttcggatgtctttttatctattgaagcatatcgtcaactttcaaaagtaaccgactatccacttcatcttggtattacagaagcgggaagttttatttctggaagtattaaatcttcaataggactgggagcattacttcttaatggcataggtgatactattagaatctcattatcagataatcctgtacaagaggtaaaaattggaaatgaaatattgaaatctttaaatttacgtaatagaggtgtaagaattatttcttgtccatcatgcgctagacaaggttttcaggtaatagaaacagttaaaattttagaggataagttagctcacattaaaacacccattactttatctatcataggatgtgttgttaatggaccaggagaggcagcaatgacagatgtaggaattactggaggtaaaaagggaaataatatgctttatctatctggtattcagacaggaaaagtttttactgacgatatgataaatagagtagtcaatgaagttgaaaaaaaagcctctgagttagaaaataattaaa

SEQ ID NO: 212774 - DNA, 994 bp, Unknown
  Bacterial polypeptide expressing nucleotide sequence isolated from the Sargasso Sea
atgaccacaacaaaaactcacgacattaaagcaacgctaaaagaagttgagcgtttagaagaagcaggatgtcaaataattcgtattaccgttcctgaccagcctgcggctgatgcattgtatgagatcaagaaaaagatgaatgttcctcttgtagcagatatacattttaattaccgtatggcactagaagccgttgatgcaggtgctgataagattaggataaatccaggtaatattggggggaaaaagaaagtaaaagaagttttagataaagttgctggtgcaggtctacctattcgaattggtgttaatgcaggtagtctagagaaagatttaattgaaaagtatggatttccgactcctgaagccatggttgaaagtgcgaagcgccacattgatatttgtcaagaacacaattttaatgatatcattgtatcgcttaaggcatctgatgttaatcttatgatgtcttcttatgaattattctcaaaaaaatatgactatccactccatttaggagtcacagaggctggccctactaagtccggaactataaagtcttccgttggaatgggtgctctattggcaaaaggtatcggtgatacaataagagttagcttaactgatgacccagttgaggaagtgcatgtaggttttgaaatattaaaatcccttggattagcttcaaaaggcgttactattgttgcttgtccaacttgcggtagattagaggtagatttatttaaaattgccggggaaatggaagaaaaattaaaagatgttaaaactcctatgacagttgcccttatgggttgcgctgttaatggccctggggaagcatcacacacggatcttggaatcgcatttggtaaaggcgctggacatttgtattatcaaggtgaaaatcgaggtaagatttctgaggatcaggctatgaacaaactagaagagatgatttcagagtttgaaacaagtaaacaagaagaataat

SEQ ID NO: 212775 - DNA, 436 bp, Unknown
  Bacterial polypeptide expressing nucleotide sequence isolated from the Sargasso Sea
atgaataatccttatgggatagatattaaaaggaataagacaagaaaaatatatgtcggagacatacctgtcggaggtgatgcgcctattagtgttcaatcaatgacaaatactgatacacgggacatcaaatcaacaataaaacaagtattggacttagaggatgcaggtgctgatattgttagaatttcttgtcctgacgaggagtcgtcaaaagctctaaaagagatagttgatcaaacaaatgttccaatagttgctgatattcattttcattataaaagggcaatagaagcagcagaatctggtgcatcatgtttaagaattaatccaggcaatattggatctattgatagggttaaagaagtcgttaaggctgccaaagataacgattgttcaattagaataggtgttaatggcggatctttagaaaaaa

SEQ ID NO: 212776 - DNA, 862 bp, Unknown
  Bacterial polypeptide expressing nucleotide sequence isolated from the Sargasso Sea
aaacagaaaagatgataattttaagacctttattgatattgctaaagatctagataagccagttagaattggagttaatgcgggttctttagatcaggaacttttagatcttaaaatggaagaaaataataaattgaaaatacctaaaagtgctgaagaagttgaatctgatgcattaatttcaagtgcaattatttcttatcagaaagctatagattatggactaagtaaaaataatattattatttcatgtaaagtatctagattaaatcaaatggttcattgttaccgtgaaatttctaaacagtgctctgcacctttacatcttggattaactgaagctggattaggtatgaaatctatcgtagctactacagcagctctttcaatacttatagaagaaggaataggagacactataagatcttctctgactcctgaagttggagcattgagatctagggaagttgaattgtgtcaggaaattcttcaatctttaggaattagaacatataaaccacaagttacagcttgtcctggttgtggtagaacaacttcaacttattttagagaactagcatctgaaataaaagatcatttagatttaaaaaataaacaatggaaaaaagactttcctggttctgaggaattaaaagttgcagtcatgggatgtgtagtaaatggtcctggagaatcaaaagcagctaacataggtgtttcattgcctggatcaggagaaagtccagtagctcctgtttttgtagatggtgaaaaggtcaaaattcttaaaggtgaaaatatatcaaatgaatttattcagatggttgaatcttatgttgaaaaaaaatggggaaataaatga

SEQ ID NO: 212777 - DNA, 1102 bp, Unknown
  Bacterial polypeptide expressing nucleotide sequence isolated from the Sargasso Sea
tatgaatattagaccctttagagaaataaaaagaaaaaaaacaaaagaaattaatgttggtaatgtgagagttggaggagataatccaatttctgttcaatcaatgaccaatactttaacaaaagatattaaagaaactgtaaatcagatcaaacaaattgaggaagcgggagctgatatcgtgagagtatcatgtccagatcaagactcaacgaaagctctgagagatataaccaaaaatacttctataccaatagttgctgatatacattttcattataaaagagcaatagaagcagctgagagtggggctgcttgtcttagaataaaccctggaaatattggagacaaaaaaaaaattagagaagtaatttctgctgcaaaaaataataattgttcaattagaattggtgttaatgctggatcattagaaaaagacttattagaaaagtataaagaaccttgtccagaagctttagtagagagtgcattaagaaatattagtattgttgaagactttgacttttatgaatttaaagtgagtgttaagtcctctgatgtatttttatctatcgaagcttacagacaactttctaaagttactgattatcccttacatctaggtatcaccgaggcaggaacatttttgcctggtagtataaaatcttctattggttttggatcacttcttatgagtggtattggagatactgtaagagtttctttgtctgatgacccggtagaggagataaaagttggaaatgaaatacttaaatcacttaatttaagaaatagaggggtaaaaattatttcatgtccatcttgtgctagacaagcttttaatgttatcaaaactgttaaaaagttagaagacagactatcccatataaaaactccaatttctttatctataattggatgtgtggtgaatggacctggtgaggcagcacaaacggatataggtattactgggggtggaaaaggtaataacatgctttatttaaatggaattgagtctgaaaaaattacaagtgatgagatgatttctaaagtggtaagattggttgaagaaaaagccgaagaaattgaaaaagccaaataa

SEQ ID NO: 212778 - DNA, 1138 bp, Unknown
  Bacterial polypeptide expressing nucleotide sequence isolated from the Sargasso Sea
ttgtgttgccttcaggggattgtagtgatttcagaacaacagatagttagaaaggaaacaagaaagatatacgtcggtgatgttcctgttggcggcgattcacctatttcagttcaaagcatgacaaatactctaactgctgattcagtctctactataaagcaaatccaacagttacatgatgcaggtgcggatattgtaagggtgtcggttcctgatcaagaagcagctgactcttttcatgtcattaaaagtaaatcaccagtgccattagttgctgatattcattttgattacacaatggctcttgaagcgattaaaggaggagccgactgtattaggattaatccagggaacattggaaaagaagaaaagataaaagaagtaatatctgcagctaaagatactaatacgcctattagagttgggataaatgccggttctctagaaaggaaattgcaaattaagtacggtgaacccaactcagatgctttggtagagtcagccttaaatcatataaatattttaaaaagattaaacttcgaagattttaaattaagcatcaaagcctcagatgttcaaatgaccgttgaaagttatagaaaaatttcagaattgattgatcagccgcttcatttaggaattactgaagcaggtggtttcagatctggcactgtcaaatctgcaatgggtcttggctctttattaatggacggcataggggatactattaggatatcgttggcctcagatccggtcgatgaaatcaaagtaggttgggatatcctgagaggcttgaaaataaggtctagaggtataaatttcattgcctgtccaagttgttcacgaatgaactttgatgtgattggaacaatgaatcaacttgagtcgagactggaagatattaaggaaaatattgatgtggctgttataggttgctacgtaaatggtcctggagaatcaaaacatactgacataggggttactggtggatctccaaaaaatcttatatatatagatggcaaaccagatcataaggtagaaagtgtagaccttgcggaccatcttgagaaaatgatccgagaaaaggttaaagaaaaatctaaaatcgaagagaacttaattgcaaaaacataat

SEQ ID NO: 212779 - DNA, 1075 bp, Unknown
  Bacterial polypeptide expressing nucleotide sequence isolated from the Sargasso Sea
atggaaataagacctcatagattaataaaaagaaaaaaaacaaaaaaaattaaagttggcaatgtttatgttggaggtgactcggcaatatctgttcaatcaatgacaaatacccttacaacagattatgtagctaccataaaacagattaatgagttggaacaagcaggtgctgacatagttagggtttcctgtcctgacgaagaatcaacaaaggcactaaaaaaaataacaaaagaagccaaagtacctatcgttgccgatatacattttcattacaaaagagcaattgagtcagctgtttcaggagcaaaatgtttgagaattaatccaggtaacataggctcaaaagaaagaatcaaagaggttgtgaaagccgccaaagactatgattgtgctattagaataggagtaaatgcaggctcattagataaaaatattttggaaaaatttaaagaaccttgtcctgaggcattaattgaaagcgcagaacaaaatataaagttactagaagacaatgatttttttaattttaaaataagtgttaaatcatcagatgtatttttagcagtaaaggcatacgagggtttatcaaagctttatgattaccccttacacttaggtattacagaagcaggtggtttaataaccggtagtatcaaatcatcaattggtattggtaaacttttgatgcaaggtataggtgatacaataagagtttctttgtctgcaaatccagtcgaagaggttaaagctggttatgaaatattaaaatctttaggcataagatcaagaggagttcaaataatttcatgcccttcttgtgcaagacaagcttttccagtcattgatacagtaaaaattttagaagataaactctctcatatcaagaaacctttaacactatcaattataggatgtgtcgttaatgggcctggcgaggcatcacaaactgatattggtcttacaggtggtggagaaggaaataatttattttatttgtcaggaattcctcataataaagttgcaaacaaagatatcattgaaaaaagtagtagagctagtttgagtcaaa

SEQ ID NO: 212780 - DNA, 827 bp, Unknown
  Bacterial polypeptide expressing nucleotide sequence isolated from the Sargasso Sea
acattttcaccataaacgagctatcgaagcggctaaaataggtgttcattgcttaagaattaatccaggaaatattggttcaaaagaaagagtaaaagatattattaaagctgctaaagataataattgttcaataagaattggtgtcaacgcaggctcactagataaatctttattagaaaaatacaaagagccttgccccgaagcattagttgagagtgcttctgatagcataaagttattcgaggacaatgatttttttaattttaaaataagtgtaaaatcttcagatatctttttaacagtcaaagcttatagacttctatcgaaaatttgtgattaccctttgcatttaggtgttactgaggctgggggtttatttactggtagcattaaatcttcaataggtattggtcaacttttgatggagggtataggcgatacaattcgagtctctttatcctctgaccctgtagatgaagttaaagccggttttgaaatattaaaatctttaggaatacgatcgagaggagtaaatattatctcttgcccctcatgtgctcgtcaagcatttccagttatagaaacagtaaagatattagaaaaaaaattatcacatattaaaaaacctattagtctctcaataattggttgtgtagtaaatggtcctggtgaggcagctcaaacagaaataggattaacaggaggtggacaggataacaacttactttatctgtctggtgtgcctcataccaaagtagctagttcagaaattattgataaaattgttgagctagtagaaaacaaagcaaaagacttgaactaac

SEQ ID NO: 212781 - DNA, 1093 bp, Unknown
  Bacterial polypeptide expressing nucleotide sequence isolated from the Sargasso Sea
aatgttaagaccctatcaaatcatagatagacgtaaaacacgtgtaattaatgtgggaaatgtattaatagggggagataatccaatatctgttcagacaatgactaatacgatcacatctgatacaaaaaaaacacttgatcaaataaacactgttgttgaagctggggctgacctggtaagagtatccgttccagataaggagtctactaacgctttaaaagttatatgtaaaaacagcaaagtacctataattgcagatatacattttcattataaaagagctcttgaagctgcagataatggtgctgcctgtttaagaataaatccaggaaatataggttctttggaaaaagttaaagaagttataaaggctgctaaagataacgattgctctatacgaataggtgtaaatgcaggaagtttagaaaaacaaattttagaaaaattttcagaacctaaccctgaagctttagttgaaagtgcattacttaatatgaaaatattagaagataatgattttttaaatttcaagttaagcgttaaagcttctgatgtgtttatggctattaaagcttacaaaaaattagcttcgatttgtgattatcctttacatttaggtattactgaggctggcggacaaagatctggatctataaaatcttcaattgggattggtaatcttttgcttaatggcataggtgatactattagggtatcattagcagataagcccgaagaagaagtaagagttggttttgaaatattaaaaagcttaggcataagaaatagaggtatcaaaataattgcatgtccttcatgtgcgagacaacaatttccagttattgaaacagtaaaaaaactagaagaatctctacaagatattacaaagcctataacagtttcaatcataggttgtgtggtaaatggacctggtgaggcaaaaatgacaaatataggaattacgggcggaggaaatgatactcacatgctatatattgatggaaaaaaagatagaaggatcaaaaacgttgatttgacatcttatttagagaaagtgattagagataaatctcagaattttaaacattaa

SEQ ID NO: 212782 - DNA, 1012 bp, Unknown
  Bacterial polypeptide expressing nucleotide sequence isolated from the Sargasso Sea
tgcagttcagacaatgacaaatacactaacctctaatgcaaaagatactattgctcaaattgaaagatctgcaaaacttggtgttgatttagttagagtttctgttccagataaagaatcttccttttctttgaaagaaattgttaaacacagccccgtacctattattgcagatatacattttcattataaaagagggattgaagcagcaaataatggcgcttcttgtattagaataaatcctggaaatattggaaacattgaaagaatcaaagaagttataaaagctgcaaaagataataattgctcaattagagtaggtgttaatgcaggaagtttagaaaaacaaattttagaaaaattttctgagcctaatccagaagccttagttgaaagtgctaaattaaatataaagatacttgaagataatgattttaccaattttaaaattagtgtgaaatcttcagatatatttatgtctataaaagcatatgagcaattagctgatttatgtgattatccattacacttaggtatcacagaggcaggaggaaaaagaacaggttcaattaaatcttcaattggagttggaaatttacttttgagagggataggtgatacaattagaatatcattgtcagatgagccagaagaagaggtaagggtgggttttgaaatattaaaaagtttaggattaagaaatagaggtgtaaaaattatatcatgcccttcatgtgctagacaacaatttgaagtaataaaaacagtaaaaaatctagaaaaaaaattagatgatatttccacgcctataacagtatctataattggatgtgttgttaatggtccaggtgaagcaactatgacaaatattggaataactggcggcggtaatgatacacacatgatttatcttgatggtaaaaaaaacaatgttgtaaaaaatgtagatttagaaagttatcttgaagatcttattagaaaaaaaacaaaagaaatagaaatgagtaattaa

SEQ ID NO: 212783 - DNA, 1075 bp, Unknown
  Bacterial polypeptide expressing nucleotide sequence isolated from the Sargasso Sea
atgataaaacgaagaaaaacacgcgaagtaaagattggcgatctcatcataggtggagagcatgcgataaccgttcaatcaatgaccactactaaaactgacgatattacaggtacgttaaaagaagttgagagattggaagaggctggttgtcatattattcgcatcactgttccagacaaagcagctgctaaagccctttatgaaataaaaaaacgtatgaatgtacccttggttgctgatatacactttgattatcgaatggctttagaagctgtcgacgcaggagcagataaaataaggattaatcctggaaatattggaggcaaggcacgcgttaaagaggttttaaataaagttaaaggagccaatctgcctatacgaattggcgtaaatgctggaagccttgaaaaagatttaatagaaaaatatagctttccaaccgcagaggcaatggttgaaagcgcacaaaggcatatcgatatatgcagagagcacggctttgaagatattatagtatctcttaaagcatcagatgtaaacttgatgattggggcttactccctattttcacaaaagtacgattacccacttcatcttggtgttacagaagctggtccagctaaatcggggacagttaaatccgctgttggtcttggaaatttattggcaaacggtataggcgatacaattcgcgtaagcctgactgatgatcctgttgaagaggtccacgttggttttgaaatcctaaaaagcctaggattagcaagtaaaggtgttactattgtctcatgtcctacctgcggtaggcttgaggtagacctatttaaaattgctggtgaggtagaggaagaattaaaagatgtaaagacacccatgactttagcgctgatgggttgcgcagtcaatggacctggggaagctacgcatacagatcttggaattgcctttggaaaaggcgctgggcatctttactataaaggggaaaaaagaggcaaagtaaaagaggatcaagctcttgatgaattgaaagctatgatatcagagtttgaagaagagaaaaaggaggattaat

SEQ ID NO: 212784 - DNA, 1099 bp, Unknown
  Bacterial polypeptide expressing nucleotide sequence isolated from the Sargasso Sea
ttgaaagaacataccatccaaagaaagaaaacaaaaaaaatatgggttggtgatgtgcctgtaggtggagatgctccaatatctgtgcagtcaatgactaatacagaaactacagatgtaaaggctactatcaaacaaataatagacttagaagacgctggagctgatattgtaagagtttcagtacccactatggaagcagctgaagcctttaaagaaataaaaaaagctacaaatatacctcttgtatctgatattcattttgattacaaaattgcattaaaagtgctcgagtatgatgttgattgtgtaagaattaatcctggcaacatcggcagcgaaaaaaagattaaagaagtaatcgcatcagcgaaagagaaggatataccaattagagtaggtgttaatgcggggtcgctagagaaagatttgcaaatgaagtatggagaacctaatgcagatgcactagttgaatctgcaatgaggcatgttgagatattgctcaaaaataattatgagaattttaaattaagcattaaatcttcggatattttcatggcagttgagagttatgaaaaaatatcggatttgatagaacaacctttgcatcttggcattacagaatctgggtctttaaaaacaggaacagttaaatcatccataggattaggtcgacttctgatgcaaggaattggtgatactatcagagtttctcttgcctctgatcctgtagatgaagtaaaagttgcctgggaaatgctaaagtccttgaaaattagatcaagaggtgtaaaaattgtcgcctgcccgagctgctcaagacaaaattttcaggtaattgatacagtaaataagcttgaaaatgaattatcagagctaaaagaagaagtaactcttgctgttataggttgttatgtaaatggtccaggtgagtcaaaagttgcagatgttggtgtgactggagcagcaccgaaacatctaatatatttaaacggaaaaccagcttataaagttgaaactaaagaccttgagaaagctctaataaaagaggtagtagaaatagcagagaaaaaacgtaatacaatagttaaacaatgag

SEQ ID NO: 212785 - DNA, 544 bp, Unknown
  Bacterial polypeptide expressing nucleotide sequence isolated from the Sargasso Sea
atgagtgtaagaccctttagagatattaaaagaagaaaaacaaaagtaataaatgttggaaaagtaaaaattggcggtgaaaatcctatttctgttcaatcaatgacgaacactttaaccactgatgttaaagcgaccatcaaacaaataaatgatataacagaggaaggtgcagatattgtaagagtttcttgtcctgatgagagctcaacattagcactaaaagaaattgtaaaacatgtctcgataccagtagttgcagatattcattttcattataaaagagctattgaggcagcagaaaatggagctagctgcttaagaattaatccaggaaatattggagatacatcgaagatacatgaggtattaaaagctgcaaagaataataattgttcaataagggttggggttaacgcaggttcattagaaaaagatattttagaaaaatttaaagagccttgtccagaggctttagtagaaagtgctcagagaaatataaaaattttagaggataaagatttttttaatttcaaaaattagt

SEQ ID NO: 212786 - DNA, 703 bp, Unknown
  Bacterial polypeptide expressing nucleotide sequence isolated from the Sargasso Sea
ataagaattggagtgaatgcaggttctcttgaaaaagatatattagaaaaatataaagaaccttgtccagaagcactagtagaaagcgctcaaagaaatataaaaattttggaagatcaaaatttttttaattttaaaataagcgtaaagtcatctgatgtatttttgtcaattgcagcttatagacaattatccaaagtttgtgattatcctctacatctaggaattacagaagcaggtagttttatccctggtagcattaaatcatcaataggacttggcacattattattggatggaattggtgatacaattagaatttctctttcagatgatcctatcaaagaagttaaaataggaaatgaaatattaaaatctttaaatttaaaaaatagaggagtcaaaattatttcttgtccaacatgcgctaggcaggcttttcaagttattgatgtagtaaaggttttggaagaaaagctttcgcatataaaaacccccattactttatctgtaattggttgtgtagttaatggacccggagaagctgctcaaacagacattggtataactgggggaggcaaaggaagcaatatgctttatttaaatggacttcaatcacaaaaaatatcaaatgacgacattatatctaaagttgtagaattagttgaaaaaaaagcattagaaatagaaaataaaaaataat

SEQ ID NO: 212787 - DNA, 1093 bp, Unknown
  Bacterial polypeptide expressing nucleotide sequence isolated from the Sargasso Sea
atgagtcagtactctcaaaataaaataatccgcaggcgcacaaagaagattgaggttggaagtgtagaagttggtggtgatgcaaaaatttctgtgcaatcaatgacaaatacgctcacttcagatgttaatgcaacattacaacaaatcaatgatttagtgtctgaaggtgcggatattgttagggtatcttgtcccgatcaagaatctacagaatctctaaaagagatcgttaattatgtggatgtaccaatcgttgcagatattcactttcactacaagcgtgcgatcgaagctgctgatgcgggcgctgcttgcttaagaataaatcctggcaatattggagtagataaaattattgaggttattgatgcggctaaacaaaataacatttgtatgcgaataggagtaaatgcaggctccattgatgaaaaaattttaaaaaaatacagtaaaccttgtgccgatgcattagtcgaaagcgcaatagaaaatatacgcctgcttgaagacaataattttgataatttcaaaataagtgtaaaagcatcagatgtatttactacaattgaagcctatgaaaaattagcaaaactttgtgattatccatttcatgttggattaacagaagcaggaacttatttatcgggctcaattaagtcatccataagtattggcaatcttctctcacaagggatcggagatacaattagagtttcattaacagcagatccagtagaggaaattaaagtaggtcacgagatattgaagagtttaaatttagcttctaggggtattaaaattatttcctgcccttcttgtgctagacaagcttttccagtaattgatacagttcgtgagcttgaaagaagattgtcacatattaaagatcctataactctctcaattattggctgtgttgtaaacggtccaggagaagcattaaatagcgatattggggtaactggcggtggaaaggggaataatatgatttatttatcaggtgttgctgaccataaaataaaaaatcccgaaatagttgatcacgttgttaatcttgtagagaaaaagattcaatcacttcatgattaaa

SEQ ID NO: 212788 - DNA, 541 bp, Unknown
  Bacterial polypeptide expressing nucleotide sequence isolated from the Sargasso Sea
tcggatgtttttttgtccaatagctgcataccaagttattggtctgaaaaaacagattatcctcttcacttaggcattacggaagcaggaagttttttacctggaagtattaaatcgtcaatagggtttggaagtttgttattagatggcattggggataccataagagtatcactctcagatgatcctgttaaggagattaaagttggcaatgaaatattaaaatcactcaacttaagaaatagaggagtaaaaattatttcatgtccatcttgtgctagacaagccttccaagttattgaaacagtaaaacaattagaagaaagattatctcatataacaaaaccaataacattatcaattataggttgtgttgtaaatggaccaggtgaagctaaacaaacagaaataggaattaccggtggtggtaaagataatcatatgttgtatttgaatggtttagaagtagagaaagtaatgactaaagatatgattaataaaattgttactttagtagaggaaaaagcttcaaacttgtaac

SEQ ID NO: 212789 - DNA, 1099 bp, Unknown; identical to SEQ ID NO: 212784
  Bacterial polypeptide expressing nucleotide sequence isolated from the Sargasso Sea

SEQ ID NO: 212790 - DNA, 1048 bp, Unknown
  Bacterial polypeptide expressing nucleotide sequence isolated from the Sargasso Sea
atgttttcagaatcaccaattaaacgcagaaaatccacccgtattaatgtaggcaatgtgcctattggcgacggcgctccaattgccgtgcagtcgatgactaataccgacaccatggatgttgatgcaaccgttgcacaaattcaagctatacaagatgctggcgccgacatagtaagagtatcggtaccgactatggacgcagctgaagcgtttaaaagtataaaagagcaagtcagtattccgcttgttgccgacattcattttgattaccgcatagccctaaaagtggcaaagtatggcgtagattgcttacgtataaaccctggtaatatcggaagcgaagagcgcattagagctgttgttgattcagctcgcgagcacaacattcctattcgtattggcgttaatggcggctcacttgagcgcgatttacaggaaaaatatggtgaaccaacacctgaggcgttattggaatcagcaatgcgccatgttgatatattacgtcgccttgattttgatcaatttaaaatatcggtaaaagcgtcagacgtatttttagctgtaggcgcatatcgcttgcttgcaaaagaaatagaccaacctttgcatttgggtatcactgaagctggcggcatgcgttcaggttcagtgaaatcggctgttggcttaggtatgttacttgccgaaggcataggcgatacattacgtgtatcactcgccgccgacccggtacaagaaataaaagtaggctttgatatattaaaatcactgcgcattcgctctcgtggtattaactttattgcctgtcctagttgctcacgccaagaatttgatgtagtgagcactatgaaccaattagaagaacgccttgaagatataatcgaaccggtttctgtatcggttattggttgtgtagtaaatggccctggtgaagcactcgtcagtgatattggccttgccggtgcaaatcgccgttctggtttgtatattaatggtgaacgtcaaaaagcccgtatcgacaataacaatattgtgagcaactaga

SEQ ID NO: 212791 - DNA, 294 bp, Unknown
  Bacterial polypeptide expressing nucleotide sequence isolated from the Sargasso Sea
gatgtctgattggataaggagaaaacctactaacctagttactttagggaatgtgaaagttggtgatttcaatccaatctctgttcaatcaatgacgaacacaaacacagaagatattgattcaacaattaatcaaattaataatttagctattgctggtgctgatattgtaagagtttcagtcccaacagaaactgctgctgaagcattcaaaaaaattaagaaagttgtgtctgttcctcttgttgctgatattcattttgattataaacttgctctcgcagtagcagattc

SEQ ID NO: 212792 - DNA, 367 bp, Unknown
  Bacterial polypeptide expressing nucleotide sequence isolated from the Sargasso Sea
atgacaaattggattaaaagaaaaaaaacgcaagttgttaatgtcggtggggttcttgttgggggagataatccaatatcaattcaatcaatgacaaatacggacacttgtgatgttgtttcaacagtaaatcaaataaaagatttagaggatgcgggtgctgatatagtgagagtatcagtgcctggatttgaagaagctaaagcatttaaggagattaagaaattatccaaaattccattagtagctgatatacattttgattacaaaatagctcttgaggttgcagatacagcagattgcttaagaataaacccaggtaatattggtaaagaggatagagttaaggaagtaattagcgcagcaa

SEQ ID NO: 212793 - DNA, 901 bp, Unknown
  Bacterial polypeptide expressing nucleotide sequence isolated from the Sargasso Sea
gatgagaagacaaactttaagtgttaaaataggcaaggtctttattggcagtgaacatagtataaagacccaatctatgacaacagcatcaactatggataccaatcaaagtgttgatgaagcaataagaattatcaaggctggcggaaaactagtaagatttacagctccgaacattaatgaagcaaaaaacttattaaatattaaaaatgctttggttgaaaaaggctatgatcatcctttagttgccgatattcattttacaccaaatgctgcattagaagcatcaaaaatagtagaaaaagtaagaattaatcctggaaattatgttgataagaaaaaatttgaagtgaaagagtatgatgatgcatcttatcaagatgagctattaaagattgaagaaaagtttattcctttaattaattcttgtaaacagaatgatgtagctatgagaattggtaccaatcatggatcattgtctgacagaataatgaatagatttggcgatactcctcttggaatggttgaatcggcaatggaatttttaaggatttgcaagcaaaatgattatgatcaaattgttttatcaatgaaatcaagtaatccaattgtaatgattcatgcatacagattacttgttaaatctatggaagatgaaaacatgcattatccgcttcatctaggagttacagaagcaggagatgggctagatggaagaataaagtctgcattaggtataggaactttattaacagaaggaataggagatactattcgagtctcactgactgaagatcctgaatttgaaattcctgcagctgaaaaaattcttgaaaaaattgatagtttttctaaaaaagtaagactcaagaataataataaaagagctttttcatttttt

SEQ ID NO: 212794 - DNA, 607 bp, Unknown
  Bacterial polypeptide expressing nucleotide sequence isolated from the Sargasso Sea
atgaacattagaccctttagggaaataaaaagaagaaaaacaaaagaaataaaggttggcaatgtaaaagttggaggagataatccaatttctgttcaatcaatgaccaatactttaacaaaagatgttaaagaaacagtaaatcaaatcaagcaaattgaggaagcgggagctgatatcgtcagagtgtcatgtccagatcaagactcaacgaaagctcttagaaatattattaaaaatatttctataccaatagttgctgacattcactttcactataaaagagcaatagaagcagctgagagtggtgttgcttgtcttagaattaaccctggaaacattggagacaaaaaaaaaattaaagaagtaatttctgctgcaaaaaataataattgttcaattagaattggtgttaatgctggatctttagaaaaagacttattagaaaaatataaagaaccttgtccagaagctttagtggagagcgcattaagaaatattagtatagttgaagactttgacttttatgaatttaaagtgagcgtcaaatcttctgatgtatttttatctattgaagcttataaacaactttctaaagcaactaatt

SEQ ID NO: 212795 - DNA, 835 bp, Unknown
  Bacterial polypeptide expressing nucleotide sequence isolated from the Sargasso Sea
aatgagtgttagaccatttagagatatcaagagaagaaaaacaaaagtaataaatgttggagatgtcaaaattggtggtgataatccaatttctgttcaatccatgaccaacactttaacaacagatgttaaagcaacaataaatcaaattaatgatattgctgaggaaggagccgatatagttagagtttcgtgtccagatacagagtcaaccaaagctcttaaagaaatagttaaacatgtatctatcccagtagtagcggatattcattttcattataaaagagcgatcgaagcagctgagaacggagccaaatgtttaaggataaatcctggtaatattggtgaggagtcaaaaattcatgatgttcttagtgctgcaaagaataatggttgttcagttagaattggagtaaatgctggatcattagaaaaagatatattagataagtttaaagagccttgtccagaagccctagtggaaagtgctttaagaaatataaaaatattagaagataaagatttttttaattttaaaataagcgttaagtcttcagatgttttcttatcaattggtgcttatagacaattatctaaagtctgtgattatcctcttcatttaggcatcactgaggctgggagttttgtgtctggaagtataaagtcttctataggactagggagtctattaatggatggaattggagatactataaggatttctctatcagataatcctacaaaagaagtaacaattggaaatgaaattctaaaatcattaaatctaagaaatagaggagtaaaaatcatatcatgcccctcttgcgcaagacaa

SEQ ID NO: 212796 - DNA, 1111 bp, Unknown
  Bacterial polypeptide expressing nucleotide sequence isolated from the Sargasso Sea
gttgaactttttaaagattaaaagacgtaattctctaaaaattaaagttggcaatgtagaaattggtggcgatgccccaattagtgttcaaagcatgacgaacactaaaacagaggacgtccaagcgacattagatcaagtaaaacagcttgaagatgctggagcagatttagtcagaatttctgtaccaaatgaagaagcagcaacggctttcaagttcataaaaaaagattccaatgttcctctcattgcagatatacactttgattacaagatgggtattctggctgctaaaaatggagccgattgcttaagaattaatcctggcaatattggcaacatcgatagagttaaagaggtagttaaatgtgcggaagataaagatattccaattagagttggcgtcaatgctggttctttagagaaaaaactacaaaaaaaatatggtgagcccacacctgaagccttggtcgaatcagccatgaatcacgtggatatattggaatctcttaattttcaaaattttaagctcagcatcaaggcatctgatgttggcatgatggtagaaagctataggattattgcagaaatgataaaacaacctttacatcttggtctcacagaagcaggtgggttcagatctggcacagttaaatcatccatagccatgggtgcattattaatggatggaataggggatacaatcagggtgtcacttgcatctgatcccgttgacgaaataaaagtaggttttgatttattaaaaagcttaaaacttagatcaaagggaataaattttatagcttgtccaagctgttcaagacaaaatttcaatgtaattgaaactatgaatcaattagaagcaagattagaggatgtcagagaaaatattgatgttgctgtaattggttgttatgtgaatgggcccggggaatctaaagcagctcatgttggtataacaggggcagatccaaataatttgatttacattgatggagagcctgatcacaaaatagggaatgaaaatctcgtagagcatttggaaaaacaaatcagagataaagtaaaatctattgagattgagaataaaaaaataattgctaaaggttag

SEQ ID NO: 212797 - DNA, 1189 bp, Unknown
  Bacterial polypeptide expressing nucleotide sequence isolated from the Sargasso Sea
ctgttcgaaactgtgaaacgccgccagagcgtgcccgtcgatgtcggcggcgtaaccgtcggtggcggcgtaccgatcgtagtccagtccatgaccaacaccgataccgcggatgtggaatcgacggcgaagcaggtcgccgacctagcccgcgccggttcggaaattgtccgcatcacagtcgaccgggacgaagccgccaaggccgtgccccatatacgcgaccggttgatgctgatgggagtagaggtaccgttggtcggagatttccactatatcggccacaagttgctgaccgaaaacccggcctgcgccgaggcgcttgccaaataccgcatcaatcccggcaatgtgggtttccgcgaaaagcgcgacacccagttcagcaccatgatcgaggtcgcgaacaaattcgaaaagccggtgcgcatcggcgtcaactggggctcgctggatcaggaactgctgacccggctgatggatgagaacacggcgtccgacaatccgaaagacgcggcgcaggtcacccgcgatgccatggtgatgtcgggccttttgtcggcggaacgggccgaagagcttggcatgccgcgcaaccggatcatcatttcggccaaggtgtcagcggtgcaggatttgatcgccgtctatcgcgacttggcggcgcgctgcgattacaccctgcatctggggctcacggaggcggggatgggcaccaagggcgtcgttgcgtcgtcggccggcatgggcattctgctgcaggatggcatcggcgacactatccgtatttccctgaccccggagcccggtggcgaccgcacacgggaagtgaccgtcgctcaggaactgttgcaggtcttgggtttgagatcgtttgtgccgttggttacggcgtgccccggttgcgggcggaccacgtcgaccgtgttccaggaattggcccagaaaatccaggcccatatccgcgaacgtatgccaggatggcgggagcaataccctggtgtggaggaactgaatgttgccgtgatgggctgcatcgtgaacgggcctggcgaatccaagcacgcggatatcggcatcagcctgcccggtaccggcgaggagcccgccgcgccggtctttatcgacggcgaaaagaagatgacgctccgcggcccgggcattgcggatgatttccgcgtactcgtcg

SEQ ID NO: 212798 - DNA, 1117 bp, Unknown
  Bacterial polypeptide expressing nucleotide sequence isolated from the Sargasso Sea
tatgtataacgaaacacccataaagagacgtccttcaacccgcatttatgtgggcaatgtgccgattggtgatggtgcgccgattgccgtacagtcgatgactaacactaagaccacagacgttgaggcaaccgttgcccaaatccgtgccctagaaaaagtgggtgccgatattgtgcgtgtctctgtgccgaccatggatgccgccgaagcctttaaagtgattaagcaatcggtatctgtgcccttggttgcagatatccacttcgattaccgtatcgccttaaaagtggctgaatatggtgtggactgtttgcgtatcaacccgggcaatatcggtaacgaagagcgtatccgcagtgtggtggagtgcgcccgcgataaaaatattcctatccgtattggggtgaacggcggttcattagaaaaagatctgatggacaaatacaaagagcccacgccagaagccttactcgaatcggccatgcgccatgtggacattctcgaccgtttgaacttcgaccaatttaaggtcagcgtaaaagcctccgatgtgttcttggcggtggaatcctatcgtttattggctaagcaaattcgccagccactgcatttaggtattaccgaagcaggcggcgcccgtgcgggtgcggtgaagtctgccgttggcttaggcatgctgcttgccgaaggcattggtgatacgctgcgtatttccttggcggccgatccggtggaagaaatcaaagttggctttgatatcctaaagtcactgcgtattcgtagccgtggcattaactttattgcctgtccttcttgctcgcgccaggagttcgatgtgatcagcacagtaaatgaattagagcgccgcctcgaagatgtgacgaccgcgatggatgtgtctatcatcggctgtgtggtcaatggcccaggcgaagccttagtgtcacacattggcttaacgggtggacatcgtaagagtggttactacgatgaaggcgagcgtcaaaaagagcgtttcgacaatgacaacttagtcgattccctcgaggcgaaaattcgcgctaaggcgagccaaatggccaatcgcatccaagtgaaagacacgactgagtaa

SEQ ID NO: 212799 - DNA, 500 bp, Unknown
  Bacterial polypeptide expressing nucleotide sequence isolated from the Sargasso Sea
cttgaaagaaaaagcaatagtacgtaaaaaaacaaaaaagatttgggttggtgatgtgcctataggaggagatgcgcccatcacaattcaatccatgacgaatactcatacccaggatataaacgccacaacaacacaaataaatgctcttgcagacgcaggcgcagatattgtaagggtatcagtgccggatatggcctcggcagaggcttttcaaaagattaaacaaaacgtaaatttacctttagttgctgatatccattttgaccataaaatagcacttaaagttatagagaatggcgcagattgtgtcaggataaacccggggaatatagggtctgagcaaaaaattaaggaagttattttttcagcaaaagacaaaaaaattcccattcgaatcggtgtaaatgctggctctttggagaaagatttacacaaaatatggagagcaaactcagatgcattagtcgagtcagcattgagacatgttgatattttag

SEQ ID NO: 212800 - DNA, 556 bp, Unknown
  Bacterial polypeptide expressing nucleotide sequence isolated from the Sargasso Sea
atgacaaattggattaaaagaaaaaaaacaaaagttgttaatgtcgggggggttcctgttgggggagataatccaatatcaattcaatcaatgacaaatacaaatacttgtgatgttgtttcaacagtcaatcaaataaaagatttagaggatgctggcgctgatatagtgagagtttcagtgcctggattcgaagaagctaaagcatttaaagaaattaagaaattatctaaaatcccattagtagcagatatacattttgattacaaaatagctttagaggttgcagatgtagctgattgtttaagaataaacccaggtaatattggtaaagaagatagagtcaaggaagtaattagcgcagcaattgataataatgttccaataagggttggagtaaatgcgggatctttagaaaaagatttacaaaaaaagtatggagaacctaatgcagatgctctagtagaatcagctttaaggcatgtagagatattagataaatttaattttgatgattataagatgagtcttaaagcttcaaacatagagatgacgg

SEQ ID NO: 212801 - DNA, 799 bp, Unknown
  Bacterial polypeptide expressing nucleotide sequence isolated from the Sargasso Sea
atgagtattaggcctttcagagatattaaaagaagaaaaacaaaagtaattaatgttggggatgtaaaagttggaggagataatcctattagtgttcaatctatgacaaatactttaacaacagatattaaagctactataaatcagataaatgcaataaccgctgagggagcagatattgtgagagtttcatgtccggatgaaaaatcaacgatagctttaaaagaaataacaaaacatgtctcggttcctatagttgcagatattcattttcattataaaagagcaattgaggctgcagaaaatggagcaaaatgtttaagaattaatcctgggaacataggtgataaattaaaagtacatgaaatattaagtgcagctaaaaataataattgttctataaggattggtgtaaatgctggatcattagaaaaggatattttagaaaaatataaagagccgtgcccagaagctttagttgaaagtgccttaagaaatataaaaatattagaagatcagaacttttttaattttaaaataagtgtaaagtcatctgatgtttttttatcaatcgcagcttatagacaattatcaaaagtttgtgactatcctctacatttaggaattactgaggcaggtagttttgtatctggtagcattaaatcatctataggtttaggctcacttttgatggaaggaataggagatacaatcagagtttcattatctgacgatcctacaaaagagataaaaataggaaacgaaatattaaaatctttaaatttaagaagtagaggaa

SEQ ID NO: 212802 - DNA, 633 bp, Unknown
  Bacterial polypeptide expressing nucleotide sequence isolated from the Sargasso Sea
gacttcgcccatcagcaatggttgagagtgcattattccatgaaaatattttaagagatttagattttaataattttaagatatctgtaaaaacttcaaatgttttacttacagttgagtcatataaagagttatcaaaagtaaccgatgctcctcttcatttaggcattaccgaagctggtggattaatggatggcacaattaaatcttccattggcattggtcaacttctggctcaaggaattggcgatacattaagagtttctctatctgcagacccagttgaagagataaaagttggttttagtattttaaaaagtcttggactaagacatcgaggagttaatataatttcgtgcccttcatgcgcgagacaaggttttgatgttatcggtacagtaaaaaaattagaagaacgtttatcaagtatttctgaaccatttacaatttctgtaattggttgtgtagttaatggccctggtgaagctactatgtcagatgtaggatttactggcggtggaaatgacagtggaatgctttatgtcgatggaaagcaacttgcaaaacgaaataatgatgagttaattgactcaattgttagtgaagttgaaaaaaaaataaaacaaaaataaa

SEQ ID NO: 212803 - DNA, 1099 bp, Unknown
  Bacterial polypeptide expressing nucleotide sequence isolated from the Sargasso Sea
atgagcataagaccatttagagatattaaaagaaagaaaaccaaaaagataaaagttggaaaagtcgaagttggtggcgatgcaccaatctcagtccaatccatgactaatactttgacaacaaatgtagatgctacaattaaacaaattaacgacctagataaagcaggagcagatattgtaagagtgtcctgtccagataaagattcttctttagctttaaaaaaaattttgaaacatgttaacgttcccatagttgctgatatacattttcattataagttagctattgaagcagcaaattctggagcacattgtttaagaataaatccaggaaatattggttcaaaaaaaaaagtccaggaaattcttaaagctgctaaagataataactgttctataagaattggagttaatgcaggatctattgaaagatcattactggaaaaatacaaagagccatgtccggaggcattagtagaaagtgcggtaaataatattaaaattttagaagatgaagatttttttaatttcaaaataagcgttaaatcttctgatgtatttttatcaacaaaagcctatagatcaatttcaaaaatatgtaattatccattgcatttaggtatcactgaagcgggaagtttaaaatcaggaagtattaaatcttcaattggaattggcatgttattaatggaaggaataggagatacaataagagtttcattatcagcagatccagtagaagaagttaaaattggttatgaaatattaaaatcactaaatttaagacacaaaggagtaaatatcatatcttgcccatcatgtgcccgacagggatttccagttattgatactgtcaaaattttggaagaaaaactctctcatataaaagaaccaataaccttgtcaataattggctgtgttgttaacgggcctggtgaagctgggcaaacacaaataggtttaacaggcggcggaaaaggtgagcacatggtatatatttctggcttgcctcatcataaagttgctagtgataaaattattgatgatgttattagtttagtagaaaaaaaatcaaaagaaatccgaaatacataaa

SEQ ID NO: 212804 - DNA, 1219 bp, Unknown
  Bacterial polypeptide expressing nucleotide sequence isolated from the Sargasso Sea
atgttcaacagaagaaaaacatctcaaattcaagtaggtaaagttggaattggttctaatttccctatatcagtgcagtcgatgacaactactaagactagagatgtagatgggacacttgcacagatttatgaaattgcctcaaatggagcggacattgtcagagttacttgcaatgaggttgaagctgctgaaggtcttgttgagattacccaaagaagcccagtccctattattgctgacatacattttcagtataagttagcacttgctgcagttgatgcaggtgtagacgggctaagacttaatcctggaaacattagaaaagaatcgcagattaaagaagtagctaaagcagcattaagtgcaaacatcccaattcgaattggggtaaatggtggatcacttgataaagatttgcttgagaaatatggagacgctactcctgaagctttggttgagtcagctatgacagaattaaagtacctagaggatgttgatttctttaatataaagatttctgtaaaacattcaaatgtaccactaatgattgagtcatacagattgcttgcagagaaagttgagtaccctttacatttaggggtaaccgaagcaggcccacttccaggaggacttataaaatcaacggcgggtatatcaacattattaaatgaagggattggagatacaataaggtattcattaaccgccgacccaatagaagaagccaaaagtggtagacagttactcgaatatttaggactcagagagagaaattctcttgatttgattgcatgtccaagctgcggcagggcagaagttgatgttattaaagttgctgaagaagcacaagaggcattgaataaagaagatataccccttcaggttgctgttatgggttgcgtagttaatggacccggagaggctagatcagcagatattggtattgctgcaggaaaaaataaggggcatttgtttatacgtggtgaggttgtgagagttgtaaatgaaaaagacatggttacttctttactggatgaagcccgtttgattgtagaagaaggaatcgaatctagattggcagctgcagatgataatgcagcagaactagctcaaaaagatgttgaagatttattaaactctcaaggtgatataaataactttacggagagaaaaaaatcagttgttgagattacttcaaaacaagataatgattagt

SEQ ID NO: 212805 - DNA, 1093 bp, Unknown
  Bacterial polypeptide expressing nucleotide sequence isolated from the Sargasso Sea
tatgagtcagtactctcaaaacaaaataatacgccggcgtacaaagaagattaaggttggaagtgtagaagttggtggcgatgcaaaaatttctgtacaatcaatgacaaacacccttacatcagatgtcaatgcaacagtaaaacaaatcaatgatttagtatctgaaggcgcagatatcgttagagtgtcttgtcccgatcaagagtctacaaaatctcttaaagagatcattaataatgtggatgtaccaatcgttgcagatattcactttcactacaagcgtgcaatcgaagctgctgatgcgggcgctgcttgcttaagaataaatcctggcaatattggagtagataaaattattgaggttattgatgcagctaaacaaaataacatttgtatgcgcataggagtaaatgcaggctccattgatgaaaaaattctaaaaaaatacagtgaaccctgtgctgatgctttagtcgagagcgcaatagcaaatatacgtctgcttgaggacaattattttgataattttaaaataagtgtaaaagcatcagatgtatttactacaattgaagcctatgaaaaattagcaaaactttgtgattatccatttcacgttggattaacagaagcaggaacttacttatcgggctcaattaagtcatccataagtattggcaaccttctctcacaagggatcggagatacaattagagtttcattaacagcagatccagtagaggaaattaaagtaggtcacgagatattgaagagtttaaatttaggttcaaggggtattaaaattatttcttgcccttcttgtgctagacaggctttcccagtaattgacacagttcgtgagcttgaaagaagattgtcacacattaaagatcctataactctctcaattattggctgtgttgtaaacggtccgggagaagcattaaatagtgatataggggttaccggcggtggaaaggggaataatatgatttatttatcaggcgttgctgatcataaaataaaaaatcccgaaatagtcgatcacgttgttaatcttgtagagaaaaaaattcaatcactccatgattaa

SEQ ID NO: 212806 - DNA, 972 bp, Unknown
  Bacterial polypeptide expressing nucleotide sequence isolated from the Sargasso Sea
ttaatcaaataaataatctcgttgcggcaggagcagatattgtcagagtgtcagttccagataaagactctgcaacagcatttaaaaaaattaaaaaggctgtttcaattcctctcgttgcagatattcattttgattatatgcttgccatcgaggttgctgattcagctgattgcttgcggattaatccggggaatattgggaaggagaaaaaagtgatagaggttataaatgctgctaagcataatggagttccaataagagttggtgtaaatgcaggttctcttgagaaagaccttcaaaaaaagtatggagaaccgaactcagatgctttagttgaatcagcacaaaggcacatagatattcttgcaaaacatgattttgatcactataaaataagtcttaaggcatctaatattgaaatgactgttgatgcatataggaaaatatcaaatttaatagatcaacctctgcatttagggataactgaagccggaagcttaagaggaggaactgtaaagtcctcaatcggtgttggaatgttgttatctgaaggtattggcgatactataaggatatcacttgcatcagatcccgttgacgaaataaaggttgggtgggatattcttaaaagtcttaatcttagaagtagaggtgtaaaaataattgcttgcccaagctgctctaggcaaaattttaatgttattgaagtggttaatgagcttgaatcaagatttgaagatatttcagaagatttagaggtagctataattggatgttatgtaaatggtccaggagaatctaaagcagtcgatataggcctcacaggagcaagcccaaataatcttttatacatcaatggacttccttcaaaaaaactcaccaatgaagagcttgttgatgaaatagagtcacaggtaagagataaaattaattcattgtcatctgatacaattattgcaagaggctaat

SEQ ID NO: 212807 - DNA, 437 bp, Unknown
  Bacterial polypeptide expressing nucleotide sequence isolated from the Sargasso Sea
gtcttctataggattggaaaatttattattagatggaattggtgatactattaggatttcactttcagatgatccggttgaagaaataaaagtaggtaatgagattttaaaatcattaaatttaagaaatagaggagttaaaataatatcttgcccttcatgcgcgagacaaggttttcaggttatagatactgttaaaattttagaagaaagactgtctcacattaaaactccaataacactttcaattattggatgcgttgtaaatggacctggagaggcagcactaactgatattggcataaccggaggtggccaaaatagcaatatgctttatttaaatggtgttcaaactcaaaaattagacaatcaagatattatttcaaaagttgttgaactagtggaaaaaaaggctgaagaaattgaaaaacaataaa

SEQ ID NO: 212808 - DNA, 901 bp, Unknown
  Bacterial polypeptide expressing nucleotide sequence isolated from the Sargasso Sea
aatgagtttaagaccatttagagatattaaaagaagaaaaacaaaagtaataaatgttggaaatgtaaagattgggggcgacaatccaatctctgttcaatcaatgacgaacactttaactacggatgttaaagcaaccataaaacaaattaatgatatagctgaggaaggtgctgatattgtaagagtgtcttgtccagatgaggactcttcaaaagcattaaaagaaataataaaacatgtatcaataccagtagttgcagatatacattttcattataaaagggctattgaggcagcagaaaatggagctagctgtttaagaattaatccaggaaatattggagatgaaacaaagatacacgaagtattgaaagcagcaaagaataataattgttcaataagaattggagtaaatgcaggttctctggaaaaagatatcttagaggaatttaaagagccttgtccagaggcattagttaaaagtgctttaagaaatataaagattttagaagataaagattttttaaattttaagataagtgtcaaatcatcagatgtattcctttcgatagcatcatatagacaactatcaaaagttatagactatcctttacaccttggaattacagaggcaggaagttttgtatctgggagcataaaatcatctatagggcttggtagtttattaatggatggaattggagatactattagaatttctttatctgacaacccaactcaagaggttaaaattggtaacgagatattaaaatcactaaatctaagaaatagaggagtaaagatcatttcttgcccctcttgtgcaagacaggcatttcaggtaatcgatactgtcaaaatattggaggagaaactagcccatataaaaacaccaata

SEQ ID NO: 212809 - DNA, 275 bp, Unknown
  Bacterial polypeptide expressing nucleotide sequence isolated from the Sargasso Sea
catgtccgctcacgaatctcccatcattcgtcgtaaatccaggcagatcatggtcggtaatgtaccggttgggggcgatgcccccatcacggtgcagaccatgaccaacaccaagaccacggacgtggccgccaccgtcgagcagatccagcggatcgagcgggttggcgccgacatcgtgcgggtctcggttcccaccatggaagcggcggaagccttcaagctcatcaagcaacagactcgtattcccatcgtcgccgatatccacttcgact

SEQ ID NO: 212810 - DNA, 1138 bp, Unknown
  Bacterial polypeptide expressing nucleotide sequence isolated from the Sargasso Sea
attgtattgccttcaggggattgtagtgatttcaaagcagcagatagttagaaagaaaacaagaaagatatatgtcggtgatgttcctgttggcggcgattcacctatttcggttcaaagtatgacaaatactctaactgctgattcagactctacaataaggcaaatccagcagttacatgaagcaggtgcggatattgtaagagtatcagttcctgatcaagaagctgccgattcttttcatgtcattaaaagtaagtcaccattgccattagttgctgatattcattttgattacacaatggcccttgaagcgatcaaaggaggagccgactgtataagaataaatccagggaatataggaaaagaagaaaagataaaagaagtaatatccgcagctaaagatactaatacgcctatcagggttgggataaatgccggttctctagagaggaaattgcaaattaagtatggtgaaccaaactcagatgctttggtagagtcagccttaaatcatatcaacatacttaaaagattaaacttcgaagattttaaattaagcatcaaagcctcagatgttcagatgaccattgaaagttacagaaagatttcagaactgattgatcagcctcttcatttaggaattactgaagcgggtggtttcagatctggaaccgtcaaatctgcgatgggtctaggctcattactaatggacggcataggggatactatcagaatttctctggcctctgatccggttgatgaaataaaagtagggtgggatatcttgaaaggcttgaaaataagatccagaggaataaatttcattgcttgtccaagttgttcacgaatgaactttgatgtgattggaacaatgaaccaattggaatctaggctggaagacataaaggaagatattgatgtggctgttataggttgttacgtaaatggtcccggagaatctaaacatactgatataggtgttacaggcggatctcctaaaaatctaatatacatagacggtaaaccagatcataaagttgaaagtgccgacctcgcggattatcttgagaaaataattcgagaaaaggttaaagaaaaatctaaaacacaagagaacttaattgcaaaaatataa

SEQ ID NO: 212811 - DNA, 742 bp, Unknown
  Bacterial polypeptide expressing nucleotide sequence isolated from the Sargasso Sea
taaaaatagaatagcagaagttatctctgcagctaagaataatgtttcttcaatacgaattggagttaatgctggatcacttgaaaaagatattcttgaaaaatataaagaaccatgtcctgaagctttagtagaaagtgctttaagaaatataaaaataattgaagatatggatttttctaatttaaaagttagtgtgaagtcttcagatgtatttttgtctatagctgcatataaattattgtcaaataaaacagattatcctctacaccttggtattacagaagcaggcagctatctgcctggtagcataaagacttcgataggatttggtagtttgttattagatgggataggagatactgttagagtatcactttcagacgaccctgttgaagaaattaaagttggaaatgaaattttaaaatccttaaacttaagagaaaggggtgtcaagatcatctcatgcccatcatgtgcaaggcaagcatttcaagttattgaaacagttaaagaattagaaaaaaaattgtctcacataaaaaagccaattagtttatctattataggatgcgttgttaatggaccgggagaggcaaaacaaacagagataggtatcactggtggtggaaaagataatcacatgttgtatttaaatggtgtagataccgaaaaagtaatgaccaaagatatgatcaatagaattgtttctttggtagaagaaaaagcatcaaaattataa

SEQ ID NO: 212812 - DNA, 1105 bp, Unknown
  Bacterial polypeptide expressing nucleotide sequence isolated from the Sargasso Sea
gatgaataattggattaaaagaaaaaagactaagaccataatggttggaagtgttcctgttggcggtgataatccaatcagtattcaatctatgacaaatactgatacatgtgatgtcgtttcaactgtaaaacaaattaaagatttagaattagccggagcagatattgttagagtttctgtgccaggttatgaagaagcaaaagcttttaaagagattaaaaaagcagtaaatgttccattagttgcagatattcattttgattacaaaattgccctagaggtagcagatactgccgattgtttgagaataaatccaggaaatattggtaaagaggatagagtaaaagaagtcataaatgcggcgacagataacaatgttccgattagagtgggtgttaacgcagggtctttagaaaaagatcttcagaaaaagtatggcgaacctaatgcagatgctcttgtggaatctgcgctgagacatgttgaaattttagatagatttaattttgagaattataaaatgagtctaaaagcatccaatattgaaatgacagttgatgcatacagaaaagtatcggatttgattaaacaacctcttcatctagggatcactgaggcaggtagttttagagcaggtactgtaaaatcatctattggtgttgggatgcttttatcagagggaattggagatacaattagaatttcattagcttctgatcctgtagatgagataaaagttggctgggatatcttaaaaagtttaaatattagaagcagaggcgtaaaaattattgcttgtccaagctgctcgagacaaaattttaatgttatcaaggtggttaacgaattagagcagcgccttgaagatatttcagaagacatagaagtggctattattggttgttatgtaaatggaccaggcgaaagtaaagctgcaaacataggattgactggagcaagtccaaaaaatttgctttatgtagatggagctccaaataaaaaaatatcaaatgataacttagttaatgagcttgaagatcaagtaaggaaaaaagttgctcagtcaaaaactgattcagaaaaaataattttgaggagttga

SEQ ID NO: 212813 - DNA, 551 bp, Unknown
  Bacterial polypeptide expressing nucleotide sequence isolated from the Sargasso Sea
atctgtaaagacttcaaatgttttacttacagttgagtcatataaagagttatcaaaagtaactgatgctcctcttcatttaggcattactgaagctgggggattaatggatggtacaattaagtcttccattggaattggtcaacttctggctcaaggaattggcgatacattaagagtttctctatctgcagacccagttgaagagataaaagttggttttagtattttaaaaagtcttggattaagacatcgaggagttaatataatttcgtgcccttcatgcgcaagacaaggttttgatgttatcggaacagtaaaaaagttagaagaccgtttatcaagtatttctgaaccatttacaatttctgtaattggttgcgtagttaatggccctggtgaagctacaatgtcagatgtaggatttactggcggtggaaatgacagtggaatgctttatgttgatggaaagcaacttgcaaaaagaaataatgatgagttaattgactcaattgttagtgaagttgaaaaaaaaataaaacaaaaataaa

SEQ ID NO: 212814 - DNA, 1198 bp, Unknown
  Bacterial polypeptide expressing nucleotide sequence isolated from the Sargasso Sea
catgaccgccctggatcggcgttacgacacccagatccatcgccgcatcacacgcaccgtgatggtgggtgatgtcgcgatcggcagcgaccaccccgtggtggtgcagtcgatgatcaatgaggacaccctggacatcgatgcggccgtcgctggcatcgtccgactggcggaagccggcagtgaaatcgtgcgtgtcaccacgccatcgatggcccatgcccgggcgatgggtgagatccgtgccgccgttcgcgcccgtggatgcacggtgccgttggtggctgatgttcaccacaacggcgtcaagatcgccatggaagtggcacagcacgtcgacaaggtgcgcatcaaccccgggttgttcgtctttgacaagccggatcccaaccgtcaggaattcagcgatgaggaattcgcggccattggtgcgcggatccgcgagaccttcgagcccttggtgaccctgctgagggatcagaacaaggccctgcgcatcggtgtgaaccacggttccttggcggagcggatgctgttcacctacggcgatacccccaaggggatggttgagtcggcgatggaattcgtgcgcatctgtgatgaactcgacttccacaacatcgtgatttcgatgaaggcgtcgcgggcgccggtgatgttggcggcttatcgcttgatggcagacacgatggacaaggaggggttcaactacccccttcacctcggtgtcaccgaagccggtgatggtgattatggccgcgtcaagagcacggcggggatcgcgaccctgcttgccgatggccttggcgacaccattcgggtgtcgttaaccgaggctccggaacgggaaatccccgtttgctactcgatcctgcaatccctcggtctgcgcaagaccatggttgagtacgtggcctgccccagctgcggccgcactctgttcaatctcgaggaggtgctgcacaaggtgcgggacgcgacgtcccatctcacaggcctcgacattgccgtgatggggtgcattgtcaacggcccgggcgagatggcggatgcggactatggctatgtcggaaagacaccgggtgtcatttcgctgtaccggggacgggacgagatccgcaaggttcccgaagaggagggcgtcaatgctttgatccagttgatcaaggaggacgggcgctgggtggagccggcctga

SEQ ID NO: 212815 - DNA, 364 bp, Unknown
  Bacterial polypeptide expressing nucleotide sequence isolated from the Sargasso Sea
catgagtattagacctttcagggatataaagcgtagagtcacaaaagttataaatgtaggagatgtaaaagttggtggaaataatccaatttctgttcagtcgatgactaatacattaacaaaaaatgttaaagaaactttaaatcaaattaataaaatttctgaagttggaggtgatatagtaagagtttcttgtcccgatgtagattccacaaatgctttaaaagaaattactaaacattccccaattcctgttgttgcagatatccattttcattttaaaagagctttagaagccgctgagaatggtgcagactgtttaagaattaatccaggtaatattggagataaaaataaaattgca

SEQ ID NO: 212816 - DNA, 1288 bp, Unknown
  Bacterial polypeptide expressing nucleotide sequence isolated from the Sargasso Sea
ataatgcaagaatactgcaatagtcttacgaaatatagtcgctggaatactagagaggttaaatgcggagatatagctataggtggggaaaatccaattagaattcagtcaatgacaacaacagatacaatggacaccagggggacaatcgagcaatcaataagaatgataaaagcagggtgtgaaatcgttaggattactgcaccaagtttgaatgaggcaagaaatttaaaggacattaagattggattaagaaaaaaaggaatgaaaacaccgattgttgctgatatacatttcacaccgaatgctgcattagcggctgcaagaattgtggaaaaagttaggatcaaccctggaaattatgctgatcgaaagcagttcaaaaactatgaatactctgaccaatcatataatgaggagctcgaaagaataaggggtaaatttttaccgctcatcaatgtatgtaaactagagggtacagcaatgcgcattggaactaatcatggatctttatcagatcgtattttgagtcgttttggtgacaccccaattgggatggtagagtctgcaatggagtttttacgtatcgcaaaagatgaaaattataatgacattgtcctttcaatgaaggcaagtaatacacaggtaatgatccaggcatatcgattattagtaaaacatatggtatctgaaaaaatgaattatccattacacctaggcgtaacagaagctggagaagctgaggacggacgcattaaatcctctgtcggcataggtactttattagaggatggtcttggtgatacaattcgagttagcttaacggaggagccagagtttgaaattccagtagcaaagacactgttgaagaggtacaaaaatagaaatgaaaatttggaaataaaacctataattgcattaccatacagtccatttttcagggtgagacgtgaatcatactctgtaaacaatattggttcaaagtatgttccgagagtaatctcagacctttcaaaattagatgtaataaaaaaaaatgaccttgctaaaataggatataattatcttttgaatgaggacaaatggaaaatttcagatcaagccccagatttgatttatattggtgggaaaactatcgattttcaaccgcctggggcccttaaagttttggctgatgcgagctgttatgataaaaaaaatggacaatttccattcttatctataaaactttacaatcctgaaatatgggaccctgacgaaatagtctttttagaggtcaatgctgacg

SEQ ID NO: 212817 - DNA, 367 bp, Unknown
  Bacterial polypeptide expressing nucleotide sequence isolated from the Sargasso Sea
agtgggttttgatattttaaaatcactgcgtattcgttcccggggtgtcaattttattgcctgccctagttgttcccgtcaggaatttgatgtgatcaaaaccatgaacgagctggaacaacgactggaagatatcatcgaccctgttactgtatccgttatcggctgtgtggtgaatggtcctggcgaagccttgatctctgatttgggtgtggcgggggcgaaccgtatgagtggtttttacctcaaaggccagcgccagaaattacgtattgataacaacactgtcgcagaacagctggaagctcagatacgactgtatttggcagagcaaaaacgactgattgaaattaaacagctggattga

SEQ ID NO: 212818 - DNA, 829 bp, Unknown
  Bacterial polypeptide expressing nucleotide sequence isolated from the Sargasso Sea
aagagctattgaagcagcagctaatggtgcagcatgtctaagaataaacccaggaaatattggagacaaaaaaaaagttagtgaagttataaaagcagcaaaagattacaattgtgctataagagttggagtgaacgctgggtctttagaaaaagacattttagaaaaatataaagaaccttgtcctgaggcacttgtggaaagtgctataagaaatattcatattcttgaggatcaagatttttttaatttaaaagtaagtgttaagtcctcagacgtatttttatctttatgggcatatcgtcaattatctaaaaaagtaaattaccctttacacctcggtataacagaggcaggaagttttataccaggaagtattaaatcatcgattggacttggaactttattattagaaggcattggggatactattagagtttcactttccgatgatcccgtgaaagaaattaaaattggaaatgagattttaaagtctttaaatctaaaaaattcaggagtaaagataatttcatgcccatcttgtgcaagacaaggttttaatgtgattgaaacagtaaaaatattagaagataaactttcacatataaaatccccaattacactctcaataataggatgtgttgtaaatggaccaggagaggcagctcaaactgattttggaattactggaggtggaaataataatcatatgttatacattaatggagaccaaatcaaaaaaatatcatctaaagaactggtagaaaaagttatatctctaattgaggaaaaagagagaaaaataaaaagcgattcacaaactaattaa

SEQ ID NO: 212819 - DNA, 836 bp, Unknown
  Bacterial polypeptide expressing nucleotide sequence isolated from the Sargasso Sea
tgattataaaattgctttgcttgttgcagattctgcggattgtcttaggattaatccgggcaatattggaaaagaaaataaggttcaagaaattattcaggcggctaaagacaataatatcccaataagaattggtgtgaacgctggctcgctggagaaagatctccaaaaaaaatatggagagcctaattcagatgctttagttgaatcagcgctgaggcatgtagatattttagatagatataatttctccaattttaaactaagcttaaaagcctcaaatattcaaatgaccgttgatagttatagaaagttttctaaattacttgatcagccattgcatctaggcatcacagagtctggaagttacagagcaggctcggtcaagtcatctattggtttaggcatgcttttatctgaaggcataggtgacacaattagagtttcacttgcatcagatccagtagatgaagtgaagattggctgggacattttaaaaagtctaaatttgagaagtcgaggcattagaatagttgcttgcccgagttgctcaagacaaaacttcaatgtgatagaggtagtcaatgaacttgaaactagatttgagggaatttctgaggatttagaagtagcaattattggttgctatgttaatggcccaggtgagtctaaggcagctgatgttggactaaccggcggcccaagtaatttactttatgttaatggcactccttcaaaaaaagtctctaatgagaaacttgttgatacaatagaagagcaagtaaaagaacagctggaaaagaaaaattctttagacataattgcaaaaggttaaa

SEQ ID NO: 212820 - DNA, 612 bp, Unknown
  Bacterial polypeptide expressing nucleotide sequence isolated from the Sargasso Sea
ctttaagaaatataaaaatacttgaggatgaagatttttttaatctaaaaataagtgtaaaatcttcagatgtctttttatcaatagaagcttatagacaactttcaaaagtaacagattatcctcttcatcttggtattacagaggcaggaggttttatagcaggaagtataaaatcatctattgggattgggtcattacttttaagcggtattggagatactattagaatttctttgtctgatgatccagttaaggaggttaaaattggtaatgaaatcctaaaatcccttagtttaagaaataggggggttaaaattatctcttgtccctcatgtgcgagacaaggttttgaagtaattgatacagttaaaatattagaaaaaaaactttctcacattaaaacaccaattacattatctattattggatgtgttgtaaatgggccaggtgaggcagctctaactgatatagggattactggaggaagaaaagggaataacatgctttatttatctggtgttcagaaagaaaaagttttgactgaggaaattatatctagagttgttagcgaagttgaaaaaaaagctagtgaattagacaaaaaataaa

SEQ ID NO: 212821 - DNA, 1012 bp, Unknown
  Bacterial polypeptide expressing nucleotide sequence isolated from the Sargasso Sea
aatactaaaactacagatgtcgaagcgacagtggcgcaaattcaggccattgccaaagcaggcgctgatttggtgcgtgtctcagtaccgactatggaagcggcagaggcctttaagctgattaaacagcaatcgcctattccattggtcgccgatatccattttgattaccgtatcgcgctaaaagtagctgaatacggtgtcgattgtttacgtattaaccctggcaatataggccgggaagaccgtatccgttctgtggtagaagcggcacgcgataaaaacattccgatccgtattggtgtgaatggtggctcgctggaagcagatttacaggaaaagtatggtgaaccgaccccagaagcattggtagagtcggccatgcgccatgtcgacattctggatcgtctgaacttcgaccagtttaaagtcagcgtcaaagcctctgatgtatttttagctgtcggcgcttatcgtttgctggcgaaacaaattaagcaacctctgcatttggggatcaccgaagctggtggtgcccgggctggtgccgtcaaatctgcgattggtcttggcatgctgttatctgaaggcataggcgatactttgcgtatttctttggcggccgacccggtggaagaagtgaaagtaggttttgatattttaaaatccctgcgtattcgttcccgcggcattaattttattgcctgcccaagttgctcccgtcaggaatttgatgtgatcaaaaccatgaatgagctggagcaacgactggaagacgtggtagaccctatgacggtctctgtgattggttgtgtagtgaatggtcccggcgaagcactgatctctgatttaggtgtggcaggtgcaaaccgtatgagtggtttctacctcaaaggtcagcgtcaaaaactacgcattgataacaataacgtcgcagaacaattagaagctcaggtacgtttgtatctggaagagcaaaaacgactgattgaaattaaacagctggattaag

SEQ ID NO: 212822 - DNA, 898 bp, Unknown
  Bacterial polypeptide expressing nucleotide sequence isolated from the Sargasso Sea
tccagataaagagtctacagaatctctcaaagaggtagtaaatcaatcaagtgttccaattgttgccgatatacactttcattataaacgtgccattgaagcggcagaagctggtgcagcctgtttaagagttaatcccggaaacattgggaaagaaaaaatcatcgaagtaattgaggctgcaaagcaaaacaatattagcatgagagtaggagttaatgcaggatcaatagatgaaaaaatattaataaaatacaaagagccatgttctgatgcgttggttgaaagtgcgttagaaaatataaagttattggaagataataattttgaaaacttcaagattagtgttaaagcatcagatgtatttataacaattgagtcatatgaaaagcttgctcaattatgtgattatccatttcatgttggtcttacagaggcaggtacatacttatctgggtcaattaaatcctcaataagcattggtactcttttatcaaagggcataggagatactataagagtatcacttaccgccgatccagtagaagaaattaaagttggttatgaaatattaaaaagcttagatttaggttcaagaggaattaaaattatctcttgcccttcttgtgctagacaggcttttccggttattgaaacagttaaaaaattagaacaaagacttgctcatataaaaacacctctcacactttcaatcattggatgtgttgttaatggtcccggagaagcactcaaaagtgacatcggccttactggaggaggaaagggtaataatatgatttatttgtcaggtgtagcggaccataaaattaccaatcctgaaattgttgatcatgtagttgagcttgtagagcaaaaagttagaacaataaatgattaa

SEQ ID NO: 212823 - DNA, 671 bp, Unknown
  Bacterial polypeptide expressing nucleotide sequence isolated from the Sargasso Sea
gttgtggcgggcagcccacacccagcgccgtgtgtgtatcgtcggatctggcccggccggcttctacagtgccaagtacctgctgaaggccgtgggtgaggatgacgagatcactgtggtggagaagctcccgacgccgtttgggcttgtgcgttccggggtcgcgccggaccacccggaggtgaagacggtgcaggacgactttgaacaggtcgcacaagatccgcgttttcgcttctgcggcaacgtggaggtggggcgggatgtcgcggtggacgagctgcgggagctctttgacgcggtggtgctcgcgaacggagccgcggacgaccgggccttagggatccccggcgaggatttgagcggcgtcttgggtgcccgcgagtttgtgaactggtacaacgggcacccggagtttgtggacctcgccccggacctggccgcgcacgaggtggcggtggtcgttggaaacggcaacgtcgccgtcgattgcgcacgcatcttgaccaaaggcgtggacgagttggcgcagacggacattgcggagcatgccctcgagatgctccgggagagccgcgtgcgccacgtcgtggtgctggggaggcggggccatgcgcaggccgccttcaccatcaaggagctgcgcgagctctccaagaatggaaggggtc

SEQ ID NO: 212824 - DNA, 487 bp, Unknown
  Bacterial polypeptide expressing nucleotide sequence isolated from the Sargasso Sea
tctgcccgaggacgaagaagccaacgtgatcatgctggccaccggcaccggcatcgccccaatgcgcacctacctgcgccgcatgtttgaagccaaagagcgcgaagccaatggctggaagttccgcggcaaggcttggctgttcatgggtgcccccaagaccgccaacctcctctatgacgaggacttccttcgttacgagagcgagtaccccgacaacttccgctacaccaaggcgatcagccgcgagcagcagaatcccaagggcggccggatgtacatccaagaccgcgtcaccgagtacgccgatgagatcttcgcgatgatcgaagaccccaaaacccacgtgtacatgtgcggtctgcgggggatggagcccggcattgatgaagcgatgaccgccgccgccgccgccaagggcttggattgggctgaactgcgtccccaactcaaaaaagccgagcgctggcacgtcgagacctactga

SEQ ID NO: 212825 - DNA, 929 bp, Unknown
  Bacterial polypeptide expressing nucleotide sequence isolated from the Sargasso Sea
aatgagttctttctggaaaatcgcagtgatcggttccggacccgcaggattttacgcggcggcggagctttttcgccagcaatctgggtcaattaaagtggatatttttgatcgcctcccaacacccttcgggttggtcaggggaggagtagcaccggatcatcagaaaataaaatctgttacaaaaatttacagccgcattgctgaaaacgaaaacttcagatttttcggaaatgttgaatttggaagtgatatttttaggtccgatttattagagttttatgatgcgataatttatgcggtcggaagtccgtctgatcgtccacttggtatttcaggagaagaactaccaggcagtcattcagctactgaatttgttgcttggtataatggacatccggattttcgtgagcataaatttaaactttctgtaaaagatgtatttgtaattggtatgggcaatgttgcactcgatgtagcacgtgttctggcaaagacgcctaacgaattgtcgaaaacagacattgcagactacgcgctggaagcacttttcgaaagccaaattgaagatatatggcttgttggtagacggggacctttgcaggcggcttttaccccggtagaagctagggagtttctggaaatggaaagtgcagatgtgattctggagggaggttcccttaaactggatgcagagagtcagcttattcttgaaaatgatgcaagcaaagacacaaaaaaaaatattgagattcttaagcaaatttcagaaaaaggatcttctaaaaaaaagaaaagagtccattttctttttcttgcatctccgcttgaaatactgggcaaagagtgtgttgaaaaaatcaggatggttagaaatgagctgtttaaacgagatgacggaaacctacgttcgcaggcaacgggggata

SEQ ID NO: 212826 - DNA, 727 bp, Unknown
  Bacterial polypeptide expressing nucleotide sequence isolated from the Sargasso Sea
actggaacagtaactgaaaattattccgcactaaaggaaggagcaattgaaaaagtacaacacataacttttgatctttctggaggagaccctgactttaaatatgttgaaggtcaaagttgcggcatacttgctgctggtgaagatgcgaaaggcaaacctcatagaccaagactttattcaattgcaagtactagatatggcgataactttgcaggaaatacactctcattatgtgttcgccaacttcagtacgaaaaagatggtgaaactataaatggagtttgctctacttatttatgtaacctatcccctggggataaggttaaaatcagtgggcctgtaggtaaagaaatgcttcttcctgatgaagaagattcaaatataataatgcttgctacaggtactggtatcgctcctatgagggcatatcttagaagaatgtttgaacctactgaaatagaaaaacatcagtggaatttcaaaggcaaagcttggttatttatgggtgcacctaagacagcaaacttgctttatgatgctgattttgaacactacaaatcaaagttccctgaaaatcttagatacacaaaagctatatctagagaacagaacaatacaaaaggaggaagaatgtacatacaagatagagtccttgaacatgcagaagaaatattcgacatgattgagaatcctaaaactcacatttacttgtgtggattaaaag

SEQ ID NO: 212827 - DNA, 679 bp, Unknown
  Bacterial polypeptide expressing nucleotide sequence isolated from the Sargasso Sea
ttaagactttattcaatagcaagcaccaggcatggagatgatttcaatggaaacacagtttctctttgtgttagacagcttcagtatgaaaaagatggcgaaactataaatggtgtttgctctacttacttatgcgatattaagcctggagataaagtaaaaattactggtcctgtaggtaaggaaatgctgcttccagatgaggaagatgcaaacatagtaatgttagccactggtactggaattgctcctatgagagcttatttaaggaggatgttcgaagcaactgaaaaagaaaaaaacaactggaactttaaaggtaaagcttggttattcatgggggcaccaaaatcagctaatttgttatacgaagaagatcttcaaagatatcttgctgattatccagataactttaaatacactaaggctattagtcgtgaagaacaaaattccaaaggtggaagaatgtacattcaagatagagttttagagtctgctaacgagctctttaatatgatagaagaagaaaaaactcacatatacctttgcggattaaagggtatggagcctggaatagatgaggctatgacaaaggctgcagaagagaagggtttgaattgggcagaattaagacctcaacttaaaaaggctgggagatggcacgtagaaacatactaaa

SEQ ID NO: 212828 - DNA, 745 bp, Unknown
  Bacterial polypeptide expressing nucleotide sequence isolated from the Sargasso Sea
atgttgaaggtcaaaagtattggtatcatgcctgctggcgaagatgctaatggaaaacctcataaattaagactttactcgattgctagtaccagacatggggataactttaatggaaatacagtttctctttgtgtaagacagcttcagtatgaaaaagatggtgaaaccatcaatggtgtctgctcgacttatttatgcgatattaaacctggagataaagtaaaaataactggtcctgtaggtaaagagatgcttctcccagatgaggaggatgccaatattgttatgttagctactggaactggtatagcaccaatgagggcttatttaagaagaatgttcgaaccaactgaaaaagaaaaaaataaatggaattttaagggtaaagcttggttatttatgggcgctccaaaatcagctaatttgttatatgaggaagatcttcaaagatatcttactgacaatccaaataactttaaatatacaaaagctattagtcgtgagcaacaaaatacaaaaggtggaagaatgtatattcaagatagagttttagaatctgccaatgaacttttcaatatgattgaagatgaaaagacacatatatatctttgtgggttaaagggtatggagcctggaatagatgaagccatgacaaaggcggcagaagaaaaaggattgaattggtcagaacttagacctcaactaaaaaaagcaggaaggtggcacgtagaaacttactaaa

SEQ ID NO: 212829 - DNA, 728 bp, Unknown
  Bacterial polypeptide expressing nucleotide sequence isolated from the Sargasso Sea
tattggtattatgcctgctggtgaagatgccaatggaaaacctcataaattaagactttactcaatagctagcactagacatggagatgactttaatggaaatacagtttctctttgtgtaaggcagcttcagtatgaaaaagatggtgaaaccattaatggtgtctgctctacatacttatgcgatattaaacccggagataaagtaaaaataacaggtcctgtagggaaagaaatgcttctccctgatgaagaggatgcgaacattgttatgttggcaactggaactggaatagctccaatgagggcttacttaagaagaatgtttgaaccaactgaaaaagaaaaaaataaatggaatttcaaggggaaagcttggttatttatgggtgctccaaaatcagctaatttgttatacgaagaagatcttcaaagatacattactgagaatccagataattttaagtatacaaaagctattagtcgcgagcagcaaaatacaaaaggtggaagaatgtacattcaagacagagttctagagtcagcaaatgaactcttcaatatgattgaagatgaaaagacacatatatatctttgtggattaaagggtatggaacctggaatagatgaagcaatgactaaggcagcagaagaaaaaggattgaactgggcagaattaagacctcaactaaaaaaagcaggaagatggcacgtagaaacttactaaa

SEQ ID NO: 212830 - DNA, 841 bp, Unknown
  Bacterial polypeptide expressing nucleotide sequence isolated from the Sargasso Sea
cccaacgaccctgtggtggcccgagtgcactccagcgtgcccgccacctccccccgagcggctggcattgtccgccacgtcgagatcgacgtctcagggacccctctcgaaggggcgttccgggccggacagtcttttggggtggtgccccccggcgaaaccgcaaaaggcaaacctcatggggtgcggctgtattcgatcgcctcccccacccgaggcgaagacggcgcgggtaaaattctgtccaccaccaccaagcgggtgatctcggaatacgccgatgccgaagatgccgaccgccacgagttgttcctcggggtgtgctccaaccacctgtgcgacctgcgccccggcgacgaggtcttggtggcgggccccaacgggaaaggcttcctgctgcccgaagcgccagaacaacacaactacatcttcttggccaccggaaccggcatcgcgccgtttcggggattcctgaaagagctcttggaaggggaatcaatttgtccatccaagatcttgctgatgttgggcgtgccatgggaaaccgacctgctgtaccgagaagaacttgaagccctcgcgcagaagcacaacaacctagaactgcggtgggccatcagccgagagaaccatcaccccgaccgaggtccttatgtgcacgatcgattggaacgggaatggtccgaattggaatcgagattcaccgatcccaacgccatggtgtacgcctgcggtctcgcgggtatgcaagtcggcgtcttccgcttgcttgcccaacgtgggttgaccgaacagttcctcaagatccgtgacgaagaaaccgcgggtatggatcccagcg

SEQ ID NO: 212831 - DNA, 630 bp, Unknown
  Bacterial polypeptide expressing nucleotide sequence isolated from the Sargasso Sea
tatgcgggtgtccaatgcagcgacagagcactgcaatgaagctctgttcactgttgtggctcgtggtccccaggtcggcgccaaaccgtccgtggttcagacctacaccgttgcaatgaaccagttttccgcacttttcaaacgattgggggccacgggcgccaagatcgtctctgtgaatggtgcgggcgaagagcgttccgccgctcccgctgtcgccaccccggcacctgccaaacaacccgccaaaaaaaccgccaagaaagccgtgacgtcaagcgccccgaagaagaagccccacgccgacgttccggtcaacacctacaagcccaaaacaccgtttatgggcactgtgacggagaactactccctgctaagggacggtgcaataggccgtgtgcagcacatcacctttgatttggccggcggcgacccgcagctgaagtacatcgaaggccagagcatcggcatcattcccgaaggggaagacgccaacggcaagccccacaagctgcgcctgtactccatcgccagcacccgccacggcgacaacctggagggcaacaccgtctctctctgcgttcgccagctcgagtacaagaacgacgccggtgagcaaatctatggcgt

SEQ ID NO: 212832 - DNA, 718 bp, Unknown
  Bacterial polypeptide expressing nucleotide sequence isolated from the Sargasso Sea
aatgtattcacaagcaaaagtaatcgcaggcggattagctcatataccagtagtaatagctgttttttattttatactcacaacttttaataaaagagctttaaaatttgttgaacaaacaaaaaccaaaaaacctgaaccaaaagctgttgaaccaaaaaaaccagctgtttcgaaagtagagaattcaaaaatagaggctcctaaaacagaaacttcaaaagttgcaaagaaaaaacatgcagatgttccagtcaatatttaccgtcctaagacaccattcgagggaacagttattgagaactatagtcttctaaaagaaggagcaattggtagagttaatcacataactttcgaccttaaagatagtgatccatttttaaattatgtagagggtcaaagtattggtatcatgcccgctggtgaagatgctaatggaaaacctcataagttaagactctattcaatagctagtactagacatggagatgactttaatggaaatacagtttctctttgtgtaagacagcttcagtatgaaaaagatggtgaaaccattaatggtgtctgttctacttacttatgtgatattaagcctggagataaagtaaaaataacaggccctgtcggtaaagaaatgctactccctgacgaagaggacgcaaacattgttatgttggcaactggaactggaatagcaccgatgagggcttattta

SEQ ID NO: 212833 - DNA, 756 bp, Unknown
  Bacterial polypeptide expressing nucleotide sequence isolated from the Sargasso Sea
cataactttcgaccttaaagatagtgatccatttttaaattatgttgaaggtcaaagtattggtattatgcctgctggagaagatgctaatggaaaacctcataaattaaggctttactcaattgctagcaccaggcatggggatgactttaatggaaatacagtttctctttgtgtaagacagcttcagtatgaaaaagatggtgaaaccatcaatggtgtttgctcgacttatttatgcgatattaaacctggagataaagtaaaaataacaggtccagtaggtaaagagatgcttctaccggatgaggaagacgcaaacatcgttatgttagctactggaactggaattgcaccaatgagggcttatttaagaagaatgttcgaaccaactgaaaaagaaaaaaataaatggaattttaaaggaaaagcttggttatttatgggtgctccaaaatcagctaatttgttatacgaggaagatcttcaaagataccttactgataatccagataaatttaaatatacaaaagctattagtcgtgagcagcaaaatacaaaaggtggaagaatgtatatccaagacagagttttagaatcagccaatgaacttttcaatatgatcgaagatgaaaagacacatatatatctttgcggattaaagggtatggagcctggaatagatgaagctatgacaaaggcagctgaagaaaaaggcctaaactggtcagaattaagacctcaattaaaaaaagc

SEQ ID NO: 212834 - DNA, 860 bp, Unknown
  Bacterial polypeptide expressing nucleotide sequence isolated from the Sargasso Sea
gtagaaacttcaaaaatagaagctcctaaaacagaaacttcaaaagtggtaaagaaaaaacatgcagatgttccagttaatatttatcgtcctaagacaccattcgaaggaacagtaattgaaaactatagtcttctcaaagaaggagcaattggtagagttaatcacataactttcgaccttaaagatagtgatccatttttaaattatgtagagggtcaaagtatcggtatcatgcctgctggggaagatgcgaatggaaaacctcacaaattaagactgtactcaatagctagtaccagacatggagacgactttaatgggaatacagtttctctttgtgtaagacagcttcagtatgaaaaagatggtgaaacaattaatggtgtctgctcaacttacttatgcgatattaagcctggagataaggtaaaaataacaggtcccgtaggtaaagaaatgcttctccctgatgaagaggatgcaaacatagttatgttggccactggaactggaatagcaccaatgagggcttatttaagaagaatgttcgaaccaactgaaaaagaaaaaaataaatggaatttcaagggcaaagcttggttatttatgggtgctccaaaatcagctaatttgttatacgaagaagatcttcaaagatatattgctgataatccagataattttaaatatacaaaagcgattagccgtgagcagcaaaattcaaaaggcggaagaatgtacattcaagacagagttttagagtcagctaatgaacttttcaatatgattgaagatgaaaagacacacatatatctttgtggattaaagggtatggaacctggaatagatgaagcaat

SEQ ID NO: 212835 - DNA, 1129 bp, Unknown
  Bacterial polypeptide expressing nucleotide sequence isolated from the Sargasso Sea
atgtattcacaagcaaaagtaatcgcaggcggattagctcatataccagtagtaatagctgttttttattttatactcacaacttttaataaaagagctttaaaatttgttgaagaagcaaaaacaaaaaaacctgaggcaaaagctgtggaaactaaaaaagtcgctgtttcaaaaatagaagctccaaaaacagaagctccaaaaacagaagctccaaaaatagttaagaaaaaacatgcagatgtgccagtcaatatttatcgtcctaaaacaccatatgagggaacagttattgaaaactatagtcttctcaaagaaggagcaattggtagagttaatcacataactttcgaccttaaagatagtgatccatttttaaattatatagaaggtcaaagtattggtatcatgcctgctggtgaagatgctaatggaaaacctcataaattaagactatactcaatagctagcactagacatggtgatgactttaatggaaatacagtttctctttgtgtaagacagcttcagtatgaaaaagatggtgaaaccattaatggtgtctgctctacttacttatgtgatattaagcctggagataaagtaaaaataacaggtcctgttggtaaggaaatgcttctacctgatgaagaggacgcaaacattgttatgttagctactggaactggaatagcaccaatgagggcttatttaagaagaatgttcgaaccaactgaaaaagaaaaaaataaatggaatttcaagggtaaagcttggttatttatgggagctccaaaatcagctaatttgttatacgaagaagatcttcaaagatacattgctgagaatccagataattttaaatatacaaaagctattagtcgcgagcagcaaaatacaaaaggtggaagaatgtacattcaagacagagttttagaatcagccaatgaacttttcaatatgattgaagatgaaaagacacacatatatctttgtggattaaagggtatggaacctggaatagatgaagcaatgactaaggcagcagaagaaaaaggcttgaactggtcagagttaagacctcaactaaagaaagcaggaagatggcacgtagaaacttactaaa

SEQ ID NO: 212836 - DNA, 1171 bp, Unknown
  Bacterial polypeptide expressing nucleotide sequence isolated from the Sargasso Sea
catgcgggtgcctgtcgccacggccggtggaaccacgtctcctctgttcacggttgttgccagcggcatcaaggccggatcaggggcctccgtgattcgcacctaccaggtggcgatgagtggactcaacaacctgtacaagcgcctgagcgcctctggagccagaatcatcagcgtgtcacccgccagcgaggactctccctccgctccggtggcagcctctagcgcacccgaaccgcaagctgtgacaactgctcccgcccccaagaaaaagccccacgccaacgttccggtcaacacctacaaaccgaagacacccttcatggggacggtgaccgagaactactcgctggtgaaggacggcggtatcggtcgggtccagcacatcaccttcgatctctccggcggcgaaccccaactcgagtacatcgaagggcagagcatcgggatcattccggaaggtaacgacgccaacggcaagccccacaaactgcgcctatattcgatcgctagcacccgtcacggcgacaactaccaggacaacaccgtctccctgtgcgtgcgtcagctggagtacaagaacgaggcaggagaacagatctacggcgtctgctccacctatctctgcgacatcgagcccggctccaaggtgaagatcaccggtccggtgggcaaggagatgctgctgcccgacgacgaagacgccaacatcatcatgctggcgaccggcacgggcatcgctccgatgcgcacctatatccgccgcatgttcgaaagccgcgagcgcgatgcgaacggctggaccttccgaggcaaagcctggctgttcatgggcgcacccaagaccggcaacctcctctatgacgaggatttcctgcactacgagaaggaattccccgagaacttccgctacaccaaggcgatcagccgcgaacagcagaacaccaagggcggccggatgtacatccaggaccgcgtgctggagcatgccgaggagatcttctcgatgatcgaaaaccccaagacccacgtctacatgtgcggtctgcgtggcatggagcccggcatcgacgaggccatgaccgccgccgccgccgccaagggactggactggtccgaactgcgtccgcagctcaagaaggccgaccgctggcacgtggaaacctattga

SEQ ID NO: 212837 - DNA, 1129 bp, Unknown
  Bacterial polypeptide expressing nucleotide sequence isolated from the Sargasso Sea
atgtattcacaagcaaaagtaatcgcaggcggattagctcatataccagtagtaattgctgttttttattttatactcacaacttttaataaaagagctttaaaatttgtggaagaagcaaaaacaaaaaaaactgattcaaaagctgtggatacaaaaaaaccatccgtttcgaaagcagaaaattcaaaaatagaagcttcgaaaacagaaactccaaaagtggctaagaaaaaacatgcagatgttcctgtcaatatttatcgccctaagactccatatgaaggaacagtcatcgaaaactatagtctccttaaagagggcgcaattggtagagttaatcacataactttcgaccttaaagatagtgatccatttttaaattatgtagaaggtcaaagtattggtatcatgcctgctggtgaagacgctaatggaaaacctcataaattaagactctactcaatagctagtaccaggcatggagatgactttaatggaaatacagtttctctttgtgtaagacaacttcagtatgaaaaagatggtgaaaccattaatggtgtctgttctacttacttatgcgatattaagcctggagataaagtaaagataacaggtcctgtaggtaaagaaatgcttctccctgaggaagaagattccaacattgttatgttagccactggaactggaatagcaccaatgagggcttatttaagaagaatgttcgaaccaactgaaaaagaaaaaaataaatggaatttcaagggtaaagcttggttatttatgggtgctccaaaatcagctaatttgttatacgaagaagatcttcaaagataccttgttgataatccagataattttaaatatacaaaagcaattagccgtgagcagcaaaatacaaaaggtggaagaatgtacattcaagacagagttttagagtcagccaatgaacttttcaatatgattgaagatgaaaagacgcacatatatctttgtggattaaagggaatggaacctggaatagatgaagcaatgactaaggccgcagaagaaaaaggcttgaactggtcagaattaagacctcaacttaaaaaatcaggaagatggcacgtagaaacttactaaa

SEQ ID NO: 212838 - DNA, 839 bp, Unknown
  Bacterial polypeptide expressing nucleotide sequence isolated from the Sargasso Sea
gaaggccggtgtggcggacatggacgcggtgaacgtgtcgcaactgaagggctcaggcttgatcggtgacgacggcaaggcgattgccgcggtgacgtacgaccgtaacgcagacggcacgccggactacagcaaggtaacgctgggccacggcgaaggtccgacgcagctgaagaacgtcgcgaacgcgacggacgacggcgacgcgctgaacctcggccagctgaaggaagcgggcttggtcggcgaagacgacaagggcaacctggcgtcggcggcggtgacgtatgaccgaaacgcggacggtacgatcaaccacgaccagatcacgctgaagggcgcggacggcacgacgctgtcgaacgtgaaggccggtgtggccgacatggacgcggtgaacgtgtcgcagctgaagggctcgggcctgatcggcgacgacggcaaggcaattgccgcggtgacgtacgaccgcaacgcggacggcacgccgaactacggccaggcgacgctgggtcatggcgaaggtccgacgcagctgaagaacgtcgcgaacgcgacggacgacggcgacgcgctgaacctcggccagctgaaggaagcgggcctggtcggtgacgacggttcgggcaacctgacctcgctcgcggtgacgtacgacaacgcggcgaaggatgccatcacgctgggcggcacgggcgcaacgacgccggtggcgatccacaacgtggcggacggcgtgctgtcggccacgagcaaggacgcggtgaacggttcgcaactgttcgcgacgaacacacgcgtgggtgacatcgagaactcgctgaaggatggcggcgtga

SEQ ID NO: 212839 - DNA, 823 bp, Unknown
  Bacterial polypeptide expressing nucleotide sequence isolated from the Sargasso Sea
tcgcaactgaagggctcaggcttgatcggtgacgacggcaaggcgattgccgcggtgacgtacgaccgtaacgcagacggcacgccggactacagcaaggtaacgctgggccacggcgaaggtccgacgcagctgaagaacgtcgcgaacgcgacggacgacggcgacgcgctgaacctcggccagctgaaggaagcgggcttggtcggcgaagacgacaagggcaacctggcgtcggcggcggtgacgtatgaccgaaacgcggacggtacgatcaaccacgaccagatcacgctgaagggcgcggacggcacgacgctgtcgaacgtgaaggccggtgtggccgacatggacgcggtgaacgtgtcgcagctgaagggctcgggcctgatcggcgacgacggcaaggcaattgccgcggtgacgtacgaccgcaacgcggacggcacgccgaactacggccaggcgacgctgggtcatggcgaaggtccgacgcagctgaagaacgtcgcgaacgcgacggacgacggcgacgcgctgaacctcggccagctgaaggaagcgggcctggtcggtgacgacggttcgggcaacctgacctcgctcgcggtgacgtacgacaacgcggcgaaggatgccatcacgctgggcggcacgggcgcaacgacgccggtggcgatccacaacgtggcggacggcgtgctgtcggccacgagcaaggacgcggtgaacggttcgcaactgttcgcgacgaacacacgcgtgggtgacatcgagaactcgctgaaggatggcggcgtgatcgatccggtcacgggcaagt

SEQ ID NO: 212840 - DNA, 809 bp, Unknown
  Bacterial polypeptide expressing nucleotide sequence isolated from the Sargasso Sea
acgacgctcgcgaacgtgaaggccggtgtggcggacatggacgcggtgaacgtgtcgcaactgaagggctcaggcttgatcggtgacgacggcaaggcgattgccgcggtgacgtacgaccgtaacgcagacggcacgccggactacagcaaggtaacgctgggccacggcgaaggtccgacgcagctgaagaacgtcgcgaacgcgacggacgacggcgacgcgctgaacctcggccagctgaaggaagcgggcttggtcggcgaagacgacaagggcaacctggcgtcggcggcggtgacgtatgaccgaaacgcggacggtacgatcaaccacgaccagatcacgctgaagggcgcggacggcacgacgctgtcgaacgtgaaggccggtgtggccgacatggacgcggtgaacgtgtcgcagctgaagggctcgggcctgatcggcgacgacggcaaggcaattgccgcggtgacgtacgaccgcaacgcggacggcacgccgaactacggccaggcgacgctgggtcatggcgaaggtccgacgcagctgaagaacgtcgcgaacgcgacggacgacggcgacgcgctgaacctcggccagctgaaggaagcgggcctggtcggtgacgacggttcgggcaacctgacctcgctcgcggtgacgtacgacaacgcggcgaaggatgccatcacgctgggcggcacgggcgcaacgacgccggtggcgatccacaacgtggcggacggcgtgctgtcggccacgagcaaggacgcggtgaacggttcgcaactgttcgcgacgaa

SEQ ID NO: 212841 - DNA, 1051 bp, Unknown
  Bacterial polypeptide expressing nucleotide sequence isolated from the Sargasso Sea
tatgacattattaattggatatttcttacttgctcttataatatcgtttatatgctctaccttagagtcagttctattatctgttacccattcgcatataggtattatatctaaaactaattctaaaggtggcaaattacttataacacttaagcatgatatcaataagcctttggcggccattctaacgttaaatacaatcgcaaatactgttggtgctgcgggtgttggcgcgcaggctcttgtcgtttatgggtctcatgctgttgctattgcctcagctattttaacattttgtattctcattttttcagaaattattccaaaaactattggcgcaacctattggaagaagcttgcagtgtcatcggcctatgttatcaatgtgctaatggttattacttttccttttgtttggatgagtcaattactatcagcaaaacttacacccgatgaagacgatgtaaagatggtaagtcgtgaggaaatagcagccatggctgagatgggtgaagatgaaggttcaatagatgaacacgaatctgatattattgaaaatcttttccgtttaaaagatatgcatgttgattctattttgacgcctaggtcagtgatttatgcattagaagacaatcaaactgtaggccaggtaatggatacagatgaagatattaatttttcgagaattccaatctttcatgaaaatattgataatgttgttggtatagtttttaaagatactttgctggaaacaatggcagatgattattttgaaaaaactatggcagaaatttctgaacctgttgacactgttttcgagaaagaatcggttgagtcagtattaaataaattcaccaaaaatagatcacatatttttatcgttaaggatgaatttggaggaactacagggctagttactcttgaagattgtattgaaactttgcttggtgttgaaattatggatgagtctgatgaggtagcagatatgagaaagttagctaaagatcaattgagacaacagcgacgcatagaagaaaatggagattcttaa

SEQ ID NO: 212842 - DNA, 529 bp, Unknown
  Bacterial polypeptide expressing nucleotide sequence isolated from the Sargasso Sea
catgaatttaattcaacattttgtgaatgggaaaataattccaggaaaatcagatagaagaggaaaagtatttaatccagcaattggtgaacaagagtcagaagtaatattaggtttaaaatcagatttagatgaagctgttgatgtagcaaaaaaagcttttgagacatggtctttaaaaccaccaattcaaagagcaagaattatgtttaaatttaaagatttaatagaaaaaaattctgatgaattaaccaaaatgatagtctccgaacatggtaaggtatatgaagatgcaaaaggatcgttgataagaggactcgaggtagtagagtttacttgtggaatccctcaagttttaaaaggagaatttacagaaaatgttggtacagatattgatagttggtcaattaggcaaccacttggtgtttgtgcaggtataaccccatttaattttccggcaatggttccaatgtggatgtttccaatggctattgcttgtggaaatacttttgtattaaaaccatcagaa

SEQ ID NO: 212843 - DNA, 422 bp, Unknown
  Bacterial polypeptide expressing nucleotide sequence isolated from the Sargasso Sea
caagccttatacaggtgatggtgttcaaggtgatcgatttgttgaaccaacaatattcacgggtgtaaccaataatatgcgaattgcccaagaagaggtgttcggacctattttgtcagtcattccttttgacaccgaagaagacgccatccgaattggaaacgatatcgtgtttggcctcgcagcaggcgtatggacttctgatttaggtcgtgctttcagaatgtccgaaaagctcaaagctggtactgtttgggtaaatacatatcgagccgttagttttatgacgccattcgggggttacaaacgatcgggccagggcagagaaagcggtcaggagtcaattaaagaattcatgcaagtaaagtcggtttggatcgctcagcagacaacgagctcaaatccttttataatgcaataat

SEQ ID NO: 212844 - DNA, 592 bp, Unknown
  Bacterial polypeptide expressing nucleotide sequence isolated from the Sargasso Sea
aatgtattcaaaatttggtcaattcatagacggaaaatggcaaccttctgaaaaaaaagaaacttacgacgtaataaatccagcaaccgaagaggtaattggtaaggcatcaaaagctacagaagcagatgttttaaaagcgctaaaatcagctgaaaaaggttttaaagtctggaaaaaaacacctgcttggcagagatcatacaaaataagaaaaattgctgacctgatgagagaaaggaaaaaagaactagctaaatggttagctcttgaagtcggcaaaccattagtcgagggagagggcgaagtaggtggcggtgctgatatttttgaatggaatgctgaagaaactaaaagaatatttggacaaacagtagaaagtcgctttgaggatactagagtccaagtaatttaccagccagtcggcgttgttgctgcattaattccatggaattttcctattatactagcatcaagaaaaatttctactgcactagcagcaggctgttctgtaattgtaaaaccagacgttataacccctggagctgtaatggaattaatgaatgttatcaatgatgcaggaattcctccc

SEQ ID NO: 212845 - DNA, 793 bp, Unknown
  Bacterial polypeptide expressing nucleotide sequence isolated from the Sargasso Sea
gaggcttttgttgattttagcttttcaactaaagaggaaagagtccagattttagaaaatattattgcagaatatgaaaaaaggtctgaggaattagctgaaacaatatctaaggaaatgggagccccaatatggctatcccaggttgctcaagttgcttctggccttactcattttaaagatactctcaatgtccttaagagctatgattttgagtatgaaaaagatggctatctcgttcgcaaagagcctgtgggtgttgttggaatgataactccttggaattggccaatgaatcagatgtgcacaaaagtagcatcaggcatagctgctggatgcactatggtgctcaaaccaagtgaaataactcctttctgcggaataattcttgcagaaattattcatgatgcaggtgttcctgccggaatctttaatttagttaatggcatgggtccagttgttggtgcctcaatgtctgagcataaagatatagatatgatgcattttactggatcaacacgggcaggagttgctgttgctcaagcatcagccccaacagtgaagagagttgctcaggagctaggtggtaaatctgcaaatatagtccttgatgatgcagatattgaaaaagctgtatcagcaggagtctcttcatgtttcctaaatacaggacaatcatgtaatgcacccacaagaatgcttgtgtcatctaagaactatgacaaagcagttgaagttgccgctaatactgcaaatgctatgaaagtaggggacccttttgatgctgatacaa

SEQ ID NO: 212846 - DNA, 505 bp, Unknown
  Bacterial polypeptide expressing nucleotide sequence isolated from the Sargasso Sea
atgacaataaaagttggcattaacggcatgggaagaattggcagaatgattgtgaggtcaatttatgaaaattacaaaggtaaaatagttgtcaaacatattaataatagatcgagctctgaagtttgtgcaaatttattaaaatatgattcaattcatggtaattttagttctataataaaatctggagaaaattacataaaaataaataaagaaaaaatatcttacacccaacactctatgattaatgacataaagtggaaaaaatatgatgttgattatgtttttgagtgcacaggtaagtttaattctaaagatcaattactgccacatatagtaaatggggtaaaaaaagttattgtatcagccccatgtaaaatggcagataaaactatagtatttggcgtaaatcacaagaagatcaacaagaatgatagaattatttcagcagcttcttgcacaacaaattgtttagctcccgttgcggacgtaattaataaaaatt

SEQ ID NO: 212847 - DNA, 176 bp, Unknown
  Bacterial polypeptide expressing nucleotide sequence isolated from the Sargasso Sea
gaagaaatttagtatcaatggatttcatcatgatccacactcttcaatatttgcggcagatcaaactaaagtactccagaaaaaaatggtgagagtattgagttggtatgacaatgagtggggcttttcaaaccgaatggccgatacggctttagaaatatctaaattgctataaa

SEQ ID NO: 212848 - DNA, 970 bp, Unknown
  Bacterial polypeptide expressing nucleotide sequence isolated from the Sargasso Sea
ggaaatttttgcattagcagaggctccagagcatcttgttcagactgttattggagatggggagacgggagcagagttaattgatcaagccccagataaggtttcttttacaggtagtgtaacaacaggaaagatgatcgcagcaaaatgtggtgaaatgctaattccatatagtttggaacttggaggcaaagatgccatgattgtttgctctgatgcagacataaaagatgcagcaagtggtgcagttgtaggctcatgcatgaatgcaggtcagtattgctgtggcactgaaagaatttatgttatggatgatgtctatgatgagtttgttgcagagactgtttccataactcagtcactcatccaatcaaatgattgtaagggtgatgttggccctaccttttgggataagcaagtcgacatcatcgaggatcatgttaatgatgccgttgctaaaggcgcaaaggtattagttggcggaaaaagaaatccaaattttgaaggtttatattttgaaccaactgttcttgtggaggttactcatgagatgaaaataatgaaagacgaaacttttggaccgattatctccattatgaaagtgcaatcagaagaggaagcattaatgttagccaaccaatctcattatggtttaaatggaaatgtgtggactaaagatttaaaaaagggtcagatattagctaaatcaattgaaacaggagcctgttctgttaatgacatggcaatgagctatggtgttaatgaagttccatttggtggagttaaggaaagtggactaggcgttgttaatggaaaagaaggtttgttggcttatgctcatccaatgccaattattattggcaagaagtctgcatcatcatacccctatacagataaatcatttgatcaacttaaaggagccttaaaaatattttggggcaatagattggtaagaaagctttttggttaa

SEQ ID NO: 212849 - DNA, 157 bp, Unknown
  Bacterial polypeptide expressing nucleotide sequence isolated from the Sargasso Sea
agaaaacttagatctggaatggtagatgtaaacggtgttggaatagctgtagcatctccatttggtggttataaacattcaggaattggaagagaagctggaacagagggattgattgaatttttagaggtaaagactgtgggtggctggaattagt

SEQ ID NO: 212850 - DNA, 610 bp, Unknown
  Bacterial polypeptide expressing nucleotide sequence isolated from the Sargasso Sea
atggaaaacaaaaaaaaattttatatagatggtaaatggcaagaacctcaaagcaaacaagaaataaaagtcattaatcctgctactgaggaaaatagtgctgttattaccttaggcaacaaagatgatgttgatcatgctgtgagctcggccaaaaaagcgtatgagacatggtccttttctttgaaagaggaaagaataaaactattagaaaaactttatgaaaattataaaaaaagatgggctgatattgcaaaagctatcacattagagatgggcgctcctaaggattttgcaacaaaactacaagcaggcactggagcggctcatattaaatcttttataagacatttaaaaagttttgaatttgaaaaacccttaggagatcacgcgccaaatcaaagacttatttatgaacctaagggagtttgtgcattaattacaccgtggaattggccaatgaatcaggtttgtttgaaagtaatgcctgccttagcatctgggtgcacaatggttttaaaaccctcggaacttgcgccattatcatcaatgattttagcagaattaattgatgaaacaaaatttcccccaggagtttttaatttgatta

SEQ ID NO: 212851 - DNA, 464 bp, Unknown
  Bacterial polypeptide expressing nucleotide sequence isolated from the Sargasso Sea
catgaaattaattgaacattttgtaggtggaaagataattcccggaagttcagataaaaaaggaaaagtttttaaccccgctactggtgaacaggaaaagcaagtaaggcttgcctcctcaagtgatttagatcaagcagtagagattgcaaaaaaagcttttgagacatggtcattaaaaccttcactccaaagagcaaggataatgtttaaatttaaagagttaattgaaaaaaattctgatgaacttacacaattaattgtttctgaacacggaaaagtttatgaggatgcaaaaggttcattaacacgaggattagaagttgtagaatttgcttgcggaattccacatttacttaaaggagaattttcagaaaatgtagggacagatgttgacagctggtcaatgcgtcaaccactaggtgttgttgccggaataacaccatttaattttccagcctatg

SEQ ID NO: 212852 - DNA, 634 bp, Unknown
  Bacterial polypeptide expressing nucleotide sequence isolated from the Sargasso Sea
aactgaagaatttgttcaacatgcaaaggatcacgttgcagaaaattacccaacaataaaaaataatcctgactatacatccataatacatttaaatcattttgaaaggctgaatgaattagttcaggatgccaaatcaaaaggagctaccgttattgaaattaatccagctcaagaagatttttctcaacaagaacatcacaagattgttcctacattaattctaaatccaactgatgacatgaaagtaatgcaggaagaaatatttggccctttaatgcctgttaaaacgtataaagattttaatgaaactgttaacttcattaacaaaaacccaaaggcattggctctttattatttcggtgatgacaaaacagaaatgaataatgtcttagataacacttcctcaggccaggcagtcatgaatgatgttctatttcaattctctatgcacgacttgccatttggaggcgttggaccaagtggaatgggcgcgtaccatggatatgatggcttcaaaaactttagtcataaaaggtctgttttaaaggggcagaatattttagatgctggaaaaatgattacagcgccatttacagagtctaccgaaaagaatattaaaagattaacttaa

SEQ ID NO: 212853 - DNA, 868 bp, Unknown
  Bacterial polypeptide expressing nucleotide sequence isolated from the Sargasso Sea
atgcctgatgatttggcctcaagtgatcaatatataaaaaatcaggaaagtgcagaaaaatatatttccagatttagaaaaaaaactttggggcattatattaacggcgcgcgcacctcgacggaaggtgccaaaacatttgaaaacatttctccaatatctggaaagatccttaatgaagtagctcttggaacagctgaggatatagatgcagcctcgaaggcagcaaagaaggctttcccagaatggagagatatgactagtagcgaccgtagaaaaatccttcataaaattgcggatcttatagtagctcgcgccgacgaaattgccttaactgagtgcgttgatacaggacaagcgttccgcttcatgagtaaagctgcaatcagaggtgcagaaaactacagattctttgcagacaaaatcttagaggctaacaatggactttccctccccgcaaaagatcatattaactacactgtccgcactcctattgggccggttggtgtaatcacaccgtggaatactccatttatgctatcaacttggaaaatagctccggcattagcagcaggttgtaccgtagttcacaagcctgcggaatggagtccactaactgcaatgttattagccgaaatttcggcagaagcaggtattcctgagggtgtgataaatttagttaatggcaccggtgaagaagccggaaaattgcttaccgagcatcctgatattaaagcgatttcattcgtgggcgaatcgtttactggaagtaaaataatgagtcaggggtcgaatactctcaaaagagtacattttgaacttggtggtaaaaatcctgtaatagtttttttgatgatgcagacttaga

SEQ ID NO: 212854 - DNA, 906 bp, Unknown
  Bacterial polypeptide expressing nucleotide sequence isolated from the Sargasso Sea
gacgaacttacaaagattatcgtttttgaacatggaaaagtatacgatgatgctagaggatctttaactagaggactagaagttgtggagtatgcttgtggtatacctcaaatgctaaaaggagaatttacagaaaatgttggaacaagtgttgatagttggtcaataagacaacctttaggagtttgtgcaggaataactccatttaattttccagcaatggtacctatgtggatgtttccaatggctatagcttgtggcaatacattcgttcttaaaccatctgaaaaagatccatcttgttcaataagattagctgagcttttaaaagaatcaggtttaccagatggcgtttttaatgttgtaaatggagacaaagaggccgttgatgcattaataaataacaaagaagtagtagctatgagttttgtaggatctacaccaatagcaaaatacatttatgaaaattgtgcaaaaaatgaaaaaagagttcaggcattaggaggagctaaaaatcattgcgtggttatgccagattgtgatttagatcaagcagtaaatggtttaatgggagccgcttatggctctgcaggagaaagatgtatggctcaatcagtagctgtcgcagtaggaaacattggagataaactagtagatagattagctaagaaagtagagtcactaaaagtaggaccaggaatggataaaaactccgagatgggaccattggttacaaaagaacatttagcaaaagtaaaaagttacgtagatgttggagaaaaagaaggagctaaattgatagtagatggtaggaattttagacttcaaggctacgagaatggttattatttaggtggctgcttgtttgatcatgtgactaaagatatgagaatttataaagaggag

SEQ ID NO: 212855 - DNA, 127 bp, Unknown
  Bacterial polypeptide expressing nucleotide sequence isolated from the Sargasso Sea
actcaaactcaagtaattgatggtaagtttggaagagtattgagctggtatgataatgaatggggattctctaataggatgtgtgatacagcgattgccatgaaacgtgcaaaaaagaatgcttgat

SEQ ID NO: 212856 - DNA, 892 bp, Unknown
  Bacterial polypeptide expressing nucleotide sequence isolated from the Sargasso Sea
aatgaaagcagagagagatggttctttttctcatggcttgttcagattacctgcttatattgctggattaaaaagtggaaaaattaatggaaaaaatagacctaaagtttctaaaattacaccaagcgttgttaaagtagatggtaacaattgtttggcaccaatggttctgaataaaagtttgccggagttaattaaagctgcaaaagaaaatggagtagcggttttatctataacaaattcgcatcacatggcagcgatgtggcctgaaacagaggcaattgctgaagaaggcctagttgcttttgcatgcacatcttataaaccagctgttgcacctgcaggatctatcaaacctttatttggtacaaatcctatttcatttgcttggcctagaaaaagtaaacctccagtagtttatgatatggcaacagcatctatggcaatgggcgaagttcaagttgcaaaaagggaaggtcacaaagttccattaggcacaggattaacaaaagatggaaaggaaacaactgatccagctgaaatagcagatgggggagttttattgccttttggcggctataaaggctcagggattgcgatgatggtcgaattgcttgctggagcccttgttggagataattttagttatgagacggctgagaatgataataatgatggcggtccaccaagtggtggagagttcattttagcaatatccccagaaaaattatcaaattctgattgggacacacattcctcaaagttttttgaaaaaatgaaatcaatgggagatgttagacttcctggtgaaagaagacataaaaatagattagataaagggccaagacatataaatgaagacttggttaataaaattaaatctttaagttaa

SEQ ID NO: 212857 - DNA, 343 bp, Unknown
  Bacterial polypeptide expressing nucleotide sequence isolated from the Sargasso Sea
gaaataattccaagcctaaaagggaaattagaaggaattgcaatgagagtacctacgcccaatgtatcgcttgttgagttggtattctgtacgaaaaaagaaattgatataaaaaaaattaatgatgtatttgagactgcttctaaaagtgaattaaataaaattttagaggtcacacacgaaaaattagtttctattgattttaatcaccgatctgcatctgcaattattgatgcctctttaacaaatgtggttggaactaagatgggcaaaatctcagcttggtatgataatgaatggggtttttcaaatagaatgtgcgatatagcagagaatttataga

SEQ ID NO: 212858 - DNA, 805 bp, Unknown
  Bacterial polypeptide expressing nucleotide sequence isolated from the Sargasso Sea
aatgaaaactataagccattttattgacggaaagatttatagtgatagtaaatctagaaaaggtccaatatttaatcctgcaattggtgaacaaattgcagaagttgaattgggaactaaagctactgtagaaaaagctatagaaagttcatctaaagcatttataaattggtcaaaaaccactccaataaatagagctagaattttatcaaaatataaagatcttcttataaaaaatatggaagaactagctgtaatggtttctgaacaacatggaaaaactattgcagatgcaaaaggttctatccagagaggaatagaagttgtcgaatatgcaactggtattactgattctttaaagggtgatcattcaactagtgttggaacaaatgttgactctcatacgctaagacaacctcttggggtttgtgctggaattacaccatttaattttccggctatggttcctatgtggatgtatccagtttcaatagcttgtggaaatgcatttgttttaaaaccatcagaaaaagatccaagctgtccaatgagacttgctgaattagcaattgaggcaggccttccagctggagttttaaatgtggtaaatggtgacaaagaggcagtagatacgttacttgaaaataaaaaagttcaagcaattagtttcgttggttctactccaatagcagaatatgtttatcacacaggcacaaaaaataataaaagagtacaggcactaggtggagcaaaaaatcatatggttataatgccagacgctgatgtagacaaaacgactgatgca

SEQ ID NO: 212859 - DNA, 940 bp, Unknown
  Bacterial polypeptide expressing nucleotide sequence isolated from the Sargasso Sea
gttagcgctgcaaaaaaagcttttgaaacttgggcattctcaaaaaaagaagaaagattagatttattagaaaaattgtatgttgtttataaaaaaaggtgggcagaaatggcaaaactaatttctttagaaatgggagcacctatgaaattttctacagaaatgcaagccgcaactggagctagccacatcaaatcatttaaaaatatattaaaagatttcaagtttgaaaaagatttaggagaggaaaaaaataatcaaaaattattatatgagccgaaaggtgtttgtgcattgattacaccttggaattggccaataaatcaagttaacttaaaagtgattcctgcattggcatcagcttgtacagtggtattaaaaccgtctgaggtagcacctttatcatcaatgttattagctgaaatgattgatgaagtgaaatttcctccaggagtttttaatttgataaacggggacggagctgttactggagatgctttaacaagtcaccctgatattaatatgatttcatttacgggatcaaccagggcaggtgcattaatttctcaaaatgctgcaaaagattttaaaaggataagcttagaattgggtggaaaaggtgcaaatataatttttaaagatgcagactcagaagctgtagcaagaggtgttttaagatgttttagaaattcaggtcaatcttgcaatgctcctacaagaatgcttgttgaaaaatctatttacaatgaaactgtagaaaaagtaaaagagctagcaaataatactaaggttgactctccgcaaaaagatggtgatcatattggacctgtagtctcagaagttcagtttaataaaattcaaactttaattcaaaaggggatagatgaaggagcaaaattaattgcaggtggaactggcaaaccccaagggtttgaaaaag

SEQ ID NO: 212860 - DNA, 358 bp, Unknown
  Bacterial polypeptide expressing nucleotide sequence isolated from the Sargasso Sea
catgaaattaatagagcactttattgatggcaaaatatattcaggaaattctaagagaaaaggtaaggtttttaatcctgctaccggtgaacaaagtgcagaggttactttagcaacaactcaagatatcaataaagcagttgaaactgctaataattcatttgaaacttggtcgaacacccctcctcttcaaagagccagaataatgttcaagtttaaagatcttatagaaaaaaattctgatgagcttacaaaaattatagtttctgaacacggaaaagtttatgaagatgccaaaggatcattaattagaggattagagatcgtcgagtacgcatgtggtataccgcaaatgtta

SEQ ID NO: 212861 - DNA, 1012 bp, Unknown
  Bacterial polypeptide expressing nucleotide sequence isolated from the Sargasso Sea
ttgcgtccagcaagcgatggcgggacgttcgaaagcaggaacccagcatggttggaggactgcttgggagtgtttcccttatctacaaaagaagacgttcacgacgcactgatttcagctagggaggctttctctcaatggtcacagacgcctgctccgactaggggccagattattggaaacatgggaaggctgctgatgcagcacaaagacgatattgtcagagtggaatctagggaaatcggaaagactctgaaagagagtgctggcgaggttcaggaagcaatcgacacatgtctatttttccaatcggagggtaggagattgtatggtcagactgtgaactcggagttaccagacaaggagttgttcacctatcggaggccactcggcgtgtgtggaatcattaatgcaagtaatttcccttctgcagtgcccttctggaagatgattcctgcaataatgtgtggaaacacgtgcgtttggaaaagtccccaggactctccccttctatcattcatgcttactagaataatgcacgaggcagggctccccaacggcgtggtcaatttgattcatggcaaaggaagtggagcggggcagttccttgttgattcagttgatgagggacttgtgaataagatcagtttcactggttcaacacctgttggaaagatgatcggagaggtctgtggaaggaatctagtctcatgttcactggagttggggggtaagaatcctctagttgtcatgccatcagcgaacatcgaaaatgcggttgaaggtgcgtattgggctgctttcggaacagcaggtcaacgttgtactagcttgggtaatctgatacttcacaaagacatatacgaagagttcatggataaattcatggcaaaggtgaaggaaactaaaatcggagattcactaagaaatgacgatgtattgtatggctctatgctatcggaaaagtatgctaacgatttcctaagggatctagggatgtgtgaaacagacg

SEQ ID NO: 212862 - DNA, 736 bp, Unknown
  Bacterial polypeptide expressing nucleotide sequence isolated from the Sargasso Sea
ctgcgagcagaaattatcttagagatctacgctgacttaaggaactggggaggaaaacaaatgactaagcgactagctgggaaagtagcggttatcacaggaggggcatcgggcatcggcagggagtgctctctcaggtttgccgaagaaggagccaagattgttgtcgctgacatcaacctagatcgagcaagctccgtgtgcgcagagattaaagcggcaggtaacgaagcggtacctttcgcagttgacgcttcaattcccgaagacgttgtagcgatggctgacgccgcgatgaacgaatttgggcaagttgatgcatgcgttgccgccgccggaatttcacatgcttcctacgtaagtagggagcctcaggaacaagcgggcgcggaccgtcatgaccgtcacgacatgatgcttatcgacaagtcgttagcaaattggcagcgagttctcgacgtgaacctcaccggagtgatgctcaccaaccaggcaattgctaagaaaatgcaggagtctggaggcggagcgatcgtgaacatagcctcgatcgctggaaaaacagctttgatgggagcatccgattattgcgtgtcgaaagccggcgtttggatgttgactaagtgcggagctatcgaactcgcgcgccacggaatcagggttaacgccgtcggaccggggtatatcaaaacatcaatgagtggcgcagctacaagcaatgacgcctgggtagaag

SEQ ID NO: 212863 - DNA, 958 bp, Unknown
  Bacterial polypeptide expressing nucleotide sequence isolated from the Sargasso Sea
gggtcatgcagacgatggttctacatcgaatatcgtcaatccggcaaactctaaacaattgggcactgttccaaattgtggctcaaatgagactttaaaagccatcaaagcagcgaaggaagcatataaagtttggtcaaagacagacgcaaaagaacgttcttctgtgcttaagaaccttcatcgtctcatgctcgaacatcaggaagacttggcaaggattataacgcatgaaggtggcaaaccactctctgaatcaatgggtgaaattgcctatgctgcgtctttttttgaatggttttcagaagaggcgaaaagagtttatggtgatgtaattcctggtcatcagcaggatcgtagaacgcttgtgatcaaacaacccatcggcgttgttggctgtatcacgccatggaattttccatcggcaatgttggcaagaaaaatcgcgcccgctatagcagttggctgcacagtggttgcgaagccagcaccagaaacaccctattctgcaacagctatggcgtatctctctgaacttgctgggatacccaagggtgtatttaatgtagtcacaggcgatgctgaaaaaattggctctgtgatgacaacccacaaagaagtaaaaaaaatcacttttactggctccaccgctgttggaaaacagttgctcaagcaatcggcagataccgtaaaaaaagtttctcttgagctaggaggtcatgccccttttattgtctttgaagacgcaaatcttgatgatgcagttgatggtgcgttgattgcaaaatatagaaacagtggtcaaacatgtgtttgcgccaataggatttatgtccaatcaagcatctatgacgatttctctaagcgcttcactgagaaagcctctcaattggtggttggtgatggtcttgcagagtctacacagcaggggccattgattagcgaagatgccatggaa

SEQ ID NO: 212864 - DNA, 817 bp, Unknown
  Bacterial polypeptide expressing nucleotide sequence isolated from the Sargasso Sea
aatgactgatctcacaaaaaatccagatctcaggttaagagacaaaccagatgatttttttggtgactggaaatggcgtgaaggtttagcagaattaatggttcctataataggaagactttatagaaatggcgtaaacgttctcatgtacggacattcattaacaaatcaatctcctattgaaataatgaagtcacatagatttataagaagagttgaagatactgagatttctgaactcgagacctatccctttttacaaagaattgaactccaagatataaaagattgtgagattgatctaggagagatagtagtggatttcatgaaagagaataaatctttagatgattcagaaattgactctcacattaaatcatatattttagatccactagataaagttgatcagaacagaccttcaaaaccccaggacatagtcttgtatgggtttggtcgaatcggtaggttagtttcacgcattatggctcaaatgacaggcccaggtaattattatagactcagagcaattgtcgtgagaaaaggatcagataaaaacgatcttcttaaacgagctagtttgttgagacgtgattctgttcacggttcatttcatggaactattagagtcgacaatgagacggaaactttagtaataaatggaaatcctgtaaagatcatctatgcaaatggaccaaaagactttaattattccgattacgatatagataatccaattgttattgataacacaggcgtctggagagaggagaaagatttatctcttcatctagaatctggcgctagcaaagttgtt

SEQ ID NO: 212865 - DNA, 937 bp, Unknown
  Bacterial polypeptide expressing nucleotide sequence isolated from the Sargasso Sea
ctacaaagcagatttcccaatacaagaattcaaatttattatcaacctgtaggagttgtagcggcattagtaccatggaattttcctataattcttgcatcaagaaaaatttcaaccgctctagcagcaggttgttctgtaatagtaaaaccagatgtaattactcctggctgcgtaatgcaattagttgatatatgcagacaagcaggcgttcctcctggtgttgtcaaccttttatctggagatccagcttttatatcaaatgaacttttatcttcagatataatcaaaaaagtatctataactggttctactcgtgtaggaaaattaattctaaaaaaagctgctgacaaagtacaaagagtaacaatggaactaagcggccacgctccatttatagtttttgatgatgttgatttagataaagttacagatatggctattgcagctaaatttagaaacaatggtcaagtatgtatttcacccaacagattctatattcatgaaagtaaaaaagatagttttgctgagcttatggttaaaaaaacaaaaaaattaaaaattggagacggtatgaataaagatacaattctgggaccacttacaactaaaaagagattagacgagatagaaaaattagtggaaattacaaaaaaagagggagcaaaggttctttgtgggggccaaagaccagcaggatttaataaaggttattttttcgaacccacaatatttgacaatgtaaaagataatttcacaattatgaatcaggaacctttcggacctttagttcctattctttcatttaagaattttgatgaagtaattaaaagagcaaataataatgatttaggtttagcaagctacatatttactaacaacataaaaaaagcacataaagcttctgaacttatggaaactggtacagtagctgtaa

SEQ ID NO: 212866 - DNA, 823 bp, Unknown
  Bacterial polypeptide expressing nucleotide sequence isolated from the Sargasso Sea
atgagtaatgatttgaacttttatataaatggcgaatgggttaggtctgaatcaaatgaattaattgatgtgataaatcctgcaaatgaagaagtaataggacaagttactgctggcactaaagaagatatagacttagcagtatcagcagcatttaaggcattttcttcatatcaacagacaactaaagaacaaagagtagaattactaaataacattattaccgaatatgaaaatagatatgatgattttgtgcagaccataactaaagaaatgggatctccattatggctatctgaagcagcacaggctaaaactggaattaaaaacatccacgaaactttggatgctttaaaaaactatgaatttgaaaaacctgagggtgattacactattattaaagaacctattggtgttatagggatgataactccatggaattggcctatgaatcaaataacaacaaaagtttctgcagcattggcagcaggttgcacaatggtgctcaaaccaagtgaaatatctccatactgtgcaatgctgttggctgaagtctttgacagcgcaggtgttcctaatggagtatttaatgttgtaaatggttatggcccaactgttggagcagctttatctgaacacccagatgtggctatgatgtcatttactggttcaaccagggcaggcattgctgtagcgcaagcttctgctgtatctgttaaacgtgtacatcaagagcttggaggaaaatcttcaaatataattcttgatgatgtggttgatttagaaaaatcagttaaaggcggtgcaggacattgttttttaa

SEQ ID NO: 212867 - DNA, 214 bp, Unknown
  Bacterial polypeptide expressing nucleotide sequence isolated from the Sargasso Sea
tatggccttggaaattaccttacaaactgaagataaagaaaaggcaaaaagagtatctaaaaaacttaggtccgggatcgtttatattaacggaaattcaccagactctggaactccttttggtggatacaaacaatctggaaatggacgcgaaggtggttcttggggattagaagaatatctagaagtaaaaacaattactggctggaaataa

SEQ ID NO: 212868 - DNA, 718 bp, Unknown
  Bacterial polypeptide expressing nucleotide sequence isolated from the Sargasso Sea
taaatctgcaatagatcatgctgagaaagcatttcaatcatggaaaaatactacagcgaaagaaagatcaataattttaaaaaaatggagtgatcttataatcgaacatgttgatgatcttgcaaaaataatgacaattgaacaaggaaaaccacttgctgaggccaagggtgaaatattaatgggtgcctcatacattgagttttatgctgaagaggcaaaacgagtttatggtgacattatcccagatccaagaccaggaaaaagaatagtcattatcaaacaacctgtaggagtggttggagctatcacgccatggaattttccaaattcaatgattactcgaaaatgtgctgcagcactagcagttggatgtacaactgttgtcaagcctgcaagtcaaacacctttttcagctttagctgtagcagagcttgcaaaagatgctggatttcctgatggggtttttaatattgttacaggttcagcaaaagagataggaatggaattaactaaaaacccaaaaattaagaaaatatcttttactggatctacagaagtaggaaaaatattaatggagcagagtgcatcaacagttaaaaagttatcaatggaattaggaggtcacgctccttttatagtttttgaggacgcaaatattgatgaagcagtaacaggtgcactacaaagcaaatttagaaatagtggacaaacttgt

SEQ ID NO: 212869 - DNA, 830 bp, Unknown
  Bacterial polypeptide expressing nucleotide sequence isolated from the Sargasso Sea
agaaacttcaaaagaagaaagaattaaattattggaaaaattattagaaatttataattcaagatgggatgatatgacaaatgctatatctaccgaattaggatgtccgaaagattggtgttcagcaaaccaaacttcctcaggtgcatctcatatagaggattttataaaaagactaaaagaatttaattttgaacctggttttggtaaagattctgtaaatcacataatctatgagccgataggtgtttgtggattaataacgccttggaattggcctattaatcaaattgctttaaaggtcatacctgcacttgctactggttgtacaatgatcttaaaaccatcagaaattgccccgctttcaggaatgttgtttgcagaaatgatacatgaatctggctttccaaaaggagttttcaatttagtaaatggagatggcttgggagttggaacagatctttcaaaacatcctgatattgacatggtctctttcactggttcaacaagagcaggcaaactaattacaaaaaatgctgctgataccattaagagagtttgtttagaacttgggggcaagggaggaaatatcgtttttgaagactcttatcctgatgctgttagagatggaattaggaacattatgagtaactcaggtcaatcttgtgatgcgcctactagaatgttagttcaaaagtccatttatgatagagccattaaggaagcagcagatgaagcaaacaaaataaaagtagatttagcaagtaaatctggtgatcacattggacctgtcatttcaaaagttcaatttgataaaattcaaagtttaa

SEQ ID NO: 212870 - DNA, 124 bp, Unknown
  Bacterial polypeptide expressing nucleotide sequence isolated from the Sargasso Sea
tgatgtaacccaaactcaagtaataaaaggaaaatttagtcgagtgctttcatggtacgataatgaatggggtttctctaacagaatgtgtgatacttcaatacaaatagctggtttaatttag

SEQ ID NO: 212871 - DNA, 835 bp, Unknown
  Bacterial polypeptide expressing nucleotide sequence isolated from the Sargasso Sea
aaattttatataaacggaaaatgggttgatccaattaaacccaaagattttcaagttattaatccatcaacagaagaagtttgtgcaataatttcgcttggcagtcctggagatacaaatgcagctgtaaagtctgctagaaattcttttgaaacttggaaagaagtatcaaaaaatgaaagaataaaacttttagaaaaattgttagaaatatataatactagatgggatcaaatgactgatgcaatctcaaccgagcttggttgtcctaaagattggtgttctgcaaatcaaactgcttcaggtgccggtcatatagaagactttataaaaagattaaaagattttaattttgagccaggattcgataaaggatcagtcaatcatatcgtttatgaacctataggagtttgtggtcttattactccgtggaattggccgataaatcaaatagctttgaaagttatcccagcgctagctactggatgcacaatgattttgaaaccatctgagattgctccgctatctggaatgttatttgcgcaaatgatacatgatgcaggatttcctccaggagtgtttaatttagttaatggagatggggttggtgtaggtacagacctatcaggtcatccagatgtcgatatggtttctttcactggatcaacaagagcaggaaagttaataactaaaaatgcagctgaaacaattaaaagagtttgtctagagcttggtggtaagggaggaaatattgttttcgcagactcttatcctgacgctgtgcgtgatggaataagaaatataatgagtaattcaggccaatcatgtgatgcac

SEQ ID NO: 212872 - DNA, 570 bp, Unknown
  Bacterial polypeptide expressing nucleotide sequence isolated from the Sargasso Sea
tatgtacgaaaaatacggtcaattcatagatggtaagtggcacaaatcttctacaggtgaaacttatgaagttattaatccagctaacgaggaaattattggtaaagcatctaaagcttcatctgaggatgttgataaagctttgttgtctgcacaaaaaggattagaagtttggaaaaaaacaccaccatggcaacgtgcttatattttaagaagaattgctgacaagatgagagaaaagcaagacatacttgctaaatggatgacccttgaagttggtaaaccgtttgcagaagcaaagggtgaagttaacggtgcagcagatatttatgagtggaatgcagaagagacaaaaagaatttatggccaaacagttgaaagcagatttgaagataccagagttcatgtttattaccaacctgttggagtagtagcagcattagttccatggaattttcctttagttttatctgcaagaaaaatttctacagcattagcagcaggttgctcagtaatcgtaaaaccagatgtaataactcctggtgttgttatggaacaagttgaaatttg

SEQ ID NO: 212873 - DNA, 827 bp, Unknown
  Bacterial polypeptide expressing nucleotide sequence isolated from the Sargasso Sea
ataatcaaatggttagagaaaaaaaaattttacataaatggtatatggatttttccttttaaggctaatgattttgaagttataaatccatcaaatgaagaaccttttgctgctatatctctgggatctgaagaagatactgatgcggctgtaaaagctgcaaaaaatgcatttgaaacatggaaagatactaaagtagaggaaagaatatcacttttggaaaaattattaaatatttataaaaaaagatttgatgagatggctaatgcgatatctatggaaatgggtgcaccaatggattggtctacaaatgtgcaaactgctagtggacaatctcatttagaagattttattataagattaaaagaatttaattttgaaaaaaattttgatccaaaatcaaataattatattcgctatgaaccaattggagtttgtggactcattactccatggaattggccaattaaccagattgcattaaaagtaataccagcttttgcaactggttgtacgatgatacttaagccatcagagatagcgccaatctcaggagtaatatttgctgaaatgattgatgaagcaggttttcctaatggagtttttaacttagtcaatggaactggagatgttgttggtaaccaaatatcaggacatccagatattgatatggtttcatttacaggttctacaagagcaggaaaattaattttaaaaaattcagctgaaacaattaaaagggtttgtttagagttaggaggaaaaggtggaaatattgtatttgcagactcctaccctaatgctgttagagatggaattaaaaacgt

SEQ ID NO: 212874 - DNA, 614 bp, Unknown
  Bacterial polypeptide expressing nucleotide sequence isolated from the Sargasso Sea
tatgaaaaaatacaaccattttgttaatggaaaagaaatgttgccaaatggtggtgaatattttgaaactgagaatccatacacatgtgaaaaatgggctgaggttgcaaaaggtgatgcctatgatgttgatgctgctgtgaatgtagcaaaagaggtatttgaaaacaattggtctaaaacaaaaccaactgaaagaggtaaattattagttcgattagcagaacttgtagagcgagatgctcagaaattaggagaaattgaagttcaagataacggaaaacttatagcagaaatgggagcacaaactaaatatcttgcagaatggtatagatattttggcggactagctgataaagttgaaggagcagtgttaccgtcagacaaacctggtattttcaactttacaaaatatgagccgtttggtgttgttggtatgataacagcatggaattcacctttattacttttatcttggaaacttgctcctgcacttgcagctggcaatactgctgtggttaaaccttccgaatttacatcagcttctactttagagtttatgaaattaatatcagaagcaggttttcctgacggtgttgttaattgcgttacag

SEQ ID NO: 212875 - DNA, 494 bp, Unknown
  Bacterial polypeptide expressing nucleotide sequence isolated from the Sargasso Sea
catgaacacaatacagcattttgtgaatggaaataaattctcaggagaatctaagagagtaggtaaagttttcaatccagccacaggcgaacaaagtgctgaagtgaagttagcatcaacgaaagatgttaatgacgctgttcaaaacgcaaaaaaagctttcgagacatggtctaataagccgccgcttcagagagcaagagtaatgtttaaatttaaagaattaatagagaaaaattctgatgaattaactaaaataattgtttccgaacatggaaaagtttatgaggatgcaaaaggatcacttacaagaggcttggaagtagttgagtatgcatgcggaattccgcaaatacttaaaggtgagtttactgaaaatgtaggttcaaacgttgacagttggtcaatacgacaacctcttggagtttgtgcaggtatcacccctttcaatttccctgcaatggtcccaatgtggatgtttcctatggcgattg

SEQ ID NO: 212876 - DNA, 341 bp, Unknown
  Bacterial polypeptide expressing nucleotide sequence isolated from the Sargasso Sea
tgaactaaaaggaaagcttgaaggcttggcaatgagagtaccaactccaaatgtctcatttgtagatttagtttttaactcaaaaaataaattgtctgtaaataaaattaacaactcttttaaaaaagcctcaaaaaaagaactaaaaaatgttcttgaaacaactaatgaaaaactagtttctattgatttcaatcacaatccaaattctgcaattgtggacttatctttaactaatgttgtcggagataaaatggctaaagtttcagcatggtatgataatgaatggggatttgcatcaagaatgtgtgatttagctgaatatattcataaaatttaat

SEQ ID NO: 212877 - DNA, 754 bp, Unknown
  Bacterial polypeptide expressing nucleotide sequence isolated from the Sargasso Sea
gacgtaataaacccagcaaatgaagaagttattggtcagatcactgcagggaccaaagatgatattaataaagctgttaatgcagctagcgaagccttcaaaacattttctcaatcttcacaaaatgagagaatcgaacttttaaagaatattattcaagaatatgaaaatagatataaagattttgtagaagttataacaaaagagatgggtgcgccaaattggctatcagaaagagcacaagccaatacaggattgattaattttaaagaaacattagaagcccttgaagaatacgaatttcaaaaagaagagggtggatatatattaagaagagagccaattggagttataggtatgattactccatggaattggccgatgaatcagattactactaaagtatctgcagctattgcttcgggttgcactatggttttaaagccaagtgaaatttctccatactgctcaatgctgcttgcagaagttatgcatgatgctggcgtacctaaaggagtatttaatttggtgaatggatatggcccaatagtaggcgcagccttatctgatcatgaaaaggtagatatgatgtcgtttactggttcaactagagctggaattgcagttgcccaagcatcagctgcaaccgtaaaaagagttcaacaagagttaggtggaaaatcagcaaatattattttggatgatgttgctgatttagaaaaatcagttacaggtggggccgggcattgttttt

SEQ ID NO: 212878 - DNA, 898 bp, Unknown
  Bacterial polypeptide expressing nucleotide sequence isolated from the Sargasso Sea
gtgctacagctcatttgtgaataacttacttaatccagaagtgagtccagatgatctagcagaagatccagttaaatctgtaaaaaaagctattgataaacttcaacatgaaaaaatagtaaacccatcagatatcttctctccaagagttaattcatctggatatgacttaagcgaacctaagaatctacttgacttaaaatctgaccttttgaaatttgataatttaaaagttgaggcaaaaaacttttgtagcgaaattaatgaatctaaaaatgagaaacgatactcaatagctaatggaaatgagattggggattgttcttttgcagatatagcaaatgaattaaatttccaacaatgcactgaatggaaaaatactcctgttagcgagagagcagatatcttttatagaattgctgataatttagagaaagattctacaaaattcttatattacttaattcatgaagccgggaaaacatacaaagattcctatgatgaaattagggaggcagtcgattttcttagatattatgcagacaatgctaaaagtcttttaagcgaacccaacaacctcaatggtccaacaggtgaatctaatcaacttttctaccagtcaaaaggtacttttgtgtgcatcagcccatggaatttcccgcttgccatttttgcaggccaaatagccgcggctcttgtaacaggaaattcagttatatcaaagccgtctgagcatactccaatcattgcgaccatgatgattgagcttttttataaaaatggtgtaccaaaatctgcattaaaattaattcagggagatggctcaataggttcaaaactaatttcatttgatcacatttctggagttgcctttacgggatcctcagcaactgcaaag

SEQ ID NO: 212879 - DNA, 805 bp, Unknown
  Bacterial polypeptide expressing nucleotide sequence isolated from the Sargasso Sea
atagacaaaagcgaaatttcatatactcacgaaactgaaatatctgatgtcaaatggggagacttagggtgtgatattgttattgattgcacaggaaaccataaagaaatttcctcattaaaaaattattttaaaagtggtgtaaaaaaagttttagtatcagctcctatagacgaccctaatgtattgaacttagtatacggaataaatcatgaaaaatatgaccccaaaaaaaatgatgtcattacagctgcttcatgcacaacaaattgtttagcaccaataattaaagtaatacatgagaatatagggattcaaaggggtcagatcactacaatacataaccctactaatacaaatactgttattgataaacctcataaagatttaagaagagcacggtcttctcttatttcacttcaacctacaaccacaggaagtgcaactgcaattggattaatataccctgaactagaagaaagattaaatggtcacgcagttcgagtgccagttcttaatgccagcctgacagattgtgtcctacagcttgaatcagaaactaataaaagtgaagtcaatgaattatttcgaattgcatctcaatcttacctaaaaggtattttaggatttgaaaatagaccacttgtctcctctgattataccaacgatactcgtagttcaataattgatggtttgagcacactaattactgataactctttattaaaagtctatgcgtggtatgacaatgaagttggatatgcttgcagaatgcttgatcttgtaaatcatataagacagtaac

SEQ ID NO: 212880 - DNA, 889 bp, Unknown
  Bacterial polypeptide expressing nucleotide sequence isolated from the Sargasso Sea
caatatattcaaaatcatgttgtacaacctttatctacatcaactaataccagaccagatacccccaaagatattgttctttttggtttcggaagaatagggaggctgattacaagaatcatggccgaaaaaactggtccaggaaattactataaattaaaagcaatagttgttcgtaaaggtagttcagaaaatgatcttttaaaacgagcaagtcttttaagaagggattcagttcatggtgcttttagtgggacaataagagttgatactgataatgatctcttggttgtaaatggtaatcctataaaacttttatatgctgactcaccagatgagttgaattactcagactttgacattattgatcctattttaattgataacacaggtgcttggagagatacacaaggactaaaaaaacacttagatgcaggtgcctcaaaagttgttttaactgcacctggcaaaggagatatgaaaaatattgtttatggtattaatgaccataacctagattctaaagataatttagtatctgcagcatcttgcactacgaacgcaatagttccagttttaaaaattgttaatgatgaatttgcaattgagaatggtcatattgaaacggtccatgcctatactaatgatcaaaacttaattgataattatcataaaggagatagaagaggaagaagtgctccattaaacatggtgataacttctaccggtgctgttaaagcagtgtcaaaagctttacctgaacttgaaggtaaactttctggaaacgcgataagagttcccatacctaatgttagtcttgctgttatgaatctaaacctaaaaaattccactacaagaaatgagtttgtaaattttttacaattcacag

SEQ ID NO: 212881 - DNA, 856 bp, Unknown
  Bacterial polypeptide expressing nucleotide sequence isolated from the Sargasso Sea
aaaagaagaaagattagatttattagaaaaattatatgtagtttataaaaaacgttgggcagaaatggcaaaactcatatcacttgaaatgggagcgcccatgaaattttcaacagaaatgcaagctgcaacaggagctagccatataaaatcttttaagaatattttaaaggattttaaatttgaaaaagatttaggagaagaaaaaaataatcaaaaattattatatgaaccaaaaggagtatgtgctttgattacaccttggaattggccaataaatcaagttaatttaaaagtaattccggcactagcatctgcttgtactgtagtattaaaaccttctgagatagcacctctatcatctatgttgcttgcagaaatgattgatgaggtaaaatttccttctggagtttttaatttagttaatggagatggagaaacaactggagatgcattaacaagtcatcctgatgtaaatatgatatcgtttactggctctactagagctggagcgttaatttctcaaaatgctgcgaaagactttaaaagaattagtttagaacttggtggaaaaggtgcaaatataatttttaaagatgctgactctgaagctgtagcaagaggagtcctaagatgttttagaaactcaggtcaatcatgcaatgcaccgacaagaatgcttgttgaaaaatcaatttacaatgaaactgtagaaaaagtaaaagaattagcaaataatactaaagtagatgtaccggagaaagatggtgaccatattggaccagtagtttcagaagtacaatttaataaaattcaaaatttaattcaaaaaaggaatagacgaaggcgcaaaatt

SEQ ID NO: 212882 - DNA, 601 bp, Unknown
  Bacterial polypeptide expressing nucleotide sequence isolated from the Sargasso Sea
atggagaatgtagaaaaattttatattaatggtgcatgggtaactcctaaatcgtcaaactcaatgcctgtaattaatcctgcaaatgaagaagaaattgcaaaagtatacttaggaaatgaagaagatgttaattctgccgttgatgctgcaaagaatgcgtttgacagcttttcccaatcatcaaaaagtgaaagattagatttattaaaaaaaattcgttctgttacttctgatcgatatgaagaattagcagtagctatgagtaatgaaatgggcgctccaatgaccttttcgcgagatactcaggcagactcaggtattggccatttagatggttttattgaatctttggagaaactcgagacagaagttactttaagcaatggtgatattttactaaaagagccaatcggtgtttgtggtcttattactccatggaattggcccataaaccaaattacattaaaagtcttacctgcaatcgcaacaggctgcactagtgttcttaagccttcagagcacactccattatctgctgcattatatgcagagatacttcatgaagctggtgttccagcgggtgtatttaatttaatac

SEQ ID NO: 212883 - DNA, 163 bp, Unknown
  Bacterial polypeptide expressing nucleotide sequence isolated from the Sargasso Sea
ttcatctgactttaatcataatcctgcctcgtcaaattttgatttaactcaaacacaagtaattgatggaaagtttggaagagttttaagttggtatgataatgaatggggcttttcaaatagaatgtgtgatactgcagttgcgatgaaaagatctagatag

SEQ ID NO: 212884 - DNA, 793 bp, Unknown
  Bacterial polypeptide expressing nucleotide sequence isolated from the Sargasso Sea
acactacttgctaatgcagaagcagcgtttgagtcatggtcgcaaacccctgtaaaagaccgcgctaatttattacgccgaattgctgacattttagaacgtcatcacgacgagctcgttgctatttgtatcaaagaagcgggtaaagtagcacaagatggcatagacgaagtacgtgaagcagtcgacttttgtcgttactacgcagcacgagccgaagaactctcagaagatgagcgctttgaagcacggggtgtaattctgtgtattagtccatggaacttcccactcgctatattcttagggcaagtggctgctgccattgtgacgggtaatactgttattgccaaaccggctgaacaaacaagcttaattgcattgcgtacaattgaacttatgctatctgtgggtttaccagagcacgtcgtgcaacctgttattgcacgcggtagtgaagtgggtaaaacaattgttcctgatgaacgtattcaagcagttatgtttacaggttcaactgaaaccggcacattaatttctcaaacgcttgcagcaagaaacgacatacaagtgccattaatcgccgaaacaggtggtcaaaactgtatgattgttgactctacagcactgcctgagcaagtagttgatgatgttataagttcgggtttccaaagcgctggtcaacgttgttcagcactgcgagtattgtttatccaagaagacgtagccgacggcatcattgaaatgcttaaaggtgctttggccgaattacatattggcgatccatcattgttat

SEQ ID NO: 212885 - DNA, 871 bp, Unknown
  Bacterial polypeptide expressing nucleotide sequence isolated from the Sargasso Sea
gatattgataaagctgtttgtgctgcattggatgctttttcatcttttcaacaaacaacaaaagatcaaagaatagaattactcaaaaacgtaattacagaatatgaagctagatatgatgattttgttcaaatcattactaaagaaatgggatcgcccatttggctatctgaagcagcgcaagccaagacaggaattaaaaatattcatgaaactttagatgcattagagagctatgaatttgaaagaccagaaggggactatacgttaataaaagaacctattggagtaattggcatgataacaccatggaattggccaatgaatcaaattacaacaaaagtttctgcggcattggcggcaggctgttctatggttcttaaacctagtgaaatatctccttattgtgcaatgcttcttgcagaagttttcgacaaagcgggggtccctaatggagtatttaatgtagttaatggatatggacctactgttggagcagcattatcagaacatccagatgtagctatgatgtcatttattggttcgacgagagctggaattgctgtagcgcaagcatctgcaagttctgtcaaacgtgttcaccaagaacttggcggcaaatcttcgaacataattcttgatgatgtagctgatctagaaaaatctgttaaaggtggcgcaggacattgttttttaaattcgggacagtcctgtaatgctccaacaaaaatgcttatttcttcaaagaattatgataaagctgtagaaattgctgttgcaactgcaaacaatactactgttggggatccaagtggtgaatttagattgggaccaattgcaaataaagttcaatacgagaaaattttaaaac

SEQ ID NO: 212886 - DNA, 886 bp, Unknown
  Bacterial polypeptide expressing nucleotide sequence isolated from the Sargasso Sea
gttgctgagctcgctgctgaggcaggagttcctcgaggagtgttacaaatactaccaggtgcagggccgatagttggcgagaaacttgggcgccataccgatattgatatggttagttttacgggatcaacagaaacaggacggctatttttaaaatactcgtcagaaagtaatttaaagaaaaccgttttggaatgtggtggcaaaaacccagccgtcgtttttaatgatgcagaaaacctggaccttgtagcagagcatatagtaaatggggctttttggaatatgggtgaaaactgcagcgctatatctagactgattgttcataaggatatcaaatcggatttactcaaaaaaatagttgatcgattaagagactggaaaactggtgatcctctcgacccacaaaatcacctaggagcacttattgacaaagagcattgtaaaaaagtttctagctatctaagcgagggcgcggtaattggcggagagattgatggctgctatattgggccaacaatttacgaaacaacaacagatgataaaaaagccaaagacgaaatatttgggccaattctaagtgttctagaagtacaaacaaatgaagaggcaatttcattagcaaataaaacagaatatggattaaccgcatctatttttagcgcaaacacgacaaacgcgttaagagcagcaagagacctcaaggctggcaccgtcacagttaatagctatggcgaaggcgatattacaacaccctttgggggatataaacaatctggatttggtggacgggataatggtgttcatgcccatgaacaatactgtgaagtgaaaacaatatggatcgatcttaccgacccagcatcgcaggataagatccaatgac

SEQ ID NO: 212887 - DNA, 184 bp, Unknown
  Bacterial polypeptide expressing nucleotide sequence isolated from the Sargasso Sea
gacaaagaaaaagttaaaagagtagcaagaaaactacgatcaggaatggtggatgtaaatggagttggtatagctgtagcttctccttttggaggatataaacattctggtattggacgagaggctggaaccgaaggtcttatagaatttttagaagtcaaaacagttggcggctggaattaat

SEQ ID NO: 212888 - DNA, 904 bp, Unknown
  Bacterial polypeptide expressing nucleotide sequence isolated from the Sargasso Sea
actccaaacaattgggcactgttccaaaattgtggctcaaatgagacttttgaagctatcaaagcagcgaaggaagcgcataaagcttggtcaaagacagacgcaaaagaacgttcttctgtgcttaagaaccttcatcgtctcatgctcgaacatcaggaagacttggcaaggattataacgcatgaaggcggcaaaccactctctgaatcgatgggtgaaattgcctatgctgcgtctttttttgaatggttttcagaagaagcgaaaagagtttatggtgatgtaattcctggtcatcagcaggatcgtagaacgcttgtgatcaaacaacccatcggcgtcgttggctgtatcacgccatggaattttccatcggcaatgttggcaagaaaaatcgcgcccgctatagcagttggctgcacggtggttgcgaagccagcgccagaaacaccctattctgcaacagctatggcgtatctctctgagcttgctggcatccccaagggtgtatttaatgtggtcacaggcgatgctgaaaaaattggctctgtgatgacaacccacaaagaagtaaaaaaaatcacttttactggctccactgctgttggaaaacagttgctcaagcaatcggcagataccgtaaaaaaagtctctcttgaactaggaggtcatgccccttttattgtctttgaagacgcaaatcttgaggatgcagttgatggtgcgttgattgcaaaatatagaaacagtggccaaacatgtgtttgcgccaataggatttatgtccaatcaagcatctatgacgatttctctaagcgcttcacggagaaagcctctcaattggtggttggtgacgatcttgcagagtccacacagcaggggccattgattagcgaaagat

SEQ ID NO: 212889 - DNA, 607 bp, Unknown
  Bacterial polypeptide expressing nucleotide sequence isolated from the Sargasso Sea
gaagttaataatccagctagtatggaaattattggtaaagtgccaaactttacagcacaagaaaccaaatctgtaatagatcatgcagacaaagcttttcaatcatggaaaaatacaactgcaaaggaaaggtcaattattttaaaaaaatggagtgatcttataattgaaaatgttgatgatcttgcaaaaataatgaccattgagcagggtaaacctctcgcagaagccaaaggtgagatattgatgggcgcatcttatattgaattttatgctgaagaggctaaacgcgtttatggtgatattatcccagacccaaggcctggaaaaagaatagtaattattaaacaaccagttggagtagttggagcaattacaccctggaattttcctaactcaatgataaccagaaaatgtgctgcagctcttgctgttggatgcacaacagttgttaaacctgcaagccaaacacccttttcagcattagcagtagctgaattggctaaaattgcaggatttccaaatggggtttttaatattattactggttcagcaaaagaaattggaatggaattaactaaaaatccaaaaataaaaaaaatatcat

SEQ ID NO: 212890 - DNA, 694 bp, Unknown
  Bacterial polypeptide expressing nucleotide sequence isolated from the Sargasso Sea
aaatgaggaagtaataggacaaattcctgctggcactaaggaagatattaataaagctgttagtgctgcattagatgccttttctacttttcaaaatacaacaaaagctgaaagaatagaattactcaaaaatattatcactgaatatgaaaacagatatgatgattttgttcaaaccatttctaaagaaatgggatcccctatttggttgtcagaagcagcgcaagctaagacaggaattaaaaatattcatgaaactttggatgcattagagagttatgaatttgaaagacctgagggagactacactttaataaaagaacctattggagtaattggaatgattactccatggaattggccaatgaatcaaattacaacaaaagtttctgcggcattagcagcaggctgtaccatggttcttaaacccagcgaaatatctccttattgtgcaatgcttttagcagaagtatttgataaagcaggcgttcctaatggagtatttaatgtagtaaatggatatggcccaactgtaggagcagcattatctgagcatcctgatgtagctatgatgtcatttactggttcaacccgagctggaatcgctgtagcgcaagcatctgctagttcagtcaaacgcgttcatcaagaacttggtggaaaatcctcaaatataatacttgatgatgtgatt

SEQ ID NO: 212891 - DNA, 697 bp, Unknown
  Bacterial polypeptide expressing nucleotide sequence isolated from the Sargasso Sea
catggaaataaataaattttatatcgatggaaagtttgtcgatccagacggatcagagaagattgatatagtaaatcccgcaactgaagaagtagtgggatttgtaatttctggctcacttaaagatgttgatattgctgtagcggcagccaataaagcattccctagtgccatggcattaactctagagcaaaagaaaaaaatactcgaagaaataattactggcatggaagaaaggcgtgaagatttcgcgcaaattatttctgaggagatggggtcgccaatacaaatggcacgtaaagctcagtatggtgctggtgttatccattttaaaaatacgcttaatgtcattgatagattcgatttcaatgaagttcatggcaacattacaataaataaattgccaattggtccagtaggaatgataactccttggaattggcctcttaatcaaatgtgtaccaaaattgcttcagccatagctgctggaacctcttgtgttctaaaacctagtgaaattactccaggtgctgcacatatatttgccgaagttattgataaaacaagcatgcctaaaggtatgtttaatttgatacatggtcttggtgttactgtaggtaaagccatgagcagccattcagatctagaaatgatttcttttactggctctactagagctggaatagatattcaaaaa

SEQ ID NO: 212892 - DNA, 148 bp, Unknown
  Bacterial polypeptide expressing nucleotide sequence isolated from the Sargasso Sea
cacgatccacacagttctatttttgatgttacgcaaacccaggttataaaaggtaagtttagtagagttttgtcttggtatgataatgaatggggtttttcaaacagaatgtgtgatacggctatacaaatatcaaaacttatctaat

SEQ ID NO: 212893 - DNA, 400 bp, Unknown
  Bacterial polypeptide expressing nucleotide sequence isolated from the Sargasso Sea
tgcaagccaatctattgtaccaacttcgactggtgcatctaaagcgattggtgaaatcataccttctctaaaaggtaaattagaaggaattgccatgagagttcctactcctaatgtttctttggttgaacttgttttttgtacaaaaaaagatttgagtattgaaaaaattaattcagcttttcaaaattttaataaaaaaaataagattcttaaaattacgaaggaaaaacttgtgtctatagactttaatcacaatcctgcctcatcaattgttgatgcaagtttaactaatgtagtagggaaaaatatgggtaaaatttcagcctggtatgataatgaatggggcttttctaatagaatgtgtgacatagcagaatatcttcacaaaatttcttaa

SEQ ID NO: 212894 - DNA, 831 bp, Unknown
  Bacterial polypeptide expressing nucleotide sequence isolated from the Sargasso Sea
taaccaagcttatagttcttgagcatggaaaagtttatgaggatgcaaaaggttcactaaacaggggtttggaagttgttgaatttgcttgcggtataccacatcttttaaaaggagaatttacagaaaatgttggaacagatgtcgatagttggtctactagacagcctttaggagtttgtgcaggaatcactccatttaattttccagcaatggtaccaatgtggatgtttcctattgcaatagcttgtggaaatacttttgtgctcaaaccaagtgaaaaagatccttcttgttcaattaaactggcacaattattcaaagaagctggcttgccagacggagtttttaatgttgtgaatggagacaaagaagcagtagattctttaataacaaataaagatgtatccgcaataagcttcgttgggtcaactcctatagcaaagtatatttatgaaaattctgcaaagaatgaaaaacgcgttcaggcgttaggtggagcaaaaaatcattgcgttgttatgccagactgcgatcttaatcaagcagtaaatggtttgatgggagctgtgtatgggtcagccggggaaagatgtatggcccagtcggtagttgtagcagtaggaaaaattggagatgaccttgtaagcaatttagcaaaaaaagttgaaaaccttaaaataggaccaggattagacaaaaaatctgaaatggggccgctcgtaacaagagagcatttagaaaaagtaaaaagttatgttgatctaggtgttaaagagggtgcaaaattagtcgttgatggaagaaatataaaacttacagggatatgaa

SEQ ID NO: 212895 - DNA, 319 bp, Unknown
  Bacterial polypeptide expressing nucleotide sequence isolated from the Sargasso Sea
aaatttttggaccctgttgtatctgtaattaatttaaaagatgaagcagaggcattagaaattgctaatgatacactttatggtttaggtgcaggtgtttggactagaaatggaaatattgcatacagaatgggtagagcaatacaagcaggaatagtatggacaaattgttatcatgcttatccagctcactctccgtttggtggttacaaacaatcaggtgtaggaagagaaactcataaaatgatgcttaatcattacagacagaataagaacttacatgtttcttatgctgagcaaaaattaggcttcttttaat

SEQ ID NO: 212896 - DNA, 820 bp, Unknown
  Bacterial polypeptide expressing nucleotide sequence isolated from the Sargasso Sea
aaaccagcatctgaaacgcctttaactatgctagctttaatgccaatcctctctaaagcgggcgttccgccgggagttgtaaatattctgccatcaagatcatcgggggaagtggtttctaaaatgctttcagatcctagggttagggtggttagtttcacaggttccacggaagtcggcagaaagttattacatgcagctgctgacaatattgttaaacccgcaatggaattaggtggaaacgctccatttattgtttgtaaagatgcgaacattgaagctgcagcagacggcctaatggtggcaaaaatgcggaaccttggcgaagcctgtactgcagcaaacaggatatacgtacatgaaagtataaaagacaagttcatagctatattttcaaaaaaaatggctgcacttaagatgggaaatggggttgagcccgatgttgacgttggaccattggtgaatgctgagacacgagacaaagtagagtattttgtttcagatgctatttccaaaggcgctaaattggaattaggcggtgttaaacccaatattccaggttttttctatcctccaaccgttttgagtaatgtgccggatgatgcggattgtctattggatgaaatatttggacctgttgctgccatacaaacctttgctgatgaaaaagaagtcatcgaaaaatcaaattcaacagagtatggtttggttgcatacttgtacactgaagatgttagacggggcttaagtttatcagaaaaactcgagttcggtatgattgggttaaatagaggtttggtatctgacccggcggcacctt

SEQ ID NO: 212897 - DNA, 856 bp, Unknown
  Bacterial polypeptide expressing nucleotide sequence isolated from the Sargasso Sea
attggaaaagcatcaaaagctacaaaagcagatgttacaaaagcattaaaatcagctgaagaaggctttaaggtttggaagaaaactccgccatggcagagatcttataaaattagaaaaattgcagacctcatgagagaaagaaaaaaagaacttgcaaagtggttagctcttgaagttggaaaaccattagttgagggcgaaggtgaagtagggggtggagcagatatctttgaatggaattctgaagaaactaaaagaatattcggacagaccgttgaaagtagatttgaaaatactagagtacaggtcaattaccaaccagtaggagttgttgccgcattaatcccatggaactttccaattattttagcttctcgaaaaatttcaacagcattagctgcgggctgttctgttattgtaaaacctgacgtaataacacccggagctgttatggagttaatgaatataattaatgatgctggaattcctccaggagttgttaatcttttatctggagatccagaagaggtgtctaatgaattaatttcatcaaacattattaaaaaggtttcaatcacaggatctactagagtaggaaaattaatattaaaaaaagcagctgataaagttcaaagagttacaatggaacttagtggtcatgctccttttatagtgttcgaagactcaaatatcgaaaaagtcactgatatggcaattacatcgaaatatagaaataatggacaagtttgtatttcaccaagtagattttatatacatgaaagtaaaaaaaatgaatttgcaaaaacttttattgaaaaaacaaaaaaacttaaattaggtgacggaatgaaag

SEQ ID NO: 212898 - DNA, 774 bp, Unknown
  Bacterial polypeptide expressing nucleotide sequence isolated from the Sargasso Sea
ttagggtggttagtttcacaggctccacggaagtcggcagaaaattattacatgcagctgctgacaatattgttaaacccgcaatggaattaggtggaaacgctccatttattgtttgtaaagatgcgaacattgaagctgcagcagacggcctaatggtggcgaaaatgcgaaaccttggcgaagcctgtactgcagcaaacaggatatacgtacatgaaagtataaaagacaaattcatagctatattttcaaaaaaaatggctgcgcttaagatgggaaatggggttgagcccgatgttgacgttggaccattggtgaatgctgagacacgagacaaagtagagtattttgtttcagatgctatttccaaaggcgctaaattggaattaggcggtgttagacccaatattccaggttttttctatcctccaactgttttgagtaatgtgccggatgatgcggattgtctatcggatgaaatatttggacctgttgctgccatacaaacctttgctgatgaaaaagaagtcatcgaaaaatcaaattcaacagaatatggtttggttgcatacttatacaccgaagatgttcgacggggcttaagtttatcagaaaaactcgagttcggtatgattgggctaaatagaggtttggtatctgaccccgcggcaccttttggtggagttaagcagtctggtttggggcgagaaggcggtaaagagggaatgttagaatttcaggaaacacaatatatttcaactgaatggtaga

SEQ ID NO: 212899 - DNA, 784 bp, Unknown
  Bacterial polypeptide expressing nucleotide sequence isolated from the Sargasso Sea
ttttgtcaggccgatcccgcccagttgccatggaatgaattagaggtcgatgtagttcttgaatgcacaggtgtgtttcatagccgagctgatgcgcagctacatttagatgcaggtgcaaaaaaagtattgttttcacatccggcagatgccgatattgatgccacagtgatttatggcattaaccagcatttgctgaccgatgagatgacagtagtgtcggcgggttcttgtaccactaattgtatagttccggtgatccaggtgctggatcagcattttggtgtagagagtggcactattaccactattcatgcgtcgatgaatgatcagcaggtgatagatgcctatcacagtgatttacgtcgtacccgggctgccagtcagtccattattccggtcgatactaagttagcccgtggtattgaacgcatcatgccgcatttagccgggcgttttgaagccattgctgtgcgtgtgcctacggtcaatgtgactgctatggatttaagtgtcactttgcatcaggacgtcgatgtcactcaaatcaatcaggttttacagcacgcaagggcaggggagctggcgggtattctggattacaccgaagagccgctggtgtccgttgattttaatcatgatgcgcattcatgcattgtcgatggctcgcaaacaagagtcagccataaacgtttagtgaaatgtttagtttggtgtgacaacgagtggggttttgcgaacagaatgatcgacacaacccgcgctatgatgagttttgtctaag

SEQ ID NO: 212900 - DNA, 346 bp, Unknown
  Bacterial polypeptide expressing nucleotide sequence isolated from the Sargasso Sea
aattattccctcacttaaaggaaaattagaaggtatagcaatgagagtgcctactccaaatgtttctttggtcgagcttgttttttgtaccaaaaaagatttaagtattgaaaaaattaattcagcatttcaaaattttagcaaaaaaaatagaatacttgaaataacagaagataaacttgtgtctgtagactttaatcacaattcttcgtcatccatagtagatgcaagtctgacgaatgtagtaggaaaaaatatgggcaaaatttcggcttggtacgataatgagtggggattttcaaatagaatgtgtgatatagcagaatacctacataaaatatcttaa

SEQ ID NO: 212901 - DNA, 925 bp, Unknown
  Bacterial polypeptide expressing nucleotide sequence isolated from the Sargasso Sea
ggcgctagacgatacggatgcaggtttgaagcatggtcgaagcgagacgtcagcgaaagggcagaaattcttaatcgtacggcagatgcgctagagcgtcacatggccgagcttattgctatttgtatgcgtgaagcgggtaaagtagcgcaagatagcattgacgaagtccgtgaagcggtagatttttgtcgttattatgcagtacgcgccgaagagcttgctgaagatcagcgtttacttccccgtggtgtggtgctgtgtattagcccatggaacttcccactggcaattttcctgggacaagttgccgccgcgcttgttacgggtaacacggtagtggctaagccagcggaacaaaccagtatcgttgcgcagcgcgcagtcgatattatgcactcggtaggtttacccgaagatgcattgaagctgattgtatcgccaggtaaagaagtcggtgaaacgttgctgcctgatgagcgtattaaagccgtcatgttcacgggctcaacgcaaaccggtacgctaatttcgcaagtattggcagagcgaggtggtgagcaggtgccgcttattgcagaaaccggcggtcaaaactgtatgattgtagactcaacggccttgccagagcaggtggttgacgatgtaatccattctgggttccaaagtgcgggccagcgatgttcagcactgcgcgtgttgtttgttcaagacgacattgccgatgaactaaccgaaatgttaatcggcgcacttaaagagctaacggtgggagaccccacgcagctagctaccgacgtcggcccggttattgacgaaaaagcactgaaaagcctgacagaccaccaagactatatggaaggtaaaggtaagttgctctatcgcagtgaaatgccaaaagggttgaaaacggtacgttcttcgc

SEQ ID NO: 212902 - DNA, 618 bp, Unknown
  Bacterial polypeptide expressing nucleotide sequence isolated from the Sargasso Sea
aatggaaatagtaaataattttattaatgggagatttgtcaaacctcaaaataaaaactatatagatttatatgagcctgcaactggaaaggtgtatggcaaagttgcaaattcttcaaaattagatgttaatcgtgcaatatctgctgcgctgagtgcgtttcccgaatggtcagagaaaccaccagcggaaagagcttcttatttgacaaaaatttcaatcgggttacaaagtcgattagaagatttagcccaatttgaatcaagagacacaggaaaacctgtatcaataactacaaaaattgatatcccaagagctatcaaaaattttagatttttttcaaacttaataaaggattttgatactagatataatcttaataatgaaaattattctaatactattattagatcacccatggggattgtagcttgtatatcgccatggaatttgccattgtatcttttttcatggaaaattgcaccagccctggcagcagggaatactgtcattgcaaaaccttcggagataactccatttacggcctcaaaattagcagaggtgtgtattgaaattgggtttccgaaaggagttcttaacattataaatggacatgg

SEQ ID NO: 212903 - DNA, 481 bp, Unknown
  Bacterial polypeptide expressing nucleotide sequence isolated from the Sargasso Sea
tatgtacgataaatatggacagttcattgatggtaaatggcaaaaatctgcaagcggtgaaacttataatgttattaatcctgccactgaagaaataataggaaaagcatctaaagccaatagttcagacgtgcaaagagctcttaaatcagccgagaaaggattagaaatttggaaaaatacctctccttgggaaagagcaaaaattattagaaaaatttctgaattgataagacatagaactgatattttatcaaaatggttaactttggaagttggaaaacccttgactgaaggcccaggagaagtaggaggtgcagcagatatatttgaatggaattcagaagaaacaaaaagaatatttggagaaataaatcaaagtcgtttccctaacacccgtatacacgttatataccaaccagttggtgtagttgcggctttagttccctggaactttcctgtaattcttgcatctagaaaa

SEQ ID NO: 212904 - DNA, 752 bp, Unknown
  Bacterial polypeptide expressing nucleotide sequence isolated from the Sargasso Sea
tccaaaagactttgctacaaaattacaagcaggaacaggagcaagtcatattaaatcattcatcagatatttaaaaaattttgaatttgaaaaaccattaggagaacacgctcctaaccaaagattaatttatgaaccaaaaggtgtttgtgcattaataacaccatggaattggccgatgaaccaagtttgtttaaaagtaatgccagcaatagctgcaggttgcacaatggttttaaagccatcagaattagcaccactctcatcaatgatacttgctgaaattattgatgaagtaaaatttccaaaaggtgtgttcaatttagttaatggtgatggagcaacaacaggcgaagctctcacaagtcatccagatattaacatgatatcttttactggatcaacaagagcaggagctttgatttcacaaaatgctgctaaagattttaaaagagtaagcttagaattaggaggcaagggtgcaaatataatttttaaagatgctgatccagaagctattgaaagaggtgctttgagatgttttagaaactcaggacaatcttgtaatgcaccgacaagaatgttagttgaaaaatctatgtatggtgaggcaattgagagattaaaaaaatatactgagaactttgaggtgggtgatcccaagaaagaaggagaacatataggtccagttatttcagaaactcaatataataaaatacaaactttaatccaaaaaggaatagacgaaggtg

SEQ ID NO: 212905 - DNA, 867 bp, Unknown
  Bacterial polypeptide expressing nucleotide sequence isolated from the Sargasso Sea
tgagaacagatataaagattttgtagaagtaataacgaaagagatgggtgcaccaaattggttatcagaaagagcacaagctaatacaggattaattaattttaaagaaacattagaagcccttgaggagtatgagtttcaaaaagaagaaggtggatatacattaagaagagagccaattggagttataggtatgattactccatggaattggccaatgaatcaaattactacaaaagtatctgcagctattgcttcaggttgtactatggttttaaagccaagtgagatttctccttattgttcaatgttgcttgcagaagttatgcatgatgctggtgtacctaaaggagtatttaatttagttaatggatatggaccagtagtgggtgcagctctatctgagcatgaaaaggtagacatgatgtcatttactggctcaactagagctggaattgcagttgctcaagcatcagctacaactgtaaaaagagttcagcaagagttaggcggaaaatcagcaaatattattttagatgatgttgcagatttagaaaaatcagttaaaggtggcgctggacattgttttttaaattctggtcagtcatgtaatgcgccaactagaatgctagtttcattaaaaaattatgacaaggcagtagaagttgctgttgctactgcaaatagcacaacagttggtgatccaaatggtgaatttagattgggaccaatttctaataaaactcaatacgaaaaaataattaagttaattgagattggtattgaagagggtgcaaggcttgttgcaggtggcgttgaaaaaccagaaggttgcgaaaagggttattacataaagccaactgtatt

SEQ ID NO: 212906 - DNA, 986 bp, Unknown
  Bacterial polypeptide expressing nucleotide sequence isolated from the Sargasso Sea
gtcttggcgtctcagtccctggaacctgcctttgctgctgatgacctggaaggtcggaccggccctggcctgcggcaatacagtggtggtcaagccgtcggaagagacaccgaccaccacagcccgtttgggcgaggtgatgaaagaggccggcgttccggacggtgtctacaacgtggtgcatggcttcggcggtgattctgccggtgcgtatctgaccgagcatccacaggtagacggctttaccttcaccggcgagaccggtactggcgaggtcattatgaaggccgctgccaaagggatccgcgacatttccctggagctgggaggcaagaatgccggcctggtattcgcagactgtgacatggaaaaggcgattgagggcaccatgcgttctgccttcgcgaactgtggtcaggtctgcctgggtacggagcgggtctacgttgagcgttcgatattcgacgaattcgtcggccgtctgaaggaagcggcggagggcctgaagatcggtccccccgatgatgccgacgccaaccttgggccactggtgagtctcaagcaccgtgagaaagtcctctcctactaccagaaagcggttgatgacggcgctaccgtggtcaccggcggcggtgttccggacatgcctgcagagctggcgggcggagcctgggttgagccgaccatctggaccggtctcgcggacgactcggcggtggtgacggacgaaatcttcggcccctgttgccacattcgccccttcgacaccgaagaggaggccattgagctggccaacagcctgccgtacgggctggcctctgcgatctggagcgaaaacatcacccgtgcgcaccgcgttgctggccagattgaggcgggcattatctgggtgaatagctggttcctgcgggaccttcggacccccttcggcgggagcaaacaatcgggtgttggccgcgagggtgggcgtcattcgctgggagttc

SEQ ID NO: 212907 - DNA, 808 bp, Unknown
  Bacterial polypeptide expressing nucleotide sequence isolated from the Sargasso Sea
gggcagaataggaagaatgattgtcagatctattatcgaaagtaaaaataaaaatatagaaattaagcatattaataacagaactaattctaaagtttgctcgtcactattaaaatatgactctattcatgggaagtttgatgctgagataaattttgatgaaaatcatctacttataaataaaaataaaattacatttagtaatgagacagacttaaataagattcattggaataaatatgaagtagattatgttttagagtgcacaggtaaatttaattcaaaagataaattattagcccatattaataatggggcaaaaaaagttatagtttcagctccatgtaaagatgctgacaaaactattgtgtatggagtaaatgaaagcgaattaaagaaagatgataatatcatatctgctgcatcatgcacaaccaattgtcttgcgcctgtggctcatgttttaaatgaaaattttgagatcgaaaaaggatttatgactacgattcactcgtttacaagtgatcaaagaattctggataactctcacgaagacccacgcagagctagatcagcaagccaatctattgtgccaacttcaacaggcgcatctaaagcaattgatgaaattataccttcacttaaaggtaaattagaaggagtagcaatgagggtgccaacgccaaacgtctcattaattgaacttgttttctgcacaaaaaaagacctgagtattgataagattaatctagcatttcaaaactttagcaaaaaaaataagattcttgagacaactaaagaaaaactt

SEQ ID NO: 212908 - DNA, 748 bp, Unknown
  Bacterial polypeptide expressing nucleotide sequence isolated from the Sargasso Sea
aaccctgcgaccgaagaaattgtaggtaagtttgctgtcgctgaaataattgatcttgatgagtcgttagaagcagccgataccgcgtttaaaagttggaaaaaagttgccccttttttaagatataaaatgatgaggagtgcggccgagttgctacgtcaaagggccgatgaaatagcacggattatgacaatcgaacaaggcaaacctttagctgaagccaaaggagaaactttgcttggagccgatacgattgattggtttgccgaagagggtcgacgtgcgtatgggcgggtaataccttctcagatggaaagtgttaaccagatcgtcatcaaagaaccagttggacctgtagccgctttttctccctggaattttccaattaaccaggctgtaagaaaaatttccggtgccattgcagcggggtgctcgattattctgaaaggaccggaggatactccggcaagctgtgctgagctcgtaaaggtttttgtcgatgctggagctccgagtggtttaataaacttggtttatggtattccttcggatatttctaattatttaatcccgcacccaattgtaaaaaagatatcttttactggttcgacggcggttggcaaaaaattggcatccttagcagctgaacacatgaagctatccacaatggaattgggagggcacgcccctgcaattgtttttaacgacgcaaatttatctgcagctcttgatgttcttacagctcaaa

SEQ ID NO: 212909 - DNA, 190 bp, Unknown
  Bacterial polypeptide expressing nucleotide sequence isolated from the Sargasso Sea
ttagatgtaaaccaaaaacctcttgtatcaaaagattttaatcataacccccatagttcaattttcgatgtaacccaaactcaagtaataaaaggaaaatttagccgagtgctttcatggtacgataatgaatggggtttctctaatagaatgtgtgatacttcaatacaaatagctggtttaatttagt

SEQ ID NO: 212910 - DNA, 217 bp, Unknown
  Bacterial polypeptide expressing nucleotide sequence isolated from the Sargasso Sea
aagctgcgaacggacctttaaaggtatactcgctacaaattcagcaccactagtatcaaaagattttaatcataatcctcacagctcaatatttgatctaacacaaacacaagtcatcaaaagtaaatttagtagagtgctttcctggtatgataatgaatggggtttttcaaacaggatgtgcgacacaacaattcagatagctggattaatttaa

SEQ ID NO: 212911 - DNA, 922 bp, Unknown
  Bacterial polypeptide expressing nucleotide sequence isolated from the Sargasso Sea
ctgaaaaatggtgctaacagctcatttgtgaataacttacttaatccagaagtgagtccagatgatctagcagaagatccagttaaatctgtaaaaaaagctatcgataaacttcaacatgaaaaaatcgtaaacccatcagatatcttctctccaagagttaattcatctggatatgacttaagcgaacctaagaatctacttgacttaaaatctgaccttttgaaatttgataatttaaaagttgaggcaaaaaacttttgtagcgaaattaatgaatcaaaaaatgagaaacgatactcaatagccaatggaaatgagattggggattgttcttttgcagatatagcaaatgaattaaatttccaacaatgcactgaatggaaaaatactcctgttagcgagagagcagatgtcttttatagaattgctgataatttagagaaagattctacaaaattcttatattacttaattcatgaagctgggaaaacatacaaagattcctatgatgaaattagggaggcagtcgattttcttagatattatgcagacaatgctaaaagtcttttaagcgaacccaacaacctcaatggtccaacaggtgaatctaatcagcttttctaccagtcaaaaggtacttttgtttgcatcagcccatggaatttcccgcttgccatttttgcaggccaaatagccgcggctcttgtaacagggaattcggttatatcaaagccgtctgagcatactccaataattgcgaccatgatgattgagcttttttataaaaatggtgtgccaaaatctgcattaaaattaattcagggagatggctcaataggttcaaaactaatttcatttgatcacatttctggggttgccaatacggggtcctcagcaactgcaaagaaaattaatctcc

SEQ ID NO: 212912 - DNA, 271 bp, Unknown
  Bacterial polypeptide expressing nucleotide sequence isolated from the Sargasso Sea
ttttattgcctcaagagagacttctgttgatgaaatcaatgaggttgtgaaagctgcatcagagggtgctcttaagggagttctcgattacaacgatggtccactcgtatcaattgattttaatcataatcctgcttcatctacctacgatgcaaccatgacaaaagttcaagagggaactttagtgaaggtgtgttcttggtatgacaatgaatggggattctcaaatcgaatgctcgatacaacacttgcgttagttaacgccgattga

SEQ ID NO: 212913 - DNA, 508 bp, Unknown
  Bacterial polypeptide expressing nucleotide sequence isolated from the Sargasso Sea
aatgaataaaattatacaaaactttaaaaaaatttcttatggtctagcgcccgaagatagcaaagaagtctatgagtggataaataaattacatcagccaaattatctttatataaatggaaaatgggtccgttctcaatcaaagaaaacaattcaaggtattaatccagcaaataattcaaaattatacaaattagcagttgctaataaatctgatgttaaaagtgcagttaatgcagcaaaaaaagctttccccaaatggcgctctatttcaccaacaaaaagatcaaaatttctatatgctttagcaagattgattcaaaaacattcaagatttcttgcagttttagaaaccatagacaatggtaagccaattcgtgaaacaagagatatagacattcctctggtagcaagacatttttactatcatgcaggatgggcagcaaaattaaataacaaaaatctaaatccaattggggttgttggtcaaattattccttggaatttt

SEQ ID NO: 212914 - DNA, 844 bp, Unknown
  Bacterial polypeptide expressing nucleotide sequence isolated from the Sargasso Sea
ggtggtaaaaaagatattgataaagcagttagtgcagcaaaaaattcatttgaaatatgggctttttcaaaaaaagaagaaaggttagaattattagaaaaactctatactatctacaaaaaaagatgggcagaaatggcaaaacttatttccatggaaatgggagctccaatgaaatttgctactgaattgcaagctgctacaggtgccagtcatataaaatctttcaaaaatatattaaaagattttagatttgaaaaagatttaggtgatgaaaaaaataatcagaaattactctatgaaccaaaaggtgtttgtgctttgataacaccttggaattggccaataaatcaagtcaatttaaaagtcattcctgcattagcatctgcttgtacagttgtattaaaaccatcagagatagcacccttgtcttcgatgttacttgctgaaatgatagatgaagctaaatttccttcaggagttttcaatttggttaatggagatggagagttaacgggcaatgctttgacgagtcatcctgatataaatatgatatccttcacaggctcaactagggcaggtgcattaatttcccaaaatgctgctaaagactttaaaagaataagtttagaattaggtggaaaaggtgccaatattatatttaaagatgctgatagcaatgctatagcaagaggagtgctaagatgttttagaaattctgggcaatcttgtaatgcgcccacaagaatgttagttgaaaaatcaatatacaaagagactgtagaaaaggtaatagaattagcaaataatacaaaagtggatgcaccaaataaagatggagatc

SEQ ID NO: 212915 - DNA, 951 bp, Unknown
  Bacterial polypeptide expressing nucleotide sequence isolated from the Sargasso Sea
gtctttttttgaatggttttcagaagaagcgaaaagagtttatggtgatgtaattcctggtcatcagcaggatcgtagaacgcttgtgatcaaacaacccatcggcgtcgttggctgtatcactccatggaattttccatcggcaatgttggcaagaaaaatcgcgcccgctatagcagttggctgcacggtggttgcgaagccagcgccagaaacaccctattctgcaacagctatggcgtatctctctgagcttgctggcatccccaagggtgtatttaatgtggtcacaggcgatgctgaaaaaattggctctgtgatgacaacccacaaagaagtaaaaaaaatcacttttactggctccactgctgttggaaaacagttgctcaagcaatcggcagataccgtaaaaaaagtctctcttgaactaggaggtcatgccccttttattgtctttgaagacgcaaatcttgaggatgcagttgatggtgcgttgattgcaaaatatagaaacagtggccaaacatgtgtttgcgccaataggatttatgtccaatcaagtatctatgacgatttctctaagcgcttcacggagaaagcctctcaattggtggttggtgacggtcttgcagagtccacacagcaggggccattgattagcgaagatgccttgaaaaaagcgtcaaaacatgttgaggatgctaaaaacaaaggtgcaactgttaccacaggcggaaatccacattcgcttggtgggttattttttgagcccactgtgttaactggggtctcagatgaaatgttgattgcacaagaagaaacgttcggtccagtcgcaccaatttttagtttcgatagtgaaaaagaagtattggaacgtgcaaataatacgccttatggtttggcggcttatttttatacgtctgatcttggtaagtcatggagagtttc

SEQ ID NO: 212916 - DNA, 337 bp, Unknown
  Bacterial polypeptide expressing nucleotide sequence isolated from the Sargasso Sea
aatggaaaattagatggtgtttcggtaagagttcctactcaaaatgtatcagttgttgattttaaatttaatgcttcaagatcaacttcagttgacgaaattaataacattattaaagaatctgccaatggagagctaaacaatattcttggctttacagatgaacctcttgtatcaagtgattttaatcatgattcacgttcttctatttttcacatggatcaaacaaaagtgatggacaatacattcgttagagtattaagttggtatgacaatgagtggggtttttctaatagaatgtcagataccgcagtagctatcggtaagacaatttaaa

SEQ ID NO: 212917 - DNA, 499 bp, Unknown
  Bacterial polypeptide expressing nucleotide sequence isolated from the Sargasso Sea
tatgtatagtaaatttggacaattcattaatgggaaatggcaacaagcagaaaaaaaagaaacctatgatgtaataaatcctgctactgaagaagtgattggaaaagcatcaaaagcatcttcgacagatgtacaaaaagcattaaagtctgcagagaaaggtttggaagtttggaaaaatactgctccatggcaaagagcatatgttttaagaaaaattgctgatctcatgagagaaaaaaaagatgttcttgcaaaatggttaactctagaagtaggtaagcctcttacagaagcagttggtgaagttgtgggcagtgcagatatttttgaatggaatgcagaagaaacaaaaagaatttatggtcaaacagttcaaagtagatttcctgatacaagagttcatgtttattatcagccagtaggagttgttgcggctttagttccatggaattttccaatcaccttagcatctagaaaaatttcaactgctttagct

SEQ ID NO: 212918 - DNA, 889 bp, Unknown
  Bacterial polypeptide expressing nucleotide sequence isolated from the Sargasso Sea
cctgaatctaaaaatactatcaatgttataaatccagcaaatgaagatataatatgtgatataatattaggtaataatttagatctagataaagcagttaattcagcaaaaaaggcttttcaaaaatactcattgttttctaaggaagataaactgttaattttagataatattataagtgcttataagaaaagaatggacgatttgtctaatgcaattactaatgagatgggggcacctaaaacactttctgaaaaagctcaagtaccttctggtttaggacacttcatacaagccagaaaaatattagaaacatttaaattcgaagaaaacctcaattcttctctagttaagaaagaagctattggagtttgtggattaattacaccatggaattggccattaaatcaaattgcatgtaaggtagcccctgccttagcagcaggatgcacaatgattttaaaacccagtgaaattgctccattaagtgctattatttttgctgaaatattacatgaagcaggagtaccaaagggagtttttaatcttataaatggaactggtgctgaaataggccttaatatgagtaaacatgcagatatagatatgatgtccttcacaggttctacatctgctggaatatctgtggccaaaaactctgcggatagtgttaaaagagtaactcaagaattaggaggtaagtctgctaatataattttaaatgacgcagactttgaaagagtagtatcaaaaggaatattccattgtatgaataatactggtcaatcatgtaatgcaccaacgagaatgttaatacctgttgaacaaatggatgaagccattgctattgtaaaaacaactatagaaaaaataaaagtaggaaacccca

SEQ ID NO: 212919 - DNA, 653 bp, Unknown
  Bacterial polypeptide expressing nucleotide sequence isolated from the Sargasso Sea
gcaattgttccatggaattatcctctttggatggctatatggaaaatagccccatctttaattacaggaaattctgtgattcttaaaccagcagaacaatcacccatgagtgcaataaaaattgctgaattattatcagaagcaggcattccagatggagtcttttctgttctaccaggagatggacctactactggtaaatccttgtgtcttcataatgatgttgattgtgtagcttttactggttctggtgaagtaggaaaacttgtacttcaatattctggccaatcaaatatgaaaagagtccaattggagtgtgggggcaaatcaccaaatatagtttttgcagattgtcctgatcttgatgcagcagctgaggcatcagcttatgcaatttttggaaatcaaggagaagtatgttcagcaggttcaagacttattgttcaaaaagaaattgaaaaagattttattgataaagtagcaaaattaagccaaaacatgcagccagcagatccatttgatccagattcattcgcgggtgcaatagtaaatgatgagcagttagctaaaattgataaatatgtaaaagtaggtatggaagagggagctaatgttgctgttggaggaacattacatgcaagaacaggaggtta

SEQ ID NO: 212920 - DNA, 784 bp, Unknown
  Bacterial polypeptide expressing nucleotide sequence isolated from the Sargasso Sea
gtgatcaaacaacccatcggcgttgttggctgtatcacgccatggaattttccatcggcaatgttggcaagaaaaatagcgcccgctatagcagttggctgcacagtggttgcgaagccagcaccagaaacaccctattctgcaacagctatggcgtatctctctgagcttgctggcatccccaagggtgtatttaatgtggtcacaggcgatgctgaaaaaattggctctgtgatgacagcccacaaagaagtaaaaaaaatcacttttactggctccactgctgttggaaaacacttgctcaagcaatcggcagatactgtaaaaaaagtttctcttgagctaggaggtcatgccccttttattgtctttgaagacgcaaatcttgaggatgcagttgatggtgcgttgattgcaaaatatagaaacagtggacaaacatgtgtttgcgccaataggatttatgtccaatcaagcatctatgacgatttttctaagcgcttcactgagaaagcctctcaattggtggttggtgacggtcttgcagagtccacacagcaggggccattgattagcgaagatgccatgaaaaaagcgtcaaaacatgttgaggatgctaaaaacaaaggtgcaactattgccacaggcggaaatccacattcgctaggcgggttattttttgagcccactgtgttaactggggtctcagatgaaatgttgattgcacaagaagaaacgttcggcccagtcgcaccaatttttagtttcgataggaaaaagaagt

SEQ ID NO: 212921 - DNA, 169 bp, Unknown
  Bacterial polypeptide expressing nucleotide sequence isolated from the Sargasso Sea
aaaagggtagcgagaaaattaagatctggaatggtcgatgttaatggagctggaatagctgttgacgcaccttttggcggttataaacattctggaattggaagagaagcaggtaaagaaggtttgacagaatttttagaagtaaaatcagttggtggatggaactaac

SEQ ID NO: 212922 - DNA, 850 bp, Unknown
  Bacterial polypeptide expressing nucleotide sequence isolated from the Sargasso Sea
aatgttgaacaaaagaaatttttatataaatggccaatgggtagcaccagcaaagcccaatgattttgatgtaattaatccatctaatgaagaaccttttgcagttatttctttgggaactaaagaagatacagattctgctgtaaaagcagctaaaagtgcatttatcaaatggaaagaaacttcaaaagaagaaagaataaaacttttagaaaaattactagccatatataaaaaaagatctaaagaaatgtccgaggcaatttcaatggaaatgggctctcctatagattattcatcctcgacccatactacttctggccaatctcatttagaagatttcatattaagattaaaagaatttaattttgaagaacattttgatacaaaatcaaacaatcatataagttatgaaccaatcggagtgtgtggtttaattactccatggaattggccaattaatcaaatagctttaaaagtagtccctgcttttgcagccggctgcacaatgatacttaaaccatctgagatagcacctatttcaggaatgctatttgctgaaatgatagatgaaacagggtttccatcaggagtatttaatttagttaatggtgatggagctggagttggaacaaatatatctggccaccatgacattgatatgatttcttttacagggtcaacaagagctggaaaattaatttcaaaaaatgcagctgatacaattaaaagagtttgtttagaattaggaggcaaaggtggcaatattgtttttgctgactcctatcctgatgcagttagagatggaattagaaatgtaatgagtaattctggacaatcatgtgatgct

SEQ ID NO: 212923 - DNA, 151 bp, Unknown
  Bacterial polypeptide expressing nucleotide sequence isolated from the Sargasso Sea
aatcataataaacatagctcaatttttgacgttacgcagacacaagtaattaaaggtaagtttagtagagttttatcttggtatgataatgagtggggtttttctaatagaatgtgtgacactgcaattcaaatagctggattaatttaat

SEQ ID NO: 212924 - DNA, 345 bp, Unknown
  Bacterial polypeptide expressing nucleotide sequence isolated from the Sargasso Sea
aattaagtgggaaactaagtggagtagcagtacgtgttccaacatcaaatgtttctatgattgacctcacgtttacttcaaaaaaacacactacttcagatgaagttaacgaagctgtaagactagctgtaaaaaatggtaaattaaaaaatgttttaagttacacagatgaaaaattagtttctaccgatttttttcataatcctcattcttcaatatttcatactgaccagacatttgtaacgggtagcaaattggttagaatattatcatggtatgataatgaatggggtttttcgaacagaatggctgataccgcagttgagatttcaaaacacttataat

SEQ ID NO: 212925 - DNA, 849 bp, Unknown
  Bacterial polypeptide expressing nucleotide sequence isolated from the Sargasso Sea
cagaaatatctctctggaggaaaaaaagatgtagataaagcagttagtgctgcaaaaaaagcttttgaaacttgggctttctcaaaaaaagaagaaagattagatttattagaaaaattatatgtagtttataaaaaacgttgggcagaaatggcaaaactcatatcacttgaaatgggagcgcccatgaaattttcaacagaaatgcaagccgcaacaggggctagccatataaaatcttttaaaaatattttaaaagattttaaatttgaaaaagatttaggagaagaaaaaaataatcaaaaattactttatgaaccaaaaggagtatgtgctttaattacaccttggaattggccaatcaatcaagttaatttaaaagtaattccagcactagcatcggcttgtactgtagtattgaaaccttcagagatagcaccattatcatctatgttacttgcggaaatgattgatgaagtaaaatttccttctggagtttttaatttagttaatggagatggagaaacaactggagatgcattaacaagccatcctgatgtaaatatgatatcatttactggctctactagagctggtgcgttaatttctcaaaatgcagcaaaagactttaaaagaattagtttagagcttggtggaaaaggtgcaaatataatttttaaagatgctgactctgaagctgtagcaaggggagttctaagatgttttagaaattcaggtcaatcatgcaatgcgccaacaagaatgcttgttgaaaaatcaatttacaatgaaactgtagaaaaagtaaaagaattagcaaataacactaaggtagatgtgccacaaaag

SEQ ID NO: 212926 - DNA, 119 bp, Unknown
  Bacterial polypeptide expressing nucleotide sequence isolated from the Sargasso Sea
tactcaaactcaagtaattaaaggaaagtttagtagagtgctttcttggtatgacaatgaatggggcttttcaaacagaatgtgtgataccactttacaaatcgcatctttaatttaaa

SEQ ID NO: 212927 - DNA, 829 bp, Unknown
  Bacterial polypeptide expressing nucleotide sequence isolated from the Sargasso Sea
tatgaaagataaaaaaaatttttacataaatggtaaatggcaggctccaaaaagtaaacaacaaattgaagttgttaatccttctaccgaagaaaaatgtgcagttataactcttggtaataaagaagatgtcgatattgcagtaagttctgctaaagaagcttatagctcttgggctttttcaagcaaagaagaaagaataaaacttttagaaaaactttatgaaaattataaaaaaaggtgggcagatatctctgaagcaataactacagaaatgggtgcaccaaaagactttgcaactaagcttcaagtgggtacaggagctgcccatattaaatcttttataagacatcttaagaactttgaatttgaaaaacctttaggagatcatgctcccaatcaaagacttttattcgagcctaaaggagtctgtgcattgataacaccatggaattggccaatgaatcaggtttgtcttaaagtaatacctgccttagcatcagggtgcacaatggtattaaaaccatcagaacttgctccattatcatcaatggttttgactgaaattattgatgaaacaaaattcccaccaggagtatttaacctaattaatggcgatggaaatataactggtgatgcactgacgcgacatccggatattaacatgatttcttttactggatcgactagagctggtgctttaatttcacaaaatgcagctaatgattttaaaagagtaagcttagaattaggtggcaaaggagcaaatataatttttaaagacgctgatccaaaagctattgaatggggcgccttaagatgtttttaa

SEQ ID NO: 212928 - DNA, 892 bp, Unknown
  Bacterial polypeptide expressing nucleotide sequence isolated from the Sargasso Sea
ttcaatcctgcaactggcgaagtaagttcaaaagttaatcttgcaagtacagcagatttaaatgaagctgtagacgcagcaaaaaaagcttttccaagttggtctgaaaaaacccccttatttcgagccagagtcctttttaaatttaaagaattgatcgaaaaaaattatgatgaacttacaaaaattatagtctcagaacacggcaaggtttatgaagatgccaaaggttctttaaccagaggattggaggttgtagaatttgcttgtggtataccacaacttctcaaaggagaattcacagaaaatgttggtacaaacgttgacagctggtcaatgaggcaaccacttggagtttgtgcgggtattacaccatttaactttccagcgatggtacctatgtggatgtttccaattgcaattgcatgtggaaatacatttgttttaaaaccatcagagaaagatccatcttgttctatgaagttagcagaattatttttaaaagccggtcttcctccgggtgttttcaatgttgttaatggagataaagaagctgtagatgcaataattaataataaagatatctcagcagttagttttgttggctcaacacctatcgcgaaatatatttatgaaaattgcgcaaaaaatgaaaaaagagttcaagctttaggcggagctaaaaatcactgtgtagtaatgcctgattgtgatttagatcaagcagttaatggtttgatgggagcagcttacggatccgctggtgagagatgtatggcacaatctgttgcagttgcagttggtaaaattgctgatcctttagtaaaaagtttatctaaaaaagttgaaacactaaaaattggtcctggattagataagaaatctcaaatgg

SEQ ID NO: 212929 - DNA, 640 bp, Unknown
  Bacterial polypeptide expressing nucleotide sequence isolated from the Sargasso Sea
tatggcaacagacccagcaaaaatctcgccactcaccgagttactccaacgccaacgtgcaagttacttggccgctcctaatcccgattacgctatccgtaaagaacgcttaatccgccttaaagccgccttgctgaaattccaacagccgctcgtcgaggcgctgtcacaggactatggccacagatcggtcgacgacagcttgatttccgacattatgcccgtggtcaataacatcaattacagcctgaaaaacctgaagaaatggctcaagccaagccgccgtcatgcgggcatcttgctcgcccccgcccaagtgaaagtgcattatcagccactcggggtgattgggataatcgtgccttggaacttccccgtcatgctctccatcggccccttagttacggccatcgccgcaggcaaccatgccatgctcaaactctcggaattcactcccgcgaccaatagcgtcatcaagcaattgctcgctgaagtgtttgaggaatcccatgttgccgtggtcgaaggggaagccgatgtcgcggcgcagttttccgccctgcccttcgatcatctgctgttcaccggttcaaccacagtcggtcgccatgtgatgcgcgccgccgctaataatctcacg

SEQ ID NO: 212930 - DNA, 646 bp, Unknown
  Bacterial polypeptide expressing nucleotide sequence isolated from the Sargasso Sea
catcgtctcatgctcgaacatcaggaagacttggcaaggattataacgcatgaaggcggcaaaccactctctgaatcgatgggtgaaattgcctatgctgcgtctttttttgaatggttttcagaagaagcgaaaagagtttatggtgatgtaattcctggtcatcagcaggatcgtagaacgcttgtgatcaaacaacccatcggcgtcgttggctgtatcactccatggaattttccatcggcaatgttggcaagaaaaatcgcgcccgctatagcagttggctgcacggtggttgcgaagccagcaccagaaacaccctattctgcaacagctatggcgtatctctctgagcttgctggcatccccaagggtgtatttaatgtggtcacaggcgatgctgaaaaaattggctctgtgatgacaaccaacaaagaagtaaaaaaaatcacttttactggctccactgctgttggaaaacagttgctcaagcaatcggcagataccgtaaaaaaagtctctcttgagctaggaggtcatgccccttttattgtctttgaagacgcaaatcttgaggatgcagttgatggtgcgttgattgcaaaatatagaaacagtggccaaacatgtgtttgcgcccaatagg

SEQ ID NO: 212931 - DNA, 882 bp, Unknown
  Bacterial polypeptide expressing nucleotide sequence isolated from the Sargasso Sea
aatgcgagatttacttagaggcgttgctgaaaaaagcattgtaaatgaaaaagatatcgcgtcaattatttgtgctgaaagcggcaagccattaatagagtgtttagacgaaatagagtggatctcttctatattcgagtattattcagaaataggacgagatcagagaggtcgtgttgtcgctccagttgcgcctaattctatgagcatggtagttaaagagtcatatggtgtagtgggctgcattgttccttggaattaccctctccttttaatggcttggaaggtcgcaccggctcttgctgcaggaaatactgttgttgtaaaaccatcagaattaactcctttatctactttgcattggctagacgtcgcctgcaatcatttgcctaaggggatattaaacgctgtcactggatccggaaatactggagaaaatttggtaaggcaccccgacacaagggttattgctttcaccggaagcgtagatactggtaaaaaaattgcagtaatggcagctaagcaattaaaaaaaacgagcttggaactgggcggaaatgatccgattattatttgtgatgatgtggacatagagattgctgctagaggtacagcatggggggggctgctgaatgctgggcaggtttgcacttctattgagcgtgtgtttgtgatggaatcaatagcagattcttttatagaggccgttgtagaagaagcaaaaaaggttcgcctgggagaccctatgaatgggcaaacagatatggggcccttggtttctgatgatcagctaaaaaaaactttagctaaaacaagccatgcaaagttagagggtgcacgcttactttgtggcggtaagaaaccggaagcttttgaaaaggg

SEQ ID NO: 212932 - DNA, 665 bp, Unknown
  Bacterial polypeptide expressing nucleotide sequence isolated from the Sargasso Sea
ggtacaggctgctaaaaaagcttttgttaaatggaaagaaacttcaaaagaagaaagaataaaacttttagaaaaattacttaatatttataaaaaaagatttagtgaaatggcgaaagcaatgtcaatggagatgggagctcctattgattttgcaacatcagttcatactgcttctggacaatcacacatagaagattttatattgaggttaaaaaattttaaatttgaagaaaattttaataataaatctaataattatataggccacgaaccaataggagtttgtggattaattactccatggaattggccaattaatcaagtggcattaaaagtaataccagccttagcaactggctgtacaatgatacttaagccatctgaaatagctcctatttcagcaatgttatttgctgaaatgatagatgaatctggttttcctgcgggagtttttaatttagtcaatggagatggtgcgggagttggaacgcaaatatctggtcatccggacattgatatggtttcgtttactggttctacacgtgcgggaaaacttattactaaaaatgccgctgatacaattaaaagagtttgtttagaactaggtggtaaaggtggaaatatagttttttcagactcataccctaatgctgtaagagatg

SEQ ID NO: 212933 - DNA, 762 bp, Unknown
  Bacterial polypeptide expressing nucleotide sequence isolated from the Sargasso Sea
attgggagaacaacaatctgaggtgatattaggtttaaaatcagatttagatcaagcagtagatattgcaaaaaaagcttttgagacctggtctttaaaaccaccaattcaaagagcaagaattatgtttaaattcaaagaattaattgaaaaaaattctgatgaactaactaaaatgattgtctctgaacacggtaaagtttatgaagatgcaaaaggttcattagtaagaggacttgaagtcgtcgaatttacttgtggtatcccacaagttttaaaaggagaatttacagaaaatgttggtacagatattgatagttggtcaataagacaaccccttggtgtttgtgcaggaataactccatttaattttccagccatggttccaatgtggatgtttcctatggctatagcttgcggaaatacttttatattaaaaccatcagaaaaagatccttcaatttcaattaaattagcagagttgttcaaagaagctggattgccggatggagtatttaatgtgataaatggtgataaggaagtagttgatgcgattttaactaacaaagacattaaagccgtaagctttgtgggatcaactcctattgcaaaatatatttatgagaatgcagcaaaaaatgaaaaaagagttcaagctttaggaggagcaaaaaaccactgtgttgtaatgcctgattgtgatctagatcaagcagttaatggtttaatgggagcagcctatggctctgctggtgaaagatg

SEQ ID NO: 212934 - DNA, 784 bp, Unknown
  Bacterial polypeptide expressing nucleotide sequence isolated from the Sargasso Sea
atgaaattaagtcattcaaaaattaaagaagtaaaatcaaatatagactttccttcacaaatatttattaatggcaagtatcagtattcagcatctgaaaaaatttttgaaaatatttcacctatagacggaaagataattaataaagttgcttttgcacaacaagcagacatagatttagctgttttaaaagctagagaagcttttaataaaggttattggtctaatttaccacctggccaaagaaaaaaaattctattaaaatttgcacaattattagaacgtgatcgtttagaattagctctattagatactgtcgatatgggtaaaactattaatgacacctataatgctgatctaccaacaagtattgataatattgaatggtatgctgagataattgataaattatttgatgatatttctcctagctcaaaagagtatatggggttaataaccaaagaaccagttggagttgttgcggcaatagttccttggaattatcctctatggatggctatatggaaaattgctccagcattaatcactggaaattctgtaatattaaaacctgctgagcagtctcctatgagtgctataaaaattggagctttactctctgaagcaggagtaccagatggtgtattttctgtactgccaggtgacggaccaataacaggtaaatctttatgtctacataatgatattgattgtgttgcttttactggatcaggtgaggttgggaaactcgtattacaatattctggtcaatcaaacagaaaag

SEQ ID NO: 212935 - DNA, 720 bp, Unknown
  Bacterial polypeptide expressing nucleotide sequence isolated from the Sargasso Sea
catggaattaaaaaataaatcattatttaggcaggaatgttatattggaggcaattgggttcagagccatagtaatgaaaaaattgaagtagataatcctgtagatcaaaaaataattggttttgttccaaaatgtggcactaaagaaacaaaaaactctataaatgaagctgatatagctttcaaaagttggaaaaacaaaacggctaaagaaagatcaaatatattaaaaaaatggcatgatcttattttgaaaaatattgatgacctagcttacataatgacaatagaacaaggaaagccacttgcagaagcaaaaggtgaaatattaatgggcacaacatatattgagttttatgctgaagaagcaaagagagtttatggagatataattccagatcctttacctgacagaagaattgttgttatcaaacagccagttggagttgttggcgctataactccgtggaattttccaagtacaatgattactagaaaatgcgcacctgcacttgctgttgggtgtactgttgttgttaaaccagcaagtcaaacacctttctctgctttagctcttgcagtcttagctgaagaagcaggttttcccaaaggagtctttaatgtaattactggttccgcatctgaaataggtaaagaattaactgaaaatccaatagttaaaaaaatatcttttacaggatcaacagaagttggaaaaat

SEQ ID NO: 212936 - DNA, 802 bp, Unknown
  Bacterial polypeptide expressing nucleotide sequence isolated from the Sargasso Sea
ggtggtaaatggatagagagtatttcaaataatcgtattgaagttgataatccagctaataaagaaattattggatatgttccagaatgttcaactgaagaaacgaaattagcaatcaataaagcaaacaaagcttttccatcttggaaggctaaaacagctaaagaaagatctataattttaaaaaaatggtcaagactcattgaagaaaatgtagatgatcttgctacaataatgacaatagaacaaggaaaaccacttgcagaagcaaggggggagattttaatgggtgtttcatatattgatttttatgctgaagaaggaaaaagggtttatggagatattattcaagatccacttccagatagaagaatacttattataaaacaacctgttggtgttgttggtgctataacaccttggaattttccaagtactatgattaccagaaaatgtgcaccaggattagcagtaggatgtacagttgtaatcaaacctgcaagtcaaactccattttcagcacttgcacttggagttcttgcaaaagatgcgggttttcctgatggtgtaataaatataattacaggttctgcaaaagacataggaaaagaattaacagaaaatcctatagtaaaaaaaatatcttttactgggtctacagaagttggaaaaatcttattaaaacaaagcgcctctacagtaaaaaaagtttctatggaactaggtggccatgcaccatttatagtatttgatgatgctaacatagatgaagctgtaaaaggagctatgcaaagtaaattca

SEQ ID NO: 212937 - DNA, 938 bp, Unknown
  Bacterial polypeptide expressing nucleotide sequence isolated from the Sargasso Sea
tagtattagttcgcctattgatggccgtatattagctgagaggacgtatcatagtgaagggcaaataaatgctattttagaaaaaacaaaaatggcccagagagagtggcaaaatgttcctcttacagaaaaaggaactatcttaaaaaaatttatagattgctttactagtaaaagtgatgagctatcgagagagattacgttacaaatgggacgtcctatcaagtttgcaccaggtgaaattaatgggacaagagaaagagcagagaaaatgattaacttggcggagataggcctacaggatacagagtgtgggaataaggaaggttttaaaagatatattcaaagaaaccctttaggaacagtctttgtagttgcagcatggaattatccttatttaatagcagtaaatagtgttgtgccagctttaatggccggaaatagtgttatcttaaagcattctgctcaaacgcctttttgcgctgagaggttttatgaggcctttaaagaggccggacttcccgatggactttttgaatatgttcatactaatcatcaagatacggccaaaattataaaggactccagagttgattttgtggcctttacgggatctgttggtggtggatatgctatttgtgaagcatctgcttcaagatttataggaacaggtcttgagttaggaggaaaagaccctgcttatgtttgtcacgacagtgatttaaatcttgcaattgaaagcctagttgatggagcattttttaattcaggtcaatcttgttgtgggatagagcggatttacgttgacgaaagagtttacgataagttcattgaaggatttattgatttaacaaatcagtaccaattgggcgacccacttgatccggatacaaatttaggcccactcgcaaaaatgagcggtgctaaatttgttagag

SEQ ID NO: 212938 - DNA, 823 bp, Unknown
  Bacterial polypeptide expressing nucleotide sequence isolated from the Sargasso Sea
gaagttggaaaaccttttgcagaggctaaaggtgaagtagggggtgctgcagatatatttgaatggaatgccgaagaaacaaaaagaatttatggacaaacagttgaaagtagatttgaagatactagagtgcatgtatactatcaaccagttggtgttgttgcagcattaacaccttggaattttccagcagttttgtcagcaagaaaaatttcaactgctttagcagctggctgttcagtaatagttaaacccgatgtaattactcctggtattgtaatggaaatggttgatatctgtagagaatgtggtgtgcccccaggtgttgttaatcttttatcaggtgatccaccaagtattgcacaacaactaatagcttctgatattatcaaaaaaatttcaataacaggatcatcaagagttggaaaattaatattaaaacaggcagccgataaagttcaaagagttacaatggaactttcaggtcattcaccttttatagtattcgatgatgctaatattaaaaaagctgctgatatggcaattgccgcaaaatttagaaataatgggcaagtctgcatatctcccaatagattttatattcatgaaagtaagaaagatgaatttgtaaatttgtttatcgaaaaaacaaaaaaattaaaaattggggatggtatggatcccacaacaaaattgggtccattaactacaaaaaaaagattaaatgaaattgaggaactagttgaaaaaacaaaacaagaaggtgctaaagttttgctaggcggcaaaagacctgctggttttaataaaggcttcttttatg

SEQ ID NO: 212939 - DNA, 796 bp, Unknown
  Bacterial polypeptide expressing nucleotide sequence isolated from the Sargasso Sea
ctggcgctgcgagccggcgtgcctgccggcctgttcagcgtcctgacgggtaacgatacccgtatcctcggcaatgaactgaccacccatccgctggttcgcaagatcaccttcaccggatcgaccgaagtcggtcgggtattgctgcagcaggcggcgagcaccgtgaagaaatgctcgatggagctgggcggcaacgcccccgtcctggtgttcgacgacgcggatctcgacacggcagtggagggtgtcatcgcttccaagtttcgcaataccggacaggcctgcatcagcgccaatcgtatctatgtccaggacgggatctacgacgccttcgcgcaacgcatggcggaacgcgtcgcgcaactcaaggtgggcaatggcctggcggacggcgttcagcagggtccgctgattgatgatggcgcggtgactaaagtagaggagcacatcgccgacgcggttgctggcggcgcgcgtgtcaagcttggcggcaagcgccatgctttgggcggctgcttcttcgagccgacgatattggtcgatgtccagccctcgatgatggtcgcgcgcgaggaaacctttggtccggtggcgccattgttccgcttccacaccgaggacgaggcgctgcggctcgccaacgatacggaattcggcctggctgcttacctgtatagccgtgacgcctcgcgtatctggcgtgtgtcggcggggatcgaatccggtatggtcggcatcaactgtggcctgatttcgaatgaggtggcgccgtttggcggcgtcaagcagagcg

SEQ ID NO: 212940 - DNA, 856 bp, Unknown
  Bacterial polypeptide expressing nucleotide sequence isolated from the Sargasso Sea
gataggttatcgaagtggcttactttagaagttggcaagcctctttctgaaggcgcgggcgaagtagggggtgcagctgatatatttgaatggaactctgaagaaacaaaaagaatttttggtgaaataaaccaaagtcgttttcctaataccaaaatacatgtgatttatcagcctgttggcgtagtggctgcattagttccttggaattttccagttattttagcatcaagaaagatttctactgctttagctgctggttgttcagttatagttaaacctgatgtaataactccaggtagcgttatggaaattgtcgatatatgtaaagaagctggtgttcctccaggcgtggtcaacctattatctggcgatccagcagctatttcttctgaattaattcaatctgatattattaaaaaaatttctattactggatcaactagggtaggtaagttaattcttaaacaagctgctgataaagtgcaaagagtaacgatggaattaagtgggcactctccatttatcgtgtttgatgatgttgatttaaataaagtaacagatatggctataacagcaaaatttagaaataatggtcaagtttgtatttctcctaacagattttatatccatgaaaaaaagaaagatgaatttgctgatctgatggttaaaaaaacaaagaaactaaaaatgggtaatggtatggataaagacactttgctcggacctttatgtacaaaagagagactagaaggtgttgaaaggttggttgaaacaaccaaaaaagagggtggaaaagttctcttgggtggtaaaagagccgcaaactttaacaaaggctattattatgacccaa

SEQ ID NO: 212941 - DNA, 546 bp, Unknown
  Bacterial polypeptide expressing nucleotide sequence isolated from the Sargasso Sea
aatgaaaaatcatgaaaatatttatatcaatggagagtgggtttcctcaggtggagacggctcaattgaagtaatgaatccttcaacagaagaagttgttggctctatccctgacggagttgcctctgacgttgacgcagcggtcgagtctgctcgtgcagctttcccggcgtggtccgctcttagtttggaagatcgcttgtcctttattgaaggtttagcaggtcaattagcagcacgtagcgaggaagttggggaacttatttccactgaaatgggtatgccacagcctttagcaaacataatccaagctggtttacctgctggaactacagccagtgtgttagaaactgctcgctcttttgcgttcgaagaacaaatgggaaacactttggttacccgtgaaccgatgggggtcgttggctgtataacaccttggaactatccgctacatcaaatcatggcaaaggtggctccggcattagcagtaggttgcacggtagttctaaagccaagtgaggtcgctcctctaaatgctttcttatt

SEQ ID NO: 212942 - DNA, 761 bp, Unknown
  Bacterial polypeptide expressing nucleotide sequence isolated from the Sargasso Sea
gttgttgtaagagattcagaaaatcctgaagatctaatcaaaagggcaagtctacttagaaatgacagcgttcatggaacatttccaggaacaatcagagtaaacagaaaaaataactctttaatagtcaatggtaacgaaattgtgtttatttatgccagtgatccaagaaaagtagattacaaaaaatatgggatcaaaaaggctactataattgataatactggggtttggagagatgaagatgggcttaaaaaacatgtcaaaaacccatcagttgaaagagttgtgcttaccgctccaggaaagggcaaaattaaaaatattgtatatggcataaatgatcataaagtcagcgaagaagataagattttaggtgctgcatcttgtacaacaaacgccattgttccagcactcaaggttgttgatgataattttaaaatcttaagtgggcatattgagaccgtacatgcctatacaaacgatcaaaacttaatagataactatcattcagctgacagaagaggcagaagtgcggccttaaatcttgttattacagacacaggtgcagcaaaagcaatttctagtatcttgcctgaacttaaaggaaaaataacagctaatgcgatcagagtgccgacaccaaatgtgagtctggctatcatgcaccttaatattaaaaagggtgtttctgttgaagatttaaatcaatgtttcagaaatgcagcctttcactcaaacttaagaactacaattgacta

SEQ ID NO: 212943 - DNA, 907 bp, Unknown
  Bacterial polypeptide expressing nucleotide sequence isolated from the Sargasso Sea
aaagaaaggggtaaccgtaaaacatggttagacaaaaaaaatttttacattaatggagcgtgggttaagccaaatagttctgaggaaattaaagtaattgatcctgctacagaagaaaattgtgcagtaattactttagggaacaaagctgatgttgataatgctgttaatgcagctaaagatgcctatgaatcttgggccttttcttccaaagaagaaagaattggattattagaaaaactttatgaaaattataagaaaagatgggcagatatagcagaagctataactcttgagatgggtgctccaaaagattttgcaacaaaattacaagctggtacaggagcaagtcatatcaaatcatttattagatatttaaaaaattttgaatttgaaaaaccgttaggagatcatgctcctaaccaaagattaatttatgaaccaaaaggtgtttgtgcattaataacaccatggaattggccgatgaaccaagtttgcctaaaggtaatgccagcaattgcatcaggttgtacaatggtcttaaaaccatcagaattagcaccactctcatcaatgatacttgctgaaattattgatgaagtaaaatttccaaaaggtgtgttcaatttagttaatggtgatggagcaacaacaggcgatgctctcacaagtcatccagatattaatatgatatcttttactggatcaacaagagcaggagctttgatttcacaaaatgctgctaaagattttaaaagagtaagcttagaattaggaggcaagggtgcaaatataatttttaaagatgctgatccagaagctattgaaagaggtgctttaagatgttttagaaattctggacaatcttgtaatgcaccgacaagaatgttagttgaaaaaatcaatg

SEQ ID NO: 212944 - DNA, 943 bp, Unknown
  Bacterial polypeptide expressing nucleotide sequence isolated from the Sargasso Sea
tggtttgctgaagaagcaaaaagaatttatgttgatattattcctgatagactttctgatagaagaataattgttattaaacaacccgttggtgtagtagctgctataactccttggaattttccaagttctatgatcacaagaaaatgtgctccggctttagcagttggatgtcctgttgttattaaacctgcaagtcaaactcctctttctgctttagcactagctgtacttgcagaagaagctggttttccaaaaggagtaattaatatcattacaggtgacgcaaatgaaataggaactgaaatgtcttcaaatccgattgtaagaaaattatcttttactggatcaaccgaaattggaaaaattttattagctcaatgctcaaatactgtaaaaaaagtttctatggaacttggtggtcatgcgcctttcattgtttttgatgatgctaatattgaagaatctgttgtaggggccattcaaagcaaatttagaaatacaggacaaacttgtgtatgcgcaaatagaatttttgttcatgaaaaaatatatgatgaatttttagaaaagtttactagggctgtatctaaaattaaagttggtgatggttttgcagatgatactacttctggaccattaattgatgaatattctctaaaaaaagttaaagaacacgtaaaagatgcaataaataacggggctagtgttgcaataggtggggatatacataggcttggaggcaatttttatcaaccaactgttctttctaatgtatcaatgaaatcaaaaattacttatgaagaaacatttgggccagttgctcctttatataaattctctaatgatcaagaagtaattaaaatggcaaatgatactccatatggattagcaacatatttttattctagagatattggtagagcttggaaagttgcagaag

SEQ ID NO: 212945 - DNA, 803 bp, Unknown
  Bacterial polypeptide expressing nucleotide sequence isolated from the Sargasso Sea
gattcaatcagatataattaagaaaatttctataacaggttcagtaagagttggaaaattgatattaaaacaagctgctgataaagttcaaagagttacaatggaattaagtggtcattcacctttcattgtttttgatgatgctgatgtaaaaaaagcagctgatatggcaatttctgcaaaatttagaaataatggacaggtttgtatctctcctaatagattttatattcatgaaaaaaagaaagatgaatttgtagatttatttatagaaaaaacaaagaaattaaaaattggtaatggtatggatccagaaacacaattaggtccacttaccactcaaaaaagattaaatgaagttgaagctttagttgaaaaaacaaaaaaagaaggtgctaaagttttattaggaggaaaaaaaccagctggttttaataaaggatttttttatgaaccaactatttttgatgatgtaaaagatgactttactattatgaaagaagaaccattcggaccgttagtcccaatgttatcatttaaatcttttgatgaagtaattgaacgagctaataatcatgatcttggattatgtagttatgtttgtacaaattctatggaaattgcacatttagcttcagaacaacttgaaacaggatctgttgcagtaaatacaggttttgtagctattgctgaagcaccttttggtggtatcaaacaaagtggatatggtagagaaggtggatcaaatgctattaaagattatttaaatgtcaaatatactcatttaggtattaaaggttaat

SEQ ID NO: 212946 - DNA, 505 bp, Unknown
  Bacterial polypeptide expressing nucleotide sequence isolated from the Sargasso Sea
tatgtatagtaaatttggacaattcatcgatggaaaatggcaacaagctgaaaaaaaagaaacatacgaggtaattaatcctgcaactgaagaagtgatcggtaaagcttctaaagcctcctctgtagatgtagacaaagcattaaaatcggctgaaaaaggtttaaaggtatggcgcaatacaccaccttggcaaagatcatatattataagaaaaattgctgacttaatgcgagagaaaaaaaataatcttgcaaagtggcttacattagaagttggcaaacctttagctgaaggagttggtgaagttgggggagcagcagatatttttgaatggaacgcagaagaaacaaaaagaatatatggacagactgttgaaagtagatttcctgactcaagagttcatgtttattatcaacccgttggtgttgttgctgcattagtgccgtggaactttcctatagttttagcttctagaaaaatttctactgctttagctgcaggt

SEQ ID NO: 212947 - DNA, 258 bp, Unknown
  Bacterial polypeptide expressing nucleotide sequence isolated from the Sargasso Sea
ttgaaactgaggaagaagcaatagcaattacaaatgatacatcttatgggcttggtaattatctacaaactgaagataaagaaaaagcaaaaagagttgctagaaaagtaagagctggaacagtttatatcaatggccaagccacagatactggtatgccgtttggtggttataaacaatctggtaatggtcgtgaaggtggtgtctggggtttcactgaatttttagaagttaaagcaattaccggttggaattaat

SEQ ID NO: 212948 - DNA, 874 bp, Unknown
  Bacterial polypeptide expressing nucleotide sequence isolated from the Sargasso Sea
atgactaatactgttactactattaacccttacaccgaacatccgattaaagagtatcgcctgctggatgaaaaagccgcgcagcaggccgtggataacgccgataaatgtttccaaagctggaagcttgtcagtatcaaggagcgggcagcgttagcgctgaacctggctaaggtgctggaaagccagcaacaacagctggcacagctaatgactgatgaaatgggcaagcttaaagcgcaggggctacaggaagtgcagctttgcgccgacatttgtcgttacacggcgaagcaggcggcagaggtattagcggacgagcagcgtaatacggaaaacggccgcgccatcattagctaccaaccaattggcgttgttttgggtatacagccgtggaattttccgttgtatcaggtgatccgctacagcattgttaacctggtggccggcaataccacagtgttaaaacatgcgtccaacgtgtttggcatggcagaaaaaattgccgccatgtttcttgaagccggttttccgacgcattgttatcagtccttgctgattgatggcgataccgctaccggcttaatcagccatcctaagatacgcggtattagctttaccggcagcgacgaagttggtaagtcggttgccgcagcggccgcgaagctggcgaagaaaaccgttctggaactgggtagcaacgacgcctacctgatcctggatgatgccgatattgaactagcggtgaaaacctgtgttgaaggccggatggtaaataacggcgaaacctgtgtggcggcaaaacgctttattgtgacagagaaaaactacgccgattttaaacatgcctttgccacggcgatggcgcattgaa

SEQ ID NO: 212949 - DNA, 538 bp, Unknown
  Bacterial polypeptide expressing nucleotide sequence isolated from the Sargasso Sea
gcaaggtaaacgtctagctgaagcaaagggtgaaatactaatgggtgcttcatatattgaattttatgctgaagaagctaaaagagtgtatggtgacatagttcgtgatccaagacttggaaaaagaattgtaataattaaacaacttgttggtgttgttggagcaataactcgatggaattttctaaattcaatgatcacaaggaaatgtgcagcagctcttggtgttggttgtacgaaagtcgttaagcttgcaagtcaaacacaatattcagcattagctgtagcagtacttgctaaagaagctggttttctagatggtgtatttaatgtaataattggattggcaagtgaaattggtaaagagctaacaagcaactttattgttagaaaaatttcttttattggatttacggaggttggaaaaatacttttagagcaaagtgtttcaatagtaaaaaaagtttctatggaatttggtggtcatgcatcatttattgtttttgatgatgcagatatggatgaagttgttgtagga

SEQ ID NO: 212950 - DNA, 1000 bp, Unknown
  Bacterial polypeptide expressing nucleotide sequence isolated from the Sargasso Sea
gtgcgcgcagaagagctggctgaagatcaacgcttacttcctcgtggtgttgtgctgtgtatcagtccgtggaacttcccactagccatctttttaggccaagtggcagcggcacttgtaacaggtaacacggttattgctaagcctgctgaacaaaccagcattattgcgcagcgtgcggtagatattatgcactcggtaggcctgccagaagacgcactgaaacttattgtgtcgcctggtaaagaagtgggcgaaacccttctaccagacgagcgcattaaagcggtaatgttcacaggttcaacgcaaaccggtacgttaatttctcaagtgcttgcagagcgtggtggcgaacaggtgccattgattgcagagacgggcggtcaaaactgtatgattgttgattcaactgcactgccagagcaggtagttgatgacgtgatccactctggtttccaaagtgctggtcagcgctgctcagcgcttcgcgtattgttcgtacaagacgaaattgctgatgatcttatcgaaatgctaaccggcgccatgaaagagcttaccgttggtgatccaacgcagcttgctaccgatgttggccctgttattgacgagaaggcactaaagagcctaaccgatcaccaagagtatatggaagataaagcaaagctgctttatcgcaatgaaatgccagcaggctttgaaaacggtactttctttgcaccgaccttgtatgaaatcaagaacatcgatgtgcttgaaaaagaagtgtttggccctgtggtgcatattgttcgctttaagtcgaaaaaccttgatagtgtgctagagcaaatcaatggcacaggttacggcctgactatgggcattcactcgcgtattgaagagcgtgctaacgagctggcagcgaagagccgcgcgggtaacgtgtacattaaccgcaacatgatcggcgctattgttggcgttcagccgttcggtggacgtggattgtctggta

SEQ ID NO: 212951 - DNA, 677 bp, Unknown
  Bacterial polypeptide expressing nucleotide sequence isolated from the Sargasso Sea
ctggaaaaggtcatataaaattagaaaaattgctgacttaatgcgtgaaagaaaacacgagctagcaaaatggttagcattggaagttggaaaacctttagtcgagggagaaggagaggttggtgggggtgctgacatttttgaatggaacgctgaggaaacaaaaagaatttttggtcaaactgttgaaagtagatttgaagatacaagagtgcaagtaatctatcaaccaattggagttgtagcagctcttgttccatggaattttccaattattttagcttcaagaaaaatttctacagccttagctgctggatgttctgtcattgttaagcccgatgtaattacacctggcgctgttatggaactaatgaacattataaatgatgctggtataccgcccggtgttgttaatcttttatctggagatcccgaggaggtttcaaatgaacttatatcttctgatattgttaagaaagtttcaattactggttccactagagtaggaaaacttattttgaaaaaagcggctgacaaagttcagcgagttacaatggaattaagtggacatgccccttttattgtatttgaggattcaaatattgacaaggttactgatatggcaattacatctaaatatagaaataacggtcaggtttgtatttcaccccagtaga

SEQ ID NO: 212952 - DNA, 461 bp, Unknown
  Bacterial polypeptide expressing nucleotide sequence isolated from the Sargasso Sea
aatgcaagaagttctgaaacttcaaagagaacattttttaaatgaaggaccgccttcatatgaattaagaatcgatagattagacagagttcaagatatggttattcaaaataaagaaagaattactgaagcattaaatgctgactttggatcaaggtcagctaatcaatctttaatatctgatgtttatgctattctccctgcattttctcatgcaaaaaaacatttaaagtcctggatgaaggatgagaagagaaagtctaacttcccatttggactgatgggagcaaagtcatatatccacagagagccgcttggagttgttggaatgatatctccatggaactttccaatgtatttatctcttgctcctttagctggaatctttagtgctggtaatcaggtaatgcataagccaagtgaatttactcctattacttctgaacttcttaaagaaattt

SEQ ID NO: 212953 - DNA, 778 bp, Unknown
  Bacterial polypeptide expressing nucleotide sequence isolated from the Sargasso Sea
gaagactcttaccttggaaatgggaaagcctataaacgaagcgaaaatagaaatgggtttcgttatcgatgtcacgcgttggtacggcgaggagggtaagcgggcttacggacgtttgatccctgcgcgggtgcctggtgcacgccaaatggtgatcaaagaacctgttggaccatcgtgtgcttttgttgcttggaattttcctggaacaaatgtgatacgtaaagttgcgggtgctcttgcagctggttgctccatgcttataaagccgagcgaggaaacaccaggaactgcggtggctattgctcggtgtttccaagaagcaggcttgccaaacggtgcattaaatgtggtctttggaattcctgacaatgtatcgaggaaagttttagggtcttggatcccacggaagatgtccttcactggttcaattcctgtcggcaagcaccttcaaaaacttgcagcggataccatgaaacgatgcacaatggaactaggtggtcactcgccggttattgtgtttgacgatgcggacattgaaaatgctttaaatatcaccgcaggttttaagtttcgtaatgcgggtcaagtttgcatttctccaactcgtttttatgtacaggacaaggcttataaatcttttgttgatggttttactgaccgagctcgagcgatcaaagtcggaaacggtatcgaagacggtatacaaatgggtcctctaattgatgctagacgtcttccaataatggaggattttgtgtcggatgcgaaagatcgg

SEQ ID NO: 212954 - DNA, 757 bp, Unknown
  Bacterial polypeptide expressing nucleotide sequence isolated from the Sargasso Sea
atgagcctgtcttcgctagaaaagaacttgaatcagttacaagacttgcgcgagagatttagacgagaaccgatcaaacattttattgacggagagtgggtaagctcgagtaacaaagaaacattcataaatggttcaccaatcgatgagtcgataattggagaggtagcattaggcacgcagcaagatgtagatgaggcttgccaagcggcgcacaatgcgttctcagattgggcggcgatgtcgggagcaaagagacgggagctgctgcatgcgattgcagattcaatagaagccaatgccgaggaaatagcccttgttgagagtttggatacggggcaaccaattcgctttatgagcaaagcggccattcgaggagctgaaaactatcggtattttgcagatatggcgccgagcgctcgtgatggtctagcgttaccagcgcagaagcatatgaactatacggtacggcaaccgattgggcctgttggtgtgatcactccatggaatacacctttcatgctttccacatggaagattgcaccagcactggctgctggttgcaccgttgttcacaagcccgccgagtggtctccatgtacagcagcacttttagcaaggctgatggaagaagcaggtttgccgaaaggagtgataaatactgttcatggtttaggtgaaaccacaggtaaagcgctgacagagaacgcattaatacgcgcaattgcttttgttggtgagtctgcaactggaagca

SEQ ID NO: 212955 - DNA, 913 bp, Unknown
  Bacterial polypeptide expressing nucleotide sequence isolated from the Sargasso Sea
acagataacgcagttaaagctgcaaaaactgcatttaaaacctggaaagaaactagcaaagaagaaaggttggatttgctggaaaaattattagtagtttataaaaaaagatttggtgaaatggcagaagctatttcgctagaaatgggagctccaatggattgggctactgatgttcaaactggatcgggacaagcacatttagaagattttattttaagattgaaagaatttaattttgatgaacactttgatcaaaaatcaaacaaccatatttgttatgagccaattggagtatgtggattaattactccatggaattggcctataaaccaaatagctcttaaggtcgtacctgcatttgcaactgggtgtacgatgatacttaaaccttctgaaatagctcctatctctgggatgttgtttgctgaaatgattgatgaagttggatttcctgatggtgtatttaatttagtaaatggtgatggcgcaggtgttggaacacaaatatcaagtcatcctgatattgatatggtttcttttacaggatcaactcgtgctggaagacttatttcaaaaaatgcagcagaaacaattaaaagagtttgtttagaacttggaggcaaaggtgggaacatagtttttgcagatagttacaaaaatgctgttcgagatggcataagaaatgttatgagtaattctggtcaatcttgtgatgcaccaacaagaatgttagttgaaaaatctatttacaaaagagcagttgatgaagcagttgatgaagcaaataaaattaatgtagatcaagcctcaaagaaaggggatcacataggacctgtaatatccaaaactcaatatgacaagatcatcaatttaattgaaagcggaatttctgaaggtgcaacgttagcag

SEQ ID NO: 212956 - DNA, 281 bp, Unknown
  Bacterial polypeptide expressing nucleotide sequence isolated from the Sargasso Sea
tgtcctttcaattctcccttacaaagacgaggaagaagcggtgaacatagctaacgatactgaatacggtctttatggttatgtctcatcaggagatgtagaacatgccaaaaaggttgcaaacagaattagagcagggagtattgccattaatggtgctcaagcagactttactgctccttttggaggctataaacaatcaggtaatggtaaagaatggggtccttttggatttgaagaattcctagaaaccaaagctgtggttgggtacgctgactaaa

SEQ ID NO: 212957 - DNA, 760 bp, Unknown
  Bacterial polypeptide expressing nucleotide sequence isolated from the Sargasso Sea
cctgatcaacggccggtgggaaatcggcaccaccaccggcgtcagcaccaatccgtcggacacccgcgaggtggtggccgagtacgcccgcgccgaccgcaaccagaccgagctggccgtgcgcgctgcggccgatgccctgcccacctggagccagagcacgccccaacgccgcgccgacgtgctggacatgatcggcagcgagctgctggcccgcaaggacgagctgggcgcactgctggcgcgtgaagaaggcaagaccctgcccgaaggcgtggccgaggtggcgcgcagcgggcagatcttcaagttttttgcgggcgaggcgctgcgcattcagggcgagctgctggcctcggtgcgccagggcgtgcaggtggacgtgacccgcgagcccgtgggcgtggtgggcatcatcgcgccgtggaacttccccttcgccatcccggcctggaagatcgccccggccctggcctacggcaacaccgtggtgttcaagcctgccgaactggtgcccgcctgtggctgggcgctggccgaaatcatcagccgcagcggcctgcccgccggtgcgttcaacctcatcatgggcagcggccgcgaggtgggtcagacgctggtggaccaccctctggtcaacgcgctgagctttaccggctctgtatccaccggcgaccgcatcctgcgcgcggcctcagcacggcgcgccaaggtgcagctggagatgggtggcaagaacccgctcatcgtgctggccgac

SEQ ID NO: 212958 - DNA, 957 bp, Unknown
  Bacterial polypeptide expressing nucleotide sequence isolated from the Sargasso Sea
ccctggctgcaggatgcacgatggtggtcaaccctgcggaagccacacctctatgcgcaaaagctgtctttcagatttttgagaaagcctcatttccaccgggtgttgtgaatctcgtgaccgcagataatccaaaacccatcggcgatatgttcatcaacgatgcacgaatccgaaaaatcaccttcaccggttccacaaaaatcggaaaaatgctggcagaaggggcaggaagaggtttaaaacgaatctccctggaacttggcggacacgcaccgttcatcgtttgtgccgatgccgatcccgttcatgcagccaaagggttgtcattggtgaaatttttaaattccggacaggcttgcatcagccccaaccggatctatgtccatgcacgacaggaaaaagcctttcttgatgaactcaaatcgagggtctcaaaattaaaggccgggccaggtctggagcaggattcgaagatcggaccgttgatcaatcagcaagccctggaaaaagtggaaaatcaggttcaggatgcccttaaaaagggagcaaaactgatctccggaggcgaacgaatcagagatgattcatgcaccaatggttttttctatgctcccaccatcctcaaccaggtcactcctgaaatgttaatctatcgggaagaaacctttggaccagtggctccggtaatcatctaccaggatgaagacgatcttttggaaatggcaaacgacacccattacggcctggcgtcttatgtctacacacaaaacttgaaatctgccatgtggctttttgagggattggattttggaattgttggaatcaatgatatcaatccaacctcggcggcggctccgttcggcggaatcaaggatagcggaatcggcagagaaggagcatcagaaggcatccacgaatacctggaaaccaaactaggagggttttcgatataat

SEQ ID NO: 212959 - DNA, 784 bp, Unknown
  Bacterial polypeptide expressing nucleotide sequence isolated from the Sargasso Sea
tggaaagaaactttagtagatgaaagaataaattttttagaaaaactactaaaagtttataaaaaaaggtttaatgaaatagctgaagcaatgtcaatggaaatgggatctcctattgattatgcaaccatggtgcatgctgcatctggtcaagcacatttagaagattttatattaagattaaaaaattttaaatttggagaagattttaattctaaatctaataattatatagctcgtgaaccaattggtgtatgtggcctaattactccatggaattggccaataaatcaaatagcccttaaagtgatacctgccttcgcaacaggttgcactatgatactcaaaccatctgaaatagctcctatatctgcaatgttgtttgctgaaatgatagacgaagctggttttccgccaggagtatttaatttggtaaatggtgatggagcaggagttggaacagatatttctggtcaccctgatattgatatgatttcgtttacaggatcaacaagagcaggaaaattaattacaaaaaatgctgctgatacaattaaaagagtttgcttagagttgggtggcaaaggaggaaatatagtattcgcagattcttatccaaatgcagttagagacggaattagaaatgtaatgagtaattcaggacaatcttgtgacgctccaacaagaatgcttgttgaaaaatctatttatgaaagagctattaaagaagcagctgacgaagcaaataaaattaaagttgatcttgcctcaaaaaaaggagatc

SEQ ID NO: 212960 - DNA, 374 bp, Unknown
  Bacterial polypeptide expressing nucleotide sequence isolated from the Sargasso Sea
taagtcccttggagatattattcctgatttaaaaggtaaggtagagggaatttcaataagggtgcctactcctaacgtatctttagttgaatttattttttcttctaaaaaaaatctttctattaaagaaatcaataatttatttttaaaagcttcaaaatcagaattaaaaaatatacttgatacgaccagcgaaaagcttgtttcttcagattttaatcacaactcacattcatctatagtcgatctttctttaactcaagttgctgataacaaaatggcaaaagtttctgcttggtatgataacgaatggggttttgctaacagaatgtgcgatctagcagtttatttaggaaatttaaataaaaaatgag

SEQ ID NO: 212961 - DNA, 676 bp, Unknown
  Bacterial polypeptide expressing nucleotide sequence isolated from the Sargasso Sea
atagtttttgatgatgcagatattaaaaaagcagctgatatggctgttgcagctaaatttagaaataatggtcaagtgtgtatatctccaagcagattttacatacaagaaaataaaaaagatgaatttataaatttatttgtagaaaagacaaaaaaattaaaaataggtgatggcatggatccctctgttaatttaggacctttaactaccaagaaaagattaaatgaggttgaggagttagtagaaactactaaaaaggaaggtgctaaagttttacttggtggaaaaagaccaaaaggatttaataaaggattttattatgaacctacaatctttgataatataaaagacgattataccattatgaaagtagagccttttgcaccattagttcctatgttatcatttaaaagttttgaagaagttattgaacgagcgaacaatcatgaattaggcttatcaagttatatttgtacaaattcaatggataaggctcatagagcctcagaattaatggaagcaggcacagttgccgtaaatactcccttggttgctttagctgaggcaccatttggtggtataaaacaatcaggttatgggagagaaggcggctctatggcaattaaggattatttgaatgtaaagtatactcatcttgggttgaaaggataaa

SEQ ID NO: 212962 - DNA, 841 bp, Unknown
  Bacterial polypeptide expressing nucleotide sequence isolated from the Sargasso Sea
aatgaaaactataagccattttattgacggaaaaatttatagtgatggtaaatctagaaaaggtccaatatttaacccagcaattggtgaacaaatcgcagaagttgaattaggaagtaaagctactgtagaaaaagctatagaaagttcatctaaagcatttataacttggtcaaaaaccactccaataagtagagctagaattttatcgaaatataaagatcttcttataaaaaatatggaagaactagctgtaatggtttctgaacaacatggaaaaactattgctgatgcaaagggttctatccaaagaggaatagaagtagttgaatatgcaactggtattactgattctttaaagggtgatcattcaacaagtgttggaacaaatgttgactctcatacgctaagacagcctcttggagtttgcgctggaattacaccatttaattttccagctatggttcctatgtggatgtatccagtttcaattgcttgtggaaacacatttgttttaaaaccatcagaaaaagatccaagctgtccgatgagacttgcagaaatagcaatagaggcaggtttgcctgctggagttttaaatgttgtaaatggtgataaagaagctgtagatacattgctcgaaaacaaaacagttcaagcaattagtttcgttggctcaaccccaattgctgaatatgtttatcacacaggtacaaaaaataataaaagagtacaagcactaggtggagcaaaaaatcatatggttataatgcctgatgcagacgtaaataaaacaactgacgcaataataggatctgcttttggatcagcaggagagaga

SEQ ID NO: 212963 - DNA, 391 bp, Unknown
  Bacterial polypeptide expressing nucleotide sequence isolated from the Sargasso Sea
tatggaggaagagatttttggaccaattcttccagttgttaaggttaaaagccttgatgagtcaattaattatgtaaacagcaacgaaaaacctttggccctatatctctttagttccaaatcttcttcccacaatagggttttaaaaaatacttcaagcggtggaatggttataaacgactgtgttttacaccatatgaacccaaaccttccttttggaggaataaacaacagcggggttggtagctatcatgggaaatttggttttgatgcattttcgcaccacaaggccgttttaaggagtagctcgctttctccttttaaaataatgcttcccccttatacaaaaaccaaggaaaccttggctaatctaataaaaaaatatttttag

SEQ ID NO: 212964 - DNA, 802 bp, Unknown
  Bacterial polypeptide expressing nucleotide sequence isolated from the Sargasso Sea
agcttggaaaaaattatcggcttttgaaagatccaaaataatgagaaaagcagctgaaatattaaaatctagaactaaatatattgcagaattaatgactattgagtctggaaaacctattgcagatgcggaaattgaattgggtatgggtatagatcaaatagagtggtttgcagaagaaggaagaagggcttatggaagaataattccatcaagattaaaaatcgtaaatcaatttgtatttaaagaacctgttggtgtagtggcggcttttacaccttggaattggccagttcaacaaactgcaagaaaaattgcacctgcactagctgctggatgcagtataatagtcaaaggccctgaagaaactcctacaagtacagcagaatttgttaaagcttttgatgaagctggaattcctaaaggaactttaaaccttgtttttgggatcccttctgaaatttcaaaatatcttatacctcatccaattgttaaaaaagtaacatttactgggtctacccaagtaggaaagcagctaatgtctctagcaggtcttcacatgaaaaaggtaactatggaacttggaggacattcacctgctataatttgtgaagacgcaaatatagaaacagctgtaaatgtattagtaggaacaaaatttaggaacgcagggcaaatttgtatttctccctcacgttttttagttcataaaaaaatttatgaaaagtttctaaatttatttgtagaaaatgttcggttaaaaaaagttggtaacggccttgaagatgatattaaaatggga

SEQ ID NO: 212965 - DNA, 877 bp, Unknown
  Bacterial polypeptide expressing nucleotide sequence isolated from the Sargasso Sea
aaaaatactacagcgaaagaaagatcaataattttaaaaaaatggagtgatcttataatcgaacatgttgatgatctcgcaaaaataatgacaattgaacaaggaaaaccacttgctgaggccaagggcgaaatattaatgggagcctcatacattgagttttatgctgaagaggcaaaacgagtttatggtgacattatcccagatccaagaccaggaaaaagaatagtcattatcaaacaacctgttggagtagttggagctatcacaccatggaattttccaaattcaatgattactcgaaaatgtgcagcagcactagcagttggatgtacaactgttgtcaagcctgcaagtcaaacacctttttcagctttagctgtagcagagcttgcaaaagctgctggctttcctaatggagtttttaatattattacaggttcagcaaaagagataggaatggaattaactaaaaacccaaaaattaagaaaatatcttttactggatctacagaagttggaaaaatattaatggagcaaagtgcatcaacagttaaaaagttatcaatggaattaggaggtcacgctccttttatagtttttgaggatgcaaatattgatgaagcagtaacaggtgcactacaaagcaaatttagaaatagtggacaaacttgtatttgcacaaatagactttttgttcatgaaaaagtttatgattcttttttagagaaatttacaaatgaggtaaaaaaaataaaagttggaaatggtttaaatgatggtattgtttctggtccactcattgataaatcctcattagataaagttattgatcatgttcaagatgcagtaaatacaggggcaaaaattgcagttg

SEQ ID NO: 212966 - DNA, 366 bp, Unknown
  Bacterial polypeptide expressing nucleotide sequence isolated from the Sargasso Sea
ttacaaacgtaaaaaataatatgagaattgctcaagaagaagtgttcggaccagtactatcaattattcgctttaaggatgaagaggatgctatcaagattggtaacgatatactttttggtcttgcggcaggtgtttggaccagcgatatcggaagagccctcagaatggctgataaacttaaagctggcaccgtttgggttaacacttacagagcggtaagttacatgtctccttttggtggttacaagagatcaggtcagggtcgtgaaagcgggcaggagtgtattaaggagtttttggaaacaaaatcagtgtggattagccatgagacgtcaacggcaaatccctttattattaaataag

SEQ ID NO: 212967 - DNA, 226 bp, Unknown
  Bacterial polypeptide expressing nucleotide sequence isolated from the Sargasso Sea
aatgacacagaatatggtctaggtaattacttgcaaactgaagacaaagataaggcaaaaagagtttctaaaaaacttagatctgggatcgtttatattaatggaaattcaccagatcccggaactccttttggtggatacaaacaatccggaaatggacgtgaaggcggttcttggggattggaagaatatctagaagtaaaaactattactggctggaaataaa

SEQ ID NO: 212968 - DNA, 244 bp, Unknown
  Bacterial polypeptide expressing nucleotide sequence isolated from the Sargasso Sea
aaaattaattctatagttcttcaagcttcaaaaactaaaaaattaaatggaatactaacaacaaactcattacctctagtttcaattgattttaatcataattcaagcagttctgtatttgatatgagtcaaacacaagttgtcaaagataaattctgcagagttttatcttggtatgataatgaatggggattctcaaatagaatggtagacactatggttaatcttaaaaaatttatttagt

SEQ ID NO: 212969 - DNA, 742 bp, Unknown
  Bacterial polypeptide expressing nucleotide sequence isolated from the Sargasso Sea
aaatctcaaaaaagtatctctagagctaggtggaaaggacccaatgatcttatgtgatgatgcagatattgagattgcggctcaaggagcatcatggggaggatttgtcaatgcaggacaggtatgtacaagtattgaacgggtgtatgttttcgaaaatgtaatggatcaattcacagaagcaatcatagaagaagcgaaaaaagtagtcctaggtgatccaatgaaggaagatacacatattggtccaatggcatcaaagctccagcaagaaaaagcaattgaaaaggtaaatcaagcaattaaagatggtgcacgcctattaactggtggtagcgttcctaaaaatttagatagagggtatttctatcagcctacagtgttagataacattgaaccaaatatggaaatcatcactgaagaagcttttagcccggttttgccaatacaaaaagtatcatcaattgaagaagcaattcagtggtctaatgattcagtttatggattggggtgttcaatatttacgaatgatatcgatagggctttgactgctgcagatgatataaaatctggtactgtctgtatcaatagcccattgatggagaatatcgctgcgccatttggagggatgaaacagtctggaatcggaagagagcatggtaaagaggccctagatgagtttcgagaagcaaaacatatttttattgattataaacaagaatcaaaagattggtggttttaa

SEQ ID NO: 212970 - DNA, 517 bp, Unknown
  Bacterial polypeptide expressing nucleotide sequence isolated from the Sargasso Sea
atgaaagtgtcttcggttctagatacctctcatctaaaggttaaatttccatttaaagcaaaatatggaaactacattaatggaaaatttgtagaacctaaatcaggcaaatattttgataatgttagcccgatatctaatgagaagatctgttcagttgcacgatctaacgaaaaagacgttgaagcagcattagatgcagctcacgcagctttccctgaatggggaaagacggacatcacaacaagatcaaatatcttgtataaaattgctgatgttttagaaaaaaacctaaacttattagctgtagctgagtgtttagacaatggaaaaccaataagagaatgtatggcagcagatctacctttggtaattgaccactggagatattttgctggagttattagagctgaagaaggttctattgcggagattagtaataatcaatactcatacaattttcatgaaccattaggagtagttggtcagatagttccatggaatttccccattatta

SEQ ID NO: 212971 - DNA, 152 bp, Unknown
  Bacterial polypeptide expressing nucleotide sequence isolated from the Sargasso Sea
tgcaattaccccatggaatttcccagcggcgatgattacccgcaaggctggaccatcactatcagcgggttgtcctataatcataaagccagctagttctactccattcactgcaactggcttggttgagctggcaaaccgagcagggattc

SEQ ID NO: 212972 - DNA, 196 bp, Unknown
  Bacterial polypeptide expressing nucleotide sequence isolated from the Sargasso Sea
ttacaaactgaagataaggaaaaagcaaaaagagtctctaagaaattgaggtctggaattgtttatattaatggaaatgcgcccgactctggcactccttttggaggttataaacagtcaggaaatggacgtgagggtggtaattggggattggaagaatatcttgaggttaaaaccattactggttggaactaaa

SEQ ID NO: 212973 - DNA, 241 bp, Unknown
  Bacterial polypeptide expressing nucleotide sequence isolated from the Sargasso Sea
gatattgctaatgatactgagtatggtttaggtgctggagtgtttacaaaagatcttaaaaaagcatcttggactgcaagcaaattagaagctggtcaagtatatgtaaataaatggtttaccggaaatcatgcaactccttttggaggttataaacaatcaggatatagccgcgaaaaaggagtagatggacttaaatcttatcttcaagtcaaaaatgttggaattagtttaggttaaa

SEQ ID NO: 212974 - DNA, 567 bp, Unknown
  Bacterial polypeptide expressing nucleotide sequence isolated from the Sargasso Sea
tatgtatgaaaaatttggacaatttattaatggaaaatggcaacaatcttcagataaatctacttatgaagtcataaatcctgctaatgaagaaattttgggaaaagcttctaaagcaacacccgaagatgtaaaccttgcattaaaatctgcacaaaaaggtttagaagtttggaaacaaacacctccctggcaaagatcttatattattagaaaaatagcagacaagatgagagaaaaacaggaagtcttagcaaaatggatgacattagaagtaggtaaaccatttttagaagcgaaaggtgaggttagtggagcagcagatatttttgagtggaatgccgaagaaacaaaaagaatttacggacaaactgttgagagcagatttgtagacacaagagttcacgtatattatcaaccagtaggagttgttgcagcattaacgccttggaatttccctttagttttgtcttcaagaaaaatttcaactgcattagcagcaggctgttctgtaatagttaagcctgatgtaataacacccggaacagttatggaattagttgatat

SEQ ID NO: 212975 - DNA, 829 bp, Unknown
  Bacterial polypeptide expressing nucleotide sequence isolated from the Sargasso Sea
aagattcaacatattaataatagggctgatattgagactgcttgtgccttattaaaaagagatagtgttcacggaaagttcaacgctgatatatcaattgaaaaaaactatataaatattaatggtgataaaatttgttattcacaaaaagataaactggaagaaattaattggaaagacaatgatgttgattttgttatggaatgcactggtaaatttaattctaaggaaaaattaattccacatttaaataatggagcaaaaaaagttattgtttctgctccatgcaaagatgctgataggacaatagtatttggagttaatgaaaaagaacttaaaatggaagataaaattatatctgccgcatcgtgtacaactaattgtcttgcgccagttgctcatgttctaaatgaaaattttgaaattgaaaaaggttttatgactacaattcattcttttacaactgatcaaaggattttggataattctcataaagatcttagaagagctagaacagccagtcaatcaatagtgccgacctcgacgggagcttcaaaagcaattggtgaaattataccttctttaaaaggaaagctagaaggtgtagcaatgagagtaccaacaccaaatgtttccttaattgaattaatattttgctccaaaaaagatttatctgttgaaaaaattaattctgcatttaaaaattttagcaaaaaacagaaaattaaagttttagaaataacggaagaaaaacttgtttcaattgattttaatcacaatccagcttcctctatagtagatgcatcatataacaaatgttataggtaaa

SEQ ID NO: 212976 - DNA, 895 bp, Unknown
  Bacterial polypeptide expressing nucleotide sequence isolated from the Sargasso Sea
attaatccatctaacgaagaagcctttgctattattacgcttggttctaaagaagatactgatacagcggtagaagcagcaaaaaatgcttttgttaattggaaagaaatctcaaaagaagaaaaaataagtcttttggaaaaactgctaaaaatttataaaaaaagatttaatgagatggctgaagcgatgtcaatggagatgggatcacccattgattttgcaacctcaacacatactgcatcaggacaagcccatttggaggatttcatattaagattaaaagaatttgaatttgaagaacattttaactctaagtctaataatcatataactcgtgaaccaataggagtgtgtggtttaattactccctggaattggccgataaatcaaatagcattaaaggtaattcctgctttcgcaactggctgcactatgatacttaagccatctgaaatagctccaatctcagcaatgttattcgctgaaatgattgatgaagtaggttttcctgctggagtttttaatttagtaaatggagatggagctggagttggaacacaaatatctggtcatcctgacatcgatatggtttctttcactggttcaacaagagcaggaaaattaattacaaaaaatgctgctaatacaattaagagggtttgtttagagttaggtggtaaaggtggaaatattgtttttgcagactcctaccctgatgcagtgagagatggaattagaaatgtaatgagtaattctggacaatcatgtgacgcaccaacaagaatgcttgtagaaaaatctatttatgaaagagctgttagagaagcaacagatgaggctaataaaattaaagtaaatattgcttcaaaaaaaggagatcacataggaccag

SEQ ID NO: 212977 - DNA, 939 bp, Unknown
  Bacterial polypeptide expressing nucleotide sequence isolated from the Sargasso Sea
tgatggtaagtggcaacaagcagaaaaaaaagaaacctatgatgtaatcaaccctgcaactgaagaagtgattggaaaagcttcgaaagcttcatctactgaagtacaaaaagcattaaagtcagcagaaaaaggtttagaagtttggaaaaatactgcgccatggcaaagagcatatgttcttagaaaaattgctgatttaatgagagaaaaaaaagatatcattgcaaaatggttaactctagaagttggaaaacctcttacagaagcagttggtgaggttggaggtggagctgatatttttgagtggaatgctgaagaaacaaaaagaatttatggtcaaactcaacaaagtagatttccagatacaagagttcatgtttattatcagcctgttggtgttgttgcagctttagtcccatggaatttcccaattgttttagcctcaagaaaaatttctactgctttagcagcaggatgttctgtaatttgtaaaccagatgtaattactcctggtgctgtaatggaattagtaaacatttgtaaagaagctggagtaccagatggtgtggttagtctgttgtcgggtgatcctgctgaaatttcaaatgaattaatggagtctgatataattaaaaaagtttcagttacaggatcaactagagttggtaaaattattttaaaaaaagcagctgataaagttcaaagagttaccatggaactaagtgggcactcaccatttattgtatgtgaagatgttgatatgaataaagtagctgatatagcaataactggtaaatttagaaataatgggcaagtctgtatttcaccgaatagattttatattcaagaaaatagaaaagacgaatttgttaatgcttttatagaaagagcaaaaaaattaaaaatcggtaatggtatggacaaaggtgttgattt

SEQ ID NO: 212978 - DNA, 766 bp, Unknown
  Bacterial polypeptide expressing nucleotide sequence isolated from the Sargasso Sea
ccggcaatggtgccgatgtggatgttcccgatggcgcttgccacaggcaatacctttgtcctcaaaccttccgaacgcgatccgggagcgccgatgatgctggcgcggctgctcaaacaggctggtctccccgatgggtgtttcaacatcgtccatggtgacaaggaagcggttgatgcgctgctcgacaatcccgacatcgccgccatcagctttgtcggctcgaccgcgatcggcaaatatatctacagccgtggctgtgccaatggcaaacgtgtccaggcgctgtgcggggctaagaaccatatggtcatcatgcctgacgctgatatgggacaggctgtcgatgcggcaatgggcgctgcctatggctcggccggtgaacgctgcatggccatttccgccgtcctggcggttggtgatgacacggcagaccgtttcgtcgaggcactcgcgcccaaggtgcgggcgctgaagattggccagtatgatgagccgggcgtcgagatggggccggtgatcaccgccgagtcaaaagcccgggtcaaggattacatccatcagggcgaggcggctggcgccacggtcgttgtcgatggccgcaatctcaaactgcagggctatgagaacggcttttttgtcgggggtacgctgcttgatcatgtgacgcccgacatgtcggtctatcgtgacgagatttttggtccggttctctcggttatgcgcccgaagagctatgaggaggcgcgccagctggtgatcgacc

SEQ ID NO: 212979 - DNA, 818 bp, Unknown
  Bacterial polypeptide expressing nucleotide sequence isolated from the Sargasso Sea
aatgtatgtaaaatatgagcctgttggtgttgttgcaggattaataccatggaattttccaatagttttatcttctagaaaaatttctacggctttagcagctggttgttcagttatatgcaaaccagatgtcattactccaggaagtgtaatggagttaatgaatattataaatgatgcaggagttcctccaggtgttgtaaatttattatcgggtgatccagcacaaatttcatcacaacttatatcatctgatatagtaaaaaaagtttctattactggatcaactagagtaggtaaacttattttaaaacaagccgctgagaaagttcaaagagtaacaatggaattaagtggtcactcaccttttatagtttttgatgatgtagatataaacaaagttacagatatggcaataactgcaaaatttagaaacaacggccaagtttgcatatcaccagcaagattttatatccatgaaaagaaaaaagatgagtttgcaaaaacattagttgaaaaagtttctaaacttaaaattggaaatggaatggatgacgacacaatattaggtccattaacaacagaaaagagattgaatgaaatagaagcattagtcgagaaaacaaaaaaagaaggagcaactgttttatgtggtggaaagagaccatcaggttttaataaaggatatttttatgaacctactatttttgacaatgttcaagataactttacaattgcaagagaagaaccttttggaccattagttccactacttacgtttaaagatacagatgaagttgttaaaagagctaacgaca

SEQ ID NO: 212980 - DNA, 830 bp, Unknown
  Bacterial polypeptide expressing nucleotide sequence isolated from the Sargasso Sea
catgttagacaaaaaaaatttttacatcaatggagtgtgggttaagccaaatagttctaaggaaattaaagtaattgatcctgctacagaagaaaattgcgcagtaattactttagggaacaaagctgatattgataatgctgttaatgcagctaaagatgcctatgaatcttgggccttttcttccaaagaagaaagaattggattattagagaaactttatgaaaattataagaaaagatgggcagatattgcagaagctataactcttgagatgggtgctccaaaagattttgcaacaaaattacaagcaggtacaggagcaagtcatattaaatcatttataagatatttaaaaaattttgaatttgaaaaaccgttaggagatcatgctccaaaccaaagattaatttatgaaccaaaaggtgtttgtgcattaataacaccatggaattggccaatgaaccaagtttgtttaaaagtaatgccagcaatagcctcaggttgcacaatggttttaaagccatcagaattagctccactctcatcaatgatacttgctgaaattattgatgatgtaaaatttccaaaaggtgtattcaatttagttaatggagatggagcaacaacaggtgatgcccttacaagtcatccagatattaatatgatatcttttactggatcaacaagagcaggagctttaatttcacaaaatgctgctaaagattttaaaagagtaagcttagaattaggcggtaagggagcaaatataatttttaaagatgctgatccagaagctattgaaagaggtgctttaagatgttttagaa

SEQ ID NO: 212981 - DNA, 778 bp, Unknown
  Bacterial polypeptide expressing nucleotide sequence isolated from the Sargasso Sea
atttaatgctgacattaagtttgacaaaaaatatttatttataaacaaaaataaaatttcattttcacaagaatctgctttggaaaatattgattggaaaaagaatggagtggattatgtatttgaatgcacaggaaagtttaattcaaaagaaaaactattaagtcatataaaaaaaggagccaaaaaagttattgtttcggctccatgtaaaaatgctgataagacaattgtatttggtgttaatgaaaaaatcctaacaagaagcgatctaataatctctgccgcttcttgtacaactaactgcttagctcctgttgtaagcatattaaataataattttgaaattgaaaaaggttttatgacaactattcattcttttactagcgaccaaagaatattagataattctcataaagacccaagaagagcaagatcagcaagccaatctattgttccaacttctactggagcatcaaaagctataggtgaaattattccatctttaaaagggaaaattgagggagttgcgatgagagttccaacgccaaatgtatctttaattgaactagttttttgtacaaaaaaagaggtaactaaagaaaaaattaattatagttttttaaatgcctcaaaaacaaaatttaaaagaatagttgatattactgatgaaaaattagtttcaatagactttaaccataacgcattttcagcaattgttgatgcttcactaacctgcgtaattggaaaaaatatgggaaaaatatctgcctggtat

SEQ ID NO: 212982 - DNA, 318 bp, Unknown
  Bacterial polypeptide expressing nucleotide sequence isolated from the Sargasso Sea
atgtctcggtcatcgacctgacgtttatgcctgccaaacctgccacggttgaaaccgtcaatgctgcagtccgcagcgcggcccgcgcaggatcgttggcggggattttggacgtggccgacgcaccattggtctccagtgactttaatcacgatccgcatagttcgatctttgccgaggcacaaaccaccgtgaccgaaggcggcatggtgcgggtgctgagctggtatgacaacgaatgggggttctcgaaccggatgctcgatactgcggccaagcttgcggccgtgggacaatcggcgcgcgctgcggcttaac

SEQ ID NO: 212983 - DNA, 141 bp, Unknown
  Bacterial polypeptide expressing nucleotide sequence isolated from the Sargasso Sea
gctatccagctcactcgccatttggtggttataaacagtctggagtgggtagagaaactcataaaatgatgcttaaccattatagacaaaataaaaatcttcatgtttcttacgcagagaagaaattgggattcttttaac

SEQ ID NO: 212984 - DNA, 694 bp, Unknown
  Bacterial polypeptide expressing nucleotide sequence isolated from the Sargasso Sea
ttcaaaaatattttgaaagattttaaatttgaaagagatttgggagaggaaaaaaataatcaaaaactattatatgaaccaaaaggtgtttgtgcactgattaccccttggaactggccaattaatcaagttaatttaaaagtaatcccagctttggcatctgcatgtacagttgtactaaaaccatcagagatagcaccactttcatcaatgttgcttgctgaaatgatagatgaagtaaaatttccagctggtgtttttaatttagttaatggagacggagaaattactggagatgcattaacaagccaccctgatattgatatgatctcttttaccggctcaacaagagcaggtgcattaatttctcaaaatgctgcaaaagattttaaaagaataagtttagaattaggtgggaaaggtgcaaatataatatttaaagatgcggactcagatgcagtagcaagaggtgttcaaaggtgttttagaaattctggtcaatcgtgtaatgcaccaacaagaatgttggtagaaaaatcaatttataacgaaactgtagataaggtaaaagaactcgcaaatagtactaaagttgatttaccaggaaaagatggagaacatattggaccagttgtttcagagactcaatttaataaaatacaaaatttaatccaaaagggtattgatgagggtg

SEQ ID NO: 212985 - DNA, 805 bp, Unknown
  Bacterial polypeptide expressing nucleotide sequence isolated from the Sargasso Sea
gatgaatcaattattggatcaattgccgctggtaccaaagaggacattgatgtggcagtagctgctgcaaaagaagcattcaaatcttttggtttttcctcaaaggaagacagaataacattacttgaaaatatcatttcagagtatgaaaaaagatctgaagaactggcacaaacaatatctgcagaaatgggagcacccttatggttatccaacgttgcacaagtaacctcaggcctatctcattttaaagatacattagaggtattaaagacatttgagtttgaaacaactgagaatgaatacattgtaagaaaggagccaattggagttattggaatgataactccttggaattggcctatgaatcaaatgtgtacaaaagttgcatcagcaattgcatcaggttgtaccatggttttaaagccaagcgagataactccattttgtggaattctttttaccgaaattttggatgctgcaaaagtacctgctggtgtatttaatctagttaatggaatggggccaattgttggtgccgctctttctgaacatcaagacattgatatgatgcacttcactggctctactagagccggagtagctgtggcaattgcttctgctccaactgttaaaagagtcgcacaagaacttggtggtaaatcagcaaacattattttagatgatgctgatattgaaaaagcagcaggagctggggcaaatcattgttttatgaatactggtcaatcctgcaacgcaccaacaagaatgttagtttcatcaaaaaattatgacaaagcagtag

SEQ ID NO: 212986 - DNA, 694 bp, Unknown
  Bacterial polypeptide expressing nucleotide sequence isolated from the Sargasso Sea
agcggtcattcaccttttattgttttcgatgatgcagatactaaaaaggctgcttatatggctatagctgcaaaattcagaaataatggacaggtatgtatatctccgaatagattttatattcatgagagtaagaaagatgagtttgtaaatttatttgtagataaaacaaaaaaattaaagattggagatggaatgaatccagaaacacaattgggtccattgactactaagaaaagattaaatgaaatagaagagttagttgaaaaaactaagcaagaaggtgctaaagttttatatggtggaaaaagaccagcaggatttaataaaggatttttttatgagccaacaatatttgataatgttaaagatgattatactataatgaaacaagaaccatttggaccattagtacccatgctttcatttaaatcttttgacgaagtaattgagagagcgaacaatcatgaacttggtttatgtagttatgtttgtactaattcaatggaaaaagcacatcttgcatctgaacagctagaaacaggaactgtaggagtgaatacaggtatgattgcaattgcagaagcaccttttggtggaattaaacaaagtggatatggaagagaaggtggctcaaatgcaattaaagattatttaaacgtaaaatatacccatatgggattgaaaggataat

SEQ ID NO: 212987 - DNA, 770 bp, Unknown
  Bacterial polypeptide expressing nucleotide sequence isolated from the Sargasso Sea
taaatctgccgaaaaaggtttggagatatggaaaaatacttctccatgggaaagatctaaaattataagaaaaatctcagatttaattagaaaaaaaacagatattttatctaagtggttaactctggaagttggtaaaccaatttcagaagcacctggtgaagtcgggggcgctgcagatatttttgaatggaattctgaagaaaccaaaagaatttttggcgaaactaaccaaagtagattttcaaatacacgtatacatgtttattatcaacctgttggagttgttgctgctttagttccttggaattttccgattgttttagcctctagaaaaatttcaactgcattagcggctggttgttctgtaattgtcaaaccagatgtgatcacaccgggcagcgtcatggaacttgttgatatttgtaacgaagctggattacctccaggtgtagtaaatttattatcaggtgatccagcagaaatttctaatgaattaataaaatcagacactattaaaaaaatatctattactggctcaacaagagttggaaaattaatattaaaacaagcagctgagaaagttcaaagagttacaatggaacttagtggtcactcaccattcatagtatttgaagatgtagatttaaataaagtaactgatatggcaatttcagctaaatttagaaataatggtcaagtgtgtatttctccgagtagattttatattcacgaaagtaaaaaaaaggactttacgaatttaatgattg

SEQ ID NO: 212988 - DNA, 925 bp, Unknown
  Bacterial polypeptide expressing nucleotide sequence isolated from the Sargasso Sea
cgattgcaatgtcataaatccatccaccgaggaaaattgtgctgtaatttcaattggtagtaaagaagatataaatctagcagttaagtcagcaaaagatgcatttaacgagtgggcgtttacctctaaagaggaaaaaataaaattattagagacattatatgctaattataaaaaaagatgggcagactttgcaaacgcaattactatggaaatgggtgccccaaaagatttcgcaacaaaacttcaagcaggaactggcgcaagtcatatgaaatcatttattagatatttaaaaaattttgaatttgaaaaacctttaggagaacatgctcctaatcaaagattattatacgaacccaaaggagtttgtgctcttatcactccctggaattggccaatgaatcaagtgtgtttaaaagtcatgccagctttatctgcaggatgcaccatggttttaaaaccatcagaactcgctccattatcatcaatgatacttgctgaaattattgatgaaacaaaatttccttctggtgtatttaatttggttaatggtaatggtgaaattactggtaatgcattaactagtcacccagatatagatatgatttcattcacaggatcaacacgggcaggtgcattaatttcaaaaaatgcagcaaatgattttaaaagagtaagtttggaattaggtggcaagggagcaaatattgtttttaaagatgctgatccagatgcagtagaaagaggcgcaacaagatgttttagaaattctggacaatcttgtaacgcacctacaagaatgttggttgaaaaatcaatatataaagccacagttgatagattaattaagttcgcaaatgatttcaaagtagacgatccaacaaaagagggagatcatattggtccggtaattcagaaacac

SEQ ID NO: 212989 - DNA, 538 bp, Unknown
  Bacterial polypeptide expressing nucleotide sequence isolated from the Sargasso Sea
ttgcctagctcattggctgatgttatcaacaatgattttaaaatattaagtgggtttatgactacaattcactcctttacaactgatcaaagactcctcgataattcacacaaagatccaagaagagcaagatcagctgtacaatctatcgttcctacatcgactggtgcttctaaatctattggtgaaatcattcctgatttaaaaggaaaaatagagggaatttcagtgagagttccaacgccaaatgtttcacttgtagaattcgttttttgtacaaaaaaaaatttaactgtcagcaaaattaataatttgtttactaaaaagtcaaacaaacaacttaaaggtattttagaagtaacaaatgaaaaattagtatctatagactttaatcacaaccctaattcagcagtattagattcatcactaacaagtgtaattggaactaatatgggaaaaatatcggcttggtatgataatgagtggggtttttcaaatagaatgtgtgatctggtaaaatatattcataaaatttaat

SEQ ID NO: 212990 - DNA, 420 bp, Unknown
  Bacterial polypeptide expressing nucleotide sequence isolated from the Sargasso Sea
gaagagcgagatctgcaagtcaatcaatcgttcctacctcaacaggagcttcgaaagcaataggagaaataattccaaacctaaaagggaaactagaaggtgttgcgatgagggtgcccactcctaatgtttctcttgttgaattaattttttgtacaaaaaaagatattaacataaaaaaaattaatgatgcctttgaacaatcatcaaaaaataaattaaaaaaaatcttagaagttactcatgaaaaattagtatctattgattttaatcatcatcctgcttctgcaatagtagatgcttctttaacaaatgtagttggaagtaatatgggtaaaatatcagcctggtatgataatgagtggggcttttctaatagaatgtgtgatatcgctgaaactttgcataaaatctcttaat

SEQ ID NO: 212991 - DNA, 173 bp, Unknown
  Bacterial polypeptide expressing nucleotide sequence isolated from the Sargasso Sea
agcagggatagtatggactaattgctatcacgcttatccagctcactctccatttggtggttacaaacaatctggggttggaagagaaactcacaaaatgatgcttaatcattacagacagaataagaatcttcatgtttcttatgctgagaaaaaattaggcttcttttaat

SEQ ID NO: 212992 - DNA, 439 bp, Unknown
  Bacterial polypeptide expressing nucleotide sequence isolated from the Sargasso Sea
atgaacttgtcaaaattctatatagatggtgattgggttgatcctattgaaccaaattcaatccctgtgataaatcctgcttcagaagatagcataggaaatgtaagcattggttcaaaagaggatgttgataaagcagtacaagcggcacgaaatgcttttcaaagtttttcaaaaacattagtttcagaaagagttgagttattaactgaaatcagaaatatctataaaaagaggtttgatgacattgctaccgctattcaaactgaaatgggtgcgccaaatagtttagcaagaggaagtcaagcaacagttggattgtctcacttaaaaactgctataagagttttagaaaaccataaatttgaatttaaacatggaagttatgttgtaaggcatgagccaataggagtttgtggattaataactccttggaatt

SEQ ID NO: 212993 - DNA, 733 bp, Unknown
  Bacterial polypeptide expressing nucleotide sequence isolated from the Sargasso Sea
atgaacattggcattaatgggctaggtcgaataggaagacttgtcataagggatttttttggtggaaccatcagaaaatttgatacgcctaactctaatattattcatgtaaatgatcctcatttcaatgcagaaactctttgccaccttttgaaacatgatagtgtccatggtatttgggatgcttcaattaagacattaggcaatgatagaattacaattaatggaaatgaattaaggctgacaaattttatcaatccatctgatgtaaattggagacaaagtcattgcaatgtagttttagattgtactggtaaatttttatctaaagaaaaacttcaaggttattttaatagcgacataaagaaagttatagtttcagcaccaataaatgatccagaaattttaaatatagtttttggtgttaatgaccatctttatgatccatcaaaatataatattataacagctgcttcctgcacaactaactgtctggcgcctatagttagcgtagttcataaaaacttggaaatcttaaaaggtcaaataacaactatacataatccaacaaacacaaatgttcttttagataagccccacaaggatcttagaagagcaagatctacaatgctttctatgcaccctacatcgacagggagtgctaaagctattggcctaattttcccaagaattaaaaggaaaactagatggccacgcagtcagggtaccagtg

SEQ ID NO: 212994 - DNA, 904 bp, Unknown
  Bacterial polypeptide expressing nucleotide sequence isolated from the Sargasso Sea
atgatagataaaagtaaattttacataaatggtaaatggattaatccaactataaagaatgactatgaggttattaacccctcaaatgaaactccatatgcttttatctctttgggaaataaagaagatgtaaatgtggcagtaaatgctgctaaaaatgcttttcttgaatggagtcaaatagataaagaaactaaaataattctattagaaaaattatctaagatttacaaatcaagatgggatgaaattactaatactatgtcagaagaaatgggtgctccattagattggtcatcatcagctcaaacttcatcaggttttgatcatattaatgattttataaaaagattgaaggaatttgaatttgaaaaaaaatttgaagacaaatcaaataactacatagtctatgaaccaattggcgtatgcggtttaataactccttggaattggcctataaatcaaattactttgaaagttataccagctcttgccagtggttgtactatgatattaaaaccttctgaaattgctccattatctggaatgcttttcgctgaaataattgatgaagctggttttcctcctggggtatttaatcttattaatggtgatggtgctggtgtaggaacagatttgtcctctcacagtgatattgatatgatttcttttactggatcaacaagagcaggaaaacttatttctaaaaatgctgcagatactattaaaagagtttgtttagaattaggtggtaaaggaggaaatattgtttttagtgattcacatccagatgcagttagagaaggtgttaggaacataatgagtaattctggtcaatcttgtgatgcaccaacaagaatgctagttgaaaaatcaatctatgatagagcaattgaagaggctg

SEQ ID NO: 212995 - DNA, 817 bp, Unknown
  Bacterial polypeptide expressing nucleotide sequence isolated from the Sargasso Sea
tctccatcaaaaccaaatgacttagaagtaattaatccctcaaacgaagatccttatgctgtaatttcacttggatcaaaagaggatattgataaagcagtcaaagccgcaaaaactgcttttgagagttggaaaaaaacatcaaaagaagaaaggcttaaattattagaaaagctattagaaatttataaaaaaagatttagtgaaatggcaaaagctatttcggatgaaatgggtgcaccaatggattgggcaacagatgttcaaactggatcaggtcaagctcatctagaagattttattttaagattaaaaaaattcaattttgatgaacattttgactctaaatcaaataatcatatttgttatgaaccaataggtgtttgtggattaatcacaccatggaactggcctattaatcaaattgcattaaaagttgttcccgcatttgcaacaggatgtacaatgattttgaagccttcagaaatcgctccattatcaggtatgttatttgcagaaatgatagatgaagctggttttccctctggtgtatttaatttagttaatggagatggtgctggagttggcactaatatatctggtcatcctgatattgatatggtttcttttacaggatcaactagagcaggtagattaatttctaagaatgccgctgacacaattaaaagagtttgtttagagcttggtggtaaaggtggaaatattgtttttgctgactcttatccaaacgcagtcagagatggcatcaggaatgtaatgagcaactcaggtcaatcatgtgatgcaccaactagaa

SEQ ID NO: 212996 - DNA, 190 bp, Unknown
  Bacterial polypeptide expressing nucleotide sequence isolated from the Sargasso Sea
gatcttaaaaaagcatcttgggactgcaagcaaattagaagctggtcaagtatatgtaaataaatggtttactggaaatcatgcaactccttttggaggttataaacaatcaggatatagccgtgaaaaaggagtagatggacttaaatcttatcttcaagtcaaaaatgttggtattagtttaggttaa

SEQ ID NO: 212997 - DNA, 218 bp, Unknown
  Bacterial polypeptide expressing nucleotide sequence isolated from the Sargasso Sea
ttcaaaaactaaaaaattaaatggaattctaacaacaaactcattacctctagtttcaattgattttaatcataattcaagtagttcagtatttgatttgagtcaaacacaagttgtcaaagataaattctgtagagttttatcttggtatgataatgaatggggattttcaaatagaatggtagacactatggttgatcttaaaaaatttatttagt

SEQ ID NO: 212998 - DNA, 954 bp, Unknown
  Bacterial polypeptide expressing nucleotide sequence isolated from the Sargasso Sea
tggaacttcccgattgccattccggcctggaagctggcgccggcacttgcctatggcaatgcggtggtgatgaagcccgccgaactaaccccgggatgcgcctgggaactagccaagatccttgacgaggcaggttgcccggccggaatcttcaaccttgtgatgggacccggatcgaaggtcggcgcacgtattgtcgagcatgaggacatcgccgccgtgagcttcaccggatcggtcgccaccggccgccaggtcgctgtcgattgcgccgcgcgcggcaagaaggtgcagctggaaatgggcggcaagaacccgatggtcgttgtcgacgatgccgatctcgaggtcgcgatcggcgcatgcctgaacggcgcgtttttctcgacaggacagcgctgcaccgcgtcgtcgcgcctgatcgtcaccgccggcatccatgacgcctttctcgacaagctgaccacagccgcggccgacctggtgatcggcgatccgctggattcgaagtctcagatcgggcctgtcgtcgaccagggccagcttgaccagaacctcgaatatctggcgcttgccgccaccgagggttgcgatgtccgcggcgggggcctcggcaacggcaatggctatttcatgcatccagccatctttgccggtgccagcaaccagatgcgcgtctcgcgcgaggagatcttcggtcccatggcctcagtcatcaaggtcgccgattatgacgaggcgcttgtcgtcgccaacgacaccgaattcggcctgtcgtcaggcatctgcaccacctcgctgaagctcgccaccgatttccgccgcaatgccaaggctggcatggtgatggtcaacctgccgacggccggcgtcgactatcatgtgccgttcggcggccgcaagggatccagctatggcccgcgcgagcaggggagctatgcccgcgagttctac

SEQ ID NO: 212999 - DNA, 807 bp, Unknown
  Bacterial polypeptide expressing nucleotide sequence isolated from the Sargasso Sea
tctgagctaacaataaaactgagcagactaacttttccatatcttattttaataagtttagtcactctttattcaggtatactaaactccttagggaagtttgcatcagttgcatttacacctattattttaaatttatttttaatcattggaattacttcaacaaattttataaatattaattcaggagaattaatagctatagctgtaactttagcaggaattttccaacttttatggcttttatttccactttacaaattagatataaaaatttttttaactttgccttattacacaaaaaaacagaaagaattttttaagttatttttgccaggggttattggagcaagtgttgttcagattaatttacttacggatattatttttgcatctttactctctaaaggctcaatatcatttttgtactttgcagatagaataaaccagttacctctaggagtaattggtgttgctttaagtacagctttattaccaattctttcaaaaaaaatagcagctaaagaagaagaaaaagcaatagatattcaaaatagatcaattgagctggctcttttttttggtattcctgcaatgtttgtttttatattttttccgcaagaaataattaagccacttttccagagaggcgcttttacttcaagtgacactatatcaaccgcaaatgctttggcagcttatgcgtatggattacctgcttatattcttttaaaaattttttctgtgtcttttttttctagaaaaaatactagcataccagtcaaggttgctatttttgctgtttgt

SEQ ID NO: 213000 - DNA, 612 bp, Unknown
  Bacterial polypeptide expressing nucleotide sequence isolated from the Sargasso Sea
tggtgaaactttacaaggcagacttcctgaaacaagaatacatgtctattatcaaccagtcggtgtcgtagcagctttggtcccttggaactttcctataacactagctgcaagaaaaatatctacagctttatctgcaggatgttcagttatagttaagcctgatgttattacacctggatcagttatggaattagtaaatatttgtaatgaagctggtgtaccgccgggtgtggtaaatttattatcaggagatccatcgtttatatctgataatctcttatcttctgatataataaaaaaagtttcgatcaccggatcgacaagagtgggaaaaattattttaaaaaaagcggcagaaaaagttcaaagagtaacaatggagttaagtggccactctccgtttatagttttcgaagatgcagatatagaaaaagttactgatatagcaatatttgctaagttcagaaataatggtcaagtttgtatatcaccaagtcgtttttacattcatgaaagcaaaaaaaatgacttcactaaattgattgttgaaaaatcaaaaaaattaaaaattggaaatggcatggataataatgttgcgcttggaacttt

SEQ ID NO: 213001 - DNA, 412 bp, Unknown
  Bacterial polypeptide expressing nucleotide sequence isolated from the Sargasso Sea
atcaaataatcatatttattatgaaccaattggtgtttgtggattaataactccatggaactggcctattaatcaaatagctttaaaggtagttcctgcatttgcaacaggatgtacaatgattttaaaaccatctgaaatagcaccaatatcagcaatgttatttgcagaaatgattgatgaagttggatttcctaaaggggtttttaatttagtgaatggagatggtgttggcgttggaactcaaatttcaagtcatcctgatattgatatggtttcttttacaggttcaacaagagctgggagattaatttcaaaaaatgctgctgaaacaattaaaagagtttgtttggaacttggaggcaaaggcggaaatatagtttttgcggacagttataaaaatgcagttcga

SEQ ID NO: 213002 - DNA, 139 bp, Unknown
  Bacterial polypeptide expressing nucleotide sequence isolated from the Sargasso Sea
ttggttgatgtaaatggcgctggtattgctgtagatgctccatttggtggatacaaacattctggtattggcagggaagcaggaaaagaggggctaactgaatttttagaagttaaatctgtaggcggttggaattaat

SEQ ID NO: 213003 - DNA, 247 bp, Unknown
  Bacterial polypeptide expressing nucleotide sequence isolated from the Sargasso Sea
aggagaggctatttcatagctaatgacactccttatggtttaacaaactatattcaaactcatgataaggaaaaagtcaaaagagttgcgaggaaacttagatctggaatggtggatgtaaatggggttggaatagctgtagcttctccttttggcggatataaacattctggtattggaagagaagctggaaccgaaggtcttatagaatttttagaagttaaaactgtaggtggttggaattaat

SEQ ID NO: 213004 - DNA, 754 bp, Unknown
  Bacterial polypeptide expressing nucleotide sequence isolated from the Sargasso Sea
ttgtaattttgattcatcgggcatttatgaaaatgttattaaaagtcacaatcttttaaaacagggaattcataaggtcataataacccattcacccaatgattctgtagatcatactgtgattataggcgcaaatgaaaattcatttgatatttcaaaacaccgtatcataagctcaagtatttgtgatgcaaatgcttgtgcacctattttaaaaataattgatgaagaattaagtattgtagatggctttattaccacattacatccttggctgggttaccaaaatttactagatggtagtctaaggtctgttagtagtccagggcactattggtctgatttttctctggggcgttccagcaccgaaagcctgatcccaaagccaacaaccttggtacctgcgctgcagaaagctcttcctgaaattaccagtaatatcttcgccatgagttttcgagtccctacgagcatagtatcagcatctgatatggttctatcgttaaaaaaacatacaacaatacagtatattgaagaactctttatagagctagaaaaattatatcctgatgtaattcgaattaataatgaatctttggtttccattgactttaaaggaataaagcaatcctgtgttattgatatgcgttggcttaaagtgtttcaaaacaaggttaaactggttctttggtatgacaatgaatgggggtattccaatcgtatagttgatatggtaaaattattaaataaatag

SEQ ID NO: 213005 - DNA, 813 bp, Unknown
  Bacterial polypeptide expressing nucleotide sequence isolated from the Sargasso Sea
actactgaaaaaagtaaaaaacacaacgttgactatttgatcatgtcggcgccacccaaagatttagatataacacctatgtattgccccggagtcaatgataaggattataaaggagaatctattgtatccgtggcatcatgcaccaccaactgtttaactccatttcttaaaaaaataattcaaactaatcacactatcgaggatgttaactttattacgattcatgcatctaccgccagtcaaagcatcgtagatgaagcaaatacaagcaaacgcacgtctagaagcgtgtggaataatattatacctcatagcaccggtgctcaaaaaacggtaaattatttattaccatcacttaaagataaagtaaaaggaacctcacttcgtgttcctattaataccgtaagtatgattgatgttaatatccgattttctcagacgattgataaagataatttattaacctctcttgtaactgatgatatatttaatattagtgaagaaaaactagttagttcagattatataggaacgactgcaccaagtatattagataaatcctgcaccatacaactaacaccccaaaccataaaatttggtctttggtatgataatgaatggtctttttgcacgcaaatgatacgtatgacgaaaaaaatacatcattatactacaaaaaaacacaattcactactagaccttgattttagacaaaaacgcgtatttatacgatgtgattttaattgtcccaaaggtgatgattttcgcatccaaagcgctatacctacaatacaatatattcttacacaa

SEQ ID NO: 213006 - DNA, 601 bp, Unknown
  Bacterial polypeptide expressing nucleotide sequence isolated from the Sargasso Sea
aatgacaattaaaattggaattaatggaatgggacggattggtcgtatggttgttagatcaattgtcgaaagtaataataaaaatttaaaaattaatcatataaacaacaggtcaaattcagaaactacatctaaattaatcaaatatgattctattcatggaaaattaaatgctaatttagattatgatacaaatcatttaataattaataaaaataaaattactttttctcaaaaaacaaaaattgaagatattaattggaaaaaatatgatgttgattatgtttttgaatgcactggaaaatttaattcaaaagaaaaacttcttgaccatttagaaaatggtgcaaaaaaagtgattgtttctgctccatgtaaaaatgctgataaaacaatagtatttggtgttaatgaaaatataattactaaagaggacaaaataatatctgcagcttcgtgcacaactaattgtctagcaccagtaaccagtgttcttgatgaaaaatttgaaattgaaaaaggttttatgactacaattcatgcgtttactagcgatcagagaattttagataattcacacaaagatccaagaagagcaaga

SEQ ID NO: 213007 - DNA, 496 bp, Unknown
  Bacterial polypeptide expressing nucleotide sequence isolated from the Sargasso Sea
atgtataaaaaatttggtcagttcattgatggtaaatggcaagaatcttctgacaaaggaacttatgaggtaattaatccagcaaatgaagaagtaatagggaatgcttcaaaagcaacacctcaagatgttgatagagcattaaagtctgcagaaaaaggtttagaagtttggaaaaaaactcccccgtggcagagatcttatattattagaaagattgcagataaaatgagagagaagcaagatgtcttagccaaatggatgacacttgaagttggtaagccttttttagaagcaaaagcagaagttggaggttcagcagatatttttgaatggaatgctgaagaaacaaaaagaatttatggtcaaactgtggaaagcagatttgcagacacaagagtacatgtttattatcaacctgttggagtagttgcagaattatctccttggaactttccattagtgttatcatctaaaaaaatttctactgcacttg

SEQ ID NO: 213008 - DNA, 869 bp, Unknown
  Bacterial polypeptide expressing nucleotide sequence isolated from the Sargasso Sea
aagagcaagagttatgtttaaattcaaagaattaatagaaaaaaattctgatgaattaactaaaatgatagtttctgaacacggtaaggtatatgaagatgcaaaaggttcgttgataagaggactcgaggtagtagagtttacttgtggaattcctcaggttttaaaaggagaatttacagaaaacgttggaacagatattgatagttggtctattaggcaaccacttggtgtttgcgcaggtataactccatttaattttccagcaatggtccccatgtggatgtttccaatggctattgcatgtggaaatacttttgtattaaaaccatcagaaaaggatccatctatttcaattaaattagcagaattatttcaagaagctgggctaccagatggagtatttaatgtaataaatggtgacaaggaagttgttgatgcaattttaattaacaaagatattaaagctgtaagttttgtaggatcaacaccaattgcaaaatatatttatgagaatgcagctaaaaatgaaaaaagagttcaagctttgggaggtgcaaaaaatcactgtgttgtgatgcctgattgtgatttagatcaggctgttaatggtttgatgggtgcagcttatggatctgctggtgaaagatgtatggctcaatcggttgcagttgcagttggaaatattggagataatttagttaatgaattatcaaaaaaagttgaagcattaaaagttggaccaggtatggacaaaaaatctgaaatgggaccgttagttacaaaagaacatttagaaaaagttaagggttacgttgacctaggggttaaagaaggagcaaaattagtagttgatggaagaaatttaa

SEQ ID NO: 213009 - DNA, 247 bp, Unknown
  Bacterial polypeptide expressing nucleotide sequence isolated from the Sargasso Sea
atgcttagaattgcgattaacggctttggtagaataggacgaatggttctcagagcactttatgaaaataattataaaggcttaagtgtagttgcaatcaataatagagccagtactgaaacaagtgcctttttgttagaaagagatacagttcacggtaaatttaatcatagtattaaatatacaaaagatgaaatcttaataggtaaagatagaattcaatgttaccaagaaaatgatcctataa

SEQ ID NO: 213010 - DNA, 147 bp, Unknown
  Bacterial polypeptide expressing nucleotide sequence isolated from the Sargasso Sea
gttctggaatggttgaaataaatggaacaagttttgcaggaggttcaccctttggtggatataaacaatcaggtaatgggcgcgaaggtggctcatgggggttagaagaatttatggaaataaaatcaataagtggatggaaataaa

SEQ ID NO: 213011 - DNA, 815 bp, Unknown
  Bacterial polypeptide expressing nucleotide sequence isolated from the Sargasso Sea
tatgtataaaaaatttggacaattcattgatggtaaatggcaacaagctgaaaaaaaagaaacatatgatgtgataaatccagctactgaagaagtaattggaaaagcatcaaaggcatcttcaatagatgttcaaaaagctcttaaatctgcagagaaaggtttggagatttggaaaaatactgctccatggcaaagagcttatactcttagaaaaattgctgacctaatgagagaaaaaaaagatgttttagcaaagtggttaacacttgaagtaggaaaacctattgccgaagctgttggtgaagttggtggtgcagcggatatttttgaatggaatgctgaggaaactaaaagaatttatgggcaaacgcaacaaagtagatttccagatacaagagttcatgtttattatcaaccagttggcgtggtagctgctttagttccttggaattttccaatagtactggcctcaagaaaaatttctacttctttagctgcaggttgctctgttatttgcaagccagatgtaattacacctggtgctgtaatggaattagttaatatatgtaaagaagccggtgtaccagacggagtagtaaatcttctgtcaggagatcctgctgaaatatcaaatgaattaatggaatcagatataattaaaaaagtttcaattacaggttcaacaagagtcggtaaaattattttaaaaaaagctgcagataaagttcaaagagttactatggaactaagtggtcactctcctttcatagtatgtgaagatgtggacatgaataaggttgctgatatagcaa

SEQ ID NO: 213012 - DNA, 769 bp, Unknown
  Bacterial polypeptide expressing nucleotide sequence isolated from the Sargasso Sea
aatggaaatgggtgcacctattgattatgcaacttcaactcatgctttatcaggtcaatcacacattgaggattttatattaaggcttaaagagtttaaattcgaacatcattttgattcaaagtcgaataactatatcgcctatgaaccgattggagtgtgcggtctaataaccccatggaattggccaattaaccaaattgccttaaaagtaattccagcttttgctaccggttgtacaatgatccttaaaccttctgaaatatctcctatttcagcaatgatatttgctgaaatgattcatgaagcaggatttcctgctggtgtttttaatttagttaatggtgatggcaagggagttggcatacaaatatccgctcatcctgatattgatatgatttcttttactgggtctacaagagcaggaaaattaatcactaaaaatgccgcagatacagttaagagagtttgtttggaattaggtggtaagggtggaaatattgtttttgcagactcttatcctaatgctgtcagagatggaattaaaaatgtgatgagtaactctgggcaatcttgcgatgcacctactaggatgcttgtagaaaaatctatttatgaaagagcagttaaagaagctattgatgaagcaaataaaataaaagtagatttagcttcaaagaaaggtgatcatattggcccagtagtttcaaaaattcaatacgataagataattaatttaattaaaaatggaattgatgaaggggcaact

SEQ ID NO: 213013 - DNA, 517 bp, Unknown
  Bacterial polypeptide expressing nucleotide sequence isolated from the Sargasso Sea
atgagctcaggaaacaaatataaagtaatatcaaataaacttaaatttgaaggaagagcattcattaatggcaaatatgtaaatgctattgatggtaaaaagtttgaaacaatcaacccagcaactggccaaaagctttgtgcagttgcaaaatgtaatcataaagatgttgatttggcggtaaaagtttcaagaaaagctttcaatagcggagtttggtctaagagttcacccgaacatagaaaagaggttttattaaaatttgctgaattacttagaaaacatggtgatgaaaattcagttttagaatgtatagatacaggtaaacttatcgccgactgtattaatgaagttgcaaatgatgctccaatgcattttcagtggtatggagaattaattgataaagtatttggaaaagttggtccgacagaaccatcaataactagtttaattgttaaagaaccaataggagttgttgctggaattgttccatggaactttcctttaatgatggcag

SEQ ID NO: 213014 - DNA, 476 bp, Unknown
  Bacterial polypeptide expressing nucleotide sequence isolated from the Sargasso Sea
aacaattcatgcttttactaccgaccaaagattattagataattctcataaagatccaagaagagcaagatctgcatcgcaatcaatagtgccaacatctacaggtgcttcaaaagcaattggagagatcataccttctttaaaaggtaaattagaaggtgtggctatgagagtgcccaccccaaatgtgtccttaatcgagttagttttttgtacaaaaaaagatttaacaattcaaaaaataaacaaaagttttttagatgcttctaaaaaatcattaaaaggtataattgatattactaatgagaaattagtatcagttgatttcaatcacaacccaaactcagctattgtcgatgctaacctaacaaatacaattgggaaaaatatgggaaaaatatcagcttggtatgataatgaatggggtttttcaaatagaatgtgtgatttagcaaaatatattcataaaatttaat

SEQ ID NO: 213015 - DNA, 379 bp, Unknown
  Bacterial polypeptide expressing nucleotide sequence isolated from the Sargasso Sea
aactggagcatcaaaagcgataggtgaaataattccaagcttaaaaggaaaattagaaggtattgcagttagagttccaacaccaaatgtatcactaattgagtttgtattctgctctaaaaaaaaaatcgacgtaaaaaaaattaatgatgcgtttgaaacagcttctaaaaatgaattgaataaaattttagagattactcatgaaaaactagtgtctatagattttaatcatcattctgcgtctgcaattgttgatgcctctttaacaaatgtagttggaaccaatatgggtaaaatctctgcttggtacgacaatgaatggggtttttcaaatagaatgtgcgatatagctgaaaatttgcataaaatctcttaa

SEQ ID NO: 213016 - DNA, 856 bp, Unknown
  Bacterial polypeptide expressing nucleotide sequence isolated from the Sargasso Sea
tatgtacacaaaatttccagttaccagaatatatgccccagtaggatctaagaaagaacttcttccgtatttagttagacgattacttgagaacggagcaaatagttcgtttgtgaacaaatatctcgataaacagatacccataagcgaagttattgagaatccaatagatgttgcgtcaagaaatcttgatgaaaaagagtaccttgagcatgtcaaaaggcctttaaatgtattttcagatagaaagaattctaaaggctatgatttggcagatcaaaagaaaatttcagagttagccagtgaaacatcgaagtatttgtcgcatacatttaaagccacaagcataattgacggggtatcagctcaagatactcaaacagtgaatatcacttctccagctacacagactaatattggaaaagtaagttttgcaggggccaatgagctaaattcaattaaaaaccttgagccttgcaaggagtggaagattcttgatataaagaaaaaaattgagatatttaataatgctgttcaattgattgagcagaacaaatttaaatttttttatttacttggtagtgaagctggtaaaacttttaaggatgcagatgcagaaattagagaagctgtcgattttatactctattattctagcaaggccaagcaattaaatatcccacaaatccttgagggccctacaggcgagaaaaattttctagaatactcttcaaaaggtatatttttatgtatcagtccttggaactttcctttagcaattttggtcgggcaagttgcagcagctttacttactggcaataccgttgtttgtaaccagctgaagatacttctttaa

SEQ ID NO: 213017 - DNA, 931 bp, Unknown
  Bacterial polypeptide expressing nucleotide sequence isolated from the Sargasso Sea
aaaacattagctgaaggtgaagctgaagtaagtgcagcagcagatatttttgaatggaatgctgaagaaaccaaaagaatttatggtcaatcgttgcaaagtagatttgataatacaaaaattcaaattatctaccagcctgtaggagttgttgcagcattatcaccatggaattttccattaattttagctgcaagaaaagtttcagctgcgcttgccgctggctgttcagtaatttgtaaaccagatgtaataactccaggaaccgttatggaaatggtagacataattaaagattgtggagtacctccaggatctgtgaatttactttctggagatccagctacgataacaactcaattgcttgcatccagtgtcgttaaaaaagtttcaatcacaggatccacgcgagttggaaaaattattttaaagcaggctgcagataaagttcaaagagttacaatggaattaagtggacatgctccctttatagtttttgatgatgtaaatattgataaagctacagatatggctatgacatgcaaatatagaaataatggacaagtttgcatttcaccaagtagattttatatacacgaaagtaaaaaggaagaatttaccaaatcttttgtagcaaaaaccaaaaaattaaaaattggcaatggtctagataaagatgttcaattaggacctttaactacaaaaaaaaggctagaagaagtagaacaacttgttgaagaaaccaaaaaagagggagcaaaagttttatgcggaggtcaaagaccagcaggctttaacaagggttatttttatgaacctacaatttttgataatgtaaaagataattataaaattatgacagtagagccatttggtcctctatcaccaatcacaacatttaaaagttttgatgaagttataaaaagagcaa

SEQ ID NO: 213018 - DNA, 877 bp, Unknown
  Bacterial polypeptide expressing nucleotide sequence isolated from the Sargasso Sea
ggagcacctatgaaattttcgacagaaatgcaagcagcaacaggagcaagtcatatcaaatcttttaaaaatatattaaaagattttcagtttgagaaagatttaggagaagaaaaaaataatcaaaaactgttatatgagccaaaaggtgtatgtgctctaataactccttggaattggccaataaatcaagttaatttaaaagttattcctgcattagcatcagcatgtacagtagttttaaagccatctgaaatagcacccttgtcgtcaatgttgctcgctgaaatgatagacgaagtgaagtttccttcaggagttttcaacttagtaaatggagatggtgaaattactggtaatgctttaactagtcatcctgatataaatatgatttcctttacgggatcaacaagagcaggtgcattaatctcacaaaatgctgcaaaagactttaaaagaattagtttagaattaggtggaaaaggtgcaaatataatattcaaagatgctgactcagaagctgtggcaagaggagttttaagatgttttagaaattcaggacaatcatgtaatgcaccaacaaggatgttagttgaaaaatcaatttataatgaaactgttgagaaagtaaaagaattggcaaacaatacaaaagttgattctccagaaaaagacggtgatcatattggacctgtagtttcagaaatgcaatttaataaaatacaaactttgattcaaaaaggaatagatgaaggtgcaaaattagttgcgggtggaagaggcaaaccaaaaggttttgaaaaaggatattatgtaaaacctacagtttttgcagatgttaataatcaaatggagattgcaagaactgaaaattttg

SEQ ID NO: 213019 - DNA, 292 bp, Unknown
  Bacterial polypeptide expressing nucleotide sequence isolated from the Sargasso Sea
acctttggacccgttgcaccactattcaaattcaaggatgaagatgatgttatccaacaggcaaatgatacaatctttggtttggcttcgtacttttatgcctctgaccttagtagagtttggagagttgctgaggctttggagtatggaatggttggaataaacacgggacttatatcaacagaggtggcaccgttcggcggcgtaaaacaatctggtattggtagagaagggtctcatcatggaatagatgaatatttggaactgaaatatctttgtttttcaatttaag

SEQ ID NO: 213020 - DNA, 724 bp, Unknown
  Bacterial polypeptide expressing nucleotide sequence isolated from the Sargasso Sea
gatgtcctctcgaacactcgatgaaaatcgggccatagcggcgcgaggccttgcgaaattttcttctgaaccagtttctcatttggtcagcggtcaatgggttgggagtaggtcgaatgctgtttttgataacttttcgcccagcgatggtcgtttgctcgggaaagtagcggcgggggacgcgcacgaggttgacgcagctgcaaagggagcttcctatgcattcgaggactgggtgggtcggagcggtaatgatcgcaaaaaaattttacatcggatagctgatttgattgttgagcgtgcagatgagatagcaactgttgaatctgttgacacaggccagccgattcggtttatgagttcggctgcaatacgaggcgccgaaaattttaggtacttcgctgacgctgcgcctggagcgcttgatggaaacgcgatgcctactgaaagtcacctgaacttctctacgagacgcgctatcggccctgttggcgttatcaccccatggaatacgccatttatgttgtcaacgtggaaaatagcgccggcgcttgcggcagggtgcacagtggtccataagccagcggaatggagtcccttaagcgcgtcaattcttggcgaaattgctcaagatgcgggagttcccgctggcgtttggaacatcgtgcacggctctggggaagtcgctggacgtgcacttactgaacaccctctgataagagct

SEQ ID NO: 213021 - DNA, 869 bp, Unknown
  Bacterial polypeptide expressing nucleotide sequence isolated from the Sargasso Sea
agcagagttattttctgaagctggtttacctgatggtgtatttaacgttattaatggtgataaagatgttgttaatatgataattaaaagtgaagaaatatcttcaattagttttgttggatctacacctgtagcaaaatatatttatagagaagccgctaaacatgaaaaaagagttcaggcattaggtggagcaaaaaatcatttaatagtaatgcctgacgctaatattaatcaagcagtagatggaataatgggagcagcttttggatcagctggagaaagatgtatggcaatttctgtagctgtagctgttggtgatattgcagataatctagtagaacaactttcaaataaagctcaaacactcaaagttgcaccttggactgatcctaaatctgacatgggtcctgttatttctcatgaacacaaagaaaaaattattgaatatataaacattggtgaacaagaaggtgcaaaattagttattgatggtagaaaaattaatatacagggttacgagaatggatattttgttgggcctactatattcgatgatgtaaaaaaaaatatgaaaatttatactgatgagatatttggcccagtattgtgtatagttagagctaagaattatgaggatgctctttctttagtaaacaaccacaaatttggaaatggaacaagcatctatacatcagatggagaaatttccagacattttagtactaattgtaaaattggaatggttggaattaatgttccaatcccagtacctatggcctttcatagttttggtgggtggaaaacatctttgtttggtgatcatgccatacatggagttgagggtgtagaatttatacaaaactcaa

SEQ ID NO: 213022 - DNA, 268 bp, Unknown
  Bacterial polypeptide expressing nucleotide sequence isolated from the Sargasso Sea
gacgacgaggaagaggccgtccggattgccaacgacagcatctacggcttgggcggcggtgtgtggtcgggcgacgagagccgcgcgattcgcgtggcgcggcgcatccgcacgggccaggtcaatatcaacggcgggccgttcaacatgcaggcaccgtttggcggctacaagcaatccggcaacgggcgggaaaacggcaagtacggcctggaggagttcctggagtacaaggcgctgcaactcaatcccgccaagacggcctgat

SEQ ID NO: 213023 - DNA, 531 bp, Unknown
  Bacterial polypeptide expressing nucleotide sequence isolated from the Sargasso Sea
catggagcagtataaaaattttattgatggaaaatggattaatagcgaatcaaaggaaacaataaaggttgataatccttcaaatggtaaaatcattggcgaaatttcatgtgcaaaaaaaaatgaagttgatcttgcagtagaagcagctaagaattcttataacagcagagttcttgtagatatgcctttactttcaagagcgaaactaatgagaaaaattgcagaagagacaagaaaggtttcaaaagaaggtggtgagcttctttgttatgaaaatggaaaaaatatagcttcagcaattaaagaattcaatgatgtagcagatatgtttgactattatgcaggcttaactgataaacttgagggtaaaacaatacctgttgcaaaaaatgtttttgattacacagttttagagccatttggtgtatcagctcatgttgtaccatggaattttccattatctatgattggaagatcactatcttgttcttttgctacaggaaattcaacaattattaaaactgcaga

SEQ ID NO: 213024 - DNA, 484 bp, Unknown
  Bacterial polypeptide expressing nucleotide sequence isolated from the Sargasso Sea
atgaaattaattgaacattttgtaggtggaaaaataatccccggaacttcgaaaaaaaaaggcaaagtttttaatcctgctactggtgagcaggagaaggaagtaagacttgcctcctctgctgacttagatcaagcagtaataattgccaaaaaagcttttgaaacatggtcattaaaaccctcacttcaaagagcaagaataatgtttaaatttaaagagttaattgaaaaaaattctgatgaacttacacaattaattgtttctgaacatggaaaagtttatgaggatgcaaaaggttcattaacgcgaggattagaagttgtagaattcgcttgtggaattccacacttacttaaaggagaattttcagaaaatgtaggaacagatgttgatagttggtcaatgcgtcaaccactaggtgttgttgctggaataacaccatttaactttccagccatggttccgatgtggatgtttccaa

SEQ ID NO: 213025 - DNA, 907 bp, Unknown
  Bacterial polypeptide expressing nucleotide sequence isolated from the Sargasso Sea
aaagcttttgagacctggtctttaaaaccaccaattcaaagagcaagaattatgtttaaattcaaagagttaattgaaaaaaattctgatgaattaactaaaatgattgtctctgaacacggtaaagtttatgaagatgcaaaaggttcattaataagaggacttgaagtcgtcgaatttacttgtgggataccacaagttttaaaaggagaatttacagagaatgtaggtacagatattgatagttggtcaataagacaaccccttggtgtttgtgcaggaataactccatttaattttccagccatggttccaatgtggatgtttcctatggctatagcttgtggaaatacttttatattaaaaccatcagaaaaagatccttcaatttcaattaaattagcagagctgttcaaagaagctggattgccggatggagtatttaatgtgataaatggtgataaggaagtagttgatgcgattctaactaataacgatattaaagccgtaagctttgtgggatcaactcccattgcaaaatatatttatgagaatgcagcaaaaaatgaaaaaagagttcaagctttaggaggagcaaaaaaccactgtgttgtgatgcctgattgtgatctagatcaagcagttaatggtttaatgggagcagcctatggctctgctggtgaaagatgcatggcccagtcggttgcggttgctgtaggtaatattggagataatttagtaaataaattaacaaaaaaggttgaagcattaaaagttggcccaggtatggataaaaaatctgaaatgggaccattggttactaaagagcatttagaaaaagtaagaggttatgttgatctaggagtaaaagagggagcaaaattggtagttgatggaagaaacttaa

SEQ ID NO: 213026 - DNA, 747 bp, Unknown
  Bacterial polypeptide expressing nucleotide sequence isolated from the Sargasso Sea
gaagattttatatttagattaaaagaatttaattttgaaaaacattttgatccaaaatcaaacaatcacattagctatgaaccaataggagtttgtggtttaatcactccatggaattggccaataaaccaaatagctttaaaagtagttccggcgttagcaactggttgtacaatgctacttaagccatcagagatagcacctatctcaggaatgctatttgctgaaatgatagatgaagcgggttttccatcaggagtctttaatttagttaacggtgacggagcgggagttggaacactaatgtctagtcatcctgatattgatatgatctcttttacaggttcaacaagggctgggaaattaatttcgaaaaatgcagctgacacaatcaaaagagtttgtttagaattgggaggcaaaggtggaaatattgtttttgcagattcttatcctaatgcggttagagatggaattagaaatgtgatgagtaactctggacaatcatgcgatgccccgacaagaatgcttgtggaaaaatctatttatgaaaaagcaattaaagaagctgctgatgaagccaataaaattaaagtagatattgcatcaaaaaaaggagatcacataggacctgtggtttcaaaagttcaatataataaaattattaaattaattgaaagcggaattgaagaaggggctacattggctgcgggaggacctgaaattccaaataatttaaaaaaaggc

SEQ ID NO: 213027 - DNA, 321 bp, Unknown
  Bacterial polypeptide expressing nucleotide sequence isolated from the Sargasso Sea
tagaaggtgtagctatgagagtgccaaccccaaatgtttcattaattgaacttgtcttttgtacaaagaaagatttgagtattgaaaaaataaattcagcatttgagaattttagtaaaaaaaataaaattattgaaatcacgaaagaaaaacttgtttctattgatttcaatcataatcctgcctcatcaattattgatgcaagtttaacaaatgtggttggcaaaaatatgggaaaaatctcagcctggtatgataacgaatggggtttttcaaataggatgtgcgatatagctgagtatcttcataaaatttcctaat

SEQ ID NO: 213028 - DNA, 538 bp, Unknown
  Bacterial polypeptide expressing nucleotide sequence isolated from the Sargasso Sea
tatggaaaataaaaaaaatttttatatagatggtaaatgggtaacggcaataagcaaagaagaaattaaagtaatcaaccctgctacagaggaagaatgtgctgtaatatcattaggaagcaaagaagatgttgacttagcagtaaacgctgcaaaaaaagcttataattcatgggcattttcacctaaagaagaaagaataaggttattagaaaaactttatgaaaattataaaaaaagatgggcagatattgccaatgctattactgttgaaatgggtgcaccaaaagactttgctacaaaacttcaagctggaacaggtgcggctcatttaaagtcttttattaggtatttaaaaaatttcgaatttgaaaaaccattaggtgaacatgcgccaaaccaaagacttatctatgaaccaaaaggagtttgtgcattaataacaccttggaattggccaatgaatcaagtttgcttaaaagttatgcctgcaattgcctctggatgtacaatggttttaaaaccgtcagaacttgcg

SEQ ID NO: 213029 - DNA, 233 bp, Unknown
  Bacterial polypeptide expressing nucleotide sequence isolated from the Sargasso Sea
taattcaaagtatggattacacgctagtgtttttactcaagacattaatagagcatttcatttagcaaaaagtttgccttgtgggacagtatcagtgaacactttttctgaaggagatatcaaaactccatttggaggttataagcaatcaggatcactaagtagagaccaaggaactgaggctctaaattcatttcttcaaacaaaaacaatttggataagtcataattagt

SEQ ID NO: 213030 - DNA, 683 bp, Unknown
  Bacterial polypeptide expressing nucleotide sequence isolated from the Sargasso Sea
tgataacaaatcaaataatcatatctattatgagccaattggagtttgtggattaatcacaccatggaattggccaattaatcaaattgcattaaaagttgttcctgcattcgctactggatgtacaatgattttaaaaccatcagagatagctcctatttcaggaattttatttgcagaaatgattgatgaagcaggttttccaaaaggagtatttaatttagtaaatggtgatggtgcaggagtaggaactgatatttcaagccaccctgacatagatatggtttctttcacgggctcaactcgagcaggaagattaatctcaaaaaatgctgctgaaacaatcaaaagagtttgtcttgaattaggtggtaaaggtgggaatattgtttttgctgatagttataaagatgcggtaagagacggtattagaaatgtaatgagcaattctggtcaatcttgtgatgcgccaacaagaatgctcgttgaaaaatcaatttatgaaagagctgttgaagaagcagtagatgaagcaaacaaaattaaagtagatcaagcttcaaaaaagggagatcatataggaccagtaatttctaaaattccatatgataaaattataaatcttatagaaagtggaatttctgaaggtgcaactcttgcagcaggtgggcctgagctaccaa

SEQ ID NO: 213031 - DNA, 853 bp, Unknown
  Bacterial polypeptide expressing nucleotide sequence isolated from the Sargasso Sea
gatatagcaaatgatttaaatttccaccaatgcactgaatggaaaaatactcctgttagcgagagagcagatgtcttttatagaattgctgataatttagagaaagattctacaaaattcttatattacttaattcatgaagctgggaaaacatacaaagattcctatgatgaaattagggaggcagtcgattttcttagatattatgcagacaatgctaaaagtcttttaagcgaacccaacaacctcaatggtccaacaggtgaatctaatgagcttttctaccagtcaaaaggtacttttgtttgcatcagcccatggaatttcccgcttgccatttttgcaggtcaaatagccgcggctcttgtaacagggaattcggttatatcaaagccgtctgagcatactccaataattgcgaccatgatgattgagcttttttataaaaatggtgtgccaaaatctgctttaaaattaattcagggtgatggtccaataggttcaaaactaatttcatttgaccaaatttctggagttgcctttactgggtcctcagcaactgcaaagaaaattaatctccagttggctaaaaaagatggtcccatctcttctttaattgctgaaactggtggccttaatgcaatgtttatagattcaagctcacttcatgagcaggttgttgatgacataatgcgatcttcttttaatagtgctgggcaaagatgttctgctttgagattagcaattattcatgagagtatttttgatgatctggtagagatgattaaggatgcgatggctgaactcactgttggtaatcccgaagacttccactgtgatgtgggtccaatta

SEQ ID NO: 213032 - DNA, 488 bp, Unknown
  Bacterial polypeptide expressing nucleotide sequence isolated from the Sargasso Sea
taccaataacgataaaattatttctgcagcatcttgtacaacaaattgtttggctcctgtcttagatatattaaatactgaatacgagattgaaagaggttttatgactactatacattcaataaccactgatcaaagaatgttagataactctcacaaagatccaagaagagcaaggtctgctgttcaatcaatcgtccctactaccactggagcaacaaaatctattggagaaataattccatctttaaaaggaaaaattgaaggggtggcaatgagagttccaactccaaatgtttctttaatagaattagttttttgtacaaaaaaagaactgtctgttgatgagataaataaaagttttttaaaagcatccaaaaaatctcataaaggaatattggatattactaatgaaaagttggtctctattgattttaatcataatcaattttctgctgttgtagatgcctcacttactactgttattg

SEQ ID NO: 213033 - DNA, 518 bp, Unknown
  Bacterial polypeptide expressing nucleotide sequence isolated from the Sargasso Sea
catggaattaaaaaataaatctttatttaaacaggaatgcttcataggaggtaagtgggttaatagtataaatggtgaaacaatcgaagtagaaaacccagctatccaagaaacaattgggatcgttccaaaatgtgatgcacaagaaactaagactgccatagaatccgcaaatattgcttttaaagattggaaaaacaaaactgcaaaagaaagatcaatcattctaaaaaaatggcatgatcttatcttggagaatattgatgacttagcacatataatgacagtagaacaaggaaaacctcttgttgaagctaagggtgaaattttaatgggaaccacttatattgaattctacgccgaagaagcgaaaagagtttacggagatattattccggaccctatgcctgataggagaatagttgttattaaacaaccagttggagtaatcggtgcaattacaccttggaattttccaagtacaatgattactagaaaatgcgcaccagctctagcag

SEQ ID NO: 213034 - DNA, 799 bp, Unknown
  Bacterial polypeptide expressing nucleotide sequence isolated from the Sargasso Sea
atgacgataaaaatcggaattaatggaatgggaagaataggtagaatggttgttagagcaattgtggaaagtaaaaataaaaaaattattataaaacatattaacaatcgaactaattcggaaattacctcagctctacttaaatatgactcgatacatggaaaatttgatgcgaatttatcttataattcaaataacttgtttattaacaaaaaaaaaatttctttttctcaagagtcaaatatagatgatatcaactggaaaaaatttgatgttgactatgtttttgagtgtactggaaaatttaattcaaaagaaaaattaataactcatataaaaaatggagcaaaaaaagtaattgtatctgctccgtgtaaaaatgcagataaaacgatagtatttggagtaaatgaaaaaaaaattacaaaaaaggatcaaattatctccgctgcttcttgtactacaaattgcttagctccagtcgtaaatgttttaaacgaaaattttataattgaaaaaggttttatgacaactgttcatgcatttacttctgatcaaaaaatattagacaattctcacaaagatataagaagagcaaggtcagcaactcaatcaatcgtgccaacctctacaggagcttcaaaatctataggagaaataataccatcattaaaaggtaaacttgagggtattgccttgagggtgccaacaccaaatgtctccctaatcgaatttgttttttgtacgaaaaatacattaacgaaagaaaaaataaataaatctttgaaaaagcatctaa

SEQ ID NO: 213035 - DNA, 733 bp, Unknown
  Bacterial polypeptide expressing nucleotide sequence isolated from the Sargasso Sea
agacgagaaaggtttatctgctcatttaaagtctaaaggagcaaataaggttttgttaactgctcctaccaaatctccactcaaaaatattgtttatggtgtaaatgaaaatgacctagatgataaggataagattgtcggtgctgcctcatgtacaacgaatgcaatagttcctcttttaaaagctctcgatgatgattatggaatcacaaacggacatgttgaaacaattcattcatacactaacgatcaaaacctaattgataattatcattcaaaatccagaagaggaagaagtgctgctttgaatatggtaattactgaaaccggagctgcctcagctgtaagtcagattcttccaaatttaaaaggtaaattaacagcaaacgcaataagagttcccactccaaatgtttcattggcaattcttaaactttccttaaataaatctttgagcgacaaggaaacagctaatgaatatttcagacaattagcatttcactcaatatacaaagaccaaatagattttactaattcttcagaaatcgtatcttctgatttagttggaagtaggtacgcttgtgttattgattctgaagcaactatttgcgacgacaaacaagtagtaatttacgcctggtatgataacgaactaggttactgcgtccaactcctgagagttattaaaagtcttgcaggaattaaatataatcgcctcccttactttttgtaa

SEQ ID NO: 213036 - DNA, 192 bp, Unknown
  Bacterial polypeptide expressing nucleotide sequence isolated from the Sargasso Sea
agaccggtgatatggatcgtgcacgtcgggtggcggcacaatggcgcgccggcatgatacaggtgaatggtgccagccggatttccggcagcccctttggcggctacaagcaatcaggcgtggggcgcgaaggcggcatgtggggcattgaagaatttctggaaataaaaactatcagcggcattgtctaat

SEQ ID NO: 213037 - DNA, 165 bp, Unknown
  Bacterial polypeptide expressing nucleotide sequence isolated from the Sargasso Sea
tgcaggaaaacttgaggctgggcaaaatttatgtaaatagttggtttacaggaagtgttgctactccttttggaggctataaacaatctggatacagtcgggaaaaaggacaagaagcaattaaaagttatcttcaggtcaaaaatgtcggcatccaactttaat

SEQ ID NO: 213038 - DNA, 532 bp, Unknown
  Bacterial polypeptide expressing nucleotide sequence isolated from the Sargasso Sea
atgagctcaggaaataaatataaagcaatatcaaataaactaaaatttgaagggagagcattcattaatggtaaatatgtaaatgctattgatggtaaaaaatttgaaacaatcaacccagcaacaggtcaaaagctttgtgctgttgcaaaatgtaatcataaagatgttgatttggcagtgaaagtttcaagaaaagcttttattagtggagtttggtctaaaagttcacctgaacatagaaaagaggttttattaaaatttgctgaattactcagaaaacaaggtgatgaaaattcagttttagaatgcatagatacgggtaaacttatcgccgactgtattaatgaagttgcaaatgatgctccaatgcattttcagtggtatggagaattaattgataaagtatttggaaaagttggcccaactgaaccatccattacaagcttaattgttaaagagccaataggagttgttgctggaattgttccttggaactttcctttaaatcttctgctggttgttcagtaat

SEQ ID NO: 213039 - DNA, 468 bp, Unknown
  Bacterial polypeptide expressing nucleotide sequence isolated from the Sargasso Sea
catttactaatgatcagagaatgttagataattctcataaagacccaagaagagcaagatctgcaggccaatcaatagttcctacatcaacgggcgcatcaaaaacaataggcgagataataccatcattaaagggtaaattagaaggtgttgcaatgagagtaccaacgccaaatgtttccttaatagaatttatatttaatgtaaaaaaaaatattactacaaaagaactaaataaatcattattgttagcatctcaaaaaaagcttaaaaatattttaaattttactaatgaaaaactagtctcaattgactttaatcataacaatgcatcagcaataatagatgcttctttgacaaatgtaataggtaacaaaatgggtaaaatttcagcttggtatgataatgaatggggtttctcaaacagaatgtgcgatattgctaggtatgtaagcaagatcaagtaat

SEQ ID NO: 213040 - DNA, 713 bp, Unknown
  Bacterial polypeptide expressing nucleotide sequence isolated from the Sargasso Sea
tatgaaagataaaaaaaaattttatataaatggacaatgggtcaatccaattaaagcaaaagattttgatgtaattaatccctctactgaagaagtttgcgcaataatttctctaggcagctctgaagatactaatcttgctgtaaaatctgcaaaatcatcttttgaaacttggaaagaaacttcaaagcaagaaagaataaaacttttagaaaaattattagaaatctataaatctagatgggatgaaatgactgatgccatatcaactgagcttggttgtccaaaagattggtgttcagccaatcaaactgcatctggtgcgggtcatattgaagattttataaaaagattaaaagaatttaattttgaacctggttttgacaaaggatctgttaatcacattgtatatgaaccaattggtgtatgtggtttaattaccccttggaactggccaattaatcaaatagctcttaaagttgtgccagcacttgcaactggttgtacaatggttttgaaaccttcagagatagctcctttatcagcaatgcttttcgccgaaatgattcatgatgcaaaatttcctgcgggtgtatttaatttagtaaatggagatggaccaggcgttggtacagatttgtcgggacatcctgatgttgatatggtttcctttactggatcgacaagagcaggaaagttaatcacaaaaaatg

SEQ ID NO: 213041 - DNA, 933 bp, Unknown
  Bacterial polypeptide expressing nucleotide sequence isolated from the Sargasso Sea
tattgctgaatatgaaaatcgttacgatgatttagttcaagtgataacagaagatatgggtgctccaatatggctctcagaaaaagctcaagcatcaactggaattaaaaatttacatgaaactttggatgctcttaaagaatatgaatttgaaaaaaaagaaggtgattacacattaattagagagcccattggtgtaataggtatgatcacgccgtggaattggcctatgaatcaaattactaccaaggcatcagctgcacttgctgcgggatgctcaatggtgttaaagcctagtgaaatttctccatattgtgcgctcctgcttgccgagatatttgatagagctggagtgccagcgggtgtctttaatgtggtgaatggatacggcccgattgtaggagccgccctatcagaccatccagatgttgccatgatgtcttttacaggatcaaccgaagctggaattgcagtcgctcaagcatctgcggtttctgttaaaagagtgcatcaagagcttgggggtaaatcttcaaatattattctggatgatgtcgctgatcttgagaaatctgtgaaaggcggtgctgggcattgtttcttaaactcaggacagtcatgcaatgcacctacaaaaatgctggtttcagagaaaaattatgagaaagcagttgaagttgcagtgcaaactgcaaatagcacaactatcggtgatcctcagggagaatttagaattggacctattgcgaacaagcctcagtatgaaaagatactgagaatgatcaaaataggcattgaagagggtgcgaccttagttgctggcggtgttgaaaagccagagggctatgaaaaaggatactatgtaaaaccaactgtgtttgccaatgttactaatgacatgaccattgcaagagaagaaatttttgggtcagt

SEQ ID NO: 213042 - DNA, 715 bp, Unknown
  Bacterial polypeptide expressing nucleotide sequence isolated from the Sargasso Sea
ggttgtacatcttttagagaataaacaactagactcggaaaagtatgttgacaaatgtttagcagaacaaaaaagaacaaaaagatcttatcctttgaggccaaaagatattgttatttatggttttggaagaattggaagaatcttaacgagaatacttataagtgatactggtgcaggagcaaaatggaggcttagagcaattgttttaagagattctggacacgatgatgatctcataaaaagagcaggtctattgagaaatgacagcgttcatggtgcgtttccaggtactataagagtaaacaaacaaaataattcattgataataaatggaaatgaagtttcgtttatatactcagacaatccaaagaaggtcaaatacaaagattttgatattaaaagagccactgtaatagatagtactggagtctggagggacgaagaggggctctcacaacatgtaaagaacccaagtgttgaaagagttttattaactgctcctgggaagggaaaaattaagaatattgtttttggagttaatgatgataaggcatctcctgaggataaaatgcttgcagcagcatcatgcactaccaatgcaatagtcccggctctaaaacttatagatgataattttaagattgtaaacggtcacattgaaacagttcactcatttacaaatgatcaaaatttaattgacaattttcaccca

SEQ ID NO: 213043 - DNA, 895 bp, Unknown
  Bacterial polypeptide expressing nucleotide sequence isolated from the Sargasso Sea
gagcacaaagacaatcttgttcgtctacaggctcgtgaaattggtaagacattgaaagaatgtggtggtgaaattcaggaggctattgacacatgtctcttcttccaatcagaaggtcgcagactatatggtcagacagtcaactcagagttaccgaacaaagaattgttcacctatcgtagaccattgggggtttgtggaataatcaattcttgcaacttcccctcagcagttccgttctggaagatgatcccagcaattatgtgcggcaatacctgtgtttggaagtcccctcaagattctcctctactttctttcgccttagcgcgtgtaatgcatgaagcaggattaccggatggtgtaattaatctggtacatgggaatggtagtggagcgggtcaagcactggttgattcagccgatttaggtatggtagacaaaatctcattcacgggtagtaccgcagtcggtaagatgattggagaaacttgtggtcgtaatcttgttagtgcttccttagaactaggaggaaagaacccactcgtaataatgccttccgcaaatatggaaaatgctgttgagggtgcctactgggcaggattcggaactgcaggacagcgctgtactagcctaggaaatttgattattcacgaagacatctatgatgagtttgttgaacgatttatggagaaggtgaaatccacttcgattggtgattcgatgcgtcatgagggagttctgtatggtccaatgctatccgaaagatatgcagttgatttcatgcaaggtgtcgatatgtgtgaaaatagcggtgctaacaaaatttggggagaaggtcgaattacaaatgacaacaagccagatagtttccatggtgatgctagcgaaggcatct

SEQ ID NO: 213044 - DNA, 259 bp, Unknown
  Bacterial polypeptide expressing nucleotide sequence isolated from the Sargasso Sea
atgaatttaatagagcacttcgttaatggaaaaataattccaggttcatctgatagaaaaggaaaagtatttaatcctgcaacgggagaacaggaatccgaggtaagacttgcaagtaaatctgatttagatcaagctgtagaggcagctaaaaaagcatttgaaacttggtctgcaaaacctcctctacaaagagcaagaataatatttaaatttaaagaattaatagaaaaaaactctgatgagttaacaaagctaa

SEQ ID NO: 213045 - DNA, 899 bp, Unknown
  Bacterial polypeptide expressing nucleotide sequence isolated from the Sargasso Sea
gatgcttcctatgattggaagaatctatagagacaatgtccatcttcttttgtatggaaagccactggtgaacttatcagtttcagaaattatgaatgctcatagatttgtaagagaaaccgaaaacaatgagatgagtgaatttgaaacctatcaagtcattgtagctcttagtgatctagaattaggaccggctgaagttgatataggaatcatagcggcaacttacctgtttgatgataaggatctctctatcgaagatttcgtaaaagaatcggtaaatgacttgattggaactaaaggatctatattggaacaggctcaggatgttgtcctttatggtttcggaagaataggaagattgttaacaagaatgttaattcaagattctggtggaggagataatctaaggttgcgagcaatagtcgttagaaaagctgtcgatgacgacatcattaaaagagcaaatctaatgagaactgattctgttcatggtcccttcaaaggaacaattcgtgttatcgaagaagagaacaaattaattataaatggtaatgaagtaaaaataatttatgccaacgatccttcagagattgactatactgacttcggcataaataaagctttattgattgataatactggagtctggagaacaaaagaaggtttgaatactcatttaagttgcaatggaatttctaaggtactacttactgccccagcaaaagaaggtataaaaaatattgttcatggtataaacaacgaaattatagataatgatgaaatcttaggggctgcttcatgtacaacgaatgctatagttccaactttaaaggtccctaatgatgagtttaatattatctcagggcacatcgagagcgtacattcctacactaatg

SEQ ID NO: 213046 - DNA, 601 bp, Unknown
  Bacterial polypeptide expressing nucleotide sequence isolated from the Sargasso Sea
atgcaacagtataaaaattttattaacggaaaatggattagtagcgaatcaaaggaaactataaaagttgatgatccttcaaatggtaaagtcattggtgaaatttcatgtgcaaaaaaaaatgatgttgatcttgctgtagaagcagcaaagaattcttataacaatagagtacttgtagatatgccattgcttacaagagcaaaattaatgagaaaaattgcggaagagacaagaaaagttgcaaaagaaggaggagaacttctttgttatgaaaatggaaaaaatattgcttcagcaattaaagaattcaatgatgtagcagatatgtttgattattatgccggtctaactgataaacttgaaggcaaaactatacctgtagcaaaaaatatttttgattacacagttttagaaccatttggtgtgtcagcacatgttgtaccatggaattttccattatctatgattggaagatcactatcgtgttcttttgctacaggaaattcaacaattataaaaactgcagaattaactcctttgtccgcaacaatttttgcaaaagcaagacaaaatgctgatgtaccagatggtttaatta

SEQ ID NO: 213047 - DNA, 625 bp, Unknown
  Bacterial polypeptide expressing nucleotide sequence isolated from the Sargasso Sea
atggaaaataaaaaaaatttttatattgatggaaaatgggtagcaccaaaaagcaaaaaagagattaaagttattaatcctgccactgaggaaaattgtgcagttatctctttaggaaataaagaagatgttgatctggcagtaacttcagcaaaaaaagcatataacaactgggcattttcaactaaagaaaaaagagtccaattattggaaaaactttatgaaaattataaaaaaaggtgggctgatattgcaaaagctataacaactgagatgggagctcccaaagattttgcaactaaacttcaagctggtactggagccgctcatttaaaatcttttatcagatatttaaaaaattttgaatttgaaaaatcattaggagatcatgccccaaatcaaagaattatttatgaaccaaaaggggtttgtgctttaataacaccatggaattggcctatgaaccaggtttgtttaaaggtaatgccagcattagcatctgggtgcacaatggttttaaagccctctgaattagctccattatcatcaatgatactagctgaattaattgatgaaactaagttcacagcaggagtatttaatttagttaatggagacggagcta

SEQ ID NO: 213048 - DNA, 919 bp, Unknown
  Bacterial polypeptide expressing nucleotide sequence isolated from the Sargasso Sea
cttggcttttcacaaaaaaagaagaaagattgaattattagaaaaattgtacgttatttataaaaaaagatgggctgaaatggcaaaacttattactcttgagatgggagcgcccatgaaattttctacagaaatgcaagctgcaacaggagctagtcacattaaatctttcaaaaatatattaaaagattttaaatttgaaaaagatttaggagaagaaaagaataaccaaaaattattgtatgaaccaaaaggtgtctgtgcattaattactccctggaattggccaattaatcaagttaatctaaaggtaattccagcattggcggcttcatgcacagtagttttaaaaccatcagagatagcacctttatcatcaatgttacttgctgaaatgattgatgaagtaaaatttccagctggtgtttttaatttggttaatggtaacggtgctgtaactggtgatgccttaactagtcatcctgatgttaatatgatttcttttacaggatcaacaagagctggagctttaatttcacaaaatgcagcaaaagattttaaaagaataagcttagaattaggtggaaaaggtgcaaatataatatttaaagatgcagattcagatgcaatagcaagaggcgttctaagatgttttagaaattcaggacaatcctgtaatgctcctacaagaatgcttgttgaaaagtcgatttacgataaaactgtagaaaaagtaaaagaattagcaaataatactaaagtagattcaccacaaaaagacggggatcatattggaccagtagtttctgaagtacaatttaaaaaaattcaaacattaattcaaaaaggaatagacgaaggtgcaaaattagttgctggtggaactggcaaacctaaaggtttagaaaaaggttattat

SEQ ID NO: 213049 - DNA, 898 bp, Unknown
  Bacterial polypeptide expressing nucleotide sequence isolated from the Sargasso Sea
ttctgtgcttaagaaccttcatcgtctcatgctcgaacatcaggaagacttggcaaggattataacgcatgaaggcggcaaaccactctctgaatcaatgggtgaaattgcctatgctgcgtctttttttgaatggttttcagaagaggcgaaaagagtttatggtgatgtaattcctggtcatcaacaggatcgaagaacgcttgtgatcaaacaacccatcggcgttgttggctgtatcacgccatggaattttccatcggcaatgttggcaagaaaaatcgcgcctgctatagcagttggctgcacagtggttgcgaagccagcaccagaaacaccctattctgcaacagctatggcgtatctctctgaacttgctgggatacccaaaggtgtatttaatgtggtcacaggcgatgctgaaaaaattggctctgtgatgacaacccacaaagaagtaaaaaaaatcacttttactggctccaccgctgttggaaaacaattgctcaagcaatcggcagataccgtaaaaaaagtttctcttgagctaggaggtcatgccccttttattgtctttgaagatgcaaatcttgaggatgcagttgatggtgcgttgattgcaaaatatagaaacagtggccaaacatgtgtttgcgccaataggatttatgtccaatcaagcatctatgacgatttctctaagcgcttcactgagaaatcctctcaattggtggttggtgacggtcttgcagagtccacagagcaggggccattgattagcgaagatgccatgaaaaaagcgtcaaaacatgttgaggatgctaaaaacaaaggtgcaactattgccacaggcggaaatccacattcgctaggcgggttatttttgagcccactgtat

SEQ ID NO: 213050 - DNA, 523 bp, Unknown
  Bacterial polypeptide expressing nucleotide sequence isolated from the Sargasso Sea
atgtatagcaaatttggacaatttatagatggtaaatggcaggagtctcaaaaaaaagagacttatgaagttataaatcctgcgacagaagaaattttaggaaatgcttcaaaagctgctccagctgatgtcgaaaaagctctaaaatccgctgaaaaaggattagaggtatggaaaaatactgcgccttggcaaagatcttacataattagaagaattgcagacttgatgagagagaaaaaagatgttcttgcaaaatggttaacattagaagttggtaaaccttttgcagaaggtattggtgaagttggaggttctgcagacatatttgaatggaatgcagaagaaacaaaaagaatttatggacagactgtagaaagtagatttcctgatactagggtgcatgtttattatcagccagttggggtagttgctgcacttgtgccttggaattttcccccttgtattagcttcaagaaaaatttctacagccttagcagctggttgctctgtgatttgtaaa

SEQ ID NO: 213051 - DNA, 955 bp, Unknown
  Bacterial polypeptide expressing nucleotide sequence isolated from the Sargasso Sea
gaagaagcaaaaagaatttatggcgaacccttacaaggtagatctccagatacaaaaattcatgtttattatcaacctgtaggagttgtagcggctttagtgccatggaactttccagtaacattagcttctagaaaaatttctacagctttatcggctggttgctcagtaattgtaaaaccagatgttatcaccccaggttcagtgatggaattagttgatatatgtagagaagcaggtgtgccacctggcgtagtgaatcttttgtcaggagatccagcgtttatttctgataaattattatcatcagatataattaaaaaagtttctataactggctcaacaagagtaggtaaactaattttgaaaaaagcagcagaaaaagttcaaagagttactatggaattaagtggtcattctccatttatagtttttgatgatgtaaatttagataaagtaactgacatagcagttttcgctaaatttagaaataatggtcaagtttgtatctctcctagtcgattttatattcacgaaaagaaaaaagatgactttacaaaattaatggttgaaaaaacaaaaaagttaaaaattggtaatggtattgaaaaaggtactattttaggaccactgactacaaaaaaaagattagaagaaattgaaaaattagttgaattaacaaaaaaggaaggtgcaaaagttttatgtggtggtagaaaacctgctggttttaataaaggctacttttatgaacctacaatttttgatggtataaaagatgactttacaatcatgaatgaggaaccgtttggaccattagtgccaattctttcatttaaagattttgatgaagttgtatacagagcaaataagaatgatttaggtctagcaagttatatatatacaaataatttgaaaaaggtcataaagcctcggagcttatggagacaggaac

SEQ ID NO: 213052 - DNA, 687 bp, Unknown
  Bacterial polypeptide expressing nucleotide sequence isolated from the Sargasso Sea
ttgaaaaagttatcttgactgctccagcaataggaaaaattaaaaatattgtttatggaataaacgatggaaaagcaaagccagaagaaaaaattcttgcagctgcttcatgtactacaaacgcaatagcaccagttctaaaacttgtcgatgataatttcaagattgtaaatggtcatatcgaaacagttcatgcatacaccaatgaccaaaaccttatagataattatcactcatcagatagaaggggtcggagtgcagcgctaaatcttgtcattacagatactggtgccgccaaagcagtatcagaggttctgccagacttaaaaggcaaactgacagcaaatgccattagagttccaactccaaatgttagtttagcaatactaaatttaactcttaaaagaggggtaggagttgaagagcttaatgattgttttagaaaggctgcatttagatcaaagcttagggaaacaattgactataccaattcattagatgcagtatcttcagatttttatagcaatgaatttgcagtagtttatgactctcaagcaactattagtaattttaatagtgtaactatttactgttggtacgataacgagtatggttacaccaagcaagttgtaaggcttttgaaaaaagtcattggtgcaaatttaacaagatacccgaaacaataaa

SEQ ID NO: 213053 - DNA, 352 bp, Unknown
  Bacterial polypeptide expressing nucleotide sequence isolated from the Sargasso Sea
atgcttagaattgcaattaatggttttggtagaataggacgaatggttctccgagcactttatgaaaataattataaaggcttaaaagttgttgcaattaataatagagctagcactgaaacaagcgcatttttgctagaaagagatacagtccacggcaaatttaataatagtattaaatatacaaaagatgaaatcataataggtaaagatataatccaatgttaccacgaagatgatcctataaattgtccatgggatgatgacaaaattgatattgttttggaatgtactggaaaatttaattctaaagatgagtctttcagacatatagaagcaggtgcaaaaaaag

SEQ ID NO: 213054 - DNA, 868 bp, Unknown
  Bacterial polypeptide expressing nucleotide sequence isolated from the Sargasso Sea
gttgatatagatttagctgtagaaaaagcacaaaaagcttttttagattggtctaggaaaccaccagcacaaagagcaagagtaatatttaaatttaaagaattaatagaaaaaaattatgatgaattaactaagcttatagtttctgaacatggaaaagtttatgaagatgcaaaaggctctctaactagagggttagaggtagttgaatttgcttgtggtataccccatctccttaaaggagaatttacagaaaatgtcggaactgatgttgatagctggtcaataagacagcctctaggagtttgtggaggtatcacgccttttaattttcccgctatggttccaatgtggatgtttccgatagctattgcttgcggtaatacatttgtattaaaaccttctgaaaaagatccatcttgctcaattaagcttgcacaattatttaaagaagcaggattgcccgatggagtatttaatgtagttaatggagacaaagaagcagtagatgctttattaacaaataaagatgtagtggctataagttttgttggctcaacgcctatagcaaaatatatttatgaaaatgctgcaaaaaatgaaaaacgtgttcaagctctaggaggtgcaaaaaatcattgtattgtaatgcctgattgcgatcttgaccaagctgttaatggtttaatgggagcagcgtatggttcagctggagaaaggtgcatggcccaatccgttgcagttgctgtaggaaaaattggagataatcttgtgaacaaacttaaacaaaaggtgcaatcgctaaaagttggcccaggattagataaaaattcagaaatgggaccgttagttacaaaggaacatttga

SEQ ID NO: 213055 - DNA, 529 bp, Unknown
  Bacterial polypeptide expressing nucleotide sequence isolated from the Sargasso Sea
catggaattaaaaaataaatcattatttaagcagcaatgttttattggtggaaaatgggtcaaaagccaaagtggggaaacaatagaagtagataatcctgcttcgcaagaaacaattggtgttgtacctaaatgtggagctgaagaaaccaaacaagctattgattcggcaaatttagcttttaaaagttggaaatctaaaactgcaaaagaaagatcaattatattaaaaaaatggcatgatctaattttagaaaatatagatgatttagcacatattatgaccgttgaacaaggtaagcctcttgcagaagctaaaggtgaaattactatgggaacaacttatatagaattttatgctgaggaatgtaaaagagtttacggggatattattcctgaccctcttccagatagaagaattgttgttattaaacaaccagtaggggttgttggcgcaataactccttggaactttccaagtacaatgattactagaaagtgtgcccctgcacttggagtaggctgtcct

SEQ ID NO: 213056 - DNA, 778 bp, Unknown
  Bacterial polypeptide expressing nucleotide sequence isolated from the Sargasso Sea
atgtacgaaaaattcgggcaattcattgatggtagatggcaaaaatcatcagatgagggaacttacgaagtaatcaatcctgcaaatgaagaagttttgggaaaagcctcaaaagctacaactcaggatgttgagagagcattaaagtctgctgcaaaaggattagaagtttggaaaaaaactgctccatggcaaagatcttatatcataagaagaattgcggacaaaatgagagagaagcaagatgtgcttgctaagtggatgacacttgaagttggaaaaccttttgcagaagccaaaggtgaggttaatggtgctgcagatatttttgagtggaatgctgaggaaacaaaaagaatttatggacaaactgttgaaagcaggtttgaagacacaagagttcatgtttattatcaaccagttggtgttgtagcagcattaactccatggaatttccccgcagtgttgtctgcaagaaaaatttcaacggcgctagcagctggttgctctgtaatagttaagcccgacgtaattacccctggtattgtaatggagatggttgatatatgtaatgaatgtggtgtgccaccaggcgtagtaaatcttttgtcaggtgacccacctagtattgcacaacagttgattgcatcagatatagtcaaaaaaatttcaattactggatcatcaagagtaggcaaattaatattgaaacaagctgcagataaagttcaaagagtaacaatggagttatcaggtcattcaccttttattgtatttg

SEQ ID NO: 213057 - DNA, 170 bp, Unknown
  Bacterial polypeptide expressing nucleotide sequence isolated from the Sargasso Sea
aaaaagagtatctaaaaaacttagatctgggatcgtttatattaatggaaattctccagactctggaactccttttggtggatacaaacaatctggaaatggacgcgaaggcggttcttggggattggaagaatatctagaggtaaaaacaattactggctggaaataaa

SEQ ID NO: 213058 - DNA, 190 bp, Unknown
  Bacterial polypeptide expressing nucleotide sequence isolated from the Sargasso Sea
aatgggtagagcaatacaagcaggaattgtgtggactaattgttatcacgcttatccagctcactctccatttggtggctacaaacaatcaggtgtcggaagagagactcataaaatgatgcttagtcattatagacagaataagaacttgcatgtgtcttatgctgaaaagaaattaggcttcttttaa

SEQ ID NO: 213059 - DNA, 931 bp, Unknown
  Bacterial polypeptide expressing nucleotide sequence isolated from the Sargasso Sea
cagaagtagattagcgagcgttaaagatgttaatgaagcaattgccaatgcaaaaaatgcttttgagtcttggtcaaacaaacctccacttcagagagctagaattatgtttaaatttaaagagttgatcgaaaaaaactctgatgaactcacaaaaattatagtttcagaacacggaaaagtttatgaagatgcaaaaggatctttaacaagaggtttagaagttgttgaatacgcttgcggtattccgcaaatgctgaaaggtgagtttacagaaaatgtaggaaccaacgtagatagttggtctattagacaaccattaggagtttgtgctggaataacaccttttaattttcctgccatggtaccaatgtggatgtttccaatggcaatagcatgtggaaatacatttgtattaaaaccgtcagaaaaagatccatcttgttctattagattagctgaacttttaaaagaagcaggtttacctgatggagtttttaatgtggttaacggagacaaagaagctgttgatgcattaattgatagtaaagatgttgtagcgatgagctttgttggttcaacacctattgcaaaatacatttatgaaaattgtgctaaaaacgaaaaaagagttcaagcattaggaggggctaaaaatcactgtgttgtaatgccagattgtgatctagatcaagcagttaatggtttaatgggcgccgcttatggctctgcaggtgaaagatgtatggctcaatcagttgctgttgcagttggaggaataggtgacaaattagtttcttcactagcaaaaaaagttgaagcattaaaagttggtccaggtatggacaaacaatctgaaatgggccctttagtaacaaaagaacatttagctaaagttaaaggatacgtagacattggtgaaaaagaaagt

SEQ ID NO: 213060 - DNA, 685 bp, Unknown
  Bacterial polypeptide expressing nucleotide sequence isolated from the Sargasso Sea
aagtccaaatcttatatttgctgactgcaaggatttagagtcagctatcaatatggcagcttttggaattttttttaatcaaggagaagtttgctcagctaactcaaggttattagttgaaagaactgttcaagaagaatttgttgaacgtttatcattgattgcaaaagacacacagccaggccatccgcttaatccagcgtctaaaatgggtgctattgtaaatgaagtacaaacaaaaaaaattgtttcttatattaataaaggaaaagagaatgcagatttagtaattggtggtgaacaaattaaaattgaaggtaaaggatgttacgttcaaccaactatttttaataatgtaaatgccaatgatataatagctaaagaagaaatttttggaccacttttatctgttattccttttgatactgaagaagaagcattatctattgcaaatgatagtgtatatggtttagctgcgtctgtttggacagatgatttatctcgtgcgcttagagtttctgatcatcttcatgcagggacagtttctgttaatactgttgatgcattaaatacaatcactccttttggaggcgtaaaacaatcagggtatggtaaagatttatcgctacattcattcaataaatacacatctttaaaaacaagatggattaaatataaagcttaa

SEQ ID NO: 213061 - DNA, 523 bp, Unknown
  Bacterial polypeptide expressing nucleotide sequence isolated from the Sargasso Sea
gatgttagatgaaaaattagctttaatagaagcacaaaagagatttgaacaagcaaaaaagcgattagaattttctaatatcagatcgccaatatccggaattgttagtaaagtaaattcaagaaatataggtcagattgtgcaagaaggaggcctattagctgaaatagttccagaaaataatattttacagatagaagctggggtaaacccaaaagatattgcttatgttaaagttggtcaaaaagctaaggtttcttttacagcttttgatatggctatatttggacaagttgatggaacagtaacaaaaatagcagcaaattcaacggcaaatgaagacgggactagcttttatcaaacaattattgaggtagactcaaaatcaatcgcagaagaacaaaatatcatcatccaatcgggtatgcagtgtgatgtttcgataattggtcaagaaagaactgtattgagttacattgctaatccaataactaaattatcaatgagagctcttcaagaatag

SEQ ID NO: 213062 - DNA, 562 bp, Unknown
  Bacterial polypeptide expressing nucleotide sequence isolated from the Sargasso Sea
aatgactgatctcacaaaaaatccagatctcaggttaagagacaagccagatgatttttttggtgactggaaatggcgtgagggtctagcagaattaatggttcctataataggaagactttatagaaatggtgtaaacgttctcatgtacggacattcattaataaatcaatctcctcttgagataatgaagtcacatagatttataagaagagttgaagatacagaaatttctgaacttgagacttatccctttttacaaagaattgaacttcaagatattaaagattgtgagattgatctaggagagatagtagtggatttcatgagtgagaataaatctttagatgatttacaaattgactctcacattaaatcatatattttagatccactagataaagttgatcagcagagaccttcaaaaccccaggacatagttttgtatgggtttggtcgaatcggtaggttagtttcgcgcattatggctcaaatgacaggcccaggtaattattacagactcagagcaattgtcgtgagaaaaggatcagatacaaacgat

SEQ ID NO: 213063 - DNA, 744 bp, Unknown
  Bacterial polypeptide expressing nucleotide sequence isolated from the Sargasso Sea
ctggcgctgcgagccggcgtgcctgccggcctgttcagcgtcctgacgggtaacgatacccgtatcctcggcaatgaactgaccacccatccgctggttcgcaagatcaccttcaccggatcgaccgaagtcggtcgggtattgctgcagcaggcggcgagcaccgtgaagaaatgctcgatggagctgggcggcaacgcccccgtcctggtgttcgacgacgcggatctcgacacggcagtggagggtgtcatcgcttccaagtttcgcaataccggacaggcctgcatcagcgccaatcgtatctatgtccaggacgggatctacgacgccttcgcgcaacgcatggcggaacgcgtcgcgcaactcaaggtgggcaatggcctggcggacggcgttcagcagggtccgctgattgatgatggcgcggtgactaaagtagaggagcacatcgccgacgcggttgctggcggcgcgcgtgtcaagcttggcggcaagcgccatgctttgggcggctgcttcttcgagccgacgatattggtcgatgtccagccctcgatgatggtcgcgcgcgaggaaacctttggtccggtggcgccattgttccgcttccacaccgaggacgaggcgctgcggctcgccaacgatacggaattcggcctggctgcttacctgtatagccgtgacgcctcgcgtatctggcgtgtgtcggcggggatcgaatccggtatggtcggcatcaac

SEQ ID NO: 213064 - DNA, 721 bp, Unknown
  Bacterial polypeptide expressing nucleotide sequence isolated from the Sargasso Sea
catgctcgaacatcaggaagacttggcaaggattataacgcatgaaggcggcaagccactctctgaatcaatgggtgaaattgcctatgctgcgtctttttttgaatggttttcagaagaggcgaaaagagtttatggtgatgtaattcctggccatcagcaggatcgcagaacgcttgtgatcaaacaacccatcggcgttgttggctgtatcactccatggaattttccatccgcaatgttggcaagaaaaatcgcgcccgctatagcagttggctgtacagtggttgcaaagccagcaccagaaacaccctattctgcaacagctatggcgtatctctctgagcttgctggcatccccaagggtgtatttaatgttgtcacaggcgatgctgaaaaaattggctctgtgatgacaacccacaaagaagtaaaaaaaatcacttttactggctccacttctgttggaaaacagttgctcaagcaatcggcagataccgtaaaaaaagtttctcttgagctaggaggccatgccccttttattgtctttgaagacgcaaatcttgaggatgcagttgatggtgcgttgattgcaaaatatagaaacagtggccaaacatgtgtttgcgccaataggatttatgtccaatcaagcatctatgacgatttctctaagcgtttcactgagaaagcctctcaattggtggttggtgacggtctt

SEQ ID NO: 213065 - DNA, 880 bp, Unknown
  Bacterial polypeptide expressing nucleotide sequence isolated from the Sargasso Sea
aaagaagaaagaattaaccttctgaaaaagttgttaaatatatacaaaaaaagatattctgaaatggtagaagcaatatccatggaaatgggagctcctatggattggtctagagattcacaaacatcaagtggccaatctcacctggaagatttcatagtcagattaaaagaatttaaatttgatgaacaatttagtcctgggtcaaacaacagaatttgttatgagcctataggagtatgtggtttaattactccatggaactggccaattaatcagatagctttaaaagttgttcctgcatttgcaactggatgcactatgatccataaaccctctgagattgcgcctatttcagcaatgttgtttgctgaaatgattgatgaagctgactttccacctggcgtttttaatctagttaatggagatggtcttggtgttggtactgatatttcaactcatcctgatattgatttagtatcatttacaggatcaactcgtgcaggaaaattaatattgaagaatggggccgacacggtcaaaagagtatgtcttgagcttggtggtaaaggtggaaacattgtttttgcagactcctacccgaatgcagttcgtgatggtgttagaaatgtaatgagtaattcaggccaatcatgtgatgcaccaacaagaatgcttgtagaaaaaccaatttatgaaagagccgttaaagaagctactgaagaagctaacttaataaaagtagatcatgcttctaaagagggagatcacataggtccagttgtttcaaaagttcaatacgataaaattattagcctaatacaaagtggtatagatgagggtgctactttggctgctggtggtccagaacttcctaacg

SEQ ID NO: 213066 - DNA, 637 bp, Unknown
  Bacterial polypeptide expressing nucleotide sequence isolated from the Sargasso Sea
atgaaaataaaaattgggattaatggaatgggcagaattggaagaatgattgttcggtcaattattgaaaataaatataaaaatatagaaataaaacatataaataatagaacaaattctgaggcttgttcaaatcttttaaaatatgactctattcacggaaaatttgatgctgaaataggttttgataaaaagcacttaattatcaacaaaaacaaaattacttttagccaagagacagatttaaataatattaaatggaaaaagtataatgttgattatgtttttgaatgcactggcaaatttaactctaaagataaattattactgcatttaaataatggagcaagaaaagtaattgtttcagctccatgtaaaaatgctgacaaaactattatttttggagttaatgagtctgaattaaaaaaaaatgataatattatctctgccgcatcatgtacaacaaattgtctcgcgcctgtagctcatgttataaatgaaaattttgagattgagagaggttttatgacaacaattcatgcttttacaagtgatcaaaggattttagataattctcacaaagatccaagaagagctagatccgctagtcagtctattgtgccaacctccacggggc

SEQ ID NO: 213067 - DNA, 658 bp, Unknown
  Bacterial polypeptide expressing nucleotide sequence isolated from the Sargasso Sea
atgaatttaattcaacattttgtaaatggaaaaataattccaggaaaatctgatagaagaggaaaagtatttaatccagcaattggtgagcaagaatctgaagtaatattaggttcaaaatcagatttagataatgcagtagaagtagcaaaaaaagcttttgatacatggtctttaaaaccaccaattcaaagagcacgaattatgtttaaattcaaagaattaatagagaaaaattctgatgaattaactaaaatgatagtttctgaacatggcaaagtatatgaagatgcaaaaggttcattaataagaggacttgaagtagtagaatttacttgtggaattccacaagtattaaaaggagaatttacagagaatgttggaacagatattgatagttggtcgataaggcaacctcttggagtttgtgcaggcataactccatttaattttcctgcaatggttccaatgtggatgtttcctatggctattgcatgtggaaatacttttgtattaaaaccatcagaaaaagatccttctatttcaattaaattagcagagttgtttcaggaagctggattgccagatggagtatttaatgtaataaatggtgacaaagaagtagttgatgcaattttaattaacaaagaatattaaa

SEQ ID NO: 213068 - DNA, 672 bp, Unknown
  Bacterial polypeptide expressing nucleotide sequence isolated from the Sargasso Sea
tatgaaaaaataccagcactatattaacggtgaatggaccgatgcctcaagcaaagaccttattccagttattaatcctgcgactgaagaggtcattggtgaagtaacttgcgcaaaagatgaagatattaatcaagcggtagagtctgctaaaaaagcatacgagtctcgaattcttgtagatatgaatccgatggaacgagcaaaacttatgcgacgcattgctgaagagcttcgcaaggtcagtaaagaaggtggggcattactttgtgcagaaaatgggaaactactagccgcttctgaatatgaatttgttgatgcagcaaactactttgattactacagtggcttaacagataaaatcgaaggtcaaacaattccagtgaacagtcaggttatggattacacgatctatgaaccttacggagtatctggtcatattgttccttggaattttcctatttcaatgatagctcgttctttagcatgttcttttgctgctggaaattctacagttattaaacctgccgagctgacacctttagctacaacatccttcttcgctgaggcaattcataatgctgaagttccaaaaggtttaataaatatagttacaggttatggaagtgaagctggggccgcgcttactgcccatccagatgttgcacaaat

SEQ ID NO: 213069 - DNA, 452 bp, Unknown
  Bacterial polypeptide expressing nucleotide sequence isolated from the Sargasso Sea
catgaatttaatacagcattttgtagggggtaaattaattgctggctcttctaacaaaaaagggaaagtttttaatcctgctacaggggaacaacagtcagaggtaattctagcaaacacttcggatttagacgaagcagtttcaattgcaaaaaaagcttttgagacttggtctgaaaaaccagctctacaaagagcaagagtgatgtttaaatttaaggagttgattgagaaaaattctaaggaacttacagaacttatagtttctgaacacggcaaagtctatgaagatgcaaagggatcattaaatagaggtctagaagttgtagaattcgcttgtggtatcccacaagttctcaaaggagaattttcagaaaatgttggtaccaatgttgatagctggtctttaagacaacctcttggagttgttgctggaattactccattcaatt

SEQ ID NO: 213070 - DNA, 653 bp, Unknown
  Bacterial polypeptide expressing nucleotide sequence isolated from the Sargasso Sea
aagacttaaaaattttaaatttgatgaacagtttgactcaaaatcaaataatcaaatattttatgaaccaatcggagtttgtggattaattactccttggaactggccaataaaccaaattgcacttaaagtaatacctgctttagcaactggctgcacaatgatacttaagccttcggaaatagctcctgtatcagcaatgttatttgctgaaatgattcatgaagctggttttccacctggagtttttaatctagtaaatggagatggagctggtgttggaacatatatatctggtcatcctgatattgatatggtgtcatttactggatcaacaagagcagggaaattaattacaaaaaatgcagccgaaacaattaagagagtttgtttagaactaggcggtaaaggtggaaatattgtatttgcagactcataccctaatgctgttagagatggaataaaaaatgtaatgagcaattctggacaatcttgtgatgccccaacaagaatgcttgtagaaaaatctatatacgaaagagctgtaagtgaagcagtggatgaagccaataaaattaaagtagatatagcatcaaaaaaaggagatcacataggtccagtagtttcaaaagttcaatacgataaaattatta

SEQ ID NO: 213071 - DNA, 796 bp, Unknown
  Bacterial polypeptide expressing nucleotide sequence isolated from the Sargasso Sea
aatgttagataaaagaaaattttacataaacggaaaatgggttgacccaatcgaaaaaaacgattttgaggtaatcaatccttgtaacgaagatccttttgcaattatttctttaggatcaaaaaaagacacagataatgcagttaaagctgcaaaaaatgcttttgaaacttggaaagaaactgacaaaaaagaaaggttggatttacttgagaaattattagtagtttataaaaaaagatttagtgaaatggctgaggctatttctttagagatgggagcaccaatggattgggcctcggatgttcaaactggatcaggtcaagcacatttagaagattttattttaagattgaaagaatttaattttgatgaacaatttgataaaaaatcaaacaaccatatttgttatgaaccaattggagtatgtggattaattactccatggaattggcctataaaccaaatagcccttaaggtcgtacccgcatttgcaactgggtgtacgatgatacttaaaccatctgaaatagctcctatctctggcatgttgtttgctgaaatgattgatgaagttggatttcctgatggtgtatttaatttagtaaatggtgatggcgcaggtgttggaacacaaatgtcaagtcatcctgatattgatatggtttcttttacaggatcaactcgtgctggaagacttatttcaaaaaatgcagcagaaacaattaaaagagtttgtttagaacttggaggcaaaggtggaaacatagttttcgcggatagttacaaaaatgct

SEQ ID NO: 213072 - DNA, 142 bp, Unknown
  Bacterial polypeptide expressing nucleotide sequence isolated from the Sargasso Sea
tactagtccatggaacttcccactcgctatattcttagggcaagtggctgctgccattgtgatgggtaatactgttattgccaaaccggctgaacaaacaagcttaattgcattgtgtacaattgaacttatgctatctgtg

SEQ ID NO: 213073 - DNA, 873 bp, Unknown
  Bacterial polypeptide expressing nucleotide sequence isolated from the Sargasso Sea
cccttcaagagcaagagttatgtttaaatttaaagaattgatagaaaaaaactctgatgaacttacaaaattaatagtttcagaacatggtaaggtttatgaagatgcaaaaggttccttaaatagaggtttagaagtagttgaatatgcttgcggtattcctcaaatgcttaagggagaatttactgagaatgttgggtcaagtgttgatagctggtcaataagacaacctctaggagtttgcgcaggaattacaccttttaatttccccgctatggttccaatgtggatgtttcctatggcaatcgcttgtgggaatacatttgttttaaaaccatccgaaaaagatccctcttgttctatgaaattagcagagctgttaaaacaagcagggctgccagatggagtttttaatgtaataaatggagataaagaggccgtcgacgctttgataaataatcaagatgtagctgcagttagttttgttggatctacaccgattgcgaaatatatttacgaaaattgtgctaaaaatgaaaaaagagttcaagccttaggtggagcaaagaatcattgtgtagttatgcctgactgtgatttagatcaagcagtcaatggtttaatgggagctgcttatgggtctgcgggagaaagatgtatggctcagtccgttgctgtagctgttggaggaatcggagataaattagtaagctctttagaaaaaaaagtagaagcccttaaagtcgggcctggaatggataaacaatctgaaatgggaccactagttacaaaagatcatttagctaaagttaaaggatatgtggatttgggtgaaaaagagggagccaagttagtggttgatggaagaaattt

SEQ ID NO: 213074 - DNA, 481 bp, Unknown
  Bacterial polypeptide expressing nucleotide sequence isolated from the Sargasso Sea
tatgaaaataaaggttggcattaatggaatgggcagaataggaagaatgattcttcgctctattattgagagtaaaaataaaaatatagttatcaaacatataaataacagaacaaattcccagacttgttcaatgcttttaaaatacgattcaattcatggaaaatttaatgcaaatcttaattttgataagaataatattattatcaataaaaaaaaaatttcatttagtcaagaaacagatattaaaaatattaaatggaaaagatatgatgttgattatgtttttgaatgcactggtaaatttaactctaaagataaattattaccacatttaaaaaacggggcaaaaaaagttattgtttctgctccgtgtaaaaaagccgataaaactattgtgtttggagttaatgagactaaattgaacaagaaggatcaaattatttctgcagcatcatgtactacaaactgtcttgcacca

SEQ ID NO: 213075 - DNA, 859 bp, Unknown
  Bacterial polypeptide expressing nucleotide sequence isolated from the Sargasso Sea
tgtagataatgcagttactggctgcaaaaaaagctttttgaaaattgtggctttcacaaaaaaagaagaaagattggaattattagaaaaactgtatgttatttataaaaaaagatgggctgaaatggcgaagcttattactcttgagatgggagcgccaatgaaattttcgacagaaatgcaagctgcaactggagctagtcatatcaaatcttttaaaaatatattaaaagattttaaatttgaaagagacataggagaggaaaaaaataatcaaaaattattatatgaaccaaagggcgtttgtgcattaattactccttggaactggccaataaatcaagttaatttaaaagtaattcctgcgctagcgtcagcatgcacagtagttttaaaaccttcagagatagcgcctttatcatcaatgttacttgcagaaatgattgatgaagtaaaatttccagctggtgtttttaatttagtaaatggagatggagctgtaactggcgatgcattaactagtcatccagatgttgatatgatttcttttacaggatcaacaagagctggtgcattaatttcacaaaatgctgcaaaagattttaaaagaataagcttagaattaggtggaaaaggcgcaaacataatctttaaagatgcagattcagaagcagtggcaaggggagtattaagatgttttagaaattcaggacaatcatgtaacgctcctacaagaatgcttgttgaaaaatcaatttataatgaaactgtagaaaaagtaaaagaattggcgaataatacgaaagtagattttcctggaaaaagacggcgatcatattggaccagttgtttcagaagt

SEQ ID NO: 213076 - DNA, 742 bp, Unknown
  Bacterial polypeptide expressing nucleotide sequence isolated from the Sargasso Sea
aatattaaaacaagctgcagataaagttcaaagagttactatggagttaagtggtcattcaccttttatagtatttgatgatgcagatattaaaaaagcagcagacatggctgtagcatccaagtttagaaataatggacaagtttgtatttcaccaaataggttttacatacaagaaaataaaaaagacgaatttgtaaatttatttgttgaaaaaactaaaaaattaaaaataggaaatggtatggaaccagatgttcaattgggtccaattacaacaaaaaaaagattaaatgaaatagaagaattggttgaaactaccaaaaaagaaggagcaaaagtattattaggtggcaaaagaccttctggattcaataaaggttatttttatgaaccaactatatttgatgatgtaaaagatgattttactataatgaaagtagaaccttttggaccattggttcctatgttatcatttaaaacatttgatgaagtagttgaaagagctaataaacatgaattaggacttgcaagctacatatgtacaagttcaatggaaaaagctcatagagcttccgaattaatggaaacaggtactgtagcagtaaatactccagtagttgcgatagccgaagcaccttttggaggaattaaacaagcaggatatggaagagaaggtggttctatggctattaaagattacttaaatgtaaaatatactcatcttggtttaaaaggttaa

SEQ ID NO: 213077 - DNA, 103 bp, Unknown
  Bacterial polypeptide expressing nucleotide sequence isolated from the Sargasso Sea
tataaataataaattttgtcgaatattatcatggtatgacaacgaatggggtttttcaaacagaatgattgaaactgcaattgatttaaaaaaattcatctag

SEQ ID NO: 213078 - DNA, 520 bp, Unknown
  Bacterial polypeptide expressing nucleotide sequence isolated from the Sargasso Sea
tatgcctataaaagttggaataaatggtttgggtagaattggaagaatgttagtaagaactatctttgaaactaagaataaaaatattaaaattagccacattaataatagatcgagttctgaagttagttgttcccttttaaaatatgactctattcatggaaaatttaatgaagatgttaaatttgataataacagcttaattataaataaagaaaaaatatcatactcccaagaagtagatataaaaaacattaattggaaaaagtttaatgttgattatgtttttgaatgtactggtaaatttaattctaaagaacaattattaactcatataaaaaatggagcaaaaaatgttattgtttctgcgccatgcaaaaatgctgataaaactattgtctatggggtaaatgaaaatatcctttctaaaaaagatcaaataatatctgcagcatcttgcacgactaattgtctagctccagtggcaaatgtattaaatgaaaattttgaaatgaaaaag

SEQ ID NO: 213079 - DNA, 158 bp, Unknown
  Bacterial polypeptide expressing nucleotide sequence isolated from the Sargasso Sea
tatggtcaagctcggcatctctggcttcggacgcattggccgcctcgtgtgccgcgccgcgtgcgagaaggatggcgctgaggtcaccgcggtcaatgacccggtgcgccggcgtgcgcgaacggcgcacggcgcgcgcgcgcacgccgcgcggctcg

SEQ ID NO: 213080 - DNA, 829 bp, Unknown
  Bacterial polypeptide expressing nucleotide sequence isolated from the Sargasso Sea
agtacttcgaaagaagaaagattagaaatgcttgaaaagctgtatgaaatttacaagtctagatggaataaaatggcagaatcaatttctcttgaaatgggctctccaatagattgggcaattgaggaacaaagttcttcaggtgctaatcatataaaaaattttattaaaactctaaaaaactttgaatttgaatctgaatttaattcagaatctaataatcatatttcttatgaaccaattggtgtatgtgctttaattacaccatggaattggccgattaatcaaataactttaaaagtcattcctgctttagcagcgggatgtactatgattttaaaaccatcagaaattgcacctttatctgcaatagtatttgcagagatgattcatgatgcaggttttcctccaggtgtttttaacctggtgaatggaaacggggatggtgtaggcactcaattggcaaaacatactgatgttgatatgatttcttttactggttcgacaagagctggaaaattaatttcaaaaaattctgctgatactattaaaagagtttgtttagaattaggaggaaaaggaggaaacatagtttttgcagactctgatccagatgcagttaaaagaggcattaaacatgttatgggcaattcaggtcaatcatgtaatcatcccactaggatgcttgttgaaaaatctatttatgatagagctgttaaagaagccgtagaggaagctgagaatactaatgttgatatctcttcaaaaaaaggcgatcatatagggcctgttgtttcaaaaatacaatatgataaaaggcaaaatttaa

SEQ ID NO: 213081 - DNA, 826 bp, Unknown
  Bacterial polypeptide expressing nucleotide sequence isolated from the Sargasso Sea
aatgttagataaaaggaatttttatataaatggtcaatgggttaagccttctcaacctcaagatttaaatgtcatagatccatctactgaagaaaattgtgctattatttctttaggtagtaaagaagatgttgatatagctgttaaatcagcaaaagaatcttttactcattggagcagaattgaaaaaaaatataaagtttcacttattcaaaacctatatgatatttataaaagtagatgggaggaaatgactaaaatgatttctttagaaatgggcgcccccttagactggtcttcttctgcgcaaactgcatctggagcagatcatattaaggatttcattaaacgattgaatgaatttgaatttgaatctgagtttagtaaagattcaaataattttatagcatacgaaccaataggtgtgtgtggtcttataactccgtggaattggcccattaatcaaatcactttaaaagtcattcccgctttagcagctggttgtactatgattttaaaaccttcggaaatagcaccattatcaggtatgttatttgcagaaatgattcatgatgctggctttcctcctggagtttttaatttaataaatggagatggctcaggagtaggaacacatttatcaggtcatcctgatattgatatgatatcttttactggatctacacgagcagggagattaattacaaaaaattcagctgatacaattaaaagggtatgtttggaattaggcgggaaaggtggcaatatagtttttgcagactcacatcctaatgctgtaagagaaggtgttaagaaacgtcatgag

SEQ ID NO: 213082 - DNA, 738 bp, Unknown
  Bacterial polypeptide expressing nucleotide sequence isolated from the Sargasso Sea
tttaaaaacattttgaaagattttaaatttgaaaaagatttaggcgaagagaagaataatcaaaagttattatatgagccaaaaggggtatgtgccttgatcacgccttggaattggccgataaaccaagttaatttaaaagtaattccagcgctagcgtctgcgtgcacagtagtattaaaaccatctgaagtagcacctttatcatcaatgttgcttgcagaaatgatagacgaagttaaatttccttctggagtttttaacttagtgaatggagatggtgctgttacaggagatgctttaacgagccacccagatataaatatgatttcttttacaggatcaacaagagctggagcattaatctctcaaaatgcagctaaagactttaaaagaataagtttagaattaggtggaaaaggtgcaaatataatctttaaagatgcagattcagaagcagtagcaagaggtgttttaaggtgtttcagaaactcaggacaatcatgtaatgctcctacacgaatgcttgttgaaaaatcaatttatagtgaaactgttcaaaaagtaaaagaattagcaaacaacacaaaagtagattctcccgaaaaagatggtgatcatattggaccggtagtttctgaagttcaatttaataaaattcaaactttaattcaaaaaggaatagacgaaggtgcaaaactaattgcaggaggaactggaaaaccaaaaggttttgaa

SEQ ID NO: 213083 - DNA, 340 bp, Unknown
  Bacterial polypeptide expressing nucleotide sequence isolated from the Sargasso Sea
catttaaatggtaaaattcatggcatggcttttagagtacttactcctacaggttcagtgactgatttagtagcgaatttggatgcaaaagttactgttgaggatatcaacaacgcatattctaaagcatctgagggggatttaagtggagttgtgcaatatacggacgagcctcttgtaagtagtgattttgttcgcaatcccaatagcgtaattattgatgggctttctacaattattcttgaagataatatggttaaagtggttggatggtatgataatgaatggggatatagttgtaggactgcagatttagctgaatatatatcagcaagctaag

SEQ ID NO: 213084 - DNA, 588 bp, Unknown
  Bacterial polypeptide expressing nucleotide sequence isolated from the Sargasso Sea
tatggaaaataaaaaaaatttttatattgatggaaaatgggtagcaccaaaaagcaaaaaagagattaaagttattaatcctgccactgaggaaaattgtgcagttatctctttaggaaataaagaagatgttgatctggcagtaacttcagcaaaaaaagcatataacaactgggcattttcaactaaagaaaaaagagtccaattattggaaaaactttatgaaaattataaaaaaaggtgggctgatattgcaaaagctataacaactgagatgggagctcccaaagattttgcaactaaacttcaagctggtactggagccgctcatttaaaatcttttatcagatatttaaaaaattttgaatttgaaaaatcattaggagatcatgccccaaatcaaagaattatttatgaaccaaaaggggtttgtgctttaataacaccatggaattggcctatgaaccaggtttgtttaaaggtaatgccagcattagcatctgggtgcacaatggttttaaagccctctgaattagctccattatcatcaatgatactagctgaattaattgatgaaactaagttccc

SEQ ID NO: 213085 - DNA, 574 bp, Unknown
  Bacterial polypeptide expressing nucleotide sequence isolated from the Sargasso Sea
tatggaaaagttggacttttatattgatggctcttgggtgacgccaagtggtgttaaaacactcgatgttataaatcccgcatctgaagaaaaagtcacaaaaatatctctgggtgatgtaagtcatgtgaatgaagctgttcaagcagcacgcaaagctttcgaaacttactctcaaactcctgttgagcagcgaattgatttgctgacaacaattagagaaatttataagcgccgtcttgatgacgtagcagatgccatccaaaccgaaatgggtgcacccacctatctggctaagggtgctcaggccatggtgggactggggcacttaaaagctgctattcgctctttaaccaaccataatttcgagtatgagcacggtaactttattattagacatgagccaattggagtttgtggactaattacaccttggaattggccagtaaatcaggtcgtttcaaaattggcaccgtgtctagctgcaggatgtacagccatattaaaaccttccgaaattgctccgctttcatcaatgattatagctgaaatactcgacgaagctaaagtgcca

SEQ ID NO: 213086 - DNA, 734 bp, Unknown
  Bacterial polypeptide expressing nucleotide sequence isolated from the Sargasso Sea
ttggtcattaggcaccgctaggggtttgcgcaggcataactcctttttttttcctgcaatggttcctatgtggatgtttccaatagctatagcctgcggtaatacttttgttttaaaaccttctgagaaagatccatcttgctcaattaaattagcagaattatttaaacaggcgggattacctgatggagtttttaatgtagttaacggagacaaggaagccgtagacgcattactaacaaataaagatgtagttgctataagttttgttggatcaacacctattgcaaaatatatttatgaaaatgctgcaaaaaatgaaaaacgtgttcaagctttaggaggtgcaaaaaatcattgtgttgtgatgcctgattgcgatcttgatcaagctgttaacggtttaatgggtgcagcgtatggttcagccggagaaagatgtatggctcagtcagttgctgttgcagtaggaaaagttggggataatcttgtaagtaaactagaaaagaaggtgagatcattaaaagttggcccaggtttagataaaaattctgaaatgggaccactagttacaaagcaacatttagaaaaggttaaagggtatgtggatcttgggatgaaagagggagccaagctagttgtagatggcagaaatataaaattacaggggtatgaaaaaggtttttatattggaggatgtctttttgataatgtgaataaaaatatgagaattt

SEQ ID NO: 213087 - DNA, 792 bp, Unknown
  Bacterial polypeptide expressing nucleotide sequence isolated from the Sargasso Sea
aaaataactacaggatcttcaaaaaaaacatctaaagtttttaatcctgcaacaggcgaacaatcagccgaagtaaatttggcttctaaatctgacgtagattttgctgtagaaaaagcaaaaaaagcatttacagattggtctggaaaaccaccagttcagagagcaagagtaattttcaaatttaaagaattgatagaaaaaaattcagatgagataactaagttaatagtttcagaacatggaaaagtttatgaagatgctaaaggctccctgactcgaggattggaagtcgtagaatttgcttgtggaatacctcatctgctcaaaggagaattcacggaaaatgttggaactgatgttgatagctggtcgattagacagccattgggagtttgtgcaggtattacaccttttaactttcctgcaatggtaccaatgtggatgtttccaatagccattgcgtgtggaaacacatttattttaaaacctagtgaaaaagacccatcatgttcaatgaaactggcgcaattatttaaagaagcaggattgccagatggggtttttaatgtagttaatggagacaaagaagcagttgatgcattgttaactaataaagatgtagctgctattagttttgttggatctacaccagttgcaaaatatatttatgaaaatgctgcaaaaaacgaaaagcgggttcaagcactaggtggagcaaaaaatcattgtgttgtaatgcctgattgtgatctcgatcaagctgttaatggtttaatgggagcagcttat

SEQ ID NO: 213088 - DNA, 529 bp, Unknown
  Bacterial polypeptide expressing nucleotide sequence isolated from the Sargasso Sea
catgaaaactattgaacactttcaaaatggtaagtcttttagtggagactctaaaagattaggtaaagttttcaatccagcaactggagaacaaagtgctcaagtaaagttagcttctactaatgatgttaatgcaacagttgcaaaagcaaaaagagcatttgaggtttgggccaatactcctccacttcaaaggtccagaattatgtttaaatttaaagaactaatagaaaaaaattcagatgaacttacaaaaataattgtatcagaacatggtaaagtttatgaagatgctaaaggttcacttatcagaggattagaagtagtagaatatgcttgtgggatacctcaaatgttaaaaggagaatttactgaaaatgttggatcaaatgttgacagttggtctataaggcaacctctaggagtttgtgcgggaattaccccttttaattttcctgctatggtgccaatgtggatgttcccaatggcaattgcttgtggaaatacctttgttttaaaaccttctgaa

SEQ ID NO: 213089 - DNA, 784 bp, Unknown
  Bacterial polypeptide expressing nucleotide sequence isolated from the Sargasso Sea
atgaaattaatagaacacttcgtaaacggtaaaataattccgggaacttcagataaaaaaggaaaagtttttaatccggcaactggcgaacaagagtcagaagtaagacttgcctcaaaatctgatttagacagtgctgttgaggtagcaaaaaaagcatttgaaacttggtctttaaaacctgctctacaaagagctagaataatatttaaatttaaagaattaattgaaaaaaattctgatgaattaacgaagttaatagtttcagaacatggaaaagtttatgaagatgcaagaggatctttaaccagaggacttgaggtggtagaatttgcttgtggaataccacacttattaaaaggtgagttttcagaaaatgttggtaccaatgttgatagttggtcaatcagacaaccattaggagttgttgcaggtatcacaccttttaattttcctgctatggtaccaatgtggatgtttccaatagcaatagcttgtggaaacacttttattcttaaaccatcagaaaaagacccttcttgcgcaataagattagcagaattactttctgaggcgggtcttccggaaggagtatttaacgtaataaatggagataaagaagctgttgatgcaattttagagaacaaagatatcaaagctgttagtttcgtaggatctactcctattgcaaaatatatttatgaaaattcagctaaaaatgaaaaaagagttcaagctttgggtggagcaaaaaaccatttagttgttatgccagcattgtgat

SEQ ID NO: 213090 - DNA, 704 bp, Unknown
  Bacterial polypeptide expressing nucleotide sequence isolated from the Sargasso Sea
ggaagttggaaaaccttttgcagaagctaaaggtgaagtagggggtgctgcagatatttttgaatggaatgctgaagaaacaaaaagaatttatggacaaactgtggaaagtagatttgaggatacaagagtacatgtttactatcaaccagttggtgttgttgcagcattaacaccttggaattttcctgcagtattatctgctagaaaaatttcaactgcattagcagctggttgttccgttatagtcaaacctgatgtaataactccaggaattgtaatggagatggttgatatatgtagagaatgtggtgttccaccaggtgtagtgaatcttttatcaggtgatccaccaagtatcgctcaacaattgatagcttcagatatagtcaaaaaaatttcaataacaggatcttcaagagttggaaaattaatattaaaacaggctgctgataaagttcaaagagttacaatggaactttcaggtcattcaccttttatagtattcgatgatgccaatattaaaaaagctgctgatatggcaattgctgcaaaatttagaaataatgggcaagtctgcatatctcccaacagattttatattcatgaaagtaagaaggatgaatttgtaaatttgtttattgaaaaaacaaaaaaattaaaaattggagatggtatggaccccacaacaaaattaggtccat

SEQ ID NO: 213091 - DNA, 601 bp, Unknown
  Bacterial polypeptide expressing nucleotide sequence isolated from the Sargasso Sea
aaattttgaatttgaaaaaccattaggtgaacatgctccaaatcaaagacttatctatgaacccaaaggagtttgtgcattaataacaccttggaattggccaatgaaccaagtttgcttaaaagttatgcctgcaattgcatctggatgtacaatggttttaaaaccatcagaacttgcgccattatcatcaatgatacttgctgaattgatagatgataccaaatttcctgcaggagtgttcaatttagttaatggagatggagccacaacaggcaatgcactaacaagccacccggatataaatatgatttcttttacaggatcaactagagcaggagctttaatttctcagaatgctgctaaagattttaaaagagtgagtttagaattagggggtaaaggtgctaatattattttcaaggatgctgatcctgaagcaattgaaagaggtgcgttaagatgttttagaaattcaggtcaatcatgtaatgctcctacaagaatgctagtagagaaatctatgtatagtgatgcagtagaaagattgaaaaaatatacagaaaattttgaggtaggcgatcctaaaaaagaaggagag

SEQ ID NO: 213092 - DNA, 665 bp, Unknown
  Bacterial polypeptide expressing nucleotide sequence isolated from the Sargasso Sea
aatgtttaagaaagctgatgcccctgataatcttgtacaagttttgatcggtgacgggcaagttggcgcagacctaataaatttgaaacccgataaagtttcatttacaggtagtataaagactggaaaattgatagctagacagtgtggtgagtcattaattcccttttcattagagcttgggggtaaagatgcaatgattgtttgtgatgatgcagatatagatgatgctgctaaaggtgcagtcattggctcatgtatgaatgctggccagtattgttgcggaacagaaagaatatatgttcaagaatcaatttatgaaagttttttagaaaaagttgttgaatatacaaaagaactgaaacagtcagatgataaatatgctgatgtaggaccaacattttgggataaacaaattgacattattgaagatcacattgaggatgctaagtcgaagggcgctaagatcttaattggtggaaaacgtaatccaaatttcgatggattatacttcgagccaaccgtaatagtggatgtcacgcacgatatgaaaattatgaccgatgaaacttttggaccaattatctctattatgaaagtaagctcagaggatgaggcaattagattagctaatgactccttttatgggtttaatggtaatgtct

SEQ ID NO: 213093 - DNA, 877 bp, Unknown
  Bacterial polypeptide expressing nucleotide sequence isolated from the Sargasso Sea
gctggatgttcagttattataaaacctgatgtgataactcctggagttgttatggagatggtagatatttgtagagaatgcggtgtaccttcaggtgtagtaaatcttttatctggtgatcccccaagtatagctcaacaattaattgcttctgatatagtaaaaaagatttctattacagggtcatcaagagttggaaaattaatattaaaacaagctgcagataaagttcaaagagtaactatggagctttcaggccactcaccttttattgtatttgatgatgctgatataaaaaaagcagctgacatggctatagcagctaaatttaggaataacggacaagtatgtatatctcctaatagattttatattcatgaaagtaaaaaagatgaatttgtaaacttatttgttgataaaactaaaaagttaaaaattggaaatggtatggatccagatatccaattaggcccattaacaactgaaaagagactaaatgaagtcgaggaattagttgaaaaaacaaaaaaagagggggcaaaagttttactaggtggtaaaagacctgcaggatttaataaaggatttttttatgaaccaactatatttgataatgttaaagacgattttacaataatgaaacaagaaccttttggacctttagtacctatgctttcttttaaaacttttgatgaagttattaaaagagctaacaaccatgagttaggattgtgtagctatgtttgtacaaattctatggaaacagctcatatagcatcagagcaattagaaactggatctgtagcagtaaatacaggcgttgtggcaattgcagaagctccttttggggggattaaacaaagtggatatggaagag

SEQ ID NO: 213094 - DNA, 472 bp, Unknown
  Bacterial polypeptide expressing nucleotide sequence isolated from the Sargasso Sea
tatggaaaatcaaaggacaatggaagaagttctaaaacttcaaagagatcattacttgaatgaaggcccgccttcatatgaattaagaatcgatagattagacagagttaaagatatggttattcaaaataaagaaagaataactgaagcattagacgctgactttggagcaaggtcacctaatcaatctctaatatctgatgtttatggcgttctccctgcattttctcatgcaaaaaaacatttaaagtcctggatgaaggatgaaaagagaaaatctaacttcccgtttggactaatgggagctaagtcatatattcatagggagccgcttggagtcgttggaatgatatcaccatggaactttccaatgtatttatctcttgctcctttagctggaatctttagtgcgggcaatcaggtgatgcataagcctagcgaatttactcctattacttctgaacttttaaaa

SEQ ID NO: 213095 - DNA, 560 bp, Unknown
  Bacterial polypeptide expressing nucleotide sequence isolated from the Sargasso Sea
tatgtccgatgcatcgaccgctgaggagtaccgcagccaggccgcggccctgtcgatccgccgtcaggccttcatcgccggcagctacgttgattcagctgacggcgcgaccttcaattgtatcagcccgatcgacggttccgttctggcgccggttgctgcctgcgatgaggaagacgttaatcgcgccgtcggtgccgctcgtaaggcctttgacgacggcgcatggtcggggctggcgccagccaaacgcaagcgtacgctgaagaagttcgccgatctgatggcggccaaccgcggggagttggcactcctggaaaccctggatatgggcaagccgatccgttactcgcaggcggtcgatatcggtggcgcggccaactgcatcgcctggtacgccgaagccattgacaagctctatgacgaggtcgccccgaccgatccctcagcgttagcgctactcaggcgtgagccggtcggcgtggtcgccgccgtggtgccgtggaattttcccctgctgatcacctgctggaagctcggacctgcgctagcggccggca

SEQ ID NO: 213096 - DNA, 823 bp, Unknown
  Bacterial polypeptide expressing nucleotide sequence isolated from the Sargasso Sea
gaagctgctcaggccaaaacaggaataaaaaatattcatgaaactttagatgcgctcaaagactatgaatttgaaagacctgaaggtgactatactttaattagagaacctattggtgtaattggcatgataactccatggaactggcctatgaaccaaataacaactaaagtgtctgctgctttagcagcaggttgttcgatggttttaaagccgagtgagatatcaccttattgtgcaatgcttttagctgaagtgtttgacaaggctggtgtaccaaatggtgttttcaatgttgttaatggatatggtcctactgttggtgcagcactttctgaacatccagatgttgctatgatgtcatttactggttcaaccagagctgggatcgctgttgctcaagcttctgcggcttcagttaagcgtgttcatcaggaattaggtggaaaatcatcgaatataatccttgacgatgttgctgacttagaaaaatctgttaaaggtggagcaggacattgttttttaaattcaggtcaatcttgtaatgcaccaacaaaaatgttggtatcggctaagaattatgacaaagcagtagaggttgcagttgcaacagcaaacaatacaaccgttggagatcctaacggtgaatttagaattggaccaattgcaaataaaactcaatatgaaaagattattaaattgatcgaaataggtattgaagagggtgcaacattagttgcaggtggagttgaaaagcctgaaggttgtgagaaaggctattacgttcgaccaacagtttttgcaaatgtaacaaatgatagac

SEQ ID NO: 213097 - DNA, 775 bp, Unknown
  Bacterial polypeptide expressing nucleotide sequence isolated from the Sargasso Sea
aaagattcagcatattaataacagatcaaattcagaagctacaggtaagttaattaaatacgattctatacatggaaaatttgatgctgatattaaatttgatgaaaataatttgataataaataaaaaaaaaatttcattttctcaagagcctaagatcgaaaaaattaattggaaaaagtatgatgttgactatgttttagaatgcacaggtaaatttaactcaagagaaaaacttgaagcacatattaaaaacggagcaaaaaaagtgattgtatctgctccatgcaaaaatgcagacaaaacgatagtttttggtgttaatgataacaccttatctaaaaaagacaaaataatctcagctgcctcatgtactacgaattgtttggcaccagttgtagatgtcattcacaaaaaatttgaaattgaaaaaggttttatgactacaattcattcatttactagtgaccaaagaattttggacaattcacataaagatccaagaagagctcgatctgcaagccagtcgattgttcctacatcaactggagcatctaaagcaataggtgaaataattccaagtttaagaggcaaattagaaggtgtggcgatgagagtacctacaccaaatgtttctcttgtagaattagttttttgtacaaaaaaagaaattaatataaaaaatataaacaatgaatttgaattagcttcaaaaagagaattaaaaaggattttagaagttacgtatgaaaaattagtttctgtgatttcaatc

SEQ ID NO: 213098 - DNA, 853 bp, Unknown
  Bacterial polypeptide expressing nucleotide sequence isolated from the Sargasso Sea
gcgcctcaattctaatgggtttgatttaaatgagatggactgcattgaagatctaatgagcaaggttaataaattttctgaattgagttttcatgcttgttctatatctccgcataatcctctgaataatgcaccaattaaaataacctctaaatgcaatgcaaaaataattggcattgttgagacctgcgattttaaatctattgatatcaactccatcaatccttcagaacaatggattaattactcgattgaatctagaaatgaaattctaatttcagttgcagacagacttgaggatgagcaagctaagtttgtctacttattaatgcatgaagccggcaaaacaattgaagatgctctggatgaaattagagaagcggttgacttccttcgatattattctcaacaagccctgaatttagaacctcttcctcaaagaggcccaactggagaggataatattttagaatatggaccaaaaggcacggtcttatgtattagtccatggaattttcctctcgcaattacaattgggcaaattgcagctgctctagccggaggtaatacagttatttctaaaccttctgagcatactccaatcattgcttttgaagctattaatctattctttaaaaaagggctaccagaagatgccctccatttatttcttgggaatggtgaattgggcaaatcgatcatattgaatcaggccatagatttagttgcttttaccggttcgttgccaactgcaaaagaaattcataaaaatttatctctaaaacctggaaaaattattcctttaattgctgaaacaggaggattgaatgcaatgattgggattcgagcgcgt

SEQ ID NO: 213099 - DNA, 694 bp, Unknown
  Bacterial polypeptide expressing nucleotide sequence isolated from the Sargasso Sea
tcacagccgatggcgagcgaggcggatatcgacgccaccgtggtctacggggtcaatcagcagtgcctgagcggtgccgagcgtctggtgtcgaatgcgtcctgtaccaccaactgcggcgtgccgctgttgaaacttctcgatgaggtggtgggtctggagtacgtctccattaccaccatccattcggcgatgaacgaccaaccagtgatcgatgcctatcaccacgaagacctgcgccgcacgcgctcggccttccaatcggtaattccggtgtccaccggtctggcccggggtatcgagcgtctgctgccggagcttgccgggcgtatccaggccaaggccatccgcgtgccgacggtcaacgtctcctgcctggacatcaccctgcagactgcgcgcgacacctccgcagaagagatcaaccgcgtgctgcgtcaggcggcggaaagtggcccgctcaagggactgctggcctacaccgagctgccgcacgccagctgcgacttcaaccacgacccgcactcggccatcgtcgacggcagccagacccgcgtgtccggcccgcgcctggtcaacctgctggcctggttcgacaacgagtggggcttcgccaaccgtatgctcgatgtcgccgaacattttctcgctgtatccacttcctccgtacaaccagcctttgtgaaggactgat

SEQ ID NO: 213100 - DNA, 769 bp, Unknown
  Bacterial polypeptide expressing nucleotide sequence isolated from the Sargasso Sea
agatatttttgagtggaatgcagaggaaactaaaagaatatttggacaaacagtggaaagtagatttgaagatacaagagtccaggtaatatatcagcctgttggagttgttgcggcgcttgttccttggaattttccaattattttagcatcaagaaaaatttctacagctctagcagctggttgttcggtgattgtaaaacctgatgtaataacacctggtgcagttatggaattaatgaacattataaatgatgcaggtataccacccggcgttgttaatcttttatctggagatcccgaagaaatatcaaatgaacttatttcatccaatattgttaaaaaagtttctataacaggatcaactagagtaggaaaactaattttaaaaaaagctgccgacaaagttcaaagagttacaatggaacttagtggacacgccccctttattgtttttgaagactcaaatattgataaagttacagatatggcaataacctcgaagtatcgaaataacggccaagtttgtatttcacctagtagattttatattcacgaaagtaaaaaaaatgaatttgcaaaaacatttgttgcaaaaactaaaaaacttaaacttggtgatggcatgaaagatggtgttaaccttgggccaattacaacaaaaaaaagattagaagaaattgaaaaattagttgaaaaaactaaaaaagaaggcggcaaagttctttatggaggcaaaagaccagcaggatttaacaagggttatttc

SEQ ID NO: 213101 - DNA, 700 bp, Unknown
  Bacterial polypeptide expressing nucleotide sequence isolated from the Sargasso Sea
caatctcatctagaagattttattttaagattaaaagagtttaaatttgatcaccaatttgatcctaaatcaaataatcatatttgttatgagccaataggtgtatgtggacttattacaccatggaattggccgataaatcaaatagctttaaaagtggtacctgcatttgctactggatgcacaatgatacataaaccttcagaaatagctccactttctgcaatgttatttgctgaaatgattgatgaagcaggatttcctccaggtgtgtttaacttggtaaatggagatggtgttggagtgggaacagatatttctagtcacccagatattaacctagtttcatttacaggatcaacgagagctggaaaattaattttaaaaaatggtgccgaaacaatcaaaaaagtatgcctagaactgggaggcaaaggaggaaatatagtttttgcagactcctaccctaatgcagtgcgtgatggaattagaaatgtaatgagtaattcaggccaatcatgtgatgctcctactagaatgcttgttgaaagatcaatttatgacagagcagtaaaagaagcagttgatgaagcaaatttaattaaagtagatcatgcttctaaaaaaggagaccatattggaccagtggtttctaaagttcagtataataaaattattaatttaattcaaagtggtattg

SEQ ID NO: 213102 - DNA, 175 bp, Unknown
  Bacterial polypeptide expressing nucleotide sequence isolated from the Sargasso Sea
gatcgcaaagaacgggtttctgccaagcttaaagcaggtgccgtgcatattaatggtggtggcattgaatacgggactccctttggcggctacaagcaatcaggcaatggtcgtgaaggaggtttgatgggccttgaggattatttagaaacaaaaactcttcatggtctttagt

SEQ ID NO: 213103 - DNA, 895 bp, Unknown
  Bacterial polypeptide expressing nucleotide sequence isolated from the Sargasso Sea
ggatctaaagaagacactgatggtgcagtaaatgcagcaaaaaacgcttttaatagttggaaagaatcttcaaaagtagaaagaataaattttttagaaaaattgctaaaaatttataaaaaaagatttaatgaaatggcagaagctatgtcaattgagatgggagcgcctattgattatgcaatgtcaactcacgcagcatctggccaatctcatatagaagattttatacttagactaaaagaatttgaatttgaagagcattttgattcaaaatctaataatcatatcgcttatgagccaattggagtttgtggactaattactccatggaattggcctatcaatcaaatagcattaaaagtaattcctgcttttgcagctggttgcacaatgattttaaaaccttccgagatagctcctatctcagcaatgttatttgctgaaatgatagatgaagcagaatttcctgctggagtttttaatttagtaaatggagatggagctggggttggaacacaaatatcagttcatccaaatattgatatggtttcatttactggttctacacgagcaggaaaacttattacaaaaaacgctgctgatacaattaaaaaagtttgtttagaattaggtggcaaaggtggaaatatagttttctcagattcatatcctaacgcagttaaagatggaataagaaatgtaatgagtaattcaggacaatcatgtgatgcaccaacaagaatgcttgttgaaaaatctatttatgacagagcagtcaaagaagcagtagatgaggcaaacaacattaaggtaaatttagcttcaataaaaggagatcatatagggccagtagtctcaaaaattcaatatgataaaataactaatttaatta

SEQ ID NO: 213104 - DNA, 419 bp, Unknown
  Bacterial polypeptide expressing nucleotide sequence isolated from the Sargasso Sea
aagagcaagatcagcaagtcaatcaatagtgccaacttcaacaggtgcctcaaaagctattggtgaaattattccctctctaaaaggcaagcttgaaggtgtggcaatgagagtaccaactccaaatgtttctttagttgagctggttttttgtacaaaaaaagatctaagtatagaaaaaatcaattctgcttttaaaaatttttcagaaaagcagaaaataaaagttttagaaataatagaagaaaaacttgtgtctattgatttcaatcataatcctgcatcatctatagttgatacaactttaacaaatgttgttggaaaaaatatgggtaaaatttctgcatggtatgataacgagtggggtttctccaacagaatgtgcgatattgcagaataccttcataaaatttcttaat

SEQ ID NO: 213105 - DNA, 407 bp, Unknown
  Bacterial polypeptide expressing nucleotide sequence isolated from the Sargasso Sea
caccctgctggcagggggctcccgcttgaccgagggtggtttggaccggggttgcttctacggtgctacgctacttagcgatgtcacgccggagatgttgatctatcgtgaggagaccttcggtcctgtcgccgcagtcgtgccctttgacgacgaggacgacgtgatcgctatggccaacgacacagactatggcctggcggcttatgtctatacgcagaatctggcgcgggcactgcggactttcgagcagctacagtttggcattatcggtatcaacgacattaaccccaccagcgccgcggcgccttttgggggcatgaaagagagcggcctgggccgcgagggcgcgcgcgagggtatcgaggaataccttgagaccaaactcggcggcctcagtatctgat

SEQ ID NO: 213106 - DNA, 961 bp, Unknown
  Bacterial polypeptide expressing nucleotide sequence isolated from the Sargasso Sea
ttgctcaataaattgcttgtagtttataaaaaaagatttggagaaatggcagaggctatttcacttgaaatgggtgcgccaatggattgggcaacagatgttcaaactggatctggacaaacacacttagaagattttattttaagacttaaagactttgaatttgatgaacatttcgatcaaaaatctaataaccatatttattatgaaccaatcggagtttgtggactaattactccatggaattggccaataaaccaaatagctctcaaggtagttccagcatttgcaactggatgcacaatgatactcaagccatcagaaatagcacctatttcaggaatgctatttgcagaaatgattgatgaagttggttttccaaaaggagtatttaatctggttaatggagatggtgaaggagtaggaactcaaatatcaagtcatcccgatattgatatggtttcttttacaggttcaacacgtgcaggaagattaatttcaaaaaatgcagctgaaactataaaaagagtttgcttagaacttggtggcaaaggtggaaatatagtttttgcagatagttataaagatgcagttagagatggaataagaaatgtaatgagtaattcaggacaatcatgcgatgctccaacaagaatgttggttgaaaaatctatttataaaagagcagtaaatgaagcagttgatgaggcaaataaaataaaagtagatcaagcatcgaaaaaaggagatcatattggtcctgtaatttcgaaaactcaatacgataagattataaatttaattgaaagtggaatatctgagggagcaacattagcagcaggaggtcctgagttaccgaatggattaaataaaggttattttattaaaccaactattttcacaaatgtcacaaatgaaatgagaattgcaaaagaagaaattttggtccagtgctttctat

SEQ ID NO: 213107 - DNA, 688 bp, Unknown
  Bacterial polypeptide expressing nucleotide sequence isolated from the Sargasso Sea
tatgggtttaggtggagtaagtgtagcatcagattatcctgaagtttctaaggatgaattagagagaattctcaatagtctcaaaaaaagatttcaaaatggtgactatcctaattataaagagagaatagatagaataaatagattaaaacttcttgtagaggaaaactcagaagacttccacaaggctttacagaatgattttggaacaaggcatgagcaactaagcttactgtcagatactttacctattattgctagcgcaaaacatatttcaaaaaatttaagtaaatggatgaagcctgaaaaaagaaaacctaatttccctctaggattgctgggcgccaaagcatttattcataatcaaccttacggagtagtagggattatctcaccatggaactttccacttaatttgagtttaggcccattggttgaagtatttgccgctggaaataatgcaatgatgaaattatcagagtttgttcctgaaacatctgatttgactgaaaagttagtaaaagaatactttaatgatgatgaagtggttgtaatcaatggcgggcctcaaacatctcagtcttttgctggtcttgcttttgatcatttattatttactggatcaactcatatagcaaaaaaaattgcctatgaagcatctgaaaatttagttcccctcacactcgag

SEQ ID NO: 213108 - DNA, 667 bp, Unknown
  Bacterial polypeptide expressing nucleotide sequence isolated from the Sargasso Sea
catgaatttaattgagcattatatcaatggtaaaattgttcctggtgtatcagagagaaaagggaaagtttttaatcctgctataggtaaacaagaatctgaagttagacttggcacaaaacaagatcttgatttagcggtactaaaagcaaaaaaagcatttgaaacatggtcaaatgtaactccaatacaaagagctagaataatatttaaatacaaagaaataattgaaaaaaattctgacttgatagccaagatgattgtatcagagcatggaaaagtttatgaggatgctaaaggttctctcacaagaggattagaggtagttgaatttgcatgtggaattccacaaatgcttaaaggtgatttcacggaaaatgtaggtacaaatattgatagctggtcagttagacagccattaggtgtctgtgccgggatcactccatttaattttcctgcaatggttccaatgtggatgtttccaatggcaattgcttgcggaaatacatttgtattaaaaccttctgaaaaagacccgtcttgtccattaaaacttgcagagctatttagtgaagctggtttaccagatggagttttgaatgttgttaatggagataaagaagtggtagatgcaatattggaacataaagatatatcagcggtaagt

SEQ ID NO: 213109 - DNA, 934 bp, Unknown
  Bacterial polypeptide expressing nucleotide sequence isolated from the Sargasso Sea
gcagaagaacaaaaaagaatttatggtcaaactgttgaaagtagatttgaggatactagagttcacgtttattaccaaccagtaggtgtcgttgctgctttgtcgccatggaattttccagcagttttatcttcaagaaaaatttctacagctttagctgcaggttgttctgtaattatcaaaccagatgttattacacctggtgttgttatggaaatggtagatatctgtaaagattgtggagtaccaccaggagtagtcaatcttttatctggcgatccacccagtattgctcaacaattaattgcctcagatatagttaaaaaaatatctgtaactggatcatcaagggttggaaaattaattttaaaacaagcagcagataaagttcagagagtgacaatggaattaagtggccattcaccttttattgttttcgaagatgcagatataaagaaagctactgaaatggctattgctgcaaaatttagaaacaatggacaagtatgtatatctcctaatagattttatattcaagaaagtaaaaaagatgaatttgtaaatttatttgtagaaaaaacaaaaaaattaaaaattggtaatggtatggatccagatacacaattagggccgttaacaactcaaaagagattgaatgaggttgaagctttagttgagaaaacaaaaaaagaaggtgccaaggttttattgggtggaaaaagacccgcaggttttaataaaggatttttctatgagccaactgtatttgatgatgttaaggatgattttactataatgaaagaagaaccttttgggccattagtacctatgctttcatttaaatcttttgacgaggtaatagaaagggctaacaatcatgaacttggattaagtagctatgtttgtaccaattctaggaaaaagcccatttagc

SEQ ID NO: 213110 - DNA, 332 bp, Unknown
  Bacterial polypeptide expressing nucleotide sequence isolated from the Sargasso Sea
gaaattagagggggttgcaatgagagtcccgactcctaatgtgtcgcttgtagagttgatattctgttcaaaaaaagagataaatataaataaaattaacactgcttttgaaattgcgtctcaaaatgaattgaataaaattttagaggttacgcatgagaaactggtttcaattgattttaatcatcattctgcatctgcaattgtagatgcttctttaacaaatgtggttggaactaatatgggtaaaatttctgcttggtatgataatgaatggggtttttctaatagaatgtgcgatatagctgagaatttgaataaaatctcttaat

SEQ ID NO: 213111 - DNA, 874 bp, Unknown
  Bacterial polypeptide expressing nucleotide sequence isolated from the Sargasso Sea
ttaggatcaaaagaagatttggataaagcagttcaagctgcaaagattgcttttaaaagctggaaaaaaacttcaaaagaagaaagacttaaattattagaaaaacttttaaaaatttataaaaaaagatttaatgaaatggcaaaagctatctcggatgagatgggtgcgcctatggattgggctactgatgttcaaactggatctggccaagctcatttagaagattttattttaagattaaaagaatttaaatttgaagaacattttgactcaaaatcaaataatcacatttgttatgaaccgataggtgtttgtggattaatcactccgtggaactggcctataaatcaaattgcattaaaagttgtccctgctttagcagcgggatgtacaatgattttgaaaccatctgagatagctccaatttcaggaatgttgtttgctgaaatgatagatgaagctgattttcctgatggagtttttaatttagttaatggagatggtgctggtattggtactaatatttcaggccatcctgatattgatatggtttcttttacaggatcaactagagcaggaagattaatttctaaaaatgctgctgatacaattaaaagagtatgtttagaacttggcggaaaaggtgggaacattgttttcgcagactcttatcctaatgcagttagagacggaattagaaatgtaatgagtaactctggtcaatcttgtgatgctccgacaagaatgcttgtggaaaaatctatttaccaaaaagcagttgatgaagcagtagatgaagcaaataaaattaaagttgatataggatcaaagaaaggtgatcatataggacctggatttcaaaagttcaata

SEQ ID NO: 213112 - DNA, 745 bp, Unknown
  Bacterial polypeptide expressing nucleotide sequence isolated from the Sargasso Sea
ctggctttatgtatcaaagaagcaggtaaaacagtgggtgacagcatggccgaagtacgcgaagctgttgatttctgtcgttattacgctgctgaagccagcaagaacctgcaagcatctcaagcccgtggtgtagtgctttgtatcagcccgtggaacttcccattagctattttcttaggtcaggtcagcgcagctttagtggctggtaacacagtagtggcgaaacctgccgaacaaaccagcttaattgctgtgcgtactctggcgctgatgaaagctgcaggtttcccggaccatgtagttcagctggtgatagcaccaggtcgtcaggttggcgaagtcatagtgccggatacccgtattcaggccgtgatgtttacaggttctactgaaacaggagcctggattgcccgtaaactggccgaacgtggtggcgagccagtgccactaattgccgaaaccggtggtcagaactgcatgattgttgactctaccgctctgcctgagcaagtggttgacgatgtgatctcttctggtttccaaagcgctggtcaacgttgttctgcccttcgggtattgttcctgcaggaagatgtggccgataagatcatcactatgatcaaaggcgctatgaaagagctgcatgttggcgacccggcctggttaagcactgacttaggtcctgtgattgacaccaaagctttagagcgtttaaaccagcatgtgcagtatctggaaggca

SEQ ID NO: 213113 - DNA, 361 bp, Unknown
  Bacterial polypeptide expressing nucleotide sequence isolated from the Sargasso Sea
aaaagctataggtgaagtaattccttctctcaaaggaaagttagagggtgtagcaatgagagtaccaaccccaaatgtttcgttaattgaacttgtcttctgtacaaaaaaagatttaagcattaaaaaaataaattcagcatttgaggattttagcaaaaaaaataaagttattgaaatcacaaaagaaaaacttgtttcgattgattttaatcataatcctgcttcatcaattattgatgcaagtttaacaaatgtggtcgggaaaaatatgggaaaaatctcagcgtggtacgataatgaatggggtttttcaaataggatgtgtgatatagctgaatatcttcataagatttcttaa

SEQ ID NO: 213114 - DNA, 343 bp, Unknown
  Bacterial polypeptide expressing nucleotide sequence isolated from the Sargasso Sea
catgaaattaataaagcattttgttgatggtaaaataatatctggatcatctgatagaaaaggtaaagtaacaaatcctgcgacaggtgaacagaaatctgaggtaagattagcttcaaaatctgacttagatcaagcagttgaagtcgcaaaaaaagcctttgaaacttggtcacaaaagccagctctacaaagagcaagaattatttttaaatttaaagagttaattgaaaaaaactcagatgaacttactgaattaattgtatcggaacatggcaaagtttatgaagatgcaagaggatctttgataagagggctagaagttgttgaatttgcatgcgga

SEQ ID NO: 213115 - DNA, 646 bp, Unknown
  Bacterial polypeptide expressing nucleotide sequence isolated from the Sargasso Sea
catggagaaaattcaaaattacattaacggaaaattatgtgacccgattaaaggggaatacatagaaaattataatccttcaactggacaggtttattgtttaattccagattcttcaaaagaagatgttgatgtagcagttgaatcggcatcatgtgcatttaaagagtggtcaactcttgggattgaaaaaagaagtgaattgttaatgaaggttgcagatttactcgaacaaaggatggaagaatttgtaattgccgaatcgaaagataatggaaagccagaatctctatctcgatctgtggatataccaagagcagtttctaatattcgttttttttctacagcaatccttcattttgcatccgaatctcattacatggaaaaagtaggagtaaactttacaactagaaaacctataggggtggttggttgtatttctccgtggaatcttcctttgtatttatttacatggaaaattgctcctgcccttgcttctggaaattgtgttgttgcaaaaccatcagaagttactccatatactgcctttttattgtcaaaggtttttatagatgctggatttcctccgggagtcattaatattattcatggtttaggatcaaatgcgggcgattctatagtaaag

SEQ ID NO: 213116 - DNA, 431 bp, Unknown
  Bacterial polypeptide expressing nucleotide sequence isolated from the Sargasso Sea
tgacttaaggagagcaagagctgcgtcggcaaatattattccaacaactactggtgcagcaaaagcagtgacaaaagtaataccagatttagaaggaaaaatagacggtatggcatatcgcgtaccagtaattacaagttctgtaacagaccttaccgtgaaactaaatagtgatgaaagtattgaaaaaataaatgaattatacaaacaatctgcatcaaaggaacttaatggaattttagattgtgcagatgaagagcttgtatcttcagatttcattggaaactcatactcttgcactatagacttagcttctacttccaaaattcctggaactggtctttataagattgtaggttggtacgataatgagtggggatacgcatctagaacttcagatttagctaacttaatcggaaaaaatttataat

SEQ ID NO: 213117 - DNA, 751 bp, Unknown
  Bacterial polypeptide expressing nucleotide sequence isolated from the Sargasso Sea
gcaaatagttcagatattcaaaaggctcttaaatcagctgaaagaggtttacaaatttggaaaaatacttctccttgggaaaggtctaaaattataagaaagatatctgatttaataagaaaaagagttgatgttctttcaaaatggttaacacttgaagtaggaaagccgttaacagaaggacctggtgaaataggtggtgcagctgatatatttgagtggaattccgaggaaactaagagaatttttggagaaataaatcaaagtcggtttccaaatacacagattcatgtcatgtatcaaccagttggagttgttgcggctttagttccgtggaattttccagtaattcttgcttcaagaaaaatttcaactgctttagcagcaggttgttcagtaatagttaaaccagatgtaataacaccaggtagcgttatggagataattgatatctgtagagaggcaggcgttcctccaggagttgttaatttattatctggtgatccagcaggaatttccgaagaattaattaagtcagatattattaaaaagatttctattacaggatcaacaagagttggtaaattaattcttaaacaagctgcagacaaagttcaaagagtaacaatggaattaagtggtcactcaccattcatagtttttgatgatgtagatttaaataaagttacagacatggcaataacttcaaaatttaggaataatggacaagtgtgtatttcaccaaaataga

SEQ ID NO: 213118 - DNA, 853 bp, Unknown
  Bacterial polypeptide expressing nucleotide sequence isolated from the Sargasso Sea
attttagctaaatggttaaccatagaagtaggaaagccattagctgaaagtattggtgaagtgacagcagccgctgatatttttgaatggaatgctgaggaaaccaaaaggatttatggtcaaacagttgaaagtagatttgaaaatacaaggatacatgtttattatcaaccagtgggagtagttgcggcacttgttccttggaattttccgataattttagcttcaagaaaaatttctacagctttagctgccggatgttcggtaatatgtaaaccagatgtaattacgccaggaagtgttatggaaatgatgaatatcatgaatgaggcaggagttccgccaggtgtagtaaatttgctttccggcgatcccgaaagtatatcttcacaattgatatcgtcagacactataaaaaaaatttcaataacaggatcaacaagagtcggaaaattaattttaaaacaagctgcagaaaaagtacaaagagtcacaatggagttaagtgggcatgctccttttattgtttttgaagatgtaaatatagaaaaagtttcagacatggctatcgcagctaaatttagaaacaatggacaagtttgtatttctccaagtagattttatatccatgaaagcaaaaaagatgcatttacaaaatcatttgtggaaaaaactaaaaaattaaaaataggcaatggtttaaatgagggggttcaattagggcccatgacgacaaaaaagagattacaagaaattgaagaattggtagagaaaacaaaaaaagaaggtgcaaaagtattatgtggcggaaaaaggccagctggttttaataaaggttatttttacgaaccta

SEQ ID NO: 213119 - DNA, 936 bp, Unknown
  Bacterial polypeptide expressing nucleotide sequence isolated from the Sargasso Sea
gggagaaagggtgtcgtctctgccctgggcgagcgaacaagaggtggattcggcgattgcgcttgctgagcagggttatcgtcagtggcgtaccgtcagtcttgaacagcgcgccgatgctctgcgtaaagtcggtaacgcgctgcgcgcccgcgccgaagagatggcgcaaatgatcagccttgagatgggcaaaccgattgcccaggcgcgtggtgaagtgacgaaatccgcgaatctctgcgactggtatgcggaacacggcccggccatgttggcgaccgaagccacccaggtggaaaataacaatgcggtgattgagtaccgtccgctgggcgcgattctcgccattatgccgtggaacttcccgctgtggcaggttctgcgcggcgcggtgccgattctgctggcggggaatagctatctgttgaaacatgcgccgaacgtgatgggcagcgcggcgttgattggcgagatcttcaatcaggcagggttgccggctggcgtatttggctgggttaacgcgacgaatgatggtgtttcccggatgatcgacgattcgcgtattgccgcggtgacggttaccggcagcgtgcgcgccggcaaggcgattggcgcccaggccggcgcggcgttgaagaaatgcgttcttgaactgggcggttccgatccgtttatcgtcctgaatgatgccgacctcgatgaagcggtaaaagccgcggtgattggccgctatcaaaataccgggcaggtttgcgccgccgcgaagcgctttatcgttgaggccgggattgccgaggccttcagcaaaaaatttgttgccgcggttgaagcgctgaagatgggcgatccgcgtgatgaggccaattacctcgggccgatggcgcgtttcgatctgcgtgatgagctgcatcaacaggtgacgacgacgctggc

SEQ ID NO: 213120 - DNA, 833 bp, Unknown
  Bacterial polypeptide expressing nucleotide sequence isolated from the Sargasso Sea
tatgaaaattgaatcaaaaaaacctttttatattaatggtgaatgggttgatccagtaaataaaaatgattttgaagttattaatccttctaatgaagaagtttgtgctataatttcactaggatcacaagctgatacagattctgcagtgaaagcagctagagattcttttttatcttggtggcatacacctaaagaaaaaaaattaactttgttaaataatcttttaaaaatttatattaaacggtctgatgaaatggcaaaagctatttcaattgaaatgggagccccaatcgattgggcaaccaatgaacaaagtaaatctggtgaagatcatattgaaacttttataaaaaaatttgaagaattcaattttgaaaattactatgatgaaaatgttggtaattacatttcaaaagaacctattggtgtttgtggcttaatcaccccttggaattggccaataaatcaaatagccctcaaagttctacctgcattcgctgcaggttgcacaatgatactaaaaccttcagaaatagctcctttatcaggaatgctttttgctgaaatgatccatgagtcaggttttccaaatggagtatttaatttacttaatggtgatggacctggtgtaggtactcaattatctacccaccctggcattgacatgatttcttttactggttctactagagcaggaaaattaataacaaaaaatgctgcagattccattaaaagagtttcattagaattaggtggcaaaggtgctaatatagtttttgctgatgcagatgaaaaagctgttaaacgtggtgttaggagagtatttaata

SEQ ID NO: 213121 - DNA, 582 bp, Unknown
  Bacterial polypeptide expressing nucleotide sequence isolated from the Sargasso Sea
gggaagataaaattatatctgctgcatcgtgtacaactaattgtctcgcacctgtcgctcatgttctaaatgaaaattttgaaattgaaaaaggttttatgactacaattcattcttttacttctgatcaaaggattttagataattctcataaagatataagaagagcaagaacagctagtcaatcaatagtaccaacctcaaccggtgcctcaaaagctattggtgaaattataccttctttaaaaggaaagctggagggtatagcaatgagaataccaaccccaaacgtttctttaattgaattaatattttgctccaaaaaagatctatctgttgaaaaaattaattctgcttttaaaaacttcagcaagaaacagaaaattaaagttttggaaattacagaagaaaaacttgtttcaattgattttaatcacaacccagcttcatctatagtggatgcatcattaacaactgttataggtaaaaatatgggtaaaatttctgcttggtatgacaatgagtggggtttttcaaatagaatgtgtgatattgcagcgtatcttcataaaatttcttaat

SEQ ID NO: 213122 - DNA, 451 bp, Unknown
  Bacterial polypeptide expressing nucleotide sequence isolated from the Sargasso Sea
tgatcaaagaattttagataattcacataaagatttgagaagagctagatctgctagtcaatcaatcgtacccacttctacaggtgcatcaaaagctttaggtgaaattattccatcccttaaaggtaaattagagggtgttgcaatgagagtgcccacccctaatgtttcattagtcgaacttgtcttttgcacaaaaaaagatttgagtgttgaaaaaataaatttagcatttgagaattttagtaaaaaaaataaggttattcaaatctcgaaagaaaaactagtttctattgattttaatcataatcccgcttcgtcaattattgatgcaagtttaacaaatgtggttggtaaaaacatgggaaaaatctcagcatggtatgataatgaatggggattttcgaataggatgtgtgatttagctgaatatcttcataaaatttcttaa

SEQ ID NO: 213123 - DNA, 760 bp, Unknown
  Bacterial polypeptide expressing nucleotide sequence isolated from the Sargasso Sea
tccagagttgaaaaactaatattaaaacaagcagctgataaagtgcagagggtaactatggaattaagtggccattcaccatttatagtttttgatgatgcagatattaaaaaagcagctgatatggctgttgcgtctaagtttagaaataatggtcaagtttgtatttcaccaaacagattttatatacaagaaagtaaaaaagacgagtttgtaaatttatttgttgaaaaaacaaaaaaactaaaaattggaaatggaatggatacagatgttcaactaggaccaattacaacaaagaaaagattaaatgaaatagaagatctagtagaaactacaaaaaaagaaggtgctaaagtattattaggtggaaaaagaccttctggatttaacaaaggttatttctatgaaccaacagtttttgataatgtaaaagatgattttactataatgaaaatagaaccttttggtccacttgtcccaatgctatcatttaaaacctttgatgaagtagttgaaagagcaaataatcatgaattaggacttgcaagctacatatgtactaactcaatggaaaaggcacatagagcttctgaattaatggagacaggtactgtagcagtaaatactccagtagttgcaatagccgaagcaccttttggtggaatcaaacaagctggctatggaagagaaggaggatctatggcaatcaaagattatttgaatgtaaaatacactcacctaggcatcaaaggttagt

SEQ ID NO: 213124 - DNA, 226 bp, Unknown
  Bacterial polypeptide expressing nucleotide sequence isolated from the Sargasso Sea
aatgacactccttacggtttgacaaattatattcaaactcaagataaagaaaaagtccaaagagtggcaagaaaacttagatctggaatggtagacgttaatggagttggtatagccgttgcttctccttttggcggatataaacattcaggaattggccgtgaagctggaactgaaggtcttatagaatttttagaagtcaaaacagttggtggctggaactaaa

SEQ ID NO: 213125 - DNA, 562 bp, Unknown
  Bacterial polypeptide expressing nucleotide sequence isolated from the Sargasso Sea
aatgacgattaaaataggaattaatggaatgggaaggattggtcgtatggtactaagatcaattatagaaggtaaaaataaaaatttaaaaataaatcatataaacaatcggtcaaattcagaagttacatctaaattaatcaaatacgattctatacacggaaaattaaatgctcatctagattttgatccaagtcatttaataatagataaaagaaaaattacattttctcaagaaacgaaaattcaagacattaattggaaaaaatatgatgttgattatgtttttgaatgtacaggaaaatttaattcaaaagaaaaacttgttgctcatataaaaaatggtgcaaaaaaagtgattgtttctgctccatgtaaaaacgccgataaaacaatagtgtttggtgttaatgaaaatataattactaaaaaggacaaaataatatctgccgcatcatgcactaccaattgtctagcaccagtggttagtgttcttaatgaaaattttaaaattgaaaaaggttttatgactacaattcacgcaattacaagcgatcagaga

SEQ ID NO: 213126 - DNA, 296 bp, Unknown
  Bacterial polypeptide expressing nucleotide sequence isolated from the Sargasso Sea
aatcatcaatttgtcaagcggtatgggacaactgattgatatggaaagtggttcaagtgcatacagaatatcaaaagcatcacttaatgcaataacaaaaatattatcaaatgaattatcagaatggaaaataaaagttaattcaatatgtccgggatgggttaagacagacatgggtggtcaaaacgcaacactaactgtacaggagagtgtaaatgaaattattaaatttgcattggacactaattttcctaatggaaaatttttaaggcatgggcaaatcataccttggtagt

SEQ ID NO: 213127 - DNA, 277 bp, Unknown
  Bacterial polypeptide expressing nucleotide sequence isolated from the Sargasso Sea
agcaatttcattagcaaataaaacagaatatggattaaccgcatctatttttagtacgaacaccagaaacgccttaagagcagccagagaacttagggctggcactgtcacagttaatagctatggagaaggtgatattacaacaccctttgggggatataaacaatcgggatttggtggacgggataatggcattcatgcccatgaacaatattgtgaagtgaaaacgatatggattgatcttaccgacccagcatcgcaggataagatcgaatga

SEQ ID NO: 213128 - DNA, 841 bp, Unknown
  Bacterial polypeptide expressing nucleotide sequence isolated from the Sargasso Sea
gtattaaaaaaatggcataatcttatattggaaaatattgatgatttagctcatataatgactgttgaacagggtaaaccccttgctgaggccaaaggtgagattttaatgggaacaacatacatagaattctatgctgaagaatcaaaaagagtttatggtgatataattcctgatccgttgcctgatagaagaattgttattattaaacaacctataggagttgtaggtgcaataacgccatggaattttccaagcactatgattacaagaaaatgtgcccctgcacttggtgtcggttgtccagtagttattaagcctgctagtcaaactcctttttctgcactagctttagcagtattggcagaagaagcaggttttcctaaaggtatatttaatgtaattactggctctgcttcagaaatagggaaagaattaacacaaaatccaatagttaaaaaaatatcatttactggttctacagaggtaggtaaaattttacttaaacaaagctcatcaacagtaaaaaaagtttccatggaactaggtgggcatgctccatttatagtttttgatgatgcaaatattgatgaagcagtttcaggcgctattattagtaaatttagaaattctggacaaacatgtatatgtgctaatagactttttgttcatgaaaaaatatatgatgaatttttaaaaaaatttgtaaatgaagtatcaaaaataaaagttggtaatggtttagaaagttctattaactctggaccattgattgatcagtattcactagaaaaagtaaaggatcatgtaaatgatgctgttaacactggtgctaaagttg

SEQ ID NO: 213129 - DNA, 368 bp, Unknown
  Bacterial polypeptide expressing nucleotide sequence isolated from the Sargasso Sea
aatggtagttaaagtaggaataaatggcatgggtcgtattggaagaatgattgtccgttcgatttatgaaaaccataaaggaaaaattttaattaaacatattaataacaaatctaattctgatgtttgcgcaaacttattgaaaaatgactctatacacggagaatttaaagttgatataaaatcaaattcggattatttaaaaattaataaaaaaaatatttcttactcacaacattcaaaaatagatgatattgaatggaaaaaatatgatgttgattatgtttttgaatgcactgggaaattcaattcaaaaattcaattacaaccacatataaataacggcgcgaaaaaagttgtggtatctg

SEQ ID NO: 213130 - DNA, 115 bp, Unknown
  Bacterial polypeptide expressing nucleotide sequence isolated from the Sargasso Sea
aatcatgctaccccttttggaggctataaacaatcaggttatagtagagaaaaaggtattgatggattaaaatcttatcttcaagttaaaaacgtaggtattagcttaagctaat

SEQ ID NO: 213131 - DNA, 871 bp, Unknown
  Bacterial polypeptide expressing nucleotide sequence isolated from the Sargasso Sea
aatgttagataaaagaaatttttacattaatggaaaatgggttaagcccattaaaccaaacgactttaaagtaataaatccgtctaatgaagaagcatttgctgtgatttctttgggatcaaaaggtgatactgatgttgctgtaaaagctgcgaaaaaagcttttgagaaatggaaagaaacttcaaaagaagaaagaatatattttttagaaaaactactaaaaatttataaaaaaagatataatgaaatggctgaagcaatgtcggttgaaatgggagctccaatagattatgcaatttcaactcatgcatcatctggacaatctcatttagaagattttatattaagattaaaaaattttgaatttgaaagacattttgattcaaaatcaaataattacataacttatgaaccaattggtgtatgtggtttaataactccctggaattggccaattaatcaaattgcattaaaagtagttcctgctttagctactggttgctcaatgatattaaaaccatcagagatagctcctatttcagcaatgttatttgctgaaatgatagatgaaacaggttttccatctggtgtatttaatttagttaatggtgatggtgatggtgttggaacaaatatgtcttgtcatccggatattgatatgatctcttttacaggatctactagagccggaaaattaatttctaaaaatgcttcagatacaatcaaaagagtttgtttagagttagggggcaagggaggaaatatcgtttttgcagatgcacaccctaatgctgttagagatggaatcaaaaatgtaatgagcaattctgggcaatcatgtgatgctccaactagaatgctagtagaa

SEQ ID NO: 213132 - DNA, 610 bp, Unknown
  Bacterial polypeptide expressing nucleotide sequence isolated from the Sargasso Sea
tatgaatattaaaaataaaactctctttaaacaaaaatgctatatcaatggaagctgggttggtagtaaagataataaaataatagaagttaataatcctgctgatttacaaattataggtcatgttccaaaatatggaactgatgagacaaaattagccatcgaagcggcaaatagagctctaccagagtggagatccaaaactgcaaaagaacgctctattcttttaagaaaatggtttgatttaattatgttaaatcaagaagatttagctcaaataatgactattgaacaaggcaagccaataaatgaatcaagaggggaaatagcttatggagcttcttttatagatctgtatgcggaggaaggaaaaagagtctatggagaaacgattcctgatcctttgcctgatagaagaatagttatcataaaacaaccaattggtgttgttggagcaatcacaccctggaattttccaagttctatgatcactagaaaagctggtccagctttagctgtaggatgtacgatagtaattaaaccagctagtcaaactccctactctgcactagccttaggtgtcttagctgaagaagccggaatcccctaa

SEQ ID NO: 213133 - DNA, 422 bp, Unknown
  Bacterial polypeptide expressing nucleotide sequence isolated from the Sargasso Sea
agatccaagaagagatagaactgcaagtcaatctattgtgccgacttcaactggtgcatcaaaagcaattggtgaaattattccctcgcttaagggaaaattagagggtgtagcgatgagagtaccaactccaaatgtttctttggtcgagctcattttttgtactaaaaaggatttaagtattgaaaaaataaattcagcatttcaaaactttagcaaaaaaaataagatacttgaaatcacagaagaaaaacttgtatctatagactttaatcataattcctcttcatcaatagtagacgcaagtttaacaagcgttgtaggaaaaaatatgggtaaaatttcagcttggtatgataatgaatggggattttcaaatagaatgtgtgacattgcagaatatcttcataagatttcttaat

SEQ ID NO: 213134 - DNA, 550 bp, Unknown
  Bacterial polypeptide expressing nucleotide sequence isolated from the Sargasso Sea
atgaaattaatagaacacttcgtaaatggtaaaataattccaggatcctcagataaaaagggcaaagttttcaacccagcaactggagaacaagaatctgaagtaagacttgcttcaaaatctgatttagacagtgcagttcaggtagcaaaaaaagcatttgaaacctggtctttgaaaccgccacttcaaagagctagaattatatttaaatttaaagaattgattgaaaaaaattctgatgaattaacaaaattaattgtttcagagcatggcaaagtgtttgaggatgcaagaggctctttaactagaggacttgaagtagtggaatttgcttgtggaattccacatttattaaaaggtgagttttctgaaaacgttggtacaaatgttgatagttggtcaatgagacaacctttaggagttgtagcaggtatcacaccttttaactttccagcaatggttccaatgtggatgtttccaatagcaatagcttgtggaaacacttttattcttaaaccatcagaaaaagatccttcttgtgcaataa

SEQ ID NO: 213135 - DNA, 193 bp, Unknown
  Bacterial polypeptide expressing nucleotide sequence isolated from the Sargasso Sea
tatacttgcaacaaactcagctccactagtttctaaagattttaatcacaatccacacagttcaatatttgatttaactcaaacacaagtaatcaaaggcaaatttagcagggttttatcttggtatgataatgagtggggtttttcgaatagaatgtgtgataccacaatccaaatcgctggtcttatttag

SEQ ID NO: 213136 - DNA, 795 bp, Unknown
  Bacterial polypeptide expressing nucleotide sequence isolated from the Sargasso Sea
aaatcgattacactaaatatgatatagatgatgctcttcttatagacaacacaggtatatggagagaaaaagaagcattagcacaacatataaagtgtaaaggaatttctaaagtcttacttacagctcccggcaaaaagggagtaaaaaatattgtttacggaattaacaatcaagatttacccgaaaacgaagaaatagttggtgctgcttcctgtactacgaacgcaatagttccagttttaaaggctttaaatgatgaatttataatccaacaagggcatattgagactgtccatgcctatacaaatgatcaaaatctaattgataattatcacaagaaagctaggcgaggtagaagtgcggccttaaatctagtaataacagaaactggagctggcaaagccgtaggagaagttttaccggagcttcaaggtaaattaactgctaatgctattagagttcctacccctaatgtatctttagctataatgaaattaacctttgaaaatgaacattctaaggaagagttaaactcctttttaagaaacaaagcttttcattctgagttaaaagaccagatagattttacaagctctccggaaatggtttccaatgattttgtaggaagtaggtatgcatgtattgttgattcggcagctactttaagtcagtcaaataatgcggttttttatgtatggtacgacaatgaatttggttatagtgttcagctacttagagttgctaaacaaatggcaggaatcaaatatcctagatttccaaaatattcataac

SEQ ID NO: 213137 - DNA, 855 bp, Unknown
  Bacterial polypeptide expressing nucleotide sequence isolated from the Sargasso Sea
aattgtggctcaaatgagacttttgaagctatcaaagcagcgaaggaagcacataaagtttggtcaaagacagatacaaaagaacgttcttctgtgcttaagaaccttcatcgtctcatgctcgaacatcaggaagacttggcaaggattataacgcatgaaggcggcaagccactctctgaatcaatgggtgaaattgcctatgctgcgtctttttttgaatggttttcagaagaggcgaaaagagtttatggtgatgtaattcctggccatcagcaggatcgcagaacgcttgtgatcaaacaacccatcggcgttgttggctgtatcactccatggaattttccatccgcaatgttggcaagaaaaatcgcgcccgctatagcagttggctgtacagtggttgcaaagccagcaccagaaacaccctattctgcaacagctatggcgtatctctctgagcttgctggcatccccaagggtgtatttaatgttgtcacaggcgatgctgaaaaaattggctctgtgatgacaacccacaaagaagtaaaaaaaatcacttttactggctccacttctgttggaaaacagttgctcaagcaatcggcagataccgtaaaaaaagtttctcttgagctaggaggccatgccccttttattgtctttgaagacgcaaatcttgaggatgcagttgatggtgcgttgattgcaaaatatagaaacagtggccaaacatgtgtttgcgccaataggatttatgtccaatcaagcatctatgacgatttctctaagcgtttcactgagaaagcctctcaattggtggttggtgacggtcttgcagagtccacacagcag

SEQ ID NO: 213138 - DNA, 211 bp, Unknown
  Bacterial polypeptide expressing nucleotide sequence isolated from the Sargasso Sea
aaaaagatgcaaaatattttatctgtaaacaatttacctttggtatcaatagattttaatcatagccctcatagttctatttttgatttaacccaaacacaagtaattaataagaaattttgccgcgttttatcatggtatgataacgaatggggtttctcaaatagaatggtagatactttaattaatcttaaaaaatattttaagtgaa

SEQ ID NO: 213139 - DNA, 361 bp, Unknown
  Bacterial polypeptide expressing nucleotide sequence isolated from the Sargasso Sea
atgaaaataaatattgcaataaatggatttgggagaataggtagattaatattaagagccatttatgaaaaaaataataataatattaacgtaaaggcgatcaatgatcttgggtctatagagagcaacgcacacttatttaattacgatactactcatggtcaacttaacaataagattgaatcaaacaaatcaggatttatcataaataataaattgataaaaatattcaataaaaaaaatcccgaagaattaccttggaaaaaacttggaatagatattgttttagaatgcacagggatatttgcttcaaaagaaaaatcaatgaaacatgtaattgctggggcaaaaaaagtaataa

SEQ ID NO: 213140 - DNA, 241 bp, Unknown
  Bacterial polypeptide expressing nucleotide sequence isolated from the Sargasso Sea
gccgctggtgtttggaccagtgatatgggccgggcattgcgtatgtctgaactcctcaaagctggcacggtatgggtcaacacctaccgggctgtcagctttacatcgccgtttggcgggtacaagcgtagtggggaggggcgcgagagtggcaaggacgcgattaaagaatttttgcaggtcaaatcagtctggattgcccagcaaacaacagcggcgaacccttttgtgatgcgctagc

SEQ ID NO: 213141 - DNA, 854 bp, Unknown
  Bacterial polypeptide expressing nucleotide sequence isolated from the Sargasso Sea
aatatcaaaagaagaaaagctgaaattattagaaaaactattagaaatttataaaaaaagattcaacgaaatggctaaggctatttcagatgaaatgggagcgccaatggattgggccacagatgtacaaactggatcaggccaagcccatttggaagattttattttaagattaaaaaaatttaattttgatgaacattttgactctaaatctaataaccatatttgttatgaaccaataggtgtttgcggattaatcacaccttggaattggcctatcaatcaaatagcgttgaaagttgtacctgcacttgcaactggatgtactatgattttgaaaccatctgagatagctcctatatcgggaatgttgtttgctgaaatgatagatgaagccgggtttccttctggtgtatttaatttagttaatggagatggtgctggagttggcactaatttatctggtcatccagatattgatatggtttcttttacaggatcaactagagcaggaaaattaatttctaaaaatgcagctgacacaattaaaagagtttgcttagagcttggaggaaaaggtggaaatatagtttttgcagactcttatccaaacgctgtaagagatggaattagaaatgtgatgagtaattctggtcaatcatgcgatgcacccactaggatgttagttgaaaaatcaatttatcaaagagctgtagatgaagcagtggatgaagcaaacaaaattcaagtagatgtaggttcaaagaaaggtgatcacataggtccggttatttcaaaaactcaatacgataaaataattaatttaattgaaagcggtatatcagaaggagcaa

SEQ ID NO: 213142 - DNA, 442 bp, Unknown
  Bacterial polypeptide expressing nucleotide sequence isolated from the Sargasso Sea
agacaattctcacaaagatttaagaagagcgagatctgcaagtcaatcaattgtacccacatctactggtgcatcaaaagctattggtgagattataccctcattgaaaggcaagctagaggggatagcaatgagagtgcctacaccaaatgtttcattaatagaatttatatttaatgtaaaaaaaaatattaccgtaaaaaaattaaataactctttattttcagcttctaaaacgaaacttaaaaatattctaaatgttacagatgagaagctagtctcagttgattttaatcacaatagtgcatctgcaatcatagactcctcacttactaatgtagttggtaataaaatgggtaaaatttcagcttggtatgataatgaatggggtttctcgaatagaatgtgtgatattgctaagtatgtaagcaagatcaaataa

SEQ ID NO: 213143 - DNA, 733 bp, Unknown
  Bacterial polypeptide expressing nucleotide sequence isolated from the Sargasso Sea
gctaaaaatgcttttacaacatggaaaaaatacctctgtagaggaaagaataactttactgaaaaagctattaaatatttataagagaagatttgatgagatgacccaagccatttcaactgaacttggtgccccattagattgggcttcatctgcacaaacagcctctggagagtcacatattgaagattttatattgagattaaaaaaatttgaatttgaaacaaaatttgatgaaaattctaataattatatagtttatgaacctattggtgtgtgtggtcttatcacaccatggaattggcctattaaccaaatagctcttaaagtaataccggcttttgccactggctgtaccatgattttaaaaccatctgaaatggcacctttgtctggtttgttatttgctgaaatgatacatgaagcaggttttcctgcaggtgtttttaatttagttaatggagatggagcaggcgttggatctcaaatatccagtcatcctgacattgacatggtttcttttactggttcaactagagcaggtaaattaatttcaaaaagtgcagctgatacaattaaaagagtttgtttagagcttggtggtaagggaggtaatattgtttttgctgatgcatatcccaatgctgttagagatggtgtaaggaatataatgagtaattctggtcaatcatgtgatgcacctacacgaatgttagttgaaaaatcaatatag

SEQ ID NO: 213144 - DNA, 587 bp, Unknown
  Bacterial polypeptide expressing nucleotide sequence isolated from the Sargasso Sea
tatgtacgaaaaatttggacaatttataaatggaaaatggcaacaatcttcagataaatcttcttatgaagttataaatccagcaaacgaagaaattttaggcaaagcatcaaaagcaacaccagatgatgtaagtcttgcattaaaatctgcagagaaaggtttagaagtttggaaacagactccgccttggcaaagatcaaatgttattagacgaatagcagacaaaatgagagaaaaacaggatgttttagcaaaatggatgacattagaagttggtaaaccatttgctgaagcaaaaggcgaggttggtgcagcagcagatatttttgaatggaattcagaagaaacaaaaagaatttatggtcaaacagtagagagtagatttgtagatactagagtacatgtttattatcaaccaataggtgttgttgcagcattaacaccatggaattttccgttagtattatcttcaagaaaaatttctacagctttggctgctggatgttcagtaatagttaaaccagacgttataactcctggaactgtaatgcaattggtagatatatgtcgagaatgtggagtgc

SEQ ID NO: 213145 - DNA, 827 bp, Unknown
  Bacterial polypeptide expressing nucleotide sequence isolated from the Sargasso Sea
gcagcaagctgaaaaaaaagaaacttatgatgtaatcaaccctgcaactgaggaagtgattggaaaagcatcgaaagcttcatctattgaagtacaaaaagcattaaagtctgcagaaaaaggtttggaagtttggaaaaacaccgctccatggcaaagagcttacgtgcttagaaaaattgcagacatgatgagagagagaaaagatattattgcaaaatggttaactcttgaagttggaaaacctttaacagaagcggttggtgaagttggtggtggagctgatatttttgagtggaatgctgaggaaacaaaaaggatttatggtcaaacacaacaaagtagatttccagatactagagttcatgtttattatcaacccgtaggagttgttgcagctttagttccttggaattttccaatagtcttagcatcaagaaaaatttctactgctttagctgcaggatgttctgtaatttgtaaacctgacgtaattactcctggtgctgtgatggaattagttaacatttgcaaagaagctggagtaccagatggagttgtgagtcttttgtcgggtgatcctgctgaaatatcaaatgaattaatggaatctgatattattaaaaaagtttctgttactggatcaactagagttggaaaaattattttaaaaaaagcagctgataaagttcaaagagttactatggagcttagcggacactcgccttttattgtatgtgaagatgtggacatgaataaagtagctgatatagctataaccggtaaatttagaaataacggtcaagtctgtatttcaccaaaataga

SEQ ID NO: 213146 - DNA, 906 bp, Unknown
  Bacterial polypeptide expressing nucleotide sequence isolated from the Sargasso Sea
ggggtcgtcatctaaagatgaaagaatcgcacttctagaatcaattattacaaattatgaggactcatccgaagaacttgctgcgatcatcagtgaagaaatgggagcaccattatggctttcaaaagttgctcaagttacctcagggcttcagcattttaaagatactttagaagtcttaaaagaatttgattttgaggaagatggcgaatcatttctcatacgtaaagaaccaattggtgtaattggcatgatcactccttggaattggccaatgaatcaaatgagtacaaaggttgcttcagcaattgcagctggctgtacaatggttttaaagccaagtgaaatatctccattctgtggtattcatcttgctaaagtgattgagaaatcagatctaccaaatggtgtctttaaccttgtaaatggccttggacctgttgttggtgatgcactttctactcatccagatgttgatatgatgcatttcacaggatctaccagagctggaattgcggtagctcagtcttcagctcccactgtaaagagagtagcacaagaactaggtggaaaatctgcaaatattatcctagatgatgctgatcttgaaaaagctgtatcagcgggagtaaatttatgtttcttaaatacaggacaatcatgtaatgcacctaccagaatgcttgttcatgcatcacaatacgatgatgcagttaaaattgctaaagctgctgcagaagctacagtagttggttatccaaatgaggacggcactaaaattggtccaatatcaaatagaacgcaatacgaaaaggttaagagattaattgatcttggagttgaggagggcgcaaaactggtcactggaggttcagaattacctgatggttttgaaaagggtttttt

SEQ ID NO: 213147 - DNA, 874 bp, Unknown
  Bacterial polypeptide expressing nucleotide sequence isolated from the Sargasso Sea
ttttaaccctgctaccggggaacaagagtctgaagttattttagcctcaaaagcagatttagatggtgcagtagaaattgcacaaaaagcttttgagacttggtcattaaaccctccacttcaaagagcaagaataatgtttaaattcaaagagctcatagagaaaaattttgatgaactggcaaaactaatagtttcagaacatggaaaagtttatgaggatgctaagggatcattaataagaggattagaagttgtagagtttgcgtgtggaattccacacttacttaaaggagagttttctgaaaatgttggaacaaacgttgatagttattcaatgcgacagcctttgggagttgcagccggcataaccccatttaattttccagcaatggtacctatgtggatgtttccattagctatagcatgtggtaatagttttattttaaaaccatcagaaaaagatccctcatgtccgatgaaattggcagaactgcttcacgaagctggtcttcctgagggagtttttaatgttgtaaatggtgataaagaggttgttgatgcgatattaacaaatcaaaatattaaatctgtaagttttgttggatcaactcctattgctaagtacatttatgaaaatgcagctaaaaatgaaaaaagagtccaagcattaggtggagcaaaaaatcatttagttgtaatgccagattgtgatttagatggtgcggtaaatggtttaatgggtgctgcatatggttcagctggagaaagatgtatggcgcagtcagtagcagtagcggtcggagacgtaggtgatgagttagtctcaagactatcaaaaaaagctgaagcattaaaaattggacccggtatg

SEQ ID NO: 213148 - DNA, 190 bp, Unknown
  Bacterial polypeptide expressing nucleotide sequence isolated from the Sargasso Sea
ttagatgtaaaccaaaaacctcttgtatcaaaagattttaatcataacccccatagttcaattttcgatgtaacccaaactcaagtaataaaaggaaaatttagccgagtgctttcatggtatgataatgaatggggtttctctaatagaatgtgtgatacttcaatacaaatagctggtttaatttagt

SEQ ID NO: 213149 - DNA, 787 bp, Unknown
  Bacterial polypeptide expressing nucleotide sequence isolated from the Sargasso Sea
tatcctcggcaatgaactgaccacccatccgctggttcgcaagatcaccttcaccggatcgaccgaagtcggtcgggtattgctgcagcaggcggcgagcaccgtgaagaaatgctcgatggagctgggcggcaacgcccccgtcctggtgttcgacgacgcggatctcgacacggcagtggagggtgtcatcgcttccaagtttcgcaataccggacaggcctgcatcagcgccaatcgtatctatgtccaggacgggatctacgacgccttcgcgcaacgcatggcggaacgcgtcgcgcaactcaaggtgggcaatggcctggcggacggcgttcagcagggtccgctgattgatgatggcgcggtgactaaagtagaggagcacatcgccgacgcggttgctggcggcgcgcgtgtcaagcttggcggcaagcgccatgctttgggcggctgcttcttcgagccgacgatattggtcgatgtccagccctcgatgatggtcgcgcgcgaggaaacctttggtccggtggcgccattgttccgcttccacaccgaggacgaggcgctgcggctcgccaacgatacggaattcggcctggctgcttacctgtatagccgtgacgcctcgcgtatctggcgtgtgtcggcggggatcgaatccggtatggtcggcatcaactgtggcctgatttcgaatgaggtggcgccggtttggcggcgtccagcagagcggcctccgggcgcgaaagggtctcagtacggggcatcgaagagttccttttga

SEQ ID NO: 213150 - DNA, 346 bp, Unknown
  Bacterial polypeptide expressing nucleotide sequence isolated from the Sargasso Sea
ccaagtttgaaaggaaaattagaaggtgtggcgatgagagtacctacgccaaatgtttctcttgtagaattagttttttgtacgaaaaaagaaattaatataaaaaatataaataatgaatttgaattagcttcaaaaagagaattaaaaaggattttagaagttacgtatgaaaaattagtttctgttgatttcaatcataactcggcctctgcaatcgttgacgcatctttaacaagtgtagttggagcaaatatgggtaaaatttcagcctggtatgacaacgaatggggtttttcaaacagaatgtgtgatatagctgaaactttgcataaaatctcataat

SEQ ID NO: 213151 - DNA, 748 bp, Unknown
  Bacterial polypeptide expressing nucleotide sequence isolated from the Sargasso Sea
aggtaaaaatagagatatttcaattaagcatatcaataacaggtcaaacttagaaacaacttgttctcttctaaaatatgattcaattcatggaaaatttaactcaaacattaaagttaatggaaaaaatttaattataaataaaaataaaatttcgttttctcaagaaacttccctagaaaatattgattggaaaaaatatggtgtagattatgtgtttgaatgtactggaaaatttaattcaaaagaaaaactattacatcatttaaaaaatggagcaaaaaaagttattgtttcagctccatgtaaaaatgcagataaaacaattgtttttggggtaaatcaaaataccattaaaaaaaatgatcaaataatttctgcagcttcttgcacaactaattgcttggcgcctgttgcaaatgttttaaataataattttgaaattgaaaaaggatttatgacgactattcatgcttttactagtgatcaaagaattttggataattctcataaagacccaaggagagcaagatctgctagccaatcgattgttccaacctctactggagcatcaaaatctattggagaaatcataccatctcttaaaggaaagcttgaaggtattgcaatgagaatcccaacaccaaatgtatcattaattgaattagtattttgtacaaaaaaagaaataacaaaagaaaaaattatttccagcttcttaaaagcatcaaaaaaagaatctaaaggt

SEQ ID NO: 213152 - DNA, 964 bp, Unknown
  Bacterial polypeptide expressing nucleotide sequence isolated from the Sargasso Sea
taaaagaaaattctatattaacggtgaatggatagagccctcaaaaaaaaatgattttgaagtaattaatccatctaatgaagaaaaattcgccgtaatatctctggggactaaagctgatgttgacttggctgtcaaagtctcaaaagaggcttttgaatcttggaaagaaactactaaagaagaaagaatcaaattattagaaaatttattatcagtttataaaaaaagatttagtgaaatgactgaagcaatttctaaagaaatgggagctccaatggattggtcttctaatgttcaaaatgcatccggtcaagcacacttggaggattttattataaggcttaaaaattttaaatttgatgaacaatttgattcaaaatcaaataatcaaatattttatgaaccaatcggagtgtgtggattaattactccttggaactggccaataaaccaaattgcacttaaagtaatacctgctttagcaactggctgcacaatgatacttaagccttcagaaatagctcctgtatcagcaatgttatttgctgaaatgattcatgaagctggttttccacctggagtttttaatctagtaaatggagatggagctggagttggaacatttatatccggtcatcctgatattgatatggtgtcttttactggatcaacaagagcagggaagctaattacaaagaatgcagctgatacaattaaaagagtttgtttagaactgggtggaaaaggtggaaatatagtatttgcagattcttaccctaatgctgttagagatggaataagaaatgtaatgagtaattctggacagtcttgtgacgctccaacaagaatgcttgttgaaaaatctatttataaaagagctgttgaggaagcagtagatgaggcaaacaaaattaaagtagatgttgcatcaaaaaaaggaggtcatattggaccggtagtt

SEQ ID NO: 213153 - DNA, 434 bp, Unknown
  Bacterial polypeptide expressing nucleotide sequence isolated from the Sargasso Sea
acacaaagatccaagaagagcaagatcagcgagtcaatcaatagttcctacctccacaggagcttcgaaagcaataggagaaataataccaaacctcaaaggaaaactagaaggtgttgcgatgagggtgcccactcctaatgtttctcttgttgaattagttttttgtacaaaaaaagatgtcaatataaaaaaaattaatgatgcctttgaacaagcatcaaaaaataaattaaaaaacatcttagaagttactcatgaaaaattagtatctatagattttaatcatcattctgcttctgcaatagtagatgcttctttaacaaatgtagttggaagcaatatgggaaaaatatcagcctggtatgataatgagtggggcttttctaatagaatgtgtgatattgctgaaactttgcataaaatctcttaat

SEQ ID NO: 213154 - DNA, 170 bp, Unknown
  Bacterial polypeptide expressing nucleotide sequence isolated from the Sargasso Sea
aaaaagagttgccaaaaaattaagatctggaatggttgatgtaaatggagctggaattgccattgatactccatttggtggctttaaacattcaggaattggaagagaagcaggtgaacatggtcttcaagaatttttagaggtcaaatcagtaggtggttggaattaat

SEQ ID NO: 213155 - DNA, 610 bp, Unknown
  Bacterial polypeptide expressing nucleotide sequence isolated from the Sargasso Sea
cctgcaacagaggaaattttaggtcatgcatctaccgcctgccgtgaagacgtaaaaaaggcactactttcatctgagagtggatttaaaaaatggagaaatactacaccttgggaaagatctaaagttttaaggagaatagctgataagataagggagaaaaaagatattttagccaaatggatgactttagaggttggaaaaccattggcggagggggttggtgaagcaggtggtgctgccgatatttttgaatggaactcagaggagacaaaaagaatatatggacaaactgttgagagtagattttcagatactagagttcatgtatattaccaacctgtcggagttgttgcagcgttagttccctggaactttcctctaatattagcgtctagaaaaatttctactgccttagctgcaggatgctcagtaatttgtaaaccagatgtgataacacctggaacagttatggaattagttgacatctgcaaagaatgtggtgttcctgatggtgttgttaatttattatctggtgatccaccctcaatctctgagcaattgcttgagtcagatattataaaaaaagtttcaattacaggatctacca

SEQ ID NO: 213156 - DNA, 668 bp, Unknown
  Bacterial polypeptide expressing nucleotide sequence isolated from the Sargasso Sea
aattgtttttgatgatgcagatatggatgaagcagttgctggagcaatgcaaagtaaatttagaaatagtggtcaaacttgtatttgtactaatagaatatttgttcatgaaaaaatttatgatgagtttttaaataaattcattgaagaagttgataaaattactgttggtaatggtcttgaagaaggaattgtttctggcccactaattgataaatcatctttagaaaaagtaattgatcatgttcaagatgctgtaaatacaggtgctaaaattgccattggtggtgatatacattctattggaggaaatttttatcaaccgactgttctatctaatgtttctagaaaggcaaaaataacttttgaagaaacatttgggcctgttgcaccattgtataaattttcaagtgatgaagaagttattgaaatggcaaatgacactccatacggtttagcttcatacttcttctcaagagatattggaagaatttggagagttgctgaggctttagagtatggaatagtttcgataaataatggattgcctacaattgcagaggttccttttggtggagttaaagaatcaggaatgggaagagaaggttctcgatatggcctagatgattatttgactattaaatatatatctatgggtggtatttagg

SEQ ID NO: 213157 - DNA, 499 bp, Unknown
  Bacterial polypeptide expressing nucleotide sequence isolated from the Sargasso Sea
atgactataaaagttggaataaatggattgggaagaattggaagaatggtactacgatctatttttgaaaataaaaataaaaaaatattagttaaacatattaataatagaactggcacagatgtagtaagttcacttttaaaatatgattctattcatgggaaatttgatgctaacataaattacaacagtaatagtattacaattaataataataaaatttcatttactcaaaaaaccaaaattgaagatattaattggaaaaaacttaatgttgattatgtattagaatgtactggaaaatttaattcaaaagaaattttgttaaaacacataaaaaatggagcaaaaaaagttatagtatcagctccttgcaaaaattcggacaagacaattgtttatggagtaaatgaaaagacaataagaaaaaatgataaaataatttcggcagcgtcatgcactacaaattgtttagctcccagttgccaaatgttttaaa

SEQ ID NO: 213158 - DNA, 847 bp, Unknown
  Bacterial polypeptide expressing nucleotide sequence isolated from the Sargasso Sea
ggttttcccctgcgatatcacgccccacggtcgagcaaggcgcatctatactatgcgcgagcccttacgtcttgtttcggcgatcactcccttcaatcatccgatgaaccaggtcgttcacaaagtggcgccggccattgccgtggggacgcctgtagtgctcaaaccatcggagaagacccctctgtctgcctattggctgggccagctagcgttggactgcggcttgcccgccaatgcgctcaatgtgatcaatgggccgttagccgagatcgctccgctgttggttcaacacgagcgagtagagatggtcaccttcacagggtcgagtgacatcggtcgacagatcgccgagcaagccggatacaaacgtctgatcctcgagttggggggcagctcgcctctcttggttttggaggacgcagatgtcgaggcggctgtggagatcgccatggcgggaatcttcaagaactctggtcagcgctgcacagcgattcgacgcctcgtcgtccatcggtcgttggccgatcggttcgccgagagtctcgcagccgcgacggctcagttgacgtgtggcgacccatacgatgaagcaaccgatatgggcaccgtcatcgatgaagacgctgcccgcctgctggagagtcgggttaatggcgcggtgaaagcaggggctcgtgtactgacgggcaaccgtcgggagggagctctgtattggcccaccgtcgtagatcaggttgagaacgactataatctggttcggtcggagagcttcggacccattgcctcgattttgcgctttgacgatctgagtgaagcgctcgccatcgccaacgacaccgagtac

SEQ ID NO: 213159 - DNA, 727 bp, Unknown
  Bacterial polypeptide expressing nucleotide sequence isolated from the Sargasso Sea
tttgaaaaaactttagatgaagaaaaaaatcaaactattttatacgaaccaaaaggcgtatgtgcgttaattactccttggaactggccaattaatcaagtcaatttaaaagttattccagcactagctgctggatgtacagtagttttaaagccatctgaaattgcacctttatcatcaatgttattagctgaaatgatgcatgatgctggttttccaaaaggtgtgtttaatttagtaaatggtgatggtgcggtaacaggagatgctttgacaagccaccctgatatagacatgatctcatttactggatcgactagagctggtgctttgatttctcaaaatgcagcaaaagattttaaaagaataagtttagaactaggaggaaaaggagcaaatattgtatttaaagatgctggaccagatgcaatatcttggagtgtccaaagatgtttcagaaattcaggacagtcttgcaacgcacctactagaatgttggttgaaaaatcaatttataatgaaacaattgagaaagtaagagagtttgcaaataaaaccaaagtagacagtccaaataaaaatggaaatcatataggaccagtaatttcagaaactcaatttaataaaattcaaactttaattcaaaagggaattgatgaaggtgctaaattagttgcaggaggcgttggaaaacaagaaggtttagaaaaaggatattatgtaaaac

SEQ ID NO: 213160 - DNA, 925 bp, Unknown
  Bacterial polypeptide expressing nucleotide sequence isolated from the Sargasso Sea
tcaaaagctatttctgatgaaatgggtgctcctatagactggtcttctgaagttcaaacaagttctggacaaactcatttggaagattttattttaagattaaaagaatacaaattcgaaaagcaatttgactcaaattcaaataattatatttgctatgaaccgattggtgtatgtggattaattactccatggaattggccaataaatcaaattgctctaaaagttgttcctgctcttgcagcagggtgtacaatgattttaaaaccatcagagattgctccattatcaggaatgatttttgcagatatgattcatgaagcgggttttccgaaaggagtttttaatttagtaaacggggatggaaaaggcgttggaacatatttttcatctcataaaaatatcgatatgatatcatttacaggatccacaagagcaggaaagctaatttcaaaaaatgctgctgacacaattaaaagagtatgtttagagcttggtggtaaaggtggaaatatagtttttgaagacgcttaccctgaagctgttcgggatggaattagaaatgtaatgagcaattctggccaatcatgtgatgctccaaccaggatgctagtacaaaaatcaatttacgagaggtcagttaaagaggctattgatgaggctaataaaataaaagtggatttagcatctaaaaaaggtggacatattggtcctgtagtttcaaaagtacaatacgataaaattatcaatttaattaaaagaggaattgaagaaggggcaacattggctgcaggtggacctgaaaagccagagcatctaaaaaatggatattttattaagccaacaatatttaccgatgtaacaaatgacatgaaaatagcttcagaggaaatttttggggactgtctttctataataccttttt

SEQ ID NO: 213161 - DNA, 661 bp, Unknown
  Bacterial polypeptide expressing nucleotide sequence isolated from the Sargasso Sea
gatgagcatttttgatgaaaaatcaaataattatatttattatgaaccaattggtgtttgtggattaataactccatggaactggcctattaatcaaatagctttaaaggtagttcctgcatttgcaacaggatgtacaatgattttaaaaccatctgaaatagcaccaatatcagcaatgttatttgcagaaatgattgatgaagttggatttcctaaaggggtttttaatttagtgaatggagatggtgttggcgttggaactcaaatttcaagtcatcctgatattgatatggtttcttttacaggttcaacaagagctgggagattaatttcaaaaaatgctgctgaaacaattaaaagagtttgtttggaacttggaggcaaaggcggaaatatagtttttgcggacagttataaaaatgcagttcgagatggcatcagaaatgtaatgagtaattcaggtcaatcctgtgatgcacctacaagaatgcttgttgaaaaatctatttaccaaagagctgtggatgaagcagttgatgaggcaaacaaaataggagttgatcaagcctctaaaaaaggagatcacattggacctgtaatttcaaaaactcagtatgataaaattataaatttaattgaaagtggaattaaagaagga

SEQ ID NO: 213162 - DNA, 901 bp, Unknown
  Bacterial polypeptide expressing nucleotide sequence isolated from the Sargasso Sea
aaaagatctgaggagttagctgaaacaatatctaagaaaatgggagctccaatatggttatcccaagttgctcaggttgcttctggtcttactcattttaaggatactctaaatgttcttaaaggctatgattttgagtatgagaaagatggttatttagttcgaaaagagcctgtgggtgttgttggaatgatcactccctggaactggccaatgaatcagatgtgcacaaaagtagcatcaggcatagctgctggatgcaccatggtgcttaagccaagtgaaataactcctttctgcggaattattcttgcagaaattattcacgacgctggtgtacccgctggaatttttaatttagttaatggtatgggtccagttgttggtgcctcaatgtctgaacacaaagatatagatatgatgcattttactggttcaacacgggcaggagttgctgttgctcaagcatcagccccaacagtgaagagagttgctcaggagcttggtggtaaatctgccaatatagtccttgatgatgcagacattgaaaaagctgtatctgctggcgtctcttcatgtttcttaaatacaggacaatcatgtaatgccccaacaagaatgcttgtgtcatctaagaactatgacaaagcagttgaagttgctgccaatactgcaaatgctataaaagttggagatccttttgatgcagatacaaaaatgggcccaatttctaataagacccaatatgagaaggttcaaaggatgattcagattggtattgatgaaggagcaacattatctgctggtggcgttggtcttccagatggctgtgagagcggttattacgtaaaaccaactatattttctgatgtaactaatgatatgactattgcaagagagg

SEQ ID NO: 213163 - DNA, 248 bp, Unknown
  Bacterial polypeptide expressing nucleotide sequence isolated from the Sargasso Sea
cattgatgatgctgtggcgattgcaaacgatactgaatatggccttgcagcttatgtttcaggagaagacaaagaaacgctcacctcaattgcaagacgtctgagggctggccaaattcatgtgaactatgggtccggtggtgcagacgcgccatttggaggctataaacagtcgggcaacggtcgtgagaaagcagaatggggcttagaagaatttcttgaagtcaaagcaataatgggggcgtaaa

SEQ ID NO: 213164 - DNA, 747 bp, Unknown
  Bacterial polypeptide expressing nucleotide sequence isolated from the Sargasso Sea
aatggcagaagctatttccttagagatgggtgcgccaattgatttttcaacgcaacttcaagcgggtacaggagctagtcatataaaatcatacattaaagttttaaaagattataagtttgaaaaaatattaggagaccacgcgccaaataataaaattttatatgagccaaaaggagtttgtgcattaataactccttggaattggccaatgaatcaagtttgtttaaaagtgattccagctttggcaacggggtgcactatggttttaaaaccatcagaaattgctcctttgtcttctatgttattggctgaaatgatcgacgaaataaaatttcctgatggagtatttaatttagtcaatggagacggtgctgtaactggaaacgctttaactagtcatccagaagtaaatatgatttcttttactggatcaactagagctggagctcttatttcaaagaatgcagcaaacgattttaaacgtgttagtttagaactaggcggcaaaggtgcaaatattatttttaaagatgcggacgccgaagccgtagaaagaggagctatgagatgttttagaaatacaggacaatcttgtaatgcacctactcgtatgctggtcgaaaaatctatttataataaaacaatcgataaagtaaaagaagttgcggaaaaagtaaaaattgatttagcatctaagaaaggtgaacatataggacctgtagtttcaaaactcaatttgataaa

SEQ ID NO: 213165 - DNA, 834 bp, Unknown
  Bacterial polypeptide expressing nucleotide sequence isolated from the Sargasso Sea
cggcatttgctcaacgccgtaactggtttttttggggttgtgggggtgttctttttcgctcgctatttgaccggttcttacacgattggattattggcagctgttcttctcgtattgactccccgttattacggtcactcttttaataatcccaaggacatacctttcgccgccttttacctatggagcgtttatttgcttgccaaagctggagatcgatggcgttccggagaaatttccaaaatcgccgactggaagctgggcctggccatgggggcctgcatgggaatccgtcctccggggcttgttatgatgttttacttgattcttttattttttgctgttcggaggttggataatgcagatggccatacacttttgtctttaatccagttggtgcggacccgccttcttcatcctgtactcgtcgccgttggtgtcatgttcattttctggccctattcccacttgaacccgatcataaacattcctcacacaataaaattgctttcgcattttccgtggaactttccgttgatgtttgatggacaaaagatcatggcaactgatgttccctggaattacatattgaaatggtatggcattgccacccctttacctcacctagcagggtttggtttgtttctcatctttggagtaatcagagttttctactcccggaccgataaatatatcccaataattctaattttgttcagcatggcgtttccgctgggcttgtcgatcgttatgcaatccactttatatgacggcttacgccattttctgtttttgacacccttgatggctgtcagtggagcctggggattcttt

SEQ ID NO: 213166 - DNA, 918 bp, Unknown
  Bacterial polypeptide expressing nucleotide sequence isolated from the Sargasso Sea
tccatgaaaccgccagcacaaagagcaagggtaatatttaaatttaaagaattgatagaaaaaaattcagacgaattaattaaacttatagtatccgaacacggaaaagtttatgaggacgcaaaaggttctttgactagaggattagaagttgtagaatttgcttgtggaatacctcatcttcttaaaggagaatttacagaaaatgtaggtacagatgttgatagctggtcaattagacagcctctaggagtctgtgcaggaattacaccatttaattttcctgcaatggtacctctgtggatgtttccaatagctatcgcatgtggcaatacatttgtattaaagccttcagaaaaagatccatcgtgttcaataaaattagctcagttatttaaagaagctggattgcctgatggagtttttaatgttgttaatggaaacaaagaggcggttgatgcacttttaacaaataaagatgtagttgcaataagttttgttgggtctacgcctgtcgcaaaatatatatatgaaaatgctgcaaaaaatgaaaaacgagttcaagctttaggtggagcaaaaaatcattgtgtaattatgcctgattgtgatcttgatcaagcggttaatggtttaatgggagcagcctatggatccgcaggagaaagatgcatggcccaatcagtcgcagtcgcagtcggtaaagttggaaaccagttagtaaacaaacttgcaaaaaaagttgaggctttaaaagtaggtccaggtatggataaaaattctgaaatgggaccacttgtgacaaaggagcatttagaaaaagttaaaggctatgtagatctcggagtacaagaaggagcaaaacttgttgtggatggaagaaatataaaacttcaaggttatgaaaaaggtttttat

SEQ ID NO: 213167 - DNA, 157 bp, Unknown
  Bacterial polypeptide expressing nucleotide sequence isolated from the Sargasso Sea
atgagaattgcaataaatggatttggtagaataggaaaactagtctttagagcttttttagaaaaaaaattaaaaaatattgaggttgttgcaattaacgaattgggcagtttagattcaagtattcacttattaaaatatgatagtatacacggaa

SEQ ID NO: 213168 - DNA, 100 bp, Unknown
  Bacterial polypeptide expressing nucleotide sequence isolated from the Sargasso Sea
gatggaaagtttggaagagttttaagttggtatgataatgagtggggtttctcaaatagaatgtgtgataccgctgtagcaatgaaaagatcaaaatagt

SEQ ID NO: 213169 - DNA, 556 bp, Unknown
  Bacterial polypeptide expressing nucleotide sequence isolated from the Sargasso Sea
catggaattaaaaaataaatctttatttagggaagaatgctatattggtggtgagtgggttagaagcttaaatggccaaactattagtgtagataatccagctacacaaagctcaattggtaatgttcctaaatgtggctctagtgaaacaaaaactgctattaaatcagctaatgaggcatttaagaattggaaaaataaaaccgccaaggaaagatcaataatactaaaaaaatggcatgatcttattttagataatattgaagatttagctcacataatgactgtagagcaaggtaagcctttagctgaatcaaaaggtgagattttaatgggagcaacttacatagaattttatgctgaagaagcaaaaagagtttacggtgacattattcctgacccacttcctgatagaagaattgtggtaattaaacaacctgtgggagttgtcggcgctataactccttggaattttcctagtacaatgataacaagaaaatgtgctccagctttaggggtcggttgtcctgtcgttataaagccagctagtcaaaca

SEQ ID NO: 213170 - DNA, 476 bp, Unknown
  Bacterial polypeptide expressing nucleotide sequence isolated from the Sargasso Sea
aatgaatcatgaaaaattaagaataggtatcaatggttttggaagaataggacgtgcgattttcagaataaatgaaaaattaaaattatttgacattgctattatcaatgatattaacccagatataaataatattgtatataatttgaattatgatactacttatggcagattaaacccaaaagcacattataaagataatgatttaatttctaataattgtacctcaaaaatctttaatcaagagaatatctctgatgttccatgggaaaattatcaagtagaattaattatagattcgtctggtaaaagtttaagtgcattggaagtagaaaaattaagaaaaaaagtaaaaaatattgtagtgacaaactctcaaaataatattgaccaaacaataatttttggtgtaaatgaacataatattgatccaaaaaataattttgtcatatcatcaagtatttgtgatgcaatat

SEQ ID NO: 213171 - DNA, 874 bp, Unknown
  Bacterial polypeptide expressing nucleotide sequence isolated from the Sargasso Sea
gtaattcctggtcatcagcaggatcgtagaacgcttgtgatcaaacaacccataggcgttgttggctgtatcacgccatggaattttccatcggcaatgttggcaagaaaaatcgcgcccgctatagcagttggctgcacagtggttgcgaagccagcgccagaaacaccctattctgcaacagctatggcgtatctctctgagcttgctggcatccccaagggggtatttaatgtgatcacaggagatgctgaaaaaattggctctgtgatgacatcccacaaagaagtaaaaaaaatcacttttactggctccaccgctgttggaaaacagttgctcaagcaatcggcagataccgtaaaaaaagtttctcttgagctaggaggtcatgccccttttattgtctttgaagacgcaaatcttggggacgcagttgatggtgcgttgattgcaaaatacagaaacagtggtcaaacatgtgtttgcgccaataggatttatgtccaatcaagcatctatgacgaattctctaagcgattcactgagaaggcctctcaattggtggttggcgatggtcttctagagtccacacagcaggggccattaattagcgaagatgccatgaaaaaagcgtcaaaacatgttgaggacgctaaaaacaaaggtgcaactattaccacaggaggaaatccacattcgctaggcgggttattttttgagcccactgtgttaactggggtctcagatgaaatgctgattgcacaagaagaaacgttcggtccagtcgcaccaatttttagttttgacagcgaaaaagaagtattggaacgtgcaaataatacgccttatggttggcagcttatttttatacgtc

SEQ ID NO: 213172 - DNA, 295 bp, Unknown
  Bacterial polypeptide expressing nucleotide sequence isolated from the Sargasso Sea
catgaaattaattgaacattttgttggtggaaaaataatccccggaacttcagaaaaaaaaggaaaagtttttaatcctgctactggcgaacaggaaaaggaagtaaaacttgcttctactagtgacttagatcaagcagttgtaattgcaaaaaaagcttttgaaacatggtcattaaaaccctcacttcaaagagcaaggataatgtttaaatttaaagagttaattgaaaaaaattctgacgaacttacacaattaattgtttctgaacatggtaaagtttatgaggatgca

SEQ ID NO: 213173 - DNA, 649 bp, Unknown
  Bacterial polypeptide expressing nucleotide sequence isolated from the Sargasso Sea
ctttggagtaaatgatgtagctttacaaaaagcagatcaaattatttcacctgcttcttgtacaactaatgccatagtaccagtccttaagttgatcagcgatcattatggtatatcaaatgggcatatcgaaactgtgcactcttatacaaatgatcaaaatttaattgataattttcataaaggtgatcgaagaggtaggagcgcacctctgaatatggtgatcacttcaacaggtgctgtgaaagcagtttcaaaagcaattccagaacttaaagataaattaactggtaatgcaattagagttccaactcctaacgtaagtttagcggtattggttttgaacttagaaaatgcagttgataaagatgaattgaatgaattcttaaaaaaatctgcttttgcaagtaaatacagagaaattattggatacactaattcaccagaggccgtatctactgatttttactcaagtccatatgcaacaataattgactctcaagctaccatagcagacggcaaacaaattactttatattgttggtacgacaatgaatatggctatactaagcaagtcctcaatcttaccaaaaaagttgcttcaatagacctaccaagatttcctgaagcaattgaagattcggtatag

SEQ ID NO: 213174 - DNA, 897 bp, Unknown
  Bacterial polypeptide expressing nucleotide sequence isolated from the Sargasso Sea
aatggttcgccgaggaaccaagcgcgtctacggcgacaccattcccggccatcagccggacaagcgcctgatcgtgaccaaggagcccattggcgtgaccgcggcgatcacgccctggaacttcccggcggcgatgatcacccgcaaggccggtccggcactggccgctggctgcgccatggtgctcaagccggcgccacagacaccgttcagtgcgctggcgctggctgtgctggccgaacgcgcgggcatcccggccgggctgttcagcgtactgccggccgatgccgagcgctcccgcgaagtcggcgccgagctgtgtgccaaccccatcgtgcgcaagctgtcgttcaccggttccaccggcgtcggcatcaagctgatggagcaatgcgcgccgaccctgaagaaactctcgctggagctgggcggcaatgcgccgttcatcgtcttcgaggatgccgatctcgacgcagcggtcgaaggtgcgctggtggccaagtaccgcaatgctgggcagacctgcgtctgtgccaatcgcctgtatgtacacgaggctgtctacgacgcctttgccgaaaagctggccgcggccgtggccaaactgcgggttggcccgggtgatgaaacaggcgtcgtcattggtccgttgatcgacggcaatgccgtggccaaggtacaggcgcatctggccgatgcgctggagaagggcgccaaggtgctgcagggcggcaaggcgcatgagctgggcgggcactttttcgagccgacggtcatcaccgacgtcacccctgatatgcgtgtggcccgtgaggagaccttcggcccgctggcgccactgttccgcttccacgacgaagccgaggtagtgcgccaggccaatgacaccgagttcgg

SEQ ID NO: 213175 - DNA, 564 bp, Unknown
  Bacterial polypeptide expressing nucleotide sequence isolated from the Sargasso Sea
tatgaagataaaagttggcatcaatggaatgggaagaattggaagaatggttcttagatcaatatttgagaataatttaaaagatatagaaattaaacatattaacaacaaatcaaattcagaaatttgtacaaatttaattaaacatgactctgttcatggaaaatttaatgctgatgtaaattttaatgaaaaaagtttaattataaataaaaaaaaaatttcatacagccaacatacacatttagaagatatcaaatggaaaaaattagatgtggattatgtttttgaatgtactggtaagttcaattcaagagaaaaactacaagctcatttaaaaaatggagcaaaaaaagttattgtttctgctccgtgtaaaaacgcagataagtctatagtttatggtgtaaaccaaaatatgctaaatgataatgatcaaataatttctgcagcttcttgcacaactaattgcttagctcctattgcaaatatagtacacgaaaattttaaaattgaaaaaggttttatgactacaatccattcttttactagtgatcaaagagt

SEQ ID NO: 213176 - DNA, 157 bp, Unknown
  Bacterial polypeptide expressing nucleotide sequence isolated from the Sargasso Sea
aagacagcttcgctctggaatggtagagattaatggtgtaggttttgcagaaggatccccttttggtggttataaacaatctggcaacggtcgtgagggaggaacttggggaatagaggattttttagaagttaaatctataagtggttggaaataa

SEQ ID NO: 213177 - DNA, 264 bp, Unknown
  Bacterial polypeptide expressing nucleotide sequence isolated from the Sargasso Sea
tctcacattaaatcatatattttagatccactagataaagttgatcagcacagaccttcaaaacccaaggacatagttttgtatgggtttggtcgaatcggtaggttagtttcacgcatcatggctcaaatgacaggcccaggtaattattatagactcagagcaattgtcgtaagaaaaggatcagatacaaacgatctgctttcccgagctagtttgttgggacgtgattctgtgcatggttcttttcctgggcctattaga

SEQ ID NO: 213178 - DNA, 289 bp, Unknown
  Bacterial polypeptide expressing nucleotide sequence isolated from the Sargasso Sea
aatggctattgcttgtggaaatacttttgtattaaaaccatcagaaaaagatccatctatttcaattaaattagcagagttatttcaagaagctggattaccggatggtgtatttaatgtaatcaatggtgataaggaagtagttgatgcaattttgactaacaaagatattaaagctgtaagttttgtgggatcaactccgattgcaaaatatatatatgagaatgcagcaaaaaatgaaaaaagagttcaagcttcgggaggagcaaaaaatcattgtgttgtgatg

SEQ ID NO: 213179 - DNA, 967 bp, Unknown
  Bacterial polypeptide expressing nucleotide sequence isolated from the Sargasso Sea
ctgacatttttgaaatggaatgctgaagaaactaaaagaatatttggtcaaacagtgaaaagcagattggaggatacaagagttcaagttatttatcagcctgttggagttgttgcagcacttataccctggaattttccaattatattggcttcaagaaaaatctctacagcgttagctgcaggatgttctgtaattgtaaaaccagacgtaataactcctggtgcagttatggaattaatgaatgtaataaatgatgctggtatcccaccaggtgttgttaatcttctatcaggagatccagaacaagtatcaaacgagctcatttcttctaatattgtaaaaaaagtttctataactggttcaacaagagtaggaaaattaattttaaaaaaagcagctgacaaagttcaaagagttacaatggaattaagtggtcatgcaccttttattgtttttgaagactctaatatcgacaaagtaactgatatggcaattacctctaaatacagaaataatggccaagtatgtatttccccaagccgcttttacattcatgagagtaaaaaaaatgaatttgcaaaaacttttgttgagaaaaccaaaaaactcaaacttggtgacgggatgaaagaaggagtaaatcttggaccaatcacaaccaaaaaaagattagaagaaattgaaaaattagtagaaaaaacaaaaaaagaaggtggaaaagttctttatggcggtaaaagaccagcaggatttaacaaaggttatttttatgaacctaccataattgataatattaaggatgattttactgttatgacagaagaaccttttggaccaataactgcgataacaacttttaaaaattttgacgaggtaattaaaagagcaaataaacatgattgtggtttggcgggatatgtttgtacaaattccatggaaaaagctttaaagcatcggagcaatt

SEQ ID NO: 213180 - DNA, 577 bp, Unknown
  Bacterial polypeptide expressing nucleotide sequence isolated from the Sargasso Sea
atgaaagtttataattgttttatcaataataaatgggtgaaaccagaaacagggaaatggctatattcagaaaaccctgcaaatgctgagaattgggcaaaagttccagattgcaatttcaatgatgtaaataaagcagtgaaatcagctaaaaaagcattctacgatggtgaatggagtaaaatttctcaagcacaaagaggaagatacttaagaaagattggtgaagtaatcagcaaatactctgatcacctaggagaaattgaaactagagataatggtaaacttccaaaaaatattaccccttctttaaaggatggtgagtggttagtagatagttggcactattacggtggcatgtgtgataaatttgaaggtaagttactaccttcagaagttccaaatatgcataattatatgaattgggaaccatttggggttgttgcacaaattcttccttggaactctccattgggtactcttttttggaaactagctccttgtttggctgctggaaatacagttgtactaaaaccttcagaacatgcaagttgttcaattttagaattaatggaag

SEQ ID NO: 213181 - DNA, 775 bp, Unknown
  Bacterial polypeptide expressing nucleotide sequence isolated from the Sargasso Sea
atgtacgaaaaattcggtcaattcattaacggaaaatggcagcaatcctcagaccaaggaacgtatgaagttattaatcctgcaaatgaagaagctctaggtcatgcatccaaagcaacatcaaaagatgttgaagcagcactacaatctgctgcaaaaggtttagaggtttggaagaaaactgctccgtggcaaagatcatatatcataagaagaattgccgacagaattagagaaaagcaagatgttttagcaaaatggatgacacttgaagtaggtaaacctttggcagaagctaaaggagaaattaatggagcagcagatatttttgagtggaatgcagaagaaacaaaaagaatatatggtcagactgtagaaagtagatttgaggatacaagggtgcatgtttattaccaacctgtaggagttgtagcagctttatcaccatggaattttcctgctgttttatccgctagaaaaatttctactgcgttagccgcaggttgttctgtcataataaaaccagatgttattacaccaggagtggtaatggaaatggttgatatttgtagagagtgtggtgtaccgccaggagtagtaaatcttttatcaggagatccaccaagtattgctcaacaacttatagcatctgatattgtaaaaaaaatttcaattacaggatcatcaagagtaggaaaacttattttaaaacaagccgcagataaagttcaaagagtaacgatggagcttagcggtcattcacccttcatagttt

SEQ ID NO: 213182 - DNA, 841 bp, Unknown
  Bacterial polypeptide expressing nucleotide sequence isolated from the Sargasso Sea
cctcagatgttcaaccgggtcaggccaagcacatttagaagattttattttaaggttgaaagaatttaattttgatgaacactttgatcaaaaatctaataatcacatttgttatgaaccaattggagtatgtggattaattactccatggaattggccaataaaccaaatagctcttaaagttgtccctgcatttgcaacggggtgtactatgatacttaaaccatcagagatagctcctatttctgggatgttgtttgctgaaatgattgatgaggttggatttcctaatggtgtatttaatttagtaaatggtgatggctcaggtgtgggaacacaaatatctagccatcctgatattgatatggtttcttttactggatcaactcgggctggaagacttatttcaaaaaatgcagctgaaacaattaaaagagtttgtttagaactcggaggcaaaggtggaaatatagtttttgcagatagttataaaaatgctgttcgagatggcataagaaatgtaatgagtaattctggtcaatcttgtgatgctcctacaagaatgttggtagaaaaatctatatacaaaagagcagttgaagaagcagttgatgaagcaaataaaatcaaagtagatcaatcctcaaagaaaggagatcatataggtcctgtaatttcaaaaactcaatatgaaaagatcattaatttaattgaaagtggaatatcagaaggagcaacattagcagcaggtggtccagagttacctaatggattaaacaagggttactttattaaaccaacaatttttacaaatgtcacaaacaatatgagaatagcaaaa

SEQ ID NO: 213183 - DNA, 454 bp, Unknown
  Bacterial polypeptide expressing nucleotide sequence isolated from the Sargasso Sea
atgtacaaggcagataagttttacataaatggtgagtgggtctcaccatcgactaatgatgaatgcgaagtaattaatccagcaactgaagaggttatagggacagttgcgatgggcaatgagaatgatgtaaataatgcagttgccgctgcaaaaaaagcatttgaaacattttcaaaaacttcgattgaagagagaatggctttactagatagaataatcgccgcttataaagcaaagatggaaaagattgcagcttgcgtatcacaggaaatgggagcaccaatttccatgtcgaatgcggcccaagcacccgcgggtttgggtcatttgctctttgcaaaaacagctgtcgaaaagtttaaattttctgaagaagtaggaacatcgcatgttgttcgcgaaccaataggggtatgtggtttgatcactccttggaattggcccgtgaatc

SEQ ID NO: 213184 - DNA, 900 bp, Unknown
  Bacterial polypeptide expressing nucleotide sequence isolated from the Sargasso Sea
gaagcttttatatcattttcaaaatcatcaaaagaagatagggtcgctcttctaaaaaatattattaaagaatacgaaaatagatataaagatcttgccgaagtaattaccaaagaaatgggcgctccacagtggttatcagacagagcacaagcaaacactggattaataaattttaaagaaactctagaagctcttgaggagttcgagtttgaaaaagaagatggtggatataccataagaaaagaagctattggggttataggaatgatcacaccatggaattggcctatgaaccagataacaacgaaggtatctgcagcaatagccagcggatgtactatggttcttaagccaagtgaaatatctccatactgttctatgttacttgcagaaattatgcacgatgcaggcgtccctaaaggggtatttaatttggttaatggatttggtcccatagttggtgctgcattatcagaacataaaaaagtcgatatgatgtcatttacaggatcaactagggctggaatagcagttgctcaagcatcagctgaaactgtaaaacgagtgcaacaagaacttggtggaaaatcggcaaatatcatattggacgatgttgctgatctagaaaaatcagttaagggcggagcaggacattgctttttaaactcaggtcagtcatgcaatgcacctacaaggatgttagtttcatccaataattatgaaaaagcagttgaaattgctgctaccaccgctaataacacaacagtgggcgatcccaatggtgaatttagaatgggcccaatatctaataagactcaatacgaaaaagtagttaaaatgatcgaaattggcattgaagagggagcaaggttggtagcaggcggagtagacaaacct

SEQ ID NO: 213185 - DNA, 694 bp, Unknown
  Bacterial polypeptide expressing nucleotide sequence isolated from the Sargasso Sea
aatgaacttaagtcgtgaaaatgttaatgctttaaaatcaaatttaaattttccttcacaattatttattaatggtaaatatcaaaagtcaatatctgaaaaatcttttgataatatttctcctattgatggcaaaataataaataaagtttattttgctcagcaagatgatatagacatcgcagtttctaaagcaaaagacgttttcaataaaggatactggtcaaaattatcaccaggcgaaagaaaaaaaatacttttaaaatttgctacattattagaaagagatcgtttggagctctctttattagatactatagatatgggaaaaactatcaatgatacatataatgcagatttaccaacaagtattgataatattgaatggtatgctgaaataattgataaattatttgatgatatttcaccaagttcaaaagaatatatgggattaattacaaaagaaccaataggtgttgttgcagcaatagttccttggaattaccctctttggatggcaatctggaaaattgcacctgctcttattactggaaattcagttatattaaaacctgctgaacaatctccaatgagtgcaataaaaattggagcattgttgtccgaagcaggaattccagatggtgtattttctgtcttgcctggggatggtcctattacaggtaaatccttatgt

SEQ ID NO: 213186 - DNA, 829 bp, Unknown
  Bacterial polypeptide expressing nucleotide sequence isolated from the Sargasso Sea
tatgattgataaaagaaaattttatataaatggtgtttgggtcgatcctgtaaataaaaatgattgtgacgtaattgatccatctacagaagaaccatatgttactatttcactaggaagtgcagtagataccaataaagctgttgaagctgctaaaaactcttttttaacatggaaaaatacctcaaaagaagagcgtattgaacttttagaaaaacttttaaaaatttatagaaatcgctctgaagaaatgacaaatgcaatatcaaaagaacttggggcacctttagactgggcgtcatcggcacagatgggttctggtgagtctcatatagaggactttattaaaagattaaaagaatttgaatttgagtcaaattttgatgagaactctgataattatattgtctatgaaccaataggagtttgcggtttaataacaccttggaattggccaattaatcaaattgccttaaaagttatacctgcctttgctactggttgtacgatgattttaaaaccatctgagatggcacctttatcaggtttattatttgcggaaatgattcatgaagctggttttcctgctggtgttttcaatttagtaaatggagacggtgctggtgttggatctcaaatttctagtcatccagatatagacatggtttcttttactggttcaactcgtgctgggaaactaatttctaagaatgctgccgatacaattaaaagagtttgtttagaacttggtggaaagggcggtaatataatttttgcagatgcatacccagatgctgtaagagatggtgtaagaaatattatgagcaat

SEQ ID NO: 213187 - DNA, 709 bp, Unknown
  Bacterial polypeptide expressing nucleotide sequence isolated from the Sargasso Sea
atgtacgataaatttggtcaattcatagatggtaagtgggtaaaatcttcgagcggtgagacctatgaagttattaaccccgcaacggaagagcttattggtaatgcatctaaagcttcaaaaaaagatatagataaagcattaaaatctgctgagaaaggtttggaagtttggaaaaacacttctccatgggagcgatcaaaaattattcgaaaaatatcagacataatgagaaaaaaagttgatatcctttcaaaatggttaaccctagaagttggaaagcctttatcagaaggagctggagaagtaggtggtgcagctgatatttttgagtggaactctgaagaaaccaaaagaatttacggtgagacccttcaaagcagatttccaaacacaagaatacatgtttactaccagccagtcggtgttgttgccgcgctggtaccttggaattttccaataattttagcctcaagaaaaatttcaacagctttagctgcaggatgctctgtaattgttaaaccagatgttattacaccaggatctgtaatggaattagtaaatatttgtaaagaagctggcgttccagatggtgttataaacctgctttcaggagatccagcgtttatttctgaagaacttttatcatctgatatcatcaaaaaagtctcaataactggatcgaccagagtaggaaaattaatataaa

SEQ ID NO: 213188 - DNA, 276 bp, Unknown
  Bacterial polypeptide expressing nucleotide sequence isolated from the Sargasso Sea
tattatctataattccttttgagaacgaagatgaagctatttcaatagctaacgacactccatatggtttgacaaactatattcaaacacaagacaaagaaaaagttaaaagagttgcaagaaaacttagatctggaatggtagatgtaaatggagtaggtattgcagttgcttctccatttggtggatacaaacattctggaattggaagagaagctggaactgaaggtttaatagaatttttagaagttaaaactgttggtggttggaactaat

SEQ ID NO: 213189 - DNA, 366 bp, Unknown
  Bacterial polypeptide expressing nucleotide sequence isolated from the Sargasso Sea
catgaatttaattgagcacttcgtaaacggaaaaataattccgggatcttcagataaaaaaggaaaagttttcaatccagcaactggagaacaagagtcagaggttagactagcttcaaaatctgatttagatgaagcggttgaagttgcaaaaaaagcatttgaaacttggtctttaaaaccagctctacaaagagcaagagttatatttaagtttaaagaattaatcgaaaaaaattctgaggaattaacaaaaatgatagtttctgagcatggaaaagtttttgaggatgcaagaggctcgttaacaagaggtctcgaagtagttgagtttgcatgtggtataccacatttattaaaagggga

SEQ ID NO: 213190 - DNA, 271 bp, Unknown
  Bacterial polypeptide expressing nucleotide sequence isolated from the Sargasso Sea
atgaccctgcgcgttgcgatcaatggattcggccggatcggtcgcaatgtgatgcggggttggctcagccgcggcgctgataccggaatcgagatcgtgggtatgaactccacatccgacccgaagaccagcgctcacctgctgacctacgactcgattctgggcaagctcgaccccagcgtccagatcgaaaccactgacgaaaccatgatcgtcaatggcaaggagatcaagtttttcgccgatcgcaatcccctcaactgccctggaa

SEQ ID NO: 213191 - DNA, 895 bp, Unknown
  Bacterial polypeptide expressing nucleotide sequence isolated from the Sargasso Sea
gaaggtagcacataaagtttggtcaaagacagacgcaaaagaacgttcttctgtgcttaagaaccttcatcgtctcatgctcgaacatcaggaagacttggcaaggattataacgcatgaaggcggcaaaccactctctgaatcaatgggtgaaattgcctatgctgcgtctttttttgaatggttttcagaagaggcaaaaagagtttatggtgatgtaattcctggtcatcagcaggatcgcagaacgcttgtgatcaaacaacccatcggtgttgttggctgtatcacgccatggaattttccatcggcaatgttggcaagaaaaatcgcgcccgctatagcagttggctgcacagtggttgcgaagccagcaccagaaacaccctattctgcaacagctatggcgtatctctctgaacttgctggcatccccaagggtgtatttaatgtggtcacaggcgatgctgaaaaaattggctctgtgatgacaacccacaaagaagtaaaaaaaatcacttttactggctccacttctgttggaaaacagttgctcaggcaatcggcagataccgtaaaaaaagtttctcttgagctaggaggtcatgctccttttattgtctttgaagacgcaaatcttgaggatgcagttgatggtgcattgattgcaaaatatagaaacagtggccaaacatgtgtttgcgccaataggatttatgtccaatcaagcatctatgacgatttctctaagcgcttcactgagaaagcctctcaattggtggttggtgacggtcttgcagagtccacacagcaggggccattgattagcgaagatgcaatgaaaaaagcgtcaaaacatatagaggatgctaaaaacaaaggtgcaactattacc

SEQ ID NO: 213192 - DNA, 400 bp, Unknown
  Bacterial polypeptide expressing nucleotide sequence isolated from the Sargasso Sea
aagggttactacctggagcccacagccgtgctcatgcctcacaaccgcacgcgtgcttgccaggaggaaatcttcggccccttcgccaccttgcagattttcgacgacttcgacgaggctctggccatcgccaacgactcggagttcggcctggtttcctacctctggagcaacgacctgagccagacccagcgcgccgtgtgcgaaatagaggccggcgtggtgctggtgaacacccccatgattcttgatctgcgctttcccttcggtggctacaagaactccggtctggggcgcgagggcattgacggcatgcgccacttctacaccgaggaaaagacggtgaccctggcgctcaagcgtccggccatgacccgcctcggtgcggacgcggactgaa

SEQ ID NO: 213193 - DNA, 481 bp, Unknown
  Bacterial polypeptide expressing nucleotide sequence isolated from the Sargasso Sea
aggggcagatcatattaatgatttcattataagattaaaaaattttgaatttgaaagtaaatttaataaaaactctaataattacattgtttacgaacctatcggtgtatgcggacttattactccatggaattggcctattaatcaaattactttgaaagtaattccagctttagctgctggctgtacaatgattttaaagccttctgaaattgcaccactatcaggaatgctctttgctgagatcattcatgaagctggatttcctgcaggtgttttcaatttaataaatggagatggtgctggagtaggtacagatttgtctactcataatgatattgatatgatttcttttactggttcaacaagagcaggaaaacttatttcaaaaaatgctgctgatactattaaaagagtttgtttagaattaggtggcaaaggaggaaatattgtttttagtgattcacatccaagtgcagta

SEQ ID NO: 213194 - DNA, 263 bp, Unknown
  Bacterial polypeptide expressing nucleotide sequence isolated from the Sargasso Sea
tccatttgaaaatgaagaagaagctatttcaattgctaatgatactccttatggattaacaaattatattcaaacacaagataaagaaaaagttaaaagagttgcaagaaaacttagatcaggaatggtagatgttaatggtgttggaatagctgtagcctctccatttggtggttataaacattctggtattggaagagaagctggaacagaaggattaattgagtttttagaagtaaagactgttggtggctggaattagt

SEQ ID NO: 213195 - DNA, 719 bp, Unknown
  Bacterial polypeptide expressing nucleotide sequence isolated from the Sargasso Sea
tatgtacgaaaaatttggtcagtttattgagggtaaatggcaacaatcattaagtggtgaaacctataacgttattaatcctgctacagaagaactaatcggaaaagcttctaaagccaacaagaatgatattgatctatgtctcaagtctgcagaaaaaggtttcaaaatatggaaagatactcctccctgggaaagatctaagataataagaaatatttcagacttaattagaaaaagaactgaaacattggctaaatggttaactttagaagttggtaaacctcttaaggaaggggctggagaagccagcggcgcagcagatatattcgaatggagttcggaagaggctaaaagaatatatggagaaactttacagggcaggtctaaagatacaaaaattcaagtttcttatcaacctgttggtgttgttgcagctcttgttccttggaattttccaataacacttgcttctagaaaaatttcaactgcattatctgccggatgttcagtgattgttaaaccagatgttataacaccaggtgcagttatggaattagtagatatttgtaaggaagctggtgtgccaactggtgtagttaatcttttatcgggtgatcccgcttacatatcagatcagttactatcttctgatatcattaaaaaagtatcaataaccggctccactagagtaggaaaattaattttaaaaaaagctg

SEQ ID NO: 213196 - DNA, 259 bp, Unknown
  Bacterial polypeptide expressing nucleotide sequence isolated from the Sargasso Sea
ggcgctgcgagccggcgtgcctgccggcctgttcagcgtcctgacgggtaacgatacccgtatcctcggcaatgaactgaccacccatccgctggttcgcaagatcaccttcaccggatcgaccgaagtcggtcgggtattgctgcagcaggcggcgagcaccgtgaagaaatgctcgatggagctgggcggcaacgcccccgtcctggtgttcgacgacgcggatctcgacacggcagtggagggtgtcatcgcttcc

SEQ ID NO: 213197 - DNA, 595 bp, Unknown
  Bacterial polypeptide expressing nucleotide sequence isolated from the Sargasso Sea
tctggtgcggagacatacgatgttattaatccagcaaatgaggaaattattggaaaagcctctaaagccaacaaaaaagatatagatttagctttgcagtctgcacaaaaggggtatgaaatttggaaaaatacatcaccatgggagagatcaaaaataattagaaaaatttctgatgttataagagataaaaaagatgtgcttgctaaatggttaacactagaagtgggaaagccactcgccgagagtacgggtgaagttttaggagctgctgatatatttgaatggagctcagaagaagccaaaagaatttatggagaaacacttcagggtcgctcccctgacacgaaaatacacgtatattatcagccagttggtgtcgttgctgcgctcgtaccatggaattttcctattacacttgcttcaagaaaaatttcaacagcgctgtcagcaggttgttcagttatagtcaagcctgacgttattacaccaggagctgtaatggaattagtgaacatttgtcatgaagcaggtgtgcctccaggtgttgtaaatttattatctggtgatccatcttttatttcagactcacttt

SEQ ID NO: 213198 - DNA, 586 bp, Unknown
  Bacterial polypeptide expressing nucleotide sequence isolated from the Sargasso Sea
atgaacaatgatttaaagttctatatcaatggtgagtgggtaaagtcagaatcaaatgaattaattgatgtcataaatccagcaactgaagaagttattggacaagttaccgctggcacgaaagaagatattgataaagctgtatcagccgcattagaagctttttctacttttcaacaaactacaaaagaacaaagaatagaacttctcaataacataattagtgagtatgaaaacagatatgatgattttgttcaaattatcacaaaagaaatgggtgctccaatatggttatctgaagctgctcaggccaaaacaggaataaaaaatattcatgaaactttagatgcgctgaaagactatgaatttgaaagacctgaaggtgactatactttaattaaggaacctattggtgtaattggcatgataactccgtggaactggcctatgaaccaaataacaactaaagtgtctgcagctttagcagcaggttgcaccatggttctaaagcctagtgagatatcaccttattgtgcaatgcttttagctgaagtgtttgacaaggctgggcgtgccaaatggtgta

SEQ ID NO: 213199 - DNA, 538 bp, Unknown
  Bacterial polypeptide expressing nucleotide sequence isolated from the Sargasso Sea
atgaaaacaattcaacattttgttggtggcaaaagcttttcaggtcagtccaaaaggacaagtaaagtgtttaatccagcaacaggcgaacaaagcgctgaagtaaaattagcatcaactaaagatgttaatgatgcagtctctaatgcacacaaagcttttgtttcttggtctgaaaaaccacctcttcaaagggccagggttatgtttaagtttaaagagcttattgaaaaaaactatgatgaattaacaaagattatagtttcagaacatggaaaagtttatgaagacgcaaaaggttcgctaactcggggtctagaagtagtagagtatgcatgtggaattccacaaatgcttaaaggtgagtttactgaaaatgttggatcgaatgttgatagttggtcaattagacaacctcttggagtttgtgcaggtgttactccttttaacttccctgcaatggttccaatgtggatgtttccaatggctattgcttgtggaaacacttttgtattaaaaccctcagagaaagatccaa

SEQ ID NO: 213200 - DNA, 169 bp, Unknown
  Bacterial polypeptide expressing nucleotide sequence isolated from the Sargasso Sea
tagagttgcaagaagactaagatctggaatggttgatataaatggcgcaggattagcaccagatgcaccttttggtggatacaaacattcaggtattggtcgtgaagctggtaaacttggtttagaggaattcctagaagtaaaagctgtcagtggttggaacgattaa

SEQ ID NO: 213201 - DNA, 727 bp, Unknown
  Bacterial polypeptide expressing nucleotide sequence isolated from the Sargasso Sea
atgaatttaattcaacatttcattaatggcaaaataattgcaggaaattcaaaaagaaaaggaaaagtatttaaccctgctacaggagatcaaaaatctgaagttaatttaggaacaaaatcagatttaaatgaagctgcagaaattgcaaaaaaagcatttgaaacatggtcgctaaagccaccaatacaaagagcaagaataatgttcaaatttaaagagttaatagaaaaaaattctgatgaacttacaaaaatgattgtttccgaacatggaaaagtctatgaggacgcaaaaggttctttggttagaggattggaagtagttgagtttgcatgtggtataccacaagttttaaaaggagagtttaccgaaaatgtaggaacagatattgatagttggtcaattagacagccactaggtgtttgtgcaggtataacaccatttaactttcctgctatggttccaatgtggatgtttccaatggcaatagcatgtggaaatacttttatactgaaaccatcagaaaaagatccttcatgctcaattaagttagcagagttatttaaagaagcaggtttaccagatggagtttttaatgttgttaatggagataaagaggtagtagatgctatattaacaaataaagatattcaggcagttagctttgtgggatctaccccaatagcaaaatacatttatgaaaatgctgcaaaaaagaaaaaag

SEQ ID NO: 213202 - DNA, 739 bp, Unknown
  Bacterial polypeptide expressing nucleotide sequence isolated from the Sargasso Sea
tatgggtaaattagatcaaaaagttgcaattgttactggtgctacatcaggtattggaagagaaactgctatcttattatctcgagagggagcctcagttgtattcactggcagaaataaagatgctgccgaagagacatcagaccttatttcaaaagaaggcggtaaaagtttatttgttcagcatgatgttgctgatgaaaataattggattgaagttataaaaactactaaggatcattttggttcattagatattttagttaataatgccggacaattttttctaaaaccaataatggaaacctctttagaagattttaatcaaatttgttcagttaatattgatggtgcttggttgggtatgaaacactgtctacctgaaatgaatgatggtggcgccattgtcaacgtatcctccttaatgggccaaatgggtcttcctgatgcctcaggttattgcgcttcaaaaggtgcagttacatctatgactaaggctgctgcattagaggttgcagatagaaatattaaaataaatgctttacacccaggtgtcatttggactcctatggttggagctggttctgagggtgataatgatctaaaaagtttttttgaattagagaccccgcttagagaggtaggtctaccaaaaatatggcagatgctattttatttttatgtactaccgagtacttacaggatcagattaaaatgtagatgggtgaagatttgctga

SEQ ID NO: 213203 - DNA, 578 bp, Unknown
  Bacterial polypeptide expressing nucleotide sequence isolated from the Sargasso Sea
aatgaattcaatagaacattttattgatggaaaaattgtaaaaggttcatctaaaagaacaggaaaggtctttaatcctgcgactggtgagataagttcaaatgtgaatcttgcaaatactgcagatttagataaggcagtaaaagctgcaaaaaaagctttttcaagttggtcagaaaaaacaccgttatacagagcaagagttctctttaaatttaaagaattaatcgaaaaaaactatgatgagcttacaaaaattatagtctcagaacatggcaaagtttatgaggacgccaaagggtctctaactagagggttagaggtggtagagtttgctaccggaatacctcaactgctcaaaggtgaatttacagagaatgttggcacaaatgttgatagttggtctatgagacaaccacttggaatttgtgcaggaataacgcctttcaattttccagcaatggttccgatgtggatgtttccaattgcaattgcttgcggaaatacatttgttctaaaaccatccgagaaagacccatcttgctcaatgaaattagcggaattatttttaaaagctg

SEQ ID NO: 213204 - DNA, 951 bp, Unknown
  Bacterial polypeptide expressing nucleotide sequence isolated from the Sargasso Sea
aaacttgggcatttgtttctaaagaagaaaaaatagatttattagaacgtttgtataccttatataaaaaaaggtgggatgattttgcgaatgctataactcttgagatgggggcaccaaaagaatttgcatcaaaactccaagtgggagcaggagctgctcatattaaaacttttataaaatacttaaaagattttaaatttgatagaccagttaatgaccaattacaaaatcagaaaataatttatgaacctaaaggtatatgtgcattaataaccccttggaattggccaatgaatcaagtttgtttaaaagttattccagccctagcctcagggtgtacaatggttttaaaaccatctgaaatagcaccattatcatcaatgatacttgcagaaataattcatgaagtaaaatttcctaaaggagtttttaatcttgtaaatggcgatggtccaaccactggcgaggcattaactagtcatccggatattgatatgatttcatttacaggctctacaagagcaggtgcattaatttcacaaaatgctgcaaaagattttaaaagaataagcctagaacttggtggcaaaggcgcaaatattatttttaaagatgctaaacctgatgcaattgaaaaaggggcttctagatgttttaaaaattctggccaatcgtgtaatgcaccaacaagaatgcttgtagaaaagtcaatttataatgaagcaattgaaaaaattagaaaatatactaatgagttaaaggtgggagatcctaataaagatggcaaccacataggacccgttgtttctaatcaacagtttgaaaaagttcaaaaactaataaaaaaaggtatagatgagggtgccagacttgttgcaggcggcacaggaaaaccagagggtttagataaaggatattatgttaaacctacagctttgcagatgtaaa

SEQ ID NO: 213205 - DNA, 646 bp, Unknown
  Bacterial polypeptide expressing nucleotide sequence isolated from the Sargasso Sea
atggtgggcaccacagtcttctacatcaccttcatgttctggggcatgagcttggtacagaatgattatccgatgcgctccgagttcctcgcgctcaacaccgtgatcctcgtcgacacggtgggcaacgacgtgttcatggcgctctgcgtctacggcaacatggccaccgcgctggacctcacgtcgcgcgccatggcggcgatcctcgcgaaggaggaggaggaagcagctgcctacgcggagaagcgtggccagctcgcgctcgtggcgacgccggagccggtgcgcgcacagctcctgaaactcgaagaggccgtgaatgctgcggagggcacggaggtggaggcgcaggccttcgacgcgtacaagtttgcagcgcaggaggagcaggaccggctcctccggctcatgagcgcctgcctgcttgcgtgccaggggccgcccctcggctcgccttggcgtgtcggtactctcttatgtccttgcgctggggccatctcaaggagctcgagagcttcggcgacgggtgcaagcagcacgtgcggagctcgcgggggagtgcattccgcagccccccctccacgcttcggaaagcgtgcggaagctttgtgtcggtacacagaatctctggagagaaagtagg

SEQ ID NO: 213206 - DNA, 820 bp, Unknown
  Bacterial polypeptide expressing nucleotide sequence isolated from the Sargasso Sea
taactttctatattataaaaatcataaaataagtgtgtctaatttctcttctattgacgatattgattttaaaggcgaaaaaaacgttttggtaatagactgtaccgggaagaataaagctttaaatttgctgaatccatatatcaataaatatgctaaatacattctagtatccgcgcctatagagtcaaaaagcgttcagaacattgtgtatggtgttaaccataatgacgtcgatactaagaatttccagatatttacatcagctagctgcacaactaattgcttagccccaattgtgaaagtgctcgaagaacaaataggtatagagcacggttctataactacaattcataatattactaatagtcaaaatctcgttgattcacctaaagctaatctgagaaggtctagatcaggtataaactctcttatacctaccactacaggctcagcaaaagcaatttctctgatatatcctgagctaaaaggtagattgaatgggcacgccgtaagggtccctcttctcaatgcatcgttgacagattgcgtttttgaaatgaaaaagccggtaagcgtcgaagagatcaataaacttttcatagaagcatcggcgtcttacttaaaaaatattctttcatttgaagaaaggcctctggtgtcttcagattatgtaaacaattcacactctgcaataatcgacggtctttccactatggtcgtaaatagaactcaattaaaggtatacgcttggtatgacaacgagtggggatatgcatgtagaatggtcgatctgatatctcatataatgaataaatag

SEQ ID NO: 213207 - DNA, 887 bp, Unknown
  Bacterial polypeptide expressing nucleotide sequence isolated from the Sargasso Sea
aatgttagataaaaaaaaattttatattaatggtaaatgggttccaccatttaagaaaagtgactttgaagtgataaacccttcgtctgaagaagtttttgctataatttctttaggtggaaaagaagatgtaaatattgctgtaaaagctgcaaaagatgcttttgacaactggaaagatactaaaaaggaagaaagaattatttttttagaaaagttacttaaaatttataaaaaaagatttaatgaaatggctgaggcaatgtccaaagaaatgggtgctcctatcgattatgcaacaactgttcatgcctcttctggccagtcacatatagaagattttatattaaggttaaaaaattttaagtttgaagaaagttttgactccaaatctaataatcatattgctcatgaaccaattggagtatgtggtttaattactccatggaactggccaataaatcagatagcattaaaagttattcccgctttagcaactgggtgcacaatgattcttaagccttcagaaatatcacctatttctgcaatgttatttgctgaaatgatagatgaagcaggtttcccagtaggagtttttaatttagttaatggagatggggctggaacgggaactgaaatatcaggacactcagatattgatatgatttcatttactggttcaacaagagcaggaaaactaattacaaaaaatgctgctaacacaattaaaagagtttgtttagagcttggaggcaaaggtggaaatatagtttttgcagactcatatcctaatgctgttagagatggaataagaaatgttatgagcaattctggtcagtcatgtgatgctccaacaagaatgcttgttgaaaaatctatttataaaa

SEQ ID NO: 213208 - DNA, 1039 bp, Unknown
  Bacterial polypeptide expressing nucleotide sequence isolated from the Sargasso Sea
atgcaagcgcaattccaacatgcccggcagttttatatcgacggccaatgggtcgacccgttaaacacgcccggcgcggccacgctcgacgtgatcgatccgtccacggctacgccgttcgcgcagatttcgctcggcagcgcggccgatgtcgacctcgcggtagccgctgcgaagcgtgcttttccggcttatagcgagacgacgatcgcgcagcgaatcgatctgctgcaggcgatcctcgacgtctaccgcaagcgctacgacgacatggtgcatgcgattagccgcgagatgggcgcaccgctgcaatacgctaacgacgcgcaggcatggaccggcgtcgcgcatctcgagacaatgatccgcacgctcgacacgttcgaattcgaatacgtgaagagcagcattctgatccgcaaggaagcggtcggcgtgtgcgggctgattacgccgtggaactggccggcgctgcagatcgccaccaaggtggtgcccgcactcgcggccggttgcacgatggtgctcaagccgtcggaactggcgccgctgtccggcatgatcttcgccgagattctcgatgaagcgggcgtgccggccggcgttttcaacctggtgaacggcgagggcgcgacggtgggcgaggcgatgtcgcgtcatccggatatcgacatgatgtcgtttaccggttcaacgcgggcgggcgtgctggtcgcgaaggccgcggcggatacggtcaagcgcgtgcatcaggaactgggcggcaaatcggccaacctgattcttgaagatgccgatctgaaacacgcggtgatgcgcggtgcccgtgcgtgttttgacaacagcggccagtcgtgcgacgcgcctacccgcatgttcgtgccgcgcgctcgccttgccgaggcgctcacctacgcgaaggaagcggctgacgcgctggtcgtcggccctgcggatgcgcagggtgtggatcttggacctgtcatcagcgagcagcagttcgacaagatccagcggctgatcggcgtgggcatcgaag

SEQ ID NO: 213209 - DNA, 1426 bp, Unknown
  Bacterial polypeptide expressing nucleotide sequence isolated from the Sargasso Sea
ttagtaccgcgcttaaaacaactggccattgccgccaaagcttatgacatcagctttactgtcgatgccgaagaagctgaccgtttagatttatccctggatattatcgaagctgtattctccgatccggaattaaacggctgggaaggttttggtttagctgtgcaggcgtactccaaacgtggcttgtttgtcattgaatggctgcgcgagctgacggtgaaagtgggccgcaaaatgatggtgcgtctggtgaaaggcgcgtactgggatactgaagtaaaagtcagccagaccgaaggtttaagcgacttcccggtatttagccgcaagccgtcgaccgatgtgtcttatcaggcttgtgccaaaaagatgctggaataccgcgacagtatgtaccctatgttcgctacccacaacgcctatacagtggccactattttagaaatggccccggatcgcactgggtatgagttccagcgtttacacggtatgggcgatgcgctgtacgatcaggtagttgcagatgacaaagtaccttgccgtatttacgcccctgtgggtgaacactcagacttactggcttacttagtacgtcgtttattagaaaacggtgctaacagctccttcgtaaataacattgtggatgaaaatattccggttgagtctttattaaaagatccggtagaaacagtacgtgcctggagcaaaaaacgtaataactctattccgttaccagaccaactgtatggtgcagctcgcctgaactctaaaggccaggactttaccgatatcgatcaaatcacggctatgcgcgaagctatggatacatggttagcatctgtcagccagattgaagtaccagcaggtgcttttgctgtgactaacccagccaacaccaaagaagtgataggtttccatcatcacagcaacagtgctcagatggagcagacagtaaccaacgctgaagccgcattcccggcctggtctgcgactgctgtgactgaacgcgctgcacttttaaataaactggctgatcagctggaattacaccgcgatgaattactggctttatgtattaaagaagcaggtaaaacagtaggcgacagcatggccgaagtacgtgaagctgttgatttctgtcgttattacgctgctgaagcgactaaaaacctgcaagcttctcaagcccgtggtgtagtgctttgtatcagcccgtggaacttcccactggctattttcttaggtcaggtcagtgcagctttagtctctggtaatacagtagtcgctaagcctgccgaacaaaccagcttaattgcggtgcgtactctggaactgatgaaagcagctggtttcccggacaacgtagtgcaattagtgatagcaccaggtcgtcaggtgggtgaagtcatagtgcccgataccc

SEQ ID NO: 213210 - DNA, 733 bp, Unknown
  Bacterial polypeptide expressing nucleotide sequence isolated from the Sargasso Sea
atgctacaactagacgcgagcgaactggtaaagaacggaagttatatcaatggccgctggcataatagcgataatacgttcagcgtaaaaaacccggctgatctacagccgctggccgacgttgctgatgccggtaaaacgcaggccgaacaagcggtgcaggctgcgagcgacagctttgccggctgggcagccaaacccgcagccgagcgctcagcgctgttgctggattggtatcaactggtgatgaaacatcaggatgacctggcgcgtttaatgacgttagagcaaggcaaaccgttagcggaagccaaaggcgagatagcttatggcgcgtcctacctgcaatggtttgctgaagaagccaagcggctgtatggcgataccataccggcgccatctgccgacaaacgtatcattgtacagcgccagccggttggtgtggttgctgccattacgccgtggaatttcccgaatgctatgctggcccgcaaagctgcggcagcgctggcagcaggctgcacctttgtggtgaaacctgcacaccagacaccgctttcagcgctggcgctggcagagttgtcgcagcaggctggtattcctccgggcgtgtttaatgtggtttgcggtaccgatgccaaagcgattggtgaggtactaacgcaggacccacgggtcgccaaattcagtttaaccggctcaacagcggtgggcaaagtactggcaaaacaat

SEQ ID NO: 213211 - DNA, 643 bp, Unknown
  Bacterial polypeptide expressing nucleotide sequence isolated from the Sargasso Sea
aatgatcttaacctttgaaaatattaaaaaaacaaaatctaatttaaattacccctctcaattatttattaatggaaaatatcaaaaatcaatttcagaaaaatcatttgaaaatatttctccaattgacggaagtattgtaaatcaagttttttttgctgaacaagaagatgttgatttagctgtttctaaagctaaagaaacttttaataaaggatattggtcgaatctttcaccaggtgaaagaaaaaaaatacttttaaaatttgctatactattggaaagagatcgtttggagttatcactccttgataccatagacatgggtaaaacaattaatgatacttacaatgctgacttaccaactagcatagataatattgaatggtatgctgaaataattgataaactttttgatgacatttcgccaagttcaaaagaatatttgggcttaattaccaaagagccaattggagttgtagcagcgatagtaccttggaattatccattatggatggcaatatggaaaattgctcctgcgcttattactggtaattctgttatattaaagcctgcagaacaatctccaatgagcgctattaaaattggtgctctgctctcagaagctgggataccggatgga

SEQ ID NO: 213212 - DNA, 578 bp, Unknown
  Bacterial polypeptide expressing nucleotide sequence isolated from the Sargasso Sea
catgaatttaattcaacatttcgtaaatggaaaaataattccaggaaaatcagatagaagaggaaaagtatttaatccagcaattggagaacaagagtcagaagtaatattaggtttaaaatcagatttagatggagctgttgatttagcaaaaaaagcttttgagacatggtcattaaaaccaccaattcaaagagcaagggtaatgtttaaattcaaagaattaattgaaaaaaatgctgacgaattaaccaaaatgatagtctctgaacatggtaaggtatatgaagatgcaaaaggttcgttgataagaggactagaggtagtagagtttacttgtggaattcctcaagttttaaaaggagaatttacagaaaatgttggaacagatattgatagttggtcaattaggcaaccacttggtgtttgtgcaggtataactccatttaattttccagcaatggttccaatgtggatgtttccaatggctattgcttgtggaaacacttttgtattaaaaccatcagaaaaggatccttctatttcaattaaattagcagagttattcaagaagcggg

SEQ ID NO: 213213 - DNA, 1150 bp, Unknown
  Bacterial polypeptide expressing nucleotide sequence isolated from the Sargasso Sea
atgacgcacgtgcttgagaccggttttgaacagcttaacagagaaaatcccaatgggagccccgctattagggggtataacattgttgatggcgagctgaaatcttcgagcagcggcgctacatttgagagcaggaacccggcttgggttgacgattgtcttggtgaatttcccctctcaacagaggaagatgtgcatgaggcactcaaatctgctaggaaagcattcccaagttggtcttccactccagcgcctaccagagggcaagtcatagggaatatgggtcgcttactgatggattacaaagaggatctggtgcgcttacaagctcgtgaaattggaaagacgctgaaggaatgtggcggagaaattcaagaagcaatagacacttgcttgtttttccaatctgagggtcgtaggctttatgggcaaaccgtaaattccgagcttcaagataaggagcttttcacctacaggagaccattgggggtctgtggcataatcaatgcatgcaatttcccttccgcagtaccattctggaaaatgattccagcaatcatgtgtggaaacacctgtgtttggaagtcaccccaggattcgcccatgctatcctttgcattggccaggataatgcacgaggcaggactaccaaacggtgtgattaacctagttcacggaaatggaagcggggccggccaaagcctagttgactcagcagaccttggaatggtcaacaagatatctttcaccggaagtacttctgttggaaagatgattggcgaaatatgtgggaggaacctagtcagcgcttcactggaattaggtggcaaaaacccacttgtagtgatgccttctgctgatatcgacaatgcggtggagggagcgtactgggctgcttttgggaccgctggacaacgctgcacaagcctaggcaatctcattttgcatcaagatatttatgccgaatttatggagaaatttatggagatggtggagaataccagaattggagattctatgaggcatgaagatgtactctatggctcaatgctctcggaaaagtatgccgttgatttccttaaaggtgtcgaaatatgtgattctgatggagcagagaagttgtttggcgataggggcgatcaccgatgac

SEQ ID NO: 213214 - DNA, 739 bp, Unknown
  Bacterial polypeptide expressing nucleotide sequence isolated from the Sargasso Sea
ttggcaccaatggttttaaataaaagcttgccggagttaattaaagctgcaaaagaaaatggagtagcggttttatctataacaaattcgcatcacatggcagcgatgtggcctgaaacagaggcaatagcagaagaaggcctagttgcttttgcatgcacatcttataaaccagctgttgcacctgcgggatctatcaaacctttatttggaacaaatccaatttcatttgcttggcctagaaaaaataaacctccagtagtttatgatatggcaaccgcatctatggcaatgggtgaggttcaagttgcaaaaagggaaggtcacaaagttccattaggcacaggattaacaaaagaaggaaaggacacaacagatccagctgaaatagcagatgggggtgttttattgccttttggcggctataaaggctcagggattgcgatgatggtcgaattgcttgctggagcccttgttggagataattttagttatgagacggctgagaaggataataatgatggcggtccaccaagtggtggagagttcattttagcaatatctccagaaaaattatcaaattctgattgggacacacactcctcaaagttttttgaaaaaatgaaatcaatgggggatgttagacttcctggtgaaagaagacataaaaatagattagataaaggaccaagacatataaatgaagacttggttaataaaattaaatctttaagttaat

SEQ ID NO: 213215 - DNA, 757 bp, Unknown
  Bacterial polypeptide expressing nucleotide sequence isolated from the Sargasso Sea
atgaatacaatacagcattttgttaatggaaagaaattctttggcgagtctaaaagagttggtaaggtctttaatcctgccacaggtgaacaaagtgctgaagttaaattagctacagctaaagatgtaaatgaagctgttgagagtgcgaaaaaggcttttgaatcttggtctaacaaacctccattacaaagagcaagagtaatgtttaaatttaaagaactaatagaaaaaaattccgatgagctaactaaaataattgtttccgaacacggaaaagtttacgaagacgcaaagggatcacttactcgaggtttagaagtagttgaatatgcatgtggaatacctcaaatgttaaagggagaatttactgaaaatgtaggctcaaatgtagatagttggtcaatcagacaacctttaggagtttgtgctgggataacaccttttaattttcccgcaatggttcctatgtggatgtttcctatggctatagcttgcggaaatacttttgtacttaaaccatcagaaaaagacccatcatgctctttaagattagcggaattattaaaagatgcaggactacctgatggtgttttaaatgtagttaatggagataaggaagcagttgatgcgttaatcaataataaagacattgtagctatgagttttgtaggatccacaccgattgcaaaatatatctatgaaaattgtgcaaaaaatgaaaaaagagttcaggctcttggaggagccaaaaacc

SEQ ID NO: 213216 - DNA, 1302 bp, Unknown
  Bacterial polypeptide expressing nucleotide sequence isolated from the Sargasso Sea
ctgtaagcgagagagcagatatcttttataggattgctaataatttagagaaagattctacaaaattcttatattacttaattcatgaagccgggaaaacatataaagattcctatgatgaaattagggaggcagtcgattttcttagatattatgcagataatgctaaaactcttttaagcgaacccaacaatctcaatggtccaacaggtgaatctaatcaactcttctatcaatcaaaaggtacttttgtgtgcattagcccatggaatttcccacttgccatttttgctggtcaaatagctgctgctcttgtaactgggaattcagttatatcaaagccgtctgagcatactccaataattgctactatgatgattgaacttttttatgaaaatggtgtaccaaaatctgctttaaaattaattcagggagatggctcaataggttcaaaactaatttcatttgaccacatttctggagttgcctttacagggtcttcactaactgcaaagaaaatcaatctccaattggcaaaaaaagatggccccatctcttctttaattgctgaaaccgggggccttaatgcaatgttcatagactcaagctcgcttcatgagcaggtagtcgatgacataatgcgatcttcttttaatagcgcgggacaaagatgttctgctttgagattagcaattattcatgaaagtatttttgacgatctggtagaaatgattaaagatgcaatggctgaacttaccgttggtaatcccgaagattttcactgtgatgtgggtccaattatcgatgaaggatcaagaaatatgcttcttgaatacatatcagaatgttcaaataatggatatcaagtttttagccacaatcaggctcctgatggtaattttgtttcgccaaccttaattgagttaaattcgattgatgaaataaatgaagaaaagtttggaccgatacttcatgtcataaaatataaaaccgatgagcttgagcaaatcttaactgctcttaaaaataaacaatacggtttaaccatgggtgtccattctagaattgaatcaaaggcagatgacatcataaacaaatctattgctggtaatacttatattaatagagatattgtaggtgctgttgtcggctctcaaccatttggagggacaggcttatcagggactggttttaaggctggcggtccaaactacttactccaatttgttgatgagaggtcaataactaaaaatacagttgcttttggtggtaacgccgaaatcctcaatttagaagactaat

SEQ ID NO: 213217 - DNA, 1390 bp, Unknown
  Bacterial polypeptide expressing nucleotide sequence isolated from the Sargasso Sea
tatgaaaagtttagacaaattatttggtaaatatggtattgatcaattaacaaacggatgctctactggaaataattggtttggttcaggagaagtaattgaaagtatatctcccgttgatggtaagttaattcgagaagtgtcttgtgggtcaaaaaaagactttgacgatatcattaaaatttcaaagaaagcttttgatgattttagaaaaattcctgctcccaagagaggggaattagtaagacaatttggaaataagttaagagaagaaaaggagctactaggaactttagtatcatatgaaatgggtaaatcatatcaagagggacttggtgaagttcaagaaatgattgacatatgtgattttgcagttggtctttcaagacagctacacggactaacaatgcactctgaaaggcctacacatagaatgtatgaacagtatcatccactaggagtaattggcattatttctgcatttaattttcctgttgcagtttggagttggaatgttgcattagcatgggtatgtggtaatgtgacaatttggaaaccaagcgaaaagactcctttatgtagtataatttgtcagaaattaattagtgaagttttcaaagaaaataatatttcagaaggtgtttcatgtttaattaatggtgattataaaattggtgagttattatctgagtctaaaaatatacctcttctatctgcaaccggatcaactagaatggggaaaattgttgctgaaaaggtaggagctagattaggtaaaactttacttgagcttggaggtaataatgcaattatagttactcctgatgctgatttaaagatgacaattatgggaactgtttttggtgcagttggaacttgtggacagagatgtacttcaacaagaagacttattgttcatgaaaaagtatatgaaaaagttaaagatgctttagttaaagcttacagtcaaattagaattggtgatccacttgatgcaaacatacatgtagggccccttattgatttagattcagtaaaatcctatcaaaaagctttatctcagattgaaaaagaaggaggtaattggctagttaaaggtggtgtattatctggaaatcaatatgatagtggatgttatgtaaaaccagttattgcagaagttgatcattctttaaaaattgttcatacagaaacgtttgctccaatattatatcttattaaatattctggagatataaagaatgcaattaaaattcaaaatgaggttgatcaagggctttcttctgcaattatgacaaataatttaaaagatgctgagttattcttatctcattggggaagtgattgtggtatagcaaatgttaacataggaaacttctggtgcagaaat

SEQ ID NO: 213218 - DNA, 1111 bp, Unknown
  Bacterial polypeptide expressing nucleotide sequence isolated from the Sargasso Sea
catgttagataaaaaaaatttttatattaatggagcatggattaaaccaaatagtgccgaagaaataaaagtaatcgatccagctactgaggaaaactgtgctgtaattactttaggaaataaagcagatgttgatttagcagttagtgcagcaaaagatgcttacgagtcttgggccttttcctctaaagaagaaagaattacactattagaaaaactttatgaaaattataagaaaagatgggctgatattgcagaagctataactcttgaaatgggcgctccaaaagattttgcaacaaaattacaagcaggtacaggcgcaagtcatattaaatcatttattagatatttaaaaaattttgaatttgaaaaaccattaggagaacacgctcctaaccaaagattaatttatgaaccaaaaggtgtttgtgcattaataacaccgtggaattggccgatgaaccaagtttgtttaaaagtaatgccagcaattgctgcaggctgtacaatggttttaaaaccttcagaattagcaccactttcttcaatgatacttgctgaaattatcgatgaagtaaaatttccaaaaggtgtatttaatttagttaatggtgatggagcaacaacaggcgatactcttacaagtcatccagatattaacatgatttcttttacaggatcaacaagagcaggagctttgatctcacaaaatgctgctaaagattttaaaagagtaagcttagaattaggtggtaagggagcaaatataatttttaaagatgctgatccagaagctattgaaagaggtgctttgagatgttttagaaattcaggacaatcttgtaatgcaccaactagaatgttggttgaaaaatcgatgtataatgaggcaattgagagattaaaaaaatatacagaaaactttgaagttggtgatcctaaaaaagaaggagagcatataggtccagttatttcagaaactcaatacgataaaattcaaactcttattcaaaaaggaatagatgaaggagcaaaattagttgctggaggaactggtaaacccgacggattagacaaaggttacttcgttaaaccaactgtttttgca

SEQ ID NO: 213219 - DNA, 868 bp, Unknown
  Bacterial polypeptide expressing nucleotide sequence isolated from the Sargasso Sea
gatgctaaataaaaaagatttttatattaacggaaaatgggtaaaggctttagagccaagaaactataaagtaattgatccatcaaacgaagaaacgtgtgcagaaatatcccttggtggaaaaaaagatatagatgtagcggttaatgctgctaaaaaagcttttgaaacttgggctttctctaaaaaagaagaaagattagaattattagaaaaattatatgtaatttataaaaaaagatgggcagaaatggcaaaattaatcactcttgaaatgggagcgcccatgaaattttcaactgaaatgcaagctgctacgggagctagtcatataaaatcttttaaaaatattttgaaagattttaaatttgaaaaagatttaggagaagaaaaaaataatcaaaaattattatacgaaccaaaaggtgtatgtgctttaattacaccatggaattggccaataaaccaggttaacttaaaagtaattccagctttagcatcagcatgtacagtggtactaaaaccatctgagatagcaccattatcttcaatgttgcttgcagaaatgattgatgaagttaaatttcctcctggagtttttaatttagttaatggagacggtgcaatcactggcgatgctctaacaagccatccagatgttgacatgatatcctttaccggctcaactagagctggcgcactaatttcacaaaatgcagcaaaagattttaaaaggataagtttagaacttggtggaaaaggagcaaatataatttttaaagatgctgatacagatgctgttgcaagaggtgttcaaagatgttttagaaattcaggccaatcttgtaatgcccctacaagaatgctc

SEQ ID NO: 213220 - DNA, 696 bp, Unknown
  Bacterial polypeptide expressing nucleotide sequence isolated from the Sargasso Sea
tatgatacaatataaatcatttggtgattgtgggaattgggttaataatgcatactctgaaagtagttcaggtaatagaataagtgttaccagtccatactttgataaggaaattgccacgattcctgattctggaaaaaccgaccttgatattgcagtaagtaaagctaaatcagcatttccaaattggtctggaacgaatattcgtgatagagcacagattatgttcaaatttaaatctatcattgaaaatgatatggaagacctcgcagctttaattgctcttgataacggtaaaacaattgcagatgcaaaaggcagtatattacgtggaattgaggttgttgagtatgcgactagtttacctaatgtattaaaaggagaatcctcagatgttagtgagggaattaactgtacgatgacacatgagcccctgggagttgtcgcgggtattactccatttaactttcctgttatggtgccgttgtggatgatccccttagcaataaccgcaggtaacacctttattcttaaaccatcggagcaaacaccactatccggtatgcgtcttgctgaatatttaaaagaggcaggtcttcctgatggagtgtttaacgttgtgaatggtgcaaagacaattgttgagtcgctttgtgaccacccagatataaaggcattagcctttgtaggttcatc

SEQ ID NO: 213221 - DNA, 1453 bp, Unknown
  Bacterial polypeptide expressing nucleotide sequence isolated from the Sargasso Sea
atggaattaaaaaataaatctttattcaaacaagaatgctttattggaggaaagtgggtaaaaagcttaaataatgatacaattcaagtagataatcctgcaactctcaaatcaattggtaatgttcctaaatgcggaaaagaagaaactaaaaatgctatagaggcagctaatgatgcttttttaaattggaaaaataaaaccgctaaagaaagatcaataatattaaaacaatggcaagatcttataataaaaaatgttgatgatttagctcatattatgactgtagaacaaggaaagcctcttgctgaatcaaaaggtgaaattttaatgggtgcttcatatatagaattctatgctgaagaggtaaaaagagtatatggcgatattatccctgatccacttccagatagaagaattgtggtaattaaacaacctgttggagtggttggagcaattacaccttggaattttcctagcactatgattactagaaaatgtgctccagctttaggagtgggttgtcctgtagttattaaacctgcaagtcaaacacctttctctgcactggctttagctgtattagctgaagaagctggcttcccacctggtgtttttaatgttttaacaggatctgcttctgaaattggcaaagaattaactgaaaatcctatagttaagaaaatatcattcactggttctacagaggttggaaaaattttacttaaacagagtgcttcgaccgttaaaaaagtatctatggaattgggaggacatgctccttttatagtatttgaagatgcaaatattgatgaagcagtttctggagctataatgagtaaatttagaaattctggacaaacttgtatatgtgctaatagattatttgttcatgaaaaagtttatgaagaatttttagaaaaatttgtaaaaaaggttgcagaaataaaagtgggaaatggtctagaggaatctactaattctggacctttgatagatcaatactctcttgaaaaagttaaagatcatgttcaagatgcagtaaaaactggagccaaaatagctattggaggggatattcataaattaggtggcaacttttatcaacctacagttttgtcagatgttactaataaagcaaaaataacttatgaagaaacttttggtcctgttgctccaatttataaattttcttcagatgaagaagtgataaatttagcaaatgacacaccttatggtttagcttcttatttttatgctagagatattggaaaaatttggaaagttgctgaagcattagaatacggaatagtaagtgtaaatactgggttaccaacaaaagcagaaataccatttggaggtgtaaaagaatcaggtttaggaagggaaggttctaaatatggattagatgattatttagaaattaaatatatttcaatggcaggaatttaag

SEQ ID NO: 213222 - DNA, 918 bp, Unknown
  Bacterial polypeptide expressing nucleotide sequence isolated from the Sargasso Sea
catggatattaaaaattctgaattgtttaagaatcagtgctacataaatggatcgtgggtcaatgcagacgatggttctacatcgaatatcgtcaatccggcaaactctaaacaattgggcactgttccaaattgtggctcaaatgagactttaaaagccatcaaagcagcgaaggaagcacataaagtttggtcaaagacagacgcaaaagaacgttcttctgtgcttaagaaccttcatcgtctcatgctcgaacatcaggaagacttggcaaggattataacgcatgaaggcggcaaaccactctctgaatcaatgggtgaaattgcctatgctgcgtctttttttgaatggttttcagaagaggcgaaaagagtttatggtgatgtaattcctggtcatcagcaggatcgcagaacgcttgtgatcaaacaacccatcggcgttgttggctgtatcacgccatggaattttccatcggcaatgttggcaagaaaaatcgcgcccgctatagcagttggctgcacagtggttgcgaagccagcaccagaaacaccctattctgcaacagctatggcgtatctctctgagcttgctggcatccccaagggtgtatttaatgtggtcacaggcgatgctgaaaaaattggctctgtgatgacaacccacaaagaagtaaaaaaaatcacttttactggctccactgctgttggaaaacagttgctcaagcaatcggcagataccgtaaaaaaagtttctcttgagctaggaggtcatgccccttttattgtctttgaagacgcaaatcttgaggatgcagttgatggtgcgttgattgcaaaatatagaaacagtggccaaacatgtgtttgcgccaataggatttatgtccaatcaagcatctatgacgatttctc

SEQ ID NO: 213223 - DNA, 667 bp, Unknown
  Bacterial polypeptide expressing nucleotide sequence isolated from the Sargasso Sea
atggaaataaataaattttatatcgatggaaagtttgttgatccagacggatcagagaagattgatatagtaaatcccgcaactgaagaagctgtaggtcatgtcatttcaggttcacctaaagatgttgatattgcagtagcagcagccaataaagcattccctagtgccatggaattaactctagagcagaagaaaaaaatacttgaagaaataattactggtatggaagaaaggcgtgaagatttcgcccaaattatttctgaggagatgggatcaccaatacaaatggcacgtaaagctcagtatggtgctggcgttatccattttaaaaatacgcttagtgttattgatagattcgatttcaatgaagttcatggcaacattacaataaataaattaccaattggtccagtaggaatgataactccttggaattggcctcttaatcaaatgtgtaccaaaattgcttcagccatagctgctggaacctcttgtgttctaaaacctagtgaaattactccaggtgctgcacatatatttgccgaagttattgataaaacaagcatgcctaaaggtatgtttaatttgatacatggttttggtgttactgtaggtaaagccatgagcagccattcagatctagaaatgatttcttttactggct

SEQ ID NO: 213224 - DNA, 657 bp, Unknown
  Bacterial polypeptide expressing nucleotide sequence isolated from the Sargasso Sea
catgaatttaatcaaacattttgttggtggaaaagtaatatcaggtagttcagagagaaaaggaaaaatctttaaccctgccaccggggaacaagagtctgaggttattttagcctcaaaagcagatttagatggtgcagtggaaattgcacaaaaagcttttgagacttggtcattaaaccctccacttcaaagagcaagaataatgtttaaattcaaagagcttatagagaaaaattttgatgaactggcaaaactaatagtctcagaacatggaaaagtttatgaggatgctaagggatcattaataagaggattagaagttgtagagtttgcatgtggaattccacacttgcttaaaggagagttttctgaaaatgttggaacaaacgttgatagttattcaatgcgacagcctttgggagttgcagctggcataaccccatttaattttccagcaatggtacctatgtggatgtttccattagctatagcatgtggtaatagttttattttaaaaccatcagaaaaagatccctcatgtccgatgaaattggcagaactgcttcacgaagctggtcttcctgagggagtttttaatgttgtaaatggtgataaagaggttgttgatgcgatattaacaaaccaaaatattaa

SEQ ID NO: 213225 - DNA, 694 bp, Unknown
  Bacterial polypeptide expressing nucleotide sequence isolated from the Sargasso Sea
atgactgatctcacaaaaaatccagatctcaggtttagagacaagccagatgatttttttggtgactggaaatggcgtgaaggtttagcagaattaatggttcctataataggaagactttacagaaatggtgtaaacgttctcatgtacggacattcattaataaatcaatctcctattgaaataatgaagtcacatagatttataagaagagttgaagatactgagatttctgaacttgaaacctatccctttttacaaagaattgaacttcaagatattaaagattgtgagattgatataggagagatagtagtggatttcatgagagaaaataattctttagatgattcaaaaattgactctcacattaaatcatatattttagatccattagataaagttgatcagcaaagaccttcaaaaccccaggacatagttttgtatgggtttggtcgaatcggtaggttagtttcacgcattatggttcaaatgacaggcccaggtaattattacaggctcagagcaattgtcgtgagaaaagtttcagatacaaacgatctacttaaacgagcgagtttgttgagacgtgattctgtgcacggttcattccacggaactattagagttgataatgagacggaaactttagtaataaatggaaatcctgtaaagatcatctatgcaaatgaac

SEQ ID NO: 213226 - DNA, 1105 bp, Unknown
  Bacterial polypeptide expressing nucleotide sequence isolated from the Sargasso Sea
atgttagatagaaaaaaattttatatcgatggaaaatgggtcattccgatagaaccaagaaattaccaggtaattgatccatcaaatgaggaaatttgtgctgaaatatctcttggaggaaaaaaagatgtggataaagcagttagtgctgcaaaaaaggcttttgaaacttgggctttctcaaaaaaagaagaaagattagatttattagaaaaattatatgtaatttataaaaaacgttgggcagaaatggcaaaactcatatcacttgaaatgggagcacccatgaaattttcaacggaaatgcaagctgcaacaggagctagtcatataaaatcttttaaaaatattttaaaagattttaaatttgaaaaagatttaggagaagaaaaaaataatcaaaaattattatatgaaccaaaaggagtatgtgctttaattactccttggaattggccaataaatcaagttaatttaaaagtaattccagcacttgcatcggcttgtactgtagtattaaaaccttccgagatagcaccactctcatccatgttacttgcagaaatgattgatgaggtaaaatttccttctggagtttttaatttaattaatggagatggagaaacaactggagatgcattaacaagtcatcccgatgtaaatatgatatcgtttactggctctactagagctggtgcattaatttctcaaaatgcagcaaaagattttaaaagaattagcctagagcttggtggaaaaggtgcaaacataatttttaaagatgctgactctgaagctgtagcaagaggagttctaagatgttttagaaactcgggtcaatcatgcaatgcaccgacgagaatgcttgttgaaaaatcaatttacaatgaaactgtagaaaaagtaaaagaattagcaaataatactaaagtagatgcaccacaaaaagaaggtgaccacattggaccagtagtttcagaagtacaatataataaaattcaaaacttaattcaaaaaggaatagatgaaggagcaaagttaattgctggtggaacaggaaaacccaaaggatttgaaaaaggttattatgtaaaacctacagttt

SEQ ID NO: 213227 - DNA, 985 bp, Unknown
  Bacterial polypeptide expressing nucleotide sequence isolated from the Sargasso Sea
atgttagacaaaagaaaattttatataaatggaaaatgggtttctccaagtaaacctaacgatcttgatgtaatcaatccatctaccgaagaagcctttgcaactatctctcttggttcaaaagaggatacaaatgctgcagttagtgctgcaaaaaaagcgctagtcacatggagtgaaagttcgaaagaagaaagggtaaaacttcttgaaaaattgttagatatttataaaaaaagatattctgaaatgacagaagccatatctatggaaatgggagctccaatggattggtcaaatgatgctcaaacttcaagtggtcaatcacacttagaagatttcatagtcagattaaaagaatttaaatttgatgaacaatttagtcctgagtcaaacaatcgaatttgttatgagcctataggggtgtgtggtttgattacaccatggaattggcctattaatcagatagcattaaaagttgttcctgcattcgcaactggatgtaccatgatccataaaccctcagaaattgcgcctatatcagctatgttatttgctgaaatgatagatgaagcaggctttcctgccggtgtttttaatctagtaaacggtgatggtgttggtgtgggtactgatatttcaacccaccctgatattgatttagtatcttttacaggatcaacacgtgcaggaaaactaatattaaagaatggagctgatacgatcaagagagtttgtcttgagcttggtggtaaaggtggaaacattgtttttgctgactcccaccctaatgcggttcgtgatggtattagaaatgtaatgagcaattctggccaatcatgtgatgcacctacaaggatgctagttgaaaaatcaatttatgaaagagctataaaagaggctgccgaagaagctaatttgataaaagttgatcacgcttctaaaaaaggagatcacataggtccagtttttcaaaagttcaata

SEQ ID NO: 213228 - DNA, 691 bp, Unknown
  Bacterial polypeptide expressing nucleotide sequence isolated from the Sargasso Sea
catgagtgataacagggatatcaatcttcagtctactaaaagacaaaaaaggatcttacctgaagattcttttggtgattggaaatggagagaaggtcttgcagagcttatggttccaattattggttctctatatcgaaatggcattaatatccttatttatggaaaatctctggtaaatgaatctccagttgcaataatgaaagcacatcgctttgctagacagtctgataataacgaactcagtgaactagaaacctatccaattcttaaatatatagaaactttagacttagcagactgcgaaattgatgtaggtgaaatagctgttaaatgtccattttttgaagatattaaaaatgacgatactaaagtaggggagtttattgatgctgaacttgaatttgtaataaataagaaatcaaataggccttctgaacctgcgaatatagttttgtatggttttggaaggattggaagacttgttgcaagaatgatgacacaaactactggaccaggtaattattttaaactaagagctattgtcattagaaaagctacagatgatgatatatttaaacgagccagcttgttaacgaaagattctgttcatgggccttttgatggaacggtaagagttgatgaagaaaactcaagtttagtaatcaatggaaatcctgttaaggttatt

SEQ ID NO: 213229 - DNA, 828 bp, Unknown
  Bacterial polypeptide expressing nucleotide sequence isolated from the Sargasso Sea
tatgtatagcaaatttggacaattcattgatggaaaatggcaagaagcagaaaaaaaagaaacatatgatgtaatcaatcctgcaacagaggaagtgattggaaaagcatcaaaagcatcttcggcagatgtacaaaaagcattaaagtcagctgagaaaggtttagaagtttggaaaaacactgcgccgtggcaaagagcttatgtgcttagaaaaattgctgatctaatgagagaaaaaaaagatattattgcaaaatggttaactcttgaagttggaaaacctctttctgaagcagttggtgaagttggtggtggagctgatatttttgaatggaatgcagaggagacaaaaagaatctatggacaaactcaacaaagcagatttccagatacaagagttcatgtttattatcagccagtaggagttgttgcagctttagttccatggaattttccaatagttttagcttcaagaaaaatttctactgctttagcagcaggttgttctgttatatgtaaaccagatgttattactcctggagctgtaatggaattagttaatatttgtaaagaagctggagtaccagatggtgttgttagtcttttatcaggtgatcctgctgaaatatcaaatgaattaatggaatctgatataattaaaaaagtttcagtcactggatctactagagttggaaaaattattttaaaaaaagcagctgacaaagttcaaagagttacaatggaactaagcggacactcaccttttattgtatgtgaagatgtggatatgaacaaagtagccgacatagcaataactggtaagtt

SEQ ID NO: 213230 - DNA, 496 bp, Unknown
  Bacterial polypeptide expressing nucleotide sequence isolated from the Sargasso Sea
aatgtcatcttctttagatacctctcacttaaaggttaaatttccatttaaagctaagtatggaaactacattaatggaaaatttgtagaacctaaatcaggaaagtattttgataatactactccgattacaaatgaagttatctgcaaggtgccacgatcgaatgaaaaagatattgattttgctttagatgcagcacatgcagcttttccaacttggggaaagacttcaattactgagagatccaatattctcaataaaattgctgataaaatagagcaaaaccttaatctattagcaacagcagagtgtttagataacggtaagcctatcagggaatgtatggcagccgatctaccattggtgatagaccattggagatactttgcaggagttataagagcggaagagggttctgtagcagagataagtaacagcgaatattcttatcatatacctgaaccacttggagtagttggacaaattataccttga

SEQ ID NO: 213231 - DNA, 1456 bp, Unknown
  Bacterial polypeptide expressing nucleotide sequence isolated from the Sargasso Sea
ttgtcgctcgacggccgcgcgttcatcgcgggcgagcgcagtgcggcggcgtcgggcgagacgttcgcgacgctcaacccggcgtcgggcaaggtactcgccgaagtcgcgcgctgcaacgagcgcgacgtcgatcgcgcggtcgcggctgcgcgcgatgcattcgagtcgggcgtctggtcgaaggccgcgcccgcgcatcgcaaggcggtgctgctgcgcgtcgcgcaactgatcgacgagcatgcggaggaactcgcgctgctcgaggcaatggaagccggcaagccgatcggcgagtgcctggggctcgacattcccgagtcggccgcgtgcatccgctggcacgcggaggtgacggacaagcgctacgacgcgttgtcgccgtccggcagcggtgtcgtcagcatgatcacgcgcgagccgatcggtgtcgtcggcgccgtgctgccatggaattttccggcgctgatgctcgcgtggaaaatcggccccgcactgtcggtgggcaacagcgttgtcgtgaagccggccgagcagacgtcgctgtcgacgctgcgcatcgccgatctcgcgcgggaagccggcgtgccgccgggcgtgttcagcgtcgtcaccgggttcggcggcgaggcaggcgaggcgattggccgccatccggacgtcgatctcgtcgcgttcaccggctcgaccgcaaccggcaagcgcttcctgcactactcggccgatacgaacctgaagcgcgtcgtgctcgaatgcggcggcaagaacccgcaggtgatcctgccggacgtcgcgaatctcgacgcggtcgccgaacaggcggtcgcggccgcgttctggaacatgggcgagaactgcagcgccggctcgcggatcctcgtgccgtcgagcctcaaggcggagctgctggagaaggttttggcggtgctcgacggctggaagaccggcgacccgctcgacccggacgtgaagctcggcgcgctgatcgagcagaagcactacgacaaggtgctcggccatatcgagaaggcgaaggcggaaggcgcacacgtggtgtgcggcgggcaggcaatgctcgccgaaaccggcggctggttcgtcgagccgacgatcttcgaccaggtgacgcccgggatgagcatcgcgcgcgacgaggtgttcgggccggtcgtctgcttcatcgagtacgacgacgtcgacgacgcggtgcggatcgcgaacgatacgtgctacgggctcgctgcatcgctctggaccgacaacgtgaacagtgcgcacaaggtcgccgcgcgcattcgcgcggggacggtcacggtgaactgcttcggcgaaggtgacctgtcgacgccgttcggcggattcaggcagtcggggttcggcggccgcgacaaatccgtgtacgcgcacgatcaatattgcgaactgaagaccacctggctgaagctcgactgag

SEQ ID NO: 213232 - DNA, 871 bp, Unknown
  Bacterial polypeptide expressing nucleotide sequence isolated from the Sargasso Sea
aatgagtaatgatttaaatttttatatcaatggtgattgggtaaaatctgattcaaatgagttaattgatgtaattaatcctgctaatgaagaagttgttggacaagtcactgctggaacaaaaaaagatattgataaagctgtagctgcagcattagaagcttttgactcttatcaatgtacttcaaaagaacaaagaatagaattacttaataatatcattactgaatataaaaacagatatgatgattttgtacaaatcattacaaaagaaatgggagctccaatatggctttctgagagagctcaagcgtcaacaggaattaaaaatatacaagaaactttagatgctttaagagaatatcaatttgaaaaacctgaaggtgattacactttaataaaggaacccataggagtcattggcatgattactccatggaattggcctatgaatcaaataacaacaaaagtttctgcagctctggcagctggttgcactatgattttaaaaccaagtgaaatatctccatactgcgcaatgcttttagcagaagtatttgataaagcaggtgttccagatggtgtatttaatgttgttaatgggtacggcccaattgttggagctgctttatccgaacatccagatatagctatgatgtcattcacaggctcaacaaaggctggtattgcagttgcgcaagcatctgctgtttcagtaaaacgtgttcatcaagagttgggtggaaaatcctcaaacataattcttgacgatgttgctgatttagagaaatcagtaaagggtggagctggccactgtttcctaattcaggacaatcgtgtaatgcacaacaaaaatgttagtttctgctaa

SEQ ID NO: 213233 - DNA, 2900 bp, Unknown
  Bacterial polypeptide expressing nucleotide sequence isolated from the Sargasso Sea
gcttggtacaggaaacgacacaacaccgaccatttccggtactacagatattgcgccaggcagcaccgtatccatcagcgttaccgatagtgcaggaaacacccaaacatttggcgccattgttcaagctaatggcaccttctctgtagatgtgccagcggccttatctgaaggtaattattcggtcaccgcaagtgcaacagatggagcgggtaatacggcaaccgcaaacgaaaatggcggcgttatcgatactactgcgccagctgcgcctactgttgatgcaggcaacggtaccgaaattaccggcacagccgaagcaggcgctgtcgtaaacgtagacgttgacggtgatggcacacctgatttcacagtgattgctgatggcgatggtaactggtcagtaacacccacaacaccgctagccgatggcgtggttgtaacggcaacagcaaccgatgaagctggcaatacgagtagcccggcgtctgatacggtagacgctgttgcgccaatcgttgcctttaacgacctaacgactaacgataccacgcctgcacttaccggttcggtggacgacccaaccgccatagtggtcgttaccattaacggtacagactataccgcgacaaacaatggtgatggcagctggacactggctaacgatatcgttgccgcgctggctgaaggtagctataccgctacggttactgctactgatgccgacggtaacaccggaactaactctggtactgtggtgattgataccactactccagcagcgcctaccgtcgatgcaggtaacggcactgaaattacgggtactgcggaagccggcgcaactgtaaatgtggacgtggatggcgacggcacgccagacttcaccgtcatcgcagatggcgatggaaattggtcaataacccccactacaccgctggccgatggcgcggttgttacggcaacggcggttgatgaagctggcaatgtcagtgcaccagcgtcagatacagtagacgctggtgcaccagtcgttacaatcaacgacttaactactaatgacgctacaccagaactaaccggtacggttgacgatccaaacgctatcgtagtagtgaccattgatggcgtggactacaccgcaactaacaatggcgatggaagttggaccctggctgacgatgcagtggctacacttgcagatggtagctataccgctaccgttactgccacggatgccgatggcaatgtaggttcaaattcaggaaccgtagtgattgatactacaccacctgcgatacctactgtggatgcgggcaacggcactgaaattaccggtaccgctgaagcaggcgcaaccgtaaatgtagacgtggatggcgacggcacgcccgatttcaccgtcatcgctgatggcgacggtaattggagcattacgcctgatacaccgcttgccgatggcgtaattgtgaccgtaacggctatcgatgaagcgggtaacattagcaacccagcctcagacacggttgacgcggctgcaccagtagttgccttcgacgatttaacaacaaacgatacaacgccggcacttactggttcggtcgacgacccaacagccacggtggttgttaccatcaacggtgccgactataccgccaccaataacggtgatggcacgtggacactggctgacgatgcagtggcggcacttgctgaaggtagctataccgcaacggttactgcaaccgacccagaaggtaatgtgggtacgaatactggtacagtggtcattgataccacagcaccagcagcgcctaccgttgaagcgggcaacggcactgaaattaccggcacagccgaagcgggcgcaacggtaaatgtggatgtagacggagacggcacgccagatttcaccgtgatcgctgatggcaacggcaattggagcgtaacgccagatacaccattagcagatggagttgtagtaacggcaacggctactgatgaagcgggcaacaccagtgggccggcatctgacacggtagacgcagtggcacctgttgtaaccatcaatgatgtgacgactaacgatactacgcctgcactaacgggtacggttgatgacccaacggctactgtagtagtcaccattgacggcgttgactataccgctaccaacaatggtgacggcacgtggacgttggctgacaacgcagttgctacgcttgcagaaggcagctacccaacttcggtaagtgcaacagacgccgatggcaacaccggaactaactctggtactgtggtgattgacaccactgctccagcagcgcctaccgtcgatgcaggtaacggcactgaaattacgggtactgcggaagcaggggcaactgtgaatgtggacgtggatggcgacggcacgccagacttcaccgtcatcgcagatggcgatggaaattggtcagtaacccccactacaccgctggccgatggcgtggttgtttcggcgacggcggctgatgaagctggcaacgtcagtgcaccagcgtcagatacagtagatgctgttgcgccagtcgttgcaatcaatgacttaaccactaatgacgctacaccagagctaaccggaacggttgacgatccaagcgctatcgtagtagtgaccattgatggcgtggactacaccgcaactaacaatggcgatggaagttggaccctgcctggcgatgcagtggctacacttgcagatggtagctataccgctaccgttactgccactgatgccgatggcaatgtaggttcaaattcaggaaccgtagtgattgatactacaccacctgcgatacctactgtggatgcgggcaacggcactgaaattaccggtaccgctgaagcaggcgcaaccgtaa

SEQ ID NO: 213234 - DNA, 202 bp, Unknown
  Bacterial polypeptide expressing nucleotide sequence isolated from the Sargasso Sea
tatgatccaaacccaagatcaggaaaaagcaaatcgagtagctaaaaaacttagatctggaatggttgatatcaatgggactggtttagcgactggtgcaccttttggtggttataaacattctggaattggtcgtgaagctggaaaattaggtttagaagaatatcttgaggtcaaagttgtcagcggttggaacgattaa

SEQ ID NO: 213235 - DNA, 1103 bp, Unknown
  Bacterial polypeptide expressing nucleotide sequence isolated from the Sargasso Sea
catggaattaaaaaataaatcattattcagacaagaatgtttcattggaggaaagtgggtaaagagctcaaatggtgagaaaattgaagttgataatcctgctacacaaaaatcaataggtagtgtgcctaaatgtggaaaaaatgaaactaaaaatgcaatagactcagctaataacgcttttataaattggaaaaataaaacagcaaaagaaagatcaataattttaaaaaattggcaagatttgataataaaaaatctagatgatttagcttacataatgactgtagaacaaggaaaacctcttgctgagtcaaaaggtgaaatcttgatgggagcctcatatatagaattttatgcagaagaagtaaaaagagtttatggtgatattattccagatcctcttcccgatagaagaattgttgtcattaaacaacctgttggagttgttggagcaataactccgtggaattttccaagcactatgattacaagaaaatgtgccccagcacttggggtaggttgtcctgtcgtaattaaaccagcaagtcaaacacctttttctgctctagctttagcagtacttgctgaggaagcaggttttccatcaggagtttttaatgtcataactggatcagcatcagaaatcgggggagaattaacagaaaatccaattgttaaaaaaatatcatttactggatctacagaagttggaaaaattttacttaaacaaagcgcctcaacagtcaaaaaagtatcaatggaacttggaggacacgctccatttattgtatttgaagatgcagatatagatgaagcagttaacggtgcgatcatgagtaaatttaggaattctggacaaacatgtatttgtgctaatagactttttgttcatgaaaaaatttataatatttttttaaaaaaatttgttgatcaagtctcaaaaattaaagttggaaatggtcttgaaaatgcaactaattctggcccactaattgatcaatattctctaaaaaaagttatcgatcatgttcaagatgcagtaaatactggtgcaaaaattgctattggtggtgatattcacagcttaggtggaaattttt

SEQ ID NO: 213236 - DNA, 1274 bp, Unknown
  Bacterial polypeptide expressing nucleotide sequence isolated from the Sargasso Sea
tgccaagggcgcgttcaagacctggtcggtcttgagctacgagcagcgccagagctatctggatgcctatgccgatgcgcttttggagcaccgcgatgaactggctcgcttgctgactttggaacaaggcaagccgctgaaaaccatggccgagccggaagttgaccaggcgatctcgtggattcgccagatcgctgcgcggcgtattccggtggagatcgtcgaggagaacgacaaccacatcgtggagctgcatcacacaccgctgggtgtggtcggtgcgatcacgccgtggaatttcccggtgctgctggcgctgtggaaagtggcgcctgcgctgatcaccggcaacaccatggtcatcaaaccgtcgccattcacacccctcacctccttgcgctttgggcagattgctcagtccgtgttgcctgctggtgtgctttcagtggtttcaggtggcaatgaactgggcccgcaaatgaccgctcacccggacatcgccaagatcagcttcaccggctccaccgagaccggcaagcatgtcatccgttcggctgcaggcaccgtcaagcggctgaccatggagatgggcggtaacgacgcggcaatcgtcatgcctgatgccgactggcaagcgatcatcccgcaactgtactggggcgccgtcggtaactcggggcagtggtgtgtgggtatcaagcgcctttacgtgcatagcagttatcgcaatgagttcgtggcagcgttcgttgagtatgcgcggcagcaggtcatgggtgacggtctcgacccgaacgtgaccgtcggccccgtgcagaacaagatgcagtacgacaaggttcgtagcttcttggatgacatcaaggccaatggttacaaagtggtattgggcggtgaggtagacgagagccgtcctggctatttcatcccggtaactgtggtcgacaacccgccagagagctcgatgatcgtgcagcaggagcagttcggaccgatcgtgccgatcatcgcttacgacgacgtcgacgatgtcgtagcccgcgcgaacgacagtccattcggcctgggtggctcggtctgggggcgtgatacccaggcagcggtggctgtggccaatcgcctggaaaccgggatggtctgggtcaacgagatccacacgcaaggcgtcgacattcctttcggtggccacaagcaatcgggtatcggcactgagcacggccatgagggccgcctgctgttcaccaacccgaaaaccgtgttgatcaagaagtaac

SEQ ID NO: 213237 - DNA, 679 bp, Unknown
  Bacterial polypeptide expressing nucleotide sequence isolated from the Sargasso Sea
catgaatttaatcgaacattttgttgatggaaataaaatatcaggaacttcgaaaagaactggtaaaatctataaccctgcaactggtgaacaagaatcagaagtaaaattaggaactaagtctgatcttgatttagctgtagaagttgcgaaaaacgcatttgaaacttggtctttaaaacctgctctgcaacgagctaggataatgtttaagtttaaagagctaatagaaaaaaattttgatgaattaacaaagttaattgtttctgaacatggaaaagtttatgaagatgctaaaggatcattaataagaggtcttgaggtagtagagtttgcatgtggaatcccacatgttcttaaaggtgaattttctgaaaatgttggaacaaatgttgatagttattcgatgcgccaaccattaggtgttgcagcaggaataacaccattcaattttccagctatggtaccaatgtggatgtttccacttgcaattgcatgtggtaatacttttattttaaagccatctgaaaaagatccatcgtgcccgatgagattagcagaattattacatgaggctggtcttccagatggagtttttaatattgttaatggagacaaggaagtagttgatgcaattttaacaaataaagatatcaaagctgtaagctttgtaggatca

SEQ ID NO: 213238 - DNA, 589 bp, Unknown
  Bacterial polypeptide expressing nucleotide sequence isolated from the Sargasso Sea
tatgtacgaaaaatttggacaattcattgatggcaaatggcaacaagctgaaaaaaaagaaacttacaatgtaatcaaccctgcaacagaggaagttataggaaaagcttcaaaagcttcatctattgaagttcagaaagcattaaagtctgctgaaaaaggattggaaatttggaaaaacactccaccttggcaaagagcttatgtgcttagaaaaattgctgatctaatgagggaaaaaaaagatctacttgctaaatggttgactcttgaagtgggaaaaccacttactgaagctgttggtgaagttggtggtggcgctgacatttttgaatggaatgctgaagaaacaaaaagaatttatggtcaaacgcagcaaagtagatttccagatacaagagtacatgtttattatcagcctgttggagtggtcgctgctttagttccttggaattttccaatagttttagcttcaaggaaaatttctacttcattagctgctggttgttcggtcatatgcaaaccagatgtgattacacctggagctgtaatggaattggttaatatttgtaaagaggctggtgtacca

SEQ ID NO: 213239 - DNA, 314 bp, Unknown
  Bacterial polypeptide expressing nucleotide sequence isolated from the Sargasso Sea
cttcggaccagttgtatctgtgattaaatttaaagatgaggcagaagcattgaaaattgctaatgatactctttatggtttaggagcagctgtatggacaagaaatggaaatatagctcacagaatgggtagagcaatacaagcaggaatagtatggactaattgttatcatgcttatccagctcactcaccatttggtggatacaaacaatcaggagttggaagagaaactcacaaaatgatgcttaatcattacagacagaataagaacttacacgtttcttatgctgagaaaaaattgggcttcttttaat

SEQ ID NO: 213240 - DNA, 263 bp, Unknown
  Bacterial polypeptide expressing nucleotide sequence isolated from the Sargasso Sea
cgccgcgcgcgatacgacggtcgaggaagtcaatgcgatcatgaaggaagcatcggaaggcgcgctcaagggcatcctcggttacaacgaggcgccgctggtgtcgatcgacttcaaccacaacccggcttcgtcgacgttcgacgcaacgctgaccaaggtgtcgggccgtctggtgaaggtgtcgagctggtacgacaacgagtggggcttctcgaaccgcatgctggacacggccgtggcgctcgccaacgcgaagtaag

SEQ ID NO: 213241 - DNA, 742 bp, Unknown
  Bacterial polypeptide expressing nucleotide sequence isolated from the Sargasso Sea
aatggataacaattttatttattcagatgtagctcaggttcctgtgaatggagatgaggttttttacaaagacaacgatgtttcaccaggtttttcgccatggacataccgggcaaaatacatagacagctgtgggaatcaagggacatttacacaggaagtaacgacgatgcatttaagcggaaccgccgatgaaatagaaatgataaataccatttcatggactccatatgtaggttttgacggagcgattgtagaatatcgaatttatagggctcttgaaggtgtctttgatccaattccaattgcaacagttccagacggacaatatacctatgtggacaatgcttatggtcttcaaacgaatggaaacatatgttatcgaatagaagcggtagaggcattgaatttttataacttctcagaacaaagttcttccaacgatttgtgcttatactataagccatatatctatgttccaaatgcatttactccaggaggaattaacccaatttttattcctgtaattagtaatgcaagcccagaggggtatcaatttgagattttctcaagatggggccagcgaatttttgaatcttccgatttatctgtaggctgggatggttttatttctaattctggtcaaatggcaacaaacgatgtgtatctatatacggtgagttttgaagatggaaacggaaatagaatttttaaaagaggctttgtttccttgttaaaataa

SEQ ID NO: 213242 - DNA, 1054 bp, Unknown
  Bacterial polypeptide expressing nucleotide sequence isolated from the Sargasso Sea
catggaattaaaaaataaatcattatttaagcagcaatgtttcattggtggaaaatgggtcaaaagcctaagtggagaaacaatagaagtagataatcctgctttacaaataacaataggcgttgtccctaaatgtggagctgaagaaaccaaacaagctattgaatcggcaaatacagcttttaaaaattggaagtctaaaactgcaaaagaaagatcaattatattaagaaaatggcatgatctaatattagaaaatatagatgatttagctcatattatgacagttgaacaaggtaagcctcttgcagaagctaaaggtgaaattactatgggaacaacttatatagaattttatagtgaggaatgtaaaagagtttatggagatattattcctgaccctcttccggatagaagaattgttgttattaaacagccagtaggagttgttggtgcaataactccttggaattttcctagcactatgattacaagaaagtgtgccccagcgcttggagtaggctgtcctgtagttataaagccagcaagtcaaactcctttttctgcattggccttagcggtattagctgaagaagctggttttcctgcaggagtttttaatgtagtgacaggaacagcttcagaaataggaaaagagttaacagaaaatcctatagttaaaaaaatatcattcacaggctcaacagaagtaggaaaaatattacttaaacaaagctcaacaactgtaaaaaaagtttctatggagctaggcggtcatgctccatttatagtttttgatgatgcaaatattgatgaagcagttgctggagttatgatgagtaaatttagaaattctggtcaaacgtgtatatgtgctaatagaatttttgttcatgaaaaagtatatgatgagtttttagaaaaatttgttaaagaggttgctaaaatcaacgtaggaaatggtttagaggaatcaactaattctgggcctttaatagaccaacattcattagaaaaagttaaagatcacgtcaatgatgctgttaatactggt

SEQ ID NO: 213243 - DNA, 559 bp, Unknown
  Bacterial polypeptide expressing nucleotide sequence isolated from the Sargasso Sea
atgactttaagttatcagttagtaaaagaaaaaaaattaaaattaaactttccttcagatttatttataaatggaaattatcaaaaatctatttctgaaaaaagttttgataatatttccccaattgacggcaaaataattaatcaaatttcttttgccaatcaggctgatatagatatagccgttacttcagcaagagagacattttgcaaaggttactggtccaatttaccgcccagccaaagaaagaagattcttttaaaatttgcacaattaattgaacgtgatcgtttagaattatctttattagacactattgatatgggcaaaactattaatgatacttataacgccgatttacctacaagtattgataatattgaatggtatgctgagattatagataaattatttgatgatatttctccaagctcaaaagaatttatgggacttatctctaaggagccaattggagttgttgtagctattgtaccttggaattacccattgtggatggcaatatggaaaatagcaccagctcttataactggtaattctg

SEQ ID NO: 213244 - DNA, 1385 bp, Unknown
  Bacterial polypeptide expressing nucleotide sequence isolated from the Sargasso Sea
tctttgtgataacttacttaatccagaagtaagtccaaatgatctagctgaagatccagttaaatctgtaaaaaaagctattgataaacttcaacatgaaaaaatcgtaaacccatcagatatcttctctccaagagttaattcatctggatatgacttaagcgaacccaagaatcttcttaacttaaaatctgaccttttaaagtttgataatttaaaagttgaggcaaaaaacttttgtaacgaaattaatggatctaaaaatgagaaacgatactcaatagctaatggaaatgagattggggattgttcttttgcagatatagcaaatgaattaaatttccaacaatgtactgaatggaaaaatactcctgttagcgatagagcggatattttttatggaattgctgataatttagagatagattccacaaaatttttatactacttaattcacgaagccgggaaaacatataaagattcttatgatgaaattagggagacagtcgattttcttagatattatgcagacaatgctaaaagtcttttgagcgaacctaataacctcaatggtccaacaggtgaatctaatcaacttttctaccagtcaaagggtacttttgtgtgcattagcccatggaatttcccgcttgccatttttgcaggccaaatagctgcggctcttgttacagggaattcagttatatcaaagccatctgagcatactccaataattgcgaccatgatgattgagcttttttataaaaatggtgtaccaaaatctgctttaaaattaattcagggagatggctcaataggttcaaaactaatttcatttgatcacatttctggagttgcctttacagggtcctcagcaactgcaaagaaaattaatctccagttggctaaaaaagatggtcccatctcttctttaattgctgaaactggtggccttaatgcaatgtttatagattcaagctcacttcatgagcaggttgttgatgacataatgcggtcttcttttaatagcgctgggcaaagatgttctgctttaagattagcaattattcatgagagtatttttgatgatctggtagagatgattaaagatgcaatggctgaacttaccgttggtaatcccgaagacttccactgtgatgtgggtccaattatcgatgaaaggtcaagaaatatgcttcttgaatatatttcagaatgctcaaacaatggatatgaagtctttagccataatcaagctcctgatggtaattttgtttcaccgaccttaattgagttaaattcgattgatgatataaatgaagaaaagtttggaccgatacttcatgtcatcaaatacaaaacagatgagcttgatcaaattctaa

SEQ ID NO: 213245 - DNA, 470 bp, Unknown
  Bacterial polypeptide expressing nucleotide sequence isolated from the Sargasso Sea
catgaaattaatagagcattttgttggtggtaaaataatatctggatcatcagatagaaaaggaaaagttacaaatcccgcaacaggagaacaagagtccgaggtaagattagcttctaaatctgatttagatcaggcagtagaagttgcaaaaaaagcttttgaaacttggtcacaaaaaccagcacttcaaagagcaagaattatttttaaattcaaggagttgattgaaaaaaactcagatgaacttacaaaattaattgtttcagaacacggtaaagtttatgaagatgcaagaggatctttagtaagaggtttagaagttgttgaatttgcatgtggaattccacaaatgttgaagggtgagttttctgagaatgttgggacaagtgtagacagttggtctatgagacaaccattgggtgttgttgctggtattacaccatttaatttcccagcaatggttccaa

SEQ ID NO: 213246 - DNA, 337 bp, Unknown
  Bacterial polypeptide expressing nucleotide sequence isolated from the Sargasso Sea
tctaaaaggcaaacttcaaggtttagcaataagagttccaacaccaaacgtatcacttatagattttgtttttaactcgaaaaataatttatcaataaaaaagattaatgattcttttataaaagcttcaaaaaaagaattgcataatatattagaagctaccaaagaaaagctagtttcaacagacttcaatcacaatccaaattctgctatcgttgatttatctctaactaacttagcaagcaaaaaaatgggtaaggtctctgcgtggtatgataatgagtggggatttgcttcaagaatgtgtgatttagcagaatacattcataaaatttaa

SEQ ID NO: 213247 - DNA, 1444 bp, Unknown
  Bacterial polypeptide expressing nucleotide sequence isolated from the Sargasso Sea
tatgtataacaagtttggacaattcatcgacggaaaatggcaacagtcagagaaaaaagaaacatatgacgttattaatcctgcaacagaagagataattggtagtgcatcaaaagcatcttctattgaagttcaaaaggcacttaagtctgctgaaaaaggactaaaagtttggagcaatacaactccatggcaaagatcatacgttcttagaaaaattgcagatttaatgagagaaaaaaaagatgttcttgcaaaatggttaacacttgaagttggaaaacctttgacagagggtgttggtgaagttggaggagcagctgatatttttgagtggaatgcagaagagacaaaaagaatttatggccaaacagttcaaagtagatttccagaaactagagttcatgtttattatcagccagtaggagtagtagctgcgttgataccgtggaattttccaattgttttagcagcaagaaaaatttcaacagcgttagccgcaggttgttctgttatttgtaaacctgatgtaattactcctggtgctgtcatggaattagttgatatctgtaaacaagctggagttcctgatggtgttgtaaatcttttgtctggtgatccagcagaaatttcaaatgaattattggaatctgatattgttaaaaaagtttctattacagggtcaacaagagtaggtaaattaatacttaaaaaagctgcagacaaagtacaaagagttacaatggaactaagtggtcactctccatttatagtatgtgatgatgtgaatattgataatgtagccgatattgctatagcagctaaatttagaaataacggccaagtttgtatatcccctaatcgattttatattcaagaaaatgttaaagatgaattcatcaatgcttttataaatagagcaaaaaaattaaaaattggtaatggtatggatgaaggagtaaaccttggtccattgactactgctaaaagattagatgaaattgaaaaattagttgatacaacaaaaaaagagggtgcagaagttttaatgggaggaaaaagaccgtcaggttttaataaaggtttttattatgagccaacagtttttgacaaagtagaagataactttacgattatgaaagaagaaccatttggcccgttagttcccatgttagcatttaaatcttttgatgaggtcattgaaagagcgaatgataatgatttgggtctatgtagttatctttatactaactcaatggataaagctaatagagggtctgaacttttagaaacaggatgtgttgctgtaaatacgggtgcagtagcaattgctgaagcgccattcggtggaataaaacaaactggatacggacgtgagggtggatcaatggcgataaaagattatttaaatgtaaaatatactcatatggccctgaaggcttag

SEQ ID NO: 213248 - DNA, 1228 bp, Unknown
  Bacterial polypeptide expressing nucleotide sequence isolated from the Sargasso Sea
tatgtatagcaattttggtcaattcattgatggtcagtggcaacaagcagaaaaaaaagaaacttataaagttatcaatccagcaacagaagaagttttaggagaagcatcaaaagcgtcctctgttgacgttcaaaaagcattaaaatcagcagagaaaggactcgaaacttggaaaaataccactccatggcagaggtcttatgtaataagaaaaattgcagatttgatgcgtgaaagaaaagatgtattggctaaatggcttacacttgaagttggaaaacctcttaaagaagcaattggagaagttggtggtggagcagatatatttgaatggaatgcagaagaaactaagagaatttatggtgaaacattacaaagtagatttccagaaacaagagttcatgtttactatcagccagtaggtgttgtagcagcacttgtgccatggaattttcctatagttttagcatctagaaaaatttcaactgcactggctgctggttgttcagttatttgtaaaccagatgtaattacgcctggagcagttatggaacttgtaaatatttgtaaagatgctggagttcctgatggagtagtcaatttattatctggagacccagctgaaatatcaaatgaattacttgaatcagatataataaaaaaagtttctataactggctcaacacgtgttggaaaattaatacttaaaaaagctgcagataaagttcaaagagttacaatggaattaagtggtcattctccatttatagtatttgacgatgttgacatgaataaagttgcagatatggcaataacagcaaaatttcgtaacaatggtcaagtttgtatatccccaaataggttttacattcaagaaacaagaaaagaagaatttgtaaatgctttcgtagatagagcaaaaaaattaaaaattggaaatggtatggatgaaggtactgacttaggacctttaacaacagcaaaacgtttggaggagattgaaaaattagttgaaacgacaaagagtgaaggcgcaaaagttgttttaggtgggggtagaccttcaggatttaataaaggttattattttgaaccaactgtatttgatgaagtgcaggacaattttacaattatgaaagaagaaccttttggtcccttagtgcctgttttaactttcaaggattttgacgaagtagtagagagagcaaataataatgacctggga

SEQ ID NO: 213249 - DNA, 2626 bp, Unknown
  Bacterial polypeptide expressing nucleotide sequence isolated from the Sargasso Sea
gggtaagcagttcgttctcggccgcaccatgaaagaagcgctcaagaacagcgaagacaagcgtaaattaggttacacccactcctacgatatgctgggtgaagccgcgctgacgcgtaaagatgccgaaaaatactttacagattatgccaatgcgattaccgagttaggcgcgcaaagctataacgaaagtgaatcaccacgcccaacgatttctatcaagctgtcggcattgcacccacgttacgaagtcgctaacgaagaccgtgtattgaccgagctgtacgacacggttattcgcctgattaaactcgcgcgcgggttaaatatcggtatttctatcgacgccgaagaagttgaccgtcttgagctgtcattaaaactgttccaaaaactgtttaattctgacgccactaagggttggggcttactaggtatcgtggtgcaagcttactctaagcgcgccctgccagtgctggtatggttaacccgcctagcgaaagagcaaggcgacgaaattcccgttcgcttagtgaaaggcgcctactgggatagcgagctgaaatgggcacaacaagctggcgaagctgcttacccactctacacccgcaaagccggtaccgacgtatcttacttagcctgtgcgcgttacctgttatccgacgccacccgcggcgcgatttacccacaatttgccagccacaacgcgcaaacagtggcggccatttccgatatggcgggcgatcgtaaccacgaattccaacgcctacacggtatgggacaagagctgtacgacactattctgtcggaagcgggcgcgaaagcggtgcgtatctatgccccaatcggtgcccataaggatctgctgccctacttagtgcgtcgcctgctggaaaacggtgctaacacctcgttcgtacacaagctagtcgatccgaaaacccctatcgagtctttagtggttcacccactgaaaaccctgacaggctacaaaaccctggctaacaacaaaatcgttttacctaccgacatcttcggtagcgatcgcaaaaattccaagggactcaatatgaacatcatttcagaagcagagccattcttcgcggccttagacaaattcaaatcgacgcagtggcaagcgggccctctggttaatggtcaaaccttaactggcgagcacaaaaccgtggtgagcccattcgataccactcaaaccgtgggtcaagtggcctttgccaacaaagcggctatcgaacaagccgtgtcttctgctcatgcagctttcgcctcttggacccgtacgcctgttgaagtgcgcgcctctgccctgcaaaagctggcggatctgttagaagaaaaccgcgaagaactgattgccctgtgtacccgtgaagcgggcaagagcatacaagacggtattgacgaagtgcgtgaagccgtagacttctgccgctactacgcggtgcaagctaaaaagctgatgtcaaaacctgaactgctcccaggcccaacaggagagctcaacgaactcttcctccaaggtcgcggtgtgttcgtctgtattagcccatggaacttcccattagcgatcttcttaggccaagtatcggcggccctcgctgcgggtaacactgtggtcgcaaaacccgctgaacagacgtctatcattggttaccgcgcagtgcagttagcacaccaagcgggtattccaacggacgtgctgcaatatctaccaggcactggcgctaccgtaggtaacgcactgacggctgatgagcgcatcggtggcgtatgctttaccggttcaacgggcacagccaaactcattaaccgcacactggcaaaccgtgaaggcgcaatcattccgttaatcgccgaaaccggtggtcaaaacgctatggtggtcgactcgacttctcagccagaacaagtggttaacgatgtagtgtcttcatccttcaccagtgcgggtcaacgctgctcggcgctgcgcgtactcttcctacaggaagatattgcagaccgcgttatcgatgttctgcaaggtgcgatggatgagttagtgattggcaacccaagttcagtgaaaaccgacgtaggcccagtcatcgatgcgaccgcgaaggctaaccttgacgcccatatcgaccacatcaagcaagtcggtaagcttatcaagcaaatgccactgccagcgggctctgagaatggccactttgtagcgccaactgccgttgaaatcgactcaatcaaagtgcttgaaaaagaacactttggtccaatcctgcacgtgatccgttacaaggcatctgaacttgcccatgtgatcgatgaaatcaacagcacaggttttggattaaccttaggtatccacagccgtaacgaaggccatgccctagaagtcgctgacaaggttaacgtaggtaatgtgtacatcaaccgtaaccaaatcggcgcagtcgttggcgtacagcctttcggcggtcaaggtctgtcgggcacaggtccaaaagccggtggtccacactacttaactcgcttcgtgactgaaaagactcgcactaataacatcaccgctatcggtggtaacgccaccctgttgtcactgggtgatagcgaagaataa

SEQ ID NO: 213250 - DNA, 1669 bp, Unknown
  Bacterial polypeptide expressing nucleotide sequence isolated from the Sargasso Sea
gtaaataacttacttaatccagaagtaagtccagatgatctggcagaaaatccagttaaatctgtaaaaaaagctattgataaacttcaacatgaaaaaatcgtgaatccgtcagaaatcttctctccaagagtaaattcatctggatatgacttaagcgaacctgagaatctacttgacttaaaatctgaccttttgaagtgtgataatttaaaggttgaggcaaaaaacttttgtagcgaggttaatgattctaaaaatgagaaacgatattcaatagctaatggtaatgagatcgggagttgctcttttgcagatatagcaaatgagttaaatttcaaacaatgcagtgaatggaaaaatacttctgttatcgaaagagcagatatcttttataaaattgctgataatttagagaaagattctacaaaattcttatattacttaattcatgaagctgggaaaacatacaaagattcatatgatgaaattagagaggcggtcgattttcttagatattatgcagacaatgctaaaactcttttaagcgaatcaaataacctcaatggcccaacaggtgaatctaatcaactcttctaccaatcaaaaggtacttttgtgtgcattagcccatggaatttcccgcttgccatttttgcaggtcaaatagccgcggctcttgtaactgggaattcagttatatcaaagccttctgaacatactccaataattgcgaccatgatgattaaacttttttacaaaaacggtgttccaaagtctgctttaaaattaattcagggagatggttcaataggttcaaaactaatttcatttgatcatatttctggagttgcctttacagggtcctcagcaactgcaaagaaaattaacctccaattggcaaaaaaagatggtcccatctcttctttaattgctgaaaccggtggccttaatgcaatgtttatagattcaagctcacttcatgagcaggttgttgatgacataatgcgatcttcttttaatagcgctggacaaagatgttcagctttgagattagcaattattcatgaaagtatttttgatgatctagtagagatgattaaagatgcaatggctgaacttaccgttggtaatcccgaagacttccactgtgatttgggtccaattatcgatgaaagatcaagaaatatgcttcttgaatatatttcagaatgttcaaacaatgggtatctagtctttagccacaatcaagcgcctgatggtaattttatttcgccaactttaattgagttaaattcgattgatgatataaatgaagaaaaatttggaccgatacttcatgtcatcaaatataaaactgatgagcttgatcaaatcttaactgctcttaaaaataaacaatatggtttaaccatgggtgtccattctagaattgaatcaaaggcagatgacatcataaacaaatctattgctggaaatacttatattaatagggatattgtgggtgctgttgttggctctcaaccgtttggaggaacaggcttatcagggactggttttaaagctggtggcccaaactacttactccaatttgttgatgagagatcgataactaaaaatacagttgcttttggcggtaatgccgaaatactcaatttagaagactgat

SEQ ID NO: 213251 - DNA, 3166 bp, Unknown
  Bacterial polypeptide expressing nucleotide sequence isolated from the Sargasso Sea
atgttcaaagctacccaagtgcttgccgctgactatgttccctccgatctggccgccctgcgcgaagccatcacccagaactacgtggtggatgaaaatgcctatctggccgagctgtcggccatgctgccgggggatggcgcctcgctggaacgggtgacccagcgtgcccgcaccctggtaaccaaggtgcgcaaggagagcggctccggcgacggcatcgacgccttcctgcaggagtacagcctggatacccaggaggggatcatcctgatgtgcctggcggaggcgctgctgcgcattcccgatgccgagaccgccgatgccctgatcaaggacaagctctccggcgccaactggtcgtcccattttcgcaagagcgactccaccctggtaaacgcctccacctgggggctgatgctgaccggcaagatcatcaagctggacaagaagctggacggcaacccggccaacctgctgggccgcatggtcaacaagctgggggagccggtggtgcgctccgccatgtacgccgccatgaagatcatgggcaagcagttcgtgctggggcgcgacatgaaggaagccctcaaagcgagccgcaagtcccgcgagaagggttacacccacacctacgacatgctgggggagtccgccctgaccctggccgatgccgacaagtatttcggtgactaccagcgcgccatcgaggcggtgggcaacgagcgcatcagcgacggcggcccggccccttccatctccatcaagctgtcggcgttgcatccgcgctatgacgtggccaaccgcgagcgggtgctcggcgagatgtgcgagcggctggtgggactggtgcgcctcgcccgcgacaaggacgtggccatcagcatcgacgccgaggagatggaccgcctcgagctctctctcgatctgttcgaacagctctatcgctccgaggccaaccgtggctggggcaagctcggcatggtggtacaggcctactccaagcgcgccctgccggtgctctgctggttgaccgggctggcccgcgaacagggggacctgatcccggtgcggctggtgaagggcgcctactgggacagcgagctgaaatatgcccagcaggcaggcctgcccggctacccgctgtttacccgcaaggcgggcaccgacatctcctacctcgcctgcgcccgctacctgctgagcgagccgacccgcggcttcatctcgccccagtttgccacccacaacgccaataccgtggtcagcattctggagatggccggcgatcgccagtttgaattccagcgtctgcacggcatgggggaggagctgcacaacgccgtgctcagcgaatatcccggcctgcactgccgcatctatgcgccggtgggtgcccacaaggatctgctgccctacctggtgcgtcgcctgctggagaacggggccaacacctccttcgtccacaagctggtggaccccaacaccccggtcgattccctggccgagcacccgctgcgcaccctcaagcgctactccagcctggccaacgatcgcattccgcagccggtgaacctgttcagcgaccgcaagaactccagcggcgtcaacatgaacatcgtctccatccagcgtcccttcttcaccaagctgaaggagctggagagcaagcattggctggcagggcccatcgtcgatggggaaaccctcaagcgcaacgaagcccgcgtggtgttgagcccgcaggatgtgagccagctagtgggcaagatccactgggccgacgaacaggcggtggagcaggcgctggcctcggcccatgccgccttcccgcgctggcgcgagaccccggtgagcgagcgtgccgccgcccttgagaaactggcggatctgctggaagcgaaccgcgagcagttcatctccctctgtacccgcgaggcgggcaagctgctgcaggacggcatcgacgaggtgcgcgaggcggtggacttctgccgttactacgcggtgcaggcccgcggcctgatggggcaggccaccctgctgcccggctacaccggcgagatgaacgagctgttcctgcagggacgcggcgtgttcgtctgcatcagcccgtggaacttcccgctggcgattttcctgggacaagtcgccgcggcgctggccaccggcaacaccgtgatcgccaagccggccgagcagaccggtctcatcgcccacctggcggtgaccctggctcatcaggccggcattcccggtgacgtgctgcaactgctgccgggtgacggcgccaccgtgggcgccaagctgacggcggatgcccgcatcggcggcgtctgcttcaccggctccaccgagaccgccaagctgatcaacatgaccctggcccagcgtgatggcgccatcctgccgctcatcgccgagaccggcggccagaacgccatgatcgtcgactccaccgccctgccggagcaggtggtgcgcgacgtggtgagcgccgccttccagagcgccggccagcgctgttccgccctgcgggtactctacctgcaggaagagatcgcgccgcgggtgctggagattttgaccggtgccctgcaggagctcaaagtgggcaacccggccgagcacaacaccgacgtcggcccggtcatcgacgccgaggccaaggccgggctggatgcgcacctggtgcacatgattccgcgtgcccgtctgatcgcccaggcgccgatgccggccgtgaccctggggggccacttcgtgcagccgaccgcgctggagatcggctccatccgcgagctgacccgcgagcagttcggccccatcctgcacgtggtgcgctacgccgcccgggatctggacaaggtgatcagcgacatcaacggtaccggttacggcctgacgctggggatccacagccgcaacgaatcccatgccgaggagctggcgagccgcatcaacgtcggcaacgtctacatcaaccgcaaccagatcggtgccatggtcggggtgcagccgttcggcgggcaggggctctccggcaccggtcccaaggcaggcggcccccattacctgagccgtttcattaccgagaagacccgcaccatcaacaccacggcggtgggcggcaacgcctccctgctggcgatgggcgacgcctgat

SEQ ID NO: 213252 - DNA, 905 bp, Unknown
  Bacterial polypeptide expressing nucleotide sequence isolated from the Sargasso Sea
tatggaaaacaaaatatattggatttttggttttgtaggtatctactgggcttattgtattttttggggtattaagggagcccgaacatccaaaacctctgaagattattttgttgcaggaaggtcgattgggacctgggtgtttgtacttgctgctactgctactagtttttcagggtggacttttgtagggcatcctgggaaaattctaacggatggtttaccatatgcttttgcttctttttatgctcttactattccttttaccggagtgttatttttaagaaggcaatgggttcttgggaggacctttaactatataacaccaggtgaaatgtattcagattactatggtgggaatatcatccgagggcttaccgttctagttgcttttcttttctcagttccatacttgggtattcagcttcgtgcatctggagcgttgttcaatgtattaacagacgggatggtatcaacaaatatagggatgattttattatctacagttgtagttatatatgttgcctcgggaggtttgaaatcagttgcttatgttgactgtgcacaagcgatactccttgcgctcgggattgttatcttaggagtgattaccataagctttattggcggatgggatttatttatccttgggattggcgacttagtgaaaaatgatcttttaaatggtagccgcttaacattagatggttactcaaacagggtttctattcctggctccatacagtgggtgtcatctggatctttagcaacgggaggtgtatggacaggtatgatgtgtatgacatatatgtttgctcttatggggatacagtcatctccagctttctctatgtgggcatatgcaaataaaacctctaaaccgtttcgttggcaacaggtagttg

SEQ ID NO: 213253 - DNA, 897 bp, Unknown
  Bacterial polypeptide expressing nucleotide sequence isolated from the Sargasso Sea
tatgttaaataagagaaaattttacatagatggtcaatgggttgaaccagtaaaaaaaaatgatttagaggttattaatccatgcaatgaggatccatttgctattatttcattaggctcaaaagaagatacagataatgcagtaaaagctgcaaaaatagcctttgaatcttggaaaaatgttagcaaacaagaaaggttagatttactcgaaaaattattagctgtttataaaaaaagatttggagaaatggcagaagctatatctttggaaatgggtgcgccaatggattggtcaacagatgttcaaactgcatcaggacaaactcacttggaagattttataataagattaaaagaatttaaatttgatgaacactttgacaaaaaatcgaacaatcatatttattatgaaccaattggtgtttgtggattaatcactccttggaattggcctataaatcaaatagctcttaaagttgttccagcatttgcaacaggatgtacaatgattttaaaaccatctgaaattgctcctatatcagggatgttatttgcagaaatgattgatgaagttggttttcccaaaggtgtttttaatttagtgaatggagatggtgcaggagttggaacacatatatcaagccatcctgatattgatatggtttcttttactggctcaacaagagctggaagattaatttcaaaaaatgcagcagaaacaattaaaagagtttgtttagagcttggtggaaagggaggaaatatagtttttgcagatagttataaaaaagctgtcagagatggaatcagaaatgtaatgagcaactctggacagtcttgtgatgcaccaacaagaatgttggtagaaaaatcgatttatcaaagagctgttga

SEQ ID NO: 213254 - DNA, 546 bp, Unknown
  Bacterial polypeptide expressing nucleotide sequence isolated from the Sargasso Sea
gatgctaacagataaagagctgaaaatttatcaacgagatggtctcgtggtccctcactaccgccttgaccacaaaaccgtgcaaacattgagacaagctttagatatattattaaaaaataacccagacgccgaccaaaatattatgatttgccctcatttgaagtcatacggccctcaagctattcaaggtgatgccatatggctagacatagcaaaacgatccgacattttagatctaatatctcaagtggccgggaacgacatcattctttggggtacaactcttttcggaaaaccagctaacagcggacaaataattccgtggcatcaagatgctctccattggccaattgaacccaaagcaactaccaccgtttggatagctgttgacgaatgcaccaaggagaatggctgccttcgttttatacccggctctcatagatctcaaatgccgcatattgaaactagtaacttagatgaaggcaaaaatgcggctgttaagctcgttttagatcaagcaacagtctccgaaaattgtgctcg

SEQ ID NO: 213255 - DNA, 1150 bp, Unknown
  Bacterial polypeptide expressing nucleotide sequence isolated from the Sargasso Sea
agctcagaggaaattaaagtaattgatcctgctactgaagaaaattgtgctgtaattactttggggaacaagactgatgttgatattgctgttaatgcagccaaagacgcctatgagtcttgggctttttcttctaaagaagaaagaattggattattagaaaaactttatgaaaattataagaaaagatgggcagacattgcagaagctataactcttgagatgggtgctccaaaagattttgcaacaaaattacaagcaggtacaggtgcaagccatataaaatcatttattagatatttaaaaaattttgaatttgaaaaaccattaggagatcatgctcctaaccaaagattaatttatgaaccaaaaggtgtttgtgcattaataacaccatggaattggccgatgaaccaagtttgtttaaaagtaatgccagcaatagccgcaggttgctcaatggttttaaagccatcagaattagcaccactttcatcaatgatacttgctgaaattatagatgaagtaaaatttccaaaaggagtgttcaatttagttaatggtgatggagcaaaaacaggcgatgctctcacaagtcatccagatattaatatgatatcttttactggatcaacaagagcaggagctttaatttcacaaaatgctgctaaagattttaaaagagtaagcttagaattaggaggcaagggtgcaaatataatttttaaagatgccgatccagaagctattgaaagaggcgctttaagatgttttagaaattctggacaatcttgtaacgcaccgacaagaatgttagttgaaaaatcaatgtatgaagaagctattgagaggttaaaaaaatatactgagagttttgaggtgggtgatcctaaaaaagaaggagaacatataggtccagttatttcagaaactcattacaataaaatacaaactttaatccaaaaaggaatggatgaaggtgcaaaattagttgctggaggaataggtaaacctgatggattagacaaaggttactttgttaaaccaactgtttttgcagatgtaaataatgatatggaagttgcaagaacagaaatttttggacctggtttatctgttatcccttttgaaacagaagaagatgcaaata

SEQ ID NO: 213256 - DNA, 643 bp, Unknown
  Bacterial polypeptide expressing nucleotide sequence isolated from the Sargasso Sea
atgtcaataaaaattggaataaatggtatgggtcgaattggaagaatgatagtcagatctataattgagaacaattattcaaacattgaaattaaacatataaataatagatcaaactcagaaacctgttcaaatctattaaaatatgactctatacatggaaagttcaatgctgaaattaaatttaataataataatattactataaacaaaaagaaaatttcttatgggcgagagacagatttaaataatattaattggaaaaaatataatgttgattatgtttttgaatgcacaggtaagtttaattctaaagaaaaattattacctcatttaatgaatggtgcaaaaaaaattatagtatcagctccatgtaaaaatgcagataaaactattgtatttggagttaatgagaaagaaatcaaaaagaatgataatataatctcagctgcttcatgtacaaccaattgtcttgcacctgtagctcatgttttaaatgaaaattttgaaattgaaacaggtttcatgacaacaattcatgcatttaccagtgatcaaagaatattagataattctcataaagatccgagaagagcaagatctgcaagccaatctattgttccgacatctactggagcatcaa

SEQ ID NO: 213257 - DNA, 538 bp, Unknown
  Bacterial polypeptide expressing nucleotide sequence isolated from the Sargasso Sea
tgtttagccccagtcgttaaagtcattcatgaacagcttggcattaagcacggttccatcacgaccattcacgatctgaccaacacacaatctattttagataccccgcataaagatttacgccgtgcccgtgcatgtggcagcagtttaattccgaccaccacaggctctgccaccgccatcacagaaatattccctgaactgaagggtcgattaaatggccatgcagtgcgggtgccactggccaatgcgtcgttaacagactgcgtattcgaggtagaacgtgctaccacggcagaggaagtcaaccaactgctgaaaacagcgtcggaaaacgaactgaacggcattttaggctatgaagagcggccactggtctcggtcgattacaaaaccgatccgcgttcaagcatcattgatgccttgtccacgatggtagtgaacggcactcaggtcaaaatttatgcctggtatgacaatgaatgggggtatgcgaaccgtactgtggaattagcccggatggtgggaaaagcataag

SEQ ID NO: 213258 - DNA, 208 bp, Unknown
  Bacterial polypeptide expressing nucleotide sequence isolated from the Sargasso Sea
tttaacaaattatattcaaagccaagactctgaaaaaattagaagacttgctagaaaactaagatctggaatggttgatgtaaatggtgcaggtattgctgttgatgcaccctttggtggctttaaacattctggtattggaagagaagcaggtaaagaaggtctgctcgaatttttagaagtaaaatcagttggtggttggagttaa

SEQ ID NO: 213259 - DNA, 333 bp, Unknown
  Bacterial polypeptide expressing nucleotide sequence isolated from the Sargasso Sea
ttagatggtacagctgtcagagttccactcctaatgtctccatgattgatttggtattcaattctaagaaaaaaatagatgctaatacgataaataatgccatgattaaagcttcgaaaggtgaattgaaaggagttcttggggttgaagacaagccattggtttcaatagattataatcacaacccgttaagttcgatttttgatctttcacaaacacaagttattaaaggaagactaggaaggatattaagctggtacgacaatgaatggggttttgccaatagaatgggtgacacagcttctcttattggaaaactaataaaatcataat

SEQ ID NO: 213260 - DNA, 919 bp, Unknown
  Bacterial polypeptide expressing nucleotide sequence isolated from the Sargasso Sea
atggttgataaaaaagatataaattttcagtctactgaaagacaaaaacgtatattacctgaagattcatttggagattggaagtggagagaagctttagctgagcttatggtacctttgattggaacattatatagaaatggcataaatataatgatttatggtaagtcgctagttaatgaatcaccagtagcaattatgaaggcacataggtttgcaagacaggttgataataatgaattaagcgaatttgaaacatatccaatgattgaatacatttcaacattagatcttaaagattgtgagatagacataggtgaagtggctgtaaaatgtcctttttttaatgaaataaaagatgatcaatcaaaaatatctaattatatcaatgaagaattaaaaacagttatcaatattaattcagatagaccaaaagaaccaaaaaatattgtcttgtatggctttggaagaattggaagacttgttgctagaatgatgacgcaaacaactggaccaggaaattactttcttcttaaagctattgtaataagaaaaggttcagatgatgatatatataaaagagcaagtttattaactagagattcagtacatggtccattcgatggcactgttagagttgatgaaaaaagttcatcattaattattaatggaaatcctgtaaaagttatttatgcatcgggtcctgaaagcatatcttataaagatcttggtattactaatccaattgtcatagataacacaggtgtatggagagacgaagagggtctatcaaagcatattaaatcaggagcagataaagtaattttaactgctccggctaaaggcaatttaaaaaatattgtttatggaattaatgatgatattttagatgatgaagataatattatttcagcagcat

SEQ ID NO: 213261 - DNA, 592 bp, Unknown
  Bacterial polypeptide expressing nucleotide sequence isolated from the Sargasso Sea
aatgatcgacacgcgcaatttttacatcgacggcgcctgggtggcgccgctcgagggaacagaccttccggtgttcaatccggccaccgaagagcccttcgccaccatctcgctaggcggggccgccgatgccgaggcggcaatcgcggcagcgcggcggacattcccgtcctggtcgatgacgacccctgcggagcgcggcgaggtacttcgcgccattctcgcggtctatgaggcgcgagctgccgacatggccgaggcgatctcgacggaaatgggcgcgcccatcgacatggcgctcagcgaccaggcaggtgccggccgcagccatctgaaagcgttcattcgcgcgctcgatgcgtttgagtggcagcgcccgatgcgccccggcacggaaggtcaggatctggtgttcgaggcggcgggtgtcgccggcctgatcaccccctggaactggccgatgaaccaggtcgtgctgaaggttggcgcggcgctggcggccggatgcacgatggtgctgaaaccgtcggaaatcgccccgatgtccagcatcctgtttgccgaaatcatgcatgaggctggtgttcccgcc

SEQ ID NO: 213262 - DNA, 1016 bp, Unknown
  Bacterial polypeptide expressing nucleotide sequence isolated from the Sargasso Sea
aatgaattcaattgagcattttatcaacggtaaaactgtaaaaggttcatccaaaagaacagcaaaagtatttaacccagctacaggcgaggtaagttctaatgtaaatttagcaaacactaatgatttaaataaagctgtggatgcagcaaacaaagcctttactagttggtctcaaaaaactcctttattccgagctagagtcctttttaaatttaaagaattgatcgaaaaaaattatgatgaacttacaaaaattattgtttctgagcatggaaaagtttatgacgatgccagaggttctttaacgagaggcctagaagttgtagaatttgcttgtggcatcccacaattacttaaaggtgaatttacagaaaatgttggtacaaatgttgacagctggtctatgagacaacctcttggagtttgtgcaggtattacaccttttaattttccagcaatggtacccatgtggatgtttcctatcgcaatagcttgtggaaacacttttgtgctgaaaccatctgagaaagacccatcttgttcaatgaaactagcagaattatttttagaagccggtcttcctcctggtgtttttaatgttgtaaatggagataaagaggctgttgatgcgattattaataacaaagatatttctgcagtaagtttcgttggttcaactcctatagccaaatatatttatgaaaattgtgcaaaaaatgagaagagagtccaagcattaggaggtgcaaaaaatcattgtgtcgtaatgccagattgtgatttagagcaagcagtaaatggtttgatgggtgcagcctatggatctgctggtgaaaggtgtatggcacaatcagttgctgtagctgtagggaaaattgctgaccccttagtaaaaagtttatccaaaaaagttgagtctcttaagattggtccaggattagataagaaatctcaaaagggaccattggttactaaggagcatttagaaaaagtgaaaggttatgtagatatgg

SEQ ID NO: 213263 - DNA, 381 bp, Unknown
  Bacterial polypeptide expressing nucleotide sequence isolated from the Sargasso Sea
caacctcaacaggtgcatcaaaagcaattgatgagattataccttcacttaaaggtaaattagaaggtgtggccatgagagtccctacgcccaatgtttcattaattgaattcgtcttttgcacaaaaaaagatgttactattgataagattaatttagcatttcaaaattttagcaaaaaaaataaaattcttaaaactacaaaagaaaaacttgtttcaatcgactttaatcataatcctgcttcttcaataatagacgaaagcttgacaaaagtggtgagtaaaaatatgggtaaaatttcagcctggtatgataacgaatggggtttctcaaatagaatgtgtgatattgtagaatatcttcataagaattcttaat

SEQ ID NO: 213264 - DNA, 241 bp, Unknown
  Bacterial polypeptide expressing nucleotide sequence isolated from the Sargasso Sea
gcaataaaaattgcaaacgatacttcttatggattaacaaattatattcaaactcaagatcctgaaaaagtgaagagagtcgcaagaaaattaagatctggaatggtagatgtaaatggggcaggtattgcagttgatgcacctttcggaggttttaaacattctggaattggtcgtgaggcaggtgagcatggacttgaggaatttttggaagtaaaagccgtaggtggttggagttaat

SEQ ID NO: 213265 - DNA, 1012 bp, Unknown
  Bacterial polypeptide expressing nucleotide sequence isolated from the Sargasso Sea
atgctcgatagaaaaaatttttatataaatggagaatggagaaagccatcaaaaccaaataattttgatgttatcaatccttctaatgaaaagccttttgctacaatttcacttggatctaaagaagatgtagattttgcaataaattcagctaaaaaatcttttaccaaatggagtgaaactacaaaagaaactagaataaatcttttagagaaactattaaaaatttataaaaaaagatttaatgaaatggctgagtctatgtcgatggaaatgggtgcccctattgactatgctacttcagttcatgctgcttcaggacaatcccatcttgaagactttatattgagattaaaagaatttaaatttgaaaaacattttgatgaaaaatcaaataatcatattgctcttgagccaataggagtttgcggtctaattactccatggaactggcctataaatcaaatagctttaaaagttatccctgcttttgcgactggatgtacaatgatattaaaaccttctgaaattgctccaatatcagcaatgttatttgctgaaatgatagacgaagcaggttttcccgcgggagtttttaatttagtaaatggtgacggcgcaggtgttggaactcatatttcgggtcatcctgatgttgatatgatttcatttacaggatcaacaagagcaggaaaattaattacaaagaacgcagcagatactatcaaaagagtttgtttggaattaggaggcaaaggtggaaatatagtttttgctgactcagctcctaacgcagttagagatggcattaaaaatgtaatgagtaattctggtcaatcttgtgacgcaccgacaagaatgctggtagaaaaatctatttataaaagagcaattgatgaagctgcagatgaggcaaataaaattaaagttgatattgcatcaaaaaaaggtgagcacataggtccggtggtttcaaaaattcaatatgataaaataattaatttaattaata

SEQ ID NO: 213266 - DNA, 1444 bp, Unknown
  Bacterial polypeptide expressing nucleotide sequence isolated from the Sargasso Sea
atgtacgaaaaatttggacaattcattgatgggaagtggcaacaagcagaaaaaaaagaaacatacgacgtaatcaaccctgcaacagaagaagtaattggaaaagcatcaaaagcttcatctattgaagtacaaaaagcattaaagtctgcagaaaaaggtttggaagtttggaaaaatactgcgccatggcaaagagcttatgtacttagaaaaattgcagacatgatgagagagaaaaaagatgtaatagcaaaatggttaactcttgaagttggaaagcctcttgcagaagctgttggtgaagtaggtggtggagctgatatttttgagtggaatgctgaagaaacaaaaagaatttatggtcaaacacaacaaagtagatttccagatactagagttcatgtttactatcagcccgtgggagttgttgcagctttagttccttggaatttcccaattgttttagcatctagaaaaatttctactgccctagctgcaggatgttcggtaatttgtaaaccagatgtaattactcctggcgctgtaatggaattagtaaatatttgcaaagaggcaggtgtaccagatggtgtcgttagtcttttgtcaggcgatcctgctgaaatatcaaatgaattaatggagtctgatataattaaaaaagtttcagttactggatcaactagagttggtaaaattattttaaaaaaagcagctgataaagtccagagagttactatggaacttagcggacactctccttttattgtgtgtgaagatgtagatatgaacaaagtagctgatatagcaataactggtaaatttagaaataacggtcaggtctgtatttcacctaatagattttatatccaagaaaatagaaaagaggattttgttaatgcctttattgaaagggcaaaaaaattaaaaattggaaacggtatggacgaaggtgtagatcttggacctttaactaccgctaaaagattggaagaaatagaaaaactagttgaaactactaaaaaagaaggagcaaaagtattaatgggtggacaaagaccttctggtttcaacaagggatactattatgaaccaacagtctttgatgatgttaaagataattttacaatcatgaaagaagagccttttggtccactagttccaattttaacttttaaaacttttgatgaagtaattgaaagagcaaatgataatgacttaggattatgtagttatttatacactaactctatggataaagctcacattggatctgagaaattagagtctggttgtgttgcagttaacactggagttgttgctattgctgaggcaccttttggaggaataaaacaaactggttatggtcgtgaaggtggttcaggagcgattaaagattatctaaatgtgaaatacactcacatgggattaaaaatctaga

SEQ ID NO: 213267 - DNA, 286 bp, Unknown
  Bacterial polypeptide expressing nucleotide sequence isolated from the Sargasso Sea
tcccgtgctatcagttcttgaatatgaggatcaagaagaagcaattaaaattgcaaatgatactgagtatggtttaggtgctggagtttttacaaaagatcttaaaaaagcatcttggactgcaagcaaattagaatctggtcaagtatatgtaaataaatggttcaccggaaatcatgcaacaccttttggaggctataaacaatcagggtatagccgtgaaaaaggagttgatggacttaaatcttatcttcaagtcaaaaatgttggaattagtttaggttaa

SEQ ID NO: 213268 - DNA, 166 bp, Unknown
  Bacterial polypeptide expressing nucleotide sequence isolated from the Sargasso Sea
gtttcaaaagattttaatcatgattcacacagttcaatatttgacgttacccaaactcaagttgttaaaaataaatttagtagagtactatcttggtatgataacgaatggggtttttcaaatcgtatgtgtgatacatcaatacaaatatcaaaacttatttaat

SEQ ID NO: 213269 - DNA, 720 bp, Unknown
  Bacterial polypeptide expressing nucleotide sequence isolated from the Sargasso Sea
tatgattgaaaaaaaacaattttacataaatggcaaatgggtagaccctattaacaaaaatgaattagaggttatagatccatctaatgaagaagtatgtgctgttatttctttaggcgattcagaagatacaaacttagctgttgaatctgcaaaaaaagcttttcctatgtggagtagcacttcgaaagaagagagaataaaactgcttgaaaacctttacgaaatttacaaatcaagatggaataaaatggctgagtcaatttcgcttgaaatgggcgctcctattgattggtcaattgaggagcaaagttcttcaggcgctaatcatataaaaaatttcattaaaactctaaaaaactttgaatttgaatctgcatttaattcagaatccaataatcatattacttatgagcccatcggagtatgtgcattaattacaccatggaattggccgattaatcagattactttaaaagttattcctgctctggcagctggatgtactatggttttaaaaccttctgaaattgcaccattatctgcaatagtatttgcagagatgattcatgatgcaggctttcctccaggtgtttttaacttggtcaatgggaatggagatggtgtaggcactcaattagcaaaacatactgatattgatatgatttcttttactggctctacaagagcggggaaattaatttcaaaaaattctgcgga

SEQ ID NO: 213270 - DNA, 1444 bp, Unknown
  Bacterial polypeptide expressing nucleotide sequence isolated from the Sargasso Sea
catggaatttaatcaagatattaagttactcattgatggaaaatggatacaatcttcagagagagattcattgcctttaattaatccagcaacagaagaaattttatcaaatgtaccaattgcaaatgataaagatttggataattcgctaatatcttcacataaagcttttaaaatatggagtaaatttccaccacttaaaagacaatcgatcatgcttaaagctgtagagataattaaaagcagacaagaggaaattgcgaaaactcttactatggaaatgggaaaaactcttagagagtcaagacaagaaattaatcaggttattgaaactacagtctggtgtgctgaagagggtaaaagaacttatggtagaattataccttcaagagatagtcaagcaaggcaaatggtttttaaagagccaataggtccagttgttgcatttgttgcttggaactttccgggtggaaattttataagaaaggttgcatctgctttagctgcaggttgcacaataatcataaaaccaagtgaagaaaccccagcaacggcagttgctcttggcgaatgttttatggaagctggtttgccatcaggtgttttaaatattatctttggaataccagacaaaatttcacgctatttgctcgaatcaccaattccaaaagccgttacctttactggctcagttgaagttggaaagcatcttcaatcgttatcttcgaacactttaaaaaaatgcaccctagaattgggaggtcatgcaccagtaattatttgtgatgatgtggatgttgataaagttcttgcaaaaattgcaccatggaagtttagaaattctggccaagtttgcatttctccttcaagattttttgttcaagatgaaatatacaaaaaatttgtagatggttttgtaaatattgcgagacaaataaaactgggtaatgggttagaagatagtactgatatgggtcctttgatatttgagaaacagttaagaaaaatggaaattttagttgaagatgcaaaatcaaagggatcaagtattaatttaggtggaaaaaaaattggtaataaaggttatttttatgaacctaccgttttaactaatttatcctccaaatctagagtgttaaatgaagaaccttttggacctttagttccaatattgccatttaaaaatattgaggaggccactgaaaaatcaaattcattgtctgttggtttggcatcatatgttttcactgagaaccaaaaaaacgcacattttttaggtagtaatcttaatgtaggaattgtatgcgtgaatcatactatagtctcagttccagaagcaccttttggtggtgtagatgagtcaggatatggaaaagaaaatggtatagaaggattagaatcatttttgaaaacgaaatatatttctgaaataccttctatttag

SEQ ID NO: 213271 - DNA, 1426 bp, Unknown
  Bacterial polypeptide expressing nucleotide sequence isolated from the Sargasso Sea
catgaacacaattgcttcgaaccaggtccccaccgtcaagctgctgatcaatggcgagttcgtcgaatccaaaaccaccgagtggcgcgacatcgtcaatccggccacccaggaggtcctcgcacgcgtgccgttcgctaccgcgaatgaagtgaacgaggcgatccagtcggcgcacactgcgttcaagacgtggaaggacacgccggtcggcgcgcgcatgcgcatcatgctgaagtttcaggcgctgattcgcgagcattcgccgcgtatcgcgaagaccttgagcgccgagcagggcaagacgattcccgacgcggaaggcgatattttccgcgggcttgaagtggtcgagcacgcctgctcgatcggcaccttgcagcagggcgaattcgccgagaacgtcgcaggcggcgtggacacctacacgttgcgccagccgatcggtgtatgcgccggcatcacgccgttcaatttccccgcgatgatcccgttgtggatgttcccaatggcgatcgtctgcggcaatacattcgtgctgaagccttccgagcaggatccgttgtcgacgatgcaactggtcgaactggcgcttgaagccggcgtgccgaagggcgtgctgaatgtggtgcacggcggcaaggacgtcgtcgacgcgctctgcacgcacgatctggtgaaagcgatttccttcgtcggttcgacggcggtgggcacgcatgtttatcgccttggcagtgaacacggcaagcgcgtgcaatcgatgatgggcgcgaagaaccacgcggtggtgctgcccgatgcgaatcgcgagcagaccttgaacgcgctggcgggcgccgggtttggcgcggcgggacagcgttgcatggcgacttcggtggtcgtgctggtcggcgcggcgcagcaatggctgcccgatctcgtcgcgaaggcgaagacgctgaaggtcaacgcgggtagcgagccgaataccgacatcggcccggtggtttcgcgcaccgcgaagcagcgcattctcggcctgatcgaacagggcgtgaaagagggcgcgacgctcgcgctcgacggccgcgacgtgaaggtgcccggctatgagcaaggcaactttatcggcccgaccgtcttcaccgacgtcaccaccgacatggagatctaccgccaggaaattttcggcccggtgctggtggtgctgaatgccgcgacgctcgacgacgcgatcgcgctcgtcaaccgcaatccgttcggcaacggcgtgggtctcttcacgcaaagcggcgcggcggcgcgcaaattccagagcgagatcgatatcggccaggtcggtatcaacattccgattccggtgccggtgccgttcttcagctttaccggctcgcgcggctcgaaactcggcgacctcgggccgtacggcaaacaggtcgtg

SEQ ID NO: 213272 - DNA, 1516 bp, Unknown
  Bacterial polypeptide expressing nucleotide sequence isolated from the Sargasso Sea
gatgaacgcgaattcgaaagacgtgccgacggtcaagctgctgatcgacggcgccttcgtcgagtccgccacgaacgagtggcgcgacatcgtcaacccggcgacgcagcaggtgctcgcacgcgtgccgttcgcgaccgtcgcggaagtcgacgcagccgtgcaggccgcgcacaccgccttcgcgacgtggaagaacacgccgatcgccgcgcgcatgcgcatcatgctgaagttccaggatctcgtgcgcacgaaccagcagcgcatcgcgaagacgctgacggccgagcagggcaagacgattcccgatgccgaaggtgacattttccgcggcctcgaagtggtcgagcatgcgtgctcgatcggttcgctgcagctcggcgaattcgcggagaacgtcgcgggcggggtggatacctacacgctgcgccagccgctcggcgtgtgcgcgggcatcacgccgttcaacttccccgcgatgattccgctatggatgttcccgatggcgatcgtctgcggcaatacgttcgtgctgaagccgtcggaacaggatccgctgtcgacgatgcagctcgtcgagctcgcgatcgaggccggcgtaccgaaaggggtactgaacgtcgtgcatggcggcaaggaagtggtcgacgcgatctgcacccatccgctcgtgaaggccatctcgttcgtcggttcgacggcggtcggcacgcacgtgtacaacctcggcagcgcgcacggcaagcgcgtgcagtcgatgatgggcgcgaagaaccacgcggtcgtgctgcccgatgcgaaccgcgagcaggcgatcaacgcgctcgtcggcgcgggcttcggcgcggccggccagcgctgcatggcgacgtcggtcgcggtgctcgtcggcaacgcgcgcgactggctgccggacatcgtcgcgaaggcgaaggcgctgaaggtcaatgcgggcgcggaagccggcacggacgtcgggccggtcgtgtcgaaggccgcgaaggaacgcatcctgtcgctgatcgacgcgggcgtgaaggaaggcgcgaagctcgaactcgacggccgcgacgtgaaggtggccggctacgagcagggcaatttcgtcggcccgacgatcttctcgggcgtgaagacgaacatgtcggtctacacgcatgaaatcttcggccccgtgctggtcgtgatggaagccgacacgctcgacgacgcgatcgcgctcgtcaacgcgaacccgttcggcaatggcgtcggcctgttcacgcagagcggcgcggccgcgcgcaagttccagagcgagatcgacgtcggccaggtcggcatcaacatcccgattccggtgccggtgccgttcttcagcttcacgggttcgcgcggctcgaagctcggcgatctcggcccgtacggcaagcaggtcgtgcagttctacacgcagaccaagacggtcaccgcgcgctggttcgacgacgacacgacggccggcccggtgaacaccacgatccggctgcactga

SEQ ID NO: 213273 - DNA, 1504 bp, Unknown
  Bacterial polypeptide expressing nucleotide sequence isolated from the Sargasso Sea
atgggtaatattggtcattacattaatggaaataatgttgaaggtaaatcaggtttaaataaaccagtatttaacccagccacaggaacttcggaaaaaaatgttgatttagcgtcagttgaagaagtcaaccaagctgtagaaaattcaaagtctgcttggaaagaatggtctaaccagccaccgctgaggagggcaagagttctagataaatttaagtatattttagaccaaagacgagaagaattagcaaaatgtataagcagtgaacatggcaaaactcatgaagatgcccttggtgaagtaacaagaggactggaagttgtagaatttgcagttggtgcaccgcatttgctcaaaggtgactacacagaaaatgtaggttcggaagttgatagtttcaatgttaggcaatcactaggcgtggttgcaggaattactcccttcaactttccagcaatggttccaatgtggatgtttcctgtagcattagtttgtggaaattgttttattttaaaaccatctgagagagatccttctccatctttattaattgctaaatggctttctgaagctggattaccagatggtgtatttaatgttgttcaaggagacaaagtagcggttgatgcaatacttcaccataaagatgttaaagctgtaagttttgtaggctcaactcctatagcaagatatatttacactacaggaacatctactggtaaaagggttcaagcgctcggcggtgccaaaaaccacatggtaattatgccggatgcagatttagatatggctacaaacgcattaatgggtgctgcatttggttctgctggcgaaagatgcatggctatctcagttgctgttcccgttactgataaagttgcagatgcacttgtagaaaaattagtaccaaaaattgaagcattgaaaattggtccttcagttgatccaagtgcagaaatgggacctcttataacaagtgagcatttaaacaaagttacaggttatatagatgaaggtgttaatgaaggtgctaaactagtagtcgatggacgcaataccaaaccttcaatgcaaggatatgagaatggatattttattggcggatctctttttgataatgttacaaaagatatgtcgatatataaaaatgaaatttttggtccagttttatcagttgtaagagcacaagactataattctgctgttgaccttattcatggtcatgaatatgcaaatggggttgctgtctttactagagacggagatgtagcaagagggttttcaaatgaaattgaagtgggaatggttggcgtcaatgttccaattccagttccaatggctttccatagttttggaggatggaagtcttcactttttggagaccatcatatgcatggaatggaaggtgttagattttacacaagattgaaaaccacaacagtaagatggcctcgaggacaaagatcagaccctcaatttactatgcctacactaggctagt

SEQ ID NO: 213274 - DNA, 871 bp, Unknown
  Bacterial polypeptide expressing nucleotide sequence isolated from the Sargasso Sea
aatgacatctccaaaaattaatttttctcctaaaggactattcatcggtggcaaatgggttgacagttataaaggggagagattttcaacgataaacccttccaacggtcaacatcttggcgaagttccacttgctgaaaaagaggatgtcaatcgtgcggtgattgccgctaagcaagcatttcatgactgggggaaaatgccattgaaggagcgtgctggttttctgataaaactggcggacaaacttttggagaacagagatgaactagggatgatggattgcgtggattctggaaatgcactcaacggcatgaaaggggatgttgattggtcttcagattcactgaaatattttgctggtcttatttcggaaataaaaggagaaacattttctgaaaaacctggtcatttaaatttcactagaagacaaccatatggtgtcgtagctaaaatcaatccctttaatcatcccttacgattttgtgctgaaaaatctgcagcggccctggctgcaggaaataccgtcattgtgaaagcttctgaacaggctccattgtcgagtcttcgctttgcagagatttgtgaagaaattttacctgaaggagtcgttaacgtccttacaggagatgcagtttgtggagatgcaatggttcgacatgaggatgtccgacgagttggagtcgtaggatccgtttctacagggaaaataattgctaaagcagcggctaaagatttaacccatgtatcattggaattaggaggaaaaaatccaattattatttttccagatgccgatcccaaaaaagcagccaattttgctgttaaggggatgaatatgaaccgccaaggacagtcttgtagttcgact

SEQ ID NO: 213275 - DNA, 1444 bp, Unknown
  Bacterial polypeptide expressing nucleotide sequence isolated from the Sargasso Sea
atgtatagtaactttggacaattcattgacggtaaatggcaacaagctgaaaaaaaagaaacatatgatgtgattaaccctgcaacagaggaagttataggcaaagcatcaaaggcttcttcagttgatgtacaaaaagctctaaagtctgcacaaaaagggttggaagtttggaaaaatactactccgtggcaacgatcctatgtaattagaaaaattgcagacttaatgagagagagaaaagatgttttagcaaaatggttaaccttagaggttggtaagccattatctgaaggagctggtgaagttggtggtggagctgatatttttgaatggaatgcagaggaaacgaaaagaatttatggccaaacagttcaaacaagattcccagatacaagagctcacatttattatcagcctgtaggtgttgtggctgctttaattccgtggaattttccaataattttagcttctagaaaaatttctactgctttagctgcaggatgctcagtaatttgtaaaccagatgtaattacacctggtgcagtgatggaattagtaaatatctgtaaggaagcaggcgtaccagatggtgtagtaaaccttttatctggagatcctgcagaaatttctaatgaattattagagtctgacataattaaaaaagtttctataactggatcaacaagagtaggaaagttaattttaaaaaaagcagctgataaagtccaaagagtaacaatggagctaagtggtcactctccatttattgtatgtgatgatgtagatattaataaagtagcggacatcgctattggtgcaaaatttagaaataatggccaggtctgtatctcgcctaatagattttacattcaagaaaacagaaaagatgagtttgttggagcctttatggatagagctaaaaaattaaaaataggtaatggaatggatgatggagttgagctcggtcctttatctactgcaaaaagactagaggaaattgaaaaattggttgaaacaactaagcaagaaggtgcaaaagttttaatgggaggtaaaagaccttctggttttaataaaggatactactatgagccaacagtatttgatgatgtaaaagataactttactataatgaaggaagaaccttttggtccgcttgtccctgttttaacttttaaaagttttgacgaagttattgagagagcaaatgataatgatcttggtttatgtagctatctttatacaaattcaatggatcaggctaatagaggttcagaaatgttagaatcaggttgtgttgcagtaaatactggtgctgttgcagttgctgaggctccatttggagggataaaacaaacaggttatgggcgtgaaggtggttccatggctataaaagattatttaaatgtcaaatatactcatatggctcttaaagtttaga

SEQ ID NO: 213276 - DNA, 3076 bp, Unknown
  Bacterial polypeptide expressing nucleotide sequence isolated from the Sargasso Sea
ttgtcagagctaatcaaactagtgccctccagtgatgaagccatcgagcgcgtcactcgtcgtgcccacgaactggtcaacaaagttcgtcaattcgataagaaaggtttaatggtaggtatcgacgccttcctgcagcaatacagcttagaaacacaggaagggattatcctgatgtgtttagccgaagccctgctgcgtattcccgatgcggccacggccgacgccttaattgaagataaactctcaggcgcaaaatgggatgaacacttaagcaagagcgattcggtactggttaacgcctccacttggggcctaatgctcactggcaaaatcgtcaaactcgataaaaaaatcgatggtacgccaagcaacctgttaagccgtttagtgaatcgtttaggtgagcctgtgatccgccaagccatgatggcggcgatgaagatcatgggtaagcagttcgttctcggccgcaccatgaaagaagcgctcaagaacagcgaagacaagcgtaaattaggttacacccactcctacgacatgctgggtgaagcagcgctgacgcgtaaagatgccgaaaaatactttaacgattatgccaatgcgattaccgagttaggcgcgcaaagctataacgaaaacgaatcaccacgcccaacgatttctatcaagctgtcggcactgcatccacgttacgaagtcgctaacgaagaccgtgtactgaccgagctgtatgacaccgttattcgcttaattaagttagctcgtggtttaaatatcggtatttctatcgacgccgaagaagttgaccgcctcgaactgtcattaaaactgttccaaaaactgtttaacgctgacgctactcagggttggggcttactcggtatcgtggtgcaagcttactctaagcgcgccctgccagtgctggtatggttaacccgcctagcgaaagaacaaggtgacgaaattccagttcgcttagtgaaaggcgcttactgggatagcgagctgaaatgggcacaacaagctggcgaagccgcatacccactctacactcgtaaagccggcaccgacgtttcttacttagcctgtgcgcgttacctgctatctgacgccacccgcggcgcgatttacccacaatttgccagccacaacgcgcaaaccgtggccgcgatttctgatatggcgggcgatcgtaaccacgaattccaacgtctacacggtatgggacaagagctgtacgacactattctgtcggaagctggcgcgaaagcggtgcgtatctacgcccctatcggtgcccataaggatctgctgccctacttagtgcgtcgcctgctggaaaacggtgcgaacacctcgttcgtacataagctggtcgacccgaaaacccctatcgagtctttagtggttcacccactgaaaaccctgacaggctacaaaaccctggctaacaacaaaatcgttttacctaccgacatcttcggtagcgatcgcaaaaattccaagggactcaatatgaacatcatttcagaagcagagccattcttcgcggccttagacaaattcaaatcgacgcagtggcaagcgggccctctggttaatggtcaaaccttaactggcgagcacaaaaccgtggtgagcccattcgataccaccctaactgtgggtcaagtggcctttgccgacaaagcggctatcgaacaagctgtcgcctctgccgatgcagccttcgcaacttggactcgtactccggttgaagtgcgcgcctctgccctgcaaaagcttgctgatctgttagaagaaaaccgcgaagaactgattgctctgtgtacccgtgaagcgggcaagagcattcaagacggtatcgacgaagtgcgtgaagccgtagacttctgccgctactacgcggtgcaagctaagaagctgatgtcaaaaccagaactgctcccaggcccaacgggtgagttgaacgaactcttcctccaaggtcgtggtgtgttcgtctgtatcagcccatggaacttcccattggctatcttcttaggccaagtatcggcagccctcgctgcgggtaacactgtcgttgctaaacctgctgaacagacttctatcattggttaccgtgcagtgcagctcgctcaccaagcaggtattccaacggacgtgctgcaatatctacccggcacaggcgcgaccgtaggtaacgcactgacggctgatgagcgcatcggcggcgtatgttttaccggttcaacgggcacagccaaactcatcaaccgcacactggccaaccgtgaaggcgcaattattccattaatcgccgaaaccggtggtcaaaacgctatggtggttgactctacttctcagccagaacaagtggttaacgatgtagtatcttcatccttcaccagtgcgggtcaacgctgctcagctttacgtgtactgttcctacaggaagatatcgcagaccgcgttatcgatgtactccaaggtgcaatggatgagttagttattggcaacccaagttcagtgaaaactgacgttggcccagttatcgatgcgaccgcgaaggctaaccttgacgcccatatcgaccacatcaagcaagtcggtaagttgatcaagcaaatgtctctgcctgctggtactgagaatggtcactttgtgtcaccaaccgccgttgaaatcgactcaatcaaagtgcttgaaaaagaacactttggtccaatcctgcacgtaatccgttacaaggcagctgaacttgcccatgtgatcgatgaaatcaacagcacaggctttggcttaaccttaggtatccacagccgtaacgaaggccatgccctcgaagtcgctgacaaggttaacgtaggtaacgtgtacatcaaccgtaaccaaatcggcgcagtcgttggcgtacagcctttcggcggccaaggtctgtcaggcacaggtccaaaagccggtggtccacactacttaactcgcttcgtgactgaaaaaactcgcactaacaacatcaccgccatcggtggtaatgcgaccctgttgtcactgggtgatagcgaagcctaag

SEQ ID NO: 213277 - DNA, 701 bp, Unknown
  Bacterial polypeptide expressing nucleotide sequence isolated from the Sargasso Sea
aatgtattcaaaatttggtcaattcatacacggtaaatggcagccttctgaaaaaaatgaaacatacgatgtcataaatccagctacagaggacgtaattggaaaagcatcaaaagctacaaaagtagatgttacaaaagcattaaaatcagctgaagaaggctttaaggtttggaagaaaactccgccatggcagagatcatataaaattagaaaaattgcagacctcatgcgagaaagaaaaaaagaacttgcaaagtggttagctcttgaggttggaaaaccattagttgaaggtgaaggtgaagtagggggtggagcagatatttttgaatggaattctgaagaaactaaaagaatatttggccaaactgttgaaagtagatttgaaaataccagagtacaggtcaattaccaaccagtgggagttgttgctgcattaatcccatggaactttccaataattttagcttctcgaaaaatttcaacagcattagctgcgggctgttctgttattgtaaaacctgacgtaataacacctggagctgttatggagttaatgaatataattaatgacgctggtattcctccaggagttgttaatcttttatctggagatccagaagaggtgtctaatgaattaatttcatcaaatattattaaaaaagtttcaatcacaggatcaactagagtaggaaaat

SEQ ID NO: 213278 - DNA, 897 bp, Unknown
  Bacterial polypeptide expressing nucleotide sequence isolated from the Sargasso Sea
aatgacaataaaaattggaattaatggaatgggtagaattggaagaatggtgcttagggcaattatagaaagcaagaataaaaatataataataaaacacattaacaatagaactaatgtagaaataacttctaatcttttaaagtatgattcaattcatggaaaatttgcttcaaatatttcatttaatagaaacaatttgataattaacaaaaataaaatttctttttcacaacattctaatattgaagaaataaaatggaaaaaagttggagttgattatgtttttgaatgtactggaaaatttaattcaaaagaaaaattattaagccatattaagaatggtgcaaaaaaagtaatagtttctgcgccttgtaaaaacgcagataaaacaattgtattcggagtaaatgaaaaaaatattacgaaagatgataaaataatctcagcttcttcttgtacaactaattgcttagcgccagttgtaaaagttttaaatgaaaattttaaaattgataaaggctttatgacaactattcacgcttttactacagatcaaagaatattggataattctcacaaagatccaagaagagcaagatctgctagtcaatcaattgttccaacaactaccggggcttcaaaatcaattggagaaataataccatcattaaagggtaaaatagagggtgtttcaatgagagttcctactcccaatgtttcaattatagaattaattttttgtacgaataaagaaataaccataaataaaattaataatgcttttattaaaacctcaaaaaaacaactaaaaaatgttttaaaagttacaagtgaaaaactagtatcagtagattttaatcataacccggcatcagcaattgttgacttaaattt

SEQ ID NO: 213279 - DNA, 1519 bp, Unknown
  Bacterial polypeptide expressing nucleotide sequence isolated from the Sargasso Sea
atgaaacacgacagcaacgtaacctccaccgtcggccacctgatcgacggcaagcgcgtcgacggcggcagccgtgtccagccggtgttcgacccggccaccggcgaatcgcacaagagcgtcgcgctcgccgacaagctgaccgtcgaagccgcgatcgcgtccgcgcaggccgcgttcccggcgtggcgcaatacgccgccgctgaagcgcgcccgcgtgatgagccgcttcaagacgctgctcgaagagcatgccgacgagctgtgcgcgctgatcaccgccgagcacggcaaggtgctcgccgatgcgatgggcgaactgcagcgcgggatcgagaacgtcgaatatgcaacctacgtgcccgagctgctgaaaggcgagcacagcaagaacgtcggccccgcgatcgattcgtggagcgagttccaggcgctcggcgtcgcggccggcatcacgccgttcaactttccggtgatggtaccgctgtggatgtggccgatggccgtcgcatgcggcaacacgttcgtgctgaagccgtcggagcgtacgccgtcgtccacgttgcgcatggccgagctggcgctcgaggccggcctgccgccgggcgtgctgaacgtcgtgaacggcgacaaggaagcggtcgacacgatcctgaccgacccgcgcgtgaaggcggtgagcttcgtcggctcgacgccgatcgccgaatacatctattcgaccggctgcgcgcacggcaagcgcgtgcaggcgctcggcggcgcgaagaacttcgcggtggtgatgccggacgccgacatcggcaacgcggtgaacgcgctgatgggcgcggcatacggctcgtgcggcgagcgatgcatggcgattccgctggtcgtcgcgatcggcgacgagacgggcgaccaggtcgtcgcgggcctgaaggccgagatcgagaagatgaaggtcggcccgggcaacggcgcgggcgtcgacatgggcccgctcgtcacgcagcagcatttcgagaaggtgacgggcttcgtcgaggccggcgtggaagcgggcgcgacgctcgtcgtcgacggccgcagcgtgaaggtcgacggtcacgacggtggttactacctcggcccgtgcctgttcgacaacgtgaagcccggcatgccgatctaccagcacgagatcttcgggcccgtgctcggcgtgatccggctgaagtcgctcgacgaggcgatggcgctgatcgacgcgcacgagtacggcaacggcacgtgcctgttcacgcgcgacggcgaggccgcgcgctacttcagcgacaacatccagatcggcatggtcggcatcaacgtgccgctgccggtaccggttgcgtaccactcgttcggcggctggaagcgttcgctgttcggcgacctgcacgcgtatggcccggacgccgtgcgcttctacacgaagcgcaagacgatcacgcagcgctggccgtcggccggcgtgcgcgaaggcaccgtgttcagcttcccgtcgaaccgctgac

SEQ ID NO: 213280 - DNA, 428 bp, Unknown
  Bacterial polypeptide expressing nucleotide sequence isolated from the Sargasso Sea
tcacaaagatccaagaagagctagatctgcaagtcaatctattgtaccgacatcaactggtgcatctaaggcgattggtgaaattataccttctcttaaagagaaattagaaggtatagcaatgagagtgcctactccaaatgtttctttggttgaactagtcttttgtacaaaaaaagatttaagtatagaaaaaattaattcagcatttcacaactttagtaaaaaaaataaaattcttgaaatcacaaaagaaaaacttgtatctatagactttaatcacaatcctgcttcagcaattgtcgatgcaagtttaacaaatgtggtaggaaaaaatatgggtaaaatttcagcttggtatgataatgagtggggtttttcaaatagaatgtgtgatatagcagaatatcttcataagatttcttaat

SEQ ID NO: 213281 - DNA, 258 bp, Unknown
  Bacterial polypeptide expressing nucleotide sequence isolated from the Sargasso Sea
tctcgaaaaatatctctattgagagcttaactgagttattaattgatcatgaagcccaaaatccaaaaatcattaaaaataattttgacccccttgtatccaatgattttattagatcagactattctgtaattattgatcatagatttttaacagtaagcaatggttatataaagtgcttaagctggtatgacaatgagtggggttatagctcaaaagtcattgatttggtcaaatatatcaataaccctttataaa

SEQ ID NO: 213282 - DNA, 2185 bp, Unknown
  Bacterial polypeptide expressing nucleotide sequence isolated from the Sargasso Sea
tatgaaagatttcacaaaattccattcagataaggaaattgctaaatatttaataagtgagtttgataactctaaagagaaagaaatcttttcagcaacaaaaaaaataatcactgagtgtaggaaaaataagtcaggtagaacgctactagataaatttctaagtgagtatggtttaacaaatgatgaaggcgttgcgttaatgtgtcttgctgaatctgttctaagaatcccagatgacaacacaaaagatgaactaatatctgaaaagattacaaattcaaattggatagatcatattaatcaggcagatagcttattcgttaatgcagctacttggggcttacttattgcaggtaaagttattcagcctccaagagcattatttgataatccgcttgagtggataggcaaactgacacaaaaaactggagagacttctgtgcggcaagcaatcatgactgcaatgcagatcttgagcaaagaatttgtaatgggaaatgattttgattctgttatcaaaagttcaaatctgaaaaagtccatccacagctttgatatgcttggtgaagctgcaagaactaaatcacaagcagaaggtttctataattcttatgttgaggcgattgaaagggttgctaaacttaatagagagtttggaatcaatcatggagtatcaataaagctttcagcacttcatccaagatacgaaactctcaaatatgaattaacaaaaaaagagatcctcaactcaatcctaagcctagttaacctcgcatatcaaaatgatgtagagataacaattgatgctgaagaacaacacaggctctctataagtcaagatttgattgaagaagttgctatgagtaaaagaataaaggattggaatggattgggttttgctattcaagcttatgggaagagagcatcaaatgttgtcaattgggcgaatgagttgtgctctaaaagagaaaaaatgcatgtcaggctgacgaaaggcgcttattgggatggagaaataaaattctctcaagccggaggtcatgaggggttcccagtccttattaataaaagtcttactgaccttaactatttatttattgcctcaaaacttcttggctcagataatctgaagcctaagtttgctactcataatgctcattctgtagcctcgatttactttatggccgaagagaaagaatatgaattccaaagactttttggaatgggagagctactttataagtctgcagataaggttctaggaggaataccttccgccggaatatatgcacccattggtccatataaagatctgctcccatatttagtaagaagactgcttgaaaatggtgctaacagctcatttgtgaataacttacttaatccagaagtgagtccagatgatctagcagaagatccagttaaatctgtaaaaaaagctattgataaacttcaacatgaaaaaatcgtaaacccatcagatatcttctctccaagagttaattcatctggatatgacttaagcgaacctaagaatctacttgacttaaaatctgaccttttgaaatttgataatttaaaagttgaggcaaaaaacttttgtagcgaaattaatgaatctaaaaatgagaaacgatactcaatagccaatggaaatgagattggggattgttcttttgcagatatagcaaatgaattaaatttccaacaatgcactgaatggaaaaatactcctgttagcgagagagcagatatcttttatagaattgctgataatttagagaaagattctacaaaattcttatattacttaattcatgaagccgggaaaacatacaaagattcctatgatgaaattagggaggcagtcgattttcttagatattatgcagacaatgctaaaagtcttttaagcgaacccaacaacctcaatggtccaacaggtgaatctaatcaacttttctaccagtcaaaaggtacttttgtgtgcatcagcccatggaatttcccgcttgccatttttgcaggccaaatagccgcggctcttgtaacagggaattcagttatatcaaagccgtctgagcatactccaataattgcgaccatgatgattgagcttttttataaaaatggtataccaaaatctgcattaaaattaattcagggagatggctcaataggt

SEQ ID NO: 213283 - DNA, 611 bp, Unknown
  Bacterial polypeptide expressing nucleotide sequence isolated from the Sargasso Sea
tatgggattagggaatatttcaattacaggtaattatccagaagttagtaaagatattatgctttcaaaactcaatatattgaaagaaccattcttagagaacttcaaccccaatattaatgatcgaatagatcgaattaaacgaatacagaaattagttgaagaaaatatagatgcttttcataaatcattgagagaagattttggatctcgtcatgaacaattaagtttaatggcagacacaatgccagttattaataatgcgaaacatgctttaaaaaatattaagaaatgggtaaagcaagataatagaaagccaaattttcctttgggattattaggctcaaaagcctatgttcagtttcaaccatacggagtagtaggtattatttcgccatggaattttccacttacattaagtattgctccgcttattgaaatattcgcagctggaaataatgctatgattaagttatcagaatttgttcctgccacttcagagcttactgaaaaattaataaataaatattttactgaaaaagaagtggtgatcatcaatggtggtccacagacatctcagtcatttgctggcttaccatttgaccaccttc

SEQ ID NO: 213284 - DNA, 1002 bp, Unknown
  Bacterial polypeptide expressing nucleotide sequence isolated from the Sargasso Sea
gagctatcacaccatggaattttccaaattcaatgattactcgaaaatgtgctgcagcactagcagttggatgtacaactgttgttaagcctgctagtcaaacacctttttcagctttagctgtagcagagcttgcaaaagctgctggctttcctaatggagtttttaatattattacaggttcagcgaaagagataggaatggaattaactaaaaatccaaaaattaagaaaatatcttttactggatctacagaagtaggaaaaatattaatggagcagagtgcatcaacagttaaaaagttatcaatggaattaggaggtcacgctccttttatagtttttgaggacgcaaatattgatgaagcagtaacaggtgcactacaaagcaaatttagaaatagtggacaaacttgtatttgcacaaatagactttttgttcatgaaaaagtttatgattcttttttagagaaatttacaaatgaggtaaaaaaaataaaagttggaaatggtttaaatgatggtattgtttctggtccactcattgataaatcctcattagataaagtcattgatcatgttcaagatgcagtaaatacaggggcaaaaattgcagttggtggtgaagttcattcattaggaggtaatttttatcaacctacagtactatcaaatgtgtcaacagaagcaaaaataacatttgaggagacctttggaccagttgcaccattatataaattttctagtgatgatgaagtaattaaaatggcaaatgatactccatatggacttgcctcatatttctattctcgtgatataggaagaatttggaaagttgctgaagctctagaatatggaattgtatctatcaacaatggattaccaactatacctgaaataccttttggaggtgtaaaagaatctggaatgggtcgagagggatcaaggtatggcttggatgattatttaattatcaaatatatttcaatgggtggaatttagg

SEQ ID NO: 213285 - DNA, 517 bp, Unknown
  Bacterial polypeptide expressing nucleotide sequence isolated from the Sargasso Sea
atgtctgttaaaaaaattctagatagtatggactatggggttgcacccgaaagcgcgggtgaagcaaaaaagtggttacttaaacataattcttcttttggccattttattggtggtgcgcttaccagtccaaaacatggatttaaatctgtcaatccctctaatggggaaaccatagccagcttaagtcaggccactaataaagatgtcaataaagcagttaaagccgctaaaaatgcttttaaaagttggtcggtagtcaatcctcacgaaagagcgaaggtattatactcaattgcgcggcttttacagaaaaattctcgtcttttttctgttcttgagtcaatcgataatggcaagccaataagagagtctcgtgatattgatataccattagcacaacgtcatttttattatcatgccggaattgctcaaatatataagagcaaaatccaaaatatggagccaataggggtatgtggccaaataattcccttggaacttccccattgctgat

SEQ ID NO: 213286 - DNA, 829 bp, Unknown
  Bacterial polypeptide expressing nucleotide sequence isolated from the Sargasso Sea
tatgattgataaaaaaaacttttacataaatggtaagtgggttaaacctgcaaaagcaaatgattataatgttgttaatccatcgaatgaagaagtatttgcggttatttctcttggatctaaagatgatacagattctgcagtaaaatcagcaaagagagctttcgatcaatggaaagaaactttagtaggtgaaagaataaattttttagaaaaactactaaaagtttataaaaaaaggtttaatgaaatagctgaagcaatgtcaatggaaatgggatctcctattgattatgcaaccatggtgcatgctgcatctggtcaaacacatttagaggattttatattaagattaaaaaattttaaatttggagaagattttaattctaaatctaataattatatagctcgtgaaccaattggtgtatgtggactaattactccatggaattggccaataaatcaaatagcccttaaagtgatacctgccttcgcaacaggttgcactatgatactcaaaccatctgaaatagctcctatatctgcaatgttgtttgctgaaatgatagacgaagctggttttccgccaggagtatttaatttggtaaatggtgatggagcaggagttggaacagatatttctggtcaccctgatattgatatgatttcgtttacaggatcaacaagagcaggaaaattaattacaaaaaatgctgctgatacaattaaaagagtttgcttagagttgggtggcaaaggaggaaatatagtattcgcagattcttatccaaatgcagttagagacggaattagaaatgtaatgagtaat

SEQ ID NO: 213287 - DNA, 467 bp, Unknown
  Bacterial polypeptide expressing nucleotide sequence isolated from the Sargasso Sea
tatggtaaattgggaatattcagagtcagttgagtcacaagaaattgtgaacattaaagacaaatatcaaaattttataaatggaaaattccaacaaccaaatagcaaaaaatatataaacacaatctctccatcaactgaagaggttctttctaaaatagtaatttcaaatgagaaagatgttgataatgctgtccaatctgcgcaactaggctttgaaaagtggtcaaatacgtcgcctcatgagagatcaaaacatctttttaagcttgcgagattaattcaagaaagatctcgagagtttgcagttttagagtcaatggacggaggaaagcctataaaagaatcaagagattttgatttgcctcaggtagctgcaaatttcttttactttgctggctgggctgacaagatagatttatcttggggtgctaaaagtttgaaaccacatggagttgttgggcaaa

SEQ ID NO: 213288 - DNA, 583 bp, Unknown
  Bacterial polypeptide expressing nucleotide sequence isolated from the Sargasso Sea
tttgcctgaagattcttttggtgattggaagtggagagaagcattagctgaattgatggtaccgttgattggctcactttacagaaagggtataaatataatgatttacggtaagtcattggtaaatgagtcacctgttgcgatcatgaaagctcataggtttgcaagacagactgataataatgaactaagtgaactcgaaacatatcctattcttcaacacataagcacactagaacttcaggattgtgaaatagatataggagaaattgctgtaagatgtcctttttttgatgatattaaagacgattcttcaaagattcctaattttatcaattcagagcttgaatctgtaataaatgtagattccaaaaggcctaaagttcctgcaaatattgttttatatgggtttggaagaattggcaggcttgtaacaagaatgatgactcaaactactggtccaggaaattattttagattaaaagctattgtcattagaaaggcagctgatgatgatatcttcaaaagagctagtttactaacaagagattctgttcatggtccatttgacggaactgtaaaa

SEQ ID NO: 213289 - DNA, 400 bp, Unknown
  Bacterial polypeptide expressing nucleotide sequence isolated from the Sargasso Sea
atgacatcagttattaatcattggattaacggtgaattacaaccatcaacatctgaaagatatggggatgtattcaatcctgcaacaggagaagtcagcgcatcggtctcaatgggtaattctgatgatctgaataaagcagttgaagctgcttcagaagcatttgagacttggtcacaaacttctgtgacaaagcgtgctcaaattttctttaaatataaagagttacttgaatcaaatagagaagaactaatagatctcattacggcagagcatggaaaagttactgccgatgctgcaggatctttgcagaggggcattgaagtcgttgatttcgtatgcggcatcccccatttgctaaaaggtgaattcagtgagcaagttgggactgggcattgat

SEQ ID NO: 213290 - DNA, 384 bp, Unknown
  Bacterial polypeptide expressing nucleotide sequence isolated from the Sargasso Sea
tttgaataatattggaataaatggctttggaagaataggtaggtctattttaagaataattgttgaatcaaattcagatttaaatgtaattgcaattaatgacctaggtgataaggaaacattatcatatttatttaaacatgattcaataatgggaattttaaacatgaatgttgaattagaggatgattccttaattgttggagacagaaaaattaaattaatatcccacagtgatcctgcagagattccttggagtgatttaggtgttgatttggtagtagaatcaactggcttttttagagataaagactcgttagataaacatatctcctcaggtgcaaaaaaagttgtcctaacagtaccccctaaagatgaaataga

SEQ ID NO: 213291 - DNA, 1028 bp, Unknown
  Bacterial polypeptide expressing nucleotide sequence isolated from the Sargasso Sea
aatgttagataaaagaaaattctatattaacggaaaatgggaagaaccttcaaaaaaaaatgattttgaagtaataaatccatcaaatgaagaaaaatatgcagtaatttctttggggtcaaaagctgatgtcgacttagctgtcaaagcctcaaaagatgcttttgaatcttggaaagaaactaccaaagaagaaagaatcaaattattagaaaatttattatcaatttacaaaaaaagatttaatgaaatgactgaagcaatttccagcgagatgggagctccaatagactggtcttctaatgtccaaaatgcatctggccaaactcacttggaagatttcattataaggcttaaaaattttaaatttaatgagcaatttgactcaaaatcaaataatcaaatattttatgagcctattggagtttgtggattgattactccttggaattggccaataaaccaaattgcactcaaagtaatacctgctttagcaactggttgtacaatgatacttaagccttcggaaatagctcctatatcagcaatgttatttgctgaaatgattcatgaagctggttttccaccgggagtttttaatctagtaaatggagatggagctggagttggaacatttatatctggtcatcctgatattgacatggtttcttttactggatcaacaagagcgggaaaattaattacaaaaaatgcagctgacacaattaaaagagtttgtttagaactgggaggcaaaggtgggaatattgtatttgctgactcttaccctgatgctgttagagatggaataagaaatgtaatgagtaattctggacaatcttgtgatgccccaacaagaatgcttgtcgaaaaatctatatacgaaagagctgttaatgaagcagtagatgaagctaagaaaattaaagtagatattgcatcaaaaaaaggagatcatatagggcctgtggtttcaaaaattcaatacgataaaattattaacttaataaaagatgggattaaagagg

SEQ ID NO: 213292 - DNA, 1060 bp, Unknown
  Bacterial polypeptide expressing nucleotide sequence isolated from the Sargasso Sea
tatgttagataaaaaaaagttctatataaatggtgaatgggtagatccaaaaaacccaaataattttgaggtaataaatccctctactgaagaagtgtgcgctgttataaatttaggaagttcagatgatactaattctgcagttaaggctgcaaaaaaagcttttgaaacatggaaagaaacaactaaagatgaaagattaaaattgttagagaaacttctaacaatatacaaagctagatgggatgatatgacagatgcaattacaactgaattaggttgtccaaaagattggtgttctgcaaatcaaacttcgtcaggagcaggtcatatagaggattttataaaaagattaaaagaatttaattttgaacctgggtttgataaaggctcagttaatcatattgtgtatgaaccaattggagtttgtggtttaataactccttggaactggccgataaatcagattgcgttaaaagtaattcctgcgtttgcaaccggatgtacaatgatattaaaaccttcggagatcgctccactttcaggaatgttatttgcagaaatgatacacgaagcaggttttccggcaggtgtttttaatttagttaatggagatggtcctggtgtaggaacggatttatcgggacatcctgatgttgatatggtttcttttacaggctctactagggcaggaaaattaataactaaaaatgcagctgatacaattaaaagagtttgtttggagttaggtggcaagggtggaaatattgtttttgcagattcatatccagatgcagtgagagatggtattagaaacgtaatgagtaattcgggacaatcttgtgatgctccaacaagaatgttagttgaaaaatccatttacaagagagcagtcgaggaagctgcagatgaagcaaataaaattaaagtagatttagcatcaaaagtgggtgaacatattggtccagtaatatctaaaacacagtttgataaaattcaaagtcttattaaaagtggcatagatgaaggtgcaactttagttgcaggaggaccagacaaa

SEQ ID NO: 213293 - DNA, 775 bp, Unknown
  Bacterial polypeptide expressing nucleotide sequence isolated from the Sargasso Sea
atgaaattaatagagcactttgttgatggaaaaataattccaggttcatctgacagaaaaggaaaagtatttaatcctgcaacaggagaacaggaatcagaggtaagacttgcaagtaagtctgatttagatcaagctgtagaagcagccaaaaaagcatttgaaacttggtctgcaaaacctcctctacaaagagcaagaataatatttaaatttaaagaattaatagaaaaaaactctgatgagttaacaaagttaatagtatcagaacacggaaaagtttttgaggatgctagaggatctttaacaagagggcttgaagtagtagagtttgcttgcggaatacctcatttgttaaaaggcgaatattcagagaatgtcggaacaaatgttgatagttggtcaatgagacaacctttaggggtagtagctggaattactccatttaattttccagcaatggtacctatgtggatgtttccaatagcaattgcttgcggaaatacatttatattaaaaccttcagaaaaagatccttcatgtccaattagattagctgagttactgagtgaagctggattacccgagggagtattaaatgtagttaatggcgataaagaagctgttgatgcaattttagaaaataaagatattaaagctgtaagctttgttggatctactccaattgcaaaatatatttacgaaaattcagctaaaaatgaaaaaagagtacaagcacttggaggtgcaaaaaatcatttagtggttatgccag

SEQ ID NO: 213294 - DNA, 1375 bp, Unknown
  Bacterial polypeptide expressing nucleotide sequence isolated from the Sargasso Sea
atgactgataaaattaaacctaattcttatgctgcattagatgctgcgcatcattttcacccttactctaatgctaaaagaattgaaaagcagggaccaatggtaattgcaaaaggtaagggaattaaagtttgggatgatcagggtaacgaatatattgaggctatggcaggcttatggtcagttgcagttggatttggtgaagaaaggcttgtagaggcagctaagaaacaacttgaaactctaccttattaccattcatttactcataaatctcatcccgcagttgcccaactttctcaaaaattaactgaaatagttggtttaaatatgacacatgctcattatacaaattctggttcagaagcaaatgactcagcaatgaagatgatttggtattacaacaatgccttaaacaggcctgaaaagaaaaaaatcatatcaagatttaaagcatatcacggaattacaattgcatcaggtagtcttactggtattccaatgatgcataatgattttgatcttccaatcaaacaagttcttcatacaagatgccctcattattggagagagggtaaagaaggtgaaactgaggaagagtttgcaacaagatgtgcaaatgagttagaggatcttattatcagtgagggacctgaaaccgttgcagctttttttggcgaacctgtaatgggcgcaggtggattaatagtgcctccaaagacttactggcaaaagatacaagaagtctgtaaaaaatatgacattttaatagttgcagacgaagtcatcaatggatttggtcgaacaggaaaaagatttgcatgtgagctttatggtatagagccagatcttataattctttcaaagcaaataacatcaaattatataccaatgggtgttgttttaatgacagataaaatctacgaacctattgctgaaaacactgttaaaaataatctttatggaagtggttttacctctgcaggacatcctgttgcatgcgcggttgctcttgaaaatatcaaaatattagaagaagaaggtttgatggagagggtttcatccttagagccaatttttcaagaaagactaaaaaatctagaaaaaaaagaattagttggtgaagcaagaggtgtaggcttaatgggcgcagtagaattagtgagcgataaagatagctctgctccatttgatcctttgggaagtgcagggcctattttagcagaaactggccatagcgagggtataattttgagagccattggtgatgttttggctgtttgtccgcctctcatcatagaagaaaacgagattcatgagctttttgatagatttgaaaatactcttgataaaggtctagaagcggttaagtgat

SEQ ID NO: 213295 - DNA, 1444 bp, Unknown
  Bacterial polypeptide expressing nucleotide sequence isolated from the Sargasso Sea
atgtacgaaaaatttggacaattcattgacggtaaatggcaacaagctgaaaaaaaagaaacttatgatgtaatcaatcctgcaactgaagaagtgattggaaaagcgtcgaaagcttcatctattgaagtacagaaagctttgaagtcggcagaaaaaggtttggaagtttggaaaaatactgcaccatggcaaagagcctatgtgttgagaaaaattgccgatctaatgagagaaaaaaaagatgtacttgcaaaatggttaacgctagaggtaggaaaaccacttaccgaagctgttggtgaagtcggcggcggtgctgacatttttgagtggaatgctgaagaaacaaaaaggatttatggtcaaacgcagcaaagtagattcccagatacaagagtccacgtttattaccagccagttggagtagtggctgctctagttccttggaattttccaatagttttagcttcaagaaaaatttcaacttctttagctgctggttgttctgttatatgtaaaccagatgtaattacaccgggagctgtaatggaattagttaatatttgtaaggaagctggtgtgccagatggtgtggtaaatctattatctggtgatcctgcagaagtttctaacgaattaatggagtcagatataattaaaaaagtttcagtaacaggatctacaagagttggtaaattaattttaaaaaaagcagccgataaagttcaaagagtaactatggaacttagtggacattctccttttatagtttgtgaagatgtagatatgaataaagtagctgatatagcaataactggtaaatttcgaaataatggtcaagtctgtatttctccaaatagattttatatccaagaaaatagaaaagatgagtttgttaatgcttttatagaaagagcaaaaaaattaaaaattggaaatggtatggatgatggagttgatttaggacctttaactactgcaaagagactggaagaaatagaaaaacttgttgatacaactaaaaaggaaggagcgaaaatattaatgggtggacaaagaccttctggtttcaataaaggatattattatgaaccaactgtttttgatgacgttaaagataattttacaataatgaaagaagagccttttgggccacttgttccaattttgacttttaaaacttttgatgaagtaattgaaagagcaaatgacaatgatttaggattatgtagttatttgtatactaattctatggataaagctcatattggatctgagaaattagaatctggttgtgtagcagttaatactggtgttgttgcaattgcagaggcaccttttggaggaataaaacaaactggttacgggcgtgagggaggatcaggcgcaataaaagattatttaaatgtgaaatacactcacatgggcttaaaaatctgaa

SEQ ID NO: 213296 - DNA, 899 bp, Unknown
  Bacterial polypeptide expressing nucleotide sequence isolated from the Sargasso Sea
ggcgcgtgcagaagagcttgctgaagatcaacgcttacttcctcgtggtgttgtgctttgtattagcccgtggaacttcccactagctatcttcttaggccaagtggcagcggcacttgtaacaggtaacacggttattgctaagcctgctgaacaaaccagcattattgcgcagcgtgcggtagatattatgcactcggtaggcctgccagaagacgcattgaaacttatcgtatcgcctggtaaagaagtgggcgaaacccttctaccagacgagcgcattaaagcggtaatgttcacaggttcaacgcaaaccggtacgttaatttctcaagtgcttgcagaacgtggtggcgaacaggtgccattgattgcagagacgggcggtcaaaactgtatgattgttgattcaactgcactgccagagcaggtagttgatgacgtgatccactctggtttccaaagtgccggtcagcgctgttcagcgcttcgcgtgttgttcgtacaagatgaaattgctgatgaccttatcgaaatgctaaccggcgccatgaaagagcttaccgttggtgacccaacgcagcttgctaccgatgtaggccctgttattgatgagaaggcgcttaagagcctaaccgatcaccaagagtatatggaagataaagctaagctgctttatcgcaatgaaatgccagcaggctttgaaaacggtactttctttgcgccgaccttatatgaaatcaagaacattgatgtgcttgaaaaagaagtgttcggccctgtggtacatattgttcgctttaagtcgaaagaccttgatagtgtgctagagcaaatcaatggtacaggttacggccctaactatggccattcactcgcgtatgaaagagcgtgctaac

SEQ ID NO: 213297 - DNA, 655 bp, Unknown
  Bacterial polypeptide expressing nucleotide sequence isolated from the Sargasso Sea
ttgccacaagattcttttggtgattggaagtggcgtgaagcattagctgaattaatggttccattgattggtactttgtatagaaacggtattaatataatgatttatgggaaatctttagtaaatgaatcacctgttgctattatgaaagcccataggtttgcaagacaggctgataacaatgaactaagtgaatttgaaacatacccaatgattcaatatatttcgacattagaacttaaagattgtgaaatagatataggcgaaattgcagttaaatgcccattttttaatgaaataaaaaatgatcaatctaaaatagctgattatattaataatgaattaaagactgttattaataaaaattcaaatagacccaaagaaccaaaaaacatagttttatatggctttggaaggattggaagacttgttgctagaatgatgacacaaacaactggaccaggaaattattttttacttaaagcaattgttataagaaaaggttctgatgatgatatatataaaagagctagtttattaacgagggactcagttcatggaccttttgatgggactgttagggttgatgaagaaaattcatcattaataattaatggaaatcaagtaaaaattatatatacatctggaccagaaa

SEQ ID NO: 213298 - DNA, 2572 bp, Unknown
  Bacterial polypeptide expressing nucleotide sequence isolated from the Sargasso Sea
atgctcattaacgacacacttcatacaacttcacccctacgccagcgtataagagactactatcgcattagtgagtcggtggctgtggatcaaatccttcccattgccgaggtaaacccgcgtgcgcgaagtcgtgcatgggaacgcgctcgtaagatggtgcttcagattcgccgagaacaagaagggcacggtggtgttgacgcattattaaatgaatactcgctatctacagcagaaggtgtggtattgatgtgcttggctgaagccttgctgcgtgttccagacaaagccactcaagatgagcttattcgtgacaaactgtctcagggacagtggacacctcacttggggaattcagagtcgttatttgttaacgcatcggcgtggggcttgttatttacgggcaacatggtgaactatgccgacaagcgcaagaaagaacagtttggcttgttaaaacaaacccttggccgcttaggtgaacctgttattcgccgcgctatgaacattgcgatgcgcgttatgggtcgtcagttcgttatgggcgaaaccattgaagatgcggtagatcgcgccaaagagaaagaaaccaaagggtacgtatattcttacgacatgctaggcgaaggcgcacgcactatgcgcgacgctgagcgttactacgatgcatacgtaaaagcaataaaagtaatcggtaaagcggctaacggacgcggtcctaagcgttcaccggggatctcggtaaagctttctgctattcacccacgctttgaattttctcaccgcgaacgcgccatggcagacattccgccgcgcttgaaagcgctgtgtatgatggcgaaagaatacgatatcggtttaaccgtagatgcggaagaagctgaccgtctagagctttctctagatattattgaagctgtatttcgcgatgaagacctgaacggttggacaggctttggcttggccgtacaggcctaccaaaaacgcgcaatccacgttatagagcacttacgtgaacttaccctagaggtaggtcgtccgctaatggtgcgtttggttaaaggcgcttattgggatactgagattaagcttactcaacaagcgggccttgaagagttccctgtatttacccgtaagtcgtcaacagatgtgtcataccatgcctgtgcgaaccgtctacttgagtatcgcgacaccatttacccgcagtttgcgactcacaatgcctacacagcgtctgttattgttgagcttgctggtgacgacaaagaaggttttgagttccagtgtctgcacggtatgggcgataccctttacgatcaggtggtaacacaggataaaattcagtgccgtgtttatgcaccggtaggtgaacacgaagacttattggcctaccttgtacgtcgtcttcttgaaaacggcgcgaactcttcgtttgtaaacgccatcgttgacgatgaaaaaccggttgagtctttgcttgaagatccggtagagaaaacacaacgcctgaaagtacgctataacaagttaatcaaaaccccacgtgggctgtatgcgccagagcgcgataactcgcgaggtctagaccttaccgacaccaatgcggtaacggcgcttaaacatgaacttgaacgttggcaggattactacaaagtgaccggtgaagtgccagaaggtgcgacagcggtacttagcccaactaaccacaacgacgtggtaggttatcaccattacgctacgcctgatgatatgcgcaaagcattagatgaagccgaagctgggtttgaagcatggtctaaacgcgatgtaagcgagcgcgctgaaatacttaatcgaacagcagatgcgcttgagcgccacatggcagaacttatcgctatctgtatgcgtgaagccggtaaagtagcgcaagacagtattgatgaagtgcgtgaagccgttgatttctgtcgctactacgcggcgcgtgcagaagagcttgctgaagatcaacgcttacttcctcgtggtgttgtgctttgtattagcccgtggaacttcccactagctatcttcttaggccaagtggcagcggcacttgtaacaggtaacacggttattgctaagcctgctgaacaaaccagcattattgcgcagcgtgcggtagatattatgcactcggtaggcctgccagaagacgcattgaaacttatcgtatcgcctggtaaagaagtgggcgaaacccttctaccagacgagcgcattaaagcggtaatgttcacaggttcaacgcaaaccggtacgttaatttctcaagtgcttgcagaacgtggtggcgaacaggtgccattgattgcagagaccggcggtcaaaactgtatgattgttgattcaactgcactgccagagcaggtagttgatgacgtgatccactctggtttccaaagtgccggtcagcgctgttcagcacttcgcgtattgtttgtacaagacgaaattgctgatgatcttatcgaaatgctaaccggcgccatgaaagagcttaccgttggtgatccaacgcaacttgctaccgatgttggccctg

SEQ ID NO: 213299 - DNA, 622 bp, Unknown
  Bacterial polypeptide expressing nucleotide sequence isolated from the Sargasso Sea
aatggatattactaataaaaaactttttaaacagcaatgttttattgatggtgaatggataaattcacaaaataaacaaattataaaggtaaataatcctgcaaatcaagaaatcattggaacaattccgaactgtggaaaagaagaaactattatagctatcaaagcagctgaaaattcgtggcctagttggaaatcaaaaacagctaaagaaagatctgctattctaaaaaaatggtttcatcttattgaagaaaataaagaagacctagctagaataatgacattagaacaaggaaaaccaatagtcgagtcaagaggtgaaatatcatatggagcttcatttgttgaatggtttgcagaagaatgtagaagagtatacggagacacaataccagatattcttcctgacagaagagctttcgtaattaaacaaccagttggtgtggtaggtgctataactccttggaactttccaagttcaatgattactagaaaatgtgcaccagcgctagctgtaggttgtccagtagttattaagcctgcaagtcaaactccttactcagcttttgctttagcagtattagcagaagaagctggatttccaaaaaggtacaattaa

SEQ ID NO: 213300 - DNA, 1144 bp, Unknown
  Bacterial polypeptide expressing nucleotide sequence isolated from the Sargasso Sea
aatgttagataaaagaaaattttacataaatggtcagtgggttgatccaattaaaaaaaatgattttgacgtaattaatccatgcaatgaagacccgtttgctgttatttctttaggttcaaaagaggatacagatttagctgtcaaatcagcaaaaaatgcctttaatacttggaaagaaactagcaagaaagaaaggctcagtttacttgaaaaattatcatcagtttataaaaaaagatttaatgaaatggctgaggctatttctcttgaaatgggtgcaccaatggattgggcaacagatgttcaaacagcttcagggaaagatcatttagatgattttattttaagattaaaaaattttaaatttgatgaacactttgataataaatcaaataatcatatctattatgagccaattggagtttgtggattaatcacaccgtggaattggccaattaatcaaattgctttaaaagtcgttcctgcattcgcaactggatgtacaatgattttaaaaccatcagaaattgctcctatttctggaatgttatttgcagaaatgattgatgaagcaggttttccaaaaggtgtatttaatttggtaaatggagacggtgcaggagtgggaacccacatttcaagccaccctgatattgatatggtttctttcacaggttcaacaagagcaggaagattaatttcaaaaaatgctgctgaaacaattaaaagagtttgtcttgaattaggtggaaaaggtggaaatattgtttttgctgatagttataaagatgcagtaagagacggtattagaaatgtaatgagcaattctggtcaatcttgtgatgcaccaacaaggatgcttgttgaaaaatcaatttacgaaagagctgttaaagaagctgttgatgaagcaaacaaaattaaagtagatcaagcttcaaaaaagggagatcatataggaccagtaatttctaaaattcaatatgataaaattataaatcttattgaaagtggaatttctgaaggcgcaactcttgctgcaggtggacctgagttaccaaacggtttgaacaaaggatacttcatcaaaccaactatatttacagatgtaactaatgacatgagaattgcaaaagaagaa

SEQ ID NO: 213301 - DNA, 1003 bp, Unknown
  Bacterial polypeptide expressing nucleotide sequence isolated from the Sargasso Sea
tggtactcagcttcgcctgaaagcgattgttgtaagaaaaagtggcgctgatgacttgatgaaaagagcgggattgctgaggcgagattctgtgcatggaagttttcaaggaacgattcgggtggacgaggaaaatcagtgcattattgctaatggcaacgtcatcagggttatttatgcgagcaaccctgatgaggtcgattacgcagtctatggaatctccgatgcgatcattattgacaacaccggagcatggaaagatgaggaaggattatcgcgtcacttaaaatcaaatggggcgtcgagagtaatcctgaccgcaccgggaagtggaacggtcaagaatattgttgctggaataaataatgaccagattgaacctggggataacatcctagcagcagcgagttgcacgacaaacgcaattgtgccggtcctgaaggctgttaacgatcaattcggtattgtcaatggccacatggaaaccgtgcatgcctataccaacgatcagaatttgatagataattttcacaagaaaaatagacgaggtagaggcgctccgctaaacatggttatcaccgaaacaggcgcgtcttctgctgtaaccaaattgttgcctgagttagaaggaaagctaacaggtaacgcaataagggtgcccacaccaaatgtgtctcttgcgattctcaacttaacgttgagtcaggtgacaaccacggaggagattagcgattttttgagggagtctgcactgcatggcaagcttcaacgccaaattgatttcacgacctcgcctgatatcgtctcctcagatctcgtcggcaatcgccacgcctgtatagtcgatggagaggcaacaatcgtcaaagaggacagggttgtattgtatgtttggtatgacaatgagtttggctattcttgtcaggtagtcagggtcgttcaaaagatggcaggtattaaatatccactaataccggaagacgcagaagagatgggcttctag

SEQ ID NO: 213302 - DNA, 1444 bp, Unknown
  Bacterial polypeptide expressing nucleotide sequence isolated from the Sargasso Sea
atgtacgaaaaatttggacaattcattgatggtaaatggcaacaagctgaaaaaaaagaaacttatgacgtaatcaaccctgcaactgaagaagtgattggaaaagcatccaaagcttcatctattgaagtacaaaaagcattaaagtctgctgagaaaggtttagaagtttggaaaaacactgcaccatggcaaagagcttatgtacttagaaaaattgcagacataatgagagaaaaaaaagaagttattgcaaaatggttaactcttgaagttggaaaacctctaactgaagcagttggtgaagttggtggtggagctgatatttttgagtggaatgctgaggaaacaaaaagaatttatggtcaaacacaacaaagtagatttccggatactagagttcatgtttattatcaacctgtaggagttgttgcagctttagttccttggaatttcccaatagttttagcctcaagaaaaatttctactgctttagctgcaggatgttctgtaatttgtaagcctgatgtaattactcctggtgctgtgatggaattagtaaacatttgtaaagaagctggtgtaccagatggtgttgttagtcttttgtcaggtgaccctgctgaaatatcaaatgaattaatggaatcagatattattaaaaaggtttcagttactggatcaactagagttggtaaaattattttaaaaaaagcagctgataaagttcaaagagttactatggagcttagcggacactcaccttttattgtatgtgaagatgtggacatgaataaagtagctgatatagctataaccggtaaatttagaaataatggtcaagtctgtatttcaccaaatagattttatattcaagaaaatagaaaagatgagtttgttgatgcttttatcgaaagagcaaaaaaattaaaaattggaaacggtatggataaaggtgtggatctaggacctttaactactgcaaaaagattagaagaaatagaaaaactagttgaaactaccaaaaaagaaggagctaaagtgttaatgggtggacaaaaaccttctggtttcaataaaggatattattatgaaccaaccgtttttgatgatgtaaaagataattttacaataatgaaagaagaaccttttggtccactagttccaattttaacttttaaaacttttgatgaagtaattgaaagagcaaatgacaatgacctaggattatgtagctatttgtatactaattctatggataaagctcatatagggtctgaaaaattagagtctggttgtgttgcagttaatactggtgttgttgcaattgctgaagcaccattcggaggaataaaacaaactggctatggtcgtgaaggtggctcaggagcaattaaagattatctaaatgtgaaatatactcacatgggcttaaaaatctaaa

SEQ ID NO: 213303 - DNA, 988 bp, Unknown
  Bacterial polypeptide expressing nucleotide sequence isolated from the Sargasso Sea
catgaaaaaagagcatagattttacatcaatggtgaatggattgattcatcctcaactgagcttattgagattgaaaatccgtcaactgaggaagttattggtactatttctgccggtacaaaagaagatatagatcatgcagttgctgcagcaaaaaacgcatttcaatcctttggatttacatcaaaggaagataggattgcaattttagaagaaattataaaaaactatgaggcatcatctgaggatttagcattatgcatatctgaagagatgggtgcaccactatggctttctcaagtcgcgcaagttgcatctggcttagggcactttaaagacactttagcggtcttgaaagactttgaatttgagttaagtgaagaccattacttagtcagaaaagaaccaattggtgttgttggaatgatcacaccatggaattggcccatgaatcaaatgtgtacaaaaattgcttcagcgttagctgctggttgtactatggttcttaaaccaagcgaaataactcctttctgtgcagtaatgttaactgatatcctagataaatctaatttacctaatggagtttttaatttagttcatggatatgggcctgttgttggagcagctttatctgagcatcctgatgtagatatgatgcactttacaggatcaactagagctggggtagccgttgctcaagcatctgctccaactgttaaaagggttgctcaagagttaggtggaaaatcagcaaatatcattcttcaagatgcaaatcttgaaaaggcagtagctgcaggcgcaaatcattgttttttaaatactgggcaatcatgtaatgctcccacaagaatgctggtacattcgtcccaatacgatgaggcagttgaaattgctaaaaatgtagctaattctatcgttgttgggaaaccaaatgatgaaggagtaagaataggccccatttctaataggacccaatatgaaaaa

SEQ ID NO: 213304 - DNA, 213 bp, Unknown
  Bacterial polypeptide expressing nucleotide sequence isolated from the Sargasso Sea
taaacaaaagctttaaaaatattttaactaccaataaactacctttagtttcaatagatttcaatcataactcaagtagttctgtatttgatttaactcaaactcaagttattaatggaacattttgtagagttttatcttggtatgataatgaatggggtttctcaaataggatgattgaaacaatgtttgatttaaaaaaattattatagg

SEQ ID NO: 213305 - DNA, 1807 bp, Unknown
  Bacterial polypeptide expressing nucleotide sequence isolated from the Sargasso Sea
aatgcaacctacagatacaaaaaacccagattactatcacaaggtcgttgattgccaatggggatgtccagcacatactgatgttccaggctatatcagacacattgcacaaggtgaatatactcaagcttaccttctgaatagagaatccaatgtttttcctggaatacttggcagggtctgcgatagaccatgtgagccggtttgcagaagggcaagagtagacgaagagccagtagcgatctgtagattaaaaagagtggccggtgatctaaagggcgattttaaatctcatcttccagcagtcccttcaaataagaatggcaagaaagtagcaatcattggagcaggctgtgcctcgttgacagtcgccaatgaccttcttcctctaggttatgaaatggatgtttttgaatctctgcctgagatgggaggtttaataagaagcaatattccaaagtttaggttgccgccagaagtcattgatgaagaatttgatgtgattatagaacaaggcatcaatcttcatctaaatcatccgatcgagagcatgaaaaatcttctccaagaagactatgatgctgtacttgttggaactggtgcgccaaaaggaagagagttagatcttccaggacgacatgagactgatcaaattcatgtaggaattgcttggcttgaatcagttgcatttgatcatattgatcaagtgggcgagaaagtcctaatcatcggtggtgggaatactgcaatggattgttgtagaacatctcttaggcttggcggaaaagatgtcaaagtcatatatcgtggtgagcggcacacgatgaaatcttcagattgggagctagaaccagctcttgaagagaatgttgacctggttttatgtcattcacctgaagaatatatcgtagaagatggaaaactaacgggcatgcgtttctctataatggaatattctgttgatgatgagggaaaaaggcaatcgaagaaagtcgatgagacaatcatcccatgtgatacggtcatcttggccattggacaagagaattcatttccatgggttgagcgtgatttaggcattgagtttgaccaatgggaggttcctgttgtggatccagtgacatatgagtcaactcttaagggagttttctttgcgggtgatgctgcatttggtccaaagaatattatcgaagcggttgagcagggacaccaagctgcaatctctatacacaaatattgcaataatgaatcactgaaagaaaggttgcctcatggaatgaacttggttactgcaaagatgggtatccacgaatggagctacagcaatgattacgactatgatgatcgatatgaagtccctacggttccaatggataatcgattcaaagatataaacatagaggttgagctcggttatgagccagggcagtttaaaagagaagtagagcgttgtttgaactgtgatattcaaactgattttgaggctggtttatgtatcgagtgtgacgcatgtattgatatttgcccagtgaactgcttgaccatcactgaaaatgatgaagagtcagaaataaggaagaaaatcaaaactccagctgacaactatgaccaggctttatatgtatcagaagatttacctcagacaggaagggtaatggttaaggatgaagatgtttgtatacattgcggactttgcgctgaacgatgcccaacagctgcttgggatatgaagaagttcacacttcaaattccttatgctactgaagaggcaattgatgcgacacagaaaacgaaaaaggctgtttaa

SEQ ID NO: 213306 - DNA, 832 bp, Unknown
  Bacterial polypeptide expressing nucleotide sequence isolated from the Sargasso Sea
ggagatccaccaagtatagcatcacatttaattgcttcagatatagtaaaaaaaatttctattactggttcatcgagagttggaaaattaattctaaaacaggctgcagataaagttcaaagagtaactatggaattaagtggtcattcaccatttatagtttttgatgatgctgacattaaaaaggcagcagatatggcgatagcttccaagttcagaaacaatggacaagtttgtatttctcctaataggttttatatccaagaaaataaaaaagatgaatttgtaaatttgtttgttgaaaaagcaaaaaaactgaaaattggaaacggaatggatccagatgttcaattgggaccaataactacaaaaaaaagattaaatgaaatagagcagttggttgagactacaaaaaaagaaggagcaaaagtattattaggtggaaaaagaccttctggttttaacaaaggttattattacgaacccacaatatttgatgatgtaaaagatgattttactataatgaaaattgaaccatttggtccattagttccaatgttatcttttaaaacatttgatgaagtagttgaaagagccaataaacatgagttaggacttgcaagctatatatgtacaaattcaatggaaaaagcacatagagcatctgaattaatggaaacaggtactgttgcagtgaatactccagtggttgctatagccgaagctccttttggaggaattaaacaagcaggatatggaagagaaggtggttctatggctattaaagattacctaaacgtaaaatatactcatcttggtttaaaaggttaat

SEQ ID NO: 213307 - DNA, 280 bp, Unknown
  Bacterial polypeptide expressing nucleotide sequence isolated from the Sargasso Sea
cctgttttgtcaataattcctttcgaaaacgaggaggatgcaatatcaattgcaaacgatactccatatgggttaacaaactatattcaaacccaagacaaagaaaaaattaaaagagttgcgagaaaactaagatctggaatggtagatgtaaatggagttggaattgccgtagcctcaccttttgggggatacaaacattcaggcattggaagagaagctggcacagagggtttaatagagttcttagaggttaaaaccgttggtggttggaactaat

SEQ ID NO: 213308 - DNA, 918 bp, Unknown
  Bacterial polypeptide expressing nucleotide sequence isolated from the Sargasso Sea
tatggcaataaaaataggcattaatggtttaggaagaattggaagaatggtcataagatcgttatatgaaaaaaattataaaaatattgaaatcaaacatattaataatcgttcaaatccagaaactgcatcacaattattaaaatatgactcaattcatggaaaatttaattgtgaaattaatagtaataataattgtttgataataaaaaataaaaaaattacttatactcaacatacaaaaatagaggatattaattggaaaaaatatggtgtagattttgttttggaatgtactggcaaatttaattctaaagaaaaattaattcctcatattacaaatggtgcaaaaaaagttatagtttcggccccatgtaagaaaacagataaaaccgtagtttttggagtaaacgaaaatgtgattcaaaaagcagataaaattatttctgctgcatcatgtacaactaattgtctcgctccagtggcaagtgtaataaacaataattttattatagaaaaaggatttatgactacaattcattcttttacaactgaccagagattacttgataactcccataaagaccctcgaagagctagatctgcagtacaatctatagtgccaacatcaactggagcatcaaaatctattggagaaattattccagatttaaaaggtaagctcgagggagtagctatgagggttccaactccaaatgtttcattaatagaactcgtattttgtactaaaaaaaacctaacagttaataaaattaataatagcttaattgaatcatcaaaaaaaacattgaaaggaatactagaagttacaaaagaaaaacttgtttccactgactttaatcataatccaaattctgcaattgtagactcatcattaacaaatgttgtagggcaaaa

SEQ ID NO: 213309 - DNA, 625 bp, Unknown
  Bacterial polypeptide expressing nucleotide sequence isolated from the Sargasso Sea
atgtacgaaaaatttggacaattcatagatgggaaatggcaagcttcctctgacaacgcaacttatgaagttatcaatcctgcgacggaagaacttttaggaaaagcgtcaaaagcaaatatcaaggatgtgcatttagctcttaaatctgctgaaaaaggtttagaggtttggaaaaaatattctccttgggaaagatcaaaaataataagaaaaatatcagacttgatcagaaaaaaaaaagatattttatctaagtggttaacgttagaagttggaaaaccaatttcagagtcacctggtgaggtcgaaggagcagcagatatttttgaatggaattcagaagaaacaaaaagaatatttggcgaaacaaatcaaagcagattcactaatactcgtatacatgtttattatcaaccagttggtgttgtagctgcgttagttccgtggaattttcctatagttttagcatcaagaaaaatttctaccgcattagctgctggatgttccgttattgtaaaaccggatgttataaccccaggaagtgttatggaacttgtaaatatttgtaacgaagccggtgtcccaccaggtgtaataaatttattatctggagatccttctg

SEQ ID NO: 213310 - DNA, 913 bp, Unknown
  Bacterial polypeptide expressing nucleotide sequence isolated from the Sargasso Sea
atgcaatataaaaataaattattcattgatggcaaatggttagatggagagggtggcgctacgtttgacgtaatcaatcctgcatctgaagaagttattacaaaagttgcatccgcaggtattgaagatgctaaaaaagctatcaatgcggcagaaatagcttttgagagttgggcaaaagtttcaccgagagacaggtcagtaattttacgaaaagcatatgaattatttatggacaagattgaacactttgctgaactgatcacgcttgaaaatggaaaggcatatggggatgcaaaaggtgaagcactttattcagctgaattttttaggtggtattctgaagaagctgtcagaggaattggacaaatatcacatgcaccagcaactggagctaggattgttgttcaatataagccaattggaatatctgtcttggtaacaccttggaactatccagcggctatgggtactagaaaaatagcgcctgctattgctgcgggttgccccgtgattataaaacctgcatcagaaacccctctaacaatgctcgagttaatgccattactggaggaagctggggttccaaaaggtcttgtttctgttttaccttcacgaaatacatcaaaacttgttgatcatctgttgcatgacaatagagtgagactagtgtcattcactggctcgacggaggttggaagaaagttattaaaagttgcctctgaccaggttttgaagacatcaatggaacttggaggaaatgcacctttaattgtatttgatgatgctgatatggaaactgctgtgaatggatgtatggttgcaaaaatgagaaatttaggagaggcttgcactgcagccaatagaatttatgttcatgaaaatgttgcagaagattttaaagataaatttt

SEQ ID NO: 213311 - DNA, 784 bp, Unknown
  Bacterial polypeptide expressing nucleotide sequence isolated from the Sargasso Sea
catgaaattaatagaacacttcgtaaacggtaaaataattccgggatcttcagataaaaaaggaaaagtttttaatccagcaactggcgaacaagagtcagaggtaagacttgcttcaaaatctgatctagacaatgctgttgaggtagcaaaaaaagcatttgaaacttggtctttaaaacctgctctacaaagagctagaataatatttaaatttaaagaattaattgaaaaaaattctgatgaattaacgaagttaatagtttcagaacatggaaaagtttatgaagacgcaagaggctctttaactagaggacttgaggtggtagaatttgcttgtggaataccacatttattaaaaggtgagttttcagaaaacgttggaaccaatgttgatagttggtcaatcagacaaccattaggagttgttgcaggtattacaccttttaattttcctgctatggtaccaatgtggatgtttccaatagcaatagcttgtggaaacacttttattcttaaaccatcagaaaaagacccttcttgcgcaataagattggcagaactacttactgaggctggtcttccagaaggagtatttaatgtaataaatggcgataaagaagctgttgatgcaattttggaaaacaaagatatcaaagctgttagtttcgtaggatctactcctattgcaaaatatatttatgaaaattcagctaaaaatgaaaaaagagttcaagctttgggtggagcaaaaaaccatttagttgtaatgccagaattgtga

SEQ ID NO: 213312 - DNA, 1444 bp, Unknown
  Bacterial polypeptide expressing nucleotide sequence isolated from the Sargasso Sea
tatgtacgaaaaatttggacaattcattgatggtaaatggcaacaagctgaaaaaaaagaaacttatgatgtaatcaaccctgcaactgaagaagtgattggaaaagcatcgaaagcttcatctattgaagtgcaaaaagcattaaagtctgcagaaaaaggtttggaagtttggaaaaacactgcaccatggcaaagagcttatgtgcttagaaaaattgctgacatgatgagagaaaaaaaagatgttattgcaaaatggttaactcttgaagttggaaaacctctaactgaagcggttggtgaagttggtggtggtgctgatatttttgagtggaatgctgaggaaacaaaaagaatttatggtcaaacacaacaaagtagatttccagatactagagttcatgtttattatcaacctgtaggagttgttgcagctttagttccttggaatttcccaatagttttggcatcaagaaaaatttctactgcgttagctgcaggatgttctgtaatttgtaagccagacgtaattactcctggtgctgtaatggaattagtaaacatttgcaaagaagctggagtaccagatggtgtggttagtcttttgtcaggtgaccctgctgaaatatcaaatgaattaatggaatctgatattattaaaaaggtttcagttactggatcaactagagttggtaaaattattttaaaaaaagcagctgataaagttcaaagagttactatggagcttagcggacactccccttttattgtatgtgaagatgtggatatgaacaaagtagctgatatagcaataactggtaaatttagaaataacggtcaagtctgtatttcaccgaatagattttatatccaagaaaacagaaaagatgagtttgttgatgcttttatcgaaagagcaaaaaaattaaaaattggaaacggtatggataaaggtgtggatctaggacctttaacaacagctaagagattagaagaaatagaaaaactcgttgaaactaccaaaaaagaaggagctaaagtattgatgggtggacagaaaccttctggtttcaataaaggatattattatgaaccaacagtttttgacgatgtaaaagataattttacaataatgaaagaagaaccttttggtccactagttccaattttaacttttaaaacttttgatgaggtaattgaaagagcaaatgataatgacttaggactatgtagttatttgtacactaattctatggacaaagctcatattggatctgaaaagctagagtctggttgtgttgcagttaatactggtgttgttgcaattgctgaagcaccttttggaggtattaaacaaactggttatggtcgtgaaggtggttcaggagcaattaaagactatctaaatgtgaaatacactcacatgggcttaaaaatataa

SEQ ID NO: 213313 - DNA, 1501 bp, Unknown
  Bacterial polypeptide expressing nucleotide sequence isolated from the Sargasso Sea
atgacagaattaattggaaattatatcaagggcactcaaataacaactacccagggtgattatcaggatgttttcaaccctgctacaggaagtgtgagcgcgcaagtatgtatgtccacaactgaagaggttgaccaggcagtgaatgttgcaaccgaagccgccaaggactggggacgaacaccatcaccgaaaagagctcaagtcatgtttcggttcaagagactgcttgaagaaaattcagataaacttgccaggatcatcagcagcgaacatgggaaaacccacgatgatgccttgggtgaggtggttcgaggtctggaagtggttgagtttgcctgtgggatacctcaactgatcaaaggaaccttcagcgaacaggttgctgatggaattgatgtatattcctttccccaacctttgggcgtagtagctggaatcactccgtttaatttccctgccatggttccgatgtggatgtatcccaatgctttggtctgcggaaatagttttgtgctcaaaccttcggaacgtgaccccagtgcttctatgtttatggcagaattgctgaagcaggcaggacttccagatggtgtatttaatgtggttcagggaggaaaggaagccgttgacgcaatcctggaccatccgggaatcagcgcagtcagttttgtcggctccactccgattgcaaaatacatatatacccgggcaacttctactggaaagagggtccaggcattaggtggagcgaagaatcatatggtggttcttccggatgcagacatgcaacaggtgactgatgctttgatgggctctgctttcggttcggctggtgagcgatgcatggccatttcagtcgccgttcccgtaggagatcaggttgctgatgagttgatggaacggatgactccattggtgaaggaactccaggttggtcctccggatgataagaatgctgctatgggagccttgatcacgcgagatagtttaaaccggattgaaggtttgatccaaagtggagttgatcagggtgcagaattactggtggacggaagaggttacaaagttcaagggtacgagaatggtttttttcttggagggacacttttcgataaggttcgtccggaaatggaaatctataaggaagaagtcttcggtccagttctttcaacggttcgtgtgaatgactaccaggaagctctagatctgattcataataatccgtacggcaacggaactgcgatttttacccgtgatggtgatgccgccagggattttgtgagccgcatcgaagtggggatggttggagttaacgtgccgattccggttcctgttgcctttcatagttttggcggttggaagcagagtctttttggagatcatcacatctatggtccggaaaccatccatttctatacccgaatgaaagctgtcacctcgaggtggccgacaggtatcaaatctggagcggtctataatttcccaactctcaactaat

SEQ ID NO: 213314 - DNA, 235 bp, Unknown
  Bacterial polypeptide expressing nucleotide sequence isolated from the Sargasso Sea
ctgcgaagtcaccgggagggtggcctcggcgcaagtgtctggacaaatgatctctccgcggctctgtcactgaccgactccatcgaggcaggaacggtctggatcaatacccacaatatggtcgatccaaacctgccgtttggcggattcaagagttcgggtattggttgggagcatggtgccgcggcgattgatgcctacacaacgccgaagtccatctctatcgcgtattgaa

SEQ ID NO: 213315 - DNA, 720 bp, Unknown
  Bacterial polypeptide expressing nucleotide sequence isolated from the Sargasso Sea
aatcagcaaacattatattttcagacgcagattttgaacgagcactggacgcagcaatggttgcaatattttcaaataacgggcaacaatgcttagctggctccagaatccttgttgaaaaacccattgcaaaggagtttaaaaaaaggatggtagaaagagcgagaaacttgattatcggcgatccttttgactcaaaaacagagattggcccccttatttcaaaagaacaaattgagaaagtcatgtcttttgctcaaacagccgaagaatccaatgacaccaacatactttgtggaggaaagcgatgcgagtcctttcaaaaaggttattattttgagcccaccattgtagaaacgaagagcaatcaaaacactgtatgccaagaagagatttttggccctttcgcgaccattctcgagtttgatggcattgatgaagcaatagaattagccaatgacagcgagtttggcttggtgtcatacgtatggtctactgacattaaaaaaatcatgagagctcaagccgaaataagagcgggagtggtctgggtcaatacgcctctgatgagagagctcagagcaccatttggggggtataaaaactctggaattggtagagatggtggagaatggagtagaaatttattcactgaggaaaaaaccgtatccattccattgaaagactttccaattacaaaactcggggaaaacgattgaa

SEQ ID NO: 213316 - DNA, 496 bp, Unknown
  Bacterial polypeptide expressing nucleotide sequence isolated from the Sargasso Sea
tatgtacgaaaaatttggtcagtttatcgacggtaaatggcaacaatcttcgagtggcgaaacgtttgaagtaattaatccagccactgaagaaattattggtaaagcatcaaaagcaaatagtaacgatattcaaaaagctctaaaatctgcagaaaaaggcttggaaatttggaggaacacctcaccatgggaaagatctaaaattattagaaaaatttctgaactaatgagaaaaaaagtagatactttatcaaaatggcttactttagaagttggcaaacctctttctgaaggtggaggtgaagtaggtggcgcagctgatatatttgaatggaactcagaagagacaaaaagaatttttggtgaaataaaccaaagtcgttttccaaatacgaaaatacacgtgatttatcaaccagtcggagtagtagctgcgttagttccttggaattttcctgttattttagcatcaagaaagattcaactgctttag

SEQ ID NO: 213317 - DNA, 934 bp, Unknown
  Bacterial polypeptide expressing nucleotide sequence isolated from the Sargasso Sea
ttgtggtcaacctgcggaagccacacctctatgcgcaaaagccgtttttcagatttttgagaaagcctcatttccgccgggtgttgtgaatctcgtgaccgcagaaaatccaaaacccatcggcgagatgttcatcaacgatacacgaatccggaaaatcaccttcaccggttccacaaaaatcggaaaaatgctggctgaaggggcaggaagaggtttaaaacggatctccctggaacttggcggacacgcaccgttcatcgtttgtgccgatgccgatcccattcatgcagccaaagggttgtcattggtgaaatttttaaattccggacaggcttgcatcagcccaaaccggatctatgtccatgcacagcaggaaaaagcctttcttgatgaactcaaatcgagggtctcaaaattaaaggccgggccaggtctggagcaggattcgaagatcggtcccttgatcaatcaggaagccctggaaaaagtggaaacgcaggttcaggatgcccttaaaaagggagcggaactgatctccggaggcgaacgaatcagagatgattcctgtgccgatggttttttctatgctcctaccatcctcagccgggtcactcctgaaatgttgatctatcgggaagaaacctttggaccagtggctccggtaatcatctaccaggatgaagacgatcttttggaaatggcaaacgacacccattacggcctggcgtcttatgtctacacacaaaacttgaaatccgccatgcggctttttgagggattggaattcggaattgttggaatcaatgatatcaatccaacctcggcggcggctcccttcggcggaatcaaggatagcggaatcggcagagaaggagcatcagaaggcatccacgaatacctggaaaccaaactcggagggttttcgatttaa

SEQ ID NO: 213318 - DNA, 468 bp, Unknown
  Bacterial polypeptide expressing nucleotide sequence isolated from the Sargasso Sea
tatgcatagagtcttagagctacaaaagagcttgaatataaaagaaggagctcctagtttggagctacgatctgatcgtttagatagagtggtcgcaatggtaacaaaatataaatcagaaacaatatcggctttacaagatgattttggaaatagagatccagtaatgtctgcagctactgaagttgattcagtcataggaccaatgatgcatgcaaggaagaatctaaaaaaatggatgaaaactgaaaaaagaaaagccgctattgcaccattaggctcagctttatctcttttaggggcaaaagccgaaataagatatcaacctaaaggtgttgtaggcacaattagtccttggaactttcctttgaatttagcgctagctcctttagctggaattttatctgctggcaatagagtgatgttaaaaccttcagaactcacaccagcttcatccgatttaacaaa

SEQ ID NO: 213319 - DNA, 577 bp, Unknown
  Bacterial polypeptide expressing nucleotide sequence isolated from the Sargasso Sea
tatgagtaacgatgcaacggttatcgtcagcgacgcggttcgcgcgttcgtgcaacgcgatttcggcctgtttatcggcggcacgcagcaacgcgcgcattcggagcgccggctggacgtgttcaatccggcgagcggcgagcgcctcgcgacggtagcggacgcggacgcaaccgacgtcgatcacgcagtgagcaatgcgcgcgccgcgttcgacgcgcgggtgtggagcggtctgcgtcccgccgatcgcgaacgcattctgctgcgttttgccgacctgctcgaagccaatgccgaagacctcgcgcaactcgaaacgctgaatcagggcaagtcgatcaacattgcccgcgcggtggaagtgggcgcgacgatcgaatacgtgcgctatatggcgggctgggcgaccaagattaccggcgaaacgctggacgtgtcgatcccgtttccgcccggtacccgctatacggcgttcacgcgcaaggagccgatcggtgtggtggccggcatcgtgccgtggaatttcccgctaatgatcgcggtgtggaaactggtgccggcgctcgcggcgggt

SEQ ID NO: 213320 - DNA, 937 bp, Unknown
  Bacterial polypeptide expressing nucleotide sequence isolated from the Sargasso Sea
atggattttggtaaccttaaaatgtatattaatggagagttaacctcctcacacaacaccatgactaaggatattattagccctttaaatgatgaaaaaatagcaactcttgcctggggatcaagcaatgactccattagggctctagaatcggcaaaagagggatttaaactttggtcaaatactcctactaaaaaaaggaaagagtggatgcttctttttagagaaaaaatattggaaaatgaggaaatattaagaaagtctatttcttatgaaatgggaaaaccatactcagccacagctgaagatattgaatcaataacaaacagcttaaaatattattctgatattattgaagattatcaatcagacaaagaaattatagataatgaaaacactcataaacactatttgatttcaaaacctattggtgtggtggtagcatatttagcttggaattttccattgttaaatgctggttttaaattaggtcctgctcttgcttctggttgcagtattattctaaaaccctctgaattatcaccattatccttatatattattggtcaaattcttgatgaaattgattttcctaagggtgtggtaaatattatttgtggagaacccaatcaggtagcaacaacattgtcaaaaagtaccattccaaatttaattacgatgattggttcaactgaaactgcaaaaaaagtaatatccgattcatctacatcaattaaaaaatatagtatggaacttggtggaaatgcacctttcattgtatttgatgatgctgatattgatcttgcagccgatataggtgctgctattaaatttggaaattgtggacaaatatgtgttgctgctaatagattttatattcatcaaaatatttttgatttctttctaaataaactaatctcaaaagcaaaaattctta

SEQ ID NO: 213321 - DNA, 514 bp, Unknown
  Bacterial polypeptide expressing nucleotide sequence isolated from the Sargasso Sea
atgacaataaaagttgggattaacggtcttggaagaataggaagaatgatagtaagagctatcacagaaaataaatataaagatatagaaattaaacacataaataatagatctaattctgaagtcagttctttattattaaaacacgattcaatacatggaaaattaaaggaagacctgaaatttgataaaaatagtataacactaaataataaaaaaatttccttttctcaagaaactaatattgaagatattaaatggaataaacacaatgtagattatgtttttgaatgtacaggaaaatttaattctaaagaaaaattaagtgatcatttaaaaaatggtgcaaaaaaagtcattgtatctgctccatgtaaaaatgcggataaaacaattgtgtatggagtaaatgaaaagagtcttaacaaaaatgataaagtaatttcaggtgcatcttgcacgacaaattgtcttgcccctgttgtaaatattttaaacgataatttgaaataga

SEQ ID NO: 213322 - DNA, 1049 bp, Unknown
  Bacterial polypeptide expressing nucleotide sequence isolated from the Sargasso Sea
aatgttagataaaagaaaattttatataaacggtgaatgggttgatccagttaaaaaaaacgacttcgaagtaattaacccatgtaatgaagatccttgtgcaattatttcgttaggttcaaaggaagatacggataatgccgtaaaagctgcaaaaactgcatttgagagctttaaagaaaccactaaagaagaaagattagatttacttgaaaaattattagctatttacaaaagaaggtttggtgaaatggctgaagctatctcattagagatgggagcgccaatggattgggctgcagaggtacaaactgcgtcgggacaggctcacttggaagattttataattagacttaaagaatttgaatttgatgaacattttgatgaaaaatcaaacaaccatatttattatgagccaattggtgtttgtggattaattaccccgtggaactggcctataaatcaaatagctttaaaggtagttcctgcatttgcaacaggatgtacaatgattttaaaaccatctgaaatagcaccaatatcagcaatgttatttgcagaaatgattgatgaagttggatttcctaagggggtttttaatttagtgaacggagatggtgtgggcgttggaactcaaatttcaagtcatcctgatattgatatggtttcttttacaggatcaacaagagctgggagattaatttcaaaaaatgcagctgagacaattaaaagagtttgtttagaacttggaggcaaaggtggaaatatagtttttgcagacagttataaaaatgcagttcgagatggtatcagaaatgtaatgagtaattcaggtcaatcctgtgatgcacctacaagaatgcttgttgaaaaatctatttaccaaagagctgtggatgaagcagttgatgaagcaaacaaaataggagttgatcaagcctctaaaaaaggagatcacattggacctgtaatttcaaaaactcagtatgataaaattataaatttaattgaaagtggaattaaagaaggagcaacgttagctgcaggag

SEQ ID NO: 213323 - DNA, 718 bp, Unknown
  Bacterial polypeptide expressing nucleotide sequence isolated from the Sargasso Sea
atggacactataaatcactttatcgaaggaaaaaaatttacagataaaaattccagaaaaggaaaagtattcaatccagcaactggagaacaaattgctgaggtagaattagcaagtaaagatattgtaaatatggcagttgaaagttcctctaaagcttttgtaaaatggtcaaaaacaactccaataactagagcaagaattttttcaaaatacaaagatcttttagtccaaaatatgagtgaaattgcagaactagtttcaaaacaacatggaaagacaataccggatgcaaaaggttctattcaaagaggtattgaggttgttgagtatgtgactggaataacatcatcattaaaaggtgagcactcttcaaatgttggaacaaatgtagactcacatactcttcgtcagccattaggagtttgtgcaggaataactccatttaattttccagctatggttccaatgtggatgtttccagtagcaattgcatgtggaaatacttttgttcttaaaccttctgaaaaagatccaagctgccctataagattgggtgagctagcaatagaggctggttttcctcctggagtactaaatgttgtaaatggagataaagagtcagttgatgcattattagaaaataaagatgtacaagcaattagttttgtaggttcaaccccaattgctgaatatgtatatcatactaggaactaaa

SEQ ID NO: 213324 - DNA, 1426 bp, Unknown
  Bacterial polypeptide expressing nucleotide sequence isolated from the Sargasso Sea
catgcgcaccgaacgcaactacgtgaacggccgtttcgtcgccccggaaagcgacacgttcatcgtcgtccacaatcccgccaccgaagcgccgttcgcgcgcgtgccggccgcgacgccggccgacgcacgcgccgccgtcgacgccgcggccgccgcacagaaggcatggcgcaagctgccgagcgccgagcgcgccgcctacctgcaccgcttcgccgacgcgctgaccgcacgcgcatccgaaatcggcgcggcgctcgcgcaggaatccggcaagagcgtcgaggacgcgtcaaacgaagccgtctacgcgggccagatcacgcgctaccacgccgagtgggcgcgccggatcgagggcgagatcatcccgagcgacacgcccgacgagaacctgttcctgcagcgcgagccgatcggcgtcgtcgcgtgcctgatcccgttcaactacccggtctacacgctgctgcgcaaggtcgcgcccgcgctgatcgccggcaacaccgtggtcgtgcggccgagcaaccacacgccggtgtccgcgttcgagatcgccaaggccgccgacgatgccggcttcccgccgggcgtcgtcaacatcctggcgatggaccacgcgacggccgaagcgctgtgcacgcatccggccgtcgggatgatcacgctgaccggcagcgtgaacgcgggccgcaaggtgctcgactactgcaaggcgaacatcgcgaagccgtcgctcgaactcggcggcaagacgcccgcgatcatcgagcccgacgccgacctcgaacgcgcggccgcggcactcgtcgcatcgaagacgacccattgcggccagctctgcacggcaatcgaacgcgtgtacgtgcacgacagcgtgcacgaccgcttcgtcgcgctgctgaaggagaagatggcggccgtgcgcatcggcgaccgtgcggaagacgcctcgcgaatgggcccgctcgtcagcgcatcggcgcgcgcgcacattcacgagatggtcgaacgcgcgatcgcagccggcgcgacgctcgaaaccggcggtgcgattccggccggccccggcttcttctacccggccacgctgctcaccggcgtgcggcaggacatggagatcgtgcaggaggaaaccttcggcccgatcatgcccgtgctgcgctacacgacgatcgatgaagcgatcgcgctggcgaacgaccaccagttcggcctgtcgtcggtgctctacaccgagcgctaccgcaccgcgatgaccgttgcgaacgcgatagaagccggcgagctgtacgtgaaccgcacgccggccgatccgtaccagggcttccacgccggctggaagcgctcgggcctcggcggcgacgacggcaagcacggcatgctcgaattcacgcagacgcgcctcgtcgtcatgaagtactga

SEQ ID NO: 213325 - DNA, 892 bp, Unknown
  Bacterial polypeptide expressing nucleotide sequence isolated from the Sargasso Sea
aactgggtgaagcaacaaggttgcgttatcgtgtcgcaaagtggtgagctagcgcctgctgaccgtcgcttgtatttaatccgtgatgtcaccgccactgtcgaatctataccgctgatcaccgcctctattttgtcgaaaaagttggccgccggtctgcaggctttgacgatggacgtaaaaattggctcaggcgccattatgaaaaacgtcgccgatgcttctgctttagcgaaaagtattgtcaatacggccaaaggggctggtgtacctactcaggctttgttaacagatatgaaccagactttgggcgctaccgcaggtaacgcgctggaaatactggaaactctggattatctgacaggaaaataccgcgagccccgtttgcatcaggtcaccttagaattaggtgccagcatgttgcagttaggtggcttgtttaacgataaagccagcgctattgcagctttggagcaaagtttaacttcaggtaaagctgctgaaattttcagtaaaatggtggcggctcaaggtgggccagcagatttactggaaaaaccagagctgtatctggctaaagccaaagtggtgctggatatcaaagccccggttgccggttatctgaataaagccgacaccactgctattggtatggcggtagtgcgtttgggcggcggtcgtgctcaccctgatcaggtgattaatatggctgtgggtttcagcgaagtgaaggcattgggcgaaaaagtggctgcaggtgatctattagcccgggttcatgctgatacaatggaagctgcagagcacgctaaaaatgagtatctggccgctttaactattgaagcaacagcagtgacaatcgatccaattatccacttagtgattgattaat

SEQ ID NO: 213326 - DNA, 889 bp, Unknown
  Bacterial polypeptide expressing nucleotide sequence isolated from the Sargasso Sea
catgggccgttcaacggcagcatcacagttgaccacgagcgtaacgcgctaaaagcaaacggttcatacattcaagtcatttatgccaacagcccagatgaagtggattacacgcaatatggtatcgataacgctatcatcgtagacaacacgggtatctggcgtgaccgcgatggccttggcctacaccttaaagctaagggggcagcgaaagctatccttactgccccgggtaaaggtgacatcaagaacatcgtacacggtgtaaatgacgaagaagtaacaccagaagatacaattgtgtctgctgcaagctgtacgactaacgcaataacgccggtacttaaagcgctagacgaagagtatggcattgaaaacggtcacgttgaaaccgttcactcttacaccaacgaccaaaaccttatcgataactaccacaaaggtgatcgtcgtggacgtagtgcgccacttaatatggttattaccgaaacgggcgctgcgaaagccgttgccaaagcgtacccaaaactggcaggtaaacttaccggtaatgctatccgcgtacctacacctaatgtgtcgctagcgattttgaacctaaatcttaaaacaccagtggatcgtattgcagttaacgagttcttgcgcgataccgcgttgttctcaaagcttcaacaccaaattgactacacggcaagtaaagagattgtgtcaacagacttagtcggctctcgcgctgcgtctgtggttgactctcaggcgaccatcgccgcagataaccgcctgacactatacgtgtggtatgacaacgagtttggttacagctgtcaggtactacgtgtagttcgtgatatggcagggcttagtttccctacgttgccgctttaag

SEQ ID NO: 213327 - DNA, 1957 bp, Unknown
  Bacterial polypeptide expressing nucleotide sequence isolated from the Sargasso Sea
attggccctgcggcacgcagccgtgcctgggaaaaagcccgtcagttggtggtgaatatccgcgaagctcaggtcggtaaaggcggagtagacgccctgctgaacgaattctctttgtcgaccgaagaaggtttagtgctgatgtgtttagccgaagccttattgcgtgtgccagacaaacatacggccgaccttttgatccgcgacaagttatccaacggcgattggagctcgcatttaggcaacagtgaatctttatttgtaaatatctcggcctggggtttattgctgactggtaagctggtgaattacagcgacgatcagaaaaaagctcagtttggtttattaaaacgcacctgtggccgtatgggcgaaccagtgatccgtcaggctgtgcgttacgcgatgcaaattatgggcacccagtttgtgatgggtaccagcattgaaaaagcggtagaacgtgcagtagagctggaaagcaaaggttttacttactcctacgatatgctgggtgaaggcgcccgcactatggacgacgccaaccgttatttcgacagctacatgatggcgattaaagtcataggcactgcagcgaaaaaacgtggcccattaaaaagccctggcatttcagtcaagttatcggccattcacccacgctacgaatttacccatcgcgaccgggtgatcagtgaattagtgccacgcttaaaacaactggcgattgccgctaaggcctatgacatcagctttacagtggatgcagaagaagctgaccgtttagatttatccctggatattatcgaagctgtattctcagatccggaattaaacggttgggaaggttttggtttagcagtgcaagcctactccaaacgtggtttatttgtgattgaatggctgcgcgagctgacggtcaaagttggccgtaaaatgatggtgcgtctggtcaaaggcgcctactgggatactgaagttaaaatcagccagaccgaaggattaagcgacttcccggtatttagccgcaagccgtccactgacgtgtcttatcaggcttgtgccaaaaaaatgctggaataccgtgacagcatttatcctatgttcgccactcacaacgcttacacagtagccactattttagaaatggcaccggatcgcactggttatgagttccagcgtttacacggtatgggtgatgcgctgtacgatcaaattgttgctgatgacaaagttccttgccgtatttacgcccctgtgggtgaacactcagacttactggcttacttagtccgtcgtttattagaaaacggcgccaacagttcttttgtgaacaacatagtcgatgaaactattccggtggaatctttattaaaagatccggtggagacagtgcgtgcctggagcaaaaaacgtaataactctattccgttaccccaccagctgtacggtgcggctcgcctgaactctaaaggtcaggactttaccgatatcgatcaggtcaccgctatgcgcgaagccatggatacatggctcgcttccgttagccagattgaagtaccggctggtgcttttgctgtgactaacccggccaacaccaaagaagtgataggtttccatcatcacagcactgctgagcagatgcagcaaactgtggcattagccgaagccgcgttcccggcctggtctgcgactgctgtgactgaacgcgctctgcttttaaataaactggcggatcagctggaattacaccgcgacgaattactggctttatgtattaaagaagcaggtaaaaccgtgggcgacagcatggccgaagtacgcgaagctgttgatttctgtcgctattacgctgctgaagccactaaaaatctgcaggctgctcaagcccgtggtgtagtgctttgtatcagcccgtggaacttcccattagctattttcttaggtcaggtcagcgcag

SEQ ID NO: 213328 - DNA, 889 bp, Unknown
  Bacterial polypeptide expressing nucleotide sequence isolated from the Sargasso Sea
catgaatttaattcaacattttgtaaatggaaaaataattccaggtaaatctgatagaagaggaaaagtttttaatccagctattggtgagcaagagtcagaagttatattgggtttaaaatcagatttagatgaggctgtagatgtagcacaaaaagctttcgagacatggtctttaaaaccgccaattcaaagagcaaggataatgttcaagttcaaagaattaattgaaaaaaattctgatgaattaacaaaaatgattgtttccgaacatggtaaagtttatgaagatgcaaaaggctctttaataagaggacttgaagtagttgaatttacttgtggaattcctcaagttttaaaaggtgaatttacagagaacgttggtacagatattgatagttggtcaataaggcaaccacttggtgtttgtgcaggtataaccccatttaattttccggctatggttccaatgtggatgtttcccatggctattgcttgtggaaatacttttgtattaaaaccttcagaaaaagatccttctatttcaataaaattagcagagttgttccaagaagctggactaccaaatggagtatttaatgtaataaatggtgacaaggaagtagtagatgcaattttgactaacaaagatattaaagctgtaagttttgtgggatcaacaccaattgcaaaatacatatatgagaatgcagcaaaaaatgaaaaaagagttcaagctttgggaggagcaaaaaatcattgtgttgtgatgcctgattgtgatttagatcaggcagttaatggtttgatgggtgcagcttacgggtctgcgggtgaaagatgtatggctcagtcagttgcggtcgcagttggcaatattggagataat

SEQ ID NO: 213329 - DNA, 914 bp, Unknown
  Bacterial polypeptide expressing nucleotide sequence isolated from the Sargasso Sea
gatgataaaaccctcagagtacacgcccgcaacatctcaactaatcaaagatttgcttgaagaagcgtattcgccagaagaggttgttgtcgttttaggaggaccagacgtagggaaagcttttgccgaaatgccttttgatcaccttctttatactggatcggggtcagtagcaaaacatattatgagaagcgcagcggagaatttagttcctttaactctagagttaggtgggaaatctccagtgattattggcgaatctgcagacctggaggttgcgacgaataatattatggcagggaaaactttgaacgcagggcaaatatgtttggcgccagattatgtttttcttccagagggacgtaaagaggagtttttacaacatgccagtaactccgttagcgaaatgttcccaaacttaaaagacaatccagactacacaagcgtaatcaaccagtcacactttgaaagactcaacgaactggtttctgatgcgaaagaaaaaggtgcggaagtcataaaacttaacccagccgacgaggatttctcgcaacaagaaaattttcgcattgctccaaccttgattttcaatccaggtgaggaaatgaaaataatgcaagaagagatattcggacctctgcttcccgtgaaagaatataaacaggttgaagaaactattacctacgtcaactcaaaggacaggccactcgggctttattactttggtacagacgatgaagaacaaagaaaggttcttgataaaacaacttcgggcggcgtcacgataaatgatgtaataatgcacgtgactcaggaagatctcccgtttggaggggtcgggccgagcggtatgggttcatatcacggacaagacgggtttaaaacttttagtcaccttaagtctatatacaccc

SEQ ID NO: 213330 - DNA, 694 bp, Unknown
  Bacterial polypeptide expressing nucleotide sequence isolated from the Sargasso Sea
atgaaaagacaaattgcatattttatagttatttttgttggattccttgcgttaattggtcattttataaattatgctccattaaataattttattgataatgatgcaactcaatggtttgatattatttctggatttgcggcttttcttggggttataagtcttttaaacttgcacataaaaaaaataatatataaaagaccaaattggcaatatagcattattactacattgagttttttaataatgttattttttggttttatatatattggtattgatgttccaagaggtgcgcaccttaaagcagaaggctctgcattttattggatgtttaataatatatatttgccacttgcatcttctatgtttgcacttttggccttttttgttgcttcagcatcatatagggcatttaaaataagaaattttgaagcaactttattattaatatccggtgttttacttatgttgggaagagtccctataggtcaaataataccatggtggttttcagtagaactgtatattttaattttatttgctgtaatagcaggtttattttctaataaaagaacccttgttttatttatggtattttcaatggtgactttcccagttttaatttattcatttgatcttacagcattaaaattatttagtattccagatggtacaggagtggatttttgat

SEQ ID NO: 213331 - DNA, 854 bp, Unknown
  Bacterial polypeptide expressing nucleotide sequence isolated from the Sargasso Sea
tgcagctttagcagcaggttgcaccatggttctaaagcctagtgagatatcaccttattgtgcaatgcttttagctgaagtgtttgacaaggctggcgtgccaaatggtgtattcaatgttgttaatggatatggtcccactgttggtgcagcgctttccgaacatccagatgtggctatgatgtcatttactggttcaaccagagcaggaatcgctgtagctcaagcttctgcagtttcagtaaagcgtgttcatcaggaattaggtggaaaatcatcaaatataattcttgatgatgttgctgacttagaaaaatctgttaaaggcggagcaggtcattgttttttaaattcaggtcaatcttgtaatgcaccaacaaaaatgttggtatctgccaagaattatgacaaagcagtagaggttgcagttgctactgcaaacaatacaactgttggagatcctaatggtgaatttagaattggaccaattgcaaataaaactcaatacgaaaagattattaaattgatcgaaataggtattgaagagggcgcaactttagttgctggaggagttgaaaagccggaaggatgcgagaaaggttattacgtgagaccaacagtttttgcaaatgtaacaaatgatatgacgatagctaaagaagaaatatttggccctgttttggtaatgattaaatatgaaagtgaagatgaagcaatttctgttgcgaatgatacggaatatggtcttgcaggttacgtccaaggagagcctgagcatgcaagggaagttgcaggaaaaattcgagctggtcaagtaatcataaatggtggcgcaagaggcacaggcgctcctt

SEQ ID NO: 213332 - DNA, 567 bp, Unknown
  Bacterial polypeptide expressing nucleotide sequence isolated from the Sargasso Sea
aatgatatttaagaattttatcaataatgaatggtgcgacgcacaaaattgtaaaacattcgaggtcataaacccctttactgaaaaagtgatcacaaacgttcccgccagtgatgaaaaggatgtggcgattgcagttgaagcagctaagaatgcattttatgattggagtaacctcactgcaggtgagcgccgtgatcatttaagagctctagcaaatagatcaagagaacatgctgaagaaatagcgaagacaatatcttcagaaatggggaaaccttacaaagatgctttgactgagatcgatgacctagctgaatatcttgaatattatagtgaacttgcccgtgaccaagttggaagaatggttgctccggtagatcagaaatcaatgtcattggtccgatatgagccctatggtgttgtgggttgtatcataccatggaactatcctttatctctcatgggttggaaacttgcacccgcattagcagcagggaatacgatcataatgaaaccaagtgagattacgtccctgtctattttacattgggcagaacttgtagt

SEQ ID NO: 213333 - DNA, 577 bp, Unknown
  Bacterial polypeptide expressing nucleotide sequence isolated from the Sargasso Sea
acgtctacttgttgaaaaatcaatttatgagagagcagtaaaagaagcaattgaagttgccgaaaaaacagaagttgatgttgctaataaaccaggtaaacatatcggaccagtagtgtcaaaagtgcagtatgataaaattcaaaatcttattcacaaagggattgaagaaggagcaaaacttgttgcaggaggacctgatcgaccttctcatttaaaaaaaggatattttgtcaaacctactgtatttgctaatgtaaataatgaaatgacaatagcgaaagaagaaatctttggacctgttgtatcaataattccttttacaactgaagaagaagcaataaaaatttctaatgacactgcttatggtttgactaactatattcaaactaatgatactaataaagctcatagagtagctaaacaactacgctctggaatggttgaaattaatggggtaggttttgctgatggatcaccatttggtggatataagcaatcaggtaatggccgtgaaggtggtaaatggggaattgaagaatttttagaagtaaaatccattagtggatggaaataa

SEQ ID NO: 213334 - DNA, 992 bp, Unknown
  Bacterial polypeptide expressing nucleotide sequence isolated from the Sargasso Sea
cactgaagaagttattggtcacgcttccaaagcttcgccaactgatgtagataaagcactcaagtctgcagaacaaggtttagaaatttggaaaaaaacatctccttggaaaagatcttcaattattagaaatattgctgatctaataagagcaaaacaagatgtacttgcaaaatggataacactcgaagttggaaaaccttttatagaaggaaaaggtgaagttggagcgacagcagatatttttgaatggaattctgaggaaacaaaaagaatttatggacaaacagtagaaagcagatttgaagaaactagaattcatgtttactatcaaccaataggagttgttgcagcaatgtctccttggaatttccctttagttttatcaggaagaaaaatatctacagccttagctgcgggctgttcagtaattattaaacctgatgtaatcgctccaggtggaacaatggaacttgtagatatttgtagagaagctggggttcctccaggggttgtaaacctactgtctggtgatcctccaagcatagcttcacaattaatttcctcagatataattaaaaaaatttcaatcacaggatctacaagagtcggaaaattaatacttaaacaggcagcagagaaggttcaaagagttacaatggaattaagcggtcatgcaccatttattgtatttgatgatgcgaatatcgaaaaagcaactgatatggccatagcttcaaaatttagaaataacgggcaagtttgtatttctccaagtaaattttatatccaggataaaatgaaaaaagattttattaatttatttatagaaaaagctaaaaaattaaaaattggaaatggcatggacgctgatgttcaattaggaccaataacaaccaagaaaagacttaatgaaattgaggatcttgtagacaaaactaaaaaagaaggtgcaaaagtattattaggaggaaaaaaaccatctggaatta

SEQ ID NO: 213335 - DNA, 759 bp, Unknown
  Bacterial polypeptide expressing nucleotide sequence isolated from the Sargasso Sea
gtgaggttgggagaaagatattagaatactcatcattatccaacttaaagagagtgtatttggagcttggagggaaatctccaaatattgtctttgctgataccccaaacatagatacagcggtcacacagagtcttggtggaattttcagaaactctgggcaagtctgtgtagctggatcaagacttataatagaagaatccattgcagacgagtttacggaaaaactcatcaatcaatcaaaagatttggttgtcggcgatccgctaaatcttaattcaaattttggtgctgtctcatcaaatgaacaattgataaaaaacctaaaatacgtaaatagcgctatagatgatggtgctaagttaagaattggaggcaaacaaatcaacaaaaacactggtggattctatatggaaccaaccattttttctgatgttgacaatcaaatgaccattgctaaagaagaggtttttggccctgtcttaagcgttatcaaatgtaaaaatgaggaagacgctgtccaaatagcaaacgacacaaattacgggcttgctgcagcagtttggacatcagatctgagtaaagcacaccgcatgataaaatcaatccgagcgggcgttgtgcatgtcaattgttatggtggtgccgatatcacagttcctctcggcggggtaaaacaatccggtaacggtcacgatcgatcattgcatgcattagaaaaatacaccgatctcaagacagcatggatttctctttgaa

SEQ ID NO: 213336 - DNA, 451 bp, Unknown
  Bacterial polypeptide expressing nucleotide sequence isolated from the Sargasso Sea
tcaattcaataaaattcaaggtttaattcaaaaaggaatagatgagggagcaaaattagttgcaggtggaattggaaaaccaaacggattaaatgatggttattatgtaaaaccgacagtttttgctgatgtaaaaaatgaaatggaaattgcaagaacagaaatatttggtcctgttttatctgttattccatttgaaactgaagaagaggcaattaaaattgcaaatgatactgattatggattaacaaactatattcaaactcaagataaggaaaaagtccaaagagttgccagaaaacttagatctggaatggttgatgtaaatggtgctggtattgcagttgatgcaccttttggaggtttcaaacattcaggaattggaagggaagcaggtaaagagggattgcttgaatttctagaagttaaatctgtaggtggttggaattaa

SEQ ID NO: 213337 - DNA, 961 bp, Unknown
  Bacterial polypeptide expressing nucleotide sequence isolated from the Sargasso Sea
ttagcaacaatgaaaattgcaggagcaattgcttttgggaatagctgcatattaaaaccatctgaattaacaccacttggatttgttccattcatgaatttactcaaaaaagcaggcctgccagacggcgtgataaacatggtcaatggaagagggtcagtaacaggtactgcgatcacacaaaatgaaaacatcgatgtaatcgcctttactggggggactgagacaggaagggtcataggcgcagagtcgggtaaaacacttaaaaaaattgttactgaactgggcggtaaatcagcaaacattatattttcagacgcagattttgaacgagcactggacgcagcaatggttgcaatattttcaaataacgggcaacaatgcttagctggctccagaatccttgttgaaaaacccattgcaaaggagtttaaaaaaaggatggtagaaagagcgagaaacttgattatcggcgatccttttgactcaaaaacagagattggcccccttatttcaaaagagcaaattgagaaagtcatgtcttttgctcaaacagccgaagaatccgatgacaccaacatactttgtggaggaaagcgatgtgagtcctttcaaaaaggttattattttgagcccaccattgtagaaacgaagagcaatcaaaacactgtatgccaagaagaaatttttggccctttcgcgaccattctcgagtttgatggcattgatgaagcaatagaattagccaatgacagcgagtttggcttggtgtcatacgtatggtctactgacattaaaaaaatcatgagagctcaagccgaaataagagcgggagtggtctgggtcaatacgcctctgatgagagagctcagagcaccatttggggggtataaaaactctggaattggcagagatggtggcgaatggagtagaaatttattcactgaggaaaaaaccgtat

SEQ ID NO: 213338 - DNA, 822 bp, Unknown
  Bacterial polypeptide expressing nucleotide sequence isolated from the Sargasso Sea
tatgtcagaaataaaaacctataaatattatgctggtaacaaatggtatgaaccttcatctggtcaatactttgaaagtgaagatccttcaaatgggaaagtttgggcaaaacttcctgactgtaatgaagtagatattaatattgcagttaaaagtgctaaaaaggcttattatgaagggccttgggggaaaatacattcagctgaaagaggaagaattttaaacagaattggagatataattgctaaaaatgctgaaagaattggacagattgaaacaaaagataatggtaagttgccaaaaaatataacaccctctttaacaagttggcaaactgagagcttttattactatgctggaatgtgtgataaatttgaagggcgattaataccttctgaagttcctaatatgcataattatttaaaatgggaaccattcggtgttgttgctcttgtgcttccttggaactctccaattggaacattaatttggaaactagcacctgctcttgcagcaggtaatacagttataataaaaccttctgaaagggcatcatgttcaactttagagttaatgagtattttagaggaggcagacttacctgagggtttaataaacgttgtaactggttttggaaaaactactggtgcacctttaattgaacacgatgacgtaagaatgataagctttactggtggaacaaaaggtggaagtgcagctagtttaagtgcatcaaaaaaagttaagccaataattatggaacttggtggaaaatctcctcaaattatttttaaagatgctgatttaaatttagcagtaaa

SEQ ID NO: 213339 - DNA, 404 bp, Unknown
  Bacterial polypeptide expressing nucleotide sequence isolated from the Sargasso Sea
acttttatctggaggtatttcagatattaaacaaaaaggtttttatgcaaaaccaactttgtttgatggtctaaaagaaaatatgactattgcgcaagaagaaatttttgggcctgttttaggagtattaactgttaaaaatgacgaagaagcactaaaagttgcgagtaattcaaaatatggattacatgcaagtgtatttactcaagatataaaccgtgcatttcatttagctaaaagtcttccatgtggtacagtttcagtaaatactttttcagaaggagatatcaaaactccttttggaggttataaacaatcaggatctttatcgagagatcaaggcacagaggcgcttaattcatttcttcaaaccaaaacaatttggataagtcacaataattaaa

SEQ ID NO: 213340 - DNA, 859 bp, Unknown
  Bacterial polypeptide expressing nucleotide sequence isolated from the Sargasso Sea
tttgtatgggtttggtcgaatcggtaggttagtttcacgcattatggctcaaatgacaggcccaggtaattattatagactcagagcaattgtcgtgagaaaaggatcagatacaaacgatcttcttaaacgagctagtttgttgagacgtgattctgttcacggttcatttcatggaactattagagtcgataatgagacggaaactttagtaataaatggaaatcctgtaaagatcatctatgcaaatggaccaaaagactttaattattccgattacgatatagataatccaattgttattgataacacaggcgtctggagagaggagaaagatttatctcttcatctagaatctggcgctagcaaagttgttctaactgcacctgcgaagggtcaaataaagaatattgttaacggtattaataacgacatattgaatgaatctgataacgttatctcagctgcttcttgcacgactaatgcaattgttccggttttagacattttaaataaagaatattcaataacatcaggacatatcgaaactgttcatgcatatacgaatgatcaaaatctaatcgataattatcataagaaagatagaagaggaagaagtgccgctttaaatatggttataacatctacaggagcagtaaaagcagtttctaaagcattacctgaactcgatggaaaattaactggtaatgctattagagttccgactccaaatgtaagtttggctgtaatgtcactttcagtagataagaatgatctaaataaagatgatgttaatgaatttctcaggaagacagcctttaactctaaatatagagaaattgttggttttgttaactcc

SEQ ID NO: 213341 - DNA, 728 bp, Unknown
  Bacterial polypeptide expressing nucleotide sequence isolated from the Sargasso Sea
aatggattataaaaattatataaatggtaaatgggttgaagcaaagtctgggaaaacatttccagtggaaaatccatttaatcaagaaattatatcacatgtaccagatagtgataatcatgatgttaatgaagctgtttccgcagcaaatacagcgtatagcgattggcataaaatgagcgcatcagagagaagagacctcatgaaagaattggctaataaatcaagagagaatgccaatgaattggcaaaaacgatttcaatggaaatgggtaagcctttccctgaggcattagatgagattgatacagtggcagattttttagaatactatggagaactagccagagatgaagttggaagaatagtagctccagtggacagaaacacaatgtctctggttcggtatgaatcaataggtgtaattggttgtatcatcccctggaactacccgcttgcgctaatgggctggaaattagcgcctgctctagcggcggggaatacagtggtcatgaaaccatctgaaataactccactatcgatattgcactggtgtaatgtagttgactctgttctccctgatggtgtgatcaatgtaattaccggttttggtcaatctgcaggagaaccaattgtaaatcacccggatgtgccggttgtaacctttaccggatccgtagctactggtaaaaaaatagccaagtttgctgctgaaaatctcaaaaaag

SEQ ID NO: 213342 - DNA, 907 bp, Unknown
  Bacterial polypeptide expressing nucleotide sequence isolated from the Sargasso Sea
tgagcgactggtaaccgcgcagagtcaggaaaccggtcagcttcgccattttattgagaaagaggagattgcggcatcctgcgatgccatccgtttttttgctggcgcggcgcgctgtcttgaagggaaggcggccggagaatattccgccgggtttacatcgaccatccgtcgtgaaccgctgggtatcgttgggcaagttacgccgtggaactacccgttcatgatggcggtgtggaagattgcaccagcgctggcggcaggcaacacggtcgtgttaaagccaagcgacaccacaccagtcagtacgctgctgttagctgaactggctgcaccattgttcccgagaggggcgtttaatgtcgtgttgggcaaagccagcaccggttcgctggtggtttcaaacccgaaggcttcactggtttcgattaccggttcggtccgcgcgggtttgcaggttgcggcttcggcggcggcaaacctgaccagagcacacctggaattgggtggaaaagcgcctgcagtcgtgttcgccgatgcggatatggataaggcgattgcgacaatcactacggcaggctttttcaatgccgggcaggattgcacagcggctacgcggatcctggtagagcaatccatctatgctgagtttctggaaaaactgatccagaaaacaaaaagtatcaaatttgggccaccagaagatcagaatgcgctgtacggcgcattgaatagccggaatcaactggagcaggtgaaaggttttattgagcgtttaccggcacatgcaaaaattgaaaccggtgggcgtgccgggccaggtccgggcttctattttgagccgacgattgtctccggattgcatcaaaatgatgaagctattcagcatgaagtatttggtccggta

SEQ ID NO: 213343 - DNA, 428 bp, Unknown
  Bacterial polypeptide expressing nucleotide sequence isolated from the Sargasso Sea
aattcaaaaaggaatagatgaaggagcaaaattagttgcaggagggattggtaaaccaaaaggttttgaaaaaggttattatgtaaaaccaacagtttttgcagatgttaataaccaaatggaaattgccagaactgaaatttttggtcctgtgctatcaataattccttttgaaaatgaggatgatgcaatttcaattgctaatgatacaccttatggtttaacaaactatattcaaacccaggataaagaaaaaattaaaagagttgcaagaaaacttagatctggaatggtagatgttaatggagttggcattgcagtagcttctccgtttggtggatacaaacattctggaattggacgagaagccggaactgagggtctaatagaatttttagaagtaaaaactgttggtggatggaattaat

SEQ ID NO: 213344 - DNA, 817 bp, Unknown
  Bacterial polypeptide expressing nucleotide sequence isolated from the Sargasso Sea
atggaaaaatacaaaaattatattaatggtgaatttttagattctaaatctggaaaaactttcaaaacaataaatccctatacagaaattgaatttgcagaagtagctgaggcagaagaatttgatgttaatttagcagtcgaatcagctgctaaagcttttaatggcgaatggtcaaaattattacctaatgaaagagcaaaatatttacgagctataggtgaccaactcttacaaaatgctgagaaactaggaacaattgaaacacaggatactggaaaactttttaaggaaacaaaatttcaagcaaattatattgcagagttttattactactatgcaggtcttgttgacaaagttgaaggatcaacactgcctatcgataaggaagatatgcatgtttttacaacgcgtgttcctgtaggagtaatagctgctgttatcccttggaattcacagatgtttttaacagcagtgaagctagctccagctttggctatgggaaatactattattattaaagcatctgaagttgcaccaactccacttcttgaatttgctaaattaatagacaaagttaatcttccaaaaggtgttgttaatataattacaggatttgctgaaaattgtagcaaaattctaacatcacatccaaaagttgacagaattgctttcactggtggcgttcaaacagctaaacacattgtcaaaaattctgcaaaaaatttatcacaggtaactttagagctaggaggcaaaagtccagtagttatttttaaagatgctagaaaagataatgctattaatggagttttag

SEQ ID NO: 213345 - DNA, 946 bp, Unknown
  Bacterial polypeptide expressing nucleotide sequence isolated from the Sargasso Sea
atgttagcagagttattaaaagaagcaggtttgccagatggtgtatttaatgtaattaatggtgataaagaagctgttgatttattaattacagaccctcatatagaatcagttagttttgttggttcaactccagttgcagaatatatttatcatacttcatctaagcataacaaaagagttcaatcattaggtggcgcaaagaatcatatggttgttatgcctgatgcagatcttgatcaggtaattgatggattaattggagctggctatggttctgcgggtgagcgctgtatggctctatctgtagcagttgctgttggagatgtaggagatcgattaatagaaaagttaacacctcgcgttcaatcattaaaagttggaccaggcacagatcctgaggttgagatgggtccattaatcagtaaagttcatttacagaaagtacaatcgtatgttgataaaggagtatccgaaggcgctgatcttttagttgatggtagatcaattgctcttcaaggctatgaagatggatattttattggaggttgtctgtttgataatgttaagcaagatatgactatatacaaagaggagatatttggcccagttctctcagttgtacgtcaacagtcctttgatgatgctttgaacttgattaatgatcatgagtttggaaatggaactactatttatactagggatggagatacagctcgatcttttacaaaccaatgtaaaattggaatggtgggagtaaatgtgccaatccctgtgccaatggcatttcatagttttgggggctggaaaaggtcattatttggtgaccatgcaatgcatggtatggatggcgtgagattttttactaagcttaaaactgtaacatcaagatggcctacaggaattcgaaaaggtgcagagtttattattcctacaatgaaataac

SEQ ID NO: 213346 - DNA, 963 bp, Unknown
  Bacterial polypeptide expressing nucleotide sequence isolated from the Sargasso Sea
atgtggatgtttcctatggccattgcatgtggcaacacctttatattaaaaccatcagaaaaagacccatcatgttcattaagattagcagaattgttgactgaggctggtttgcccgatggtgtttttaatgtgatcaatggcgacaaagaagttgtagacgcaataattgaaaataaaaaaatttctgcggtaagttttgtaggatcaacacctatagcaaaatatatctacgaaaattgtgctaaaaatgaaaaaagagttcaagctttgggaggcgcgaaaaatcattgtgttgtaatgccagattgtgatttagatcaagcggtaacaggtttaatgggagcggcctacggttcagctggggagagatgtatggctcaatctgtagcagttgctgtaggtgatatcgcagataatttagtaaaaaaattaacaaaaaaagttgaagtattaaaagttggacctggaatggataaaacttctgagatggggccattagttacaaaagagcatctcaataaagtaaaaaattatgttgatattggtgtaaaagagggtgccaaattagttgctgacggaagaaatcttaagctgcaagggtatgaaaatggtttttttatgggcggatgtttatttgataacgtaagttcagaaatgagaatttatagggaagaaatttttggaccagttttatcagttgtaagagtaaaaaattttgaacaggctttaaaattggttaatgaacatgaatatggaaatggtgtaagtatttttacgagagacggagacacagcaagagcttttactaatcaagctaaaattggaatggttggagtaaatattcctattcctgtgccaatggcatttcatagttttggagggtggaaaagatctttattcggggatacgcatatccatggacctgaaggagtaaaattttatacaaaactaaaaactata

SEQ ID NO: 213347 - DNA, 847 bp, Unknown
  Bacterial polypeptide expressing nucleotide sequence isolated from the Sargasso Sea
gttgctcaaattggaaaagaggctggaataccagatggagttttaaatgttctccctggttatggtgatgttggtgaggctttaggtcgacacaaagatgtagatgcagtttcatttacaggttcaactgaagttggtggttattttttaaaatactcaagtgaaagtaatctaaaacctgtcgcattagagatgggaggaaaaagtccgtttatagttttagaggatgctaaaattacagatgatttaattgataatgcgatgaattccgcattttggaatggtggacaaaactgttcagcaaatatgagacagatagttcataaaaaagttaaagatgaatttttagacaaagttattaaaaaagttaaaaagctaaaagtaggagatccattagatttaaaatcaaacatgggatctatgatttcaaaaggacatttgcaaactgttgatggatatatccaaaaaggtatagatgaaggagcaaagcttttgtctggaggaatttcaagtaaacagcaaaaaggtttttatgcaaaaccaacactatttgatggattaaaagaaaatatgaccatcgctcaagaggaaatttttggaccagtgcttggtgttttaacagttaaaaatgatgaggaggctttgaaaattgctagtaattcaaaatatggattacatgctagtgtttttactcaagacattaacagagcatttcatttagctaaaagtttgccttgtggaactgtgtcagtaaacacattttcagaaggggatattaaaactccatttggaggctataagcaatcaggttcactaagtagagatcaaggtactgaagcattaaatt

SEQ ID NO: 213348 - DNA, 889 bp, Unknown
  Bacterial polypeptide expressing nucleotide sequence isolated from the Sargasso Sea
ggaagaattggcagaatgattgtgaggtcaatttttgaaaattacaaaggtaaaatagttatcaagcatattaataatagatcgggctctgaaatttgtgcgaatttattaaaatatgattcaatacatggtaattttagttctctagtaaaatctggagaaaattacataaaaataaataaagaaaaaatatcttatactcaacactctataatcaatgacataaagtggaaaaaatatggtgttgattatgtttttgagtgcacaggtaagtttaattctaaagatcaattacttccacatatagtaaatggggtaaaaaaagttattgtatcagccccatgtaaaatggcagataaaactatagtttttggcgtaaatcataagaatgtcaacaagaatgataagattatttcagcagcttcttgcacaacaaattgtttagctcccgttgcagacgtaattaataaaaattttataattcttaatggttttatgacaaccatacatgcttttacaagtgatcaaagaatattagacaattctcacaaagatccaagaagagcgaggtctgcaagtcaatcaattgtgcccacatctactggtgcatcaaaagctattggcgaaattataccttcattgaaaggtaagctagaaggggtagcaatgagagtgccaacaccaaatgtttcattaatagaatttatatttaatgtaaaaaaaaatattacgataaaaaaattaaataactcattatttacagcatctaaatcgaaacttaaaaatattctaaatgttacagatgagaagctagtctcagttgattttaatcacaatagtgcatccgcgatcatagattcctcacttactaatgtagttggcaataaaa

SEQ ID NO: 213349 - DNA, 892 bp, Unknown
  Bacterial polypeptide expressing nucleotide sequence isolated from the Sargasso Sea
aaacttgccgaaggagcacaagcagcaactggcttaggacatttgaaaactgctatgcgtgtacttgaaaatcatgagtttgaatataagcatggtgattatatagttcgtgaagaaccaataggtgtttgtggtttaataacaccatggaattggccaataaatcaaattgtttcaaaagttgcccccgcttttgctgctggttgtactgttattttgaaacctagtgagattgcacctctttcggcaatgataattgctgaaataatgcatgaatccaaaattccagcaggaatgtttaatcttgtaaacggattaggcaatattgttggcgaagctatgtccgctcataaagatattgatatgatgtcatttacaggatctacaagaggtggagtagcagtagctacagcatctgcagctactgtaaaaagagtttcacaagaattaggaggtaaatctgcaaacattatacttgatgatgattcctttactaaatctatcactaatggtgttactcatgttatgagtaatacaggtcaatcatgtaatgctccaactagaatgctagttcctctatctcgacatgatgaagcattagatattgcaaaaaattctatagaaaatattaaagttggtaaacctgatgatataaatactgatttaggaccattagtaagtattactcaatataataaagtacaaaatttaattgaaaagggaatagaagaaggagcacagttggtttcaggtgggaaaggtaaacctgatggttttgaaaaaggttattatgtaaaaccaacaatttttggtaacgtttctaataatatgattatagcaaaagaagaaatttttggaccagttctatctattattccttatgataacattg

SEQ ID NO: 213350 - DNA, 1051 bp, Unknown
  Bacterial polypeptide expressing nucleotide sequence isolated from the Sargasso Sea
agtataaccactcaacatggaaaggttctgtcagacgctcaaggtgaaattactcgcgggcttgaagtagtagagtttgcctgcggtataccacacgcccaaaagggagaattttctctcaatgttggccgtgaagtagattcgttttctctgatgcaacctttaggtgtctgcgtcgggatcactcccttcaactttcccgttatggttccaatgtggatgtttccaatcgctttagcttgcgggaatactttcgtgcttaaaccatctgagaaagaccctagtccttcactaaaaattgcagaactattgcttgaggctggacttcctgaaggcgtattcaatgtagtcaacggggataaacaagcggtcgatttactactgcaacacaaaaccgtgcaggcagtaagttttgttggctcaaccccaatcgcagaatatatctattccgaaagttcgtgtaatgggaagcgttgccaagccctcggaggggcaaaaaaccatctggttatcatgccagacgcggagacttctgaagttgttaatgctctaacaggctcggcatttgggtctgctggagagcgatgcatggccatttctgttgcagtctgcgttggcgaaaaaacaggggatcggatagtggagtctttaaaaacagcgtcagagtctttaagaataggccctggcttatccacggaaaacgaaccagatttgggccctctgataaccggggatcacaaaagaaaagttaagagctatattgaatcaggcgtagagcaaggtgccaaattagtgcttgatggtcgagaagccgaagcagccaaaagctcgagcggcttctttattggacctacaatcttcgattttgtaaaaccatctatggatatctaccttgatgagatttttggacctgtgttatctgttgttcgagttgattcactcgctgatgccataggtttgatcaatgatcaccaatttggaaacgggacttcgatttttacgaatgacggcggcaacgctcgcgtctttcaagaagaaataaaggtaggga

SEQ ID NO: 213351 - DNA, 970 bp, Unknown
  Bacterial polypeptide expressing nucleotide sequence isolated from the Sargasso Sea
atgagctcaggaaacaaatttaaagtaatcgccagtaaacttaaatttgaaggaagagcattcattaatggaaagtatgtaaatgctattgatggtaaaaaatttgaaacaatcaatcccgcaactggtaaaaaactttgtgctgttgcaaaatgtaatcacaaagatgttgacttagcggtaaaagtttcaaggaaagcttttaatagtggagtttggtctaaaagttcacctgaatatagaaaagaaattttattaaaatttgctgaattacttagaaaacatggtgacgaaaattcagttttagaaagtatagatacaggtaaacttattacggattgtattaatgaagttgcaaatgatgcgccaatgcattttcagtggtatggagaattaattgataaagtatttggaaaagttggtccaacagaaccatctattactagtttaattgttaaagaaccaataggagttgttgctggaattgttccttggaactttcctttaatgatggcggtatggaaaatggcacctgctcttgcagctggttgttcagtaataattaagccagcagaggatacaccccttacagctattagagttgctcagattgggaaagaggctggaataccagatggagttttgaatgtactcccaggttatggtgatgttggtgaagctttaggtcggcacaaagatgttgatgcggtttcttttacaggctcaactgaagtaggtggttattttttaaaatactctagtgaaagcaatttaaaacctgtcgcattagagatgggaggaaaaagccccttcatagttttagaggatgctaaaattactgatgatttaatagataatgctattaattctgcattttggaatggtggacagaactgttcagctaatatgagacagataattcataaaaaagttaaagatgaatttttagacaaagttattaaaaaagtaa

SEQ ID NO: 213352 - DNA, 331 bp, Unknown
  Bacterial polypeptide expressing nucleotide sequence isolated from the Sargasso Sea
acaatgttacaaacgaccatgaggatagcaaaggaagaaatttttggtcctgtcctttctattattccgtttgaaaccgaagatgaagcagtgaacattgtgaacgatacttcttatggtttggggaattatttacagacagaagatagagaaaaagcacatagagttgctaaaaaattaagatctggttgtgtttatattaatggtaatggagctgatgctggaactccttttggaggttacagacaatcaggaaatggaagagaaggtggagtttgggggcttgaagaatatttagaagtaaaaactgttacaggctggaaagattaat

SEQ ID NO: 213353 - DNA, 912 bp, Unknown
  Bacterial polypeptide expressing nucleotide sequence isolated from the Sargasso Sea
gctggtggaaaaccacaacgctgttattgaataccgtccgctggggccgattctcgcggtaatgccctggaacttcccgctctggcaggtgctgcgcggcgcggtgccgatcctgctggcaggtaacagctatctgcttaagcatgcgccaaacgtgctcggctctgcggatcttattgggcagatctttgcggatgccggtttccctgaaggcgtattcggctgggtgaacgccaccaatgacggcgtaagccaggcgattaacgatcgccgtattgcggcggtgaccgtcaccggcagcgtgcgtgccggtgcggccattggcgcgcaggcaggagccgcgctgaaaaaatgcgttcttgagctgggtggctccgacccgtttatcgttctcaacgatgccgatctggatctagctgtgaaggcggcggtggcgggtcgctatcagaataccggacaggtgtgcgcggcggccaaacgcttcattgtggaagcggggattgcagacacctttacccgccgcttcgtcgacgccgtcgccgcgttaaagatgggcgcgccggaagaagaagagaactacctgggcccgatggcgcgttttgacctgcgcgatgagctgcatcagcaggtgcaggccaccctggccgaaggggcaacgctgctgctgggcggagagaaaatcagcggagagggcaattactacgcgccaaccgtgctgaccaacgtcaccccgtcgatgacggcgttccgccaggaactgtttggtccggtcgcgaccgttacggtagcaaaagacgcggagcacgccctgacgcttgccaacgacagcgactttggcctgtccgctaccgtcttcaccgctgacgcagcgctggcggataaattctcccgcgaaacctggagtgcggcggg

SEQ ID NO: 213354 - DNA, 553 bp, Unknown
  Bacterial polypeptide expressing nucleotide sequence isolated from the Sargasso Sea
tatggataaagttattaaaaattttcaaaatataacttatggaccagcaccagaggacagcaaagaagtaaatagttggataaaaaatttaaaaaatccaaataataattttattaatggtaaatttgtaaaatcgtctagctcaaaaaaattaaacataattaacccttccacaaataaaaaaatagcaacactgtctattgcttcaaaaaaagatgtaaatactgcagtcagtgctgccaaaaaagctcacatcaaatggtcaaaactttcatcttttgatcgatcaaaatatttatatgccctcgctcgtctgatacaaaaaaattctaggtttatttctgttttagagaccattgataatggtaagccaataagagaaacaagagatatagatattccacttgttgcaagacatttttattatcatgcagggtgggctgcgaggaatacaaataattctgataattctattggtattgttggacaaattataccgtggaactttccattattaatgttagcgtggaaaattgctcctgctattgctctt

SEQ ID NO: 213355 - DNA, 1031 bp, Unknown
  Bacterial polypeptide expressing nucleotide sequence isolated from the Sargasso Sea
agagcaagggttatgtttaaatttaaggagttgatagaaaaaaactctgacgagcttactaggattatcgtttcggaacatggaaaagtatatgaagatgccaaaggttctttggttagaggattagaagtagttgaatatgcttgtggaatacctcaaatgcttaaaggagaatttacagaaaatgttggaacaggtgtggatagttggtcgacaaggcaacccttaggagtttgtgcgggaattactccctttaattttcctgcaatggttccaatgtggatgtttcctatggctatagcgtgtggaaatacattcgtcctaaaaccatccgaaaaagatccatcttgctctatgagattagcagagcttttgaaggaagctggattgccagatggtgttttaaatgttgttaatggagataaggaagcagttgatgcattgataaataatagagatgttgtagcaatgagttttgtaggatctacaccgatagcaaaatatatttatgaaaattgtgctaaaaatgaaaaaagagttcaagcattagggggagctaaaaatcattgtgtagttatgccagattgtgatttggatcaagcagtaaacggtttaatgggagccgcgtatggttcagctggcgaaaggtgtatggctcaatccgttgcagtagcagtaggcagcattggagataagctagttgactcactcgcaaaaaaagttgaagcacttaaagttggtccaggaatggacaaacaatctgaaatgggaccactggtaacaaaagaacatttatcaaaagtaaaaagttatgtggatataggtgaaaaagagggagctaaattagtagtagatggaagaaattttaaaatgcaagggtatgaaaatggatattatattggtggatgtttatttgatcatgtaaagaaagatatgagaatttataaagaagaaatttttggtcctgttttatcagtagttagagctaaagattttaatgaggcattaaagcttgtaaatgatcatgaatt

SEQ ID NO: 213356 - DNA, 352 bp, Unknown
  Bacterial polypeptide expressing nucleotide sequence isolated from the Sargasso Sea
tgagactaataatagttctcgaatctctcaagaagaaatctttggacctgtagtatctgtaattaaatttaaagatgaagcagaagcattggaaattgctaatgatactctttatggtttgggtgcaggtgtttggactagaaatggaaatattgcttaccgaatgggtagagcaatacaagcaggaatagtatggactaattgttatcatgcttatccagctcactctccatttggtggatacaaacaatcaggtgtgggaagagaaacacacaaaatgatgcttagccattacagacaaaataagaatcttcatgtttcttatgctgagaagaaattaggcttcttttaa

SEQ ID NO: 213357 - DNA, 358 bp, Unknown
  Bacterial polypeptide expressing nucleotide sequence isolated from the Sargasso Sea
gaaaaagggctactatgtaaaacccaacaagtttttgcaaatgtaacaaatgatatgactattgcaaaagaagaaatctttggcccagtgctatcaataattaaatatgaaaatgaagacgaagctattgagttggcaaatgatacagaatatggccttgcaggatatgttcagggtgaaccgagtcacgcaaaggaagttgcaagaaaaataagagcaggacaaataattattaatggaggtgcaagaggaacaggagcaccttttggtggatataaatcatcaggcaatggaagagagcatggtcttcatggtcttgaagaatgtcttgaaactaaggctgtgatctctccttaat

SEQ ID NO: 213358 - DNA, 453 bp, Unknown
  Bacterial polypeptide expressing nucleotide sequence isolated from the Sargasso Sea
gtttaagtgatgtctaccacacagacgttcgccgtgcccgtgcagctgcgatgtcgatgatcccaactcaaaccggtgcagctgccgctgtaggtttggtcgtgccagaactgaaaggtaaatttgacggtttagcagtgcgtgtgccaacactgaacgtatctttagtggatttatcttttattgccggtcgtaacaccacggtagaagaagtcaacgatattatccgtaaagctgcagcacaaagcccaatgaatcaggtattagcagtcaacgatttaccattggtatcagtcgatttcaaccacaacccaatgtcctctatttttgatgccagtgaaacccgcgtaaacggtcgtctggtgaaagtaatggcatggtatgacaacgagtggggtttcagtaaccgtatgctcgacaacactgttgaactgatgaaacatagtcagtaag

SEQ ID NO: 213359 - DNA, 555 bp, Unknown
  Bacterial polypeptide expressing nucleotide sequence isolated from the Sargasso Sea
aagatttcatcaataaagttgttcaattaagtaaaaaaatgcaaccttcagatccgctaaatcctgattcatttgctggagcaatagtaaatactgagcagttagaaaaaatacataaatatgtaaatataggtaaaaaagagggagctaatattgaagttgggggcaatataacaatgaaagaaacaggtggttgttattttgagcctactatttttaaaaatgttaagaacaatatgaagattgctcaagaagaaatttttggacctgtgctaacaactttatctttttctaattttgaggaggctgtttcaattgctaatgactctgaatatggactagcagctggtgtgtggacgaatgatattaacaaagcaattagagcatcaagagaaattcgtgcaggaacagtttatataaacaactatgaggaaggtgttgactcaacaatacctcttggtggatataaacaatctggaattggaagagataatggtgcacaagctctagaaaattatcttcaagtaaaatcaacttggatcaaaataacttaaa

SEQ ID NO: 213360 - DNA, 944 bp, Unknown
  Bacterial polypeptide expressing nucleotide sequence isolated from the Sargasso Sea
aagtcatcaatcctgcacaaacgaggtttgtggaacatgtgcagcaggaaatgaaaaagacatagataaggctgttgcggctgcaaaagaaagctttaaagcaaaaacatggaggaagatggcgcccaggaaaagaatgggaatcatgatgaagtttgccgatcttcttcaagcaaatacagctgaacttgccctcatggattccatgaatatgggtaagccgattagcgattgcttgaatgtcgatgttccagcttcagctgtgaacattcgattcatggcagagtgtatcgataagatgtatggaaaagttgccaatacacatgagaaagctctgaacctttctgttagagagccatatggtgtggttggattgatttctccatggaattatccgcttcttatgggtgtttggaaaattgctccagcattggctgcagggaattcaattgtacttaaaccagatgagcattcgcctcactcgtgcataaaaatggcagagctttttgtcgaagcaggtggacctccaggggtattcaatgtggtcacgggacatggagaagaggcgggacaatctttggcgctccatcaagatgtctccaagatcggattcactggatcaactgaggttggaaagctacttttgcaatatgctggtcagtccaatatgaaaaaagtcagtcttgagactggtggaaaatcacccatgatttacttcgctgatttacctgatatggaactcgctgtctctacagcttatgattcaatctatgcaaatatgggcgaagtctgtaatgcaggatctaggatctatgttgaaagagcaatttatgctgatttcgttgatcaattcattgcagaaggtcaaggtgcatatacacctggtgatccattggatccagaaacaaacatgggtccattgatgtcagcacaagctcaaaaaa

SEQ ID NO: 213361 - DNA, 757 bp, Unknown
  Bacterial polypeptide expressing nucleotide sequence isolated from the Sargasso Sea
atggaacagttaaacttttatattaatggttcttgggtaaagccaaacggtgttgaaacacttgatgttataaatcccgcatcggaagaaaaagtcacaaaaatatctctgggaacggctaatcacgttaatgaagctgtagcagcagcacgcacagcgttcgaaacttattctcaaactcctgttgaacagcgaattgatttacttacaaccattagagaaatttataagcgtcgcctagatgatgttgcggatgcaatccaaaccgaaatgggtgccccaacctacctcgccaagggtgcccaggctatggtgggattaggacacttaaaagccgctatccgctctttaaccaatcataattttgagtatgagcatggaagttttattatcagacatgagcctataggcgtatgcggattaataacgccgtggaattggcccgttaatcaagtggtatcgaaactggcaccatgccttgccgcaggatgtacagccatattaaaaccttccgaaattgcccccctttcatcaatggttatcgctgagatattagatgaggcaaaagtgccagctggggtttttaatctaataaacggaatgggaccagttgtaggtgaagcaatgtcagcccatcctgatattgacatgatgtctttcactggttcaacgaggggaggcgtcgcagttgcaaaggcatctgctgatagtgtcaaacgagtaagtcaggaactaggtggaaagtcagctaatatta

SEQ ID NO: 213362 - DNA, 919 bp, Unknown
  Bacterial polypeptide expressing nucleotide sequence isolated from the Sargasso Sea
tctacagaaatgcaagctgcaactggagctagccatatcaaatcatttaaaaatatattaaaagattttaaatttgaaaaagatttaggagaggaaaaaaataatcaaaaactattatatgaaccgaaaggcgtttgtgcattgattacaccctggaattggccaataaatcaagttaacttaaaagtaattcctgcattggcatcagcttgtacagtagtattaaaaccgtctgagatagcacctttatcatcaatgctattagctgaaatgattgatgaagtgaagtttcctccaggagtttttaatttgataaatggggacggagctgttactggagatgctttaacaagccatcctgatattaatatgatttcatttacaggatcaactagagcaggtgcattaatttctcaaaatgctgcaaaagattttaaaaggataagcttagaattaggtggaaaaggtgcaaatataatctttaaagatgcagattcggaagctgtggcaagaggtgttttaagatgttttaggaattcaggacaatcttgcaacgctcctacaaggatgcttgttgaaaaatctatttataatgaaactgtagaaaaagtaaaagaattagcaaataatactaaggtagactctccgcaaaaagatggggatcatattggaccagtagtctcagaagttcagtttaataaaattcaaactttaattcaaaaaggaatagacgaaggagcaaaattaattgcaggtggaactggcaaacctaagggttttgaaaaaggatattacgtaaagccaacagtttttgctgatgtaaataatcaaatggaaatagcaagaactgaaatttttggccctgttttatctataataccttttgaaaatgaagatgaagctatatctattgctaacg

SEQ ID NO: 213363 - DNA, 1002 bp, Unknown
  Bacterial polypeptide expressing nucleotide sequence isolated from the Sargasso Sea
gcatagcttgtggaattcttttattttgaagccatctgaaaaagatccttcttgctcaataaaattagctcaattattttctgatgcaggtttacctgatggagtatttaacgttattcagggtgataaaagaatagttgatcaaatactatctagtcctgaaatttcagctgtcagctttgtaggatcaacacctgtagcaaaatatatttatgaagaatctgccaaaaacttaaaaagagttcaagctcttggaggagctaaaaatcatttaattgttatgccagatgcgaatttgaatcaggcggttgatggagttataggtgcaggttatggttctgctggtgaaagatgtatggctgtatcagttgcagttgcagtaggcgatatagcagatgatttagttgaaaaaataaatattcagtcacaaaaacttaaagttgctccttggacagatgctgaatcagatatgggacctgtgatttctaaagagcataaagaaaaaatagaaaattacatttcttcaggagtaaaagaaggagctaaattagttgcagatggaagaaattataaaattcaaggttatgaaaatggttattttttaggcccaacattgtttgataatgtaactaaagatatgaagatatataaagaagaaatatttggacctgtagtgtctgttgttagagcaaaaaattatgatgaagcattaaatctagtaaataaacataattttggtaatggaacaagcatatatacttctgatggagagatagcccgtcattttactacaaatgctaaaataggaatggttggagtaaatgttcctattcctgtacctatggcttttcatagttttggaggatggaaacaatcattgtttggagatcattctatgcatggaatggaaggaattcacttttacacaaaattaaaaactgttacgagcagatggccaaaatctatttcagaaggtcctgagtttgtgtaccaacaaattaa

SEQ ID NO: 213364 - DNA, 571 bp, Unknown
  Bacterial polypeptide expressing nucleotide sequence isolated from the Sargasso Sea
acttcaaaatcgataaaagacgaatttttagaaaaggttgtaagctactctcaaccatggatgccaggtaacccatttgatccaaatactttaatgggctcgatagtcgataaaacccaaactgaaagaatcatgaattatatagataaaggcaaatctgaaggtgcgaatgttataactggaggtgatcaggtgcttcaagactcaggtggttactatgtcagcccaacggtctttaaagatgttcaaaattcaatgactgttgctaaagaggaaattttcggaccagtattatgtgccatagattttgaaaatgaagatgaagctcttcaaatagcaaatgatactcattatggacttaacgcaatgatatggtctaatgacttaaataaagtacataagcttgcaaaaagaattaaaagcgggaaagttctgataaatagtttgagcgacggagatatgtctttacctcacggtggatacaaacagtcaggttctggaagagataaatctctggaagctcttggccaatatactcaaacaaaactaacattgatagaagttaagtaat

SEQ ID NO: 213365 - DNA, 523 bp, Unknown
  Bacterial polypeptide expressing nucleotide sequence isolated from the Sargasso Sea
aatgaaagtgtcatcagcactagatacgtctcatttaaaggttaaatacccatttaaaccaaagtatggaaactttataaatggaaaatttgttgaacctaagtcgggtaagtattttgataatccaagtccgattactaatgaaactatctgttctgtagcacgttcgaacgaacaagatgttgaagctgctttagatgcagcacatgccgcttttcctaaatggggaaaaacatcaataactgaaagatcaataatgcttaataagattgctgatgtcttagaggcaaatgcccagttattggctacagcggaaactatggataatggtaaaccgattagagagactgcgggtgctgatatcccattaacaatagatcactttagatactttgctagtgtaattagagcagaggaaggttcagtggctgagataagcaatgacatgtatgcttatcatataccagaacctcttggagtagttgcacagattataccttggaactttccacttctaatggca

SEQ ID NO: 213366 - DNA, 943 bp, Unknown
  Bacterial polypeptide expressing nucleotide sequence isolated from the Sargasso Sea
tttgggcaaagcttctaaagcctctccagaggatgttgatagagcattaaaatcagctgaaaagggattacaagtttggaaaaaaacgccaccatggcaaagatcatacatcatcagaagaattgcagacaagatgagagaaaaacaagatatcttagcaaaatggatgacacttgaagttggaaaacctttagctgaagccaaaggtgagattaatggagcagcagatatttttgaatggaatgctgaagaaacaaaaagaatttatggtcaaacagtagaaagtagatttgaagatacaagagtacatgtttattaccagcctgttggtgttgttgcagcattaactccatggaattttccagctgtattgtcagctagaaaaatttcaactgctttagccgcaggttgttcagttattattaaaccagatgtaattactccaggcgtggtaatgcaaatggttgatatttgtagagagtgtggtgtgcccccaggtgttgttaatcttttatcaggtgatccaccgagtattgcacaacagttaatttcttctgatataattaaaaaagtttcaataactggatcttcaagagttggaaaactaattttaaaacaagctgccgataaagttcaaagagtcactatggaacttagtggtcattcgccatttattgtatttgatgatgcagatattaaaaaagcttcagatatggctattgccgcaaaatttagaaataacggacaagtatgtatctctcctaatagattttatattcatgagagtaaaaaagatgagtttgttaatttatttatagaaaaaacaaaaaaattaaaaattggtgatggtatggatccaagtactcaattaggtccattaaccacaaagaaaagattaaatgaaattgaagagttggtcgaaaagacgaaacaagagggtgct

SEQ ID NO: 213367 - DNA, 788 bp, Unknown
  Bacterial polypeptide expressing nucleotide sequence isolated from the Sargasso Sea
gatggataaactactcagattcagaaaagattttaaggaaatctatgttggtggcagatggtggccaattgaggcaagctttgaagacataaacccatctgacaattccttatgggcaacggttccagatgttgaagtaaaagacgtacagaatgctattacatccgccgatcatgcttttgaaaattggtctaatttaaaatttaatgaacgatctcactacatgatcaaaatcgctgaagttctagaagaaaataagatggacatagtaaaagctttgagagctgaagcaggcggctggtttggcaaggccatgtttgaagccggttatctaccagaactgtttcatgctgcggctgccgccaattatcaggctatcggcgaagttataccatcagattctgggaaattttccatggcagtaaggcggcccataggagtcatatcagtgattagtccatggaattttccctgtatattaacggctcggggtatggcttttgctttggctgcaggaaacacggtggttcttaaaccttctgaggagacgccttacacgggtggacttttgtgggccgaaatatttgaagaagcgggcgtacctggcggagtgctaaatgttgtaacatgctccagagaaaatgtagctgaggttggaacagagttagtagaaaatcccctcgtaaaaggagtatccttcactggatcaacaccagttgggagagagatcgccgctagggcaggagcacatttaaaaaaatgttgtgtagaactgggtggaaaagatg

SEQ ID NO: 213368 - DNA, 478 bp, Unknown
  Bacterial polypeptide expressing nucleotide sequence isolated from the Sargasso Sea
acagacctaactccagttatatcagaaaatcaacttcaaaaagttgaaggttatgcaagatcaggaatccaagaaggagcagaagcagcatatggtggaaaaagattagaacgtgagggatattttatggaaccaacagttctaaacaatgtaaaacaaagtatgactgtagcaagagaagaaatttttggtcctgtgctctcagttcttgaatatgaagatcaagaagaagcaattgatatcgctaatgatactgagtatggactaggtgctggtgtttttacaaaagatcttaaaaaagcatcttggactgcaagtaaactagaagctggtcaagtatatgtaaataaatggttcactggtaatcatgcaacaccctttggaggttataaacaatcaggatatagccgcgaaaaaggagtagatggacttaaatcataccttcaagtcaaaaacgttgggattagtttagtctaaa

SEQ ID NO: 213369 - DNA, 922 bp, Unknown
  Bacterial polypeptide expressing nucleotide sequence isolated from the Sargasso Sea
aaatttgaaggaagagcattcattaatggcaaatatgtaaatgccattgatggaaaaaagtttgaaacaatcaatcctgcaactggtaaaaaactttgtgttgttgcaaaatgtaatcataaagatgttgatttagcagttaaagtttcaagaaaagcttttaatagtggaatttggtctagaagttcacccgaacatagaaaagaagttttattaaaatttgctgaattacttagaaaacatggtgatgaaaattcagttttagaatgtatagacacaggtaaacttatcaccgattgtattaacgaagttgcaaatgatgcaccaatgcattttcagtggtatggagaattgattgataaagtatttggaaaaattggtccaacagaaccatctgttactagtttaattgttaaagaaccaataggagttgttgctggaattgttccttggaactttcctttaatgatggcggtatggaaaatggcaccagctcttgcggctggttgttcagtaataattaagccagcagaagatacacctcttacagcgattagagttgctcaaattggaaaagatgctggaataccagatggagttttaaatgtacttccaggttatggcgatgttggtgaggctttaggtcgacacaaagatgttgatgcagtttcttttacaggctctactgaagtaggtggttattttttaaaatactcaagtgaaagcaatttaaaacctgtcgcattagagatgggaggaaaaagtccatttatagttttagaagacgctaaaattactgatgatttaatagataatgctatcaattctgcattttggaatggtggacagaactgttcagcaaatatgagacagatagttcataaaaaagttaaagatgaatttttagacaaaagttattaaa

SEQ ID NO: 213370 - DNA, 319 bp, Unknown
  Bacterial polypeptide expressing nucleotide sequence isolated from the Sargasso Sea
tatgactatcgctcaagaggaaatttttggaccagtgcttggcgttttaactatcaaaaatgatgaagaggcattgaaaattgcaagtaattctaaatatggattgcatgcgagtgtgtttactcaagacataaacagagcatttcatttagctaaaagtttaccttgtggaactgtttctgtgaatactttttctgagggagatatcaaaacaccttttggaggatataagcaatcaggttctctaagcagagatcagggtactgaagctttaaattcatttcttcaaacgaaaactatttggataagtcataattaa

SEQ ID NO: 213371 - DNA, 369 bp, Unknown
  Bacterial polypeptide expressing nucleotide sequence isolated from the Sargasso Sea
gcgatcagggcgccttcgtgatgccgaccatctggaccggtctgtccgacgatgcgcgttgcgtcaaagaggaaatcttcggtcctgtgtgccacatcgcaccgttcgatagcgaagacgaagtgatcggacgcgtgaacgacagcgcctacggcctcgccgccagcatctggacgacgcagctttcacgcggtcatcgtgtggcgcggcagatcgaaaccggcatcgtctgggtcaacgcgtggttcgtgcgcgatctgcgcacgccgttcggtggcaccaagctctcgggcatcggccgtgaaggcgggcgtcattcgctcgacttctattcggaactgaccaacgtttgcgtgaggatcgcatgag

SEQ ID NO: 213372 - DNA, 895 bp, Unknown
  Bacterial polypeptide expressing nucleotide sequence isolated from the Sargasso Sea
agagggttttgctgtaatttctttaggatctaaagaggatacagataaagctgtaagtgctgctaaagtagcatttgaaacctggaaagaaacttcgaaagaagagagaataaagttattagaaaaattttgtgaaatttataatagaagatgggatgaaatggttgaagcacaatcaatggaaatgggtgcaccattagattttgcatcagagactcatactaaaatgggagcagatatatctaaaaatgtaatagaaattttaaaagattttaattttgaacatcagtttgatccaaaatcaaacaatcaaatcagatatgagccaattggagtttgtggattaataacgccatggaattatccaatgaaccaaatagtacttaaggtcataccagcacttgcagctggttgcacaatgattttaaaaccgtcagaagtggctccagtatcaggtgttttgtttgcagaaataattgacgaagctgggtttcctccaggtgtattcaatttaataaatggtaacggagaagtagttggaaatcatatatctggtcacccagatattgatatggtttcatttacaggatctacaagagcgggaaagttgatacagaaaaatgcagctgatacaattaaaaaagttacacttgaacttggcggtaaaggtggaaatatagtatttgaggattcttatccagatgctgttagagatggagtaagaactataatgagcaacactggacagtcgtgtgatgctccaacacgaatgctagttcaaagatcaatttatgatagagcagtaaaagaagctgtagatgaagcaaataaaattaaagtagatgtggcatctaaaaaaggtgatcatattggacctttagtatccaaagttcaa

SEQ ID NO: 213373 - DNA, 872 bp, Unknown
  Bacterial polypeptide expressing nucleotide sequence isolated from the Sargasso Sea
tgcaggtattctgatgatgtggataaagccgttgctgcagctaaagcagcttttgttgattttagtttttcaactaaagaggaaagagtagagattttagaaaatattattactgaatatgaaaaaagatctgaggagttagctgaaacaatatctaaggaaatgggagctccaatatggttatcccaagttgctcaggttgcttctggtcttactcattttaaagatactctaaatgttcttaaaggctatgattttgagtatgagaaagatggttatttagttcgcaaagagcctgtgggtgttgttggaatgatcactccctggaactggccaatgaatcagatgtgcacaaaagtagcatcaggcatagctgctggatgcaccatggtgcttaagccaagtgaaataactcctttctgcggaattattcttgcagaaattattcacgacgctggtgtacccgctggaatctttaatttagttaatggcatgggtccagttgttggtgcctcaatgtctgaacacaaagatatagatatgatgcattttactggttcaacacgggcaggagttgctgttgcacaagcatcagccccaacagtgaagagagttgcacaggagctgggtggtaaatctgccaatatagtccttgatgatgcagacattgaaaaagctgtatctgctggcgtctcttcatgtttcctaaatacaggacaatcatgtaatgccccaacaagaatgcttgtgtcatctaagaactatgacaaagcagttgaagttgctgccaatactgcaaatgctatgaaagttggagatccttttgatgctgatacaaaaatgggtccaatttctaataagacccaatatga

SEQ ID NO: 213374 - DNA, 478 bp, Unknown
  Bacterial polypeptide expressing nucleotide sequence isolated from the Sargasso Sea
catgggatctatgatttcagaaggacatttaaaaactgttgatggatatatccaaaaaggaatcgatgaaggtgcaaaacttttatctggaggagtttcaaataataagcaaaaaggtttttatgcaaaaccaactttatttgatggattaaaagaaaatatgaccattgctcaggaagaaatatttggaccagtacttggtgttttaactgttaaaaatgatgaagaagctttaaaaattgctagtaattctaaatatggattacatgcaagtgtatttactcaagatataaatagagcattccatctagctaaaagtttaccttgtggaactgtgtcagtgaatactttttctgaaggagacatcaaaactccttttggtggatataaacaatctggttcactaagtagagatcaaggtactgaagctttaaattcatttcttcaaacaaaaacaatctggataagtcataattaa

SEQ ID NO: 213375 - DNA, 630 bp, Unknown
  Bacterial polypeptide expressing nucleotide sequence isolated from the Sargasso Sea
tatgattaaaattgggataaatggatttggtcgaattggaagagctatttttaaaaatgcattattattcgatgatatacagatagtagcaattaatgacatcaatccagaagttgagaatcttggttatttgttgaaatatgattctttttacgggcgatttaaaggagatataaaaattgaaagcaataaaatagttattgatcaaaaatcaatagatatttatcaacaaagtaatattgggaatgtcccttgggttgaacttgggtgtgatattgtcattgaagccgccggagttcattctcttctggatgaattgcctgggataataaaaagcggtgtaaaaaaggttgtggttacttactcccctgatcataaagtggataattctattgtcctcggtgccaatgatgaacaatatgacccaattaaacacaatattatatctagtagtatctgtgatgttgtcgcattagctccggtttacaagattattgatgacaattattctgtcttgaatggttttctcaccactttgcacccctggcttgcctatcaaaacctactagatgggccgccgcaatcttgggggtatcctggttcattgtatggtcactattccttgggacg

SEQ ID NO: 213376 - DNA, 589 bp, Unknown
  Bacterial polypeptide expressing nucleotide sequence isolated from the Sargasso Sea
aatgcgccaacaagaatgttcggtcgaaaaatcaatgtatgatgaggctattgatagactaaaaaaatatactgaaaactttgaggtgggtgatcccaaaaaagaaggagagcacataggtccagttatttcagaaactcaatacaataaaattcaaactttaatccaaaaaggtattgatgaaggagcaaaattagttgctggaggaacaggtaaacctgatggattagacaaaggttactttgttaaaccaactgtttttgcagatgtaaataatgatatggatgttgcaagaactgaaatttttggacctgttttatctgttattccatttgaaacagaagaagaggcaattaaaattgcaaatgatacttcttatggattaacaaactatattcaaactcaagattctgaaaaagttcaaagagtcgctagaaaattaagatctggaatggtagatgttaacggtgctggtattgcagttgatgcaccatttggaggctttaaacactctggtattggtagagaagcaggtgaacacggattagaagaatttttagaagtaaaagctgtgggtggttggagttaa

SEQ ID NO: 213377 - DNA, 887 bp, Unknown
  Bacterial polypeptide expressing nucleotide sequence isolated from the Sargasso Sea
agcatctcatataaaagactttatcaaaagattgaaaaattttgaatttgaatcaaattttgataataaatctgataactatattgcatatgaacctattggagtatgtggtttaattactccttggaattggcctattaatcaaattactttgaaagttataccagcactagctgcaggttgtacaatgatattaaaaccttctgaaatagcaccattatcaggcatgttatttgcagatatgattcataacgctggatttccaaaaggtgtttttaatttagttaacggtgatggaaatggagtaggtacacaaatatctggacacccagatattgatatggtttcctttactggttctactagagctggtaagcttattacaaaaaattctgcagatacaattaaaagagtttgtttagagttagggggtaagggaggcaatattgtatttgctgattcttatccagacgcagttagggatggcattagaaatgttatgagtaattctggacaatcttgtgacgcgccaacacgcatgcttgttgaaaactcaatttatgaaagagctgtaaatgaagctaaagatgaggcaaatagtataaaagttgatttagcttctaaaaaaggcaaccatattggacctgttgtatctgaagctcaatttaacaaaatacaaaatttaattcaaagtggtattgatgagggcgctactttagtagcgggaggtcctaatcgtccagaaggattagaaaaaggttattttattaaaccaacaatttttactgatgtgtcaaacaaaatgagaattgctagagaagaaatttttggtccggtattatctataataccttttgcaactgaagaagaagcagtgtctataacaa

SEQ ID NO: 213378 - DNA, 772 bp, Unknown
  Bacterial polypeptide expressing nucleotide sequence isolated from the Sargasso Sea
atgtacgaaaaatttggtcaatttatcgatggaaaatggcaaccttcagaaaaaaatgaaacttatgaagttataaatcctgctacagaagaaattttaggccatgcatcgaaagctacaccaaaagatgttgataaagcactaaaatcagcagaaaaaggtttaaaagtttggaaacaaactcctccatggcaaagatcatatataattagaagaattgcagacaagatgagagagaagcaggatgttcttgcaaaatggatgacactagaagttggtaagccttttgcagaagccaaaggcgaagttggtggtgctgcagatatttttgaatggaatgctgaagaaacaaaaagaatttatggacaaacagtcgaaagtagattcgcagatacaagagtacacgtatattatcaaccaataggagttgttgcggccctaacaccttggaattttcctctagtattatcatcacgtaagatttctacagcattagcagctgggtgttcggtgattgttaaacctgatgttataacacccggaacagtcatggagttagttgaaatatgcagagaatgtggagtacctccaggggtggtaaatttattatctggagatccaccaagcattagtcaacggttgattgcttcagatatagtaaaaaaaatttcagtaacggggtctacaagagtaggaaaattaatccttaaacaagctgctgacaaagtgcaaagagtaacaatggagttaagcggacattctcccatttatt

SEQ ID NO: 213379 - DNA, 700 bp, Unknown
  Bacterial polypeptide expressing nucleotide sequence isolated from the Sargasso Sea
atgtacgaaaaatttggacaatttattaacggtaaatggcaagagtcatcaagcggagaaacttacgaagttataaatccagcgactgaagaaataattggtaaagcttcaaaagctaataaagatgatataaatttatctcttaagtctgctgagaaaggtttggtgatttggaaaaatacttcaccatgggaaagatcaaaaattattagaaaaatatcagatattataagaaaaaaaaccgatgttctatcaaaatggttaactttggaaactggcaaacctctggcagaaggaatgaatgaagcaaatggtgctgctgatatttttgaatggagcgcagaggagtctaaaagaatttacggtgaaactttacaaggaagattgcctaatacaagaatacatgtttattatcaaccagtaggagtggtagctgctcttgtcccttggaattttccaattacactagcttcaagaaaaatttctactgctctctctgctggatgctcagtcatagtaaaacccgacataataactcctgggtctgttatggaattagttaatatttgtaatgaggctggtgtaccaccaggtgtagtaaatttattatcaggtgaaccttcttatatttccgataaattattatcgtctgaaataatcaaaaaagtttcaatcacaggctcaacaagagttggtaagc

SEQ ID NO: 213380 - DNA, 705 bp, Unknown
  Bacterial polypeptide expressing nucleotide sequence isolated from the Sargasso Sea
tatgtatgaaaaatacggacaattcactgatggtaaatggcatcaatcatcaagtggcgaaacatacgaagttttaaatcctgcaaatgaggaaattattggacatgcttcgaaggcttcaccagaggatgttgagagagctttaaggtctgctgaaaaaggtttggaagtttggaaaaaaacaccaccttggcaacgtgcttatattttaagaagaattgctgacaagatgagagaaaagcaagacatacttgctaaatggatgacacttgaagttggaaaaccttttgcagaagcaaaaggcgaagttaatggagctgcagatatatacgaatggaatgcagaagagacaaaaagaatttatggtcaaacagttgaaagtagatttgaagacacaagagttcatgtttattatcaaccggttggcgttgttgcagctttagtcccatggaatttccctttagttctatctgctagaaaaatttctacggctcttgcagcaggttgttctgtgattgttaaacctgatgtaataacgccaggtgttgtaatggaacaggttgaaatttgtagagagtgtggagtgcctcctggagttgttaatttattatcaggagatccaccaagcattgcacaacaattaatcgcttcagatattgttaaaaagatatctataacaggatcatctagagttggtaaattaat

SEQ ID NO: 213381 - DNA, 826 bp, Unknown
  Bacterial polypeptide expressing nucleotide sequence isolated from the Sargasso Sea
ctggctcatttttataagaatcctttcgaattaaaaggtgagagtattgatatcgtttcttcttcaaagactgatctacttgttggctcaatcatttttggaacaaaggaagatgctgaaagagctattgaagcttcttcaaattattacaatcaaggcggttggtctaaaactagatggcaagagaggtcatcaatccttcttaaagtggctgagcttcttactttaaggagaaacgagtttgcttctctaattgtctatgaagcaggaaaaactattttagaggcattaggtgatgtagacgaagcgatggattttttggatttttatgctcgtgaagagggagtgatccaaaaaagagagaagggagaagtgttaagtcgaggagtgactgttgttatttctccttggaactttcctttggcgattccatgtggaatggtttcggcgcctcttgtcgctggaaatactgtgatactaaagtctgctgaacaaactcctcttgtagctcaaaaaatgattgatctatttcatgaggcaggagttccaaaagaagctttaatccactgtcctggtgaaggagaaatcgttggggatgctcttgtaaataatcctttgactgcagcgatcgtttttacaggctcaagagcagtcggtagttctattttcaaaagagcttcacagagaatgataaagaatgaacttcatgggaatgtatatccagtcaaagttataactgaaatggggggaaaaaatgccattattgttacggccaatgctgaattggatgaaactgtttctggaattctttattctgcttttggcc

SEQ ID NO: 213382 - DNA, 673 bp, Unknown
  Bacterial polypeptide expressing nucleotide sequence isolated from the Sargasso Sea
cgccaaccttgtttttgctgattgtgatcttgaagaacgagttatcgcttctgtagatgagtgcatgttcaatacaggtcaatcctgcgatgctcccacaagattgttggttgaacgtgcttgttatgatgatgtacttagtattgcaaagcgagcagctgaacagacaaatgttggcaaccccgctgaggaaggggaccatattggtcctttatttgacaagcttcaatttgagcgagttcagaggatgatcaaggttgggatcgatgagggagcaacattgttagcaggagggttaggaaaaccagagggcattgataagggctggtttgttaaaccaacaatcttttcagatgtttcgaatgacatgagaatcgctcaggaagaaatatttggtcctgtactagtgataatcccatttgaaaatgaaagtgacgccgttgctatcgccaatgatacaccctacgggcttgccgcatatttgcagactggtgatccagatcgtaaagaacgagtttctgccaagcttaaagcgggtgccgtgcatattaatggtagtggcattgaatacggtaccccgttcggcggttacaagcaatcaggcaatggtcgtgaaggaggtttgatgggccttgaggattatttagaaacaaaaactcttcatggtctttag

SEQ ID NO: 213383 - DNA, 719 bp, Unknown
  Bacterial polypeptide expressing nucleotide sequence isolated from the Sargasso Sea
attgagagaagtattagagattcaaaagcaggcattcattaaaaatgggccaccaacttataaagaacgtatagacagtttaagacgatgcatagcgcttatagaagcacatgaaggattgctaattgaaactctaaatcaagattttagccacagatcaaaagatgaaattaaaatttcagaaatagaccaaacgattagaaatttattatttaccataaaaaatctaaagaaatggatgaagccaaaaagacgaagcccttcacttggcacaggtctactcggtgcaaaatcgatcatgaatccgacaccgttaggaacagttggaattatagccccgtggaattttcctgttggaatggtattttatcctgctgcctccattcttgcttcaggaaacaaaataatggccaaaccatcggaaattactcccaatactgcgaatcttattaaagaagctgtagggaaatattttgatccatctgaattttcagtttttttaggtgggccagaagtaggcgaagaattttcatctcttcctctcgatcatctgctttatacgggcagcaacactattgccaaaaaagtattaagaaatacggccaagaatttagtcccaaccactttagagcttggtggtaaaagtccaaccatcatatcaggcgatgccaaccttaatctttgcgcaaaaagaatactttttgctaaaactatgaatg

SEQ ID NO: 213384 - DNA, 844 bp, Unknown
  Bacterial polypeptide expressing nucleotide sequence isolated from the Sargasso Sea
tttgcagaaatgatacatgaggcaggttttcctgctggtgtttttaatttagtcaatggagatggtcaaggcgttggaacagacttatcagggcatcctgatgttgatatggtttcctttacaggttctaccagagcaggaaaattaataactaaaaatgcagctgatactattaaaagagtttgtttagaattgggtggcaaaggtggaaatattgttttcgcagactcttatccagatgcggttagagatggaattagaaatgtcatgagtaattcgggacaatcttgtgacgcaccaacaagaatgttagttgaaaaatccatttacaagagagcagtcgaggaagctgcagatgaagcaaataaaattaaagtagatatagcatcaaaagatggtgaacatattggtcctgtaatatctaaaacccagtttgataaaattcaaagtcttattaaaagtggaatagatgagggtgcaactttagttgcaggaggaccagacaaacctgaaaactttaaaaaaggctactttataaaaccaactgtatttactgacgtaaataatgacatgagaatagcaaaagaggaaatatttggtccagttttgtctataatacctttcgaaaatgaggaggaagctatcaaaataacaaatgatactgaatatgggcttggaaattatctacaaacagaagacaatgaaaaagctaaaagagtctcaaagaaattaagatcaggaattgtttatgtaaatcataaacccgcagactcagggacacctttcgggggatatagacaatctggaaacggacgtgagggaggaacgtggggccttcatgaat

SEQ ID NO: 213385 - DNA, 386 bp, Unknown
  Bacterial polypeptide expressing nucleotide sequence isolated from the Sargasso Sea
attagtcgcaggaggagttgaaaaaccagatggatgtgaaaaaggttactacgttagacccacagtttttgcaaatgtgacaaatgatatgacgatagctaaagaagagatatttggccctgttcttgtaatgattaaatataataatgaagaagaggctatcaatattgctaatgatactgaatatggtcttgcaggttatgttcaaggtgatcccgatcatgccagagaagttgctcgaaaaataagagctggacaagtaataattaatggaggcgcaagaggaactggagctccttttggaggatataaagcttcaggaaatggaagagagcatggtcttcatggtctagaagaatgtctagaaactaaagcaattatataga

SEQ ID NO: 213386 - DNA, 591 bp, Unknown
  Bacterial polypeptide expressing nucleotide sequence isolated from the Sargasso Sea
ttttatcaaatgatgataaaataatatctgctgcctcatgcacaactaactgtttagcgccagtggtgaatgtccttaataataattttgaaattgaaaaaggttttatgactaccattcatgcatttactagtgatcaaagaattttggacaattctcataaagatccaagaagagcacgagctgcaagccagtcaatagttccaacatcaactggggcatcaaaagcaataggcgagataattccaagcttaaaagggaaattagaaggggttgcaatgagagtcccaactcctaacgtgtcgcttgtagagttaatattctgttcaaaaaaagagataagtattaaaaaaattaatgatgcttttgaagctgcttctaaaaatgaattgaataaaattttagaagttactcatgagaagctggtttccattgattttaatcatcattctgcatctgcaattgtagatgcttctttaacaaatgttgttggaactaatatgggcaaaatttctgcttggtatgataatgaatggggtttttccaatagaatgtgtgatatagctaagaatttgaataaaatctcttaat

SEQ ID NO: 213387 - DNA, 729 bp, Unknown
  Bacterial polypeptide expressing nucleotide sequence isolated from the Sargasso Sea
ggaggacttggcgcgaatcatgacggcagagcaaggaaaaccgttgatagagtcgcgaggagaggtggcgtacgcggcgtcgtttttagagtggttcgcggaggagggtaagcgcgtgtacggggacgtggtgccggcgtcgacgacgggttcgagaatcatggcgattaaacaaccggtgggcgtgacggcggcgattacgccgtggaactttcctctcgccatgatcacgcgaaaagccggcgcggcgctcgcggctgggtgcacgatggtggtgaaaccgagcgaggagacacctctgagcgcgttcgcgttgggcgcgctcgcggaggaggcgggatgtccggatggcgtgttgcagttcatcgtgggcgatcccgccgccatcggcgaagcgttgtgcgcgtcacccgtcgtaaggaaaatcaccttcacggggagcacgcgcgtgggtaaattgttgatgaaacaaagcgcagagacgtcgaagcgcgtgagcatggaactcggcggtaacgccccgttcatcgtgtgtgcggacgccgacgtggatgcggcggtgcagggcgccatggcgagtaaatttagaaactcgggccaaacgtgcgtgtgcgcgcaaagattcatcgtgcacgaatccgtcgaggctgaattcgtgcgcaagctcacggaagctgcgagcgcattggtgatggcgaacggcttggaggatgaaaacgccacgcaagg

SEQ ID NO: 213388 - DNA, 853 bp, Unknown
  Bacterial polypeptide expressing nucleotide sequence isolated from the Sargasso Sea
aatttcctcctggagttttcatttagttaatggagatggagtaaccaccggagatgcattaacaagtcatcccgacgtaaacatgatatcatttactggctctactagggctggtgcattaatttctcaaaatgcagctaaagattttaaaagaattagtttagagcttggtggaaaaggtgcaaacataatttttaaagatgctgattctgaagctgtagcaagaggagttctaagatgttttagaaactcaggtcaatcatgcaatgcaccaacaagaatgcttgttgaaaaatcaatttatagtgaaactgtagaaaaagtaaaagaattagcaaataatactaaagtagatgcaccacaaaaagaaggcgaccacattggaccagtagtttcagaagtacaatataataaaattcaaaatttaattcaaaaaggaatagatgaaggagcaaagttaattgctggtggaacaggaaaacccaaaggatttgaaaaaggttattatgtaaaacctacagtttttgctgacgttaataatcaaatggaaattgcaagaactgaaatttttggtccagtattatccataattccttttgaaaacgaagaggaagctatttcaatagctaacgatactccttatggccttacaaattatattcaaacccaagataaagaaaaagttaaaagagttgcaagaaaacttagatcaggaatggtagatgtaaatggagttggtatagcagttgcctcaccttttggaggctacaaacattctggaattggacgagaagctggtacagaaggactgatagagtttttggaagtaaaaacagtcggtggttggaattaa

SEQ ID NO: 213389 - DNA, 772 bp, Unknown
  Bacterial polypeptide expressing nucleotide sequence isolated from the Sargasso Sea
tttatgtacgaaaaattctggtcaatttataaatggtaagtggcagcaatcatcaggcggagagacctatgatgtaattaatcctgctaccgaagaaataatcggtaaagcttcgaaagctaacaaagatgatataaatgcatgtcttaagtccgcagaacaaggttttaaagtttggaaaaatacttcgccatgggaaagatctaaaataatcagaaaaatttctgatttaattagaaaaaaaaatgatgttttgtctaaatggttaactttagaagtaggaaaacctcttaaagaagggtctggtgaatctagtggagctgcagatatttttgaatggagcgccgaagaagcaaaaagaatttatggtgagactttgctaggaagatcgccagaaactagaatacatgtttactatcaacctgtaggagtggtagctgcacttgttccttggaattttccaataactcttgcatcaagaaaaatttctacagctttatctgctggatgttctgtaatagttaaaccggatataattactcctggtgctgttatggaattagttgatatttgtaatgagtctggtgttccgccaggtgttgtaaatcttctatctggtgatccagcatacatttcagatcaattattatcttctgatataattaaaaaagtttcaataactggttcaacacgtgttggaaaacttattttaaaaaaagccgctgataaagttcaaagagtaacaatggaattaagcggtcattctcctttt

SEQ ID NO: 213390 - DNA, 748 bp, Unknown
  Bacterial polypeptide expressing nucleotide sequence isolated from the Sargasso Sea
tgcaagaaaagttgcactaagtgcagctgagaatttagtgcctcttacattggagctgggcggcaagtccccatcaattataagtcaaaatgcaaaaataaaaaaaacagttgatcaaataatgactggtaaacttttgaactcaggacaaatttgtatatcccctgattatgtttttgctccttctaataaggtttcagagtttgttgaacatgcaaaaaatcatgtaagtgagaggtatccgacaattaaaaataatcctgattatacatcaatcattcatctgaatcattatgatcgcctgaataaccttattaatgatgcaagggagaagggggctgaaattattgaaattaatccagcaaatgaggatctatcacaacagcaatatcacaaaattgctcctactttggttcttaatcccactgacgacatgaaaataatgcaagaggaaatatttggaccactcttgcctgtaaagacatatgataagtttagtgacgtaatatcatacgtaaataaattgccgaaagcacttgcattatattattttggtaatgaaaaaagtgagattgatgagctattaaacaaaacaagttcaggtcaaattgctataaatgaccttatttcacaatttgcaatgcatgatttaccatttggtggtgttggccccagtggaatgggctcttaccatggatatgatggatttaaaaatttcagtcacaaaagagcggtacttaagggtcaa

SEQ ID NO: 213391 - DNA, 513 bp, Unknown
  Bacterial polypeptide expressing nucleotide sequence isolated from the Sargasso Sea
tttgaaggttaaatttccatttaaagctaaatatggaaactacattaacggaaaatttgtagaacctaaatctggaaagtattttgataatacttctcctatcactaatgaagttatctgtaaggtgccacgatcgaacgagaaagacgttgattttgctctagacgcagctcatgcagcatttcctgcatggggaacaacatcaattggagagagatcaaacattctcttaaagattgctgatgttattgagaaaaatcttaacgttttagctacagcagaatgtttagacaatggtaagcctataagagaatgtatggctgcagatttacctttggtaattgatcattggagatattttgcaggagtaataagagcagaggaaggttcagttgctgaaataagcaatagtgaatattctttacacatacctgaaccattaggtgtagtaggacagatcataccatgggaactttcccattattatggcaacatggaaactttgcacagctt

SEQ ID NO: 213392 - DNA, 874 bp, Unknown
  Bacterial polypeptide expressing nucleotide sequence isolated from the Sargasso Sea
ttggcctacctggtaaggcggcttctggaaaacggtgccaacagttcgtttgtgaatcaactgttggatcaggatgtgcccgcgaccgaggtcgtcagtgaccccctcgatcagatgctcgaggtggcccagacaccctcacaccccaacattgcgctgccgccagatctttatcaaccacagcggcgcaatagtgccgggcgggatcttgaggaccggtttgcggttgccgggcttgaggaggacatgagtgcgtttcttgatcgactctggaagttctcgtacaacgccatagctgatctaaaaggcacggtgcgcgaggtacgcaatcccgccagaccagaagaacaggtcggggatcttaaagaggcatctgtcgaggatatcggaccaactatccataaagccagaacagctttggggaactggcaagcacttccggcagagacccgtgcggctgttctcaacaagacagccgatctctatgaaacgcattttgccgaactgatgacgttggccggtcgcgaggcaggcaagactttgctcgatggcgtcgccgaaatccgggaagcggtcgattttttgcgctattacgcgagccaggtgagagcgcttccagccgaatctactccccggggtgtttttgcgtgcgtttcgccgtggaatttcccgctggcgatttttaccggccagataagtgcggcgcttgccgcaggcaattgcgtcatcgccaaacccgcggaacagacgcctttgatcgcgctgcgggcggtggacctcatgcatgaggcgggcgtccccggtgatgtgcttcagtgtcttcccggtccgggagaaaccgtaggcgccgcgctgacggcaagccccggcatcg

SEQ ID NO: 213393 - DNA, 694 bp, Unknown
  Bacterial polypeptide expressing nucleotide sequence isolated from the Sargasso Sea
atggataacaaaaaattttatattggtggagaatgggtagaaccagtcaatcaagaagacataaatgttataaatccagccactgaagaagtagtttcaattgtaagtaatggaaattcagcagatttagataaagccgttaattttgctagaaatgcatttaaatcgttctcccaatctactaaagaagaaagattaaaattattacatagaatttgtgaaaattatgaaaaaaggataaaagatattgcggaaataattcgtctggaaatgggcgctccggttaaattagcaaatggatcacaatctaagcttggcttacaacatttaaagactgcaataagagttcttgaagagcatgaatttgaatttaagcataataatctgcttataagacatgaacccataggagtttgtggtttaataactccttggaactggccagttaaccagataatggcaaaattaggtccatctctagcagcaggttgtacttcaattttaaaaccaagcgaaattgcgcctggttcagcaatgattatagctgaaatacttgatgcttcagatccaccacctggtgtttttaatcttattaatggatatgggaatggtattggtgaagcaatatcatctcatccagatatagatatggtatcttttacaggttcaacaagagcaggaatagcggtgctaa

SEQ ID NO: 213394 - DNA, 886 bp, Unknown
  Bacterial polypeptide expressing nucleotide sequence isolated from the Sargasso Sea
aatgttacttgcagaaatgattgacgaagtaaagtttccggctggagtttttaatttggttaatggagatggagctattactggggatgctttaactagtcatcctgatattgatatgatttcttttacaggatcaacaagagcaggagctttaatttctcaaaatgctgctaaagattttaaaagaataagcttagaattaggtggaaaaggtgcaaatataatttttaaagacgcagactcagatgctgtagcaagaggagttttgagatgttttagaaattcaggacaatcttgcaatgctcctacaagaatgctagtagaaaaaacaatttataatgcaactgtagaaaaagtaaaagaattggcaaataataccaaggtagactcaccccaaaaagatggtgatcatattggtccagtagtatccgaagtacagtttaataaaattcaaactttaatacaaaaaggtatagatgaaggagcaaaattaattgctggcggaaccggtaaacccaagggatttgaaaaaggttattatgtaaaaccaacagtttttgctgatgttaacaatcaaatggaaattgcaagaactgaaatatttggtcctgtgctatctataattccttttgaaaatgaagaggaggctatttcaatagctaatgatactccttatggtttaacaaattatattcaaactcaagataaagaaaaagttaagagagttgcaagaaaacttagatctggaatggtagatgttaatggagttggtatagctgtagcatctccttttggaggatacaaacattctggtattggacgagaggcaggaacagaaggtcttatagagtttttagaagtcaaaacagttggtggctggaattaa

SEQ ID NO: 213395 - DNA, 747 bp, Unknown
  Bacterial polypeptide expressing nucleotide sequence isolated from the Sargasso Sea
ggaacagggtaagccattggaagcggccacaaccgaagtctttggtatggcggcgttttgtagatatttcacttctttggatctccctgtggaggtattagaggacagcgaggggcgaaaagttgaatcgcataggaatcctcttggagtcgtaggagccattgtcccttggaattttcctttgatgctaatggcctttaaattgccccccgcgttaatcgccggaaatacgattgtccttaagcccgcccccacgacaccgctcagttctttgagatttgcagaacttatcaaagacgtggttcctgcaggagtggtcaattttgtgacggacgccaatgatctaggagcagccttgactgcccacccagacgtgagaaaagtatccttcactggatcgactgcaacaggtgcaaaagtcatggcaggagctgccggactgctgaaacgcatcaccctggagttgggaggaaatgatgcagggatcgttcttaacgatgtcgatcccaaggaagccgctcctaaactattcgacagcgccttccagaatacaggtcaggtctgcatcgcgatgaagaggctgtacgtccacgaagacatatacgatgaaatgtgtgcagagctggctaccatcgcggatgagacaccgattggaaatggcttggatcaaggcacaaaactcggacctcttaataacaagatgcagtatgagcgcgtcaaggaactgattgaagaagcaaaacaaga

SEQ ID NO: 213396 - DNA, 892 bp, Unknown
  Bacterial polypeptide expressing nucleotide sequence isolated from the Sargasso Sea
gcaaagatcttatattattagacgtatagcagataaaatgagagagaagcaagaagtactggccaaatggatgacgttagaagttggaaaaccttttgcagaagctaaaggagaagttaatggagcagctgatatttttgaatggaatgcagaggagacaaaaagaatttatggtcaaactgtagaaagcagatttgaggacactagagttcatgtttattatcaaccagtaggagttgtcgctgcattatctccatggaattttccagccgtgttatcagcacgaaaaatctcaacagctttagctgctggatgttctgttataataaaacctgatgtaattaccccaggtgtagtaatggaaatggttgatatttgtaatgagtgtggagttcctccaggagtagtaaatcttttatcgggagaccccccaagtattgctcaacagttaatcgcttctgatattgttaaaaagatttcaataacaggatcttcaagagtaggcaaattaattttaaaacaagctgctgataaagttcaaagagtaacaatggaattaagtggacattcgccttttattgtttttgatgatgcagatatcaaaaaagctgctgatatggcaattgctgcaaaatttagaaataatggccaagtatgtatatctcccaatagattttatatccatgaaaaaaagaaggatgaatttattaatttatttgtagagaaaacaaaaaaattgaaaattggtaatggtatggatcctgaaacacagttaggtccactcacaactaaaaaaagattaaatgaagttgagactcttgttgaaaaaactaagcaagaaggtgctaaagtcttattgggtggcagaagaccatctggttttaataaagga

SEQ ID NO: 213397 - DNA, 910 bp, Unknown
  Bacterial polypeptide expressing nucleotide sequence isolated from the Sargasso Sea
gaaaatgtagggaccgatgtagatagttggtcaataaggcaaccattaggagtttgcgcaggaataactccatttaactttccagccatggtgccaatgtggatgtttccaatatcaatagcatgtggcaacacatttatcttaaaaccttcagaaaaagatccttcttgttctattagacttgcagaattatttaaagaagctgggcttccggatggtgtttttaatgttattaatggagataaagaagctgtggacgcattgctattaaataaagacattgtagccataagttttgttggttccactcctatagcaaaatatatatatgaaaatgcagctaaaaatgagaaacgagttcaagctttaggtggcgctaaaaatcattgtgtaattatgccagattgtgatttagatcaggcagtaaacggattaatgggagctgcttatggttcagcaggagagagatgcatggctcaatctgtagcagtagcagttggaaatataggaaatgatttagtaagcaaaatttctaaaaaagttatgtctcttaaagtaggtcctggtatggataaaaattctgatatgggaccactagtaacgaaagaacatttagaaaaagtgaaaggctatgtagatttaggaattaaagaaggtgcaaaattagttgtggatggtagaaatataaaacttcaaggttatgaaaaaggtttttatttaggtgggtgcctttttgatcatgtagaaaaaaatatgaaaatttataaagaagagatttttggaccagtgctttctgtagttagagtaaaagattttgaatctgctatcaatttaattaatgatcatgaatttggtaaaggaacaagtatttatactagagacggagacgtaggacgtacattcgcaagta

SEQ ID NO: 213398 - DNA, 570 bp, Unknown
  Bacterial polypeptide expressing nucleotide sequence isolated from the Sargasso Sea
gctggagcgcatcacagaccgcacccttgtcaaaacgcagtcctacgtcgacggcgcctgggtgggcgcggcagacggcgcgacctttcccgtctacgaccctgccaccaacgcacacctgactgacgtcgccaatctcggccacgcagaaacgctgcgcgccatcgacgccgccaatgcggcttggcccgcatggcgcgagctgaccggcaaagagcgcgccggcctgatgcgacgctggttcgacctgctgatcgccaatgccgacgacctcgccacgctgatgaccgccgaacagggcaagccgctggccgaagccaagggcgaaatcgtctacggcgcgtcgttcatcgaatggtttgccgaagaggccaagcgcgtctccggcgacgtgatggccagcacctggcgcgacaaacgcatggtcgtgttgaagcagccggtgggcgtgtgcgcctccatcacgccgtggaacttcccgctggcgatgatcactcggaaggttgcgccggccatggcggcaggctgcaccatcgtcatcaagccggccgagcaaacgccgctgtccgc

SEQ ID NO: 213399 - DNA, 784 bp, Unknown
  Bacterial polypeptide expressing nucleotide sequence isolated from the Sargasso Sea
atggaaaaaatattaaattacataaatggggaattggttgaaccgataaatggtaattattttgataattataacccatctaatggaaatgcttattccttagttcccgatagtgaaaaagcagacatagatcatgcagtagcagcagcaaaagaagcttttaaaacatggagtaaaacttcaaagcaagagcgttcagacatactaatgaaattagccgatacgattgaaaaacactcagaagaattgattattgcagaaagtaaagataatgggaaaacagaatccttagctagagcagtagatattccgagagcgccagcaaattttagattttttgcaactgcaattctacacgatcattctgaaatacatgaaatggatggagtggcattaaactacactttacgtcaacctataggtgtggctgcttgtatttccccatggaatttaccactttatttactcacttggaagattgcacctgcacttgctgcaggaaatacggtggtagcaaaaccatctgaaatcactccaatgacggcattcttactcagtaaaatatgtattgaagcaggccttcctaaaggaatattaaatattgtacatggccatggcgctaaagttggagattccttaacaactcatccagacacaccaattatttcctttacaggaggaactgtaacaggaaaacacattgcaagcgtaactgctccaatgtttaaaaagatttcattagagttaggaggaaaaaatcctaacatcatttttgcagatgcta

SEQ ID NO: 213400 - DNA, 580 bp, Unknown
  Bacterial polypeptide expressing nucleotide sequence isolated from the Sargasso Sea
acgaggatgttagtagaaaaatcaatgtatgaagaagcagtagaaagacttaaaaaatatgcaaatgaatttcaagttgatgatccaaacaaagaaggtgagcacataggtccagtcatctcagaaacacaattcaataaaattcaaactttaataaaaaaaggcatagacgagggagctaaattagtttcaggtggtcctggtaaaccaaatgggcttaacaaagggtactatgtaaaacctactgtatttgcagatgtaaaaaatgatatggaaatagctagaacagaaatttttggaccagttttatcagttatgccatttgaaacagaagaagaggcaattaaaatagccaatgataccccttacggtttaacaaattatatacaaacccaagatcctgagaaagtaaaaagagtcgcaagaaaattaagatctggaatggtagatgtaaatggtgctggtatagctgtcgatgcaccgtttggaggatttaaacattcaggaattggcagggaagctggatcagagggactagtagagtttcttgaggtaaaatctgtcggcggctggaattaaa

SEQ ID NO: 213401 - DNA, 568 bp, Unknown
  Bacterial polypeptide expressing nucleotide sequence isolated from the Sargasso Sea
agtagaaaagtcgatttataatcaaactgtagaaaaagtaaaagaattagcaaataacacaaaagtagactctccagaaaaagatggagatcatattggcccagtagtctctgaaacacaatttaataaaattcaaactttaattcaaaaaggaatagatgaaggtgcaaaactaattgctggaggaactggaaaaccaaaaggtttagaaaaaggctattatgtaaaaccaactgtttttgcagatgtcaataatcagatggagattgctagaactgaaatttttggtcctgtgttatctataattccctttgaaaatgaagaagaagctatttcgatagctaatgatactccatacggattaacaaattatattcaaacgcaagatagagagaaagttaaaagagttgcaagaaaacttagatcaggcatggtagatgtaaatggagttggtatagctgtaggctcaccatttggtggatataaacactctggcattggtagagaggcaggaacagagggtttaatagaatttttagaagtaaaaacagttggaggatggagttaa

SEQ ID NO: 213402 - DNA, 511 bp, Unknown
  Bacterial polypeptide expressing nucleotide sequence isolated from the Sargasso Sea
caatccagtcaataatctgggcgctcttgttgataaagaacattttaccaaagtctgcaattacctagacaaggggaaaaatgaaggagcaaaaattgtcctaggtggagaaacaatggatggagtatatgtggagccaacgattttcgatgaggcttcggcagatgcttcgattgcacgagaagaaatttttggaccgcttctctctgtgttaactgtcaaatcgaatgataaggcaatttctttggctaatgacaccaactatggtctggcagcctcggttttttctgcaaatgcgaaacgtgcgatacgcactgcgagagctattcgagctggaaccataacggtcaactgttatggggaaggggatatttcgactccgtttgggggctataaacaatcaggtttcggaggtcgagacaattctattcatgctcatgaccaatatacagaattaaaaacaatttgggtggacctttcagatcgaacctctgaagaggtgattgaataa

SEQ ID NO: 213403 - DNA, 340 bp, Unknown
  Bacterial polypeptide expressing nucleotide sequence isolated from the Sargasso Sea
ccaacaattttttcagatgtaaataatgacatgaaaattgcaagaactgaaatttttggacctgtactttcaattataccatttgaaactgaggaagaagcaatagcaattacaaatgatacatcttatggacttggtaattacttacaaactgaagataaagaaaaagctaaaagagttgctagaaaagttagagctggaacagtttatataaatggtcaagccactgatactggcatgccttttggtggttataaacaatctggtaatggtcgtgaaggtggtgtctggggtttcactgaatttttagaagttaaagcaattaccggttggaattaat

SEQ ID NO: 213404 - DNA, 847 bp, Unknown
  Bacterial polypeptide expressing nucleotide sequence isolated from the Sargasso Sea
tatgtatgaaaaatttggtcaatttatagatggtaagtggcaacaatcatcggacaaaaaaacttatgaagttataaatccagcaagtgaggaaattatcgggcatgcatcgaaagctacaactgctgatgttgataaggctcttaaatctgctgaaaaaggcttagaggtttggaaaaaaacttctccatggaaaaggtcttcagtcattagaaaaattgctgacctaataagagctaaacaagatgtacttgcaaaatggataactcttgaagtaggcaaaccttttcttgagggtaagggtgaagtaggagctactgcagatatttttgagtggaattcagaggaaacaaaaagaatttatggtcaaactgtagaaagcagatttgaagacactagaattcatgtttactatcaaccaattggagttgttgctgcaatgtctccttggaattttcctttagttttgtcaggaagaaaaatatcaactgctttagctgcaggctgttcagttataattaaacctgatgtgattgcaccaggtggagtgatggaattagttgatatttgtagagaagctggagttcctccaggtgtggttaatttattatccggtgacccaccaagtatagcctctcaattaatttcatcagatatagtaaaaaaaatttcaattacaggatccacaagagttggaaagctagtgcttaaacaagcggctgaaaaagttcaaagagttactatggagctaagcggtcacgcgccatttattgtgtttagtgatgcaaatatcgagaaagcaacagatatggctattgcatcaaaatttagaaacaatggacaagtt

SEQ ID NO: 213405 - DNA, 730 bp, Unknown
  Bacterial polypeptide expressing nucleotide sequence isolated from the Sargasso Sea
tatgttttcgaatgcactgggaaaatttaattcgaaagaaaaacttcttgctcatatagaaaatggtgcaaaaaaggtgatcgtttctgctccatgtaaaaatgctgataaaacaatagtatttggtgttaatgaaaatataattactaaagaggataaaataatatctgcagcttcatgcacaaccaattgtctagcaccagtaatcagtgttcttgatcaaaattttgaaattgaaaaaggttttatgactacaattcatgcatttactagcgatcagagaattttagataactctcacaaagatcccagaagagcgagatctgcaagtcaatcaatcgttcctacctcaacaggagcttcgaaagcaataggagaaataatgccaaacctcaaagggaaactagaaggtattgcgatgagagtacctactcctaatgtttcgctcgttgaattggtcttttgtacaaaaaaagaaattaatataaaaaaaatcaataacgcttttgaacaagcatcaaaaaataaattaaaaaatattttagaagttactaatgaaaaattagtatctatagattttaatcatcatcctgcttctgcaattgtagatgcctctttgacaaatgtagttggaagcaatatgggtaaaatatcagcctggtatgataatgaatggggcttttctaatagaatgtgtgatattgctgaaactttgcataaaatctcttaa

SEQ ID NO: 213406 - DNA, 556 bp, Unknown
  Bacterial polypeptide expressing nucleotide sequence isolated from the Sargasso Sea
aatttatgatagagctgtaaaagaggcagaagaggaagcaaataatattaaagttgatcttgctaaaaaacaaggtgatcatatagggcctgtagtttccaaaatacaatatgataaaatacaagatttgatcaaaagtggaatagatgagggagcaacccttattgccggcggccctgataaaccaaacggattagaaaaaggatattttattcaaccaacaatatttacagatgtatcaaataaaatgagaatagctaaagaagaaatttttggcccagttctatctattattccttttgaaacagaagaagaagcaatttcaattgttaatgatacatcatatgggttaggaaattatgttcaaactgatgatttagaaaaagcaagacgagttgcaaaaaaatttagatcaggaggtgtatatattaatggtaaaagtgctgatccaggcactccttttggaggatatagacaatcaggcaatggccgtgaaggtggaacttggggccttgaagaatatttagaagttaaaactatttgtgggtggaaatag

SEQ ID NO: 213407 - DNA, 802 bp, Unknown
  Bacterial polypeptide expressing nucleotide sequence isolated from the Sargasso Sea
atgagaaaacttgaaactttcaaccccgcgacaggtgagcgcattgcagaattagaaatcaccacctccaaagaaatacaagctatggttggtaaagcaaaaaaagctcaaataaaatgggctgagaaaagtattcgtgatcgagcaaatatcatcatcaaagcttacgaggaaataaaaaataggactaagcaaatggctgatataatacataacgaaatgggtaaaatctgtgaagaggcattaggcgaagttgagtcttctattaaaaaaattcccggaattgcagatgatgtagtgaatgcactgctgtcagaggagattaacgatggtttcactcgtaccatttcatattgggatccaatgggtgtgtgcgctagcataactccttggaattttcctatgggtatgcctcagaccctcataattcccagtttgatagctgggaatactgttctttttaaaccatctgaagaagttcctttggttgggaaagaatacgcagatatcttaaataaaactctcccagaggatgttctccaggttgttataggtgagggagagcagggacgagagttagttcaatcagacgtacaactcataactttcactggttctcaatcaacaggtaagcatatactcgaaaaggcagtaaaagaatttaaaagggttatattggaactaggaggcaaagatccgctgattattcttgatgatgcagacttggaaactgcggctgaatttgctgcaaacaatagttttagaaatacaggacaagtttgcgtgagtacagagaatatct

SEQ ID NO: 213408 - DNA, 734 bp, Unknown
  Bacterial polypeptide expressing nucleotide sequence isolated from the Sargasso Sea
agaccatgcttcaagagtaaactttcgcagcaaagcatttattgatggcgaattcgttagttccgtatctggaaaaacaatgaattctataaaccctgccaatggcagaatactaactaaaatcgccgagtgcgacgagaaagatatcaacaaagccgttagttctgcgcgccgttcgtttgaaaaagggtcttggtcttgtatgtctccagtagacaggaaagtaatcttattgaggctatcagaactaattagagaaaaccttatagaattagcactgctagatagcctcgacatgggaaaattagttacagatgccgctaacgtcgatgttccaggttcagccatgttttttcaatggtatgctgaagcgatcgacaaaatatatgatgaaatagcgcctactggcttgggagaccttgcaatggtttcgagagaaccattaggagttgtcggtgccgtcgtgccttggaatttcccactagacatggcaacctggaaagcatcggcagccctcgctgcaggaaattctatagtgctcaaaccagccgaacaatcgcctctatcggcactgcgcttggcggagctagctatggaagctggagttcccaaaggtgtctttaatgttgttcctggatatggtgaaacggctggcaaagcactcggtctacataatgatgtagattgcctcgcctttaccggatccactgcagtaggaaagttatttcagcagt

SEQ ID NO: 213409 - DNA, 751 bp, Unknown
  Bacterial polypeptide expressing nucleotide sequence isolated from the Sargasso Sea
atgaagaccgaaatagtaaatcaatctagtagttacgtaaatggagaatggtctgcttcagatgaaaaaattacattgaagaatcccgctaatttgagctcgaatattaaagaaatatattttgcgtctccacaaaatgcaaaaaaatctattttatctgctgatgttgcatttgcaaactggaaatcaacatcaattgattatagaattggttttttaaaaggcctgatgtcatctttagagaaaaataaaaaatcatttagtcatcttataacgttggagaatggaaaaaccattaaagaatcaatgagtgaggttgatgccgctattctcgaaggtaattatcagattgaatttttaatgcacaatctttgcgagagcattgaaaacaataaattgtattatgaaccgctaggtgttgcattgctcattacaccatggaattttccattgtcaacagtgattagaaaaatgataccagccttaatatgtggcaatacgatcgttttgaagccttctgaattttcttcactgacgtcaatcttcctttttgagcttattgataatatttcgcttcccaatggagttgctaatcttgtcttaggtgaagggagtgttgttggaccacccttaatggaatcatcagctctaaaaattgtttcatttactgggtcaaccgatactggagaatcgatccagaatgaaataggatcaaatgatattaggtatcaagctgagatgggcggatcaa

SEQ ID NO: 213410 - DNA, 844 bp, Unknown
  Bacterial polypeptide expressing nucleotide sequence isolated from the Sargasso Sea
ttcaatgcagaagtaaaatttgataaaaagcacataattattaacaaaaagaaaatctcttttggtcaggaaacagatttaaataaaataaattggaaaaaatttaatgttgattatgtttttgaatgtacaggtaaatttaattctaaagaaaaattattacctcatttaaaaaatggagcaaaaaaagtcattgtatcagcaccatgtaaaaatgcagataaaacaattgtatttggagtaaatgagagagtattaaaaaaaaatgataatattatctctgcagcatcatgtacaaccaattgtctagcacccgtggctcaccttttaaacgaaaactttaaaattgaaaaaggtttcatgactacaattcatgcttttacaagcgatcaaagaatattagataattctcataaagatccaagaagagccagatccgcaagtctctcgattgttccaacctctactggagcatcaaaagcaattggtgaaattataccctctcttaagggaaaactagaaggtatagcgatgagagtccctacaccaaacgtatcattaatagagcttgtcttttgtacaaaaaaagaattgtcagtaaaaaaaattaattctgcttttcaaaaatacgtatcaaaacaaaaaaagaaagttctagaaatatcaaatgacaaacttgtatcaatagattttaaccataattcagcatcatcaatagtagatgcttcacttacaaatgtagttggaaaaaacatgggaaaaatttctgcttggtatgacaatgaatggggattttctaatagaatgtgtgatatagctgagtttattcacaaaaattcttaat

SEQ ID NO: 213411 - DNA, 520 bp, Unknown
  Bacterial polypeptide expressing nucleotide sequence isolated from the Sargasso Sea
aaataaaataaaagtagatcaagcatcgaaaaaaggagatcatattggtcctgtaatttcgaaaactcaatacgataagattataaatttaattgaaagtggaatatctgagggagcaacattggcagcaggaggagctgaattacctaatggattaaataaaggttattttattaaaccaactattttcacaaatgtcacaaatgaaatgagaattgcaaaagaagaaatttttggtccagtactttccataataccttttgaaagtgaagatgaagcagtaaatattgtaaatgatacatcttatggtttaggaaattatttacaaacagaggacagagcgaaagctcgtagagttgcaaaaaaattaagatcaggatgtgtttatatcaatggaaatgcagctgacgctggaacaccatttgggggatatagacaatcaggaaatggaagagaaggcggagtttgggggcttgaagaatatttagaagtaaaaactgttacaggctggaaggattaa

SEQ ID NO: 213412 - DNA, 421 bp, Unknown
  Bacterial polypeptide expressing nucleotide sequence isolated from the Sargasso Sea
atagaaattggcattaatgagggcgcaactttggttgccggaggtcttgaaaagccagagggatatgacaaaggttattatgttaaaccaacagtgtttgcaaacgtaactaatgacatgactattgctaaagaagaaatttttggtccagtcttatcaattatcaaatatgattcagaggaagaagcaattgagattgcaaatgacactgaatatggtttggctggatatgttcagggtgagccagagcatgctaacaaagttgcaagaaaaattagagccggacaagttattattaatgggggcgcacgaggtactggtgcaccttttggtggttataaatcctccggcaacggaagagaacacggcatacatggtctagaagaatgcttagaaactaaagccgttataatgccttaaa

SEQ ID NO: 213413 - DNA, 834 bp, Unknown
  Bacterial polypeptide expressing nucleotide sequence isolated from the Sargasso Sea
atttagttaatggagatggagctactactggtgacgcattaactagccatccggatataaatatgatttcatttactggctcgacacgagctggagctcttatttcacaaaatgcagctaaagattttaaaagagtaagtttagaattaggtggtaaaggtgctaatattatatttaaagatgctgatccagaagctatcgagcgaggtgcattgagatgttttagaaattcaggtcaatcttgtaatgctcctacaagaatgcttgttgaaaaatcaatgtacaatgaagcaattgaaagactaaaaaaatacacagaaaattttgaagttggtgacccaaaaaaagagggggaacatattggtcctgttatatctgagacacaatataataagattcaaactttaattaaaaaaggagttgatgaaggagctaaactagtagcagggggacctggtaaaccagatggattagaaaaaggatattttgttaaacccactgtatttgcagatgtaaataataatatggaaatagctagaacagaaatttttggtcccgtattgtctgttatgccatttgaaactgaagaggaggctatagctatagctaacgacactccatatggtttaacaaattatattcaaactcaagataaagaaaaagtaaaaagagttgcaagaaaacttagatcaggaatggtagatgttaatggagcagggattgcagttgatgctccttttggtggttttaaacattctggtattggtagagaagcaggcgaacatggtcttgaggaatttcttgaagttaaagctgttggtggctggagttaat

SEQ ID NO: 213414 - DNA, 394 bp, Unknown
  Bacterial polypeptide expressing nucleotide sequence isolated from the Sargasso Sea
tgcagcaggtggacctgagttaccaaacggtttgaacaaaggatactttatcaaaccaactatatttacagatgtaactaatgaaatgagaattgctaaagaagaaatttttggacctgtgttatctataattccatttgaaactgaggatgaggcggtcaatattgtaaacgatacttcttatggtcttggaaattatttgcaaactgaagatagagaaaaagcacatcgtgttgctaaaaaattgagatcaggctgtgtttacattaatggaaatggagcagatgccggaactccatttggtggttacagacaatcaggtaatgggagagaaggaggtgtttggggccttgaggaatatcttgaagtaaagaatgttactggttggagttaa

SEQ ID NO: 213415 - DNA, 832 bp, Unknown
  Bacterial polypeptide expressing nucleotide sequence isolated from the Sargasso Sea
acagggagcgcgggtgctattggtggagaaattgccgaaaatcctattgtaaggaagttgactttcaccggctcaacggaaatcggcaaggtattaatgaaacaatgtgcgaatacggttaaaaaagtttccatggaattgggaggaaatgctccttttatcgttttcgatgatgctgaccttgatgccgcggttcaaggagcgatggcatctaaatttcgcaacaccgggcagacttgcgtttgtgccaaccgtatttatgtgcaggaggcggtctatgaggactttgctgaaagattatccgaggcagtgtccaagatgaaagtaggaaatgggttggagggagaaactcatcaagggccacttattgaggctgccgctgttgaaaaggtcgaagagcatattgctgatgcgttaaacaagggtgctgtggttgctgttggaggggaacgtcattcccttggaggaaacttttttaaacccactattatcaagaatgtcagtcaggatatgaaaatagcccgggaggagacttttggcccggttgctcccttgtttccatttaaaaccgaggaggaggttattgcctatgctaatgatacggagtttggtttggcctcttacttttacagccgtgatataggacggatctggagagtaatggaagcattagaatatggtattgttggcgtaaatgagggtatcatttcaactgaggttgctccatttggaggagtaaaagaatccggcattggccgcgaagggtcaaagtacggtatcgatgattttgtggagatcaaatatgcacttatgggtggtattgatcgataaa

SEQ ID NO: 213416 - DNA, 619 bp, Unknown
  Bacterial polypeptide expressing nucleotide sequence isolated from the Sargasso Sea
aactattgtgtttggagtaaatgaaaatattctaacaaaaaaagatcaaattatttctgctgcttcatgtacaacaaattgtttagctcctgttttaaatgtacttaataaaaattttgaaattgaaaaaggatttatgactacaattcacgcatttactagtgatcaaagaatattagataattctcataaagatccaagaagagcaagagctgctagccaatctatagtcccaacatctactggcgcatcaaaaactataggtgaaattattcctaaactgaaaggaaaattagaaggtattgcaatgagagtaccaactccaaatgtttctcttgtagaattggttttttgtacaaaaaaaaatattaatataaaaaaaattaataacgcttttaaattagaaacaaaaattcaatctaaaaaaatattagaatttactactgaaaaactagtttctattgattttaatcataattcatcttctgcaatccttgatacatctcttactaatgtggttggaaaaaatatgggaaaaatttcagcttggtatgataacgaatgggggttttcaaataggatgtgtgatatagtagaacatattcacaaaatctcttaa

SEQ ID NO: 213417 - DNA, 609 bp, Unknown
  Bacterial polypeptide expressing nucleotide sequence isolated from the Sargasso Sea
aatgataacggttagaaatgcttttaaaaaaatggattacgaagaggctctcgagagtaacattgagtcattggagtggatagctgaacataaaggccaattcgggcattttattgggggcagatttactaaaccaaaaaacttattcaagaccattaacccctttaataaaaaagaaattgctaaaatttctcagggaactgttgcagacattaaaagatctgttcaggctgctagatcaggcttagaaaaatggcaatcaatcggcccctttcaaagatcaaaatatttgtatgctatcgcaagatatattcaaaaagaatctcgaacaatctctgttttggaatcaatggaaaatgggaaatcaattcgggaaagtagagatattgacatacctctcgcagcaagacacttttactatcacgctggctgggctcaattacttgatgaagaatttcaagactattctgctattggagtatgtgggcaaattattccatggaattttcccatattaatgttagcgtggaaagtcgctcctgcgattgcagcccggcattcagttatccttaaacctgcagagcaaacctctctaactgccctttattt

SEQ ID NO: 213418 - DNA, 310 bp, Unknown
  Bacterial polypeptide expressing nucleotide sequence isolated from the Sargasso Sea
gttgctcgagaagaaatatttggacctgttttatctgttttagagtatgaagaacaagatgaagctatagaaatagctaatgacacagattttggattaggagctggtgtctttacaaaagatttaaaaaaagcttcatggactgcaagtaaattagaagcaggacaagtatacgttaataaatggtttacaggaagtcatgctacaccttttggaggatataaacaatcagggtatagtagagaaaaaggaattgatgctcttaaagcttatgtacaaattaaaaatgttggtataagtttggactaat

SEQ ID NO: 213419 - DNA, 460 bp, Unknown
  Bacterial polypeptide expressing nucleotide sequence isolated from the Sargasso Sea
ttctaaaattcaatatgataaaattataaatcttattgaaagtggaatttctgaaggagcaactcttgcagcaggtggacctgagttaccaaacggtttgaacaaaggatactttatcaaaccaactatatttacaaatgtaactaatgaaatgagaattgctaaagaagaaatttttggacctgtgttatctataattccatttgaaactgaggatgatgcagtcaaaattgtaaacgatacttcttatggtcttggaaattatttacaaactgaagatagagagaaagcacatagagttgcaaaaaaattaagatcaggctgtgtttatattaatggcaatggagctgatgctggaactccatttggtggttacaggcaatcgggtaatggtagagaaggaggtgtttggggccttgaggaatatcttgaagtaaagaatgttactggttggagttaa

SEQ ID NO: 213420 - DNA, 553 bp, Unknown
  Bacterial polypeptide expressing nucleotide sequence isolated from the Sargasso Sea
catggcagttaactataaatctattgcaaaaaaattaaaatttgaaggtcgagccttcataaatgggaagtatgttaatgctatagatggtaaaaaatttgaaacaataaatcctgctactggagaaaagctttgcacagttgctaaatgtaatcataaagatgttaatttagcagttaaagtttcaaggaaagcttttaatagtggtgtttggtctaaaagttcaccagagcatagaaaagaagttttattaaaatttgcagaattactaagaaagcatggagatgaaaattctgttttagaatgtgttgatactggaaagttggtgacagattgtattaatgaagttgcaaatgatgctccaatgcattttcaatggtatggagaattgattgataaagtatttggaaaagttggtcctacagagccatccattacaagtttaatcgttaaagagccaattggtgttgttgcaggaattgttccttggaactttcctttaatgatggctgtttggaaaatggcaccggctcttgctgcaggctgctcagtg

SEQ ID NO: 213421 - DNA, 663 bp, Unknown
  Bacterial polypeptide expressing nucleotide sequence isolated from the Sargasso Sea
gctgggcttccagatggagtatttaatgtaattaatggagataaagaagtagttgatttattaataactgatccagcagtagattctgtgagctttgtcggatcaaccccagttgctgaatacatttatcatacatcttcaaagtacaataaaagagttcaatccctgggaggtgctaagaatcatatggttgttatgcctgacgctgatcttgatcaagttgttgatggcttgattggcgcaggatacggttctgctggcgaaagatgcatggctttatcggtcgccgttgctgttggcgatgtaggagataagctgattgaaaaattaacacctcgcgttcagaatttgaaggtaggtcctggaactgatccagaagttgaaatgggtccactgataagcgatgttcatcttgcaaaagttaaaagttatgttgatgcaggggtatctgaaggagctgaattaattgttgatggaagatcgatttcacttcaagggtatgaaaatggatattttataggtggctgtttatttgatcatgttaaagaggatatgaagatatatagagaggaaatatttggtcctgtactgtcagttgtgcgtcaaccaacttttaacgatgccttaaaaatggttaacgatcacgaatttggaaacggtact

SEQ ID NO: 213422 - DNA, 451 bp, Unknown
  Bacterial polypeptide expressing nucleotide sequence isolated from the Sargasso Sea
ttgataaaattccaaagtttaataaatagtggaattgaagaaggtgctactttagtagcaggtggtcctgacaaacctgaagatctaaagaaaggttattttattaaaccaacagtattcactgatgttaataataatatgagaattgctaaagaggaaatatttggaccagtattgtcgattattccttttgaaaatgaagaggaagctatccaaattacaaatgatacagaatatggattaggaaactatttacaaacagaggataatgaaaaggcaaaaagagtctcaaaaaaattaaggtccggaattgtgtatgtaaatcataaagcagctgactctgggactccttttggtgggtatagacaatctggaaatggacgtgaaggtggaacctggggattgcatgaatatctagaggtaaaaactattactgaatggaaaaattaaa

SEQ ID NO: 213423 - DNA, 853 bp, Unknown
  Bacterial polypeptide expressing nucleotide sequence isolated from the Sargasso Sea
gaaaatgcagatgacttagcaaaaataatgactgttgaacaagggaaacccttagccgaagcaaaaggtgaaatattgatgggagttacttatattgatttttatgctgaagaaggaaagagagtttatggtgatataataccagatccaatgccagacagaagaatagttgttattaagcagcctgtaggagttgtaggtgctattacgccttggaactttccaagtaccatgattactagaaaatgcgctccagcacttgctgttggttgcactgttgttataaaaccagctagccaaacaccttattcagcacttgctcttggtgtgttggctaaagaagctggatttccaaacggagttatcaatataattactggatctgcaagtgctattggaaaagaaatgacagagaattctcttgtaaagaaaatatcttttacaggatcaactgaggttggaaaaattcttctgcaacaaagtgctttgaccgtaaaaaaagtatcaatggaactaggtggtcatgcaccatttgttgtttttgatgatgctaatattgatgaagctgtaactggtgctattcaaagtaaatttaggaattcaggtcaaacttgcatatgtgctaatagaatttttgtacatgaaaaagtttatgatgaatttttgaataaatttatacaagaagtaaataaaataaaagttggcaacggacttgaaaagggaattatatctgggccacttatagacaagcagtctctattgaaagtactagatcaagttaaagatgcagtaaatgaaggggctaaagaagaagtaggcggagacgtccattctcttggtggtaatttttttc

SEQ ID NO: 213424 - DNA, 687 bp, Unknown
  Bacterial polypeptide expressing nucleotide sequence isolated from the Sargasso Sea
tctggacgcagaacaggatacaccggttaactctggtggaggtgtggggggacttccccccgctgaatgggatgttgtttacagacgggacccgatcggtatcgttggtctaatttcagcatggaattaccctctaaatgttgcgtttcgaaaggtagctccggctttggtagccgggaattgtgccatcctcaagccttcggaaatagcgggtctttcctgcatgttcttgggcaagctggcaaaggatgtaggcatcccagaaggcgtgtttagcgttgtaactggcgatcgtgaaactggtgccgctcttgtcgcctctccctcagtttcaatggtttctttcacgggttcgtcactaacaggcagcaagattatggaagcttctgccccaaaactttctcaagtagcattagaattgggcggcaagtcagccatggtaatatttgaagataccgacattgagcgcgcggttgaagctactattaaaggatgcctgactaacggcggccaaatttgcactgcgcatacccggctaatagtacaggaaggtataaaagacgatttgttgaaaaaaatgaaaaacgcgctggagaagataccttactgtaaggatcccattaccgaaaggaaacgcggtgacagagcatgggaaactgggttgacagatgtcatccaacctgtggt

SEQ ID NO: 213425 - DNA, 376 bp, Unknown
  Bacterial polypeptide expressing nucleotide sequence isolated from the Sargasso Sea
tatgagagtagcaattaatgggtttggtagaataggaaaacttgtgtttagggcttttttagaaaaaaaattacgtaatgttgatattgttgctattaatgaattaggcaatcttgactcaagtttccacttaactcaatttgatagtgttcatggaatattaaaacacaaactagataaaactaaaaacggtttaaaatataataataaatctattacttttttttcagaaaaaaatccaaataatttaccttggaaaaaaatgaaggttgatatagttcttgaatgtagtggagtttttacatctaaagaaacggcttcttctcatttaaatgctggtgcaaaaaaagttataatctctgccccaggaaaaaat

SEQ ID NO: 213426 - DNA, 379 bp, Unknown
  Bacterial polypeptide expressing nucleotide sequence isolated from the Sargasso Sea
tggcaaaccgaaaggtttagaaaaaggttattatgtaaaacccactgtttttgctgatgttaataatcaaatggagatagcgagaactgaaatttttggaccagtgctatctataattccttttgaaaatgaggaagaagctatttcaatagcaaatgacactccttacggtttgacaaattatattcaaacacaagataaagaaaaagttaaaagagtagcaagaaaacttagatctggaatggtagatgttaatggagtaggaatagctgttgcttctccttttggaggatataaacattctggtattggacgcgaagctgggactgaaggtttaatagagtttttagaagttaaaacagttggtggttggaattaa

SEQ ID NO: 213427 - DNA, 841 bp, Unknown
  Bacterial polypeptide expressing nucleotide sequence isolated from the Sargasso Sea
gctatggttccaatgtggatgtttgttatgtctattgcatgtggtaattcatttattttaaaaccgagtgaaaaagatccaacagttccgtacatgatgggagatttacttagagaagcaggcctaccagatggggttttcaatgttgtcaatggcgataaagaagcagtagatctcctgattacagatcctgaagttgcatcagttagttttgttggctcgactccagttgctgagtatatttatcatacctcttctaaacataataagcgcgtccagtcattaggcggtgcaaaaaatcatatggttgtaatgcctgatgcagatttagaccaagttgttgatggtcttatcggcgcaggctatggatccgcaggagagcgatgcatggctctttcggttgccgtagctgttggtgatgtgggcgataaattaattgaaaagcttacccctcgcgttcagggacttaaagttggccctggaacagatccagaagttgaaatgggtccactcatcagtgatgtacatttgtcaaaagtaaaaagctatgttgactctggagttgctgaaggagctgatcttatagtggatggaagatcaatatctcttcaaggttatgaaaatggatacttcatcggaggctgtttatttgatcatgttaaggaagatatgcagatatatagagaagaaatatttggacctgtattatctgttgtacgtcaacctacttttgatgatgctttaaaaatggttaacgatcatgaattcggaaacggtactactatttatactcgtgatggtgatacagctagagcttttgctaatcaatgcaaaattggaa

SEQ ID NO: 213428 - DNA, 301 bp, Unknown
  Bacterial polypeptide expressing nucleotide sequence isolated from the Sargasso Sea
aatgactattagaatagcaattaatggctttgggagaattggaagaatggttacacgtgaagctacaaaaaatcctaatttcgagattgtagccataaacgacctcgttccttccgaaaacttagcttatttacttaaatttgattccacacatgggaaattcgatggtgaagttgtgacaggacaaaatagcatagaaattaatggtaacaaaattgaatgcctttcaaaaaagaaccctttagatctcccatggagtgatctaaatattaactatgtgattgaatctacaggattattt

SEQ ID NO: 213429 - DNA, 895 bp, Unknown
  Bacterial polypeptide expressing nucleotide sequence isolated from the Sargasso Sea
tctgttcttggagtgataactgcaggtaattctgatgatgtggataaagccgttgctgcagctaaagcagcttttgttgattttagtttttcaactaaagaggaaagaatccagattttagaaaatattattactgaatatgaaaaaagatctgaggagttagctgaaacaatatctaaggaaatgggagctccaatatggttatcccaagttgctcaggttgcttctggtcttactcattttaaggatactctaaatgttcttaaaggctatgattttgagtatgagaaagatggttatttagttcgaaaagagcctgtgggtgttgttggaatgatcactccctggaactggccaatgaatcagatgtgcacaaaagtagcatcaggcatagctgctggatgcaccatggtgcttaagccaagtgaaataactcctttctgcggaattattcttgcagaaattattcacgacgctggtgtacctgctggaatctttaatttagttaatggcatgggtccagttgttggtgcctcaatgtctgaacacaaagatatagatatgatgcattttactggttcaacacgggcaggagttgctgttgctcaagcatcagctccaacagtgaagagagttgctcaggagcttggtggtaaatctgccaatatagtccttgatgatgcagacattgaaaaagccgtatctgctggcgtctcttcatgtttcttaaatacaggacaatcatgtaatgccccaacaagaatgcttgtgtcatctaagaattatgataaagcagttgaagttgctgctaatactgcaaatgctatgaaagtaggagatccttttgatgctgatacaaaaatgggcccaatttctaataagacccaatacgaga

SEQ ID NO: 213430 - DNA, 561 bp, Unknown
  Bacterial polypeptide expressing nucleotide sequence isolated from the Sargasso Sea
aaacaatttataatgaaactgtagaaaaggtaaaagaattggcaaataataccaaggtagactcgccccaaaaagatggtgatcatattggtccagtagtatctgaagttcaatttaataaaattcaaactttaatccaaaaaggtatagacgaaggagcaaaattgattgcaggaggaactgggaaacctaagggatttgaaaaaggttattatgtaaaaccaacagtttttgctgatgttaacaatcaaatggaaattgcacgaactgaaatatttggtcctgtattatctataattccttttgaaaatgaagaagaagctatttcaatagctaatgacactccttatggtttaacaaattatattcaaacccaagataaagaaaaagttaagagagttgcaagaaaacttagatctggaatggtagatgtgaatggagttggtatagctgtaggttctccttttggaggatataaacattctggcattggacgagaggctggaactgaaggtcttatagagtttttagaagtcaaaacagttggtggctggaattaat

SEQ ID NO: 213431 - DNA, 878 bp, Unknown
  Bacterial polypeptide expressing nucleotide sequence isolated from the Sargasso Sea
tcagttggccgccgatgcggtggaaaatcaaaaagaagtccttgcccacctattatcacttgatacaggtaatgcaatccgaacacagtcgcgacctgagatggcctctactatcgaccttacaagaatgtttggtggattagctggtgagttaaaaggcgaaacttatccctcaccaagcccaggagtaatgcaatttaccagacgcgaccctgtcggagttgtagcaggtattattccctggaacgccccaatgtttctctttgccgctaaggttgccccagctctaatagcaggaaataccatagttattaaaaccgctgaacaagccccactttgtgttttagcacttgctgaagttatggcttgtcaatttcctgagggtgtcctgaatgttatatctggatatggtgaagagtgcggaaaacctctagcggagcatgaagtcgttaataaggtcacattcacagggtcaatgcctgtgggccaaaaaatagccaaatatgtcgctccaaaactttgcccgattacgctagagctaggtggaaaaaacccggctataattttaccagatgccgatcctgatatagctatacctgggattattgatgggatgcggtatacaagacaaggccaagcatgcactgcggcaacacgtgttttcattcataaaggtatttatgataagatcatagacggagtgataagcaaactctctcagttgaaggttggggatcccatgtccgataaaacggatatgggttgcatcatatccgatgaacaatttaatagaactctgcattatatggagatagttcaaggaactaaaggccgaagaattttgtttgggggggagcgaccgacagacgattattaag

SEQ ID NO: 213432 - DNA, 693 bp, Unknown
  Bacterial polypeptide expressing nucleotide sequence isolated from the Sargasso Sea
aaaaacttctttcacatttaaaaacaggggcaaaaaaagtgattgtttctgcaccatgcaaaaatgccgataaaacaattgtatttggtgtaaacgagaaaattattaccaaagacgataaaataatatcggctgcatcatgtactactaattgtttggctcctgtagtaaacgttctaaataaaaactttgaaattgaaaaaggctttatgactacaattcatgcttttactagtgatcaaagaattttagacaattctcacaaagactcgagaagagcaagatctgcaagtcaatcaatagtcccaacatcaacgggagcctcaaaagcaataggtgaaataattccaagtcttaagggaaaattagaaggagtagcaatgagagtaccgacgcctaatgtatctattattgaattggttttttgcacaagaaaagttattgatgtaaaaaaaattaataaagcatttgaattggagtccaaaaataaattaaaaaaaattttagacataacacatgaaaaattagtttccattgatttcaatcataatccagcctctgcaattgttgatgcctcgttaaccaatgttgttggaaaaaaaatgggaaagatatcagcttggtatgataatgaatggggatttgctaatagaatgtgtgatatagctgaaaatatacacaaaatctcttaat

SEQ ID NO: 213433 - DNA, 877 bp, Unknown
  Bacterial polypeptide expressing nucleotide sequence isolated from the Sargasso Sea
aacacttttgtgctgaaaccatctgagaaagacccatcttgttcaatgaaactagcagaattatttttagaagctggtcttcctcctggtgtttttaatgttgtaaatggagataaagaggctgttgatgcgattattaataacaaagatatttctgcagtaagtttcgttggttcaactcctatagccaaatatatttatgaaaattgtgctaaaaatgagaagagagtccaagcattaggtggcgcaaaaaatcattgtgtcgtaatgccagattgtgatctagaccaagcagtaaatggtttgatgggtgcagcctatggatctgctggtgaaagatgtatggcccagtcagttgctgtagctgtaggtaaaattgccgaccctttagtaaaaagtttatccaaaaaagttgagtcacttaagattggtccaggattagataagaaatctcaaatgggaccattagttactaaggagcatttagaaaaagtgaaaggttatgtagatattggagttaaagaaggagcaaagcttgtagtagatggtagaaatttaaaacttcagggttacgaaaatggtttttatatgggaggatgtttatttgataatgttaaaaaaaatatgaggatttataaagaggaaatttttgggcctgtgctttccgttgttagagcaaaagattacagtgaagcattatctttagttaatgatcatgaatttggaaatggcacaagtatattcacaagagatggggatacagggagatcatttgccagtaatgtaaaaattggaatggttggtgtaaacataccaataccagttccaatggctttccatagttttggtggatggaaaagatccttgtttggagatc

SEQ ID NO: 213434 - DNA, 937 bp, Unknown
  Bacterial polypeptide expressing nucleotide sequence isolated from the Sargasso Sea
tgccgtgcaccccagttgttaaagggcgagcacagtaaaaatgtgggcccaagaatagactcttggagcgagtttcagcctcttggcgtggtggcgggaaatacaccatttaacttcccggccatggtgcccctttggatgtttccgcttgccattgtatgcggcaacacctttgttttaaaaccctctgagcgagatccaagctgcgctatttaccttgccaagctactaaaagaagcagggctacccgacggcgtttttaacgtcattaacggcgacaaagaagcggttgatcagatactagatgacgagcgcattaaagcagtgagttttgtgggttcaacgcccatcgccgaatacatctactcaaaagccaatactaatggcaagcgctgccaagcattaggtggcgctaaaaaccacgctattgtgatgcccgatgccgacatcgacaacgcagtaaatcagcttttaggtgctgcttttggctcgtcaggcgagcgctgcatggcattatcagtcgtggttgccgtaggcgacaaagtggcagatgaaattgtagataaaatgcaatcagccatgaaaagcttaaaagtaggagcttttgacgatgcgactaacgatttcggcccactgattacacttcagcacaaagagaaagtagaaggctacataaccagtgcggctgagcaaggggctgatgtagttgttgatggcagaaaccctagcgtagaaggctacgagaccgggttcttcttaggtgcaacgcttatcgacaaggttacgcctgaaatggccagctacaaagctgagatttttggccctgtactacaagttatacgcgttaaaagcatggaacaagctatgcagctcattgacagccatgaatacggcaatggtacgtgtattttcaccccgagatggagaggctgcccgc

SEQ ID NO: 213435 - DNA, 732 bp, Unknown
  Bacterial polypeptide expressing nucleotide sequence isolated from the Sargasso Sea
ccaggacatagttttgtatgggtttggtcgaatcggtaggttagtttcacgcattatggctcaaatgactggcccaggtaattattataggctcagagcaattgttgtaagaaaaggatcagatacgaacgatcttctaaaacgagcgagtttgttaagacgtgattcagtgcacggttcattccatggaactattagagttgataatgagacagaaactttagtaataaatggaaatcctgtaaagatcatctatacaaatggaccaaaagacttaaattactctgattacgacatagacaatccaattgtcattgataacacaggtgtctggagagaggagaaagatttatctcttcatctagaatctggtgccagtaaagttgttttaactgcacctggtaagggcaaaataaagaatattgttaacggtatcaataacgacatattgaatgagtctgacaatgtaatatcagctgcttcatgcacgactaatgcaattgttcctgttttagatattctaaataaagaatattcaattaaatcaggacatatcgaaactgttcatgcatatacgaatgatcaaaatctaatcgataattatcataagaaagatagaagaggaagaagtgctgctttaaatatggtcataacatccacaggagcagtaaaagcagtttctaaagcattgcctgaactcgatggaaaattaactggaaatgctataagagt

SEQ ID NO: 213436 - DNA, 564 bp, Unknown
  Bacterial polypeptide expressing nucleotide sequence isolated from the Sargasso Sea
catggcagttaactataaatctattgcaaaaaaattaaaatttgaaggtcgagccttcataaatgggaagtatgttaatgctgtagatggtaaaaaatttgaaacaataaatcctgctactggagaaaagctttgcacagttgctaaatgtaatcataaagatgttaatttagcagttaaagtttcaaggaaagcttttaatagtggtgtttggtcgaaaagttcaccagagcacagaaaagaagttttattaaaatttgcagaattacttagaaaacatggagatgaaaattcagttttagaatgtgttgatactggaaagttggtgacagattgcattaatgaagttgcaaatgatgctccaatgcattttcaatggtatggagaactgattgataaagtatttggaaaagttggtcctacagagccatccattacaagtttaatcgttaaagagccaattggtgttgttgcaggaattgttccttggaactttcctttaatgatggctgtttggaaaatggcaccagctcttgctgcaggctgctcagtgattataaaacc

SEQ ID NO: 213437 - DNA, 840 bp, Unknown
  Bacterial polypeptide expressing nucleotide sequence isolated from the Sargasso Sea
agtgcaaagcagatttgaagatactagagttatcattaattacgaaccagttggtgtagttgctgctttatctccatggaattttcctcttattttggcgtcaagaaaaatttcaactgcattagcggctggctgttctgtaatttgtaaaccagatgtaattactccaggcactgttatggagttggttaatattattaatcaatgcggtgttcctgcgggagttgtaaatttattatccggtgatccagcagcaattgcttctcagttaatttcttcagatataataaaaaaaatttctttaacaggctcaacaagagttggcaaaatagttttaaaacaagcagcagagaaaatacaaagggttactatggaattaagcggtcacgcaccttttatagttcatgaagatgctaatgttgaaaaagcaaccgatatagctatggctgcaaaatatagaaataatggacaagtttgtatttctcctagtcgtttttacatccacgaaagtaaaaaaaaggaatttactgaattatttgttaataaaactttaaagttaaaaattggtaatggtatggatgaaaacgtccagctaggtccgattacaacaaaaaaaagattagatgaaatagaaaagctcgttgaagttacaaaaaaagagggagctaaagttttgtgtggaggtaaaagaccatcaggatttaacaaaggttatttttatgaacctacaatttttgataatgttaaagaagattttaaaattatgatagaggagccttttggtcctttaacacccttattaacttttaaaaaatttgatgaagtaataaaaaaagcaaa

SEQ ID NO: 213438 - DNA, 816 bp, Unknown
  Bacterial polypeptide expressing nucleotide sequence isolated from the Sargasso Sea
aaaacaagatgtgttagcaaaatggttaacaatagaagtaggtaaacctttggctgaaggaattggagaaacaggtggtgccgcagatatatttgaatggaacgcagaagaaacaaaaagaatttatggacaaacagttcaaagtaggtttccagaaactagggttcatgtttattatcaaccagtaggagtagtcgcagcattagtaccttggaattttccattagttttagcagctagaaaaatatctactgctttagcagctggatgttctgtgatttgtaaaccagatgtaataacccctggaacagttatggaattaatagatatttgcaaagaggctggtgttccgccaggtgtagtaaatcttttgtcaggagaccctgagagcatttcaaacgaactattagaatctgatatcattaaaaaagtttcaataactggatctacaagagtaggtaaattaatattgaaaaaagcagcagataaagttcaaagagttacaatggaacttagcggacattcaccttttatagtttttgatgatgttgatattaataaagttgctgatatggcaattactgcaaaatttagaaataatggacaagtatgtatttcaccaaacagattttacattcaggaaaaaaggaaagaagaatttataaaagcatttgtagataaaactaaaaaacttaaaattggcaacggattagataaagatgttcaattaggccctctaactacagcaaaaaggttatcagaagttgaaacattagtagaaataacaaaaaaagaaggtgctaaagtgttacttgg

SEQ ID NO: 213439 - DNA, 364 bp, Unknown
  Bacterial polypeptide expressing nucleotide sequence isolated from the Sargasso Sea
tgtgagaagggatattatgttaaacctactgtattcgctgatgtaactaatgatatgacaattgcaaaagaagaaatctttggtccagtactttgtgttatgaaatatgaaactgaagaagaagcaattcaaattgcaaatgatacagaatatggattagctggttatgttcagggtgaactatctcatgctatagaagtaggaaaccaaatacgcgcgggacaaataactattaatggtggggccagaggaaatgctgctccgtttggaggttataaagcttcaggtaatggaagagagcatggaaaacatggtattgaagaatgccttgaaactaaagccataattgcaccagcgagctaat

SEQ ID NO: 213440 - DNA, 522 bp, Unknown
  Bacterial polypeptide expressing nucleotide sequence isolated from the Sargasso Sea
aatgaaagtgtcttcagtcctagatacctctcatcttaaggttaaatttccatataaagcaaaatatggaaactacattaatggaaaatttgtagaacctctatcaggcaagtattttgacaatgtaagcccgatatctaatgagaagatctgttcagttgcacgttcaaatgaaaaagacgtagaagctgcattagacgcggctcacgcagctttcccagaatggggaaagacagacatcactacaagatcaaacatcttatataaaattgctgatgttttagaaaaaaatctaaatttattagctgtagctgagtgtttagataatggtaaaccaatcagggaatgtatggcagcagatttacctttagttatagatcactggagatattttgctggagtaattagagcagaggaaggatctattgcagagattagtaatagtcagtactcatataatattcctgaaccacttggagtagttggtcaaatagttccatggaactttccattattaatggc

SEQ ID NO: 213441 - DNA, 859 bp, Unknown
  Bacterial polypeptide expressing nucleotide sequence isolated from the Sargasso Sea
ttggccaatcaaccaaatagctctcaaggtagttcctgcctttgcaactggatgcacaatgattctaaagccttcagaaatagcaccactttcaggaacgctatttgcagaaatgattgatgaagttggtttcccaaacggagtatttaatctggtaaatggagatggtgcaggagttggaactcaaatatctagtcatcccgatattgatatggtttcttttacaggttcaacacgtgcgggaagattaatttcaaaaaatgcagctgaaacaataaaaagagtttgcttagaacttggtggcaaaggtggaaatatagtttttgcagatagttataaagatgcagttagagatggaataaaaaatgtaatgagtaattcaggtcaatcatgcgatgcaccaacaagaatgttggttgaaaaatctatttatgaaagagcagtcaatgaagcagttgatgaagcaaataaaataaaagtagatcaagcatcgaaaaaaggagatcatattggtccagtaatttcgaaaactcaatacgataaaattataaatttaattgaaagtggaatatctgagggggcaacattagcagcagggggacctgaattaccaaatggattaaataaaggctattttattaaaccaactattttcacaaatgtaacaaatgaaatgagaattgcaaaagaggaaatttttggtccagtgctttccataataccttttgaaagtgaagatgaagcagtaaatattgtaaatgatacatcttatggtttaggaaattatttacaaactgaagatagagagaaagctcatagagttgcaaaaaaactaagatcaggatgtgtttatattaat

SEQ ID NO: 213442 - DNA, 529 bp, Unknown
  Bacterial polypeptide expressing nucleotide sequence isolated from the Sargasso Sea
catgagcttgctgacacgcgacgaatatgcggcgattgccgccgggctgaccctgcccaccggggcgttcattgacggcggctatcgcccggcgatctcaggccggacatttgcgacgctgaacccggccactggcgagacattggccgaggtggccgcctgcggtgccgaggacgtggagttcgctgtgaccaaggcgcgcgcggcgtatcaagatggccgctggtcgcgcctgcacccgtcggcgcgcaaggaggtgctgatccggctggccaggctgatgacccgcaatgcccgggaatttgcggtgctggaaagcctcgattcgggcaagaccatctacgattgcgagacggtggatatccccgagaccatccattgcctgaaatggcacgccgaggcgatcgacaagatctacgatcaggtttcgcctgcctcggacgatcacatcgccatgattgtgcgcgaacccatcggggtggtgggcctcgtgctgccatggaatttcccgctccttatgctggcgtgg

SEQ ID NO: 213443 - DNA, 718 bp, Unknown
  Bacterial polypeptide expressing nucleotide sequence isolated from the Sargasso Sea
atgaaaactattcatcatttcgtcgacggtaaaggtttctcaggagactcaaaaagattaggtaaagtttttaaccctgctacaggtgaacaaagtgccgaggtaaagatggcttcaaataaagatgtaaacgatgcagttgctaatgctaaaaaagcctttgagtcatggtcaaacaaacctccacttcaaagggctagagtgatgtttaaatttaaagaattaatcgaaaaaaattccgaagaacttactaaaataattgtttcagagcacgggaaagtctttgaagatgctagagggtctttaacaagaggattggaagtagttgaatatgcttgtggtatccctcaaatgctgaaaggtgaattcacagagaatgtcgggtctaatgttgacagttggtctattagacagccacttggggtatgtgcaggcattacaccatttaattttcctgcgatggtgcctatgtggatgtttccaatggcgatagcttgtggaaatacttttgtattgaaaccatcagaaaaagatccttcatgctctataagattagctgaattactcaaggaggctggattacccgatggagtttttaacgttattaacggtgacaaagaagcagttgatgctttgataaacaacaaagatgtagttgctatgagttttgttggctctacacctatagcaaaatatatttacgagaattgtgctaaaa

SEQ ID NO: 213444 - DNA, 880 bp, Unknown
  Bacterial polypeptide expressing nucleotide sequence isolated from the Sargasso Sea
gcctaaagccggttttccttccggagttttaaacatcgtcccaggattgggcgaagaagcaggtgaagctctgctgaagcatcctggggtgagccactattcattcaccggttcgacggaaatcggggttaaggtccagcaggaggctgcaaaacgtgccgtccctgtgacccttgaattggggggtaaatctcctcaattggttttttccaatgctgatattgataaagcccttccttttctggtgaatgctgccattcagaatgcaggacaaacctgttctgctgcaaccagggtcctgatcgaaaagccgatattccaggagttgacggcaaggcttgccaagggaatcagttcactccgttctggcccggccttacaagatcttgaatgcggtcccttgatcagcagggtgcagaaagatcggttcgaaggatttcttcagcgtgcgaggcaggacggggttgaattcctcgcagaaggaagcattgtagaggatgcacctcaagggggaaattatgttgctccctgtatggttggcagcgtgcctccgaaacataccctggcacaggaggaggtttttggccccttgctcgtcaccatgcctttcgaaggagaagaagaggggattgaactcgcaaataacacggtttacggtttggtctcaggtgtttggacaaaggatggtggacgtcagttaagggttgccaggagacttaaatcggggcaggtattcatcaataattacggtgcaggtggaggggttgaacttccattcggaggagtcaaactcagtggccatggacgtgaaaaaggctttgaagcactttatggtttttccgtgaccaaaaccgtagccattcatcacggagcatcatga

SEQ ID NO: 213445 - DNA, 340 bp, Unknown
  Bacterial polypeptide expressing nucleotide sequence isolated from the Sargasso Sea
tacagctttcgctgatgttaacaatcaaatggaaattgcaagaactgaaatttttggtccagtactatcaattatacctttcgaaaatgaggaagatgcgataaatattgcaaatgatactgattacggcctaaccaattacattcaaacaaaagataaagaaaaagctaatagagttgcaagaagacttagatctggaatggtagatgttaacggagccggtatagcagtcgatgcaccgtttgggggattcaaacattctggtataggtcgtgaagctggaaaagaaggcttattggaatttttagaagttaaatcagttggtggatgggctaattaa

SEQ ID NO: 213446 - DNA, 793 bp, Unknown
  Bacterial polypeptide expressing nucleotide sequence isolated from the Sargasso Sea
tgtactcttgaacttggcggcaagtctccagttgttattggcaaatcagcagatttaaaaacctccgcaaaaagaattatgtttggtaaaacaatgaatgctggacaaatttgtttagcgcctgattatgttattgttcataaagataaaaaggatgactttataaaagaaacaaaagatgcagttacagagtattttcctgatatcaagaacaacgaagattacacatcaataattaatcaaaagcactacgatagactaaaagatttgttggatgatgcagttgcaaagggagctaatgtcgatgaaataaatccagcaaatgaagatttttctcagcaagagttttataaaataccgcccacaattgtcactaatacaacagatgatatgaaaataatgcaagaagaaatttttgggcctatattacctgtagtcgaatatgaagagattgatgaagcaacaaaattaataaattccaaagatagacctcttggcctctactactttggaaccgataaaaaagaagaagataatgtcttaaataatacatcctctggtggtgtaacagttaataacgttattagtcatcttcagcaaaatgatctatctttcggtggtgtgggaccatctggaatgggaagatataaatcatttgatggttttaagaatttctcgaatccacgagcatattttaaggacgtaagctttaaattagataaattttttgacgcagtaagaccaccatataaaggaaatattgagaaagttttacaacaactgatgaaataag

SEQ ID NO: 213447 - DNA, 537 bp, Unknown
  Bacterial polypeptide expressing nucleotide sequence isolated from the Sargasso Sea
tagcaccagtaaccagtgttcttgatcaaaattttgaaattgaaaaaggttttatgactacaattcatgcatttactagcgatcagagaattttagataactctcacaaagatccaagaagagcaagatctgcaagtcaatcgatagttcctacctcaacaggagcttcgaaagcaataggagaaataataccaaacctcaaagggaaactagaaggcgttgctatgagagtacctactcctaatgtttctcttgttgaattagttttttgtacaaaaaaagatattagtataaaaaaaattaataatgcatttgaaaaagcgtcaaaaaataaattaaagaatatcttagaagttactaatgaaaaattagtatctatagattttaatcatcatcctgcttctgcaatagtagatgcttctttaacaaatgtagttggaagtaatatgggtaaaatatcagcctggtatgataatgaatggggcttttctaatagaatgtgtgatatcgctgaaactttgcataaaatctcttaat

SEQ ID NO: 213448 - DNA, 364 bp, Unknown
  Bacterial polypeptide expressing nucleotide sequence isolated from the Sargasso Sea
aagaaaggttattttattaaaccgacagtattcactgatgttaaaaataatatgagaattgcaaaagaggaaatatttggaccagttttatcaattattccttttgaaaatgaagatgaggcaattcaaataactaatgatacagagtatggattgggaaattacctgcaaactgaggataatgaaaaagcaagaagagtatcaaaaaaattaagatcagggattgtttatgttaatcataaaccagcagattctgggactccatttggaggctatagacaatcaggaaatggacgtgaaggtggtacttggggtttgcatgagtatctagaagttaaaaccgttactggctggacagattaat

SEQ ID NO: 213449 - DNA, 721 bp, Unknown
  Bacterial polypeptide expressing nucleotide sequence isolated from the Sargasso Sea
aatgagggattcttcattgttccggcaacaggtctatataaatggtaaatggtcagatgcagataatggagaaagcaatgaaattaccaacccatccaatggaaaggtattaggtactgttccgaattgcggggctactgaggctaaaaaagctatagaagcagcaaataatgcgtggccaaaatggcgatctaaaacatcaaaagaacgtgcattaattttacgcaggtggtacgagttgatgatggaaaaccaagaagaccttgcacgcctaatgactgcagagcaaggcaaacctcttacagaatccatcggagaaatagcatacgcagctagctttgtggaatggttcggagaagaagggaagagactttatggcgatactatccctgcacatgcatcagataaacgtattatagttatcaagcagcctattggagttacagtcgcaataactccatggaattttcctgcagcaatgatcaccaggaaagcagctcctgccttggctgcaggatgtccaatggtaatcaagccggctcccgacacacctttttcagcttttgcactttgtgagcttgctgaaagagctggggtacctcccgggatattaagtacaattacaggagatgcagttgaaataggtggtgaatttactagcaatccaatagtaagaaaactaagtttcacaggttcaactggagtaggtaagctactaatg

SEQ ID NO: 213450 - DNA, 521 bp, Unknown
  Bacterial polypeptide expressing nucleotide sequence isolated from the Sargasso Sea
atcttgtgatgcgcccacaagaatgcgagttgaaaaatcaatttataaaaaagcaatagatgaagccgcagatgaagcaaataaaattaaagttgatattgcctctaaaaatggaaatcatattgggccagtaatttcacaaaatcaatatgataaaattattgatcttataaaaagtggaataaaagagggcgccacacttttagcaggaggtcctgaaaaaccaaatggtctagaaaaaggttattttgttaagccaacaattttcacagatgtaactaatgatatgagaattgcaaaagaggagatttttggaccagtactttcaataataccatttgaggatgaagatgaggctgtatcaattgtaaatgatacatcctatggtctaggtaactacgtgcaaactcaagataaagaaaaggcaaaaagagtagcaagaaaatttagatctgggggtgtctatataaatggaaatagtgcagaaccaggaactccttttggtggttatagacaatctg

SEQ ID NO: 213451 - DNA, 750 bp, Unknown
  Bacterial polypeptide expressing nucleotide sequence isolated from the Sargasso Sea
tatggaaataaataagttctacattgatggaaattttgttgagccagatggctcagagaagattgatatagtaagtcctgtaactgaagaagttgtaggtcatgtaatttcaggctcacccaaggatgttgatattgcagtagcggcagccaataaagcatttcctagtgctatggcattaactctagagcagaagaaaaaaatacttgaagaaataattgctggcatggaagaaaggcgtgaagatttcgcacaaattatttctgaggagatggggtcgccaataaaaatggcacgtaaagctcagtatggtgctggcgttattcattttaaaaatacgcttagtgttattgataaattcgatttcaatgaagttcatggcaacattacaataaataaattaccaattggtccagtaggaatgataactccttggaattggcctcttaatcaaatgtgtaccaaaattgcttcagccatagctgctggaacctcttgtgttctaaaacctagtgaaattactccaggtgctgcacatatatttgccgaagttattgataaaacaagcatacctaaaggtatgtttaatttgatacatggtcttggtgttactgtaggtaaagccatgagcagccattcagatctagaaatgatttcttttactggttctactagagctggaatagatattcaaaaaagtgcagcagataatatcaaaagagtctcattagaattaggaggtaaatctcc

SEQ ID NO: 213452 - DNA, 940 bp, Unknown
  Bacterial polypeptide expressing nucleotide sequence isolated from the Sargasso Sea
caacagggagctagtcacattaaattcttttaaaaatatattaaaagattttaaatttgaaaaagatttaggagaagaaaaaaataatcaaaagttattgtatgaaccaaaaggtgtttgcgctttgattacaccttggaactggccaataaaccaggttaatttaaaagtaattcctgcactagcatcagcatgcacagtagttttaaaaccatcggagatagcgcctttatcatcaatgttacttgcggaaatgattgatgaagcaaaatttccagctggtgtttttaatttagttaatggagatggagctgtaactggtaatgctttaactagccatcctgatatcaacatgatttcttttactggatcaacaagagctggagctttaatttcgcaaaatgcggcaaaagatttcaaaagaataagcttagaattaggtggaaaaggtgcaaatataatctttaaagatgctgacaaagaagccgtagcaagaggtgttctaagatgttttagaaattcaggacaatcctgtaatgctcctacaagaatgcttgttgaaaaatcaatttacaatgaaactgtagaaaaagtaaaagagttagcaaataataccaaggtggattcaccacaaaaggacggtgatcatattgggccggtagtttctgaggtgcaatttaataaaattcaaactttaattcaaaaaggaatagacgaaggtgcaaaattagttgccggaggaactggaaaacctaaaggtttagaaaaaggctattatgtaaaaccaacagtttttgcggatgttaataatcaaatggagattgcaagaactgaaatttttggcccggtgctatctataattccttttgaaaatgaagatgaagctatttcaatagctaacgacactccatatggtttaacaaattatattcaaacgcaa

SEQ ID NO: 213453 - DNA, 775 bp, Unknown
  Bacterial polypeptide expressing nucleotide sequence isolated from the Sargasso Sea
tatgtcaataaattatccagacacccatctttttcttaatggagaatggagagaatccatagcaaaagaaagtcttgaaataataaatccagcaactgaagaagttattggtaaagtatcacatgcaagaaaagaagatttagatatcgcgctaagtgctgctgaaaaagcatttgatagttggaaaaatgtttctgcttatgaaagatcaaaaatattgagaaaggcagcagacatagtccgtagtaaagcagagcatattgcgacacttatgactatggagcaaggtaaacctattaccgaagctaagatggaaacaatgggtgcagcggactcaattgattggtatgcagaagaaggaagacgagcttatggaaggataattccttcaagagccccagaaggtgtgtaccaatttgtctttaaagagccagttggtgttgttgcagcttttactccctggaattttccactaaatcaagttgttaaaaaggttgccgcagcttttgctgctggttgtactgcaattgtaaagggacctgaagaaacacctgcaagtgtagctgaattgattaaagcttttgatgaagctggaatgcccaagggttcaataaatttagtttatggagttcctgctgaaatctctgaatatttaattgctcatcccgttgtaagaaaagttacgtttacagggtcaacagcagttggaaaattattggcatctcaagcaggaacatacatgaaaagagttaccatggaacttgggggtcattcc

SEQ ID NO: 213454 - DNA, 922 bp, Unknown
  Bacterial polypeptide expressing nucleotide sequence isolated from the Sargasso Sea
gaaatgggatcacctatagattattcaatttcaactcatactacttcaggacaaactcatttagaagatttcatattaagattaaaggaatttaattttgaagaacattttgattcaaaatcaaacaaccatataagttatgaaccaatcggagtttgtggtttaattactccatggaattggccaattaatcaaatagctttaaaagtagttccagcttttgccgccggctgcacaatgatacttaaaccatcagagatagcgcctatctcaggaatgctattcgctgaaatgatagatgaagcggggtttccaccgggagtttttaatttagttaatggtgacggagcaggagtcggaacaaatatatctggccatcccgatatcgatatgatttcttttactggatcaacaagagctggaaaattaatttcaaaaaatgcagctgatacaattaaaagagtttgtttagaattaggaggcaaaggtggaaatattgtttttgcagattcttatcctaatgcagttagagacgggattagaaatgtaatgagcaattcaggacaatcatgcgacgctcctacaagaatgcttgtggagaaatctatttatgaaaaagcaattaaagaagcagctgatgaagcaaataaaattaaagtagatattgcatcaaaaaaaggagatcacataggccctgtggtttcaaaagttcaatatgataaaattattaacttaattaaaagcggaattgacgaaggagctacattagccactggaggccctgagcttccaaacaatttaaataaaggttattttattaaaccaacaattttcacaaatgttacaaacgatatggaaatagcaaaaaaagaaatttttggaccagtcctttcaataattccattcgaaacagaagaagaag

SEQ ID NO: 213455 - DNA, 763 bp, Unknown
  Bacterial polypeptide expressing nucleotide sequence isolated from the Sargasso Sea
catgttaaataaaaaaaatttttatataaatggtgaatggataaaaccaaacagttcagaagaaattacagtagtagatccagctacagaagaaaattgtgctgtaattactttaggtgacaaaattgatgttgataaggctgtaaaagctgcaaaaaatgcatatgaatcatgggccttctcgtctaaggaagatagacttcgattattagaaaaactttatgaaaattacaaaaaaagatgggcggatattgcaaaagccataactcttgaaatgggcgctccaaaagattttgcatctaaattgcaagcaggtacaggagcaagtcatattaaatcattcataagatatttaaaaaattttgaatttgaaaagccattaggtgaccatgctccaaatcaaagactaatttatgaaccaaaaggtgtttgtgcattaattacaccttggaattggccaatgaatcaagtttgtttgaaagtaatgcctgccatggcagcaggatgtacaatggtattaaaaccatctgaacttgcacctttgtcgtctatgatacttgctgaaattgtggatgaagtaaagtttccaaaaggtgtatttaatttagtcaatggtgatggagtaactactggtgatgctttaacaagtcatccagatataaatatgatttcttttactggatcgactagggctggagctctaatttcacaaaacgctgcaaaagattttaaaagggtaagtttagagcttggaggcaaaggg

SEQ ID NO: 213456 - DNA, 817 bp, Unknown
  Bacterial polypeptide expressing nucleotide sequence isolated from the Sargasso Sea
aattttttagaaatggaagatgaggttctttctgccctatcaagcgaccttggaaagtctaaaaccgaagcgttgttagcagaaatttatggggttaaatctgaggcaaagtttgcaataaaaaacattcacaagtggatgaaaacaaaaagggttgcaagccccttggctatatcctttagcaaaagctgggttaagcctgagcccaaaggaaatattttgataatatctccttggaattatccaattatgctttgtttgaatcctcttattgctgcaatatcgtcgggcaacacagcaataattaagccgtcagagcttacaccggcctctggtgagtttatgaaaaaattaattgaaaaaactttttcttcagatgaggttgctgtttttttaggcgaaaaagacgtggctgaaaaactgctagaccttccttttaatcacattatgtttactggcagcccaaaggttggcaagcttgttatgagtgcggcttcaaaacacctagcaggtgttactcttgagctaggcggtaagtctcctgttattgttgataaaagcgcaaatataagtgatgctgcttggaaaatttcttttttcaaatttgcaaacgcaggtcaaacatgcactgcccctgattatattctttgtgatgaggccgtacacaatgaccttgttactgctttacaaaaaaatatggcacaattttttcctgggggagtggatgcggctacaaaagactattgttctattgccaacgaacaccacttcaacaggcttaaagttgctttggagggtgctctttcgggtggggcag

SEQ ID NO: 213457 - DNA, 339 bp, Unknown
  Bacterial polypeptide expressing nucleotide sequence isolated from the Sargasso Sea
caacagtatttacagacgtaaataatgaaatgacaatagctaaagaagaaatatttggtccagttgtttcaataatacctttttctactgaagaagaggcaataaaaatctctaacgacacagcttatggtttaactaactatattcaaactaatgataccaataaagctcatagagttgcgagacaactgcgctctggaatggttgaaattaatggtgtaggttttgctgatggatcaccatttggaggatacaaacaatccggtaatggccgcgaaggtggtaaatggggaattgaagaatttttagaagtaaaatccattagtggatggaaataaa

SEQ ID NO: 213458 - DNA, 502 bp, Unknown
  Bacterial polypeptide expressing nucleotide sequence isolated from the Sargasso Sea
tttgaattcaaaagggtttatgactacaattcatgcatttactagcgatcagagaattttagataattctcacaaagatccaagaagagcaagatctgcaagtcaatcaatagtccctacctcaacaggagcttcgaaaacaataggagagatattaccaaacctcaaagggaaacttgaaggtgttgctatgagagttcctactcctaatgtttctcttgttgaattagttttctgtacaaaaaaagacataaacataaaaaaaattaatgatgcctttgaaaaagcatcaaaaaataaattaaaaaatatattagaggttactcatgaaaaattagtgtctatagattttaatcatcatcctgcttctgcaatagtagatgcttctttaacaaatgtagttggaaataacatgggcaaaatatccgcctggtatgataatgaatggggattttctaacagaatgtgcgatattgcagaaaccttgcataaagtctcttaa

SEQ ID NO: 213459 - DNA, 377 bp, Unknown
  Bacterial polypeptide expressing nucleotide sequence isolated from the Sargasso Sea
aaaacctaatggattagacaaaggttattatgtcaaaccaacagtgtttgcagatgtaaataataatatggaaattgcaaaaacagaaatatttggcccagtactatcagtaatgccttttgagactgaggaagaagctatctcgatcgcaaacgatacaccttacggacttacaaattatattcaaacacaagatccagaaaaagtaaaaagagtagcaagaaaattaagatctggaatggttgatgttaatggagcaggtattgctgtagacgcaccatttggaggatacaaacattcaggcataggaagagaagctggcaatgaaggtctgacagaatttctagaggttaaatctgttggtggttggaattaaa

SEQ ID NO: 213460 - DNA, 818 bp, Unknown
  Bacterial polypeptide expressing nucleotide sequence isolated from the Sargasso Sea
atatggacctactgttggagcagcattatcagagcatccagatgtagccatgatgtcatttactggttcaactagagctggaattgctgtagcacaagcatctgcaagttcggttaaacgtgttcatcaagaacttggcggcaaatcttcaaacataattcttgatgatgtacctgatttagaaaaatctgtaaaaggcggtgcagggcattgttttttaaattcaggacaatcatgtaacgctccaacaaaaatgcttgtttcctcaaagaattacgataaggctgtagaaattgctgcagcaactgcaaacagtactactgttggagacccaaatggtgaatatagattgggaccaattgcaaataaagttcaatacgaaaaaattattaaattgatagaaataggtattgaagagggcgcaacattagtcgcaggaggagtcgaaaaaccagatggatgtgaaaaaggttactacattagacccacagtttttgcaaatgtgacaaatgatatgacgatagctaaagaagagatatttggccctgttctagtaatgattaaatataatagtgaagaagaggctatcaatattgctaatgatactgaatatggtcttgcaggttatgttcaaggtgatcccgatcatgccagagaagttgctcgaaaaataagagctggacaagtaataattaatggaggcgcaagaggaactggagctccttttggaggatataaagcttcaggcaatggaagagagcatggtcttcatggtctagaagaatgtctagaaactaaagcaattattgctccttaga

SEQ ID NO: 213461 - DNA, 565 bp, Unknown
  Bacterial polypeptide expressing nucleotide sequence isolated from the Sargasso Sea
gagaaatcaatttatgaaagagctgttaaagaagcagtagatgaagcaaacaaaattaaagtagatcaagcttcaaaaaaaggagatcatataggacccgtcatctctaaagttcaatatgataaaattataaatcttattgaaagtggaatttctgaaggtgcaactcttgcagcaggtgggcctgagctaccaaacggtttgaacaaaggatactttatcaaaccgactatatttacagatgtaactaatgaaatgagaattgctaaagaagaaatttttggacctgtgttatctataattccatttgaaactgaggatgaggcagtcaatattgtaaatgatacttcttatggtcttggaaattatttgcaaactgaagacagggaaaaagcacacagagttgcaaaaaaattaagatcaggctgtgtttatattaatggaaatggagcagatgccggaactccatttggtggttacaggcaatcgggtaatggtagagaaggaggtatttggggccttgaggaatatcttgaagtaaagaatgttactggttggagttaac

SEQ ID NO: 213462 - DNA, 844 bp, Unknown
  Bacterial polypeptide expressing nucleotide sequence isolated from the Sargasso Sea
ggcgttataaggacatttgagtattatgctgggctagctacgaaaataaaaggcacctcgcaagtaatcaacaaagaacttctttccttaactataaaagaaccaataggggttgttggacagatattgccatggaacttccccttattgctggcttcttggaaaattgcaccagcgcttgcgtctggatgtaccgtcgttataaaaccttctgagttgaccccacacggtacaattgagcttgcaaaaattatttctgattgcggcgttccagatggggcaattaatgtttgtcctggtagtggtgaagaggctggagatgctttagtaaaaaataaaaaaattgcaaaaatttcctttactgggtcttcaatggttggaaagtctatagtaaggaatagctcggataacttaaccaaactctcactggagttaggaggaaaggctcctaatattatttttgatgatgcaaacttaggctcttgtcttgaggcgaacttaagaggcggtttttttaatcagggcgagaattgtacggcagtaacaagattgtttgttcataagaaaatttacaataaatttgttagcctttacaaaaaaaggattgctgaaattaatatggatgagcctgacaagaataatactgaaatgggatctttaatctccaaagctcatttaaaaaaagtaacctcttgtgtagataaaagtattaaacaggggtcgaagattatttttcaaggtaaaatcaagaaaggtttaaatggccactattttcctccaacattaattgaaattttagatacaaagaatattttgtttaaagaagaagtttttggccctgttg

SEQ ID NO: 213463 - DNA, 373 bp, Unknown
  Bacterial polypeptide expressing nucleotide sequence isolated from the Sargasso Sea
taacggtttagataaaggttattttgttaagcctacagtgttcgctgatgtaaataataatatggaaatagctagaactgaaatttttggacctgttttatccgtcatgccttttgaaacagaggaagaagctattgaaatagcaaatgacactccatatggattaacaaattatattcaaacccaagataaagaaaaagtaaagagagtcgcaagaaaattaagatcaggaatggtagatgttaatggtgcagggattgcagtcgacgctccctttggtggctttaaacactcaggcattggaagagaggcaggtgaacacggacttgaagagttcttagaagttaaagctgttgggggttggaataattag

SEQ ID NO: 213464 - DNA, 673 bp, Unknown
  Bacterial polypeptide expressing nucleotide sequence isolated from the Sargasso Sea
atgacaataaaagttggtattaacggtatgggaagaattggcagaatgattgtgaggtcaatttatgaaaattataaaggtaaaataattatcaaacatattaataacagaacaagctctgaaatttgcacaaatttattaaaatacgattcaattcatggtagttttagttctatagtaaaatctggaaagaattacatcaaaataaataaagaaaaaatatcttacacacaacactctatgattaatgacataaagtggaaaaagtatggtgttgattatgttttcgagtgtacaggtaagtttaattctaaagatcaattgctgccacatatagaaaacggtgtaaaaaaagttattgtatcagccccatgtaaaatggcggacaaaactatagtttttggagtaaatcataaaaagataaataaaaatgacagaataatttcagcagcttcttgcacaacaaactgtttagctcccgtcgcaaacgtaattaataaaaattttataattcttaatggttttatgacaactatacatgcttttacaagtgatcaaagaatattggataattcgcacaaagatccaagaagggcgagatctgcaagtcaatcaattgtgcccacatctactggtgcatcaaaagctattggtgagattattccctcatgaa

SEQ ID NO: 213465 - DNA, 865 bp, Unknown
  Bacterial polypeptide expressing nucleotide sequence isolated from the Sargasso Sea
cgatgaagtaaaatttccagcaggagtttttaatttagtaaatggtgatggagccctaacaggagacgctttaacaagtcatcctgatattaacatgatatcatttacaggatctaccagagctggtgcattaatttctcaaaatgctgcaaaagattttaaaagaataagtttagaattaggaggaaaaggcgcaaatataatttttaaagatgcagattcagaagcggtagcaagaggagttcaaaggtgttttagaaattcagggcaatcttgtaatgcaccaacaagaatgctagtagagaaatcaatttataaagaaactgtagaaaaagtaaaagaactagcaaacaatacaaaggtagattctccagaaaaaaatggagaccatattggcccagtggtttccgaagtacaatttaataaaattcaaactttaattcaaaaaggaatagatgaaggagcaagattggttgcaggaggggtcggaaaaccaaaaggtttagaaaaaggctactatgtaaaaccaaccgtttttgctgatgttaataatcaaatggagatagctagaactgaaatttttggtcccgtgttatccataattccttttgaaagtgaagatgaagctatttcaatagctaatgacactccgtatggtttaacaaattatattcaaacacaagataaagaaaaagtgaaaagagttgcaagaaaacttagatctggaatggtagatgtaaatggagttggtatagctgtaagctcaccatttggtggatataaacattctggtattggcagagaagcaggaactgaaggcttaatagaatttttagaagtaaaaacagttggcggatggagttaa

SEQ ID NO: 213466 - DNA, 844 bp, Unknown
  Bacterial polypeptide expressing nucleotide sequence isolated from the Sargasso Sea
aggagtttttaatctagtaaatggtgatggagctgaaacaggagatgctttaacaagtcatcctgatataaacatgatatcatttacaggatctacaagagcaggcgcattaatttctcaaaatgcagcaaaagattttaaaagaataagtttagaattaggaggaaaaggtgcaaatataattttcaaagatgccgattcagaagcagtatcaagaggagttctaagatgctttagaaactcaggacaatcgtgcaatgcaccaacaagaatgctagtagaaaagtcaatttacaatgaaactgtagaaaaggtaaaagaattagcaaacaacacaaaggtagattctccagaaaaagatggtgatcatattggaccagttgtttctgaaatacaatttaataaaattcaaactttaattcaaaagggaatagatgaaggtgcaaaactagttgcgggaggaactggaaaaccaaaaggtttagaaaaaggctattatgtaaaaccaactgtttttgcagatgttaataatcaaatggaaattgctagaactgaaatttttggtcctgtgctatccataattccgtttgaaaatgaagatgaagctatttcaatagctaatgatactccatatggattaacaaactacattcaaacacaagataaagcgaaaatcaaaagagttgcaagaaaacttagatctggaatggtagatgtaaatggggttggtatagctgttagctcaccatttggcggatataagcactctggcattggtagagaagcaggaactgaaggtttaatagaatttctagaagtaaaaacagttggtggttggaattaa

SEQ ID NO: 213467 - DNA, 475 bp, Unknown
  Bacterial polypeptide expressing nucleotide sequence isolated from the Sargasso Sea
attggtcctgtgatttctgaaacacaatttaatataattcaaaatttaattcaaaagggaattgatgaaggtgcaaaattagttgctggtggccctggtaaacctaatggtattaaagatggatactatataaaaccaacagtattcgctgatgtgaataataatatggaaattgctagaacagaaatatttggaccagttttatcggtaattccatttgagacagaggaagaggcaattgaaattgctaatgatactgactatggtttaacaaattatatccaaactcaggacaataaaaaagttcaaagagtagcaagaaaattaagatcaggaatggtagatgttaatggcgcaggtatcgcagtagatgctccttttggtggttataaacattcaggtataggcagagaagcaggtaaagaaggtttaattgaatttttagaattaaaatcagttggtggatggaactaat

SEQ ID NO: 213468 - DNA, 613 bp, Unknown
  Bacterial polypeptide expressing nucleotide sequence isolated from the Sargasso Sea
aatgtacgaaaaatttggacaattcattgatggaaaatggcaagcatcttccaacaaagagacatatgaagtcataaacccagccaacgaagaagttataggtcttgcatcaaaagctactccagaagatgtggatcgggcacttaaatctgctgaaaaaggtttagaagtttggaaaaaaacatctccttggaaaagatcttcggtcattagaaaaattgctgatctaataagagccaaacaagatgttcttgcaaaatggataacacttgaagttggaaaaccttttcttgaaggcaaaggcgaagtaggagctacagcagatatatttgagtggaattcagaggaaacaaaaagaatttatggacaaacagtagaaagcagatttgaagacactagaattcatgtttattatcaaccaattggagttgttgcagcaatgtctccttggaattttcctttagttttatcaggaagaaaaatatcaactgctttagccgcaggatgttcagttataattaaacctgatgtgatcgcgccaggaggtgtgatggagttagttgatatttgtagagaagctggagttcctccaggagtggttaatttattatct

SEQ ID NO: 213469 - DNA, 522 bp, Unknown
  Bacterial polypeptide expressing nucleotide sequence isolated from the Sargasso Sea
taaagtttcaaggaaagcttttaatagtggtgtttggtcgaaaagttcaccagagcacagaaaagaagttttattaaaatttgcagaattacttagaaaacatggagatgaaaattcagttttagaatgtgttgatactggaaagttggtgacagattgcattaatgaagttgcaaatgatgctccaatgcattttcaatggtatggagaactgattgataaagtatttggaaaagttggtcctacagagccatccattacaagtttaatcgttaaagagccaattggtgttgttgcaggaattgttccttggaactttcctttaatgatggctgtttggaaaatggcaccagctcttgctgcaggctgctcagtgattataaaaccagcagaagacactccattaacagcaattcgagttgcaaaaatagctcaagaagctggaattcctgatggtgttttaaatgtactccctggttatggcgatgttggtgaggcattaggtagacataaagatgttga

SEQ ID NO: 213470 - DNA, 844 bp, Unknown
  Bacterial polypeptide expressing nucleotide sequence isolated from the Sargasso Sea
atgaatagcgttttaattaagcaaaaagaatattttgttaaaaatggtgcaccatcaatagaattaaggattgatagactagagcgtttgaagtccctaattatggataatcgttatgattttgttgaaacattaaactctgattttggaaatagatccaaaaatgcatccatgttgtcagatgtatatggaattatgcctgcaataaatcttgccatcaaaaatgtcaaaaaatggagcaaggatgaaaagaaatcttcaaattttccattcggcttgcttggtgctaaatcttatataagatacgaacctttaggaacagttggtatgatctctccatggaactttccagtgaacttagcctttgtgcctttggtctctatatttgctgcaggaaatcaagtgatgcataaacctagcgaacatacaccattaacttctgcattattaaaggatttatgcgataaagtctatgatgaggttgaatttgcaacttttcttggtgggcctgaggtaggagctgcttttactaagctaaattttgatcatcttctttatacaggtggaggatctgttgctaagcacgttatgaatgcagcttctgagaatttagttcctcttacccttgaacttggtgggaaatctccggtggtgttaggaaaatctgctgatttaaagacttctgcaaaaagaattatgtttggtaaaacactaaatgcaggtcaaatttgtttagcgcctgattacgtagttgttcataaagatcagaaaaatgatttcatcaaggaaactaaagatgctgtttcccgagtactttcccaaaaattaaagaccaatgatgatt

SEQ ID NO: 213471 - DNA, 697 bp, Unknown
  Bacterial polypeptide expressing nucleotide sequence isolated from the Sargasso Sea
tatgaaaataaaagttggaattaatggcatgggtagaattggacgaatgatagtacgttcaataatagaaaacaactatcctaacattgaaattaaacatataaacaatagagctaatacagaaatttgctcaaatcttttaaaatacgactcgattcatggaaaatttaatgcagaaattaaatttgatgatagcaacctcataattaacaacaataaaattacttttagtcaagaaacagatgttaataaaataaattggaaaaaatttggtgttgaatatgtttttgagtgcactggtaaatttaattctaaagataaattgctagctcatttaaataatggagcaaaaaaagttatagtatctgcaccttgtaagggtgcagataaaacaatcgtatttggtgttaatgaaactaatataaaaaaagatgataatattatatccgcagcgtcatgtactactaattgtttggcacctgtgacatatgttttaaatgaagaatttgaaattgaaaaaggatttatgaccaccattcatgcttttacaagtgatcaaaggattttagataattctcacaaagatccaaggagagcaagggcagctagccaatcaattgttccgacttccactggagcttcaaaagcaataggtgaaattattccttcattagaagggaaactagagggtattgct

SEQ ID NO: 213472 - DNA, 709 bp, Unknown
  Bacterial polypeptide expressing nucleotide sequence isolated from the Sargasso Sea
atgattgaaaaaaaaaatttttatataaatggcaaatggatatccccttctataccaaatgactttgaagttatcgatccatcaactgaggaaccttttgcagttatatctctaggatctgtagaagacgctgacaaagctatcagcgctgctaaaaatgctttcgaaacgtggaaggaaactacaaaagaagaaagattggacttgctggaaaaatttgatcaaatttataatagaagatgggaagagatggttaaagcacagtcaactgaaatgggagctccactggactttgcttcagaaacacacacaaaaatgggtgctgatatttcgaaaaacacaataaaaattttaaaagattttaattttgaacatcaatttgatcctgagtctaataatcacattagatatgagcctattggggtatgcggattaataacaccttggaatttcccaatgaaccaaatcgtattaaaagttgttcctgctttagcagctggctgcacaatgatattaaaaccctcggagattgctccaatatctggagttttatttgcagaaataattgatgaagctggttttcctccaggcgtttttaacttagtcaatggtaatggagaagttgttggaaatcatatctctggtcatccttatatagatatggtttcatttacagggtcaacaagagcaggaaaattaatcaaaaaaa

SEQ ID NO: 213473 - DNA, 166 bp, Unknown
  Bacterial polypeptide expressing nucleotide sequence isolated from the Sargasso Sea
atggcaataaatattggtataaatggttttggtagaattggcagactagtttttagatctgcaattaataatgatgattttaatttagtctcagtaaatgacttgttagacattgatcatcttgcatatcttttaaaatatgattctgtcccatggtccttttgat

SEQ ID NO: 213474 - DNA, 298 bp, Unknown
  Bacterial polypeptide expressing nucleotide sequence isolated from the Sargasso Sea
attgtttgcgcttcagatttaacaatccaactaaaaacgaaaatagtaaaaaaagatatatttaatcactttaagaatttagcgaaatctaaaagtaaaatatttggttttcaagaagaatcacttgtttcactcgaccatcttggtacttctaaatcagtaatagtggatgcaaattttattaatttactagactcaaatttattaaaaatggttatatggtacgataatgaatggggatatagtaatagggtagttgatatagcaaagtttgtattaaaaaaaaataagatttaaa

SEQ ID NO: 213475 - DNA, 595 bp, Unknown
  Bacterial polypeptide expressing nucleotide sequence isolated from the Sargasso Sea
caaatatgtactgccatgtctagattagttgtgcataaatcagttaaagatgaattaattacaaagttggtagacttaagcaaatctcttaaagttggacctggttataaagaagatacaggattaacacccattatctctgaaaagcaacttgaaaaagttgaagggtatgcacgctctggaattcagcaaggtgcagaggctgttcatggtggaaaaagagcagaccgtgaaggatattttatggaagcaactgttttaaataatgtcaaacaagacacatctgtagcgagagaagaaatttttgggcctgttttatctgttcttgaatatgaagatcaagatgaagcaattcatattgcaaatgatactgattttggattaggagcaggcgtctttactaaagatttgaaaaaagcatcatggactgcaagtaaattagagtcagggcaggtttatgttaataaatggtttgctggcaatcacgcaactccatttggtggctacaaacaatctggctatagtagagaaaaaggtgtggacgctttaaagtcatatcttcaagttaaaaacgttgggataagcttagattaat

SEQ ID NO: 213476 - DNA, 127 bp, Unknown
  Bacterial polypeptide expressing nucleotide sequence isolated from the Sargasso Sea
gatgacaaaaattggaataaatggctttggtaggattggcagacttattttaagagctttattggaaaattataaggataaaattcaagttgttgctataaacgatctaggctcaatgaaaccaacg

SEQ ID NO: 213477 - DNA, 361 bp, Unknown
  Bacterial polypeptide expressing nucleotide sequence isolated from the Sargasso Sea
aatggttattaaaattggtataaacggattcggtagaattgggagaatggtacttagatctatcgtagaaaataatagaaaagatattgaagttgttgctattaataacagaggaagttcagaggttagtagttttttattaaaacacgataccatacacggaaagctaaaagctaaaatatctcattcagaaaatgcaattgaaattaatggaaaaaaaataaatataattcatgaatcagaaatttcaaaaataaattggaaaaaatataatgttgatattgttttagaatgcacaggtaaatttaatactaaagaaaaatcttcactgcatttaagttcgggagctaaaaaagtttta

SEQ ID NO: 213478 - DNA, 859 bp, Unknown
  Bacterial polypeptide expressing nucleotide sequence isolated from the Sargasso Sea
actggcaaatcatataatcaggcaataagtgagattaaatattgttataaattatggttacatgcctctgaaacaattcaaaaaattaaagaaaaaaaaatttttataaacaagaaaactttttgcaagatttcttatgaacctataggtgtaactgctgtaatagtaccgtggaattttccatttattgttctatctgaaagattaccttatatattggcgtcaggatgtgttggtattattaagcctagtgaatatgcatcaggaacgttaataaagtttgtagatttagttatgaaaattggcaaagtgccaaaaggactaatcaatttaattacaggcggatcagaaattggctcaaaaatcacaactaataaaaaagttaaatgtatttcatttacaggatctagttttactggccgaaaagtcatgagagctgcaagtcgagatcttaaaagaattagtttggaacttggaggcaaaaacccaataattatatttaatgaagcaaatttaaaaaacgctgcaaaaaatgtttttacgtcattcacacataattcaggacaatgctgtgtgggcgctagtagaatttttgtggaggatcaagtctatgaacagtttcttaaatattttaaggaaattttgaataaaaattcaaaatatttccaaatgtcaaatttcatgcaatatgaaaaagttttaaattttttaagaaaaaaaaaaattaataaaaatcaaatttttcatggcaaaattccagataaaaaaaataaaaacttaaaaattaaaccaattgtatttcataatttaagtcaaactgataaaattcatactacagaattattggacccatcataac

SEQ ID NO: 213479 - DNA, 504 bp, Unknown
  Bacterial polypeptide expressing nucleotide sequence isolated from the Sargasso Sea
catgaacatcctttcctctctaaatcccgctacaggagacgtcctgggtgaagttttagtcactcagaccgataaggtccaaaactcggtcgaccgagctcgtgacgcacaattgggctggagcgcactaggtcttcagggccgggcagacatccttggacaagcagcagtgatcttttccgagcgagagcaaaagcatgccagactcatgacccgagagcagggaaagccacttaaagagtcaagggcggaggctcacggcctcgggtcgcgattagaagaagagatcacagaaatagtcgatgcactccagcctgacatagtggaacacggcgggaaccgctcgacgatttaccacgaccccctaggagtagtaggagcaatcaccccgtggaactttcccatgtccatgccgaactggatggtgcttccttccttaatggctggtaatacggtcgtacttaaaccatcggaagagaccccactttgtggtcaggcatatgc

SEQ ID NO: 213480 - DNA, 833 bp, Unknown
  Bacterial polypeptide expressing nucleotide sequence isolated from the Sargasso Sea
attgatatcgggtgagatagctgtaaaatgtcctttttttaatgatattaaagatgatacttcaaaaattcctgattatattaatggcgaacttaaatctgtaattaataaaaagtctaataggccaaacaatcccaaaaacatagttttatatggttttggaagaataggaagattggtagcaagaatgatgacacaaacaactggtcctggtaattacttcagactaaaagctatcgtgataagaaaagctacagatgatgatatttttaaaagagcaagcttattaacaagagactccgtgcatggagcatttgatggtactgttagagttgatgaagagaattcaactcttgtaattaatggcaatccagtaaaaataatatatgcatcgagtccagatgaaattaaatataaagatttcgatataattgatccaatagtaattgataatacaggcgtttggagagatgaagacagtctttcaaaacatcttaaatctggagcttctaaggttattcttactgctccagcaaaaggtgatttaaaaaatatagtgtatggaataaatgataatattctaaaagataacgattcaataatatcagctgcttcatgcactacaaatgcaatagttccagttttaaaggcagttaatgatgaatataaaattaaaggtggtcatatagaaactgttcatgcatatacaaatgatcaaaatttaattgataattttcacaaaggtgacagaagaggtcgtggggcaccgttaaatatggtcattactactacaggagctgttaaggcagttgcaaaagcacttccagagctag

SEQ ID NO: 213481 - DNA, 195 bp, Unknown
  Bacterial polypeptide expressing nucleotide sequence isolated from the Sargasso Sea
aatggtaaaagttgcgattaatggatttggaagaattggtaaattagtttttagagctatagttgaaaaaaatttaaaaaatgttcaaattgtagctataaatgaattaggttcattagaatctagcctccatttagttaattttgatagtacgcatggagaattaaaaacaaaattatataaaagtaataaggg

SEQ ID NO: 213482 - DNA, 649 bp, Unknown
  Bacterial polypeptide expressing nucleotide sequence isolated from the Sargasso Sea
aatcattgtctcagctccatgtaaaaacgctgacaaaactattgtttttggagtaaatgaaaaaatattaaaaaaaggtgacaagattatttcagctgcttcatgtacaacaaattgtcttgcacctttaacacatgtcttaaatgaaaattttcaaattgaaaaaggttttatgacaacaattcatgcttttactagtgatcaaagaattttagacaattctcataaagatcctagaagggcccgatctgctagccaatcaattgtaccaacctcatctggcgcatctaaagcaattggagagattataccctctcttaaaggaaaattagagggcattgctatgagagttccaactccaaatgtttctttggttgagctagttttttgtactaaaaaagatttaaatattgataaaataaattctgcgtttgaagattttagtaaaaaaaataaaatccttgaagtctctagagaaaaacttgtttctatagattttaatcataatcctgcttcatcaattgttgatgcaagtttaacaaatgttgtaggtaaaaatatgggtaaaatttctgcttggtacgataatgaatggggattttccaatagaatgtgtgatatagtggaatatcttcataagatttcttaa

SEQ ID NO: 213483 - DNA, 847 bp, Unknown
  Bacterial polypeptide expressing nucleotide sequence isolated from the Sargasso Sea
gaaatactttattctcaaaccatcagaaaaagatccctcatgtccgatgagattagcagaattacttcacgaagctggtcttcctgctggagttttcaatgttgttaacggcgataaagaagttgtagatgctatactttcaaacaatgatattaatgctgtaagctttgttggatcaacacctatagctaaatatatatatgagaatgctgccaaaaatgaaaaaagagttcaagcattagggggagccaaaaatcatttagtggtgatgcccgattgcgatttagaaggagctgtaaatggtctaatgggtgctgcatatggatctgcaggtgaaagatgtatggctcagtctgttgctgtagcagttggtgatattggcgatgagttagtatctaggttagtaaaaaaagctgaagcattaaaaattggtcctggtatggataaatcctcagagatgggtcctcttgttacaaaacaacatttagaaaaagtaaaaggatatgttgatttaggagttaaagagggagctaaattagctcttgatggcagaggtttaaaacttcaagggtatgaaaatggtttttatataggtggatgtttgtttgatcatgtaactactgatatgagaatttataaagaagagatttttggtcctgttctgtcagtggtaagagtaaaaacttttgaagaagcaaccaaaatgataaatgagcatgagtatggaaatggtgtaagtatttatactagagatggtgatgcgggaagaacttttgcaagtaaaatccaagttggaatggttggaataaatgttccaataccagttcctatggcatttcatagtttt

SEQ ID NO: 213484 - DNA, 931 bp, Unknown
  Bacterial polypeptide expressing nucleotide sequence isolated from the Sargasso Sea
acctcatcttctcaaaggagaattacagaaaatgttggtacagatgttgacagctggtcaattagacaacctttaggagtttgtgcaggtatcactccttttaatttccccgctatggttccaatgtggatgtttccaatagctattgcttgcggtaacacatttgtactaaaaccttccgaaaaagatccatcttgttcaattaaacttgcacaattatttaaagaagcaggattacccgatggagtatttaatgtagttaatggatccaaggaagcagtagatgctttactaacaaataaagacgtagtggctataagttttgttggctcaactcccatagcaaaatatatttatgaaaatgctgcaaaaaatgaaaaacgtgttcaagctttaggcggggcaaaaaatcattgtgttgtaatgcctgactgtgatctggatcaagccgttaatggtttaatgggcgcagcgtatggttcagccggagaaaggtgtatggctcagtccgtggcagtggcagtaggaaaaattgcagacaatcttgtgagcaaacttaaacaaaaggtacaatcactaaaggtaggcccaggattagataaaaattcggaaatgggaccattagttacaaaagaacatttagaaaaagttaaaggatatatagatcttggagtgaaggaaggtgcgaatctagtagttgatggaagaaatataaaacttcaaggttatgaacaaggtttttatattggaggttgtctttttgataatgtaaataaaaatatgagaatttataaagaagaaatttttggaccagttctttccgtggtacgagtaaaggactttgattcagcggttcaattagtaaatgatcatgagtttggaaatggaaccagtatatatactcgagatggtgatgtcgggagaactttgc

SEQ ID NO: 213485 - DNA, 801 bp, Unknown
  Bacterial polypeptide expressing nucleotide sequence isolated from the Sargasso Sea
tatgaagataaaaattggtattaatggaatgggaagaataggaagaatgatcctaagaacaattatcgaaaataactataagaatatcgagattaaacatataaataatcggacgaattcggaagcatgttcaactcttttaaaatatgactcaatccatggaaaattcaatgctaatataggatttgacaaaaatcacttaattataaataaaaacaaaatttcttttagtcaagaaactgacataaaaaatattaattggaaaaaatttaatgttgattatgtgtttgaatgtactggtaaatttaactctaaagataaactattagatcatttaaataatggtgcaaaaaaagttattgtttcagctccttgtaaaaatgcagataaaactattgtatttggagtaaatgaaaaagaattaaaaaaagaagataatattatttctgctgcgtcatgcacaaccaactgtcttgcgcctgtagcaaatatcttaaatgaaaattttgaaattgaaaaaggctttatgactacaattcatgcttttacaagtgatcaaagaatattagataattcacataaagatccaagaagagcaagatctgcaagtcaatctattgtgccgacctcaacaggtgcctcaaaagcaatcggtgaaattataccttcgcttaaaggtaaattagaaggcattgctatgagagtaccaactccaaatgtttctttaattgaattagttttttgtacaaaaaaaaatttgagtattgaaaaaattaattcttcatttcaaaacttctgtaa

SEQ ID NO: 213486 - DNA, 856 bp, Unknown
  Bacterial polypeptide expressing nucleotide sequence isolated from the Sargasso Sea
cttaccaactagcatagataatattgaatggtatgctgaaataattgataaactttttgatgacatttcaccaagttcaaaagaatatttgggcttaattaccaaagagccaattggagttgtagcagcgatagtaccttggaattatccattatggatggcaatatggaaaattgctccagcgcttattactggtaattctgttatattaaaacctgcagaacaatctccgatgagtgctattaaaatcggcgctttgctctcagaagctggggtacctgatggagtattttcagtacttccaggagatgggcctattacaggcaaatcattatgtcttcataatgatattgattgtgtagcttttactggatcgggcgaagttggtaaactagtacttcagtattctggtcaatccaatatgaaaagagtgcaactggagtgtggtggaaaatcaccaaatattatttttgcagattgtgatgatcttgacagagctgcagaagcatcagcttatgctatctttggaaatcaaggtgaggtttgttcagcaggatctagacttataatccaaaaagatattgaaaaagacttcattaataaagttgttcaattaagtaaaaaaatgcaaccttcagatccgctaaatccagattcatttgctggagcaatagtaaatactgaacagttagaaaaaataaataaatatgtaaatataggtaaaaaagagggggctgatattgaagtcggtggaaatataacaatgaaagaaacaggtggttgttattttgagcctactatttttaaaaatgttaagaataatatgaagattgctcaagaagaaatttttggaccc

SEQ ID NO: 213487 - DNA, 808 bp, Unknown
  Bacterial polypeptide expressing nucleotide sequence isolated from the Sargasso Sea
cctctcggcgtcttcggtattatcacaccttataacttcccggtaatgatccctctgtggttttggccctacgcagttgcaacaggaaataccgtggtgcttaagcccagtgagcaagatcccctcacgcaccagaagatagtggaccttgctagggaggctggacttccggacggcgtcttgaatgtcgtacacggtggccgtgaggttgtcgaaacgatgtgtgaccatcctgatatagagggtgtttcgttcgtgggctcgagtgatgtggcgaagatagtttacacgcgtgctggagccgctgggaaacgcgtgcagacgcttggcggtgcgaagaacttcctgatcgtcatgcccgatgcggatatggacgcgacgctggatgcgtgcgctggttccatttttggatcgtcaggtcagcgctgcttggctggaagcgttgtcgtcggcattggagacgcgcatcaccagatccgtgagcgaatccttgattatgcctcttcaatccgcataggggacggactcgagagcacaacacagatgggcccagtcatttctggtactcatcgtgaccgggtgaaagagtttatcaatcagggtgtggcggatggagcgactctcgctctggatggcagaagcgccactgttgaggggcttgaggatggctactgggttggccctacagtcttcgagaatgtcgcaccaggcatgtcgatcgcgagtgaggagatctttggcccagtggctagtatcaatcgagccgacagcgtcgagggtgcgattgagatgatgcacagccaatcgt

SEQ ID NO: 213488 - DNA, 685 bp, Unknown
  Bacterial polypeptide expressing nucleotide sequence isolated from the Sargasso Sea
ttaaaatacgactctattcatggtaaatttaatgcgaaactgaaatttgaagaaaatgaattaataattaatgaaaataaaattacattttcacaagaaagtaaaatagaaaatattaattggaaaaaatataatgttgattatgtctttgaatgtactggtaaatttaattcaaaagaaaagttactcatacacatcaaaaatggagcgaaaaaagtaattgtttctgctccatgtaaaaatgcagataaaacaatagtagttggtgtaaatgaaaaaattatatcaaaggatgatagaataatttctgcagcttcatgtacaactaattgcttagcaccagttgtaaacgttcttcataatcattttgaaattgaaaagggttttatgactactattcatgcatttactagtgatcaaagaattttggacaattctcataaagatcctagaagagcaagggctgcgagccaatcaatagtcccaacttcaacaggtgcatcaaaagcaataggagaaataattccaagtctaaaagggaaattagaaggagttgcaatgagagtacctacgcccaatgtatcgcttgttgagttggtattctgtacgaaaaaagaaattgatataaaaaaaattaatgatgtatttgagtctgcttctaaaagtgaattaaataaaattttag

SEQ ID NO: 213489 - DNA, 574 bp, Unknown
  Bacterial polypeptide expressing nucleotide sequence isolated from the Sargasso Sea
gatgacgatatttatttctgctgcatcatgcacaacaaattgtcttgtgcctattgctcatgttttaaatgaaaattttataattgaaaaaggtttcatgaccacaattcatgcttttacaagtgatcaaagaattttggataattcgcataaagatccaagaagagccagatctgcaagtcaatcaattgtaccaacctcaacaggtgcatctaagacaattggtgaaatcatgccttcccttaaaggtaaaatagaaggcattgcaatgagagtgcctactccaaatgtttctttaattgaacttgttttttgcactaaaaaagatttaagtattgaaaaaattaattcagcattcatgaactttagtaaaaaaaacaaagttctggaaattacaaaagaaaaacttgtttctgttgattttaatcacaacccagcctcgtctattattgatgcaagtttaacgaatgttgttggtaaaaatatgggtaaaatttctgcttggtatgacaatgagtggggtttttcaaatagaatgtgtgacatagcagtttatctccacaaactttcttga

SEQ ID NO: 213490 - DNA, 389 bp, Unknown
  Bacterial polypeptide expressing nucleotide sequence isolated from the Sargasso Sea
agtagctggaggtgttgaaaagccagatggatgtgacaaaggttactatgtaagaccaacagtttttgcggacgtaacaaacgacatgacgatagcaaaagaagagatatttggccctgtccttgtcatgattaaatataacaatgaagaggaggctataaatattgccaatgatactgaatatggtctagcaggttatgtgcaaggtgatccagatcatgctagagacgttgctcgaaaaataagagccggacaagtaatcattaatggaggtgctcgaggaactggagctccttttggaggctacaaagcttcaggtaatggaagagagcatggtcttcatggtttagaggaatgccttgaaactaaagcaataattgctccataga

SEQ ID NO: 213491 - DNA, 799 bp, Unknown
  Bacterial polypeptide expressing nucleotide sequence isolated from the Sargasso Sea
aatggcaagcgtacagcggatattctgcctggtcttcagagctggttagcggaaagcttttggtattatgcggggttggcggacaagatacatggagatgttataccggcaaatgtatccggaatcttgaattatacccgtcgcgaaccttttggtgttgttgcttccattacagcatggaattcaccattgcttatcgctatctggaagattgcacctgcgcttgctgcaggaaatacaatggtgatcaaaccatctgaacatgcatctgcctcaacactagctttaatgaatgttcttagtgaactggcacctcccggagtgctaaatgttgttactggatttgggaaggaagttggggagccattggtggatcatcctgaagtgaggatgataagtttcactggttcaatttcaggaggaaggcgagttgctgaggttgcagcgaggcagatcaaaccagtattaatggaactgggtggaaaatcgccacagatcgtatttcctgatgtaaaaatggatgatgcagcacatggagtggcactgggtattttccctccagcgggacaaagttgtgttgctggttcaagattgctggtgcatagggaaatgcaggacgaacttgttcagaaaatttgtgatgttgcatctcaggccaggttgggccctcccctcgcaccagacacacaaattgggccaatggcaaatgaaccacattttgaaagggtgattggctacatagagcaagcaagaaatgaaggagctgaatgtgtgttgggtgggaaggcggtaaaacctg

SEQ ID NO: 213492 - DNA, 403 bp, Unknown
  Bacterial polypeptide expressing nucleotide sequence isolated from the Sargasso Sea
gagggcgcaactttagttgcccgaggaattgaaaagccagatggatgtgacaaaggttactatgtaagaccaacagttttcgcggacgtaacaaacgatatgacgatagcaaaagaagagatatttggccctgtccttgtaatgattaaatataacaatgaagaagaggctataaatattgcaaatgatactgaatatggtctagcaggctatgttcaaggtgatccagaccatgctagagaagttgctcaaaaaataagagctggacaagtaatcattaatggaggtgctcgaggaactggagctccttttggaggctacaaagcctctgggaacggaagagagcatggtcttcatggtctagaagaatgtctagaaacaaaggcaattattgctccataaa

SEQ ID NO: 213493 - DNA, 545 bp, Unknown
  Bacterial polypeptide expressing nucleotide sequence isolated from the Sargasso Sea
tatggataaggttattaaaaattttcaaaatatatcttatggtcctgcaccagaagacagcaaggaagtaattaattggataaaaaatttaaaaaatccaaataatctttttataaatggtaaatttgtaaaatcgtttagttcaaagaagttaaacatcattaatccatctacaaataaaaaaatagcaacattatcggttgcttcaaaaaaagatgtgaattccgctgtgagtgccgctaagaaagctcatgttaaatggtctaaattatcatcttttgatcgatcaaaatatttatatgcccttgcacgtctcatacaaaaaaattctaggtttatttctgtcttggagacaattgataatggcaaaccaatacgagaaacaagagatatagatattccacttgttgcaagacatttttattatcatgctgggtgggctgctaggaatacaattaacactgataactctattggtgttgttgggcaaattataccgtggaattttccattattaatgttagcttggaaaattgctcctgcaa

SEQ ID NO: 213494 - DNA, 880 bp, Unknown
  Bacterial polypeptide expressing nucleotide sequence isolated from the Sargasso Sea
tatgtacgataaatacggacagttcattgatggtaagtggcaaaagtctgcaagtggtgaaacttacgatgttattaatcctgcaactgaagaagtaatagggaaggcgtcaaaagcaaacagttcagatgttcaaaaagctcttaaatcagctgaaaaaggtttgcaaatttggaaaaatacgtctccttgggaaagatctaaaattataagaaagatttctgatttaataagaaaaagagttgatgttctttcaaaatggttaacccttgaagtaggaaaaccactaacagaaggtcctggtgaaataggcggtgcggctgatatatttgaatggaattctgaggaaactaaaagaatttttggagaaattaatcaaagtcgatttcctaatacgcaaattcacgttatgtatcaaccagttggtgttgtagcggctctagttccatggaattttccagttattcttgcttcaagaaaaatttctactgcattagcagcaggatgttcggtaatagttaaaccagatgtgataacaccaggcagtgttatggagatagttgatatttgtagagaggcaggcgttcctccaggagtagttaatttattatcaggtgatccagctagaatttctgaagaattaattaagtcagatataataaaaaaaatttcaataactggatcaacaagagttggtaaattaattttaaaacaagccgcagacaaagttcaaagagtaacaatggaactgagtggtcactcaccctttatagtttttgatgatgttgatttgaataaagttaccgatatggcaataacttcaaaatttagaaataatggacaagtatgtatttcacctaacagattttatatacacgaa

SEQ ID NO: 213495 - DNA, 679 bp, Unknown
  Bacterial polypeptide expressing nucleotide sequence isolated from the Sargasso Sea
gatgccagctgaaagaggtaggtgcctaagagaaattggagatgtaatctcaaaaaatgctgaacgtattggaaaagttgaaacaactgataatgggaagcttccaaaaaatattactcctagtttgcagaaaaattcatggcaagttgatagctggaattattattcaggtatgtgtgataaatttgaaggtagtcttattcctgcggaagttcctaatattcataattatttacaatgggaaccttttggagttgttgctcaaatacttccttggaactctcctattggaacactaatttggaaattagcaccttgtttagcagcaggtaatacagttgttctcaaaccctcagagtttgcaagttgttcaactttggaattaatggatgttttattggaagctaatttaccacctggagttataaatgtggtaactggttttggcaacaaaattgttgaacctttagttgatcatgaagatgttagaatggtatcttttacaggtggtaccaatggaggtcgtatagttgcaggaattgctgcaaaaagtgctaaaccaacagtaatggaactaggaggtaaatctccacaaattgtactccctgattgtgatttagaacttgcggttaatggtattatttcaggaatttttcctgctgcgggacaaagttgtatt

SEQ ID NO: 213496 - DNA, 790 bp, Unknown
  Bacterial polypeptide expressing nucleotide sequence isolated from the Sargasso Sea
aaaacctcaagacattgttttatatggatttggtcgaataggtaggttcgtttcacgtattatggcgcaaacaacaggacctggtaattactacagacttaaagcaattgttgttaggaaaggatccaatacaaatgatctacttaaacgagcgagtttgttgagacgagattctgttcatgggtctttccacggaactatccgagttgataatgagtccaaaactttggtaataaatggaaatcctgtaaagattatctatgcaaatggaccaaaagattttaaatattcagattatggtatagataatccaattgttattgataatacgggtgtttggagagaggacaaagatttatcacttcatctagaatctggtgcaagtaaagttgttttaactgcacctgctaagggcaaagtaaagaatattgtaaatggtatcaataacaatatattgaatgaatctgataatataatttcagcagcttcatgcacaactaatgcaatagtgcctgttttagatattctaaataaaaaatattccataacttctggacatattgaaactgttcatgcttacacaaacgatcaaaaccttatcgacaattatcacaacaaagatagaagaggaagaagtgctgctttaaatatggtaattacatctacaggagcagtaaaagcagtctcaaaggccttgccggagcttgatggaaagctaactggaaatgctataagagttccaacaccaaacgtaagtttggccgttatgtcacttacagttgaaaagagt

SEQ ID NO: 213497 - DNA, 964 bp, Unknown
  Bacterial polypeptide expressing nucleotide sequence isolated from the Sargasso Sea
caaccattgggagtttgtgctggtgtaactccctataactttcctgccatggttccactttggatgtttcctatcgctatagcttgtggaaatacttttatacttaagccaagtgaaaaagatccctcttgtgcgattaaattggctcaattatttaaagaagccggattacctgatggagtttttaacgtagttaatggaaataaagaagcggtcgatgcattattaactaacaaagaagtggctgctattagctttgttggatcaacacctattgcaaaatatatttatgaaaatgctgcaaaaaatgaaaaacgtgttcaagcattaggtggagcaaaaaatcattgtgtagttatgccagactgtgatcttgatcaagcagtaaatggtttaattggtgctgcttatggatcagctggacaaagatgtatggcccaatccgttgccgttgctgttggaaaaattggagatcaacttgtaagtaatttagctaaaaaagttgagtctctaaaaataggacccgggttagataaaaattctgaaatgggtcctttagtaacaaaagaacatttggaaaaagtaaaaggttatgttgatcttggtgttaaagaaggtgcaaagttagttgtggatggtcgaaatataaaattacaaggttatgaaaaaggattttacatgggaggttgcctttttgataatgttgaacaaaaaatgagaatttataaagaagagatttttggcccagtcctttcagttgtcagggtagaagattttgagtcagctataaaattagtgaatgaacatgaatttggcaatggaacaagtatatatacccgcgatggagatgtaggaagaacttttgctagtaaaataaaaattggaatggttggaattaatataccaattccagtacctgttgcttaccattcttttggtggttggaaaagaatcgttgtttggt

SEQ ID NO: 213498 - DNA, 556 bp, Unknown
  Bacterial polypeptide expressing nucleotide sequence isolated from the Sargasso Sea
atgagctcaggaaacaaatataaatcaatagccaataaactcaaatttgaaggaagagcattcatcaatggtaaatatgtaaacgcaatcgatggaaaaaagtttgaaactatcaatcctgcaacgggtaaaaaactttgcgctgttgcaaaatgtaatcacaaagatgttgatttagcagttaaagtctcaagaaaagctttcaatagtggagtttggtctaagagttcacctgaacatagaaaagaagttttattaaaatttgctgaactacttagaaaacatggcgaagagaattcagttttagagtgtatagatacaggaaaacttattggagactgcattaatgaggttgcaaatgatgcgccaatgcattttcaatggtatggagaattaattgataaagtatttgggaaagttggtcctactgaaccatccattacaagtttaattgttaaagagccaataggagttgttgctggaattgttccttggaactttcccttaatgatggctgtatggaagatggcgccagctctagcagcgggttgctcgg

SEQ ID NO: 213499 - DNA, 576 bp, Unknown
  Bacterial polypeptide expressing nucleotide sequence isolated from the Sargasso Sea
tgttggtagaaaaatccatctacaaaagagcagtagaagaagctgctgatgaagcaaataaaattaaagtagatctagcatcaaaagctggtgaacatataggtcctgttatatctaaaactcaatacgataaaattcaaagtttaatcaaaagtggaattgaagaaggtgcaacattagtagcaggtggacctgaaaaacctcaagatttaaaaaatgggtattttattaaacctactgtgtttacggatgtaaataatgatatgaggattgcaaaagaagagatttttgggccagttttatccataattccgtttgagaatgaagaggaagcaataaaaattacaaatgatactgaatatggcctcgggaattatttacaaaccgaagataaagaaaaagcaaaaagagtttcaaagaaattaagatctggaattgtatacgtaaatcataaaccagcagactctggcacaccatttggtggttatagacagtctggaaatggacgtgagggtggcacgtggggtttgcatgaatatttggaggttaaaaccattactgaatggaaaaactaaa

SEQ ID NO: 213500 - DNA, 883 bp, Unknown
  Bacterial polypeptide expressing nucleotide sequence isolated from the Sargasso Sea
attgctttaggatcttctgaagacgtaaatgctgcagtggatgcagccaaaaatgcttttgccacctttagttcgtctgaaaaagatgaaagagttggttatttagagaaaatcatagaaatttacatgaaaagaagctcagaaatggctgaagctatttcctctgaaatgggtgctccaatgtcattagcttcaaaagcacactcaccctctggtttaggtcattttatgacggctctagagactcttaaaaattatgattttgaacaacaaaaagatggattgttcattagaaaagagccagttggcgtggtcggtatgattactccttggaattggccaatcaaccaaattgcttgcaaagttgcacctgctttagcagctggctgcacaatgattttaaaaccaagtgaaattgctcctttcaatgcgatgctcatggctgaaataattcatgaagcgggaattcctgatggtgtgtttaatcttatcaacggtgacggacctacagttggtgaggctatgtcctctcatcccgacatagacatgatgtctttcacgggatcaactagagccggaatccaagttgcaaaaggttctgctgattcagttaaaagagttcatcaagaattaggtggaaaatcaccaaacattattttagatgatgcagattttgaaaatgctgttattagaggaaccagacatatgtttaataacagtggtcaatcgtgtaatgctccatcgagaatgttagttcctgagtcaaggcaggatgaagcaaaagccgctgctaaaaaagctgcagatgagaccaaagtgggtgatcctaatgctgaagatactgtaattggtcctgtggtaagcgaagttcagttcaataaaa

SEQ ID NO: 213501 - DNA, 844 bp, Unknown
  Bacterial polypeptide expressing nucleotide sequence isolated from the Sargasso Sea
atgggaagaattggcagaatgattgtgaggtcaatttatgaaaattacaaaggtaaaataattatcaagcatattaataatagatcgagctctgaaatttgtgcaaatttattaaaatatgattcaattcatggtaattttagttctctagtaaaatctggaggaaattacataaaaataaacaaagaaaaaatatcttacacccaacactctatgattaatgacataaagtggaaaaaatatggtgtagattatgtttttgagtgcacaggtaagtttaattctaaagatcaattactgccacatatagaaaatggggcaaaaaaagttattgtatcggccccatgtaaaatggctgataaaactatagtttttggcgtaaatcataagaagatcaacaagaatgatagaattatttcagcagcttcttgcacaacaaattgcttagctcctgttgcagacgtaattaataaaaattttataattcttaatggttttatgacaaccatacatgcttttacaagtgatcaaagaatattagataattctcacaaagatccaagaagagcgagatctgcaagtcaatcaattgtacccacatctactggtgcatcaaaagctattggtgagattataccctcattgaaaggtaagctagaagggatagcaatgagagtgccaacaccaaatgtttcattaatcgaatttatatttaatgtaaaaaaaaatattaccttaaaaaaattaaataactctttattttcagcttctaaaatgaaacttaaaaatattctaaatgttacagatgaaaagctagtctcagttgattttaatcaccaatagt

SEQ ID NO: 213502 - DNA, 850 bp, Unknown
  Bacterial polypeptide expressing nucleotide sequence isolated from the Sargasso Sea
gttgcttgcagaaatgattgatgaagctaaatttccacctggagtttttaatttagttaacggcgatggtgcggtaactggtgatgcactaacaagtcaccctgatatcaatatgatttcattcacaggatcaacaagagcaggtgcgttaatttctcaaaatgccgcaaaagattttaaaagaataagtttagaattaggtggcaagggagcaaatataatttttaaagatgcagattcagaagcggtagccagaggtgttctaagatgttttagaaattcaggtcaatcctgtaatgctccaacaagaatgcttgttgaaaaatcaatttataatgaaactgttgaaaaagtaaaagagttagcgaataatactaaagtagactcacccgacaaggacggtgatcacataggaccagtagtttcagaaacacaatttaataaaattcaaacattaattcaaaaaggaatagatgaaggtgcaaaattagttgctggtggaataggaaaaccaaaaggcttggaaaaaggatactatgtaaaaccaacagtttttgcagatgtaaataatcaaatggaaattgcaagaactgaaatttttggaccagttctttcaattattccttttgaaaatgaagatgaagctatttcaatagcaaatgacactccttatggtttaacaaattatattcaaactcaagataaagagaaagtcaaaagagttgcaaggaagcttagatctgggatggtagatgtgaatggagttggtatagcagtagcatctccttttggaggatataaacattctggaattggaagagaagctggtacagagggccttatagaattt

SEQ ID NO: 213503 - DNA, 746 bp, Unknown
  Bacterial polypeptide expressing nucleotide sequence isolated from the Sargasso Sea
gaggacactagggttcatgtttattatcagccagtaggagtagttgctgcattatctccatggaattttccagcagttttatcagctagaaaaatttcaacggctttagcagcaggatgttccgttatcataaaaccagatgtaatcactccaggtgtagttatggaaatggttgatatttgtaatgagtgtggagtccctcctggagtagtaaatcttttatcaggagatcctcccagtattgctcaacaattaatagcatctgatattgtaaaaaaaatttcaataacgggatcttcaagagtaggaaaattaattttaaaacaagcagctgacaaagttcaaagagtgacaatggaactaagcggtcattcaccttttatcgtttttgatgatgcggatattaaaaaagctgcagatatggcgattgctgcaaagtttagaaataatggtcaggtatgcatatctccaaatagattttatattcatgaaaaaaagaaggatgaatttgtaaatttatttattgaaaaaacgaaaaaattgaaaatcggtaatggtatggatccagacacaaaattaggtccactcacaacccaaaagagattaaatgaagttgagacacttgttgaaaaaactaaacaggagggtgctaaagttttgttgggtggaaaaagaccagctggctttaataagggatttttttatgagccaactatatttgatgatgtaaaagataattttactat

SEQ ID NO: 213504 - DNA, 948 bp, Unknown
  Bacterial polypeptide expressing nucleotide sequence isolated from the Sargasso Sea
attggtcgaaccattggcggtgcgctcttgatgggcaatacgtgtgtgcttaaacccggggaggaagcctctctgacttccctgaaaattggagatctgagtttgaaagccggttttcctccaggagttttaaacatcgtcccaggattgggcgaagaagccggtgaagctctgctgaagcatcctggggtgagccactattcattcaccggttcgacagaaatcggggttaaggtccagcaggaggctgccaaacgtgccgtccctgtgactcttgaacttgggggtaaatctccccagttggttttttccgatgccgatatagatcaagcccttccttttctggtgaatgctgccattcagaatgcaggacaaacatgttctgctgcaaccagggtcctgattgaaaagccgatattccaggagttgacggcaaggcttgccaagggaatcagttcacttcgttctggcccggccttacaagatcttgaatgcggtcccttgatcagtaagattcagaaagatcgggtcgaaggatttcttcaacgtgcgaggcaggacggggttgaattcctagcagaaggaagcatcgtagaggatgcacctcaagggggaaattatgtggctccctttatggttggcagcgtgcctccgaaacataccctggcacaggatgaggtttttggcccattgcttgtcaccatgtcttttgaaggagaagaagaggggattgaacttgcaaataacacggtttacggtttggtttcaggtgtttggacaaaggatggtggacgtcagttaagggttgctaggagacttaaatcggggcaggtattcatcaataattacggagcaggtggaggggttgaacttccattcggaggagtcaaactcagtggccatggacgtgaaaaaggctttgaagcactttatggtttttccgtgacc

SEQ ID NO: 213505 - DNA, 810 bp, Unknown
  Bacterial polypeptide expressing nucleotide sequence isolated from the Sargasso Sea
aatggacgaattaacgatctttatcggcggtcactggcgccacggcggcggcaatctgatgcacagctactttccggcggacggcacggtgaacgcgacgctgcgggcggccagtctcgacgatctgcaggaagcgatgacctgcgccgagcgtgcctggcgggaaccaacgtggcgcaacatgctgccgcatctgcgggcaaagatcctgcataaggtggcggatctgattgaatcccgtctggatgaactggcgcgaatgcaaagtcgggacaacggcaagccgctggcggaagcgcgggggctggtgatgagtgcggcggcaagcgcccgctatttcgccgccgcctgcgagctgctggaaggggagctgccgactccgcgtcaggcagacctgttgaccctgagccgctacgagccgctgggcgtggtggcggcgatcaccccgtggaactcgccgatcgccagcgaaatgcaaaaagtggcgccggcgatcgccgcgggtaatgcggtgatcctcaaacccgcggaagcgacgccgctgatggcgctggaactggcgcggatcttcgagcaagccggtttacctgcggggctgctgagcgtgctgccggggaaaggatcggtgattggcgacgccctggcgcgtcatccgctggtgcgcaaaatttcgtttaccggcggcacccgcaccggacgccatctggcgcacgtggcggcagaaaaactgatcccggcatcgctggaactgggcggtaaatcgccgaccatcgtgctggaggatgcggatatcgaacaggcggcgcgggg

SEQ ID NO: 213506 - DNA, 796 bp, Unknown
  Bacterial polypeptide expressing nucleotide sequence isolated from the Sargasso Sea
tttactgggaggtactgatacagctaaaaaaattatacaaaattcttcaaataattttgccgcaactaatttagagcttggtggtaagtctcccatgattatttttgatgatgctgacctcgagagtgcagcaaatggaataatcgcaggaaactttggcgcctctggacagtcttgtgtagctggcagtagagtaatagtagataaaaaaatatcaaaaaaaataattgatttaattgttcaaaaatctaagtcaattattgtaggagatcctgaaaattcaaaaactaatctaggtccactttgcacaaaaaatcaaattcaaaaaattgaacaaacactaaaaaaatcaattcaacaaggaggaaaaattattattggtggaaataaaattagtggagaaggtaattactttgagccaactttaatacattgtccaaatagtgaaatcgaaacacttaaaattgaaatgtttgggccagtgatctcaataatagagtttgagaatgaggcagaagcagtcaatattgcaaatagctcaaaatatggacttgggtcaggaatttttacaaaaaatttagctagagcacatcgagtttcaagacaaattcaagccggaatttgttggataaatacatatcgagctatttcacctattgcaccttttggaggttttaatcaatctggctatgcaagggaggctggaaagcaatctattttagattacacaagaacaaaaacaacatggattaatatatctgatgaccccatgactaatccttttattatgaggtag

SEQ ID NO: 213507 - DNA, 298 bp, Unknown
  Bacterial polypeptide expressing nucleotide sequence isolated from the Sargasso Sea
agaggaaatatttggtcctgttctttctatactgccttacaaagatgaagaggaggctgtagaaattgcaaatgatactgagtatgggctttatgggtatgtttcttcaggtgacgtagagcatgctaagaaagttgccaatagaataagagctggaagtatagccattaatggtgccggtgcagacttcacaacaccttttggaggatacaaacaatctggcaatggaagggaatggggtctatttggattcgaagaattcctagaagttaaagctgttgtaggttttaccagctaa

SEQ ID NO: 213508 - DNA, 847 bp, Unknown
  Bacterial polypeptide expressing nucleotide sequence isolated from the Sargasso Sea
gctttatactgggtagcaatactggttgccaaaaaagtattaaaaaatacagccaagaatttagtccctactactttagagcttggtggaaagagtccaaccatcatatcaggcgatgccaaccttaatcttgccgcaaaaagaatactttttgctaaaactatgaatgcaggtcaaatttgtctcgctcctgattacatttttctagaaaagaaactgcaagaaaagtttgtagagcaattacaaaatatatttgaaagttattatccaaagggtcatgaggatgaccatacttcaatggttaatgataagcattacgagagaatgaatttatatatagaagacgcaagatctaagggagcccaaattgttgagataggtcgtggaaaaccaaaaaatcaaaacacaattctaacaaaagtcattcttggagttaatgacgatatggatgttatgaaaaatgaaatctttggtccacttctcccaataatgctttatgaggacttaaatgaagttgtggaatatattaatgcacatgataatccattaggtctttatttttttggcgacagaaagtccgagcaagattttgtcattaataatactagatccggtggagtaactattaatgattccttatttcatatcttgcaatccagacttccatttggaggggtcggagagtctggttacggttgctatcatggttacgagggatttcttaacttttcaaacttgcgaagcatttactaccaaactcgctatgatgcactactttcaatgatgagacctcctcgtggtaagaactttagtctactatctaaaattttaagaaggttaggctaat

SEQ ID NO: 213509 - DNA, 523 bp, Unknown
  Bacterial polypeptide expressing nucleotide sequence isolated from the Sargasso Sea
tatgtacgaaaaatatggtcaatttatagatggcaaatggcaaccttctgaaaacaacgaaacatacgaagtaataaatcctgctacagaagaaattattggcgaagcatctaaagcgacacacgttgacgttgataaagcacttaaatctgcagaaaaaggtttagaagtttggaaaaaaacaccgccctggcaaaggtcatacataataagaaggattgcagacaagatgagagaaaaacaagatgttctagcaaaatggatgacattagaggttggcaaaccttttgcagaagctaaaggagaggtaggtgggtcagcagacatatttgagtggaatgcagaagaaacaaaaagaatttatggacagacagtagagagcagatttgttgatacaagagttcatgtttattaccaaccagtaggagtagttgcagctttaacaccttggaattttccgttagttttatctgctagaaaaatttctacagctttagctgctgggtgttctgtaattataaaa

SEQ ID NO: 213510 - DNA, 919 bp, Unknown
  Bacterial polypeptide expressing nucleotide sequence isolated from the Sargasso Sea
tcgcaccgaaagtaacggcaaagacgttaaagaattcctggctgaagaactggctagcctgaacggcgaagcgggtgacagcgaaaaccgtgacgttgtcctgtacggtttcggtcgtatcggtcgtctgctggctcgtatcctgatcgagaaagaaggtggcggtaacggtctgcgtctgcgcgcgatcgttgttcgtcgtggtaaaggtgatgacctggttaagcgtgcatcactgctgcgtcgtgattctgtacacggtactttccgtggttctatcagcatcgaccacgaaaacgaagccatcatcgcgaacggcacttacatcaaaatcatctacgccaacaacccggctgagattgattacaccgaattcggtatcgagaacgctctggttatcgataacactggtgtatggcgtgacgaagctggccttgctcagcaccttgaagcaaaaggcaccgcgcgcgtactgctgactgctccaggcaaaggcgacctgaaaaacatcgtttacggtatcaacaacaaagacatcgatgcatctgacaagatcctgtctgcagcatcatgtactaccaatgcgattacgccagtactgaaagtgatgaacgaccagtacggtatcgagaacggtcacgttgaaactgttcactcctacaccaacgaccagaacctgatcgacaactaccacaaaggtgaccgtcgtggccgttctgctccgctgaacatggtaatcactgaaacaggcgcagcaagcgcagtagcgaaagcactgccagaactgaaaggtctgctgagcggtaacgcgatccgtgtaccaacgccaaacgtttctatggcgatcctgtctctgaacctgaagaaagaaaccagcgctgaagaagttaacgacttcctgcgtgatcaggcgctgcac

SEQ ID NO: 213511 - DNA, 495 bp, Unknown
  Bacterial polypeptide expressing nucleotide sequence isolated from the Sargasso Sea
atccgacactagatggtgaccatctcggaccactctttgataaaattcaatttgatcgggttcaaaatatgatccaagttggtattgatgaaggagcaaaactattagtaggcggccttggaaagcccgatggccatgaaaaaggatggttcgtaaaaccaacaattttttctgacgtaaataataatatgagagttgctcaagaggaaatatttggtcctgtcctagttataattccttttgatgatgaggatgaggcgatcagaatagcaaatgacaccccttatggtcttgctgcttatttgcaaacgggagataaagaaagagcagaacgagtctcaaggcagttaagagctggcggtgttcatgttaatggtggcggttataattacggctcaccttttggaggatataaagaatctggcaatggacgagaaggtggagacatggggctagaagattaccttgaaactaaggcactccacattgcctaag

SEQ ID NO: 213512 - DNA, 557 bp, Unknown
  Bacterial polypeptide expressing nucleotide sequence isolated from the Sargasso Sea
ttctgcaaagaattacgataaagcagtagaaattgctgttgcaactgcaaacagtaccacagtaggcgatccgaatggtgaattcagattgggaccaattgcaaacaaagttcagtatgaaaaaattataaaattgatagaaataggcattgaagagggagcaacattagtcgcaggtggtgttgaaaagccagatggatgtgacaaaggttattatgtcagaccaacagtttttgcgaatgtaacaaatgacatgactattgctaaagaagagatatttggacctgttttagtaatgattaaatatgataatgaagaagaagctataaatatagccaatgatactgaatatggtcttgctggttatgttcaaggcgatgccgaccatgctaaagaagttgccagaaaaataagagctggacaagtaattattaatggtggcgcaagaggaaccggagcacctttcgggggctacaaagcatccgggaatggaagagagcatggtctccatggtctagaagaatgtcttgaaactaaagcaattattgcaccgtaaa

SEQ ID NO: 213513 - DNA, 928 bp, Unknown
  Bacterial polypeptide expressing nucleotide sequence isolated from the Sargasso Sea
aagggtcgtggaggaacgcgaggaagccttcacccaggcaatttcaacggatttcggacagcgatccgcttttgaaacggccaactacgacatcaccgtcaccctggctgacatcaaatatcaaatccgcaatctggcgcgctggatgcggatccgtaagcgttcggtcccgcttcacctgatgcccggaagagccaggattgtgcctcaaccgctgggggtagtgggggtgatttctccctggaattttccggtttttcttagcctctctcctgttgcgggtgccattgcagcaggcaaccgggtgatgctcaaacccagcgaatggacgccgaaaacctcggtacttatcgcggaattggcatcggaagcttttgaaccggatgaatttgtggtttttgaaggaggaatcaagaccggcagggcctttgcggaattgccctttgaccacctgctcttcaccggttccaccagggttgctaaagaagtttcaaactcggcagcgaaaaatctgacaccgctgaccctggaactcgggggaaaatcccccgcgctggtctgccccgatgcgaacctgaaaagggctgcggaacggattgttttcggaaaactagccaacgccggacagatctgtattgctccggactatgtttttgtggaacgggcaaagtttcatgatttcatcgaaatgcttcaaacctacaccaaaaaagcttatccccgtttgaacaacaatccggattacacttcgatcatttcgtcggatcatttttcacgtttgaaccggatgatcgaggaagccagagaggacggagcggaaatcatcagcatcaacccggatggggaaaccctcgaaccctccgcaagaaagattccgccgaccctgatcctgcgcccgaatccgacgctcagggtgatgcaggaggag

SEQ ID NO: 213514 - DNA, 281 bp, Unknown
  Bacterial polypeptide expressing nucleotide sequence isolated from the Sargasso Sea
tctttctgtaattgaatatgaagatacagaagaagctataagtatagccaatgatacagactatggcttagggggaggagtttttactaaagatttgaataaagctgcttggactgccaatcaattacaatctggccaagtatatgtaaacaaatggtttactggaagtcatgccactccttttggaggctataaacaatctgggtacagtagagaaaaaggaattcaagctctgaatgcttatctacaaataaaaaatgtaggcattagtttaaattaaa

SEQ ID NO: 213515 - DNA, 337 bp, Unknown
  Bacterial polypeptide expressing nucleotide sequence isolated from the Sargasso Sea
tactgtattcgcagatgtaactaatgatatgacaattgcaaaagaagaaatctttggaccagtactttgtattatgaaatatgaaactgaagaagaagcaattcaaattgcaaatgatacagaatatggattagctggttatgttcagggtgaactatctcatgcaatagaagtaggaaatcaaatacgcgcgggacaaataaccatcaatggcggagctaggggaaatgctgccccatttggaggttataaagcttcaggtaatggaagagaacatggaaagcatggtattgaagaatgccttgaaaccaaggctataattgcaccagcgagttaa

SEQ ID NO: 213516 - DNA, 790 bp, Unknown
  Bacterial polypeptide expressing nucleotide sequence isolated from the Sargasso Sea
aatgacaattaaaattggaataaatgggttgggaagaattggtcgtatggtaataagatcaataattgaaagtaaaaataaaaatataaaaatacagcatataaataataggtctaacatagaaataagttcaaaattaattagatatgactctaatcacggaaaattttgtgctgaattaaaagttaaaaaaaacaacttaataattaataaaaataaaattagtttttcacaaaaaccaaatattgaggacattaaatgggataaacataaagttgattatgtttttgagtgtactggaaaatttaactctaaagaaaagttattaccacatatcaacaatggtgcaaaaaaagtaatagtttcagctccttgtaaagggtcagataaaactattgtttttggtgtaaatgaaaacatgcttacaaagaatgatcaaattatttctgcagcttcatgtactacaaattgtttagctccagttgttaatgtaattaataaaaactttggaattgaaaaaggatttatgaccacgattcatgcatttacaagtgatcaaagaattttagacaattctcacaaagatcctagaagagctagatcagctagccaatcaatagtccctacatccactggagcctcaaaagctattgaacaaattattccttcattaaaaggtaaattagaaggtattgcaatgagagttcctactccaaatgtatctcttatcgaattggttttttgtacaaaaaaaaacattaatataaaaaaaattaatgacgcatttcta

SEQ ID NO: 213517 - DNA, 964 bp, Unknown
  Bacterial polypeptide expressing nucleotide sequence isolated from the Sargasso Sea
gcattgtccaaagatgattgggccaagatggcgggcgatgccgatagtatcttcgaaggaagatgtttcattaatggtgaatatgttgatgcagcagatggcggaaagatagaagtcatcaatcctgcaaccaacgaggcttgtggaacatgtgcagcaggaaatgaaaaagatatagataaggctgttgcggctgcaaaagaaagctttaaagcaaaaacttggaggaagatggcacccaggaaaagaatgggaatcatgatgaagtttgccgaccttcttcaagcaaatacagctgaacttgccctcatggattccatgaatatgggtaagccgatcagcgattgcttgaatgtcgatgttccagcttcagctgtgaacattcgattcatggcagagtgtatcgataagatgtatggaaaagttgccaatacacatgagaaagcgctaaacctttctgttagagagccatatggtgtggttggactgatttctccatggaactatccacttctcatgggcgtttggaaaattgctccagcattggctgcagggaattcaattgtacttaaaccagatgagcattcgcctcactcgtgcataaaaatggcagagctttttgtcgaagcaggtggacctccaggggtattcaatgtggtcacgggacatggtgaagaggctggtcaatctttggctctgcatcaagatgtctctaagatcggattcactggatcaactgaggttggaaagctacttttgcaatatgccggtcagtccaatatgaaaaaagtcagtcttgagactggtggaaaatcacccatgatttacttcgctgatttacctgatatggaactcgctgtctctacagcctatgattcaatctatgcaaacatgggcgaagtctgtaatgcaggatctagaatctatgttgaaagagcaatttatgctgatttcgttgatcaat

SEQ ID NO: 213518 - DNA, 349 bp, Unknown
  Bacterial polypeptide expressing nucleotide sequence isolated from the Sargasso Sea
tttgttaaaccaacaatatttactgatgtatctaacaatatgcgaattgcgaaagaagaaatttttggccctgttttatcaattattccttttgaaagtgaagatgaagctatttcaattgttaacgaaacatcttatgggttaggtaattatgtacaaacacaggatatagaaaaagcacgaagagttgctagaaaatttagatctggaggagtttatattaatggaaatactgctgatcctggtacaccttttggtggttatagacagtctggtaacggtagagaaggaggaaattggggtttggaagagtatttagaggttaaaacaatttgtggttgggattaaa

SEQ ID NO: 213519 - DNA, 655 bp, Unknown
  Bacterial polypeptide expressing nucleotide sequence isolated from the Sargasso Sea
tttgttatgttcaatcttaaccaaggagaagtttgtacttgtccaagcagagctttaattcaagagtctatatatgataaattcatggaaagggctattaaaagaactaaagctgtaaaacaagacaatcctttaaaaatggaaactatgattggagctcaagcgtcagtagagcagatggaaaagattaaatcttatcttgaactcggtaaaaaagaaggcgctaaagttcttactggcggtagtgttgctaaacttaatagtggattggaaaaaggaaactacattcaaccgactatttttgaagctaaaaacaatatgcgtatctctcaagaggagatctttgggcctgttgtatctgttattaaatttaaagatgaagcagaagcattaaaaattgctaatgatactctttatggtttaggagcagctgtatggactagagatggcaatacagctcacagaatgggtagggcaatacaagcaggaatagtgtggacaaattgttatcacgcttatccagctcactcgccgttcggtggttataaacagtctggagtaggaagagaaacacataaaatgatgctaaatcattacagacaaaacaagaacttacacgtttcttacgccgagaagaaattgggattcttttaac

SEQ ID NO: 213520 - DNA, 496 bp, Unknown
  Bacterial polypeptide expressing nucleotide sequence isolated from the Sargasso Sea
atgtataatagatttggccaattcattgacggaagatggcaacaatcagaaaaaaaggaaacttatgatgttataaacccagccactgaagaagtgattggaaaagcttcaaaagcttccaccaaagatgttgataaagcacttaaatcagcagaaaaaggttttgctgtttggaaaaaattttcaccatgggatagatcagcaataataagaaaaattgctgattcaatgagaaaaaaaaataatgaactagcaaaatggatgactttagaaacaggaaagcccatggcagaatcgctagcagaagtcagtggatcagcagatatatttgaatggaatgcagaagaaacaaaaagaatatatggtcaaacagttcaaagtagatttgaaaatacaagagttataattaattacgaacctgttggtgtagtagcggccttatcaccctggaattttcctcttgttttagcatcaagaaaaatttcaaccgctttag

SEQ ID NO: 213521 - DNA, 842 bp, Unknown
  Bacterial polypeptide expressing nucleotide sequence isolated from the Sargasso Sea
ataaaccttgggtcttcatttccagatgcaacagtcaatgatgtcaataacgcagttgcagctgctaaaaatgcatttaagtcgtggtcagcaagtgatgtaaaaataagagctcaatatcttcgggcaataggtgatcagcttaagaataatgctgagtatattggaaaaatagaaaccattgatagtggcaaactattgaaagaaacaaaatttcaagctgaatatatgaaagattatttctactattatgcagagctcgctgagaaaatggaaaatacaaaaattatttctgacatagataagcctgatatggaagttacagaagtaagcgaaccaataggcgttattgcatgtatcattccatggaattcacaaatgtttttaacagcgactaaagttgcacctgcactggctgcagggaacacagtggtgataaaatcatcagaacttgctccagcacctttagctgaatttgtaaaattaacagaaaaagcagaattgccaaaaggcgtcataaatctagtgagcggtggtgcagaagttgggaaaaatttaacgtctcataaagatataggcaaagtgctcttcacaggtgggaccgaaacaggatctcatgtaataagaaatacagctgaaaattttgcacaattaacccttgaacttggagggaaatccccagttattgtatttgcagacgcagatatagagaatgcattaaataatattacgaccgctatcttttctggaaatggctgcagctgtattgctggatcagtattgattctgcatgataaaatttatgatgaatttcttaaccaattaaaaaatagagctgagag

SEQ ID NO: 213522 - DNA, 703 bp, Unknown
  Bacterial polypeptide expressing nucleotide sequence isolated from the Sargasso Sea
gttgattttgcagtagaggcagctaataaagcctttcctgaagttatggcattaacacttgatcaaaggaaaaaaattcttgaagaagtacttgagggcatggaagaaagacgtgaagattttgcgcaaattatttctgaggagatgggttcgccaattacgatggcacgtcgagctcaatatggcagcggcacaatacattttaaaaatacacttagtatcattgatagattcgatttccaagaagttcatggcaacatcacaataaataaattaccaataggtccagtaggaatgataactccttggaattggcctctaaatcaaatgtgcaccaaagttgcttcagcgatagctgcagggactacatttgttataaaacctagtgaaattactccaggagctgcacatattcttgccgaagttatcgataaaacaagcatgcctaagggtatgtttaatttgatccatggtcatggcatcactgtaggtaaagctatgagcagtcatccagatttagaaatgatttctttcactggttctactagagccggaatagatatccaaaaaaatgcggcagataatatcaaaagagtctcattagaattagggggtaaatctccaaatataattcttgaagatgtagatttagaaaatgctgtaactatgggcatgaagcaatgttttctcaatacaggtcaat

SEQ ID NO: 213523 - DNA, 619 bp, Unknown
  Bacterial polypeptide expressing nucleotide sequence isolated from the Sargasso Sea
tatgtctaactccgatccagaagtattggtgggagaaattcaatttgcgaatgaaagtgatgtaaataaagctgtagaaacagcaaatgaagcttacactaacacagattgggccaggagggcatggattgagcgttcagcgatactattaaaggtggctaccgaattattattaaggagaatggaactggcttgtaagattgttaaagagtcgggaaaaaccatgatagaagcattaggagacgtggatgaagcaatagatttttgccaattttatgctcgtcaacagggtgactttgttaaaaaaaatccaagtcatcactctcgaggggttttagccattgttaccccttggaattttccgttggccattccttctggaatggtggccgccggtttagttgccggaaatgcagtcattttgaaatcagctgagcaaactcctttaattacggatgaattagtagaaatttttcatcgagctggagtggagagtaatcttttaattcatttgccggggaaaggagagactgttggccagcaactggttgctcacccagctatttccggagttatttttacgggtagtaaatctgttggaatgaaaatcgctcatcta

SEQ ID NO: 213524 - DNA, 888 bp, Unknown
  Bacterial polypeptide expressing nucleotide sequence isolated from the Sargasso Sea
aatgtcgatattgcactggtgtaatgttgttgaatctgttctccccagtggcgtaatcaatgtaattaccggttttggccaatctgcgggagaaccaattgtaaaacacccggatgttccggttgtgacctttaccggatctgtagctactggtaaaaaaatagccaaatttgctgctgaaaatctcaaaaaagtatctctagagctaggtggaaaggacccgatgatcatatgtgatgatgcagatattgagatagcggctcaaggagcatcatggggaggttttgtcaatgcaggacaggtatgtacaagtattgaaagggtctatgttttcgaaaatgtaatagatcaattcacagaagcaatcatagaagaagcgaaaaaagtagttctaggtgatccaatgaagaaagatacacatattggcccaatggcatcaaagctccagcaagagaaagcaattgaaaaggtgaaccaagcaattaaagatggtgcgcgtttgttagctggtggtagcgctcctgaaaatttagataaagggtatttctatcaaccgacagtcctagataatattgaaccaaatatggaaatcatcaccgaagaagcttttagcccggttttgccaatacaaaaagtgtcatcaattcaagaggcaatccagttgtctaatgattcagtttatggattggggtgttcaatatttacaaatgatatcgatagggctttgactgccgcggatgatataaaatcaggtactgtctgtattaatagccctttgatggagaacattgctgcgccgtttggagggatgaaacagtctggtattggaagagagcatggtaaagaggccctagatgagtttcgagaagcaaaacatatttttattga

SEQ ID NO: 213525 - DNA, 583 bp, Unknown
  Bacterial polypeptide expressing nucleotide sequence isolated from the Sargasso Sea
gaggcagatagttcacaaaaaagttaaagatgaatttttatataaggtaattaaaaaagtaaaaaaaataaaagtgggtgatcctctagatttaaaatctaacatggggtcaatgatatcaaagggacatctacaaacagttgatggttatattcaaacaggaatagacgaaggtgcaaaacttttatctggaggtatttcagatattaaacaaaaaggtttttatgcaaaaccaactttgtttgatggtctaaaagaaaatatgactattgcgcaagaagaaatttttgggcctgttttaggagtattaactgttaaaaatgacgaagaagcactaaaagttgcgagtaattcaaaatatggattacatgcaagtgtatttactcaagatataaaccgtgcatttcatttagctaaaagtcttccatgtggtacagtttcagtaaatactttttcagaaggagatatcaaaactccttttggaggttataaacaatcaggatctttatcgagagatcaaggcacagaggcgcttaattcatttcttcaaaccaaaacaatttggataagtcacaataattaa

SEQ ID NO: 213526 - DNA, 640 bp, Unknown
  Bacterial polypeptide expressing nucleotide sequence isolated from the Sargasso Sea
agctattgaaaggggtgctttaagatgttttagaaattctggccaatcttgtaatgctccaacaagaatgttagtagaaaaatctatgtatgatgaagctgttaaaagattaaaaaaatatgcagatgattttaaggttgatgacccaaataaagaaggtgaacacataggaccagtaatttccgaaactcaatttaataaaatacagggactaattcaaaaaggaatagatgagggagcaaaattagtttcaggtggtactggaaaaccagatggtttaaaagatggttactatgtaaaaccaacagtatttgcagatgtaaacaatagcatgaatattgctagaacagaaatatttggtccagttttatcagttataccatttgagacagaagaagaagctattgaaatcgcaaacgatactgattatggtttaacaaattatattcaaactcaagatgggaaaaaagttcaaagggtagctagaaaattaagatcagggatggttgatgttaacggagcaggaattgcagttgatgcgccattcggtggttataaacattcaggaattggcagagaagcaggcaaagaaggtttaatagaatttctagaagttaaatctgttggtggttggagctaa

SEQ ID NO: 213527 - DNA, 478 bp, Unknown
  Bacterial polypeptide expressing nucleotide sequence isolated from the Sargasso Sea
aatgggtccgttagtttcggacgaacagtttcaaaaggtttctggatatatcgaatcaggtaaatctgaaggtggagaagttgttgcaggaggaaaatatgataattcttctggaggacactttgtacacccaacagtttttgcaaaaacaaatgctgacatgactcttgttaaagaggaaatttttggacctgttgtttgtgcacaaccattttcagatgaaaatctagaaaagattgcaaatgaagctaacaatactacttttggtttagcagctagtgtatggacaaaaaatataagtgtcgcgcataaattagccagtaaaataagagcaggtacagtttggataaattgtcataatatatttgatgcctcacttccgtttggtggttttaaagaatcaggatggggaagagaaatgggtcacgaagtattaaaaaattatacagaagttaaggctgtaactgtaaatctttaa

SEQ ID NO: 213528 - DNA, 169 bp, Unknown
  Bacterial polypeptide expressing nucleotide sequence isolated from the Sargasso Sea
aggtagagtttggacaaactgttatcatgcttatccagctcatgccccttttggtggttataagcaatctggtataggaagagaaactcacaaaatgatgttaaatcattacagacaagttaaaaatttacacgtgtcttatagtgagaaaaaattgggcttcttttaa

SEQ ID NO: 213529 - DNA, 964 bp, Unknown
  Bacterial polypeptide expressing nucleotide sequence isolated from the Sargasso Sea
tttgaaaagggatcttggtcaagaatggctccaagtaaaagaaagaagatcctctttaactttgctgatttaatgaaaaaaaatattcttgagcttggaatacttgaaactcttaatatgggaaaacctatttcaaacgcaactggagatattgctgcatgcattaactgtacaaggtggtatgctgaggctatagacaaaatatatgatgatgtagctcctacaagtgataatttattagctactattactcgagaaccattaggagttgtaggtgctgttacaccatggaattatccattattgatggcttgctggaaatttgcgccagcacttgctactggaaacagttttattttaaaacctgctgagcaatctccattatcagcattacgtgtagctgaactagcaatagaagctggcatgcctgagggtgtatttaacgttgtacctggctatggacctactgctggcaaagcattaggtatgcatatggatgttgacaaacttggatttactggatcaacagaagttggcagatattttctttcgtattctggtcaatcaaatatgaaaagggtctcgcttgaatgtggtggaaaatctccaaacattatatttgctgatgcacctgatttagatcatgctgcaaaaatggctgctaatgggatgtttgggaatagtggtcaagtttgtgacgccccctcaagacttctagttcaaaaatcgattaaagatgagtttcttgaaaaagtagttaattattcaaaaccatggatgcccaatgatccatttaaccctgaaactttaatgggaacaattgtcgataaaactcaaacagaaaagattctaaattatatagataccggaaaaagtgagggtgcaagcgttataacaggtggagaccaggttaaaaggatacaggtggttattatattagtccaactgtattcaaagatgtaaa

SEQ ID NO: 213530 - DNA, 610 bp, Unknown
  Bacterial polypeptide expressing nucleotide sequence isolated from the Sargasso Sea
atgaaagatctcagtttattccgtcaacaggcctacatcgcagggaactggtcagacgccgacagtggtgagaaggatgatgtcctgaatccggcaacaggtgaggtctttgggacggtaccgcgatgcgggcagcaggaaaccagaaaggccatcgaagcggcgaatcaggctatgccagcctggaaggcaacccctgccaaggagcgggggaaaattctgcggagatggtatgagttgatgattgagaacaaggaagaccttgccatcctgatgacggcagagcagggcaaacccctggcagaatcacatggggagatcctttatgcctcgtcattttttgaatggttcgctgaggaagcaaaacggatgtatggtgagaccattccgacccacatgcctgaccgtcggctgctggtcgttaaggagggggtcggggtcacggccgcgatcactccctggaattttcctgcggcgatgatcacccgtaaagcagggccggctctggcggcaggttgtccgatgatcatcaaacctgcaccggatacacccttttccgcattggcactttgtgaattgggagaacgtgccggagttcctaaagggatca

SEQ ID NO: 213531 - DNA, 512 bp, Unknown
  Bacterial polypeptide expressing nucleotide sequence isolated from the Sargasso Sea
tagcacacccattgtgatcccaagtggagagtttagattgggaccaatttcaaacaaaactcaatatgaaaaaattataaaattgatagaaataggaattgaagaaggagctagattagttgcaggtggagttgaaagaccggagggatatgataaagggtactacattaaaccaactgtttttgcagatgtaacaaatgatatgactattgcaaaagaagaaatatttggtcctgtcttatgtattatgaaatatgaaacagaagaagaagcaattaagattgcaaatgatacagaatatgggcttgctggatatgttcaaggtgagttgtctcatgcaatcgaagtaggaagacaaataagagcgggacaaatcacaataaacggaggtgctagaggaaatggagcacccttcggaggttacaaggcgtcaggaaatggaagagagcatggaatgcatggcctagaagagtgcctagaaacaaaagctattattgctccaactagttaat

SEQ ID NO: 213532 - DNA, 576 bp, Unknown
  Bacterial polypeptide expressing nucleotide sequence isolated from the Sargasso Sea
gaatgcttattgaaaggtctaattatgatcaagcagttgagaaattaaaaaaatattcagaggaaattcaagtaggagatccaaataaagagggagaacatataggtccagtagtttcagaaacacaatttaaaaagattcagtttttaattcaaaaaggaattgacgagggcgcaaaattaatagtcggaggactcggaaaaccgactggtcttcaaaaaggatattttgtaaaaccaacagtgtttgttgatgttaataacaaaatggaaattgctagaactgaaatctttggaccagttttatctgtaatcccgtttgaaaatgaagatgaggctatagaaatagcaaatgatactttttatggtttaacaaactatattcaaactaaagatcaggaaaaagcaagaagagttgcaaagaaattaagatctggaatggttgatgtcaatggagctggaatagctattgatactccttttggtggttttaaacactcaggtataggacgtgaggcaggggaacatggtcttcaagagtttttagaagtaaaatccgtgggtggttggagttaaa

SEQ ID NO: 213533 - DNA, 693 bp, Unknown
  Bacterial polypeptide expressing nucleotide sequence isolated from the Sargasso Sea
tagaattaggtgggaaaggtgcaaatataatatttaaagatgcggactcagatgcagtagcaagaggtgttcaaaggtgttttagaaattctggtcaatcgtgtaatgcaccaacaagaatgttggtagaaaaatcaatttataacgaaactgtagataaggtaaaagaactcgcaaatagtactaaagttgatttaccaggaaaagatggagaacatattggaccagttgtttcagagactcaatttaataaaatacaaaatttaatccaaaagggtattgatgagggtgctaagttaattgctggtggcacaggaaaacctaaaggttttgaaaaaggttattttgtaaaaccaacagtatttgctgatgtaaataatcaaatggaaattgcaagaacagaaatttttggtccagttctatctattattccgtttgaaaacgaagaagaagcgatttcaattgcaaatgacactccatatggcttaaccaattatatacaaacacaagataaggaaaaagttaaaagagttgcaagaaaattaagatctggaatggttgatgtaaatggtgttggtatagcagtagcttctccttttggtggatataagcattcaggcataggaagagaagcaggtatagagggtttaattgaattcttagaagtcaaaacagttggtggctggaattaat

SEQ ID NO: 213534 - DNA, 961 bp, Unknown
  Bacterial polypeptide expressing nucleotide sequence isolated from the Sargasso Sea
agatattttgcaggattagcggataagattgaaggctctactctaccaattgataagaaagatatgcatgtttatacaacacaccatccaattggtgtagtagctgctgttgtcccttggaatgctcaaatgtttctaactgctacaaaattggcacctgcactagctgcaggatgcagtgttataataaaagcatcagaaatagccccatgtgctatgtttgaattatcgaaattaatccatgaagctggcttcccaaaaggagtagtatcaatagtaaccggtgatgcagggaattgttcagcacctttaacctcacaccctgatattgatagaatagcttttactggcggtactgatacagctagaaaaattatacaaaattcttcaaataattttgctgcaactaatttagagcttggtggaaagtctcccatgattatttttgatgatgctgacctcgagagtgcagcaaatggaataatcgcaggaaactttggtgcctccgggcagtcttgtgtagctggtagtagagtaatagtagataaaaaaatatcaaaaaaaataattgatttaattgtacaaaaatctaattcaattatcgtaggagatcctgaaaattcaaaaactaatcttggtccactttgcacaaaagatcaaattcaaaaaattgaacaaacactaaataaatcaattcaacaaggaggaaaaattatcattggtggaaataaaattagtggagaaggtaattactttgagccaactctaatacattgtccaaatagtgaaatcgaaacacttaaaattgaaatgtttgggccagttatctcaataatagagtttgaaaatgaggaagaagcagtcaatattgcaaacagctcaaaatatggacttggatcaggaatttttacaaaaaatttatctagagctcatcgagtatcaagacaaattcaagcaggaa

SEQ ID NO: 213535 - DNA, 770 bp, Unknown
  Bacterial polypeptide expressing nucleotide sequence isolated from the Sargasso Sea
gctcaaggctaacgccgaagagctggcgctgctcgaaaccctggacatgggcaaacccatcagcgattccctgaacatcgacgtccccggcgcggcgcaagccctgagctggagcggcgaggctatcgacaagatctacgacgaagtcgccgccacgccccacgatcaactgggcctggtgacccgcgagcccgtcggcgtcgttggcgccatcgtgccgtggaacttcccgttgatgatggcctgctggaaactcggcccggcgctgtctaccggcaactctgtcatcctgaagccgtcggaaaaatccccgctcaccgccatccgcatcgccgcgttggccgttgaggctggtattccaaaaggcgtgttcaacgtgctgcctggctatggccacactgtaggtaatgcgctggcggtgcatatggacgtcgataccctggtgttcacgggctcgaccaagatcgccaagcaactgttgatccgctccggcgaatcgaacatgaagcgtgtctggctggaggctggcggcaagagcccgaacatcgtgtttgccgacgcgccgaacctgcaagcggcggccgaatccgccgccagcgccattgccttcaaccagggcgaagtctgcaccgccggctcgcggctgctggtcgagagctcgatcaaggacaccttcctgccgctggtgatcgaggccctcaagggctggaaacccggcaacccactggacccagccaccactgtgggtgcattggtggatacgcagcaga

SEQ ID NO: 213536 - DNA, 958 bp, Unknown
  Bacterial polypeptide expressing nucleotide sequence isolated from the Sargasso Sea
ttgaatggtctttatccaaccgcatctgttttagctgcaggcaatagaatcatggtaaaaccctcagaatttactcctaatacagcaagccttatcaaagaagcagtcggcaaatattttgatgaatcagaatttgctgtttttcttggtgggccagaagttggtgcagaatttacagctcttcctctagatcacctcttgtatacaggtagtggggcagtggctaggaaagttgttgcaaatgcagcaactaatcttgtgcctacaacattagaattaggtggtaaaagccccaccattatttcagctgacgctgatcttaaattagctgctaaaagaattatgtttgttaagactttaaatgcaggtcaaatatgtttgtcgcctgactacattatgattaaaaaggggcttgaagaaaaattagtatccgagcttcaacaagtttttaaatccttttatccggaaagcaatacaaaagattatacctcaatggtaaatgatcatcatcatcaaagaatgcaagagtacctccaagacgcaaaagagaaaggggcaaaaatccaaaatttaggcgagtttgattctaatgaaaataacattatgacgacaaaggtattgttaaatgtgaacgataatatgagggtaatgcaggaagaaatttttgggccattgttgcctgtaatggtttatgaagaattaagtgaagtagtcgattacattaataaacatgatcacccattaggactttatttctttggaaataataaatctgaacaaaactttataatcaataatacaagatctggaggagtgaccataaatgatgctatgtttcatttaatgcaatcaagattaccttttggaggtgttggtccgtctggatatggtcactaccacggtcacgaaggattcttaaatttttcaaacttaagagcaatttactatcaaacaaatc

SEQ ID NO: 213537 - DNA, 581 bp, Unknown
  Bacterial polypeptide expressing nucleotide sequence isolated from the Sargasso Sea
tatgacaactaattatccagatacccatctttttctcaatggagaatggagagaagccgtagcaaaagagagtcttgaaattataaatccagcaacagaagaagttattggtaaagtatcacacgctagaaaagaagatttagatattgctcttagtgctgctgaaaaagcctttgatagttggaaaaatgtttctgcttatgaaagatcaaaaatattgagaaaggctgctgacatagtccgcagtaaggcagatcatattgctacactaatgactatggagcaaggtaaacctgttattgaagcgaagatggaaacaatgggtgcagcagactcaattgactggtatgcagaagaaggaagaagagcttatggaagaataattccttcaagagctccagagggggtatatcaatttgtttttaaagaaccagttggtgtagttgccgcttttactccttggaattttcctttaaatcaagtcgttaaaaaggttgctgcagcgtttgcggctggttgtactgcgattgtaaaaggacccgaagaaacgcctggcagtgttgcagagttaatcaaggctt

SEQ ID NO: 213538 - DNA, 499 bp, Unknown
  Bacterial polypeptide expressing nucleotide sequence isolated from the Sargasso Sea
cggcgaccctaagaacgatagtacaaccattggccctttggtaagcgatgtacagttcaaaaaagttcaaaatttaattcagaaaggtattgatgaaggtgccgaactgttaatcggcggaacaggaaaaccagatggcttggaaaacggttattatgccaaaccaactgtatttgctgatgtaaaaaatgacatggcaatatcaagagaagaaattttcgggcctgttctatctatgcttacctacaaaaatattgatgatgctgtagcaattgcaaatgatactgaatatggccttgcagcttatgtatcaggcgaagacaaagaaacacttacgtcaattgctagacgtttgagggctggacaaattcatgtgaattatggatctggtggtgccgatgccccttttggaggctataagcagtcgggcaatgggcgggaaaaagcagaatggggcttagaagagtttcttgaagttaaagcaataatgggagcttaa

SEQ ID NO: 213539 - DNA, 922 bp, Unknown
  Bacterial polypeptide expressing nucleotide sequence isolated from the Sargasso Sea
gatattgaaaccatctgaaattgcaccactttcaggtatgctttttgcagaaataatcgaacaagcaggatttcctaatggagtttttaatttaattaatggtgatggtaatggagttggtactagcttatcttctcatcctgatattgatatgatttcatttacgggttcaacaagagcaggtaaacttatttctaaaaatgcatctgataatattaaaaaagtatgtcttgaattaggaggaaagggaggcaacataatttttagtgactctcaccctgacgcagtgagagagggagtgcgaaatgttatgagcaattctggtcagtcttgtgatgcacctacaagaatgttagttgaaaattcaatttatagaagagctatagaagaagctgcagatgaagcaaaaaaaataaaggttgatatagcttcaaaaaaaggtgaccacataggaccagttatttcaaaaaaacaatatgacaagataatagatcttataaatagtggcattaaagaaggagcaaaactaattgcaggaggaccagagaaacctcatggacttaaaaatggttattttataaagcctacaatttttactgaagtatcaaataatatgagaatagctaaagaagaaatttttggtcctgtattatcaataattcctttttcaaacgaagaggaggcaataacaatagttaatgatacctcttatggtttaggtaattacgtacaaaccctaaatctagaaaaagcaaaaagagttgcaagaaaattcagatcaggtggagtttatataaatggtaatagtgctgatccaggaacaccctttggaggttataggcaatctggtaatggaagagagggtggtatctggggtatggaggaatatttagaggtaaaaacaatttgcggatgggagtaa

SEQ ID NO: 213540 - DNA, 910 bp, Unknown
  Bacterial polypeptide expressing nucleotide sequence isolated from the Sargasso Sea
tatagcttgtggaaatacatttgttttaaaaccgtcagagaaggatccaagttgtccaatgagattagcagaattggcaattgaagcaggattaccaccaggagttttaaatgttgtaaatggtgataaagaagcagtggataccttacttgaaaacaaaactgttcaagcaattagttttgttggttctaccccaatagctgaatatgtttatcatactggcacaaaaaataataaaagagtgcaagcattaggtggtgcaaaaaatcatatggttataatgcctgatgctgatataaataaaactacagatgctattattggctcagctttcgggtcagcaggagaaagatgtatggccatttctgttgcagtttgcgttggaaagcaaactaaagaaaaaattaaaacaaagttattagaagaaacggctaaactaaatgttgggccttatacagatgaaaaaagtgactttggtcctttaaataataaagcacattttgaaaaagttttaggatatatagatactggagaaaaagagggtgcaaaattattgagtgatggaagaaattttaaaaaacaaggttatgaaaatggatattttgtcgggccaacaatttttgatgatgtaaaacctgaaatgaaaatttataaagaagaaatctttgggccagtgttaagtatgatgacaacagaaacatatgaagaagctcttaatttagttaatgaccatgaactaggaaacggagcagctgttttcactaaaagtggaaatattgctaaacactttactgaaaatgctaaaattggaatgataggagtaaatgtaccaattccagtcccagttgcttaccacagttttggtggttggaaacgatccttatttggagatcattcaatgcatggacct

SEQ ID NO: 213541 - DNA, 682 bp, Unknown
  Bacterial polypeptide expressing nucleotide sequence isolated from the Sargasso Sea
aatgacaataaaagtcggcattaacggtatgggaagaattggcagaatgattgtgaggtcaatttatgaaaattataaagataaaataataatcaaacatattaacaataaatcaagctctgaagtttgcgcaaatttattaaaatatgattcaattcatggtaattttagttatctagtaaaatctggaggaaattacataaaaataaataaagaaaaaatatcttacacccaacactctatgattaatgacataaagtggaaaaaatatggtgttgattatgtttttgagtgcactggtaagtttaattctaaagataaattacttccacatttagaaaatggggtaaaaaaagttattgtatcggccccatgtaaaatggctgataaaactatagtttttggcgtaaatcataagaagatcaaaaagaatgatagaattatttcggcagcttcatgcacaacaaattgtttagctcctgttgcagacgtaattaataaaaattttataatcattaatggttttatgacaaccatacatgcttttacaagtgatcaaagaatattagataattctcacaaagatccaagaagagctagatctgcaagtcaatcaattgtacccacgtctactggtgcatcaaaagctatcggagaaattataccccgcattgaaaagtaa

SEQ ID NO: 213542 - DNA, 411 bp, Unknown
  Bacterial polypeptide expressing nucleotide sequence isolated from the Sargasso Sea
acgaaggagcaaaattagttgctggtggaccaggaaaaccagacgggttgtctaatggttattatgtaaaaccaacagtgttcgctgatgttaataataatatggaaattgctagaacagaaatttttggtcctgttttatctgtcattccatttgaaagtgaagaggaagcaatagaaattgctaatgatacagactatggtttaaccaattatattcaaagccaagatcctgaaaaagttaaaagacttgcaagaaaacttagatctggaatggttgatgttaatggcgcaggaatagcagtagatgctcctttcggaggatttaaacattctggaattggaagagaagctggaaaagagggattacttgaatttttggaagttaaatcagttggtggttggaattagt

SEQ ID NO: 213543 - DNA, 927 bp, Unknown
  Bacterial polypeptide expressing nucleotide sequence isolated from the Sargasso Sea
cggagtttgtggtctaattaccccttggaactggccaatcaaccaaatagctcttaaggttgttcctgcttttgctactggatgtacaatgatacttaaaccatctgagatagcacctatttctggaatgctttttgcagaaatgattgatgaagttggtttcccaaatggagtttttaaccttgttaatggagatggtgcaggagttggaactcaaatatctagtcatccagatatagatatggtttcatttacaggatcaacacgtgctggacgactaatttcgaaaaatgcagccgaaacaataaaaagagtttgcttggaacttggtggcaaaggtggaaatatagtttttgcagatagttataaaaatgcagttagagatggaataagaaatgtaatgagtaattctggccagtcatgtgatgccccaacaagaatgttagttgaaaaatctatttataaaagagcagtggatgaggcagtagatgaagccaataaaataaaagtagatcaagcatcaaaaaaaggagatcatattggtccggttatttctaaaacacagtatgataaaattataaatttaattgaaagcggaatatcagaaggagcaacattatctgcgggtgggcccgagttgcctaatggattaaataaaggttattttattaagccaactattttcacaaacgttacaaatgaaatgagaattgccaaagaagaaatttttggaccagtgctttcaattataccttttgaaaatgaggatgaagcagttaatattgtaaatgatacatcgtatggtctaggaaattacttacaaactgaggacagaaaaaaagctcatagagttgcaaaaaaactaaggtcaggatgtgtttatatcaatggaaatgcagctgatgcaggtacaccattttggaggat

SEQ ID NO: 213544 - DNA, 604 bp, Unknown
  Bacterial polypeptide expressing nucleotide sequence isolated from the Sargasso Sea
tctgggacaatcttgcaatgctcccacaagaatgcttgttgaaaaatcaatttacaatgaaactgtggaaaaagtaaaaaaattggcaaatgacacaaaggtagattctccacaaaaggatggagatcatattggaccagtggtttctgaagtacaatttaataaaattcaaactttaattcaaaaaggaatagatgagggagcaaaattagttgcaggaggaacaggtaaacctaaaggtttagaaaaaggttattatgtaaaaccaacagtttttgctgatgttaataatcaaatggagatagcaagaactgaaatttttggacctgtgctatcaattattccttttgaaaatgaagaagaagcaatttcaatagcaaatgatactccatatggtttgacaaattacattcaaactcaagataaagaaaaagttcaaagagttgcaagaaaacttagatctggaatggtagatgttaatggagtgggtatagctgttgcttctccttttggtggatataaacattctggtattggacgagaagctggaactgaaggccttatagagtttttagaagttaagacagttggtggttggaattaa

SEQ ID NO: 213545 - DNA, 859 bp, Unknown
  Bacterial polypeptide expressing nucleotide sequence isolated from the Sargasso Sea
cattacaccatttaattttcctgctatggtaccaatgtggatgtttcctatggctattgcttgtggtaatacatttgttttaaaaccttctgaaaaggatccctcatgctcgataaaattagctgagcttttaaatgaagcaggtttacccgagggtgttttgaacgtgattaatggagacaaagaagctgttgacgctttaataaacaataaagacgttactgcgatgagttttgtaggctcaacaccaattgcgaaatacatttatgaaaattgtgctaaaaacgaaaaaagagttcaagcattaggaggtgcaaaaaatcattgtgtagtaatgccagattgtgatttagatcaggcagtaaatggtttgatgggagctgcattcggttctgcgggcgaaagatgtatggcacaatcagtagcagtagcagttggaagtatcggagacaggttagtgaattcattagcaaaaaaagttgaagctctcaaagttggacctggaatggacaaacaatctgaaatgggtcccttagttactaaagaacatttatctaaagtcaaaggttatgttgatataggtgaaaaggaaggggcaaaattaatagtagatggtagaaattttaagttacaaggatatgaaaatggttactatataggcggctgtttatttgatcatgtaacaaaagacatgaaaatatataaagaggaaatttttggaccagttttatcagttgttagagcaagagatttcaatgaagctttacaattggttaacaatcatgaatttggaaacggtgtaagtatttttacacgagatggagatacaggaagaactttttctaataaagcaaaaatc

SEQ ID NO: 213546 - DNA, 645 bp, Unknown
  Bacterial polypeptide expressing nucleotide sequence isolated from the Sargasso Sea
cagatgcagtagcaagaggtgtcaaaagatgttttagaaattctggtcaatcgtgcaatgcaccaacaagaatgttggtagaaaaatcaatttataacgaaactgtagataaggtaaaagaacttgcaaatagtactaaagttgatttaccagaaaaagatggagaacatattggaccagttgtttcagagactcaatttaataaaatacaaaatttaatccaaaaaggtattgatgagggtgctaagttaattgctggtggcacaggaaaacctaaaggttttgaaaaaggttattttgtaaaaccaacagtgtttgctgacgtaaataatcaaatggaaattgcaagaacagaaatttttggtccagtactatctattattccatttgaaaacgaggaagaagcgatttcaattgcaaatgacaccccatatggcttaaccaattatatacaaacacaagataaggaaaaagttaaaagagttgcaagaaagttaagatctggaatggttgatgtaaacggtgttggtatagcagtagcttccccttttggtggatacaagcattcaggtataggaagagaagcaggtatagagggtttaattgaattcttagaagtcaaaacagttggtggctggaattaat

SEQ ID NO: 213547 - DNA, 699 bp, Unknown
  Bacterial polypeptide expressing nucleotide sequence isolated from the Sargasso Sea
tatgtacgaaaagtttggtcagtttattgacggtaaatggcaacaatcttcaagcggagaaacttacgaagtaataaatccagctacagaagaaattataggtaaagcatctaaggctaatagtaaagacgttcaaagagccctgaagtcagctgaaaaaggtttagaaatttggaaaaatacttcaccttgggaaagatcaaaggtaataagaaaaatttcagaattaatgagaaaaaaagtggataccttatcaaaatggcttacactagaggtaggaaaaccctttactgagggtgctggagaagtaggtggagcagctgatatatttgaatggaactctgaagaaacaaaaagaatttttggtgaaataaaccaaagtcgttttccaaatacaaaaatacatgtgatttatcagcctgtaggggtggtggctgcattagttccatggaactttccagttattttagcatcaagaaaaatatcaactgctttagctgctggatgttcagttatagttaaacccgatgtgattactccgggaagtgtaatggagatagttgaaatatgtaaagaagctggtgtcccaccaggtgttgttaatttattatcaggagatccagcagcaatttcatctgaactaattcaatcagatataataaaaaaaatatctattaccggatcgactagagttggtaa

SEQ ID NO: 213548 - DNA, 373 bp, Unknown
  Bacterial polypeptide expressing nucleotide sequence isolated from the Sargasso Sea
acatccaaccttactgttttcgaggctaaaaataacatgcgaatctctcaagaggagattttcggacctgttgtatctgtaattaaatttaaagatgaagcagaggcattaaaaattgctaatgatactctttatggtttaggagcagctgtatggactagaaatggtaatatagctcacagaatgggaagagcgatacaggcgggaatagtatggactaattgttatcatgcttatccagctcactctccatttggtggatacaaacaatcaggagtaggaagagaaactcacaaaatgatgcttaatcactatagacagaataagaacttacatgtctcttatgctgagaaaaaattaggcttcttttaaa

SEQ ID NO: 213549 - DNA, 853 bp, Unknown
  Bacterial polypeptide expressing nucleotide sequence isolated from the Sargasso Sea
gtcggttacgtgcgagaagcgactcacagcgaagtggaacaggcattgcagaatgcggtaaataacgcgccgatatggttcgccacaccgccacaagagcgcgccgctattttgcatcgcgccgccgttctaatggaaggccagatgcagcaattgattggcattctggtgcgcgaagcaggtaaaaccttcagtaacgccattgcggaagtgcgcgaagcggtagatttcctgcactattatgccggtcaggtccgcgatgacttcgataatgaaacccatcgtccgttagggccagtagtctgtatcagcccctggaacttcccgctggctattttctcagggcagattgccgccgcgctggcggcgggcaacagcgtgctggcaaaacccgcggaacaaaccccgctgattgccgcccagggtattgccattttactcgaagcaggtgtaccgccaggcgtggtgcaactgttgcctggtcagggcgaaacggtcggggcgcagctcacttccgatgagcgcgtacgcggcgtcatgtttactggctcaacggaagttgccacgctgttgcaacgcaatatcgcgacccgcctggatgctcagggacgtccaatcccgcttatcgccgaaaccggcgggatgaacgccatgatcgtcgactcctccgcgctgacggaacaggtggtggtcgacgtcctggcttctgcctttgacagcgccgggcagcgctgctctgcgcttcgcgtcctgtgtctgcaggacgatgtagccgaccatacgctgaaaatgctgcgcggcgcgatggcggaatgccgcatgggtaacccgggccgcctgaccaccgatattg

SEQ ID NO: 213550 - DNA, 448 bp, Unknown
  Bacterial polypeptide expressing nucleotide sequence isolated from the Sargasso Sea
tgataaaattcaatctttaattcaagtcggaattgacgaaggtgcaaaactaatagctggaggacctggtaaaccagaaggtttaagtaaaggatattttgtaaaacctacagcttttgcagatgtaaataaccaaatgcaaattgcaagaacagaaatatttggaccagttttatcaattattccatttgaaactgaggaagaggcaattgaaattgcaaatgatactccttatggacttttaaattttattcaaactcaagatcaaaaaaaagcaaatagagtggctagaaaacttagatcaggaatggttgatattaatggtgctggtttagcaccagatgcaccttttggtggttacaaacattctggtattggtcgtgaagctggaaaattagggttagaagaatatcttgaagttaaagcagtcagtggttggaataattaa

SEQ ID NO: 213551 - DNA, 556 bp, Unknown
  Bacterial polypeptide expressing nucleotide sequence isolated from the Sargasso Sea
atttacgaaagagctgttaaagaagctgttgatgaagcaaacaaaattaaagtagatcaatcttccaaaaagggagatcatataggaccagtaatttctaaaattcaatatgataaaattataaatcttattgaaagtggaatttctgaaggcgcaactcttgcagcaggtggacctgagttaccaaacggtttgaacaaagggtacttcatcaaaccaactatatttacagatgtaactaatgaaatgagaattgctaaagaagaaatttttggacctgtgttatctataattccatttgaaactgaggatgatgcagtcaaaattgtaaacgatacttcttatggtcttggaaattatttacaaactgaagatagagaaaaagcacatagagttgcaaaaaaattaagatcaggctgtgtttatattaatggcaatggagctgatgctggaactccatttggtggttacaggcaatcgggtaatggtagagaaggaggtgtttgggggcttgaggaatatcttgaagtaaagaatgttactggttggagttaac

SEQ ID NO: 213552 - DNA, 709 bp, Unknown
  Bacterial polypeptide expressing nucleotide sequence isolated from the Sargasso Sea
ggtaaattaattttaaaaaatggagctgatacaatcaaaagagtttgcctggaattaggtggaaaaggtggaaatattgttttcgcagactcctaccctaacgctgtacgagatggtatcagaaacgtaatgagtaattcaggtcagtcatgtgatgcaccgacaagaatgctcgttgaaaaatcaatatatgagagagcagtcaaagaggctgttgaagaagcaaatttgataaaggtagaccatgcttcaaaaaaaggagatcatataggtcctgttgtctctaaaattcaatacaataaaataataagccttattcagagtggaattgacgaaggagcaactcttgcagcaggtggaccagaattacctaacggtatgaacaaaggctattttattaaaccaactatttttactgatgttacaaatgatatgcgtattgcaaaagaagaaatatttggtccggttttatctataataccctttgagacggaagaagaagcaattcaaattgtaaatgaaactgagtatggattaggtaactatttacaaactgaggataaagaaaaagcaaaaagagttgccaaaaaacttaaggctggaacaatttatgtaaatggaaacggtgcagaccctggtgctccatttggaggatatagacaatctggaaatggacgtgaaggtggtgtttggggattacatgaatttt

SEQ ID NO: 213553 - DNA, 424 bp, Unknown
  Bacterial polypeptide expressing nucleotide sequence isolated from the Sargasso Sea
ctttgtggaggtagtggttggaaaactaaacagtggtcttgaaaaaggtaattatattcaaccaactgtttttgaagcgaaaaatgacatgcgaatctcacaggaagaaatctttggacctgttgtgtctgtaattaaatttaaagatgaagcagacgctttaagaatcgcgaatgatactctttatggtttaggagcaggtgtttggactagaaatggtaacattgcttatagaatgggaagggcaatccaagcaggaatagtgtggactaattgttatcatgcttatccagctcactcaccatttggtggttataaacaatcaggtgttggaagagaaacacataaaatgatgcttaatcattatagacagaataagaaccttcatgtctcttatgctgaaaaaaaattaggcttcttttaa

SEQ ID NO: 213554 - DNA, 784 bp, Unknown
  Bacterial polypeptide expressing nucleotide sequence isolated from the Sargasso Sea
cctgatattgacatgatttcatttactggatcaacaagagctggaaagctaattacaaaaaatgctgccaatacaattaaaagagtttgtttagaactgggtggcaaaggtggaaatatagtttttgcagactcttatccaaatgctgtgagagatggtattagaaatgtaatgagtaattcaggacaatcttgcgatgcaccaacaagaatgcttgttgaaaaatctatttatcaaagagccattaaagaagctgcagatgaggcaaataaaattcaagttgatgttgcatcaaaaaaaggggatcatataggtccagtagtttcaaaagctcaatatgataaaataattaatttgattaatagtggaattgaagaaggagctactctagcggcaggaggacctgatctccccaatggattaaataaaggttattttataaaaccaactatatttacagatgttacaaataacatgcagatagcaaaaaaagaaatctttggcccggttctttctataatcccatttgaaagtgaggaagaagcaattaatgttactaatgatacagaatatggtcttggaaattatttacaaacagaagacaaagaaaaagcaaaaagagtttcaaaaaaactaagatcaggaattgtttatattaatggtaaatcaccagactctggaactccctttggaggatacaaacagtctggaaatggacgtgaaggtggttcttggggattggaagaatatctagaggtaaaaacaattactggctgggattaaa

SEQ ID NO: 213555 - DNA, 427 bp, Unknown
  Bacterial polypeptide expressing nucleotide sequence isolated from the Sargasso Sea
attaaaaaaggtatagatgaaggcgctaatttaatagctgggggacctggaaaacctgatggtttgaaagatggttattacgtaaagccaactgtttttgctgatgtaaataataatatggaaatcgccagaaccgagatttttggtccagtattatcagtaattccatttgaaaccgaagaagaggcaatagaaattgcaaatgatactccatatggtttgacaaattatattcaaactgaagatcaagaaaaagttaaaagagttgcaagaaagcttagatctgggatgatagttgctaatacagcttcactagctgtagatgctccatttggaggatttaaacactctggaataggaagagaaggtggaaaagaaggtttattagaatttttagaagtaaaatctattggtggttggaattaat

SEQ ID NO: 213556 - DNA, 790 bp, Unknown
  Bacterial polypeptide expressing nucleotide sequence isolated from the Sargasso Sea
tggggtgccatcaatcgatgggtgcagctttcccgtttttaatcctgccactgaagacgcatttgctacgatcatgctcggtggtgaaaaagatgcgcaagccgctatcgaagctgctaggggtgcttttccggactggtcgcaaacaagtcctcaagaccgcgcggcgtatttgcaaaagttgcttgatatctatgtttcccgaaatgatgaaatgggagccgtgatttcaaccgaaatgggtgcacccatcgatatggcggttcgcgatcaggctgggtctggcagtagtcatttaaaggcttttatccgggctttaggctcaatggaatttcagcgtgctcttcgtcctggcactgaaggtcaggacatcgcctatgaagcggctggtgttgcaggccttattaccccgtggaactggccgatgaatcaggttgttttgaaagttggtgcggcgttggcggcaggctgtacaatggtgctaaaaccatcggaaattgcaccgctatcaagtgttgtttttgccgaaatggtgcatgaggcgggtttgccacctggcgttttcaacatggttaatggtgatggcgtaggcgttggttcaattttatcgtcacatcccggcattgatgttgtttcattcactggatcaactcgcgctggtattcttattagcaaggcggccgcagatacggtgaaaactgtctcgctagaacttggtggtaaatcaccaaacttggtttttgatgattgtgatgtggaaaaagctgttcggttcggggctgcgttctgc

SEQ ID NO: 213557 - DNA, 769 bp, Unknown
  Bacterial polypeptide expressing nucleotide sequence isolated from the Sargasso Sea
atgtcaaccaattatccagatacccatctttttctaaatggagaatggagagaagcagcagcaaaagagagtcttgaaattatcaacccagcaactgaagaagttattgggaaagtttctcatgccagaaaagaagatttagatattgctttaaatgcagctgaaagtgcttttaatagttggaaacatgtttctgcatatgagagatcaaaaatacttcgtaaagcagctgatattgttcgaagtaaagctgatcaaattgctactttgatgactatggaacaaggcaaacctctaattgaagcaaagatggagacaatgggagcggctgattcaattgattggtatgctgaagaaggacgaagagcatatggtagaattattccttcaagagctcctcaaggtgtttatcaatttgtatttaaagagccagttggagtagtggcagccttcacaccctggaattttcctcttaatcaagtggttaaaaaagttgcggcagcttttgcagctggttgtacagctattgtaaaaggacctgaagaaacgccagctagtgtagcagaattaataaaagcttttgacgaggcaggaatgccaaaaggatctattaatttggtttatggtattccagctgaaatttcagaatatttaattgctcatccaattgtaagaaaagttactttcacaggatctacagctgttggaaagttattagcttcgcaagctggaacgcatatgaaaagagtaactatggagctaggaggtc

SEQ ID NO: 213558 - DNA, 832 bp, Unknown
  Bacterial polypeptide expressing nucleotide sequence isolated from the Sargasso Sea
atggataaaaaaatttttaaggttaaaggaacctatgtaaatggtaagtggcttaattcaaaagatagatacgatatttataacccatctaatggtgaaaaattatccgacgtacctatatcagataaaaaagaacttgaattagcagtagactctgcaaaaaaggctcagctaatctggtcaaaaacttctttgattgaaagagctaacgctttagaaaaattagcaaaaaaaatattagaaaaagaagaagagtttgctttaattgacacttacgattcaggtaatgctttaactgggatgagaaaagatgttaaagaaacagtaaataacataagatatttttgtggattagtaagagaagttaaaggcgaaactttttctatggaaaaaaaccacttaaactttacacgttatcagccttatggtgtagtacttaaaatcaatccttttaatcatccttttagattttgcgttgagaaaattgctgcccctttattaatgggaaattctctgataatcaaaaattctgaacaagcaccaatttcgtctttgagattctgtgaacttttagaagatatatttccaaaaggcttaataaatgttgtaacaggcggccctgataatggaaaatttttagttgaacatcctgatataaaaagaatagctgtaataggatcagttaatactggaatagctgttgcgaaatctgctgcccctcttctcaaaaatatatctctagagttaggtggtaaaaatccaattattgtttttgatgacgctgatccagattttgcagcaagtttagctataaaaggtatgaacctaagca

SEQ ID NO: 213559 - DNA, 766 bp, Unknown
  Bacterial polypeptide expressing nucleotide sequence isolated from the Sargasso Sea
atgttagataaaagaaagttttacattaatggtagctgggcaaaccctgttaaaccaaatgattatgaagttataaatccttcaacagaaaaagtctgcgcaacaataagtttgggaagttcagatgatactaattcagcagtaaactctgcaaaaaaggcttttaaatcatggaaagaaactaaaaaagaagaaagattaaaattgctcgaaaagttgctctctatttataaatcaaaatgggatgaaatgaccgatgcaataactaccgagttaggttgtccaaaagactggtgttcagctaatcaaactgcttcgggcgctggacatattgaagattttataaaaaggttaaaagaatttaattttgaaccaggttttgacaaaggttctgtaaatcatattatttatgaaccaattggagtttgtggattaattactccgtggaattggcctataaatcaaatagcattaaaagtagttccagctttagcaactggctgtacaatggtattaaaaccatcagaaattgctccattatctggaatgttgtttgcagaaatgattcatgatgcaggttttccagcgggagtttttaatttagtaaatggagatggtgttggagttggaacagatttatcaggtcacccagatgtagatatgatttcattcacaggctcaactcgggcaggaaagttaattactaaaaatgctgctgacacaataaaaagagtttgtttagaacttggtggcaaaggaggaaata

SEQ ID NO: 213560 - DNA, 817 bp, Unknown
  Bacterial polypeptide expressing nucleotide sequence isolated from the Sargasso Sea
agattttttaattattaacaataataaaatttcttatagtcaagaaagcgatttagaaaatataaattggaaaaaatttgatgttgattatgtttttgaatgtaccggaagatttaattcaaaagatcaattattatcccatattaaaaatggagcgaaaaaagttattgtttctgccccttgtaaaaatgctgacaaaactattgttttcggagtaaatgagacaatattagataaaacagataagattatatctgcagcgtcatgtactactaactgtttagctccagtagcttacattttaaataaaaattttgaaattgaaaaagggtttatgaccactattcatgcatttacaagtgaccaaagaattttagataattctcacaaagatcctagaagagcaagatccgcgagccaatcaatagtaccaacctcaacaggtgcatcaaaatctattggagagattattccagatcttaaggggaaattagagggaatagctatgagggttcctactcctaatgtatccttaattgaattagttttttgtacaaagaaagatttgagtattgaaaaaattaattctgcatttgaaaattttgttaaaattcagtcaaagaaaataattgaaataaattctgaaaaactagtatctattgactttaaccataactctgcttcttcaattatcgacactactctcacaaatgttgtaggtaaaaatatgggtaaaatatctgcctggtatgataatgaatggggattttcaaatagaatgtgtgatattgcagaatatcttcataaaatttcttaa

SEQ ID NO: 213561 - DNA, 691 bp, Unknown
  Bacterial polypeptide expressing nucleotide sequence isolated from the Sargasso Sea
tatgtacgaaaaatttggtcagtttattgacgggaaatggcaacaatcatctagcggtgaaacttacgaagtaattaatccagctactgaagaaattattggaaaggcatcaaaagcaaacagtaaagatatacaaagagctcttaaatcagcagaaaaaggattagagatctggaaaaatacatcaccttgggaaagatctaaagtaattagaagaatttcagaattgatgagaaaaaaagtagatactttatcaaaatggttaactttagaagtaggtaaacctcttactgaaggtccgggtgaagtgggcggcgcagctgacatttttgaatggaactcagaagaaacaaaaagaatttttggtgaaataaatcaaagtcgttttccaaatacaaaaatacatgtggtttaccagcctgtgggtgtggttgctgcattagtgccatggaatttcccagttattttagcatcaagaaagatttccactgctttagctgctggatgttcagttatagtaaaacctgatgtgattactccaggtagtgtaatggaaatagttgatatatgtaaagaggctggtgttccacctggtgttgtcaatttattatcaggagatccagcagcgatttcatcagaattaattcaatcagatataataaaaaaaatatctattactggatcaaccaga

SEQ ID NO: 213562 - DNA, 904 bp, Unknown
  Bacterial polypeptide expressing nucleotide sequence isolated from the Sargasso Sea
tgcaccattgtcgggaatgctttttgcagagatgatagatgaggctggatttccagctggagtatttaatttggtaaatggtgatgggcctggtgttggaactgacctgtcaggacatcctgacattgatatggtctcttttacaggatctacaagagctggaaaattaattacaaagaatgctgctgaaactataaaaagagtttgtctagagcttggtggtaaaggtggaaatattgtgtttgcagactcgtatcctgatgctgttagagacggcattagaaacgtaatgagtaattcaggtcaatcctgtgatgctccaactagaatgcttgttgaaaaatcgatttataaaagagctgttgacgaagctgcagatgaagcaaataaaattaaagttgatcttgcctcaaaaaacggtgatcatataggacctgtaatctcaaaaactcaatttgataaaattcaaagtttaataaatagcggaatagaagaaggtgctactttagtagctggtggtcctgataaacctgaagatttacagaaaggttattttattaaaccgacagtatttacagatgttaataataatatgagaattgcaaaagaggaaatatttggaccagtcctatcaattattccatttgaaaatgaagatgaggcagttcaaataactaatgatacagagtatggattgggtaattacttgcaaactgaagataaagagaaagcaagaagagtctcaaaaaaattaagatctggaattgtttatgttaatcataaaccagcagattctggaactccatttggaggttatagacaatcaggaaatggccgtgaaggtggtacttggggtttgcatgagtacctagaggttaaaaccgttactggctggacaggttaa

SEQ ID NO: 213563 - DNA, 511 bp, Unknown
  Bacterial polypeptide expressing nucleotide sequence isolated from the Sargasso Sea
tacaaaagtggatgcaccaaataaagatggagatcatattggacctgtagtttctgagactcagtttaataagattcaaactttaattcaaaaaggaatagatgagggtgcaaaattagttgcaggtggaactggtaagcccaaaggtttagaaagaggttattatgtaaagccaacggtatttgccgatgtaaacaaccaaatggagattgcaagaactgaaatatttggtcctgtactatctataatcccttttgaaaatgaagatgatgctatttcaatagccaacgatactccttatggattaacaaattatattcaaacacaagataaagagaaagtaaaaagagttgcaagaagacttagatctggaatggtagatgtaaacggtgtaggcatagctgtaggttctccgtttggaggatataaacactcaggaattggaagagaagccggtacagagggtttaattgagtttttagaagttaaaacagtaggtggttggaattaa

SEQ ID NO: 213564 - DNA, 802 bp, Unknown
  Bacterial polypeptide expressing nucleotide sequence isolated from the Sargasso Sea
cacgccatttaacttcccggcgatggtgccgatgtggatgttccccatcgccattgccgccggtaatactttcattctcaagcccagcccgctggaccctagcgcctcgctgatgatcgcggatctgctaacgcaggcaggtctacccgatggcgtgttcaacgtggtgcagggcgataaagactccgtcgaagcactgattgaccaccctcacgttaaagcgctgtcgtttgtcggctccacgcccattgccaacctgatctacgagcgtggcgccaagcacggtaagcgcgtacaggcactgggtggggcgaaaaaccatatggtggtgatgccagacgcccatctggataaagcggtggatgcgctgattggtgcggcctacggtagtgccggcgagcgctgcatggcgattagcgtggccgtgctggtaggcgatgtggccgataaagtggtgccgatgctcaccgagcgtgccaaggcgctgaaagtgaaagatggcatgcagctagatgcggagatggggcccatcgtgacccgccaggcacaccagcggattaccggctacatcgaaaagggcgtggcagaaggcgcgcagctgattgtcgatgggcgcgagtttgatagcacccaagcgggcaagggctgtgctgacggtttctggatgggcggcacgctgttcgaccacgtcacgccagagatgactatctataaagaggagatatttggccctgtgctggtgtgcgtgcgcgtaccggatgtggcgaccgccatccaactgatcaacgaccatgagtttggt

SEQ ID NO: 213565 - DNA, 821 bp, Unknown
  Bacterial polypeptide expressing nucleotide sequence isolated from the Sargasso Sea
gcaactccacaagatgttgatgaagcacttaaatctgctgagaagggattagaagtttggaaaaaaactgctccatggcaaaggtcttatattatcaggcgtattgcagataaaatgagggaaaagcaagatatacttgccaagtggatgacactagaagttggaaagccgtttgttgaagctaaaggagaagttaatggagctgcagatatttttgagtggaatgcagaagagacaaaaagaatttatggtcaaaccgtagaaagtagatttgaagatactagagttcacgtttattatcaaccagtgggagtagttgctgctttatcaccatggaattttccagcagttctatcagcacgaaaaatctcaacagctttagctgcaggatgttctgttattataaagccagatgtaatcactccaggtgtagtaatggagatggttgatatttgtaatgaatgtggagttccacctggtgtagttaatctcttgtcaggtgatcctcctagtattgctcagcaattaatatcatctgatattgtaaaaaagatttcaataacaggatcctctagggtaggtaaattaattttaaaacaagcagctgacaaagttcaaagagtaacaatggaactaagtggacattcaccctttatcgtttttgatgatgcagatattaaaaaagctgcagacatggcaattgctgcaaaatttagaaacaatggtcaagtatgtatatcccctaatagattttatattcatgaaaaaaagaaggatgaatttattaacttatttgtagaaaaaacaaaaaaattaaaaat

SEQ ID NO: 213566 - DNA, 634 bp, Unknown
  Bacterial polypeptide expressing nucleotide sequence isolated from the Sargasso Sea
gattcacaaaatgtttttaacagcagtaaaacttgctccagctttagctatgggtaattcaattattattaaagcatcagaagtggctcctactccacttcttgaatttgcaaaattaatagataaagtaaaacttccaaggggtgtggttaatattattactggatttcctgaaaattgtagcaaagtactaacatctcatcctaaaattgatcgcatagcttttacaggcggggtacaaactgcaaaacaaattgtaaaaaactctgcagaaaatttgtctcatgtaactttggaattaggtggaaaaagtccagtagttatttttaaagatgcaagaaaagataatgctattaatggagtaatggcaagtatttttggagccagtggtcagagttgtattgctggttcaagattatatttacaagaagaaatctatgatgaatatctagaagaaattaaaaataaagctcttcaaataaaaattggtgaaccgatggaaccaagtactcaattgggtcctttagctaccttacaacaactaacaaatatagaaaaaaagataagtgaaactctcaatcaaggaggaaagataattatgggtggtagtaaacctacaaatataagcaagggt

SEQ ID NO: 213567 - DNA, 785 bp, Unknown
  Bacterial polypeptide expressing nucleotide sequence isolated from the Sargasso Sea
acttgatcaaaggaaaaaaattcttgaagaagtacttgagggcatggaagaaagacgtgaagattttgcgcaaattatttctgaggagatgggttcgccaattacgatggcacgtcgagctcaatatggcagcggcacaatacattttaaaaatacacttagtatcattgatagattcgatttccaagaagttcatggcaacatcacaataaataaattaccaataggtccagtaggaatgataactccttggaattggcctctaaatcaaatgtgcaccaaagttgcttcagcgatagctgcagggactacatttgttataaaacctagtgaaattactccaggagctgcacatattcttgccgaagttatcgataaaacaagcatgcctaagggtatgtttaatttgatccatggtcatggcatcactgtaggtaaagctatgagcagtcatccagatttagaaatgatttctttcactggttctactagagccggaatagatatccaaaaaaatgcggcagataatatcaaaagagtctcattagaattagggggtaaatctccaaatataattcttgaagatgtagatttagaaaatgctgtaactatgggcatgaagcaatgttttctcaatacaggtcaatcatgttcatctccaactcgaatgttattgcctgaacatatgcttgatgaggcaactaaatatgcaattgcagcagcaaatgatatgtctacaggagaccctttagatgaagagatttacttgggcccaaatatctaat

SEQ ID NO: 213568 - DNA, 856 bp, Unknown
  Bacterial polypeptide expressing nucleotide sequence isolated from the Sargasso Sea
tatgaattctactgaaaaatttcgaaactatattaatggccaatggaaaaattccatttcaggtaaagaatatgaagtttttaatcctgcagataaaaatcaattattagggagtatccctttttgctctaaaaaagatgctgatttagcgattgatgctgcatcatcttctttacacgaatggtctaatattactgctccagaaagaggagaaattctttttgaagtgttaagaataatggactctagaaaattggatttagcagaaacaattactttagaagaaggaaaagttttatctgattcagaagcagaagttaaaagatcaatgaatattattcaatttagtgcaggagaagggagaagattacttggaaatactagtcagtcagagaatgaaaataatgtttcctatactatgcgtaaacctcttggtgttgtaggaattattaccccttggaatttcccattagctattcctgcatggaaaatagctcctgctcttatatgtggaaatacagtaatatttaagccagctttttctactcctctatcagcaataaaattagtagaaatatttgaagaggctggtttacctcctggagttataaatttagtaacgggtagtgggtcagagataggtcaatctttagttgaagataatagggttcaaggaatttcattcactggttctactgaaattggaactaagatatattctgatggagcttcaaagttaaaaaaaatacaatgtgaaatgggtggaaaaaatgctgtgattgtccttaaagatgcagatattgaaaaagctgccaaagatgttgttataggagcatttggatcaacgggcaaagat

SEQ ID NO: 213569 - DNA, 685 bp, Unknown
  Bacterial polypeptide expressing nucleotide sequence isolated from the Sargasso Sea
catgcaaacatatcaacattacataaacggacaattcatcgatccaaaagctggtgtttggtttgacactgaaaatccctataccggcgaagtttgggcaaaaattccgcgtggtgatgcaggtgatgtagaccatgcggtggccgcggcaaaagccgcattcgatggggtgtgggggcaaactggcccaactcagcgcggaaaattgctggtcaagctggccgaaattatcgaacgcgaagcggtgcggttgggcgagatcgaagtacgcgataacggcaagcttatcgctgaaatgggcgcgcaaacaaaatatcttgctgaatggtatcgctattatggtgggttggctgacaaggttgagggcgcggtgatcccatcagacaagccgggtatattcaattttacacgatacgaaccccttggcgttattggcatgattaccgcatggaattcgccgctcttgctattggcatggaaattggcgccagcgttagcggcaggtaacacggccgttattaagccatctgaatacacatcggcctcgacactggaatttatgaaattggttggagaggccggtttccctgctggcgttgtgaacacggttaccggttttggtttggatgttggtgccccccttgtcgatcatcgccacgttgataagattgcctttactgggtct

SEQ ID NO: 213570 - DNA, 556 bp, Unknown
  Bacterial polypeptide expressing nucleotide sequence isolated from the Sargasso Sea
atgagttcaggtaacaaatacaaagtaatagctagtaaaattaaatttgaagggagagcatttattaatggcaaatatgtaaatgcaattgatggtaaaaaatttgaaacaattaatcccgcaactggtaaaaaactttgcgctgttgcaaaatgtaatcacaaagatgttaacttagcagtcaaagtttcaagaaaagcttttaacagtggagtttggtctaaaagctcacctgaacatagaaaagaagttttattaaaatttgctgaattacttagaaaacacggtgatgaaaattctgttttagaaagtattgatacaggtaaacttatcacggattgtattaatgaagttgcaaatgatgcgccaatgcactttcagtggtatggagaattaattgataaggtatttggaaaagttggtccaacagaaccctctattactagtttaattgttaaagaaccaattggggttgttgctggaattgttccttggaactttcctttaatgatggcggtatggaaaatggcaccagctcttgcagctggttgttcgg

SEQ ID NO: 213571 - DNA, 873 bp, Unknown
  Bacterial polypeptide expressing nucleotide sequence isolated from the Sargasso Sea
ctgataagatacaccggaattaccattccttaccagaatgactttatggtatacgcattgcgagagagactggggataacggcacatataataccgtggaactatccaatgcaaataattggtcgctcaatttgtgcatcacttgcgatgggaaatgcatgtatattaaaaccttccgaagaagcttgtctaactgcgcttgcctttggcgaaattgctcgggaagcgggactttccaatggggcattgaacatattgcctggtctcggttcagaagttggaaaggcaatcgcaaaacataaaaaagtgaatcatatctcgtttacgggttcccttagaacgggtcagaaagtacaaaaatttgcctcaaaaaacgtgactccaacgactttagagcttggtggaaaatctcctcaaattgttttttcagactcaaacttggatcgagcaataacatatctagtaaatgctggaatacaaaattcaggtcaaacttgttcagcatcgagtcgtattttagttgagaaatcaatttttaaaaaggtattgaagcgaatgtcagaccgttatgaacaactaaaggttgggtctgcatcagaagaccttgatttaggaccagtaatttcaaaaaaacagatggacattatatcagagtacgaagcacaagcagaaaacttaaaacttttggctaaaggaaagttagtaaaggatacaaacccagatggcttttacaaaacgccaaagctattcacgactgaagatttcaaacatgttttagctcaggaagaaatatttgggccaatacaggtaattattccatttaacgatgaggacgaggctatagaaattgcaaactcaacggattatggtctg

SEQ ID NO: 213572 - DNA, 837 bp, Unknown
  Bacterial polypeptide expressing nucleotide sequence isolated from the Sargasso Sea
tattggtgtatgtggtttaatcacaccttggaattggccaattaatcaaattactttaaaagtaattccagctcttgcaactggttgcacaatgatcttaaaaccttcagaaattacacctttatctggaatgttatttgcagagataattgatgaggctggattccctcccggagtatttaatttaatcaatggtgatggatcagatgtaggaacttatttatcttcgcatattgatatcgacatgatttcctttactggatcaacaagagctggcaaactcatttctaaaaatgcagcagattcaattaaaagagtttgtttagaattaggaggtaaaggtggaaatataatctttgctgactcacactccgaagctgttagagaaggtgttagaaatataatgagtaattctggacaatcttgtgatgctccaacaagaatgcttgttgaaagatcgatatataaaagagcaattgaagaggctacagatgaagcaaataaaattaaagttgatatagcatcaaaaaaaggatctcacattggaccagtaatttcaaaaaaacaatatgaaaaaataattgatcttataaatagtggtattgaagaaggtgcaacacttgtagctggcggacctgacagaccaagtgagcttcataaaggttattttattaaaccaactatatttacaaatgtttctaataatatgagaattgcaaaagaagaaatttttggtccagtattatctattataccatttgaaaatgaagaagaagcaatttcaattgttaatgaaacatcctatggtttaggcaattatgttcaaactcaagataa

SEQ ID NO: 213573 - DNA, 772 bp, Unknown
  Bacterial polypeptide expressing nucleotide sequence isolated from the Sargasso Sea
atgaaaaaaaatcttaaagataagtttgacccattcgaatcaaaccaactttttagttactcaacgtatttaaataattttattactttatataaaaaaggtaatcttcctaaagttttaatgctttcaggtgagaagggtttgggtaaattcacattggcatttcatttatttcattttataaacacagagagggataaagaatatagatataatttagacaaacaaatttttattaataatgtttctttcatttcaagtttaaagtcaaatacttgcgagaatttttactatttaggtaataaccatgaagtttctgtttcaataaacgacgttcgtgaaatcaaaaaaaaattaacaaatagaccactaaatggttttccaagaataattgtttttgatgatgctgatcttttcaataaaaattctgcaaactcattgcttaaaattattgaagaacccactgaatttaattattttatcctaattaataatcaaagaaattatattttagatacattaaaatcaagatcaatagagtttaaaatctttttaaaaaagaatgaaaaaaaaattattttatctaatttactcaaaaaaaataatataaacttatcacttgatgaaaatataatttataatctaacaccaggtattttattaagaattcatgacactttgattgattataagattgatctttcaaatgattatctttcaaatattgaaatcttacttgatgtatataaaaaaaataaacaatatattttta

SEQ ID NO: 213574 - DNA, 844 bp, Unknown
  Bacterial polypeptide expressing nucleotide sequence isolated from the Sargasso Sea
aatgtctaatttaaaaaagtataagatgtttattaatggtgagtgggttgaatctgaaagtaaaaaaacatttaagtcactaaatccagaaaacaatgaaccttgggtggaagttcctgaagctaatgaaaaagatgtcgacaaagctgttaaagcggctcaaaaagcttttgaaggtaaatggccaaaactatttccaagagaaagagcaaaatatttaaaagcaatagcagaacaacttagagcaaatgccgaactacttggaaaaatagaaacaatagatactgggaaactatttaaagaaacgaaaactcaagcaaactatattgctgaatactatgattactacgcaggtcttgctgataaagttgaaggaacagttctaccaatcgataaagctaatatgcaagtcataactactagagtgcctattggagttgtggctgcaataataccttggaattcacaaatgttattaacagctgtaaagttagctcctgcacttgctatgggaaatactatagtaattaaatcttctgaattggctcctgcaacactatttgaatttgcaaaattgattgaaaaaacaggtatacctaaaggagtggtgaacattgtttctggatttggaaatccatgtggaaaagcattaacttcacataacttggtagaaagagttgctttcactggtggtcctgagactgctagaaatattataaaaaattctgcagaaaatttatcacaagtaagtttggagttaggaggcaaaagtcccgtttgctgttttgaagacgcagatcaagaaaaatgcttaatggaataccgcaggaatttttggtgctag

SEQ ID NO: 213575 - DNA, 854 bp, Unknown
  Bacterial polypeptide expressing nucleotide sequence isolated from the Sargasso Sea
taatagtcatgaagtagcggatgcattaacttcttcaatatttccacaagttataactctgattggatccactcaaacgggtcagcatattatgcgtactggtgcatcatctatcaaacgctattctatggaattgggaggaaatgcacctgttttggtatttgatgacgctgacttagatctagcagctgatatagtaacaggtgttaaattctcaaatgctggtcaaatttgtgtagctccaaatagggtatttgttgcagagaatgtaaaagaaaaatttaccgaaaaggttgtttctcgtgctaaggccgctttagttggttttaataagaataaagatataacgactggcccagtaattgataaaagagcatttcaaaaaattaagggattgattaaagatgcagttatgaatggtgccaaacttttagttggggggaatcgccccaaatatttaaaaaaaggatattatatatcacctacagttctctgtgatgtaacagaagaaatgcaagtataccaacaagaaatatttggtcctattgtaagtttaatatctttttcagaagaaactaatctcttaaatatggctaatgattgtgatgaaggcggactaactgcttatatttttactaccaatcaaacacgtgctgaattttatgcatctaaattaagatatggggaaattcaaataaatggtgttaaatatgatattgatttaccacatggtggaattggtcagtcaggaataggtcatgattgttcttcactagctttacaagattatcttatacaaaagcgtattacttgttctaataatacttatgaattaggaaaggcaatatcatgaa

SEQ ID NO: 213576 - DNA, 616 bp, Unknown
  Bacterial polypeptide expressing nucleotide sequence isolated from the Sargasso Sea
actgaggaagcttttgcaataatatctttgggctctgcagaagatgctgataaaagcaataaatgctgccaagaatcgcatttgagacttggagagaaaactacaaaggaagaaagattagctttacttgagaagtttgatgaaatttataatagaagatgggatgaaatggttgaggcacaatctaaagaaatgggcgccccattagattttgcttccgaaacacacactaaaatgggtgctgatatttgtagaaataacattgaaattttaaaagattttaattttgaacatcaatttgatcctaaatctaataatcatataagatatgaaccaattggagtttgtggattaattacgccatggaattttcctatgaatcaaatcgtattaaaggttattcctgctttagctgctggttgtacaatgatattaaaaccatccgaaattgctccagtgtcagcagtattgtttgcagaaatgattgatgaagctggttttcctgcaggagtttttaatttagttaatggaaatggagaagttgttggaaatcatatttctggtcatcctgatattgatatggtttcattcacaggatcaacaagagctggaaaat

SEQ ID NO: 213577 - DNA, 703 bp, Unknown
  Bacterial polypeptide expressing nucleotide sequence isolated from the Sargasso Sea
gatgtcatgggaaaaagatgatgacttttttgataaatgtattgaaggttttgttatgttcaatcttaaccaaggtgaagtttgtacttgtccaagcagagctttaattcaagagtcaatctatgataaattcatggagagagctattgcaagaactaaagctgtaaaacaagacaatcctttaaaaatggaaacaatgattggagcccaagcgtctgtagagcagatggaaaagattaaatcttatcttgaactcggtaaaaaagagggtgctaaagttctaaccggaggaagtgttgctaaacttaatagtggattggaaaaaggaaactatattcaaccgactatttttgaagctaaaaatgacatgcgaatctctcaagaagagatcttcggacctgttgtatctgtaataaaatttaaagatgaggcagaagcattaaaaattgctaatgatactctttatggtttaggagcagcagtatggactagagacggtaataaagctcacagaatgggcagaggaatacaagccggaatagtgtggacaaattgttatcacgcttatccagctcactcaccatttggaggctataaacagtctggagtgggaagagaaactcacaaaatgatgcttaatcattatagacaaaataagaacttacacgtttcttacgctgagaagaaattgggattcttttaa

SEQ ID NO: 213578 - DNA, 982 bp, Unknown
  Bacterial polypeptide expressing nucleotide sequence isolated from the Sargasso Sea
tttataagatatttgaaaaattttgattttgaaaaaccattaggagaacatgctcctaatcaaagacttatttatgaacctaaaggtgtatgtgcattaatcacaccatggaattggccaatgaaccaggtttgtttaaaggtgatgcctgcaattgcatctggctgcactatggtcttaaaaccatctgaactagctccgttatcgtcaatgatattagctgagctaattgatgagactaagatcccagcaggtgtgtttaatttagttaatggtgatggagcaacaactggagatgcattaacaagtcatcctgacgtaaatatgatttcatttaccggatcaactagagcaggagcattaatttcccaaaatgctgcgaaagattttaaaagagttagtttagaacttggcggcaaaggtgcaaatataatatttaaagatgctgatccagatgcaatagaaagaggtgctttgagatgttttagaaactcaggccagtcatgtaatgcacccactagaatgctagtcgaaaaatcaatgtataatgatgctgtggaaagattaaagaagtatacagaaaattttgaggttggtgatccaaaaaaagagggagagcatataggcccagttatttctgaaactcaatacaacaagatacaaactttaattaagaaggggattgatgagggagctaaattagtagctggaggcctaggcaaaccggatggattagaaaaaggttattttgtgaagcctactgtatttgctgatgttaataacaaaatggaaatagcaagaacagaaatatttggaccagttttatctgtgatgccttttgaaacagaggaagaagctattgaaattgcaaacgatactccctacggattaacaaactatattcaaactacagataaagaaaaagtaaagagagttgctagaaaacttagatcggggatggttgatgttaatggtgctggta

SEQ ID NO: 213579 - DNA, 562 bp, Unknown
  Bacterial polypeptide expressing nucleotide sequence isolated from the Sargasso Sea
tatgaagacctataaccattacatcaacgacgaatgggttgaaccctcatcaggtgcttatctcgacagtgaaaaccccttcacaggcgaaaactgggcacgtattgcgagagggaattcggaggatgctgatttggcggtcaaggcggctaaacaggcctttgaaaacagcgaatgggccgaaatgagacccacccaacgcggtaagcttttggtcggacttgctgaaatcattgagcgggaagctgttcgcctgggagaaatcgaagttcgcgacaatggaaaactgattgcggaaatgggggcccagacaaagtatcttgcggagtggtatcgttattatggagggttggcagacaaaatcgaaggtgcggtcattccgtcggataaacccggaattttcaatttcacacgatacgaaccgctcggggtggtcggtatgatcaccgcctggaattctccgttgcttcttcttgcatggaaactggctcctgctctggcggcaggaaacactgctgtggtcaaaccctctgaattcacttcagcatcttccctggagttc

SEQ ID NO: 213580 - DNA, 733 bp, Unknown
  Bacterial polypeptide expressing nucleotide sequence isolated from the Sargasso Sea
atgacaattaaaattggaattaatggaatgggacggattggtcgtatggttgttagatcgattatcgaaagtaaaaataaaaatttaaaaattaatcatataaacaacaggtcaaattcagaaactacatctaaattaatcaaatatgattctatacatggaaaattaaatgctgatttagaatatgatccaaatcatttaataattaataaaaataaaattacattttctcaagaaacaaaaattgaagacataaattggaaaaaacatgatgttgattatgttttcgaatgcactggaaaatttaattcgaaagaaaaacttctttctcatatagaaaatggtgcaaaaaaggtgatcgtttctgctccatgtaaaaatgctgataaaacaatagtatttggtgttaatgaaaatataattactaaagaggataaaataatatctgcagcttcatgcacaaccaattgtctagcaccagtaataagtgttcttgatcaaaattttgaaattgaaaaaggttttatgactacaattcatgcatttactagcgatcagagaattttagataactctcacaaagatcccagaagagcaagatctgcaagtcaatcaatcgttcctacctcaacaggagcttcgaaagcaataggagaaataataccaaacctaaaagggaaactagaaggtgttgcgatgagggtgcccactcctaatgtttctcttgttgaat

SEQ ID NO: 213581 - DNA, 895 bp, Unknown
  Bacterial polypeptide expressing nucleotide sequence isolated from the Sargasso Sea
gttatggaaaatgggagatttagttgttgaaaatgccgctgaactgtctgcggtggaaactcaggacaatggtaaacgcactgcggatattctacctggtctccagagctggttggcggaaagcttttggtattatgcaggtttggctgacaagatatacggagatgttattcccgcaaatataaccggaatcctgaattatacccgtcttgaaccttatggagttgttgcttcgattacagcatggaattcaccattacttatcgctatctggaagattgctcctgcacttgctgcaggtaatacaatggtaatcaagccatctgaacatgcttctgcctcaacactggctttgatgaaaattctcagtgaactagtaccccctggggtgttgaatgttgttactggatttggccaagaagttggggaaccattggtggatcattctgaagtgagaatggtaagtttcactggttccatttcaggaggaagacgagttgcagaagttgcagctaggcagatcaaaccagtagtaatggaactaggggggaaatctccacagatcgtattccaagatttaaaactggatgatgcagcacatggagtggcactgggacttttccctccagccggacaaagttgtgtagcgggttcaagattgctggtacagaggggaattcaagatgaacttgttcagaaaatatgtgatgttgcatcgcaggctaggttgggtcctccacttgaaccagagacacaaattgggccaatggcaaatgaacaacattttgaacgggtgattggctatattgatcaagcaagaaatgaaggtgcggaatgtgtattgggtggtaaggctgctaaacctgaaggaacgtcaggatggtttatagaaccc

SEQ ID NO: 213582 - DNA, 364 bp, Unknown
  Bacterial polypeptide expressing nucleotide sequence isolated from the Sargasso Sea
gatgggcttgagtctggtatttttcgtaaagccgacagtcttcgcagacgttactcgagatatgacaatattcagagaggagattttcggtcctgttctgtgcatcacctcttactcctccgaggaggaggcggtagagttggctaacgactctgaatatggactatctggaggagtctggtcagatgatgaggagagggccatgagagtggccaagatgttgaggactgggcaggttagcatcaatggcggcgcgttcaatgtcacagcccctttcggaggatacaagcaatcgggattgggaagagagttgggggtccacggaatggaggagttcctcgagatcaaatcaattcagcgctag

SEQ ID NO: 213583 - DNA, 640 bp, Unknown
  Bacterial polypeptide expressing nucleotide sequence isolated from the Sargasso Sea
gcagtaaaagatggtgtaagaaatataatgagtaattcaggtcaatcctgcgatgctcctacaagaatgttagttgaaaaacctatttatgaaagagctgtaaaagatgcagttgatgaagctaataatataaaagtagacttggcttctaagaagggtaatcacataggacctgtagtctcaaaggttcaatatgataaagttgttaatcttatagaatctggaataaaagaaggcgcaactttagcagcaggaggaccagatttgcccaatggtttagataagggttattttattaaaccaacaatcttcacagatgttaataatgatatgagaattgcaagagaagaaatttttgggccagtgctctctattataccatttgaaacagaagaagaagctgtttcgatagtaaatgacacatcttacggacttggaaattatttgcaaactgaggatagagaaaaagctcaaagagttgcaagaaaattaagagctggaacagtttatattaatggccatggaacagaaactggagcgccctttggaggttacaaacaatctggcaatggtcgtgagggtggaacttggggattagaagaatatttagaagtaaaagcaataacaggatggaaataac

SEQ ID NO: 213584 - DNA, 922 bp, Unknown
  Bacterial polypeptide expressing nucleotide sequence isolated from the Sargasso Sea
gctgaagctaaaggtgaaattctaatgggtgtaacttacattgatttttatgctgaagaaggaaaaagagtttatggagatattattccagacccaatgcctgatagaagaattgtagttataaaacaacctgtaggggtggtgggagcaattactccctggaattttccaagtactatgattacaagaaaatgtgctcctgcacttgcagtaggatgtacagttgtaattaaaccagctagtcaaactccttattcagctctggctcttggagtcttagcaaaagaagctggatttccagatggagttattaatattattactggatctgcaagtgaaattggtaaagaattaacagaaaattctttggttaaaaaaatatcttttactggatctactgaagttggaaaaattcttttgaaacaaagtgcttctaccgtcaaaaaagtatcaatggaattaggagggcatgcaccatttatcgtattcgatgatgctaatattgatgaagctgttgttggtgctatgcaaagcaaatttagaaattcaggtcaaacttgtatatgtgcgaacagaatatttgttcatgaaaaggtttatgatgatttcttgaataaatttatacaagaagtaaaaaaaataaaagttggaaatggattagaggaaggaatagtttcaggccctctaattgatcaaccttctttaatgaaagttcatgatcaagtgaaagatgctgtaaatcaaggagctaaaattgcagttggtggagatattcatgaattaggaggaaattttttccaaccaactattctatctgatgttacttctaaagctaaaattacctatgaagaaacttttggtcctattgcacctttgtataagtttagctcagatgaagaagtaataaaactcgcaaatgata

SEQ ID NO: 213585 - DNA, 445 bp, Unknown
  Bacterial polypeptide expressing nucleotide sequence isolated from the Sargasso Sea
ttatcgcaggtctcgctggagctcggcggcaacgcgccgttcatcgtcttcgacgacgccgacctcgacgccgccgtcgccggcgcgctcgcgtccaagttccgtaacgccgggcagacgtgcgtgtgcgccaaccggatcctcgtgcagcgcggcgtgtacgacgcgttcgcggcgcgcctcgccgccgccgtgggcgcgctcgtggcgggcgtgggcacgcagcccggcgtgcagatcgggccgctcatcgacgggcgcgccgtggacaagaccgcgcggcacgtcgacgacgcgctgtccaagggcgcgacgtgcctcgtgggcggcgcgcgcatgcccgcgctcgggcccaacttttacgcgccgacggtgctggccggcgcgacgcgggacatggccgtcttcgacgaggagaccttcggaccgctcgcgccgctcttcg

SEQ ID NO: 213586 - DNA, 325 bp, Unknown
  Bacterial polypeptide expressing nucleotide sequence isolated from the Sargasso Sea
gtaactaataatatgagagtagctaaagaagaaatatttggccctgttctttcaattattccatttgaaactgaagaagaagctatcaaaattgtaaatgaaacagaatatggtcttggaaattatttacaaactgaagacaaagaaaaagctaaaagagtgtctagaaaacttaaagcaggaacaatttatgtaaatggaaatggtgcagatccaggtgctccattcggtggttataaacaatcagggaatggacgtgaaggtggggtgtggggattgcatgagttcttagaagtaaaaacaattacacactggccaaaataat

SEQ ID NO: 213587 - DNA, 880 bp, Unknown
  Bacterial polypeptide expressing nucleotide sequence isolated from the Sargasso Sea
ataaaatatttaagaaagtttgaatttgagaaaccatggggggaacatgctcctaatcaaagattaatttatgaacccaaaggagtgtgtgctttgattactccatggaactggccaatgaaccaagtttgtctaaaggtaatgccagcattagcagctggttgcacaatggttttaaaaccatctgaacttgcccctttatcatcaatgattttagcagagcttatagatgaaaccaaatttccttcgggagtatttaatttaataaatggagatggagctacaactggagatgctttaactagtcaccccgatataaatatgatttcttttactggctcaacaagagcaggagctttaatttcacaaaacgctgcaaaagattttaaaagagtaagtttagaattaggtggtaaaggtgcaaatataatttttaaagatgctgatccagaagctattgagagaggagcattaagatgctttagaaattcaggacaatcatgtaatgctccaacaagaatgctcgttgaaaaatcgatttataaagaggcaattgaaagattaaaaaaatatacagaaaattttgaggtaggcgatcctaaaaaagaaggtgagcatataggaccagtaatttctgaaactcaatacaataagatacaaaccttaatcaaaaaaggtttagatgagggtgcaaaattaattgcaggaggtcctggaaaacctaaaggatttgaaaagggatattttgtaaagcccactgtgttcgcagatgttaaaaacagtatggatattgcaagaactgaaatttttggaccggttttatcagttataccatttgaaaatgaagatgaagcgattataattgcaaatgatactccct

SEQ ID NO: 213588 - DNA, 808 bp, Unknown
  Bacterial polypeptide expressing nucleotide sequence isolated from the Sargasso Sea
cgaaaccgcaggacaagcgatcggaatgcataatgacattgatacggtatcttttactggatcaactgaggttggtcggatgttcatgcgctattcgggcgaaagtaatcttaaaagtgttggccttgaaatgggcgggaaaagccccttcatcgttcttgatgatgcggtgattaatgatgatcttatagagcatgcggcgatggcggcgttctggaatgggggacaaaattgttctgcaaatatgcggcaaattattgcgaaaccgcttgtcgatgatttcttggataaaatgctgaaacgtgtggcagctttccgacttggggacccacttgatcctgagacaaccattggatcaatgattacgcctgaacacaaggcgcaggtaatgagctacattgaaaagggtaccgccgaaggcgctaaattgatagttggcggggatgttgatgggcccggtcagttcatttccccagccgtttttgacggcgtgacgaatgacatgaccattgctcgtgatgagatttttggaccagtgttaggggtaatgccggttacttctcccgatgaagcattggctattgccaccgatactgattacggcctccatgctaccgtcttcactcgtgatatagatcgggccatttcaatggcacggcgtcttccatgtggcacagtttcggtgaatggtttttctgagggtgatataaaaacaccctttggcgggtataaacaatccggttcacttgcccgcgataatggaaccgaagcgctcgagcaataccttcaaaccaaaacgatatggatc

SEQ ID NO: 213589 - DNA, 313 bp, Unknown
  Bacterial polypeptide expressing nucleotide sequence isolated from the Sargasso Sea
aatgaaaattgctagaactgaaatatttggaccagttttatcaattattccttttgaaacagaagaagaggccattgaaattgctaatgatactccatatggacttttgaatcttattcaaacacaggatcaagaaaaagcaaatcgggttgctagaaaattaagatctggaatggttgatattaatggtgcaggtttagcaaaagatgctccttttggtggttacaaacattctggcattggacgtgaagccggaatactagggctagaggaatatcttgaagttaaagctgtcagtggctggaacgattaa

SEQ ID NO: 213590 - DNA, 790 bp, Unknown
  Bacterial polypeptide expressing nucleotide sequence isolated from the Sargasso Sea
catcccgatattgatatggtttcttttacaggttcaacacgtgcaggaagattaatttcaaaaaatgcagctgaaactataaaaagagtttgcttagaacttggtggcaaaggtggaaatatagtttttgcagatagttataaaaatgcagttagagatggaataagaaatgtaatgagtaattcaggccaatcatgtgatgctccaacaaggatgttagttgaaaaaactatttatgagagagcagtaaatgaagcgattgatgaggcaaataaaataaaagtagatcaagcatcaaaaaaaggagatcatattggtcctgtaatctcgaaaacgcaatacgataagattataaatttaatcgaaagtggaatatctgaaggagcaacattagcagcaggaggtcctgacttacctaatggattaaacaaaggttattttattaaaccaactattttcacaaacgtaacaaatgaaatgagaattgcaaaagaggaaatttttggtccagtactttccataataccttttgaaagtgaagatgaagctgtaaatattgtaaatgatacatcttatggtttaggaaattatttacaaacagaggatagaaagaaagctcacagagttgcaaaaaaactaagatcaggatgtgtttatatcaatggaaatgcagctgacgctggcacaccatttggaggatatagacaatcaggaaatggaagagaaggtggagtttgggggcttgaagaatatttagaagtaaaaactgttacaggttggaaagattaat

SEQ ID NO: 213591 - DNA, 860 bp, Unknown
  Bacterial polypeptide expressing nucleotide sequence isolated from the Sargasso Sea
caagctgagaaaaaagaaacttatgatgttataaatcctgctactgaagaagtaataggaaaagcttcaaaagcgtcttctgtggatgttcagaaagcattaaaatctgcagagaaaggactacaagtttggaaaaataccactccatggaaaagatcttacataatcaggaaaattgcagatttgatgaggcaaaagcaagatgttttagctaaatggttaactcttgaggtaggaaaaccattggcagaaggaattggtgagactggtggagctgcggatatatttgaatggaacgcagaagaaacaaaaagaatttatgggcaaactgttgaaagtagatttcccgacactagagtgcatgtttattaccaaccagtaggagtagttgctgcattagtgccctggaattttccattagtcttagctgcaaggaaaatttctacagctttagctgctggttgttctgttatttgtaaacctgatgtaattacacctggtactgttatggaattagtggatatttgtagagaagcaggtgtaccacccggtgttgtgaaccttttatctggagatcctgctgaaatatcaaatgaattgttagagtctgatattgtaaaaaaagtttcaattactggatcaactagagttggaaaattaatattaaaaaaagcagcagataaagttcaaagagtaactatggaactcagtggtcattcaccgtttatagtttttgatgatgtggatattaataaagttgctgatatggctatcactgcaaaatttagaaataatggacaagtttgtatctcacctaatagattttatattcaagaaaagaaaaaagatgaatttatcaa

SEQ ID NO: 213592 - DNA, 592 bp, Unknown
  Bacterial polypeptide expressing nucleotide sequence isolated from the Sargasso Sea
tgcaccgcaggttcgcgtttgctggtggaatctggggtgaaagatgatcttatcgcgcttattgctgaggagttagcctcatggcatccggggcatccactcgatcccgcgacagtgagcggcgccgttgttgataaacaacagttagatacagtactcagttacatcaaagcgggtaaagatgaaggtgcaaccttagtccacggtggcagccaagtcatggccgacacaggcggcgtgtatgtgcagccaacggtattttctaacgtaaacaatcagatgaaaattgccagcgaagagatattcggcccagtgttatctgttattgaatttaatggcatggaagaagcgatatcaatagccaacgataccatctatggtttagccgctggtgtgtggacatccgatatcagcaaggcccataaaacggccaaagccctgcgcgctggcatggtgtggatcaaccattacgatggcggcgacatgacagcgccattcggtggctataaacagtcaggtaatggccgagataaatctctgcactccttcgacaaatacacagaactgaaagcgacgtggatcgtgctataag

SEQ ID NO: 213593 - DNA, 868 bp, Unknown
  Bacterial polypeptide expressing nucleotide sequence isolated from the Sargasso Sea
ctgcccatcaagcccgaatcccgcgccttcctgcagcgcgcgccgaagatgctcatcggtgccgactggacctccgccagcgacggcgctctgatggacctgcgcaatccggccaccggcgaagtgctctgccaggtgccggccggcaccgtcgccgatgtcgaccgcgccgtgcgcgccgcacgccaggccttcgatgactccgcctggagccgcacccgcccgcgtgagcggcagaacctgctgtggaagctcgcaagcctcatggaacgcgacgccgacctgctggccgaactcgagtgcctgaacaatggcaagagcgccgccgtcgcccgcgtgatggacgtgcaactggccatcgacttcctgcgctacatggccggctacgccaccaagatcgaaggcagcacggtggatgtgtccatgccgctgatgcccgacggcgacttccacggctacatccgccgcgaagccgtcggcgtggtcggcgccatcgtcgcctggaacttcccgctgctgctggcctgctggaagctcggcccggcgctggccaccggctgctcggtggtgctcaagcccgccgacgagacgccgctgtccgcgctgaaacttgccgaactcgtcctcgaagcgggctacccggccggcatgttcaacgtcgtcaccggcaccggcatcaccgcgggcgccgccctctcccaccacccgctggtggacaagctgaccttcaccggctccaccccggtgggcaagcagatcggcaaggcggccatggacaacatgacccgcgtgaccctggaactgggcggcaaaaggccgaccatcgtcatggccgacgccgacctggccaccgccgcagccggcgccg

SEQ ID NO: 213594 - DNA, 313 bp, Unknown
  Bacterial polypeptide expressing nucleotide sequence isolated from the Sargasso Sea
aaaatggagatcgcaaagacagaaatctttggtccagtgcttcagtttatgccattgaaaaatgaagacgaagcaatagaaattgctaatgacactccgtatggactaacaaattatatccaaacacgagacccagaaaaagttaaaagggttgctagaaaattaagatcaggtatggttgatgtaaatggtgcaggtatagctgttgatgctccatttggtgggtacaaacactctggcatcggtagagaagctggaaaagaagggttaatagaatttctagaagtcaaatctgttggtggatggaactaat

SEQ ID NO: 213595 - DNA, 887 bp, Unknown
  Bacterial polypeptide expressing nucleotide sequence isolated from the Sargasso Sea
acctgtgtttaatccagctactggtgaagaaatagcccaagtaaaactaggaaatttgaaagacttaaatcaaatagtagaaaaagctcaaaaagcattttactcttggtcaaatactccgcccctacaaagagctagagttttatttaaatataaagaattaatagaaaaaaattcagacttattaataaaaataatagtttcagagcacggtaaagtttatgaagatgcgagaggctccttgacaagaggactagaggttgtcgaatatgcttgtgggatacctcaaatgttaaaaggtgagttcacagaaaatgttggaaaaaatgtagatagttggtcacttagacagccgctaggaatttgtgctggtataacccctttcaattttccagccatggtcccgatgtggatgtttccgatggctattgcttgtggaaatacgtttattttaaagccatcagaaaaagacccctcttgttcaattaagcttgcagagttatttagcgaagcaggcttaccagacggcgtatttaatgttgtaaatggcgataaagagattgtcgatgcaattattcaaaataaaaatatttcagcggttagttttgttggctcaactccaatagcaaaatatatttacgaaaattgtgcaaagaatgaaaaaagagttcaagctcttgggggcgctaaaaatcattgtgtagtcatgcctgattgtgatcttgaccaagctgttaatggtcttatgggggctgcctatggctctgccggcgaaagatgtatggcgcaatctgttgcagttgctgtcggaaatattggtgatctgcttgtcaaaaatcttaaaactaaagtagagtccttaaaaataggaccaggcatggataaaa

SEQ ID NO: 213596 - DNA, 886 bp, Unknown
  Bacterial polypeptide expressing nucleotide sequence isolated from the Sargasso Sea
gatggtccctatgtggatgtttcctgttgcaattgcttgtgggaatacatttgttttaaaaccatccgagaaggatccatcttgttctatgaaactagcagaattatttttagaagccggtcttcctccaggtgtctttaatgttgttaatggggacaaagaagctgttgatgcaataattaaaaataaggatattgctgctgtaagttttgttggttcaacaccgattgcaaaatatatatatgaaaattgtgcaaaaaatgaaaaaagagtccaagccttgggaggcgcaaaaaatcactgtgtagtaatgccagattgtgatttagaccaagcagttaacggtttgatgggtgcagcatatggatcagcaggtgagagatgtatggcacaatcagtagctgttgcagttggtaaaattgcagagccccttgtcaaaaatttatcaaaaaaagtagagtctttaaaagtaggcccaggtttagataagaaatcgcaaatgggtccattagttactaaagaacatctagaaaaagttaaaggttacgttgatataggagtcaaggaaggtgcaaaacttgtagtagacgggagaaatttgaagcttcaaggttatgaaaatggtttttatatgggaggatgtttatttgattatgttaaaaaaaatatgagaatttataaagaggaaatatttggtccagtcctttcagttgtaagagcaaaagattataatgaagctttatctttggtaaatgatcatgaatttggaaatggtactagtatatttacaagagatggagatacggggagatcgttcgcaagcaaggtaaaaaattggaatggttggcataaacataccaattccagttccgatggcgtttcatag

SEQ ID NO: 213597 - DNA, 724 bp, Unknown
  Bacterial polypeptide expressing nucleotide sequence isolated from the Sargasso Sea
ggctgctaaagattttaaaagagtaagtttagagttgggtggcaaaggtgctaactttatatttaaagatgcagatcctgaggcaattgagagaggagcactaagatgttttagaaattcaggtcaatcatgcaatgctcctactagaatgcttgttgaaaaatcaatgtacaatgaagcaattgaaagattaaaaaaatatacagaaaattttgaggtaggtgaccctaaaaaagaaggggaacatatagggcctgtgatttctgaaacacaatataataaaattcaaacattaattaaaaaaggaatagatgaaggtgcaaaacttgttgcaggaggacctggtaaacctaaaggtttagaaaaaggttactttgtaaaacctacagtgtttgctgatgtaaataataatatggatattgctagaactgaaatttttggacctgtattgtctgtaatgccatttgaaactgaggaagaagcaattcaaattgctaatgacactccttatggattaacaaattacattcaaactcaagataaagaaaaagttaaaagagttgcaagaaaattaagatcaggaatggtagatgttaatggcgctggtattgcagttgatgctccgtttggaggttttaaacactctggaatcggtagagaggcaggcgaacatggtcttgaagaatttttagaggttaagtctgtaggtggttggaacaattaa

SEQ ID NO: 213598 - DNA, 518 bp, Unknown
  Bacterial polypeptide expressing nucleotide sequence isolated from the Sargasso Sea
aattaataaaaattttataattcttaatggttttatgacaaccatacatgcttcacaaagtgaccaaagaatattagataattcccacaaagatccaagaagagcgagatctgcaagtcaatcaattgtacccacatctactggtgcatcaaaagctattggtgagattataccatcattgaaaggtaagctagagggtatagcaatgagggtgccaacaccaaatgtttccttaatagaatttatatttaatgtaaaaaaaaatattaccgtaaaaaaattaaataactctttattttcagcatctaaaacgaaactgaaaaatattctaaatgttacagatgagcagctagtctcagttgattttaatcacaatagtgcatctgcaattatagactcctcacttactaatgtagttggtaataaaatgggtaaaatttcagcttggtacgataatgaatggggtttctcgagtagaatgtgtgatattgctgagtatgtaagcaagatcaaataat

SEQ ID NO: 213599 - DNA, 682 bp, Unknown
  Bacterial polypeptide expressing nucleotide sequence isolated from the Sargasso Sea
tatggcgctcgcttataacgatgtagtagaaaaaagaaacgcaattgattttaaaactcaagcttttatcaatggaaattatgtagattctcaaacaggtaaaacttttgaaagtataagccctgttgatggaaaattaatcacgaatgtttctgagtgtgatattgaagatattaataaagcagtgaaggcagcaagagaagtctttgaaaaagggtcctggtcaagaatggctccaagtaaaagaaaaaaaatactttttaattttgctgatttaatgaaaaaaaatattcttgagctcggcattcttgaaacacttaacatgggcaagcctatttcaaatgcaacaggagatattgcagcatgtattaattgcacaagatggtatgctgaagctatagacaaaatatatgatgatgtagctccaactagtgacaatttattagctacaattactcgtgaaccattgggtgtcgttggtgctgtaactccttggaactatccattattgatggcttgttggaaattcgcccctgctttagctgctggaaatagttttattctaaaacctgctgaacaatctcctttgtctgcattacgcgtagctgaacttgccattgaagctgggatacctgaaggagtctttaatgttgtgcctggttttgggccaacagctggcaaa

SEQ ID NO: 213600 - DNA, 610 bp, Unknown
  Bacterial polypeptide expressing nucleotide sequence isolated from the Sargasso Sea
caaggagaagtatgttccgcaggttctaggcttattgttcaaaaagaaatagaaaaagattttataaataaggtagctgaaataagtgaaaatatgaaaccagctgatcctcttgatccaagttcgtttgcgggtgctatagttagttctgaacaattagaaaaaattaataaatatgtaaataccggaaaagaagagggtgcagaaattaaggttggaggaaatattaccatgaaggaaacaggaggttgctattttgagcctacaatatttaaaaatgtagaaaatagtatgaaaatagctcaagaagaaatttttggccctgttcttacagcgctcagttttaacaattttgaggaggctatttctattgctaatgatactgaatacggacttgcagcaggtgtttggacaaaagatattaataaagcaattaaagcgtctagagaaattcgtgccggcactgtttatattaataattatgaagaaggtgtagattcaactataccactgggcggttataaacagtctggcattggcagagataatggctatcaagctctagaaaattatctacaagtaaagtcaacttggataaaagtttcttaga

SEQ ID NO: 213601 - DNA, 811 bp, Unknown
  Bacterial polypeptide expressing nucleotide sequence isolated from the Sargasso Sea
aaaaaatcaaacaattttatatgaaccaaaaggagtgtgtgcattaattactccttggaattggccaattaaccaagtaaatttaaaagtaataccagcactagctgctggttgcactgtagtattaaaaccatctgaaatagcaccattgtcatcaatgctgttagctgaaatgataaacgaagcaggttttcctaaaggtgtttttaatttaataaatggagatggtgcaataactggagaagctttaactagtcatcctgatataaatatgatttcatttacgggttccactagagctggtgctttaatttctcaaaatgcggcaaaagattttaaaagaattagtttagagctaggcggcaaaggagcaaatatagtttttaaagatgcaggaccagaagcaatatcttggagcgttcttagatgttttagaaattcaggacaatcttgtaatgcacctactagaatgcttgttgaaaaatcaatttataatgaaacagttgaaaaagttagagattttgcaaacaaaactaaagtagataaacctaataaaaatggagatcacataggaccagtaatttctgagactcagtttaacaaaattcaaaatttaattcaaaaaggaattgatgaaggggcaaaacttgttgcaggaggagtaggaaagcctaaaggattagaaaaaggatattatgttaaacctactgtattcacagatgtcaataatcaaatggaaatcgcaagaacagaaatatttgggccagttttatcaattataccttttgaaacagaagatgaggcaatttaa

SEQ ID NO: 213602 - DNA, 886 bp, Unknown
  Bacterial polypeptide expressing nucleotide sequence isolated from the Sargasso Sea
acttgatagtttggatatgggtaaacttataaatgatgctgtaactatagatgctcctggctcagcagcattttttcaatggcatgcagaagctattgataaaatgtatgatgaaattgctccaaccggaccaggtgatttagcaatggtaacaagagagcctcttggagtagtaggagctgtagtgccatggaattttcctcttgatatggcaacatggaaagcttcagcagctttagctgctggaaactctatagttttaaagcctgcagaacaatcaccattgtcgtcattacgattagcagagttggcagtagaggcaggtgtacctgaaggagtatttaatgttgttccaggttttggagaaatggccggtaaggctcttggacttcatccagatgtggattgtattgcattcacaggctcaacagctgttggaaaattatttcagcaatatgcaggtcaatcaaacatgaagcaagtatggttagaaactggagggaaaagtccaaatcttatatttgctgactgtaaggatttagaagcagctatcaatatggcagcttttggaatattttttaaccaaggagaagtttgctcagctaactctaggttgttagtcgaaagaactgttcaagaagaattcgttgagcgtttatcatcgattgcaaaagacacacagccaggtcatccacttaacccagaatctaaaatgggtgctattgtaaatgaagaacaaacaaaaaaaattgtttcttatattaaaaaaggaaaagagaatgctgatttagtgataggtggtgaacaaattaaaattgaaggtaaaggatgttacgttcaaccaactatttttaataatgtaaatgccaatgatataatcgctaaa

SEQ ID NO: 213603 - DNA, 820 bp, Unknown
  Bacterial polypeptide expressing nucleotide sequence isolated from the Sargasso Sea
gaagaaagaatatctctcttagaaaaattacttaaaatttacaaaaaaagattcaacgaaatgtcagatgcaatttccttagaaatgggctctcctatagattattcaatatcaacacatacttcttctggccaatctcatttggaagatttcattttaagattgaaagaatttaattttgaggaacattttgacaaaaaatctaataatcacataagacatgaaccaataggagtctgcggtctgatcactccatggaactggccgatcaatcaaattgcacttaaagtcgttcctgcttttgcaacaggatgcacaatgattcttaaaccatctgagatagcacctatctcagcattattatttgctgaaatgattgacgaagcaggttttccgccaggagtatttaatttagttaatggtgatggtgcaggagttggaactcatatgtcaggacaccccgatattgatatgatttcttttacaggatcaactagagctggaagattaattttaaaaaatgctgctgatacaatcaaaagagtttgcttagagttaggtggcaaaggtggaaatattgtttttgccgattcctactcaaacgcagtaagagatggaattcgaaatgtaatgagtaactctggacaatcatgtgatgcaccaacaagaatgcttgtagaaaaatctatctacgaaagagcaattaaagaagcagcagatgaagcaaacaaaattaaagtagatgttgcatctaaaaaaggtgatcacataggacctgtagtttcaaaagttcagtatgataaaattattaatttaatta

SEQ ID NO: 213604 - DNA, 418 bp, Unknown
  Bacterial polypeptide expressing nucleotide sequence isolated from the Sargasso Sea
cggcattgatgagggagctactttattagcaggtggacctgagaagccagaaggattaaaagaaggttattttatcaaacctactatttttacaaatgtatctaacgatatgagaattgcaaaagaagaaatctttgggcctgttttgtcaattattccatttgataatgaagaagatgcagtttcaatagttaatgatacagaatatggtttaggtaattatgttcaaactcaagataaagaaaaagcaaaaagaattgcaagaaagtttagatcaggtggggtttctataaatggtaatagtgcagaccctggaacaccttttggaggatataggcaatccggtaatggaagagaaggtggtttttggggattagaagaatatttagaagtaaagacaattagtggctgggaataa

SEQ ID NO: 213605 - DNA, 726 bp, Unknown
  Bacterial polypeptide expressing nucleotide sequence isolated from the Sargasso Sea
aatgaacttgtcaaaattctatatagatggtgattgggttgatcctattgaacctaattcaattcctgtcataaatccagcttcagaagagagcataggaagtgtaagtattggttcaaaagaggatgttgatatagcagttaaagcggcgagatatgcttttcaaagtttctcaaaaacattggtttcagaaagagttgagttattaactgaaataagaaatatctataagaagaggtttgatgatattgctgctgctattcaaactgaaatgggtgcgccaaatagtttagcaagaggaagtcaagcaactgttggattgtctcacttgaaaactgctataagagttttagaaaaccataaatttgaatttaaacacggaagttatattgtgagacatgagccaataggagtttgtggattaataactccttggaattggccaataaatcaggttgtttcaaagttagctccatgtttagcctcagggtgtactgctgtattaaaaccaagtgaaattgctccactatcttcaatggttatagcagaaattttccatgaggctggtgttcctaaaggggtgtttaatttagttaatggtctaggtcctgtcgttggagaggcaatgtctaaccatgttggaattgacatgatgtcctttactggatcaaccaggggaggtattgctgttgcaagagcgtctgcaaattctgtcaaaagggtttg

SEQ ID NO: 213606 - DNA, 971 bp, Unknown
  Bacterial polypeptide expressing nucleotide sequence isolated from the Sargasso Sea
caacaaatggtttaatagtgaaaatcctgcaaatggtaaagtttgggcaacagtacctgattgcagtgaaaaagatattgatatagcagtacaggctgcaaaaaaagctttttatgatggtccttggggcaaattaatgccagcagaaagagggcgtgttcttcgaaaaataggtgatgttattagcaaaaatgctgaccgcataggcgctattgaaacaagagataatggcaaattaccatcacaaataactccctctctcagagagggtgcatggcttttagatagttggtattattatgcgggaatgtgcgataagtttgaaggaaaattaattccagcagagcttccagatatgcataattatatgaagtgggaaccctttggtgttgtcgctcaaatattgccttggaactctccaattgggactctaatttggaaacttgctccttgtttagcagctggaaacaccgtggttttaaaaccatctgaacaagcaagttgttctattttggaattgatggatatacttttagatgcagatataccatcaggagttttaaatgttgttacaggatatggtcttacaactggagagcctttaattgatcaccctgatgttagaatggtttcatttacaggtggcactaatggtggaaaagcagctgctaaaatagcttcacagcaagttaaacctatcgtaatggaattaggaggcaaatcacctcaaattgttttacctgacgctgatattgatcttgccgtaaaaggggttgcgtctggaatttttccagctggtggacaaagctgtatatcaggatcacgcttattaattcactcttcaataattgataaatttactgagcaattagtaaaagtttgcaaaagagctactgtcggagatcctttagaagggagcactactattggtcctattgcaaatagagttcactatgaaagaattttagaca

SEQ ID NO: 213607 - DNA, 325 bp, Unknown
  Bacterial polypeptide expressing nucleotide sequence isolated from the Sargasso Sea
agcttgtttacaaatgttcagccttcatacaatatgcaaagagaagaaatttttggtcctgtattaactacattgacttttagaactcctgaagaagcagtagagattgcaaataatacagagtatggtttatcagctggtgtctggacggagaaaggatctaaaattctttggacggcagatcgtttagatgctggtgttatttgggctaatacatttaataaatttgacccatcttctccttttggtggttataaagaatcagggtttggaagagagggaggtaggcatggtctactttcatatttgaaggtccagtcatgac

SEQ ID NO: 213608 - DNA, 725 bp, Unknown
  Bacterial polypeptide expressing nucleotide sequence isolated from the Sargasso Sea
catggaaatggttaatatttgtaaagaaagtggagttccaccaggagtagtaaatcttttatcgggagatcccccaagtattgcccaacaacttattgcctctgatatagtgaaaaaaatttcaatcactggctcttcaagagtaggaaagttgatattaaaacaagccgcagaaaaagttcaaagagttacaatggaattaagtggtcattccccgtttatagtttttgatgatgctgatattaagaaagctactgaaatggcaattgctgcaaaatttaggaataatggtcaagtatgtatttccccaaatagattttatattcatgaaaataaaaaagaagaattcataaatttatttattgaaaaaaccaaaaagttaaaaattggaaatggtatggatcctgaaactcaattaggtccattaacaacagagaaaagattgaaagaggttgaagaattagttgaaaaaactaagcgagagggagccaaagtattattaggtggtaaaagaccagcgggttttaataaaggatttttctatgaacctactgtatttgataatataaaagatgactatacaataatgaaacaagaaccttttggaccgttagtaccgatgctttccttcaaatcttttgatgaagttatagaaagagctaataaccatgaacttggtttatgtagttatgtttgtacaaattcaatggagacagcgcatttag

SEQ ID NO: 213609 - DNA, 880 bp, Unknown
  Bacterial polypeptide expressing nucleotide sequence isolated from the Sargasso Sea
aattgatgaagcaaaaggtgagattgcctatggagcatcttttattgaattttttgctgaagaagccaaaagaatttacggggaaacaataccagggcaccagactgataaacggataactgttttaaaacaaccgattggagtagcagcatctattacaccttggaactttcccaacgcaatgatcactaggaaggctggcccagcactagccgctggatgtgcttttgttgctagaccagctgctgaaactccactatctgccctagcaatgggtgttttagcagatagagcgggcattccgaaaggagttttatccgtaattccatcctcacgttcatctgacattggaaaggaattctgcgaaaacccaattatacgaaaacttacatttacaggctcaaccgaggtaggcagaattttacttaaacaagcttccgaacagattatgaaatgttcaatggaactgggaggtaatgctccatttattgtgtttgatgatgcagatatcgatgctgcggttgaaggcgcaattatgtgcaaattcagaaataatggacaaacatgtgtttgcgccaaccgaatttatgttcagtctggagtttacaaagaatttgcaaaaaaattatcactagcagtttcaaaaatgaaagttggggatggctttgctaatggtactgctcttggacccttgataaacagtgaagcaatagagaaagtgcaagagcatatcgcagatgcaaaatcaaaaggagcgaatgttattttgggaggcgaaacaatccaaggaccaggtaattttctaacgccaacaattgtaactcaggcgacaaaagaaatgcttgtatctaaagaagaaacatttggtccatttgcgcct

SEQ ID NO: 213610 - DNA, 304 bp, Unknown
  Bacterial polypeptide expressing nucleotide sequence isolated from the Sargasso Sea
atagctaaagaagaaatatttggaccagttttgtctataataccatttgataatgaagaagaagcagttaaaatttctaatgatactgcgtatggcttaacaaactatattcaaacaacaaacaaagaaaaggcaaaaagagtagcaaaacaattacgttctggaatggttgaaattaatggcactagttttgctaatggatctccttttggtggttacaagcaatcaggcaatggaagagagggtggttcgtggggattagaggaatttttagagataaaatcaataagtggatggcaataaa

SEQ ID NO: 213611 - DNA, 246 bp, Unknown
  Bacterial polypeptide expressing nucleotide sequence isolated from the Sargasso Sea
aaaaaataaatgaatttgtatttagtgcatcaaaaacaaaacaactaaaaaatatcttaacaaccaataatcaaccacttgtatcagtcgattttaatcataatgcaagtagttcagtttttgacttaactcaaactcaggttgttaatgaaaaattttgtagagtattgtcatggtatgataatgagtggggtttttctaatagaatgattgatacaatgcttgattttaagaaattcgtatagg

SEQ ID NO: 213612 - DNA, 443 bp, Unknown
  Bacterial polypeptide expressing nucleotide sequence isolated from the Sargasso Sea
tgttgatggatatatccaaaaaggaatagatgaaggagcaaaacttttatccggaggagtttcaaataataagcaaaaaggattttatgcaaagccaactttatttgacggattaaaagaaaatatgaccatagctcaagaagaaatatttggaccagtgctcggtgttttaacagttaaaaatgatgaagaagctttgaagattgctagtaattctaaatacggattacatgctagtgtatttactcaagatataaacagagcatttcatctggctaaaggtttgccttgtggaactgtttctgtaaacactttttctgaaggagatattaaaactccatttggaggttataaacaatcaggctcactaagtagagatcaaggtactgaggctctaaattcatttcttcaaacaaaaacaatctggataagtcataattaat

SEQ ID NO: 213613 - DNA, 787 bp, Unknown
  Bacterial polypeptide expressing nucleotide sequence isolated from the Sargasso Sea
atcgggcggtgaggcggagatcaacgcggcggtagcggcggccaaggcggcatttccggcctgggccaacacgccggccaagcagcgcgccaagctgatgcgccgactcggcgagctgattgagcagaacgtgccgcacctggcggcgctggagacgatggatactggcctgccgatcgcgcagacgagcaagcagctcattccgcgcgcttccgagaacttccatttcttcgccgcggtgtgcacgcaggtcaacggccgcacgtatccggtcgatgaccagatgctcaactacacgctgtatcagccggtgggcgtttgcgcgttgatctcgccgtggaacgtgccattcatgaccgccacctggaaggtcgctccgtgcctggcgctgggtaatacggccgtgctgaagatgtcggaactgtcgccgctgacagcggatcaactgggccgcctggccctggaagccggcattccgcccggtgtgctcaacgtggtgcaaggctatggcgccacggccggcgatgcgctggtgcgccatccggatgtgcgggtggtgtcgttcaccggcggcacgacgaccggcaagcgcatcatggagcgcgccggcctgaagaaattctcgatggagctaggcggcaagtcgccggtgctggtcttcgacgatgcggacctggatcgcgcgctcgatgcgtcactgttcaccattttctccatcaacggcgaacgctgcacggcgggctcgcgcatcttcgtgcaagaaagtgtctatgacgatttcgtacgc

SEQ ID NO: 213614 - DNA, 649 bp, Unknown
  Bacterial polypeptide expressing nucleotide sequence isolated from the Sargasso Sea
tgaagtaagtgaaccaataggcgttattgcctgtatcattccatggaactcacaaatgtttttaacagcgactaaagttgcacctgcactggctgcagggaatacagtggtgataaaatcatcagaacttgctccagcacctttggctgaatttgtaaaattaactgaacaagcagaattgccaaaaggcgttataaatctattgagtggaggagcagaagttggaaaaagtttaacatctcataaatatataggcaaagtgctctttacgggcgggaccgaaacaggatctcatgtaataagaaatacagctgagaattttgcacagttaacccttgaacttggagggaaatcaccagttatagtatttgaagacgcagatatagagaatgcattaaataatatcacgactgctatcttctccggaaatggctgcagttgcatagctggatcagtattgcttctgcatgataaaatttatgatgaatttcttcatcaattaaaaaatagagctgagagtattaaattgggttccccgcttgaagcggaaactcaaatgggtccattaaataatcttaaacaaatagagtttatagaaaaaaacattgagttatcgattaaacaaggagctaaaatattatgtggtggc

SEQ ID NO: 213615 - DNA, 416 bp, Unknown
  Bacterial polypeptide expressing nucleotide sequence isolated from the Sargasso Sea
ccaagatgagggcgcgaacttagtgcatggtggacaacaagtgctggccaaaacgggcggcgtgtatgtgcagcccactatctttagccaagtacacaacaagatgaaaatcgccagtgaggaaatctttggccctgtgttatctgtcattgaattcaatggcatggaagaggcgattgcgatagccaatgataccatttacggcttagcggcaggggtgtggacggcggatatcagcaaggcgcacaaaaccgccaaggcactgcgatcgggtatggtgtggattaaccattatgatggaggcgatatgacggcgccttttggtggttataaacagtctggcaatggccgcgataaatccatgcactccttcgacaagtacactgaaattaaggcgacttggatagccctctaag

SEQ ID NO: 213616 - DNA, 655 bp, Unknown
  Bacterial polypeptide expressing nucleotide sequence isolated from the Sargasso Sea
cagctacggcctgcacattgccggcgaggccgtcgcggccgagccgggacgtaccttcgagtccttcaaccccacgaccgggcggcgctggggcgacttcgccatcgccggcgccgaccaggtggaccgggcggtgacggcggccgccaaggcattccgcggcccctggtcccgcatgtccgcgaccgagcgcggccggctgctgatgcgctggggcgacgcgatcgcggagaacgcgatgcacatcggcgcgctcgaggcgacgcagaacggcaagctggcctcggagatgcagacccaggcgcgcatcgtgcgcgactggctctgctacttcggcggcatggccgacaagatcgagggcgcggtcattccggtcgcgcagacgtcggtgctcaactacacgctcaaggagcccctgggcgtggtggccgtcatcgtgccctggaactctccgacgctgctgatgatcgagtcggccgcgcccgcgctcgccgcgggcaacaccatcgtcgtcaagcccagcgaggtgacgtcggcctcggcgatcgagatcgcccggctggcggaaagcgtcggcatcccccccggcgtcctcaacgtcgtgacggggctgagggaaaccggggaggcgctcgtcggacacccgcaggtccgc

SEQ ID NO: 213617 - DNA, 863 bp, Unknown
  Bacterial polypeptide expressing nucleotide sequence isolated from the Sargasso Sea
tttgatttggaaaaaaacttcaccttggaatagagcatctattattagaaaaattgctgatttaatgagaaaaaaaaataatgaattagcaaaatggatgacacttgaaactggaaaacctttgactgaatcactagcagaagtgaatgggtctgctgatatttttgaatggaatgcggaggaaacaaaaagaatttatggacaaacagtacaaagtagatttgaaaacacaagagctattattaattatgaacctgttggcgtagttgcagctttatcaccatggaattttcctcttattttagcttcgagaaaaatttctactgctttagctgcaggatgttctgttatttgtaaaccagatgttattactccaggaacagttatggaattagtagacattatcaatcaatgtggtgtacctcccggtgttgtaaatttattgtcaggcgatccagcatcaattgcctcacaattaatttcatcagatatagtaaaaaaaatttcattaaccggctccactagagtaggtaaaataattttaaaacaagcagctgaaaaaatacaaagagttactatggagttaagtggtcatgcaccatttatagtgcatgaagatgcagatattgaaaaatctgtagatatggctatggcagctaaatatagaaataatgggcaagtttgtatttcaccaagtcgcttttatatacacgaaagcaaaaaagaaaaatttaccaaatcttttgttgataaaactttgaagttaaaaatcggaaatggaatgcataaggatgttcaacttggtccattgaccacaaaaaaaagattagaagaaatagaaaaacttgtagaggtaacaaaaa

SEQ ID NO: 213618 - DNA, 694 bp, Unknown
  Bacterial polypeptide expressing nucleotide sequence isolated from the Sargasso Sea
gccaataaatcagatcgctttgaaagttattccagcgctagcaactggctgcacttgcattttgaaaccctctgaacatacacccatttccgcaatgatttattctgagattattcatgaagccggctacccgccgggagtatttaatctaatacatggtttaggagaaacggttggttcagcaatgtctggccaccctgatatacaaatgatgtcttttaccggttctacccgtgccggcagggcagtcacgcaagatgccgctgaaacagttaaaagagtgactctcgaacttggtggtaagtcaccaaatctcatatttgccgattgcaatcttgaggagcgcgtaactgcctcgatagacgaatgcatgtttaatactgggcaatcctgtgatgcaccaacacggcttctggttgagcgctcgtgttatgaagaggttctgaaaattgcaaagagtgcggcaaattcaattactgttggtgatcctgctcaagagggtgatcatattggcccgctgtttgatcaaattcagttcgaacgcgtacaggcgatgatccaaaaaggacttgatgaaggtgccactcttttaacaggtggtcttggtaaacccgaaggttataaaactggttggtatgtgaagccaacagtctttgctgatgtatccaatgatatggtaattgctcaggaagaa

SEQ ID NO: 213619 - DNA, 553 bp, Unknown
  Bacterial polypeptide expressing nucleotide sequence isolated from the Sargasso Sea
attgaaagatctataaaagaagccaaagaagaagctaataacattaaggtagacttgtctcataaaaaaggagatcatattgggccagtagtatcaaaaaaacaatatgataaaatattggatttaattcaaagtggaattgacgaaggtgcaactttagtctcaggaggaattgatcgccctgatggattaactaagggttattttgtaaagcctacaatttttactaatgtttcaaatgatatgagaattgctaaagaagaaatttttggaccagtcttatcgataataccttttgaaaatgaacaagaagcaatttctatagttaatgatactacttatggcttaggtaattatgttcagactcaagataaagaaaaagctagaagagtagcgagacagtttagatctggaggagtttatataaatggaagtggtgctgatcctggaactccctttggaggatacaggcagtcaggaaatggaagagaaggaggagcatggggattagaggagtatcttgaagtaaaaacaatttctggctggaagtaga

SEQ ID NO: 213620 - DNA, 748 bp, Unknown
  Bacterial polypeptide expressing nucleotide sequence isolated from the Sargasso Sea
ttaaacagaattggtgatattattgctaaaaatgctgaaagaattggacaaattgaaacaaaagataatggaaagttgccaaaaaatataacaccctctttaacgagttggcaaactgagagcttttattactacgcgggcatgtgtgacaaatttgaagggcgattgatcccatcagaagttccaaatatgcacaactatttgaagtgggaaccttttggagtagtagcattaatacttccgtggaattctcctattggaactcttatttggaaacttgctccagcacttgctgcaggcaatactgtggtaattaaaccttcagaaagagcatcttgctcgtcattagaattaatgaaggtgcttgaagaagcagacttaccagaaggattaattaatgttattactggatttggaacaactactggagtccctctaatagaacatgacgatgttagaatgattagttttactggaggcactaaaggtggaagtgcagcaagtttagccgcctctaaaaaagttaaaccaattataatggaattaggtggaaaatctcctcaaatagtttttgaggatgccgacttaaatttatctgttaatggagtagtttctggtatttttcctgtaactggacatagttgtatttcagggtccaggatattagtacacaaaaaaattaaagatcaatttattaagaaattattggatgtagtaaaaaaagccaaagttggtaatccgaatgatc

SEQ ID NO: 213621 - DNA, 698 bp, Unknown
  Bacterial polypeptide expressing nucleotide sequence isolated from the Sargasso Sea
catgaccaccagcctgcctgagcgcacccccaccggcctgttgatcggtagcgattggctcacgaccgccactcatctcgaggtggtgaacccggcgaccctcggcacgttggcagaaatcggggatgcctcgcctgccgagggcgtgcaggcggtccaggccgcgcacgatgcgttcgccgactggggttcatcctccgcacgcttccgggccgagattctgcgcaaagccttcgagatcatgacggcggaaatcgaagactgcgctcgactgatctccctcgagaatggcaaagcctggaaagacgcgatgggggaggcgatgtacgcggccgaattctttcggtggttctccgaagaggccgcccacgttcagggtgacttccggtatagcccgtcgggcgacaagaccatcatcaccgactaccgcccgatgggagtcgcctacctgatcactccgtggaacttccccgcagcgatggccacacgcaaacttgctccggcgatggcggcagggtgcacgtccattctcaagcctgcgcaagagactcctttgacggctctgtgggtagccgacgttctcgagcgagccggtgctcccgcgggtgtggtcaacgtgatcaccacgtccacgtccgggccggtgtcccaggccatcctctccgatccgcgcgtcgcgacgttgtcctttaccggtt

SEQ ID NO: 213622 - DNA, 775 bp, Unknown
  Bacterial polypeptide expressing nucleotide sequence isolated from the Sargasso Sea
attggttttaaaaccatctgaattagccccgttatcatcaatgatactagctgagcttattgatgaatctaaaattccagcaggcgtgtttaatttagttaatggtgatggagcaaccactggggacgcattaacaagtcatcctgatgtaaatatgatttcatttactggatcaactagagcaggagcattaatttctcaaaatgctgctaaagattttaaaagagttagtttagagcttggcggcaaaggtgcaaatataatatttaaagatgctgatccagatgcaatagaaagaggtgctttgagatgttttagaaattcaggccagtcatgtaatgcgcctacaagaatgctagttgaaaaatcaatgtataatgatgctgttgaaagattaaagaagtacacagaaaattttgaggttggtgatccaaaaaaagaaggagaacatataggcccagttatttctgaaactcaatataataagatacaaactttaattaaaaaaggtattgatgaaggagctaaattagtagctggaggcccaggtaaaccagatggattagaaaaaggttattttgtaaaacctactgtatttgctgatgttaataatcaaatggcaatagcaagaacagaaatatttggccccgttttatctgtaatgccctttgaaacagaggaagaagctattgaaattgcaaacgataccccctacggattaacaaactacattcaaaccaaagataaagaaaaagtaaaaagagttgctagaaaa

SEQ ID NO: 213623 - DNA, 955 bp, Unknown
  Bacterial polypeptide expressing nucleotide sequence isolated from the Sargasso Sea
cttagatgcagcacaagatgcttttgcagattgggcatctaggacaccaagagctaggtccgaaatattgcgcaaagcttatgaacttatgattgaaaggcaggaggaatttgctcgtttaataactttagaaaacggtaaagctggcaacgacgcccgaggtgaagcagcatatgccgctgaattctttcgctggttttcagaagaggcagtgcgtgttgatggtcttatcacgcatgcgcccgcaagtggagcacgtatagttgttcagcataaaccagcaggcattgcagtattagttacaccttggaattacccagctgcgatgggtacaagaaaaattgctccagcattggcagcaggctgtccagtaattataaaacccgcatctgaaacgcctttgacaatgcttgctttaatgccgttactggaggaagctggtgttcctaaaggagttgtgaatgttctaccatccaaaaagacgggaccattagtcgacaggttattgcatgacccccgtgttcgagttgtttcatttactggctctacagaaataggcagggtattattgcggtctgcggcagatcaggtattaaaaccagccatggaacttggaggaaatgccccgttaattgtatttgatgatgctgatatcgatatagctgtagagggagctatgcttgcaaaaatgagaaacctcggagaggcatgcaccgctgcaaatagattttatgtacataaaaaagttttcgatgactttgtttctaaatttactaatgctatggcaaatcttaaaactggaaatggacttgacccagaaaccgatgtgggtcctcttgttaatcaatccacaaaagataaagtagccttttttgttaaagatgctgtttctaaaggtgctgaaattaagcttggcggggaagatatcgaaggtcctgggttttactatccacct

SEQ ID NO: 213624 - DNA, 660 bp, Unknown
  Bacterial polypeptide expressing nucleotide sequence isolated from the Sargasso Sea
aatgagaaaacttgagactttcaatcctgccaccggtgaacgccttgcagagttgaatataacaccctccaaagaaattcaagcaatggttgggagagcaaaaaaagcccaaattacatgggctaagaaaagtaatcgtgatcgtgctaatctcataattaaagcttacaaggaaattaaaaataggtctaagcaaatggctgaaataatacataaggaaatgggaaaaatacatgaagaggccgcaaatgaggttgaatcttctataaaaagaattcctagaattgcagaggatgtagtcgatgcacttaagtcagaggaaactaacgatggtgtcactcgtaccatttcctattgggaccccttgggggtttgtgccagcattactccttggaattttcccatgggcatgcctcagactcttataattcccagtttgattgcaggaaacactgttctttttaaaccttcagaagaagttcctttagttggaatagaatacgcccagattttaaataaaacactccctgaggatgttctccaggttgtgataggtacgggagatcagggacgagagttagttgaatcagacatacaactaataactttcactggttcccaatcaacgggtaagcatattctagaacaagcagcaaaaga

SEQ ID NO: 213625 - DNA, 867 bp, Unknown
  Bacterial polypeptide expressing nucleotide sequence isolated from the Sargasso Sea
tgagataattgatgaagctaattttcccccaggagtattttatttaatcaatggagatggagctacaactggcgatgctttaactagtcaccctgatgttaatatgatttcttttactgggtcaacaagagcaggagcattaatttcaaaaaatgctgctgaagattttaaaagagttagtctagaacttggtggtaaaggtgcaaatattatttttaatgacgctgattcagaagcggttgaaagaggtgctctgagatgttttagaaactccggtcagtcatgtaatgctccatcaagaatgttaattgaaaaatctatgtatgatgaagctattcaaagattaaagaaatttactaatgaatttaaagttgataatccaaataaagaaggagatcatataggtccagtaatttctgaaaaccaatttaataaaattcaaaatttaataaaaaagggaattaatgaaggagcaaaattactagtaggtggtccaggcaaaccagaaggtttggatcagggatattatgtcaagcccacagtttttatagatgtaaaaaatgatatggagatcgctaaaaccgaaatatttggacctgttttatctgttatgccttttgaatctgaagaagaagccatttcaattgctaatgatactccatatggtcttacaaattatattcaaactcaagattcagaaaaaataaagagagttgcaaaaaaattaagatcaggaatggttgatgtaaatggcgcaggcattgctgtagatgctccatttggaggatataaacattctggaattggaagagaagctggaattgagggtttaactgaatttttggaaataaaaactgttggtggctg

SEQ ID NO: 213626 - DNA, 511 bp, Unknown
  Bacterial polypeptide expressing nucleotide sequence isolated from the Sargasso Sea
cacaaaggtagattctccacaaaaagacggtgatcatattggaccggtggtttctgaggtacaatttaaaaaaattcaaactttaatacaaaagggaattgatgagggtgcaaaattagttgcaggaggtattggtaaacctaaaggattagaaaaaggttattatgttaaaccaactgtttttgctgatgttaataatcaaatggaaattgcgagaactgaaatttttggccctgtcctatctataattccgtttgaaaatgaagacgaagctatttcaatagcaaatgacactccatatggtttaacaaattatattcaaacccaagataaagaaaaagttaaaagagttgcaagaaaacttagatctgggatggtggatgttaacggtgtcggtatcgcagttgcttctccttttggtggctataaacattctggtattggacgagaagctggaaccgagggcttgatagaatttttagaagttaaaactgttggtggctggaactaa

SEQ ID NO: 213627 - DNA, 202 bp, Unknown
  Bacterial polypeptide expressing nucleotide sequence isolated from the Sargasso Sea
aagaaagaaaatttatgattatcaaacagagtcgcttgtttctattgaccatctaaaaacaacaaaatcatctataatagactcaaactatatcgatacggtgaattcaaatttaattaaaatggttatttggtatgataatgagtggggatatagcaaccgagttgttgatattttagattacatttcaaaaagaaaataa

SEQ ID NO: 213628 - DNA, 862 bp, Unknown
  Bacterial polypeptide expressing nucleotide sequence isolated from the Sargasso Sea
aatgtattcaaactttggtcaatttatagatggaaaatggcaaccttcagaagacaatgatacatatgaagttataaatcctgcaactgaagaaattattggtaaggcttctaaagccagtgaaaaagatgtcactaaagcattaaaatctgcagaaaaaggttttgaaatttggaaaaagactccagcgtgggaaagatcggccaaaataagaaaaatagctgatttaattcgcaagagaaaaaatgatctagctaaatggcttgcgttagaagtaggcaaacctcttatagaaggtgttggtgaagttatgggagcagctgatattttcgaatggaattcagaagaaacaaaaagaatatttggacaaacagtagagagtagatttgaggatacaagagtacaggttatataccaacctattggagttgttgcagctttagttccatggaattttcctatagttttagcatcaagaaaaatttcaactgctcttgctgctggctgctcagttattgttaaaccggatgttataacgcctgggtcggttatggaattaatgaatattataaatgacgcaggagttcctccgggagtagtaaatttattatctggtgatccagaaaaaatatctaatcaattaatattatctgatataattaaaaaagtttcaattacaggatcaacaagagttgggaaattaattttaaaaaaagcagcagataaagttcaaagagtaacaatggaattaagcggtcatgcgccatttatagtttttgaggactcaaacattgataaagtaacagatgtggctattgcatcaaaatatagaaataatggtcaagtctgtatatcaccaagc

SEQ ID NO: 213629 - DNA, 823 bp, Unknown
  Bacterial polypeptide expressing nucleotide sequence isolated from the Sargasso Sea
atgtttccagtttcaattgcatgcggaaatacatttgttttgaaaccttctgaaaaagatccaagttgtccaatgagattagcagaaatagcaattgaagctggtcttcctcctggagttttaaatgtcgtaaatggagataaagaagcagtagataccttacttgaaaacaagactgtacaggcaataagttttgttggttctactccaattgctgaatacgtttaccatactggaacaaaaaataataaaagagttcaagctctaggtggtgcaaaaaatcatatggtaatcatgccagatgctgatgttaataaaacaacagatgcaattattggttctgcttttggttcagctggagagagatgtatggctatttctgttgctgtttgtgttgggaaagaaactaaagaaaaaatcaaaaccaaattattagaggaaactgctaagttgaatgttggtccttacacagatgagaggagcgactttggacctttaaataataaggcacactttgaaaaagttttaggttatatcgacaccggagagaaagaaggagcaaaattattgactgatggaagaaattttaaaaaacaaggatatgaaaatggttattttgtaggacctactatttttgataacgtgaaaccagatatgaaaatttataaggaggaaatctttggtccagttttaagcatggtaacgacagaaacttatgaagatgcattaaatttagttaatgatcatgagcttgggaatggtgcagcagtttttacaaaaagcgggaatatagcaaaacattttactgaaaatgctaaaattg

SEQ ID NO: 213630 - DNA, 841 bp, Unknown
  Bacterial polypeptide expressing nucleotide sequence isolated from the Sargasso Sea
gcaactgaagaagtaataggtaaagcttccaaagcatcttctgaagatatagaaaaagctttaaaatctgccgaaaaaggttttctaatttggaaaaaattttcgccatgggatagagcaaccattataagaaaagtcgcagatttaatgagaagaaaaaacaatgaattagcaaaatggatgacactagagactggaaaaccctttacagaagctctggctgaagtaagcggatctgcggatatttttgagtggaatgctgaagaaacaaaaagaatttatggtcaaacagtacaaagcagatttgagaatacaagagttataataaattatgaaccagttggagtagttgcagctttatctccatggaattttcctcttgttttagctgctagaaaaatttcaaccgctttagccgcaggatgttctgtaatttgtaaacctgatgttatcactccaggtacagttatggaattggtggatattattaatcagtgtggagtgcctcctggagtagtaaatttgttatcaggagatccttcatcaattgcatcacaactgatttcttcagatatagtaaaaaaaatttctttaactggctccacaagggttggtaagataattttaaaacaagcagccgaaaaaatacaaagagttactatggaattaagtggtcacgcgcctcttatagtctatgaagatgctaatgtagagaaagcagttgatatagctatggctgctaaatatagaaataatggtcaagtttgtatttcgcctagccggttttatattcatgaaagtaaaaaaaaacaattcacagaatcttttgtaaaaaaaactt

SEQ ID NO: 213631 - DNA, 787 bp, Unknown
  Bacterial polypeptide expressing nucleotide sequence isolated from the Sargasso Sea
tgcaatgataaaattcgaaaacttacatttacgggatcaacggaagttgggaaaaaactgcttaaacaaggcgcagaccaagttctaaagatgtcaatggagttgggcggtaatgccccttttattgtatttgacgatgctgatattgataaggcagttgaaggagcaataatttccaaattcagaaataatggtcagacttgtgtgtgtgcaaatcgaatctacgtccaggatggagtgtatgatctattcgcaaaaaaactggaagtagctgtttcaaagatgattgtaggagacggcttttctacatcaagcacactaggcccattaattacgaatgatgctctaaacaaagttgaggagcatattgaagatgcattgaaaaagggtgctacagtccggtgtggaggaaaaagacatagtatcggcggaactttttttgagcccacagtgctaactaatgttgataagtccatgcagatttctgaagaagagacttttggtccagttgcacctttattccgctttaaggatgaagacgatgtcatagagcaggcaaataatactatatttggactagcttcgtatttttacgcgtcagaccttaaacgtgtatggaaagtagcagaggctctcgaatacggtatggtaggtataaatactggattgatttcaacggaagtagcccccttcggtggagtgaagcagtctggacttggtcgtgagggatcacatcatggaattgatgaatacttggaattaaaatatctttgtctatcactttaat

SEQ ID NO: 213632 - DNA, 481 bp, Unknown
  Bacterial polypeptide expressing nucleotide sequence isolated from the Sargasso Sea
gaccaccattcatgcgtatacaaacgatcaggttctaaccgatgtaatgcatagcgacctcagaagagcgagatctgcaacacaatccatgattccaaccaagaccggtgcagccgctgctgttggcctcgtattgccagaactggatggaaaattggacggcttttctgttcgagtgccaaccatcaatgtatcgttggttgatctcagttttattgcctcgagagagacttctgttgatgagatcaatgaggttgtgaaagccgcatcagatggagcccttaagggagttctggattacaacgatggcccacttgtatcaattgactttaaccacaatcctgcttcatctacctacgatgcaaccatgactaaagttcaagagggaactttggtgaaggtatgctcttggtatgacaatgaatggggattctcaaatcgaatgctcgatacaacacttgcgttagtcaacgccgattga

SEQ ID NO: 213633 - DNA, 976 bp, Unknown
  Bacterial polypeptide expressing nucleotide sequence isolated from the Sargasso Sea
gaaaaaatcaaggtggataatcctgccaacgtgaaaattataggaaatgttcctaaatgctcaacctctgaaactaaaaaagctattgaagtagctcaagtggctttttcttcttggaaaaataaaactgctaaagaaagatcattaattttacagaaatgggctaggcttattgagaaaaatgctgacgacttagcaaaaattatgactgttgaacagggtaaaccattagctgaagcaaaaggtgaaatcttaatgggagttacctatattgatttttatgctgaagaaggaaaaagggtttatggcgatataattcctgacccaatgccagacagacgaattgttgttattaaacagcctgttggtgttgtgggagcaattactccctggaactttccaagcacaatgattacgagaaaatgtgctccagcacttgccgtaggatgcaccgtagtaattaaaccagcaagtcaaaccccatattcagctctcgctcttggtgttttagcaaaagaagcaggatttcctgatggggttattaatattataactggttctgcaagtgctattggaaaagaattaactgaaaatccacttgtaagaaaaatatctttcactggctctactgaagttggtaaaatccttttacaacaaagtgctgcaacagtaaaaaaagtatcaatggaattaggtggacatgcaccatttgttgtgtttgatgatgcaaacattgaagaagcagtaactggcgcaatgcaaagtaagttcagaaattcaggtcaaacatgcatatgtgctaataggatatttgtgcatgaaaaagtttatgatgaatttttgaataaatttacgcaagaagttagtaaaataaaagtaggaaatggattagaggaaggaattatttctggtccacttattgatcaactatcgttaatgaaagttcatgatcaagtaaaagatgctttaatcaagg

SEQ ID NO: 213634 - DNA, 509 bp, Unknown
  Bacterial polypeptide expressing nucleotide sequence isolated from the Sargasso Sea
attgaatattgctattaatgggtttggtaggattggtagatctgttttcagaatacttaatgggaaagagaatgtaaacatagtagctataaatgatatttttgataaagaagcgcttacttacctattaaaatatgatactgtaatggggaggtttcctgaacaaataaatcttaaaggagatacactaaatacaaaaagtcaaaaagtaaagcttttggctgaaaaaaatcctgagactttaccgtgggaagatttagcagttgatatagtagttgagtctactggaatttttcgtaagcgtgctcagcttgataaacatttgatagccggtgcaaaacgtgttgtattaactgtgccttccaaagatgaaattgattatactgtagtactaggtgtaaacgatcacggactaaattcaaaacacaagattatatctaatgcttcttgtactactaattgccttgctccaatggctaaagtattaaatgatgcctttggaatagaac

SEQ ID NO: 213635 - DNA, 892 bp, Unknown
  Bacterial polypeptide expressing nucleotide sequence isolated from the Sargasso Sea
acaaaaagaatatatggacaaacggttgaaagtagatttcctgatacaagagtacatgtatattatcagccagttggggttgtggctgcattagttccatggaattttccaatagcattagcatcaagaaaaatttctactgcattagcagcaggatgctctgtgatctgtaaacctgatgttattacacctggagccgttatggaactagtagacatatgtaaagaagcaggagttcctccaggagtagttaaccttttatctggtgatccagcatcaatatctgaacaacttattaattcagatataataaaaaaagtttcaattacaggatcaacaagagttggaaaattaattttaaaacaagctgcaaataaagttcaaagagtaacaatggagttaagtggtcactcgccttttatagtttttgatgatgcggatattaataaagcaactgatatggcaattacatctaaatttagaaataatggacaagtatgcatttcaccaaatagattttatattcaagaaaagaaaaaagaagaatttattaattcttttataagaaaagctaaaaaactaaaaattggaaatggaatggataaagatgttcaactaggtcctttaacaacagaaaaaagacttaatgaggtagaacaacttgttgaaacaacaaaaaaagaaggtgcaaaagttttaatgggaggaaaaagaccagctggatttaacaaagggtatttttatgaaccaacagtttttgataatgttcaagataattttacaattatgaaagaagaaccttttggtcctttagttccaattctttcatttaatgattttgacgaaatcattgaaagatcaaataaaaatgatttgggattatgtagttata

SEQ ID NO: 213636 - DNA, 820 bp, Unknown
  Bacterial polypeptide expressing nucleotide sequence isolated from the Sargasso Sea
ccttgaaggttataccgtcctgaccttgagggaaccccatggagtaacggggcatatcattccctggaactacccgatgcaaatcatcggtcgaaccattggcggtgcgctcacgatggggaatgcatgcgtgcttaaacccggcgaggaagcctctcagacttccctgaaaatcggagatttgagtctgaaagccggttttcctcccggagttttaaacatcgtcccaggattgggcgaagaagccggtgaagctctgctgaagcatcctggggtgagccactattcattcaccggttctacggaaatcggggttaaggtccagcaggaggccgcaaaacgtgccgtccctgtgacccttgagctggggggcaaatctccccagttggttttttccgatgccgatattgaaaaagcccttccttttctggtgaatgctgccattcagaatgcaggacaaacctgttctgctgcaaccagggtcctgatcgaaaagccgatattccaggaattaacagaaaggcttgccaagaaaatcagttcactccgttctggcccggccttacaagatcttgaatgcggtcccttgatcagcaaggttcagaaagatcgggtcgaaggatttcttctgcgtgcgaggcaggacggggttgaattcctcgcagaagggagcatcgttgaggatgcacctcaagggggaaattatgtggctccctgtatggttggcggcgtgcctccgaaacatacactggcacaggatgaggtttttggcccattgctcgtcaccatgcctttcgaaggagaagaagaggggattgaa

SEQ ID NO: 213637 - DNA, 704 bp, Unknown
  Bacterial polypeptide expressing nucleotide sequence isolated from the Sargasso Sea
tatgaaaataaaagttggtattaatggaatgggcagaattggaagaatgattgttcgaacaattattgagaataataataaaaatatagaaataaaacatataaacaataggaccaactctgaaacatgttcatctctattaaaatatgattctattcacggtaaatttaatgcaaatgtaagttttgacaataatcatttaattgttaataaaaataagatctcttttagtcaagaaacagatttaaaaaatattaattggaaaaagtttggagttgattttgtttttgaatgtacaggtaaatttaattctaaagataaattattacctcatataaaaaatggagctaaaaaagttattgtttctgctccatgtaaaaatgcagacaaaactattatatttggagttaatgaaactgaaataaaaaaagaagacagtattatttccgctgcatcttgtaccacaaattgtcttgcacctgtagcttatgttttaaatgaaaactttgaaattgagaaaggttttatgactacaatccatgcatttacaagtgatcagagaatattagataattcacacaaagatccaagaagagctagatctgcaagccaatcaattgtgccaacttcaacaggcgcaacaaaaactataggtgaaattatacctagcctcaaaggtaagattgagggagtagcaatgagag

SEQ ID NO: 213638 - DNA, 676 bp, Unknown
  Bacterial polypeptide expressing nucleotide sequence isolated from the Sargasso Sea
tatagttttagaagatgctaaaatcactgacgatttgattgataatgctatgaattctgcattttggaacggtggacagaactgttcagcaaatatgagacagatagttcataaaaaagtaaaagatgaatttttagataaaatttttaaaaaagttaaaaaattaaaagtaggagatccattagatctaaaatcgaatatgggatctatgatttcaaaaggacatttacaaactgttgatggatatatccaaaaaggaattgatgaaggggcaaaacttttatctggaggagtttcagataataagcaaaaaggtttttatgcaaaaccaactttatttgatggattaaaagaaaatatgaccattgctcaggaagaaatatttggaccagtacttggtgttttaacagttaaaaatgatgaagaagctttaaaaattgcaagtaattctaaatatggattacatgctagtgtgtttactcaagacataaatagagcatttcatttagctaaaagtttgccttgtggaacggtatcggtgaatactttttctgaaggagatattaaaactccttttggtggatataaacaatctggttcactaagtagagatcaaggtactgaagctttaaattcatttcttcaaacaaaaacaatctggataagtcataattaa

SEQ ID NO: 213639 - DNA, 741 bp, Unknown
  Bacterial polypeptide expressing nucleotide sequence isolated from the Sargasso Sea
catgaacacaatacagcattttgtgaatggaaataagttctcaggtgactccaagagagtaggcaaagtttacaatccagccacaggtgatcaaagtgctgaagtgaagttagcgtcagcgaaagatgtaaatgacgctgttgagagcgcaaaaaaagctttcgagacatggtctaataagcctccacttcagagagcaagagtaatgtttaaatttaaagaattaatagagaaaaattctgatgaattaactaaaataattgtttccgaacatggaaaagtttatgaagatgcaaaaggatcacttacaagaggcctggaagtagttgaatatgcatgtggtataccacaaatgttaaaaggagaatttacagaaaatgtaggttcaaatgttgatagttggtcaataagacaacctttaggagtttgtgctgggataacgccatttaattttcccgcaatggttccaatgtggatgtttccaatggctatagcttgtggaaatacatttgttttaaaaccatcagaaaaagatccatcgtgctcagttagattagcagaactattaaaagaggctggattacctgatggtgtttttaatgtggtaaacggggataaagcagcagttgatgcactaataaataataaagatgttgtagcaatgagttttgttggatctacaccaatcgcaaagtacatttatgaagaatgtgcaaaaaatgaaaaaaagagtgcaagctt

SEQ ID NO: 213640 - DNA, 855 bp, Unknown
  Bacterial polypeptide expressing nucleotide sequence isolated from the Sargasso Sea
tttaatccagcaacagaagaagttttaggtaaggcatcaaaagctgatgaagaagatgtaaacaaagcacttaagtcagctgaaaaaggtcttgaagtttggagaaatactcctccttggcaaagatcaaaaataattagaaggattgctgatctaatgagagagagaacagatgttttagctaaatggttaacacttgaagtaggtaaacctttatcagaggcgaaaggagaagtaggaggagctgctgatatttttgaatggaactctgaagaaacaaaaagaatttatggtcaaatagttgaaagtagatttgaacatacgagaatgtatgtaaaatatgaacccgttggagttgttgctggactaataccgtggaattttcctatcatgttatcttcaagaaaaatttccactgctttagctgctggatgttcagtaatttgtaaacctgatgtaattactccagggagtgtaatggagcttatgaatattataaatgatgcaggtgttcctcctggcgttgtaaatttattatctggcgatcctgctaaaatctcatctcaattaatgtcatctgatatagtgaaaaaagtctctataactggttcaacaagagttggaaaactaattttaaaacaagcagctgaaaaagttcaaagagttacaatggaattaagtggtcattcgccttttattgttttcgatgatgtagatattaacaaggtaacagacatggcaatcactgcaaagtttagaaataatggtcaagtttgtatatctccagcaagattttatattcatgaaagtaaaaaggatgaatttgcaaaaacattagttgaaaaggttactaaa

SEQ ID NO: 213641 - DNA, 900 bp, Unknown
  Bacterial polypeptide expressing nucleotide sequence isolated from the Sargasso Sea
agaatatcacttttggaaaaattattaaatatttacaaaaaaagatttgatgagatggctaatgcgatatctatggaaatgggtgcaccaatagattggtctacaaatgtacaaactgctagtggacaatctcatttagaagattttattataagattaaaagaatttaattttgaaaaaaattttgatccaaaatcaaataattatattcgccatgaacctattggagtttgtggactcattactccatggaattggccaattaaccagattgcattaaaagtaataccagcttttgcaactggttgtacgatgatacttaagccatcagagatagcaccaatatcaggagtaatatttgctgaaatgattgatgaagcagattttccaaatggagtttttaacttagtcaacggaactggagatgttgttggtaaccaaatatcaggacatccagatattgatatggtttcatttacaggttctacaagagcaggaaaattaattttaaaaaattcagctgaaacaattaaaagggtttgtttagagttaggaggaaaaggtggaaatattgtatttgcagactcctaccctaatgctgttagagatggaattaaaaacgtaatgagtaattctggacaatcttgtgatgcaccaacaagaatgcttgtagaaaagtctatttatgaaaaagctataaaagaagcggcagatgaagctagtaaaatgaatgtagaccttgcctcaaaaaaaggagatcatataggaccagtcgtttcaaaagtgcaatatgataaaataattaatttaattaatagtggaatcgaagaaggagcaacattagccgctggaggaccagaactcccaaataatctaaacaaaggctattttataaaccaa

SEQ ID NO: 213642 - DNA, 934 bp, Unknown
  Bacterial polypeptide expressing nucleotide sequence isolated from the Sargasso Sea
ctttgtgcctttggtctctatatttgctgcaggaaatcaagttatgcacaaaccaagtgaacatacaccgttaacctctgcattactaaaagatttatgtgataaagcctatgatgaagttgaatttgctacgtttcttggagggccagaggttggagctgcttttactaagctaaattttgatcatcttctttatactggtggaggatctgttgctaagcatgttatgaatgcagcttctgagaatttagttcctcttacccttgaacttggcgggaaatccccagtagtgttaggtaaatctgctgatttaaaaacctccgcaaaaagaattatgtttggtaagacactaaatgcaggtcaaatttgcttagctcctgattatgtagttgttcataaagatcaaaaaaatgattttatcaaggaaactaaagatgctgtttctgagtactttcctaaaattaaagacaatgatgattacacatctattattaatgaaagtcattacaatcgtttaaaagatatgattgatgatgctatagaaaagggagcaacagttgaagaaataaatcctgctaatgaagatttctcacaacaagagttttataaaataccaccaacaattgtctccaatacaaccgatgatatgaaaattatgcaagaggagatatttggtccactattgcctgttgttgaatatgatgaaattgatgaagcaacacaattgattaattctaaagatagaccactgggcctttattattttggtaatgataaaactgaagaggataatttattaaataaaacttcatcaggtggagtaacagttaacaatgtaattagtcatcttcagcaaaatgatttatcttttggaggtgaaggtccttcaggtatgggtagatataaatcttttgaaggttttaaaaactttcaa

SEQ ID NO: 213643 - DNA, 904 bp, Unknown
  Bacterial polypeptide expressing nucleotide sequence isolated from the Sargasso Sea
gatgtttccaatagcaattgcatgtggaaatacatttattttaaaaccatctgagaaagacccatcatgttcaataatgttagcacagcttttaaaagaggcaggtttgccagatggagtctttaatgtagttaatggtgacaaagaatctgtagatgcaattttagaaaataagaacattaaagcagttagttttgtaggatcaacaccaattgcaaagtatatttatgagaatgctgcaaaaaacgaaaaaagagtacaagctttagggggtgcaaaaaatcatttagtagttatgcctgattgtgacatcgatggtgcagttaatggattaatgggagcagcttatggatctgctggtgaaagatgtatggctcaatcagttgctgtagctgtaggagatataggtgacgaattagtttctagactttcaaaaaaagcagaagctttaaaagtaggaccaggcatggacaaaaattctgaaatgggaccattaataacaaaagagcatttggaaaaagtaaaaggttacgtagatttaggagttaaagaaggagcagatttagttgtagatggaagaaatataaaactccaaggctacgaaaatggattttttataggcggatgtttatttgataatgttaaaaaagatatgagaatttataaagaagaaatatttggacctgttttgtcagtcgtaagagttaaaactttcgaagatgcaactaaattaattaatgatcacgaatatggtaatggtgttagtatttatactagagatggagatgccggaagaacatttgcaagcaaaattcaagttggtatggtgggtattaatgtaccgataccagttccaatggcttttcatagttttgggtggctggaaaagatcattatttggtga

SEQ ID NO: 213644 - DNA, 391 bp, Unknown
  Bacterial polypeptide expressing nucleotide sequence isolated from the Sargasso Sea
gttagcaggagggttaggaaaaccagaggggatggataaaggctggtttgttaaaccaacaatcttttcagatgtttcgaatgatatgagcatcgctcaagaagaaatatttggtcctgttctagtgataatcccctttgaaaatgaaagtgatgctgttgccatcgccaatgatacaccctatgggcttgctgcatatttgcagactggtgatccagatcgcaaagaacgggtttctgccaagcttaaagcaggtgccgtgcatattaatggtggtggcattgaatacgggaccccctttggcggctacaagcaatcaggcaatggtcgtgaaggaggtttgatgggccttgaggattatttagaaacaaaaactcttcatggtctttag

SEQ ID NO: 213645 - DNA, 813 bp, Unknown
  Bacterial polypeptide expressing nucleotide sequence isolated from the Sargasso Sea
taaacccctctaaccagcaacatttgggcgatgttcccttagctgatgaaaaagatgttaacagggctgtaattgcagcaaagaatgcatttccggactggtcccgaatgcctatcaaggaacgtgcaggatttctaataaatctagcagatagactcatggattatagggatgagcttggaatgatggattgtgttgactcaggtaatgcactatctggaatgaaaggtgacgtaaactggtcttctgactccctgaaattttttgcaaacctaattacagaaatcaaaggacagacccactcagaaaagtcaggtcatttaaattttacaaggagacatccttatggtgtagttgccaagattaatcccttcaatcatcctctgcgtttttgcgcagaaaaatccgcagcagctttagctgcaggaaacactgttgtagttaaagcctcggaacaggcgcctttgtcaagtttaagatttgctgaaatctgtgaagaggttctccctcaaggagtagtcaatgtattgactggtgacaaaatttgcggtgatgcaatggtccgtcatccagatgtaagacgtgtaggagtagtgggctcagttgctactgggaaaataattgctaaatctgcggcggaagatctgacccatgttacacttgaactgggcggaaagaaccctatcatcatatttccagatgcaaatccaaaacaagccgcaagttatgcagtaaaaggtatgaatatgaaccgacagggacagtcttgcagttctacttccagagttcttgtgcaccaggaatctccatgat

SEQ ID NO: 213646 - DNA, 730 bp, Unknown
  Bacterial polypeptide expressing nucleotide sequence isolated from the Sargasso Sea
gaaatctcctaacattttttctttgaagatatcatgggaaaaagatgatgacttctttgataagtgtatagagggttttgtaatgtttaatctaaaccaaggtgaggtttgtacttgtccaagtagagctttagttcaagagtctatctatgataaattcatggaaagggctgtagcaagaacaaaagctgttgttcaagacaatcctttaaaaatggaaactatgattggagctcaagcctcagttgaacagatggagaaaataaaatcttatcttgaactaggtaaaaaagagggcgctaaagttctaactggcggaagtgttggtaaacttaatagtggattggaaaaaggtaattacattcaaccaactatttttgaagctaacaaccagatgagaatctctcaagaagagatctttggaccagttgtatcagtgatcaaatttaaagatgaagcagaagcattaaaaattgctaatgatactctttatggtttgggagctgctgtgtggaccagaaatggtaatatagctcacagaatgggtagagcgatacaagcaggaatagtatggacaaattgttatcatgcttatccagcacactcaccatttggtggttacaaacaatcaggagttggaagagaaactcataaaatgatgcttaatcattacagacagaataagaacttacatgtgtcttatgctgaaaagaaattaggcttcttttaa

SEQ ID NO: 213647 - DNA, 778 bp, Unknown
  Bacterial polypeptide expressing nucleotide sequence isolated from the Sargasso Sea
attgaacgctagtcagcggggtgaattgctaaataatcttgcgaacctaatgcaacaaaatgcttctgagctcggtaaaatcgaagtaagagacaacggtaaactttttatagaaatgaaggcgcaagtaatttatgcagcaagtatcttacgttattatgctggattagctgataagattgaaggcgcggtgataccgagtgataaggatgctctgatttatacaaggtatgagcctttaggcgtatgtgcagcgatagtcccttggaattcacctattatctgtgcagttttcaagatcgctccagcactgtcggctggcaataccgtgataattaagccttcggaatatacctcagcctcgatcttagagttgatgaagcttgtcggaaaggcggggtttccaaaaggcgtcatcaatgtcgtaaccggttttggtaaagatgttggagcggccctagtggctcatcctctggtcaaaaagctatcgttcactggttcgagtcaaacaggcgctgctatctattcagatgcagcgaaaagcatcaagcatgtaggtcttgagttgggaggaaaatcaccaaatatagtgtttgaggatgcaaatcttgataatgctataaaaggggcaatagcaggaatttacgcggcctctggccaaacctgcatagccggatctcgtctacttgtgcaaagcagcattcatgacgaatttgtggaacgcctaaaagaatttgcgcaacatgcgataatgggtgatcctatggatattaagaca

SEQ ID NO: 213648 - DNA, 898 bp, Unknown
  Bacterial polypeptide expressing nucleotide sequence isolated from the Sargasso Sea
atgataattaaaattggaattaacggaatggaaagaattggtcgtatggtattcagatcaattgtcgaaagtaaaaataaaaatttaaaaattaatcatataaataataggtcaaattcagaaactacatctaaattaattaaatatgattctatacatggaaaattaaatgctcatctaggtttcgatgcaaatcatttaataattaataaaaataaaatttcattttctcaagaaacaaaaattgaagaaattgactggaaaatacatgatgtagattatgtttttgaatgcacgggaaaatttaattcaaaagaaaagcttgttgcacatttaaaaaatggtgcaaaaaaagtcattgtttcagctccatgtaaaaatgctgataaaaccatagtttttggtgttaatgaaaatataattactaaagaagataaaataatatctgctgcatcatgtaccaccaattgtctagcaccagttgctaacgttctaaatgaaaattttgaaattgaaaaaggtttcatgactacaattcatgcttttacaagtgatcagagaattttagataattctcacaaagaccctagaagagcaaggtctgcaaatcaatctatagttcccacctcaacaggagcttcaaaagcaataggagaaataattccaagcctcaaaggaaaattagaagggattgcgatgagagtacccactccaaacgtttctcttgttgaattggttttttgtacaaaaaaaaaaattgatattaaaaaaatcaataacgcttttgaacaagcatcaaaaaataaattaaaaaaaatcttaaaagttactaatgaaaaattggtatcaatagattttaatcatgatcctgcatctgcaatagtagatgcttcttgac

SEQ ID NO: 213649 - DNA, 372 bp, Unknown
  Bacterial polypeptide expressing nucleotide sequence isolated from the Sargasso Sea
aatgaaaatagcaataaatggatttggaagaataggaaagcttgtatttcgtgcatttctagaaaaaaatattaaaggatgtaaaattgtggctattaatgagcttggttctatagaatcaagttttcacttacttaaacatgatagtaatcatggtatcttaggtaaaaaaattaaaaaaaaacataattcaattcaatatgataacaatatagtaaagtttttttcagaaaaaaatcctataaaacttccatggaaaaaactgggtattgatgtggtgctggaatgtagcggagtttttacaagtaaagataaagcttatgcccacataaatgcaggagcaaaaaaagttattatatcagcaccagcaaa

SEQ ID NO: 213650 - DNA, 909 bp, Unknown
  Bacterial polypeptide expressing nucleotide sequence isolated from the Sargasso Sea
tttgcttgtggtataccacaattacttaaggggagaatttacagagaatgttggtacaaatgtagatagttggtcaatgagacagcctcttggagtttgtgctggtattacaccttttaactttccagcaatggttcctatgtggatgtttcctattgcaatagcttgcgggaacacttttgttcttaaaccatcagaaaaagatccatcttgttctatgaaattagcagaattatttttagaagctggtcttcctcctggtgtctttaatgttgttaatggagataaagaggcagtagatgcgattattaataataaagatatagccgcagttagtttcgttggctcaacacctatagctaaatatatttatgaaaactgtgcaaaaaatgaaaaaagagttcaagctttaggtggtgcaaaaaatcattgtgtggtcatgccagactgtgacttagatcaagcggtaaacggtttaatgggagcagcatatggatcagctggggagagatgtatggctcaatcagttgctgtagctgttggaaaaattgctgatccattagtagaaagtttatcaaaaaaagtcgagtcacttaagattggtcctggactagataagaaatctcaaatgggaccactagttaccaaagaacacttagaaaaagttaagggatatgttgatattggtgtaaaagagggagcaaagttagttgttgatggaaggaatttaaaactccagggctatgagaatggtttttatatggggggatgtctattcgacaatgttaaaaaagatatgagaatttataaagaggaaatatttgggccagtgctttctgttgtaagagttaaagattatggagaggcattatctttagttaatgaccatgaatttggaaatggaacaag

SEQ ID NO: 213651 - DNA, 343 bp, Unknown
  Bacterial polypeptide expressing nucleotide sequence isolated from the Sargasso Sea
aaaccaacaattttttcagatgtaaataatgatatgaaaattgcaagaactgaaatttttggacctgtgctttcaattataccatttgaaactgaggaagaagcaatagcaattacaaatgatacatcttatggacttggtaattacttacagactgaagataaagaaaaagctaaaagagttgctagaaaagttagagctggaacagtttatataaatggtcaagccactgatactggaatgccttttggtggttataaacaatctggtaatggtcgtgaaggtggtgtctggggtttcactgaatttttagaagttaaagcaattaccggttggaattaat

SEQ ID NO: 213652 - DNA, 703 bp, Unknown
  Bacterial polypeptide expressing nucleotide sequence isolated from the Sargasso Sea
gatgtttccaatggcaattgcatgtggaaacacttttgtattaaaaccatctgaaaaagatccttctatctcaatcaaattagcagagttattcaaggaagctggactgccagatggagtatttaatgttataaatggtgataaggaagtagttgatgcaatattaactaacaaagatattaaagctgtaagttttgtaggatcaactccgattgcaaaatatatatatgagaatgcagcaaaaaatgaaaaaagagttcaagctttgggaggcgcaaaaaatcattgtgttgtgatgcctgattgtgatttagatcaagctgttaatggcttgatgggagcagcttatggatctgctggtgaaagatgtatggctcaatctgtggcagttgcagttggaaatattggagataatttagttaatgaattatcaaaaaaagttgaagcattaaaagttggaccaggtatggacaaaaaatcagaaatgggtcccctagttacaaaggaacacttagaaaaagttaagggttacgttgacctaggagttaaagaaggagcaaaattagtagttgatggaagaaatctaaaactgcaaggatatgaaaacggttactatataggtggatgtttatttgatcatgttaaaaaaaatatgaggatttataaagaggaaatttttggccctgtacttttctgtagttag

SEQ ID NO: 213653 - DNA, 497 bp, Unknown
  Bacterial polypeptide expressing nucleotide sequence isolated from the Sargasso Sea
ttcaaaaaaaggagatcacataggtccagttgtttcaaaagttcaatacgataagatcattagcttaatacaaagtggaattgatgaaggtgcaactttagcagccggtggtcctgagctacctaaaggtatgaataaaggttactttattaaaccaactatttttacagatgtgactaatgatatgagagtagctaaagaagaaatatttggccctgttctttcaattattccatttgaaactgaagaagaagctatcaaaattgtaaatgagacagagtatggtcttggaaactatttgcaaactgaagacaaagaaaaagcaaaaagagtttcaaaaagacttaaagcaggaacaatttatgttaatggtaatggcgctgacccaggtgctcctttcggtggctataaacaatcaggtaatggacgtgaaggtggaacatggggattgcatgaattcctagaagtaaaaacaattacacactggccaaaataat

SEQ ID NO: 213654 - DNA, 760 bp, Unknown
  Bacterial polypeptide expressing nucleotide sequence isolated from the Sargasso Sea
ggaagctcttggtcgacataaagatattgatgcagtatcttttacaggatctaccgaagtaggtggttattttttaaaatactcaagtgaaagtaatttaaaaccagtcgcattagagatgggaggaaaaagtccatttatagttttagaagacgctaaaattacagatgatctaattgataatgctatgaattctgcattttggaatggtggacaaaactgttcagcaaatatgagacagatagtgcataaaaaagttaaagatgaatttttagataaagttattaaaaaggttaaaaaactaaaagtaggagatccattagatttaaaatcaaatatgggatctatgatttcaaaaggacatttacaaattgttgatggatatattcaaaaagggatagatgaaggagcaaaacttttatctggaggagtttcaagcaaaaagcaaaaaggtttttatgcaaaaccaaccctatttgatggattaaaagaaaatatgaccatcgctcaagaagaaatatttggaccagtgctaggtgttttaacggtaaaaaatgatgaggaagctttgaaaattgccagcaattcgaaatatggattacatgctagtgtatttacacaggacataaatagagcgtttcatttagctaaaagtttgccttgtggaactgtatcagtaaatacattttcagaaggagatattaaaactccatttggaggctataagcaatcaggttcattaagcagagatcaaggtacc

SEQ ID NO: 213655 - DNA, 871 bp, Unknown
  Bacterial polypeptide expressing nucleotide sequence isolated from the Sargasso Sea
aaggaagcacaaccaactaccggcgcatggttagagaaacgcgatccacatacaggtcagaccatgagcttagttgctgattcctcttcagaagatgtttctttagcattagatgctgcagaggcagcgttcatggaatggtcttgtatgactccaatcgcaagaggtcaagttcttgctgacattgttgcttccatgaaaataaaaaaagtagaacttgcggcatgtattgctagtgaaacgggtaagccaccccaggatgctgagggagaagtctctggtgcaattcagcagggaagtttttttgcaggagaaggtatgcgactttatggtagaacactgacttctgctatgccaggaaagcaaagctttactgttcggcagccaagaggaattgctggtctgatcgtaccggctaatacacccattgcgaatattgcatggaaagcatttcctgcactcattaccggcaatacagttgtaatgaaagctgccgaggatgcccctgcaattgcaaatctttttgcacagcttgcccaagaagcaggtctacccgacggagtcttcaacgtgatccaagggaatggtcaaccagctggctcatctttggttgaagacccaagagtagatatcatcagttttactggttcttcagatgtgggtcgctggattgctgaggtagcaggtcgtcgactggcgagggtttctttagaattgggcggaaagaatccttttgtggtgtgtaatgatgccgacatggaacaggctattcactgggcttcgctttctgcattcagtaatgctggacaacgctgtgctgccgggagtcgaatcatagttttcaaggaatatatacgattcatttcttgaa

SEQ ID NO: 213656 - DNA, 556 bp, Unknown
  Bacterial polypeptide expressing nucleotide sequence isolated from the Sargasso Sea
atgagttcaggtaacaaatataaagtaatagccaataaacttaaatttgaaggaagagcattcattaatggcaaatatgtaaatgcaattgatggtaaaaagtttgaaacaatcaatcccgcaactggtaaaaaactttgtgttgttgcaaaatgtaatcataaagatgttgatttagcagttaaagtttcaaggaaagcttttaatagtggagtttggtctagaagttcacctgaacatagaaaagaagttttattaaaatttgctgaattacttagaaaacatggtgatgaaaattcagttttagaatgtatagatacaggtaaacttatcaccgattgcattaatgaagttgcaaatgatgcgccaatgcattttcagtggtatggagaattaattgataaagtatttggaaaaattggtccaacagaaccatctattactagtttaattgttaaagaaccaataggagttattgctggaatcgttccttggaactttcctttaatgatggcggtatggaaaatggcaccagctcttgcagctggttgttcag

SEQ ID NO: 213657 - DNA, 808 bp, Unknown
  Bacterial polypeptide expressing nucleotide sequence isolated from the Sargasso Sea
aaatcatttaacgattaacaaaaaaaaaattacttttagtcaagaaacagatttaaataatattaattggaaaaaatttaatgttgattatgttttcgagtgtactggtaaatttaactcaaaagaaaacctattaccccatttaaaaaatggtgccaaaaaggttattgtttcggcgccttgtaagaatgcagataaaacagttgtatttggtgttaatgaaaataaaattaaaaaaaacgataatataatatccgctgcctcttgtaccactaactgtcttgcgactgtagcttacgttttaaatgaaaattttgaaattgaaaaaggttttatgacaacaattcactcttttactagtgatcaaagaattttggataattcacacaaggatccaagaagagctagatctgcaagtcaatcaatagtaccaacttctacgggagcatcaaaagcaataggtgaaattattccttcacttaaaggcagattagaaggaatagcaatgagagtaccaacgccaaatgtgtctatagttgagttagttttttgtacaaaaaaagacataaacattgaaaaaattaataatgcatttaaaaaatttagtaaaaaacaaaagaaaaaagttctcgaaataactaacgaaaaacttgtgtcgattgattttaatcataacgcagcttcatcaattgtagacgcgtcacttaccaaggtagttggaaaaaatatgggtaaaatttctgcttggtatgataatgaatggggcttttctaatagaatgtgtgatatagtagattatattcataaa

SEQ ID NO: 213658 - DNA, 781 bp, Unknown
  Bacterial polypeptide expressing nucleotide sequence isolated from the Sargasso Sea
atgtacgaaaaatttggtcagtttattgacggtaaatggcaacaatcatcaagtggtgaaacatatgaagtaattaatcctgctaccgaggaaattatcggtaaagcatcaaaagcaaatagcacagatatacaaaatgcacttaaatctgcacagagaggtttggaaatttggaggaatacatcaccctgggagagatcaaaagtaattagaagaatctcagaattgatgagaaataaagttgatactttatcaaaatggctcactttagaagttggtaaacctctatcagaaggaccaggtgaagttggtggagcggctgatatatttgagtggaactcagaggaaacaaaaagaattttcggagaaattaatcaaagtcgtttccctaatacaaaaatacatgtcgtttatcagccagttggcgtagttgcggcgttagtgccatggaattttccggttattttggcttcgagaaaaatttctactgctcttgcagctggatgttcagttatagtcaaacctgatataataacaccgggcagtgtaatggaaattgtcaatatatgtaaagaggctggtgtacctccaggtgttgtgaatttattatctggtgacccagcagctatttcgtctgaattaattcagtcagatataataaaaaaaatatctattaccggatcaacgagggttggtaagctcattcttaaacaagctgcagataaagttcaaagagttacaatggaactaagtggtcattctcccatttattgtgtttgat

SEQ ID NO: 213659 - DNA, 856 bp, Unknown
  Bacterial polypeptide expressing nucleotide sequence isolated from the Sargasso Sea
taattatatagcttatgagccaataggagtttgcgcattaattactccttggaattggcctataaatcaaattactcttaaagtgataccagcattagccgctggttgtactatgatattaaaaccttcagagattgcacctctttcaggaatgttgtttgctgagatgattgatgaagctggatttcctccaggtgtttttaatttaatcaatggagatggtgctggcgtgggaacagaattatcaggtcatcttgacatagatatggtatcatttacaggatctacacgggcaggaaaattaatctcaaaaaatgctgcatcaaatattaagagagtatgtttagagttaggtggaaagggtggaaatattgtttttgaggactcttatcctgatgctatcagagaaggggttagaaatgttatgagtaattctggacaatcatgtgatgctcccactcgtatgcttgttcaaaaaacaatttatgaaagagctgtaaaagaagcagcagaagaggcaaataaaataaaagtagatcttgctgaaaagaatggagatcatattgggcctgtagtttcaaaaaaacaatacgataaaattatagatttaattcagagtggtattgatgaaggggctaccctagtagcgggaggaattgaaaggccctcagggttaaaaaaaggtttttttattcaaccaactatatttactaatgtaactaataatatgaagattgcaaaagaagaaatttttggacctgttttatctattatcccatttgaaaatgaagaagaagcaatatctattgtaaataatacttcatatggtttaggaaattatgttcaaactcaaaat

SEQ ID NO: 213660 - DNA, 658 bp, Unknown
  Bacterial polypeptide expressing nucleotide sequence isolated from the Sargasso Sea
aaaggttattgtttcagcgccatgtaaaaatgctgataaaactattgtatttggagttaatgaaaatgaaataaaaaaagaagataacattatttctgctgcatcttgtacaacaaattgtcttgcgcctgttgcccatgttttaaatgaaagttttgaaattgaaaaagggtttatgacaacaattcattctttcacaagtgatcaaagaattttggataattcgcacaaagatccaagaagagcgagatctgcaagccaatctatagtaccaacatcaacaggggcatcgaaagcaataggtgagataataccttccctaaagggtaaattggaaggagttgcaatgagagtgccaactccaaatgtttctcttattgagcttgttttttgtacaaagaaagatttaagcattgagaatattaattcagcatttgaaaatttttgtaaaaaacaaaaaataaaggttttagagataactaaagaaaaacttgtatctattgattttaatcacaatcctgcatcagcaatagttgatgcaactttaactaatgttgttggaaaaaatatgggtaaaatttctgcctggtacgataatgaatggggtttttctaataggatgtgtgatatagcagaataccttcgtaagatttcttaa

SEQ ID NO: 213661 - DNA, 853 bp, Unknown
  Bacterial polypeptide expressing nucleotide sequence isolated from the Sargasso Sea
aaaggacccttcatgctctattaagttagctcatttgcttacagaagcaggtcttccagatggcgtgtttaatgtagtgaatggtgataaagaatctgtagatgcaatattggagaactcagatattaaagcagtaagctttgtaggctcaactccaattgcaaaatatatttatgaaaattcagctaaaaatgaaaagagagttcaagcgctaggtggtgctaaaaatcatttggtggtaatgccagattgtgatttagatggagcagttaacggtttaatgggcgcagcttatggttctgcaggcgaaagatgtatggcccaatcagttgcggttgctgttggagatattggagatgagcttgtttctagattatctaaaaaagccgaagctttaaaagttggccctggaatggataaagcatctgaaatgggtcctttggtaacaaaagaacacctagaaagagttagaggatatgtagatttaggtgttaaagagggtgctaaactagttattgatggaagagatcttaaacttcaaggttatgagaatggattttatattggtggttgtttatttgatcatgtcaataaagatatgagaatatacaaagaggaaatattcggcccagtattatcagttgtaagagttaaaacttttgaagaggctgcaaaattaattaacgatcatgaatatggaaatggagtaagtatttatactagagatggagatgctggaagaacattcgctagcaaaattcaggtaggtatggttggtattaacgtaccaataccagtgccgatggcctttcatagttttggaggctggaaaagatctttatttggagatagt

SEQ ID NO: 213662 - DNA, 379 bp, Unknown
  Bacterial polypeptide expressing nucleotide sequence isolated from the Sargasso Sea
gaacataaaaatatttcaaaaattgcatttacaggatcagatatttctggacaaaaaatttatgaaactgctgcaaaaaaaataatgcctgtatctttagagttaggtggtaaatcacctaatattgtttttgaggatgctgattttgaggcagctattatgggtgtgatttcaggaatatttgctgcaacaggccaaacatgtatagctggatctcgacttttagttcaagattcaatatatgaaaagtttgttgaaagacttgtaaaagttgcgagtgaggcaaaaattggagaccccatgtctttagacactcatgttggccctgtaacaactaaaccacaatttgaaaaaataatgagctatattgatattgcaa

SEQ ID NO: 213663 - DNA, 870 bp, Unknown
  Bacterial polypeptide expressing nucleotide sequence isolated from the Sargasso Sea
aatgctgaagaaacaaaaagaatttattggacaaacaatacaaagcagatttaaaaacacaagagttattattaattatgaaccggtgggagtagttgccgctttgtctccatggaattttcctcttgttttagcttcaagaaaaatttcaactgctctagcggcaggatgttctgtaattagcaaacctgatgtaataactccaggcactgttatggaattagtagatattattaatcagagtggagtacctcccggtgtagtgaacttactttctggagatcctccatcaatagcatcacaattaatttcttcggatatagtaaaaaaaattagtttaactggttctacaagggttggtaaaataattttaaagcaagcagctgaaaaaatacaaagagttaccatggaactaagtggtcacgcacctttcatagtttatggagatgctaatgtagaaaaagcagtcgatatggctatgtcagctaaatacagaaataatggtcaagtttgtatctcgcctagtcggttttatattcacgaaagtataaaaaaagaatttacagaatcgtttgttaaaaaaactttgaagttaaaaattggaaatggaatggacaaagatgtccaactcggtcctataactacaaaaaaaagattggaagaaatagaaaaacttgttgaagtaacaaaaaaagaaggagccaaaatactatgcggaggaaaaagaccatcaggatttaataaaggatatttttacgaacccacaatttttgataatgttcaagatgattttaaaattatgacagaagaaccttttggtcccttaacaccgttattaacttttaataattttgatgaagtaattaaaaa

SEQ ID NO: 213664 - DNA, 824 bp, Unknown
  Bacterial polypeptide expressing nucleotide sequence isolated from the Sargasso Sea
tttggagttatcactccttgataccatagacatgggtaaaacaattaatgatacttacaatgctgacttaccaactagcatagataatattgaatggtatgctgaaataattgataaactttttgatgacatttcgccaagttcaaaagaatatttgggcttaattaccaaagagccaattggagttgtagcagcgatagtaccttggaattatccattatggatggcaatatggaaaattgctcctgcgcttattactggtaattctgttatattaaagcctgcagaacaatctccaatgagcgctattaaaattggtgctctgctctcagaagctgggataccggatggagtattttcagtactaccaggagatggacctattacaggcaaatcattatgtcttcataatgatattgattgtgtagcttttactgggtcaggtgaagttggcaaactagtacttcagtattctggtcaatccaatatgaaaagagtgcaacttgagtgtggaggaaaatcaccaaatattatttttgcagattgtgatgatcttgatagagctgcagaggcatctgcttatgctatctttggaaatcaaggtgaggtttgttcagcaggttctagacttataatccaaaaagatattgaaaaagattttattaataaagttgttcaattaagtaaaaaaatgcaaccttcagatccgctaaatccagattcatttgctggagcaatagtaaatactgaacagttagaaaaaataaataaatatgtaaatataggtaaaaaagagggggctgatattgaagtcggaggaaata

SEQ ID NO: 213665 - DNA, 313 bp, Unknown
  Bacterial polypeptide expressing nucleotide sequence isolated from the Sargasso Sea
catcgctcaagaagaaatatttggaccagtgctcggtgttttaacggttaaaaatgatgaagaagctttaaaaattgctagtaattctaaatatggattacatgcaagcgtatttactcaagatataaatagagcatttcatttagctaaaagcttaccttgtggaactgtgtcagtgaatactttttctgaaggagatattaaaactccttttgggggatataaacaatctggttctctaagtcgagatcaaggtactgaagctttaaattcatttcttcaaacaaaaacaatctggataagtcataattaa

SEQ ID NO: 213666 - DNA, 944 bp, Unknown
  Bacterial polypeptide expressing nucleotide sequence isolated from the Sargasso Sea
catgcaactcaactacatcgccaacgcctcggtgccctcgtcctcgggccgcacgatccctgtgatcgacccgtccgacggccagcccttcgacgagatccagcgcagcaacgccgacgacatcgacgcggcggtgcatgcggcccgccagtgctaccacgcggtgtggcagaagctggctccggtggaacgcggccgcctgctgcaaaagctctcggccaagatcctggaacatgcggacgagctgacggcgctggagcagcgcgactgcggcaagcccaccaagcaggcacgcgccgacgcgattgcgctggcgcgctacttcgagttctacgccggtgcatgcgacaagttccacggcgagaccatcccctaccccgacggctacagcgtgctgacttggcgcgagccccatggcgtcacgggccatgtgatcccctggaactacccgatgcagatcttcggccgcagcgtaggcggtgccctggctgcgggcaatgtgtgcgtggtcaagccggccgaagacgcttgcctctcgctgatccgcgtggcgcaactcgcggccgaggtgggcttccccgccggcgcgctcaacatcgtcaccggctacggccatgaagtgggcgacgcgctggcgcgccaccccggcatcgaccacatcagcttcaccggcagccccaagatcggcacgctgatccagcaggtggcggcagagcgccactgcccggtgacgctggagctgggtggcaagagcccgcagatcatctttgcggatgccgacctggacgccgccatccccgtggtcatcaacgccatcgtgcagaacgcagggcagacctgctcggccggctcgcgtgtgctgatcgactcgctgatttatgaacccctgctggagcgcctgggcaaggcgtttgaaaagctgcgagtaggccccgctgccatgg

SEQ ID NO: 213667 - DNA, 685 bp, Unknown
  Bacterial polypeptide expressing nucleotide sequence isolated from the Sargasso Sea
ggccttgttgccactatcactccctggaattttccattagctatgttcgcgagaaaggctagcgcagccttagctgctggttgcagtgttataacaaaacctgccgaagatactcccttaactaccttagccatgatttctttggcgcgtgagacaggactaatccctgaaatattagacgcaattgttgttccgagaagcaaggtttctgagattggaaaattgctatgtacaaatcaaaaaattagcaagatatcttttacaggttcaacagcagttggaaagcagttggtattgcaaggagcgggcactttacaaaaattttcccttgagctgggaggtaatgcgccttttatagtcagggaagatgctgacttagagttagctagcgatgaacttatattaagtaaatttcggaacgctggccaaacttgtgtatgcgctaatagaatttttgttaactctttagttttcgataatttcgtgtctatttttcttaataaggttaaggccattaaaactggttgtggatttgaggctggcgtgcagatcggaccgcttataaaccatgcagcggcgaatcgctacgaaggactaatctcagatttgaaacttagtggagctaaattcctctatcaaaaggaaaaaggggacaaaggtttgatttttgaacctacggtggcga

SEQ ID NO: 213668 - DNA, 925 bp, Unknown
  Bacterial polypeptide expressing nucleotide sequence isolated from the Sargasso Sea
ggaggtgcttgagaaattagcagatttgctgtcagaaatgtctgaaccccttggtaaaatagaaaccattgatactggtaaaatgcttaaagagacccggtggcaagcaaagtatatagcagagttttttaatttttatgcaggttgtgccgataaaataagtggagaaactcttcctatagataagcctgatctattagttttcacagagcgtgaaccgttgggagtagtagctgcagtcgttccctggaattcacagttgtttttagttgctgttaaattaggacctgctctagctgctggaaacactgttgtattgaaggcatctgaacatgcttctgcagcaatgctagagtttggtaaacttattgaaaaggctggatttccaaatggagtagtaaatatcatcactggccatggagatccttgtggaaagaaattaacatcccatcctaaggtttcaagaatttcgtttacaggcggtccaaggtcagcccaacatattattagaaattctgcggagaactttgcagaagtttccctggaattgggaggtaaatcaccattcatagtttttgatgacgcaaatttggagagcgcagttaatggatccatagcagggatttttggcgctacgggtcaaagctgcgtggcagggtcgaggctttatttacatgaagatattacagatcaatttcttgaaaaaatgatggatattgtgagtactataaatatgggagatcctcttgaagagaatactcaaatgggacccttatgtaccacgggacaaatcgaaaatattgaacgtgagttggaaatagcccaatctcaaggaggacagattttgtgtggaggagaaaggcctgaagacttagacggttatttttttaagcctactataatttcctgccagaccagtcattaa

SEQ ID NO: 213669 - DNA, 884 bp, Unknown
  Bacterial polypeptide expressing nucleotide sequence isolated from the Sargasso Sea
tatggaacaggttgaaatttgtagagaatgtggggtaccaccaggtgtggtaaatttattatcaggagatccaccaagtattgcacaacaacttattgcttcagatataattaaaaaaatttcaataacaggatcttcaagagttggtaaattaattttaaaacaggcggcagataaagttcaaagagttacaatggaattaagcggccattcaccatttattgtttttgatgatgcagatattaaaaaagcaactgatatggcaattgctgccaaatttagaaacaatggtcaagtttgtatttcacctaatagattttatatacaagaaaataaaaaagatgagtttataaatttgtttgttgaaaaaactaaaaaattaaaaattggcgatggtatggacccttcagttcaattaggacctcttaccaccaaaaaaagattaaatgaggtagaagaattagtcgagacaaccaaaaaagagggtgcaaaagtcttaatagggggcaaaagaccttcaggttttaataaaggattttattacgaaccaactatatttgataatgtaaaagatgattatacaataatgaaagtagaaccatttggacctttggttcctatgttatcatttaaaagtttcgacgaagtaattgaaagagctaacaatcatgaattaggtttatcaagttatatatgtacaaattcaatggaaagagctcacaaagcttcagaattaatggaaactggaactgtagctgtaaacacacatttagttgcaatagcagaagcaccttttggaggcattaaacaagcaggatatggaagggaaggtggttctatggctataaaagattatctaaatgttaagtacactcaccttggtt

SEQ ID NO: 213670 - DNA, 307 bp, Unknown
  Bacterial polypeptide expressing nucleotide sequence isolated from the Sargasso Sea
caagaggaaatatttggaccagtgcttggtgttttaactgttaaaaatgatgaagatgctttgaaagttgctagtaattcgaagtatggattacacgctagtgtttttactcaagatattaatagagcatttcatttagcaaaaagtttgccttgtggaactgtgtcagtaaacactttctctgaaggagatattaaaactccatttgggggttataagcaatcaggctcactaagtagagatcaaggcactgaggctctaaattcatttcttcaaactaaaacaatttggataagtcataattaat

SEQ ID NO: 213671 - DNA, 715 bp, Unknown
  Bacterial polypeptide expressing nucleotide sequence isolated from the Sargasso Sea
aataaaataaaattgccaattggtccagtaggaatgataactccttggaattggcctcttaatcaaatgtgtaccaaaattgcttcagccatagctgctggaacctcttttgttctaaaacctagtgaaattactccaggtgctgcacatatatttgccgaagttattgataaaacaagcatgcctaaaggtatgtttaatttgatacatggtcttggtgttactgtaggtaaagccatgagcagccattcagatctagaaatgatttcttttactggctctactagagctggaatagatattcaaaaaagtgcagcagataatatcaaaagagtctcattagaattaggaggtaaatctccaaatataattcttgaagatgttgatttagaaaatgctgtaactatgggaataaagcaatgctttcttaatacaggtcaatcttgttcatctccaacaagaatgttgttacctgaacatatgcttgataaggcaactaaatatgcaattgcagcagcaaatgatatgtctactggagaccctttagatgaaaagatttacttgggcccaatatctaataaaacacaatatgcgaaggtgcaagatttaattcagaaaggtatagatgagggagcaactctagcatgtgggggaacaggaagacctaatggattagagaaaggattttttgttaaaccaaccagtatttactaat

SEQ ID NO: 213672 - DNA, 458 bp, Unknown
  Bacterial polypeptide expressing nucleotide sequence isolated from the Sargasso Sea
taaaacacagtatgataaaattattgatctaattaatagtggtataaatgagggggctacacttctagctggaggtactgaaaaaccaaatggtttagaaaaaggttactttgtaaagccaacaattttcacagatgttacaaatgatatgagaattgcaaaagaggagatttttggaccagtactttcaataattccatttgaggatgaagatgaggctatatcaattgtaaatgatacgtcatatggtttaggaaactatgttcaaactcaagataaagaaaaggcaaaaagagtagcaagaaaatttagatctggaggtgtctatataaatggaaatagtgcagaaccaggaactccttttgggggttacagacaatctggaaatggaagagagggaggagattggggtttagaagaatatttagaaattaaaactatctgtggatgggaatgat

SEQ ID NO: 213673 - DNA, 584 bp, Unknown
  Bacterial polypeptide expressing nucleotide sequence isolated from the Sargasso Sea
tcctactcgtttattggttgaaaaatcaatctatgaaagagctgtaaaggaagctattgaagtagccggcaaaacagatgtagatgttgcagaaaaaaaaggcaaacatattggccccgttgtttctaaggtacagtttgataagattcaaaatttgattaataaggggatagaagaaggagcaaccttatcagccggtggaccaaatagacctgaaggtttggacaaaggttattttgtaaaaccaactgttttttctgatgtaaataatgagatgactattgctaaggaggaaatatttggaccagttgtatcaattattcctttttcaaatgaagaagaagcaattagtatttcaaatgatacttcttatggtttaacaaattatatccaaacaacagataaagagaaagcaaaacgtgttgcaagaaaattgcgctctggaatggtagaaatcaatggtgaaagttttgctaatggagcaccatttggaggatacaagcaatcagggagtggaagagagggaggcacttggggtttagaagaatatttggagattaagtccataagcggctggaaataga

SEQ ID NO: 213674 - DNA, 489 bp, Unknown
  Bacterial polypeptide expressing nucleotide sequence isolated from the Sargasso Sea
taagagttggaaacccattagataaaaacactgacattggtgcaataaactcaaaagaacaattggataaaataaccagtttagttaatgaaggtgtcgaagatggtggtgaattgtttcaaactcaatgtgaattaccaggtaatggattttggtttaggccaactttgtttactaatgtacaaccttcctattcaatcgcaagagaagagatatttggccctgttttgacgactttaactttcagaactccagaagaagcagtagaaatagcaaacaatactgaatatggtttatcagctggcgtgtggactgaaaagggttctaaaatattgtggactgcagataggcttgaggctggtgtagtctgggctaatacatttaataagtttgacccttcgtctccatttgggggatataaagaatctggatttggaagagaaggcggaaggcatggtctgctttcttatttaaaggcatcatcatgat

SEQ ID NO: 213675 - DNA, 836 bp, Unknown
  Bacterial polypeptide expressing nucleotide sequence isolated from the Sargasso Sea
aacaaaaagaatttatggtcaaacagttgaaagtagatttcctgatactagagtgcatgtatactaccaacctgtaggagtggttgctgcattagtaccatggaattttccattagtcttagctgcaaggaaaatttctacagctctagctgctggttgctcagttatttgcaaacctgatgtaattacacctggtactgttatggaattagtagatatatgtaaagaagcgggagttccagctggtgttgtaaatcttttatctggagatcctgctgaaatatcaaatgaattattagagtctgatatcgtaaaaaaggtttcaatcactggatcaactagagttggaaaattaatattaaaaaaagcagcagataaagttcaaagagttactatggaactaagtggtcattcaccatttatagtttttgatgatgtggatattaataaagttgctgatatggctatcactgcaaaatttagaaataatggtcaagtttgtatttcaccgaatagattttatattcaagaaaagaaaaaagatgaatttatcaaagcgtttattgatagagcaaaaaaattaaaaatcggaaatggtctggataaagatgtgcagttaggaccattgactacatctaaaagattaggagaaattgaagaacttgttgaaatcacaaaaaaagaaggaggtaaggttttactaggtggcaaaagaccttctggttttaacaaaggttatttttatgaaccaacaatttttgatgatgttaaagatgatttcacaattatgaaacaagaaccttttggaccattggtgccaatgctttcatttaaaa

SEQ ID NO: 213676 - DNA, 868 bp, Unknown
  Bacterial polypeptide expressing nucleotide sequence isolated from the Sargasso Sea
gccttggaactggccgctgaatcaggtcagctgtaaggtcgcgccggcactggctgtgggctgcaccatggtgcttaagcccagcgaaatagcgccgctgtcggcctatctttatgcagagattatggatgaagcgggcgtccccgccggcgtattcaatctggtcaacggcgacggaccgaccgtcggtgaagccctgtcgcgccaccccgatgtcgacatgatgtccttcaccggctcaacaagagcgggctcgctggtcgcacaaaacgctgcgcccacggttaagcgcgtcacgcaagagctgggcggtaagtcaccgaatatcattctcgcagacgccgatctcgaggcagcggtcacccgcggtgtcacgcatatgtacaacaacaccgggcagtcctgtaacgcgccgtcgcgcatgctggtaccccgggacctgctgtccgaggctgaagcgattgccgccaaggtcaccgagggcgtggtgattggcccaaccgctgaagactcaacaacaatgggtcctgtcgtgtccaaggtgcagtgggacaagattcaggtacttattgaaggcggcatcgcagagggcgcaaaagtggtctgcggtggaccgggtctgcctgacggtattgatcggggctattacgtgcgacccacggtgttctccgacgtcactaacgacatgagcattgccgagcaggaaatctttggcccggtacttgtcatgattccctacaacagcgaggaagaggcgatccaaattgccaacgacacgccatatggtttggcgggctatgtgcagagcggggatcttgaccatgcgcggcaggtggcgtcgcgtatccgcgcgggcaacgtgcacatc

SEQ ID NO: 213677 - DNA, 864 bp, Unknown
  Bacterial polypeptide expressing nucleotide sequence isolated from the Sargasso Sea
gcattttgttggtggcaaaagtttttctggctcgtcaaaaaggactgggaaagtttttaatcctgcgactggagaacaaagtgctgaagtcaaattaggtaatttagaagatataaataatgctgtctcaaacgcaaaaaaagcttttgagacttggtctaacaaacctcctcttcaaagagcaagagtcatgtttaagtttaaagagttaatagaaaaaaattcagatgaattaacaaaaattattgtttcagagcatggaaaggtttatgaagatgcaaaaggatcattaactaggggactagaggtagtagaatatgcttgcggtataccccagatgttaaaaggtgagtttaccgaaaatgttggctcaaatgttgatagttggtcattgagacaacctttgggcgtttgtgcaggaataactccttttaattttcctgcaatggttccgatgtggatgtttccaatggcaattgcatgtggaaatacctttgtattaaaaccgtctgaaaaagatccctcatgctcaattagattagcagagctattaaaagaagctggtttgcccgatggtgtttttaatgtagtaaatggggataaagaggcagttgacgccctaattaataacaaagatgttgttgcaatgagttttgttggttccaccccaattgcaaaatatatttatgaaaattgtgctaaaaatgagaaaagagttcaagctttaggaggcgcaaaaaatcactgtgtagtgatgcctgactgtgacttagatcaagcagttaatggtttaatgggtgcagcatatggatctgctggagaaagatgtatggctcagtccgtggctgtagctgttggcggtat

SEQ ID NO: 213678 - DNA, 850 bp, Unknown
  Bacterial polypeptide expressing nucleotide sequence isolated from the Sargasso Sea
ccaaacggtaaatgaagtggctgttgccgaaatcgaagacttggatatagccctaaacgcctgcgccaggggcttttccgtttggcgcaaaactcccgcaataaagcgcgcggatgtactgcttgaggcggcgcgactgatccgtgagcgccttgagtcgctagcgcagaccttaagccttgagcaaggaaaacccctgcctgaggcacgcatggaaataaattcctgcgccgagcttttacagtggtacgccgaagaagggcgacgcgcttgtggtcgtctggtgccggcacgcgacagcaaagtgatcaacatggttcggcgtgatccggtagggccggtggccgcattttcgccgtggaactttccagcctcgcaagctgtacgcaaactcgcgccggccctcgcggctggctgttcgattatcttgaaagggccagaagaagcgccgggcgcgctgattggggtggtgcaggcactggtagacgccggcctgcctgacggagtgctggcgttggtgtttggccggccggctgagatttctgcgcatttgattgcctcaccgattattcgcaaagtctcgttcacaggctccgtgccggttggcaagctgatcgccacccaagcggcacagaacgtcaaaccctgcactctagaactcggcggacatgctccggttctggtattcgaggatgtggatatcctcgactgcgcacaaaagctggcacaggccaagttccgtaacgcagggcaggtatgcgtctcgcctacccgcttttatatccagcaaagtgtttttgccgaattcacccaggcatttgtcgaggccgtacaacgtataaccattggc

SEQ ID NO: 213679 - DNA, 727 bp, Unknown
  Bacterial polypeptide expressing nucleotide sequence isolated from the Sargasso Sea
atgtacgaaaaatacggtcaattcatagatggtaagtggcacaaatcttctacaggcgaaacgtatgaagttatcaatccagcaaacgaggaaattattggaaaagcatcgaaagcatcacctgaggatgttgataaagctttgttgtctgctcaaaaagggttagaggtttggaaaaaaacgccaccatggcaacgagcttatattttaagaagaattgctgataagatgagagaaaagcaagacatacttgctaaatggatgacccttgaagttggaaaaccgtttgcagaagcaaagggtgaagttaacggtgcagcagatatttatgagtggaatgcagaggagacaaaaagaatttatggccaaacagttgaaagcagatttgaagatactagagttcatgtttactaccaacctgttggagtagtagcagcattagttccatggaattttcctttagttttatctgcaaggaaaatttctacagcattagcagctggctgttcagtaattgtaaaaccagatgtaataactcctggcgttgttatggaacaagttgagatttgcagagaatgtggagtccctccaggtgttgtaaatttattatcaggggaccctccaagtatcgcccaacaattaattgcctctgatatagtaaaaaagatttcgattacaggatcttcaagagaatgggaaattaattttaaaacaggcagcagataaa

SEQ ID NO: 213680 - DNA, 523 bp, Unknown
  Bacterial polypeptide expressing nucleotide sequence isolated from the Sargasso Sea
tacagaaaaatttgaagtcggtgatcctaaaaaagaaggtgagcatatcggacccgttatttctgaaacccaatacaataaaattcagaccttaataaaaaagggtataaatgaaggagcaaaattaattgctggtggacctggtaaacctgaaggtttagagaaaggatattttgtaaaaccaaccgtttttgcagatgtaaacaacaagatggaaatagctagaacagaaatttttggaccagtcttatcggtaatgccttttgaaactgaagaggaggcaattcaaattgcaaatgatactccttatggtttaacaaactatattcaaactcaagataaagaaaaagtaaaaagagttgcaagaaaattaagatcaggaatggtggatgttaatggagctggtatagcagtagatgcaccatttggtggatttaaacattctggaattggtagagaagccggacaacatggacttgatgaatttttagaggttaaatcagttggcggttggaataattga

SEQ ID NO: 213681 - DNA, 877 bp, Unknown
  Bacterial polypeptide expressing nucleotide sequence isolated from the Sargasso Sea
agggatgttggtaaacccctccgccaatcacgggttgatgttcgggcatgtgcccggtatttcgagttttatgccggttcggtggacaaaatccatggtcagaccatcccctatcttgaaggttataccgtcctgaccttgagggaaccccatggagtgacggggcatatcattccctggaactacccgatgcaaatcatcggtcgaaccattggcggtgcgctcacgatggggaatgcatgtgtgcttaaacccggggaggaagcctctctgacttctctgaaaatcggagatctgagtctgaaagccggttttcctcccggagttttaaacatcgtcccaggactgggcgaagaaaccggtgaagctctgctgaagcatcctgggttgagccactattcattcacaggttcgacggaaatcggggttaaggtccagcaggaggccgccaagcgtgctgttcctgtgactcttgaactggggggtaaatctcctcagttggttttttccgatgccgatatagataaagcccttccatttctggtgaatgctgcaattcagaatgcaggacaaacctgttctgctgcaaccagggtcctgatcgaaaagccgatattccaggaattaacggaaaggcttgccaaggaaatcagttcaatccgttctggcccggccttacaagatcttgaatgcggtcccttgatcagcaaggttcagaaagatcgggtcgaaggatttcttcagcgtgcgaggcaggacggggttgaattcctagcagaaggaagcattgtagaggatgctcctcaagggggaaattatgtggctccctgcatggttggcagcgtgcctccgaaacataccatggcacaggatgagg

SEQ ID NO: 213682 - DNA, 779 bp, Unknown
  Bacterial polypeptide expressing nucleotide sequence isolated from the Sargasso Sea
tatgaaaataaaaattggaataaatggaatgggaagaataggaagaatgattcttcgctccataattgaaagtaataaagagaacattgagataaagcatattaacaatagaacaaattctgaagcttgttccgctctcttaaaatatgactcaattcatggaaaatttaaagcagatgtaagttttgatgatgatcatttaattataaatcaaaataaaatttcttttagtcaagaaacagatttgaataaaattaattggaaaaagtataatgtagattatgtttttgaatgcactggcaagtttaattctaaggataaattagaaactcatctaaataatggggcaaaaaaagttattgtttctgctccatgtaaaaatgcagataaaaccattgtgtttggagtaaatgagtctgaattgaaaaaagatgacaaaataatttctgccgcatcatgtacaacaaattgtcttgccccagtggctcatgttattaacgaaaattttgaaatcgaaaaaggttttatgactacaatccatgctttcacaactgatcaaagaattttggataattctcacaaagatcctagaagagcacgttctgctagccaatccattgtcccaacttcaactggggcatcgaaatcaattggagaaattatcccttcactcaaaggaaaattagaaggtatagcaataagagtacctactccaaatgtctctttaattgaacttgttttttgtacaaaaaaagatttaagtattgaaaaaattaatt

SEQ ID NO: 213683 - DNA, 335 bp, Unknown
  Bacterial polypeptide expressing nucleotide sequence isolated from the Sargasso Sea
tgtttttgcagatgtaaataatgatatggatattgcaagaactgaaatttttggacctgtcttatccgttatcccatttgaaacagaagaagaggcaataaaaattgcaaatgatactgcttatggattaacgaactacatccaaacccaagactctgaaaaagtacaaagagttgcaagaaaactaagatctggaatggtagatgttaatggagccggtattgcagttgatgcacctttcggtggttttaaacattctggaataggtcgagaagcaggtgaacacggtttagaagagtttttagaagtaaaagccgtaggtggctggagttaat

SEQ ID NO: 213684 - DNA, 757 bp, Unknown
  Bacterial polypeptide expressing nucleotide sequence isolated from the Sargasso Sea
atcagacgaattgcagataagatgagagaaaaacaagatcttttagcaaaatggatgacacttgaagttggaaaaccattagcagaagctaaaggtgaaattaatggagcggcagatatttttgaatggaatgctgaagagacaaaaagaatttatggtcaaacggtagaaagtagatttgaagatacaagagtgcatgtttattaccaacctgttggtgttgtagcggcattaactccttggaattttccagcagtattatcagctagaaaaatttcaactgctttagccgcaggctgttctgttattattaaaccagatgtaattactccaggagtagtaatgcaaatggtagatatttgtagagaatgtggcgtgccaccaggtgttgtaaatcttttatcaggtgatccgccaagcattgcacaacagttaattgcctcagacataattaaaaaagtttcaatcactggatcttcaagagttggaaaattgattttaaaacaagctgctgataaagttcaaagagtaacaatggaactttctggtcattcaccatttattgtgtttgatgatgcagatattaaaaaagctgcagacatggctatagctgcaaaatttagaaacaatggtcaagtgtgtatatctccaaatagattttacattcatgagaataaaaaagatgagtttgttaatttatttgtagataaaacaaaaaaattaaaaattggtgatggtatggatcctagtactcaat

SEQ ID NO: 213685 - DNA, 805 bp, Unknown
  Bacterial polypeptide expressing nucleotide sequence isolated from the Sargasso Sea
caattcattgatggcaagtggcaacagtcacaaaataatgaaacatatgatgtaattaatcctgctacagaggaagtaattgggaaagcttcaaaagctggtgaggaagatgttaacaaggctctgaaatctgcagaaaagggattggaagtttggagaaacactcctccatgggaacgtgcaaaaataatcagaaaaattgcagacttaatgagagagaaaaaagaaactttaggaaaatggttaactttagaagtaggaaaacctttgtcagaaggtattggagaagttggaggtgcagcagatatatttgaatggaattctgaagagactaaaaggatttatggacagattgttgagagtagatttgaaaatacaagaatgtatgtaaaatatgaaccagttggagtagtagcaggattaattccatggaatttcccaattgttttagcttcaagaaaaatttcaacagctttagctgctggttgttcggttatttgtaaaccagatgtaattactcctggaagtgttatggaattgatgaatattataaatgaagcaggtgttcctcctggcgtagttaatttattatctggtgatccagcaaaaatttctgaacaacttatttcttctgatattgtgaaaaaagtttctataactggttcaactagagttggaaaattaatattaaaacaagcggctgaaaaagttcagagagttacaatggaattaagcggacattctccatttatagttttcgatgatgttgatttaaataaagtaacagatatggccttaacagcaa

SEQ ID NO: 213686 - DNA, 943 bp, Unknown
  Bacterial polypeptide expressing nucleotide sequence isolated from the Sargasso Sea
gtggaaatacgtttatttaaaaccatcagaaaaagacccctcttgctcaattaaactcgcagagttgtttactgaagcaggcttgccagacggagtatttaatgtggtaaatggtgataaagaaattgtagatgcaattattgaaaataaaaatatttcagcagttagttttgtaggttcaactccaatcgcaaaatatatttacgaaaattgtgctaagaacgaaaaaagagttcaggctcttgggggggcaaaaaatcattgtgtagttatgcctgattgcgatcttgaccaagctgttaatggtattatgggtgctgcttatggttctgccggtgagagatgtatggcgcaatctgttgcagttgctgttggaaatattggtgatctattagttaaaaatcttaaagctaaagtagaatctttaaaaataggaccaggcatggacaaaaattctgaaatggggccattagtaacaaaagcgcatttagaaaaagtaaaagattacgtgaatatcggtatacaagagggtgctgaacttgtagtagatggtagaaatttaaaattacaaggctatgaaaaaggtttttatatgggaggctgcttgtttgataaggttaaaaaaaatatgagaatttataaagaagaaatatttggaccagttctttctgttgtaagagcaaaaaattttgaagaagctctatctttggtaaatgatcatgagtttggaaacggtgtaagtatttttactagagacggtgatgttggaagatctttctcaagtaaggcacaaatcggaatggttggaattaatatacctattccagttccgatggcattccacagttttggtggttggaaaagatccttatttggtgatcaacacatgcatggccctgagggtgtaagattttatactaaacttaaaactatcacttcacgt

SEQ ID NO: 213687 - DNA, 808 bp, Unknown
  Bacterial polypeptide expressing nucleotide sequence isolated from the Sargasso Sea
tatgaatttaattcaacactttgtaaatggaaaaataattccaggaaaatcagatagaaaaggaaaaatatttaaccctgcaactggagaacaagaatctgaagtcaaactaggttcaaaatcagacttagatgaagcagtagatattgcaaaaaaagcttatgaaacttggtcgctcaaaacaccaattcaaagagcaagaataatgtttaaatttaaagagttaatcgaaaaaaactctgatgaattaactaagatgatagtttctgagcatggaaaggtttatgaggatgcaaaaggttcacttataagaggtcttgaagtagtagaatttgcatgcggtattccacaagttttaaaaggagaatttactgaaaatgttggaactgatatcgatagttggtcaataagacaaccacttggcgtttgtgcgggcataacaccatttaattttccagcaatggttcctatgtggatgtttcctatggctattgcttgcggcaatacttttgtattaaagccttcagaaaaagatccatcatgttcaattaggttagctgaactattaaaagaatcaggattacctgatggagtatttaatgtagtcaatggagataaagaagttgtagactcaattttaattaacaaagatattaaagctgtaagttttgttggttcaacaccaattgcaaaatatatttatgagaatgcggcaaaaaatgaaaaaagagttcaagccttaggaggagcaaaaaatcattgcgtggtaatgccagactgcgatttagatcaagcagttaatggttta

SEQ ID NO: 213688 - DNA, 875 bp, Unknown
  Bacterial polypeptide expressing nucleotide sequence isolated from the Sargasso Sea
aaagatttttgaagaggcggggttgcccgcaggtgtttttaacttggtctacggcgtgccatcagagatatcggattatctaataccgcatccgacaatcaaaaaagttactttcacgggatcgacggcagtaggcaaacagttggctgcaaaggccggcgagtatatgaagcttgtaaccatggagttaggtgggcattcacccgctatcgtattcgaagacgctgacttagacgtagcattgaatgtactatcttcgaataaatatcgtaacgcgggccaggtttgcatatctcccacacggttcttagttcacgaatcagtttacgacaaatttgtagatggctttaaagaggcatcagagaatttaatagtcggcgatggtctgttgcctgaaacaaaaatggggcctttggcgcacgatagacgtctagaggctattgatgattttgtgaaagatgcggtaaagcgcggaggtaagattgaaaccggcggtgaaagaaagggcaataagggctacttttatgagccgacagttttaacggacgtgccgttagatgcaaaaattatgaatgaagagccgtttggccctgtggcgcccataactcgcttcaagtcttttgatgatgtggttgaagaagcaaaccggttgccatatgggcttgcagcttatgcgtataccaactcaaataagacagctgaagccataggaagtgcgcttgcgagtggtatggtttcgattaaccatcacggattggctatgccggaaacgccatttggcggtatcggcgagtccggctatgggaaagagggtggagtagaagggattgaagcttaccttcagacaaagtttataactcaggctagcttgtaga

SEQ ID NO: 213689 - DNA, 946 bp, Unknown
  Bacterial polypeptide expressing nucleotide sequence isolated from the Sargasso Sea
tatgaaaataaaagttggaataaatggaatgggaagaattggaagaatgattgttcgttcaattgtagaaaataatttttctaactttgaaataaaacatataaacaatagaaccaacgctgagacatgttcaaatctgttaaagtacgactcaatacacggaaaatttaatgcagaagttaaatttgatcaaaataatctaattattaacaacaataaaattacatttagccaagagacagatattaataaaatcaattggaaaaaatttggtgttgattatgttttcgagtgtactggtaaatttaattccaaagataaactaatacctcatttaaaaaatggtgcaaaaaaagttatagtctctgccccttgtaaaaatgctgataaaacaattgtatttggagttaacgaaaaagagataaaaattgaagacaaaataatctccgctgcatcgtgtacaactaattgccttgctccagttgcttatgttcttaatgaaaattttggaattgataaaggatttatgacaactattcatgcatttaccagcgaccagagaatattggataattcacataaggatccgagaagggcaaggtcagcaagtcaatcaatcgtgccaacctctacgggagcttcaaaggcaataggtgaaattattccgtctctaaaaggaaaactggaaggtgttgcaatgagagttccaactccaaatgtatctttaattgaactagtattcctttcaaataaagaagtgagtattgaaacaattaactcagcatttaaaaaatttataaagaaccaaaataaaaaaataatcgaaataactaatgaaaagcttgtatcaatcgattttaatcataactcagcctcatcaattatagacacttcacttacaaacgtagtggaaaaaatatgggtaaaatttctgcttggtatgata

SEQ ID NO: 213690 - DNA, 326 bp, Unknown
  Bacterial polypeptide expressing nucleotide sequence isolated from the Sargasso Sea
agacgtaaaaaataatatggagattgctcaaacagaaatttttggacctgtattatcagtaataccatttgagactgaagaagaagctattttaattgcaaatgatacttcttacgggttgacaaactatattcaaacacaagaccaaaaaaaagttcatagagttgcaagaaaattaagatcaggtatggttgatgttaatggtgctggtatagcagtagatgctccatttggaggttttaaacattcaggaataggaagagaagcaggacaagatggtcttcttgagtttttagaagtaaaatccgtaggtggatggagttaat

SEQ ID NO: 213691 - DNA, 887 bp, Unknown
  Bacterial polypeptide expressing nucleotide sequence isolated from the Sargasso Sea
aatggaattggttgatatatgcagagaagcaggagtgcctccaggtgtagtaaatttattatcgggtgatccaccaaccattgctgaacatttgttaaaatcagacataatcaaaaaaatttcaattactgggtcaacaagagttggtaaattaattttaaaacaagccgcagataaagttcaaagagttactatggagttaagtggtcactcaccatttatagtttttgatgatgcagatataaataaagcaactgatatagctattacaacaaagtttagaaacaacggtcaagtttgtatttctccaaataggttttatattcaagaaagcaaaaaagcagattttattaattcgtttatagcaaaagcaaaaaaattaaaaataggcaatggaatggataaagatgttcaactaggtccattaacaactgaaaaaagacttaaagaagtagagcaattagtagagataactaaaaaagaaggagctaaagtattaatgggaggcaaaagaccagcaggatttaataaaggatatttttatgaacctacagttttcgataatgtagatgatagttttacaattatgaaagaagaaccatttggaccgcttgttccaatgttatcatttaaatcttttgatgaagtaatagatagagcaaataataatgatttgggtttatgcagctatatttgtactagttcaatggacaaggcacacagagcttctgagctgatggaaacgggaacggttgctgtaaatacaccagtagtagcgatagccgaggctccttttggaggaataaaacaaactggctatggacgagaaggtggatcaatggcaattaaagattatttaaatgttaaatatacacatttaggaataa

SEQ ID NO: 213692 - DNA, 481 bp, Unknown
  Bacterial polypeptide expressing nucleotide sequence isolated from the Sargasso Sea
agatcatataggtccagtagtttcaaaagttcaatacgataaaattattaacttaataaaagatggaattaatgaaggtgcaacattagctgcaggaggtcctgaaatgcctaatggtttaaataaaggatattttattaaaccaaccatatttactgatgttacaaatgatatgcagatagcaaaaaaagaaatttttggaccagttctttctattataccttttgaaacagaagaagaagcaattagcgtaaccaatgatacagaatacggccttggaaattaccttcaaactgaagataaagaaaaggcaaaaagagtatctaaaaaacttagatctgggatcgtttatattaatggaaattctccagactctggaactccttttggtggatataaacaatctggaaatggacgcgaaggtggttcttggggattagaagaatatctagaggtaaaaacaattaccggctggaaataa

SEQ ID NO: 213693 - DNA, 753 bp, Unknown
  Bacterial polypeptide expressing nucleotide sequence isolated from the Sargasso Sea
tatgaaaataaaagttggaataaatggattaggcagaataggaagaatggttattcgctctatcatagagaacaatattaaaaatatagaaataaaacatattaacaataaaacaaattcagaaggtagttttgctctcttaaaatacgactcaatccatggaaaatttgatgcagatttaggttttgatgagaaacatttaatcatcaacaaaaataaaattacatttggtcaagaaacagatttaaataatattaattggaaaaaatatggtgttgactatgtttttgaatgtacgggtaagtttaatactaaagataaattacaacctcatttaaataatggggccaagaaagttattgtttctgctccatgtaaaaatgcagataagaccattgtatttggggttaacgagttagaattaaaagaaaatgataagattatttctgcagcgtcgtgcacaacaaattgtcttgctcctgttgctcatgttttgaacgaaaactttgaaatcgaaagaggttttatgacaacaatccatgcatttactagtgatcaaagaattttggataattctcataaagatccaagaagggctcgttctgctagtcaatctattgtgccaacttcgactggtgcgtccaaagcaattggtgaaattattccttctctcaaaggaaaactagagggtgtttcaataagagttcctactccgaacgttttcttagttgaacttgttttttgtacaaaaaa

SEQ ID NO: 213694 - DNA, 619 bp, Unknown
  Bacterial polypeptide expressing nucleotide sequence isolated from the Sargasso Sea
tatgtatagcaaatttggacaattcattaatggaaaatggcaacagtcttcagataaacaaacatacgaagtaattaatcctgcaaatgaagaaattattggtcatgcttcaaaagcaagttcaaaagatgtagacgatgctcttaagtctgcacaaaaaggtttggaagtttggaaaaatactccaccctggcaaagatcttacacattaagaaaaattgcagacaagatgagagaaaaacaagatgttttagcaaagtggatgacacttgaagttggaaaaccatttgtagaagcaaaaggtgaagttggaggatcagcagatatttttgaatggaacgcagaggagacaaaaagaatttatggtcagactgttgagagcagatttaaagatactagagtacatgtatattatcaaccagtcggagtagtggctgcactatcgccatggaattttccattagttttgtcttcaagaaaaatttcaacagcactagcagctggctgttcagtaattataaaacctgacgttataacacctggtactgttatggaattagtagatatatgcagagagtgtggtgttccggctggtgttgtaaatttactttcgggtgac

SEQ ID NO: 213695 - DNA, 919 bp, Unknown
  Bacterial polypeptide expressing nucleotide sequence isolated from the Sargasso Sea
ttcgagaaagatttaggagaagaaaaaaacaatcaaaaattattgtatgaacccaaaggagtttgtgctttgattacaccttggaactggccaataaatcaggttaatttaaaagtaattcctgcactggcatcagcatgtacggtagttttaaaaccatcagagatagcaccactgtcttcaatgttacttgccgaaatgattgatgaggcaaagtttcctgcaggagtttttaatttaataaatggtgatggagctttaacgggcgatgctttaactagccatcctgatataaatatgatttcatttacgggctcaactagagccggagccttaatttcacaaaatgctgcaaaagattttaaaagaataagtttagaactaggtggaaagggtgcaaatataatatttaaagatgcagattcagaggcagtagcaagaggtgtatcaagatgttttagaaattcaggacaatcatgtaatgcccctacaagaatgcttgttgagaaatccatttataatcaaactgttgaaaaagtaaaagaattagcaaataatactaaagtagactctcctcataaggaaggagatcatatcggaccagtagtatcagaaatacaatttaacaaaattcaaactttaatccaaaagggaatagatgaaggagcaaaattagttgcaggaggaactggtaagcccaaaggtttagaaaaaggctattatgtaaaaccgactgtttttgcagatgttaataataaaatggaaattgcaagaacagaaatttttggtcctgtattatcaataattccttttgaaaacgaagatgaagccatatcaatagctaatgatactccatatggcttaacgaattatattcaaactcaagataaggaaaaagttaaaagagtgcaagaaaact

SEQ ID NO: 213696 - DNA, 618 bp, Unknown
  Bacterial polypeptide expressing nucleotide sequence isolated from the Sargasso Sea
cttgctttctaaactcaggacaaacttgcagtgcgttgacacgtctactcgtcccttcaagcaaaatggaggaagcagcagaactagctgctcaagcagcagccggattcacagtcggtcctgctgatgacgagacaagtaaattaggacctctggtttctcaaatgcaatgggatcgagttcaaagttacattcaaacaggaatagatgaaggggcgacactggttactggaggcttaggaaaacctgatggactagattctggctattttgtccagcccacagtattcgctaatgttaaaaattcaatgaaaatagcacaggaagaaatctttggtcccgttctttcaataattggctatgaagatgacgacgatgctattcaaatagcaaatgattctgattacgggttatctgggggtgtttggagttcagacaatgaacgagctttaaaagtagctaaaaagcttagaactggtgaagttgatatgaatggttcgtttctaaatactgatgcaccttttggtggatataaaaaatccggcaacggtagggaattaggacgtttcggaatggatgaatttgtggaagcaaagcaaataaatctacccctttaaa

SEQ ID NO: 213697 - DNA, 319 bp, Unknown
  Bacterial polypeptide expressing nucleotide sequence isolated from the Sargasso Sea
acaaatgatatgcagatagcaaaaaaagaaatttttggaccagttctctctattataccttttgaaacggaagaagaagcaattagcgttaccaatgatacagaatacggccttggaaattaccttcaaactgaagataaagaaaaggcaaaaagagtatctaaaaaacttagatctgggatcgtttatattaatggaaattctccagactctggaactccttttggtggatacaagcaatctggaaatggacgcgaaggtggttcttggggattagaagaatatctagaggtaaaaacaattaccggctggaaataaa

SEQ ID NO: 213698 - DNA, 893 bp, Unknown
  Bacterial polypeptide expressing nucleotide sequence isolated from the Sargasso Sea
gatgaagtttgccgatcttcttcaagcaaatacagctgaacttgccctcatggattccatgaatatgggtaagccgatcagcgattgcttgaatgtcgatgttccagcttcagctgtgaacattcgattcatggcagagtgtatcgataagatgtatggaaaagttgccaatacacatgagaaagctctgaacctttctgttagagagccatatggtgtggttggattgatttctccatggaattatccacttctcatgggtgtttggaaaattgctccagcattggctgcagggaattcaattgtgcttaaaccggatgagcattcgcctcactcgtgcataaaaatggcagagctttttgtcgaagcaggtggacctccaggggtattcaatgtggtcacgggacatggtgaagaggccggacaatctttggctctgcatcaagatgtctccaagatcggattcactggatcaactgaagttggaaaacttcttttgcaatatgccggtcagtccaatatgaaaaaagtcagtcttgagactggtggaaaatcacccatgatttacttcgctgatttacctgatatggaactcgctgtctctacagcctatgattcaatctatgcaaacatgggcgaagtctgtaatgcaggatctagaatctatgttgagagagcaatttatgctgatttcgttgatcaattcattgcagaaggccaaggcgcatatacacctggtgatccattggatccagaaacaaacatgggcccattgatgtcagcacaagctcaaaaaagagtattgggcttcattgaatcgggtaaaaatgaaggtgcgaaactcaaatttggtggaaacattccaacaggacttgaatccggatgtttcgttg

SEQ ID NO: 213699 - DNA, 837 bp, Unknown
  Bacterial polypeptide expressing nucleotide sequence isolated from the Sargasso Sea
aatgtatagtagatttggtcaatttatagatggaaaatggcaggcatcagaaaaaaaagaaacttacgatgtaattaatcctgctactgaggagataataggaaaagcgtctaaagcgtccccggttgatgttgaaaaagcgttaaagtcagcagcaaaaggatttgctacttggaaaaaattttcaccatggaaaagagcagaaattattagaaaaattgcagacttaatgagaaaaaaaaataatgaattagcaaaatggatgacgctagaaactggaaaaccgttagctgaaggattggcggaagttagcggatctgcagatatttttgagtggaacgcggaagagacaaaaagaatttatggtcaaacagtacaaagcagattcgaaaatacaagagttattattaattatgaaccagtaggtgtagttgctgctttatcaccgtggaattttcctcttattttagcagcaagaaaaatttcaactgctttagcagctggatgttccgttatttgtaaaccagatgttattactccaggaactgttatggaattagttgatatcattaatcaatgtggcgtccctcctggtgttgttaatttattatcaggtgatccaccgtcaatatcctcacaattaatttcttcagatatagtaaaaaaaatttctttaacaggatctactagagttggtaaaatagttttaaaacaagcagcggaaaagattcaaagagttacaatggaattaagtggtcacgcaccatttatagttcatgcagatgctaatattgaaaaagctgttgatatggctatgacagctaaatatagaaataa

SEQ ID NO: 213700 - DNA, 646 bp, Unknown
  Bacterial polypeptide expressing nucleotide sequence isolated from the Sargasso Sea
aatggctgttaactacaaatctattgctcaaaaattaaaatttgaaggccgtgcctttataaatggtaagtatgttaacgctatagatggtaaaaaatttgaaaccataaatcctgctacaggagataaactttgtacagtagcaaaatgtaatgaaaaagacgttaatttagcagttaaagtttcaaggaaagcgttcaatagtggtgtttggtctagaagctcacctgaacatcgaaaagaaatattattaaaatttgctgaattacttagaaagcatggcaatgaaaattcagttttagaatgtgttgatacaggaaaattaataacggattgtataaatgaagttgctaatgatgctccaatgcattttcagtggtatggagaattaattgataaggtttttggaaaggttggtcctaccgaaccatctattacaagtttaatagtaaaagaacctattggagttgttgcaggtatagtaccatggaatttccctttgatgatggcagtttggaaaatggcgcctgctcttgcggctggatgttctgttattattaaaccagcagaagatacacctctcacagctataagagttgcaaaaattgctcaagaggcaggaattcctgatggagttttaaatgtt

SEQ ID NO: 213701 - DNA, 886 bp, Unknown
  Bacterial polypeptide expressing nucleotide sequence isolated from the Sargasso Sea
ggaaaatttaatgctgacataagttttgacgataaacatctcatcataaacaaaaataaaatatcattcagtcaagaaacagatttaaataaaattaattggaaaaagtttgacgtcgattatgtttttgaatgtacagggaaatttaactcaaaagaaaaactgaagccacatctaaaaaatggagcaaaaaaagttattgtctcagctccatgtaaaaaagctgataaaactattgtgttcggagtaaacgaaacgaaattgaacaaaaacgatcaaataatttctgctgcatcgtgtacaacaaattgtcttgccccagtagctcatgttctaaatgaaaactttgaaatcgaaagaggttttatgacaactatccacgcatttacaactgaccaaagacttttagataattcccataaagatcctagaagagctagatccgcaagtcaatcaattgtccctacttcaactggtgcctctaaggcaattggtgagattattccatctttaaaaggaaaattagaaggtattgcaatgagagtccctactccaaatgtatctttagttgaacttgttttttgtacaaaaaaagacctaagtgtcgaaaaaattaatttagcatttcacaattttagcaaaaaaaataagatacttgagattactaaagaaaaacttgtgtctatagactttaatcataatcaagcttcatcaatcattgactctaacttaactaacgtaattggaaaaaatatgggtaaaatttcagcttggtatgataatgaatggggtttttcaaataggatgtgtgatatagcaggaatacattcacaaaaattcttgatgaaaaatataaaagacgaagaaaatcttagtcaaaaaagag

SEQ ID NO: 213702 - DNA, 522 bp, Unknown
  Bacterial polypeptide expressing nucleotide sequence isolated from the Sargasso Sea
aagcaaataaaataaaagtagatcaagcttcaaagaaaggagatcatataggtcctgtaatttcgaaaactcaatacgacaagatcattaacttgattgaaagtggaataacagaaggagcaacgttagcagccggtggtccagagttacctaatggattaaataaaggttactttataaaaccaacaatttttacaaatgtaaaaaacgagatgagaatagcaaaagaagaaatctttggtccagttctatctattattccatttgaaaccgaggaagaagcggtgagcattgtgaatgatacttcatatggtttaggtaattatttacaaaccgaagataaagaaaaagctcatagagttgctaaaaaattaagatctggttgtgtttatataaatgggaatgcggctgatgctggtacaccttttggaggttacagacaatcaggaaatggtagagagggtggtgtttggggtcttgatgagtatctagaagttaaaactgttaccggatggaaataag

SEQ ID NO: 213703 - DNA, 415 bp, Unknown
  Bacterial polypeptide expressing nucleotide sequence isolated from the Sargasso Sea
gatgaaggagcaaaacttttatctaggaggagtttcaagtaaaaagcaaaaaggtttttatgcaaaaccaacgctatttgatggattaaaagaagatatgaccatcgctcaagaggaaatatttggaccagtgcttggtgttttaacagttaaaaacgatgaggaggctttgaaagttgctagtaattcaaagtatggattacacgctagtgtttttactcaagacattaatagagcatttcatttagcaaaaagtttgccttgcggaactgtatcagtaaacactttttctgaaggagatatcaaaactccatttggaggttataagcaatcaggatcactaagtagagaccaaggaactgaggctctaaattcatttcttcaaacaaaaacaatttggataagtcataattag

SEQ ID NO: 213704 - DNA, 682 bp, Unknown
  Bacterial polypeptide expressing nucleotide sequence isolated from the Sargasso Sea
gaaaaggagcaaaatattatatttaaagatgcagattcagaggctatagaaagaggggctcttagatgctttagaaactcaggtcagtcttgtaatgcgccaactagaatgttaattgaaaaatcaatgtatgaagaagctgttgagagactgaaaaaatatgcagatgagtttaaggttgatgaccctaacaaagaaggagatcatattggccctgtaatttcagagatacaatataataaaattcaaacattaataaaaaaaggaatcgatgaaggtgctaaattaatttctggtggaccaggaaagccaaatggatttgataatggttattatgttaagccaactgtgtttgctgatgtaaataacaatatggagatagcaaaaacagaaatatttggacctgtattatcagttataccatttgagacagaagaagaggcaattagcattgctaacgacacagagtatggccttaccaattatatccaaacccaagatactgaaaaggttcaaagggttgcaagaaaattaagatctgggatggttgatgtaaatggagcaggcattgcagttgatgctccttttggaggatttaagcattctggaattggaagagaagcaggaaaagaaggacttcttgagtttttagaagttaaatcagtaggtggctggaattaat

SEQ ID NO: 213705 - DNA, 805 bp, Unknown
  Bacterial polypeptide expressing nucleotide sequence isolated from the Sargasso Sea
ctgccgccgcgaggatctggtgcccgtgacgctggagctgggcggcaagtctccggtgctggtcggcgacacggccgatatcgcccatgcggccgagcgcattgccgtgggcaagtcgctgaactccggccagctgtgcgtgtcacccgacgaggtctgggtccatgagtcgcggctgcaggcgctggccgaagggattgctgcgcaataccagtcgctgtatccctcggtgagcggcaatgcggatatgacgcctgtgatcaacgagcgacaccatgcccgtgtgaaagcctatgtggacgatgccaaggcgcgtggcctgagcgtgctggaagtcggtgccgcgcaagccggatcggaccgtcgcctgccgctggcgctggtcatcaacccgcctgccgacgccgagatctccctgcatgaaatcttcggcccggccctggtactgcgcagtttccacaatatccgcgatgcggtggcggcgatcaatgccggcgagcgcccgctggcgctgtactacttcggcaacgacgagacggagcagggctgggtgctggacaacacgctgtccggcggtgtctccatcaacgatgtggtcatgcatccggcgctggaagacgccccgttcggcggcgtgggggcttcgggcatgggtcactaccatggccgggagggctttctcgagttcagtcatgcgcgctccgtctacaaggctggcagccacgacccgcgtcgagagtggggcatgctgccgccatataacgagcagttcgcacagatgctgcaggccgctgtcaccccctga

SEQ ID NO: 213706 - DNA, 814 bp, Unknown
  Bacterial polypeptide expressing nucleotide sequence isolated from the Sargasso Sea
ggcggcatcgacaactggaatctgcgtcaggcgctgggcgtagtggcgggcatcacgccgttcaatttcccggtgatggtgccgatgtggatgttcccggtggcgctggctggcggcaatacgttcgtgctgaagccgtcggagcgcgatccgtcggcatcgctgcgcattgccgaattgctgaaggaagcgggtctgccggacggggtgttcaacgtcgtgaacggcgacaaggtcgccgtggatgcgctgatcgaacacccggatgtcgcggcgctgtcgttcgtcggctccacgccgattgccgaatacatctatacggaagcgtcgaagcgcggcaagcgtgtgcaggcgctcggcggcgcgaagaatcacctggtggtgatgccggatgccgatctggaccaggccgtcgacgcgctgatcggcgccgcctacggttcggcgggcgagcgctgcatggcgatctcggtcgcggtggcggtcggcaatgtcgccgacgaactgatcgaacgcctggtgccgcgcgtgaaatcgctggtaatcaagaacggcgagaacctcgacgcggaaatgggtccgctggtgaccgccgaacataaggccaaggtggcgggctatatcgacgcgggcgtcgcggagggtgcaaagctgatcgtcgacggccgcgctcatccggtcgcgcaggaagcgggcttcttcatcggcggcacgctgttcgaccaggtcggcaccgggatgaagatctacaaggaagaaatcttcggcccggtgctggcggtggtccgtgtgcccgatttcgcgagcgcggtcg

SEQ ID NO: 213707 - DNA, 370 bp, Unknown
  Bacterial polypeptide expressing nucleotide sequence isolated from the Sargasso Sea
gagacttggagagaaactacaaaggaagaaagattagctttacttgagaagtttgatgaaatttataatagaagatgggatgaaatggttgaggcacaatctaaagaaatgggcgccccattagattttgcttccgaaacacacactaaaatgggtgctgatatttgtagaaataacattgaaattttaaaagattttaattttgaacatcaatttgatcctaaatctaataatcatataagatatgaaccaattggagtttgtggattaattacgccatggaattttcctatgaatcaaatcgtattaaaggttattcctgctttagctgctggttgtacaatgatattaaaaccatccgaaattgctc

SEQ ID NO: 213708 - DNA, 109 bp, Unknown
  Bacterial polypeptide expressing nucleotide sequence isolated from the Sargasso Sea
atgagtattaatatcgggatcaatggatttggaagaatcggacgcatggttttgcgggcggggatcaataatccgaatattcgtttcgtggctatcaatgatttggtgc

SEQ ID NO: 213709 - DNA, 705 bp, Unknown
  Bacterial polypeptide expressing nucleotide sequence isolated from the Sargasso Sea
aaagagtaagtttagaacttggtggcaaaggtgcaaatataatatttaaagatgctgatcctgatgcaatagaaagaggtgctttgagatgttttagaaactctggccagtcatgtaatgcacccacaagaatgctagttgaaaaatcaatgtataatgatgctgttgaaagattaaagaagtatacagaaaattttgaggttggtgatccaaaaaaagagggagagcatataggcccagttatttctgaaactcaatataacaagatacaaactttaattaagaagggtattgacgagggagctaaattagtagctggaggcccaggcaagccagatggattagaaaaaggttattttgtaaagcctactgtatttgccgatgttaataataaaatggaaatagcaagaacagaaatatttggtccagttttatctgtaatgccttttgaaacggaggaagaagctattgaaattgcaaacgatactccttacggattaacaaactacattcaaaccaaagataaagaaaaagtaaagagagttgctagaaaacttagatctgggatggttgatgttaatggtgctggtattgctgttgatgcgccttttggtggatttaaacattcagggattggtagagaagctggagaacatggtctagaagagtttctagaggttaaatctgtaggtgggtggagttaat

SEQ ID NO: 213710 - DNA, 918 bp, Unknown
  Bacterial polypeptide expressing nucleotide sequence isolated from the Sargasso Sea
gcgtagtggctgcattacaccttggaattttcctttagttttatcagcaagaaaaatttcaacagctttagctgcaggatgctcagtaatagttaaaccagatgtaattactcccggaactgtaatggagttggtagatatatgtagagagtgtggcgttcctaatggtgtaataaatttattatctggtgatcctccaagtatcgcacaacaattaatttcgtcggatataattaaaaaaatttcaataactggatcaacaagagtaggaaaattaattctcaaacaagctgcagataaagttcaaagagtaactatggaacttagtggtcattctccatttattgtttttgaagatgcagacattaaaaaagctacagatatggcaatttctgcaaaatttagaaataatggacaggtttgtatttctccaaatagattttatatccaggaaagtaaaaaagatgagtttgttaatttgtttgttgaaaaaacaaaaaaactaaaaataggagatggcatggatccaagcgttcaacttggtcctttaacaactaaaaaaagattaaatgaagtagaagaattagtagaaacaactaaaaaagaaggtgcaaaagtattaatgggaggaaaaaggccagcaggttttaacaaaggtttttattatgaaccaacagtttttgacaatgtaaaagatgattttacaattatgagagtagaaccattcggcccattagttccaatgttatcttttaaatcatttgatgaagtaattgagagagctaataataatgatttaggtcttagtagttatatatgtacaaattcaatggaaaaagcacatagagcatcagaactaatggaaacaggtactgttgcagttaacactcctttagtagcgatagcagaggcaccttt

SEQ ID NO: 213711 - DNA, 866 bp, Unknown
  Bacterial polypeptide expressing nucleotide sequence isolated from the Sargasso Sea
catgaatttaattgaacactttgttggcggaaaattattttcaggttcttctgatataaaaggtaaagtttttaatccagctacaggtgaacaagaatctgaggttaagttagcgtcgaaatcagatttagatcaagtagttggaattgccaaaaaagcttttgaaacatggtctttaaaaccagctcttcaaagagcaagagtaatgtttaaatttaaagaattaattgaaaaaaattctgatgaattgacaaaactaattgtttctgaacatggaaaagtttttgaagatgccaggggttctttaacaagaggacttgaagttgttgaatttgcttgtggaatacctcatttattaaaaggtgaattttctgaaaatgttggaacaaatgttgatagttggtcaatgagacaacctttaggggtggttgcaggaattaccccatttaattttcctgccatggttccaatgtggatgtttccaatagcaatcgcatgtgggaatacatttattttaaaaccatctgaaaaggacccttcatgctccattatgttagctcaattgcttacagaagcaggtcttccagatggtgtatttaatgtagtgaatggtgacaaagaatctgtagatgcaatattggagaactcagatattaaagcagtaagttttgtaggctcaactccaattgcaaaatatatttatgaaaactcagctaaaaatgaaaagagagttcaagcattaggtggtgctaaaaatcatttggtggtaatgccagattgtgatttagatggagcagttaatggtttaatgggtgcagcttatggttctgcaggtgaaagatgtatggcccaatcagttgcgggtg

SEQ ID NO: 213712 - DNA, 782 bp, Unknown
  Bacterial polypeptide expressing nucleotide sequence isolated from the Sargasso Sea
attgttttcagaagcaggcttgccagatggagtttttaatgttctaaatggaaataaagataatgtagacatgttactagatgatgaaaatattcaatcaataagttttgttggttctacacctgtagcaaaatatatttatgaaagatctgctcaaaaaggaaaaagagtccaagcactaggaggagctaagaatcatttagttgttatgcctgatgcaaatttggatcaagctgttgatggcattatgggagccgcatatggttcaccaggagaaagatgtatggcagtatccgttgcagtagcagttggtgatattgcagacaaacttgttgaaaatatcaataataaagcagagtctctcattgtagcaccctggacagattcttcctctcaaatgggtccagtaatatcaaaagaacataaagataaaatcgaaaattacatttcctctggagtagaagaaggggctaaattggttttagatggaagaaatctaaaaattcaaggatatgaaaatggtttttttgtaggtcctacattatttgacaatgtaaacaaaaatatgaaaatctataaagaagagatttttggtcctgtcttgtcggttgtaagagcaaaaacatacgacgaggctttaaaattagttaacgatcattcatttggtaatggaaccagcatttatacttccgacggagaagtttctagaaattttacaactaattgtaaaattggtatggtaggagttaatgtacctatacctgtccctatggcattccata

SEQ ID NO: 213713 - DNA, 958 bp, Unknown
  Bacterial polypeptide expressing nucleotide sequence isolated from the Sargasso Sea
gcatatcatcccctggaactacccgatgcaaatcatcggtcgaaccattggcggtgcactcacgatggggaatgcatgcgtgcttaaacccggcgaggaagcctctctgacttccctgaaaatcggagatcttagcctaaaagccggttttccttccggagttttaaacatcgtcccaggattgggtgaagaagctggtgaagctctgctgaagcatcctggggtgagccactattcattcactggttcgacggaaattggggttaaggtccagcaggaggccgccaagcgtgccgttcctgtgactcttgaactgggaggtaaatctccccagttggttttttccgatgccgatatagataaagctcttccatttctggtgaatgctgcaattcaaaatgcaggacaaacctgttctgctgcaaccagggtcctgatcgaaaagccgatattccaggaattaacggaaaggcttgccaggggaatcagttcactccgttctggcccggcattacaagatcttgaatgcggtccattgatcagtaaggttcagaaagatcgggttgaaggatttcttcagcgtgcgaggcaggacggggttgaattcctcgcagaaggaagcattgttgaggatgcacctcaagggggaaattatgtggctccctgcatggttggcagcgtgcctctgcaacataccctggcacaggatgaggtttttggcccattgctcgtcaccatgcctttcgaacgagaagaagaggggattgaacttgcaaataacacggtttacggtttggtctcaggtgtttggacaaaggatggtggacgtcagttaagggttgctaggaaacttaaatcggggcaggtattcatcaataattacggtgcaggtggaggggttgaacttccattcggaggagtcaaactcagtggccatggacgtgaaaaaggctttgaa

SEQ ID NO: 213714 - DNA, 455 bp, Unknown
  Bacterial polypeptide expressing nucleotide sequence isolated from the Sargasso Sea
catgattacgcgagacgccatatacatcgatggcaagtgggttcctgccagtggaggagaaaaaattgaggtcatcaatccggctacagaggagatagtaggcactgttcctgtcgggacggaggttgatgttaatgatgcaattttagctgcaaggtcggcttttccatcgtggtctaagtccagtatagaggagcgtcagggatatctcaatgccatttctgccgcaatctccgaaagaggggatcagattgcagaggtaatcacttccgaagttggtactccaatcaattattctaaaatggccatggttggaactcccagagtggttgccaggtcgtatgctaagattcttgactcatttgaatgggaggaggaggtacgaaattctcttatcgtcaaggagcccattggagtagttgggatgataacgccatggaattttcctcttcatc

SEQ ID NO: 213715 - DNA, 424 bp, Unknown
  Bacterial polypeptide expressing nucleotide sequence isolated from the Sargasso Sea
cttactggggggatctcaggctaaattaaatagtggattggaaaaaggaaactatattcaacctactgtttttgaagctaaaaataatatgagaatttctcaagaagaaatttttggaccggttgtttctgttattaaatttaaagatgaagcagacgcgttaaaaatcgcgaatgatactctttacggtttaggcgcaggtgtttggactagaaatggtaatattgcttatagaatgggaagagcgatacaagcaggtatagtgtggacaaattgttatcacgcttatccagcacattcaccatttggtggttataaacagtctggcgtaggtagggagactcacaaaatgatgcttaatcattatagacagaataagaacttacacgtttcttatgctgagaaaaaattgggcttcttttaa

SEQ ID NO: 213716 - DNA, 592 bp, Unknown
  Bacterial polypeptide expressing nucleotide sequence isolated from the Sargasso Sea
tgtaatgctccacaagaatggttggttgaaaaatcaatttataatgaaacagttgaaaaagtaaaagaattagcaaataatactaaggtagactctccccaaaaagatggagatcatattggcccagtagtttcagaagtacaatttaataaaattcaaactttaattcaaaaaggaatagatgaaggagcaaaattaattgcaggaggaactggaaaacccaagggttttgaaaaaggttattatgttaaaccaacagtttttgctgatgttaataatcaaatggaaattgcaagaactgaaatatttggacctgtattatctatcattccttttgaaaatgaggatgaggcaatttctatagctaatgatactccctatggtctaactaattatattcaaacacaagataaagaaaaagttaagagagttgcaagaaaacttagatctgggatggtagatgtaaacggagttggtatagcagtggcttctccgtttggaggatacaagcattctggtattggaagagaagctggaaccgaaggtttaatagagtttttagaagtaaaaactgtcggaggatggaattaaa

SEQ ID NO: 213717 - DNA, 850 bp, Unknown
  Bacterial polypeptide expressing nucleotide sequence isolated from the Sargasso Sea
tatttgtagggaatgtggagtgccacctggtgtagttaatttactctcaggagatccaccaagtatagcatcacaattaattgcatcagatatagtaaagaaaatttcaattactggttcttcaagagtaggtaaattaatattaaaacaagctgctgataaagttcaaagagttacaatggaattaagtggtcattcaccttttatagtatttgatgatgcagatataaagaaagcagctgatatggcagtagcctctaagtttagaaataatggtcaagtttgtatttctcctaacagattttatattcaagaaagtaaaaaagatgagtttgtgaatttatttgtcgaaaaaacaaaaaaattaaaaataggaaatggaatggatccagatgttcaactaggtccagttacaacaaaaaaaagattaaacgaaatagaagatctagtagaaactacaaaaaaagaaggagctaaagtattattaggtggaaaaagaccttctggatttaataaaggttatttttatgaaccaacaatatttgatgatgtgaaagataattttaccataatgaaaatagaaccttttggtccattggtacctatgttgtcctttaaatcatttgatgaagtagtagaaagagctaataatcatgaattaggtcttgcgagctatatatgtacaaactctatggaaagagctcacagggcttctgagttaatggaaactggtacagtagcagtaaacacgccagtagttgcgatagctgaagcaccttttggaggattaaacaagctggatatggaaagagagggtggttctatggcaataaaagattatctaaatgtt

SEQ ID NO: 213718 - DNA, 631 bp, Unknown
  Bacterial polypeptide expressing nucleotide sequence isolated from the Sargasso Sea
aaagtgcacgttcaggaaatatttagtgtgcagggacaaatttgtacagcaatgtctagattagtagttcacaaatcaattaaagatgaattgttagataaacttgttgatatgagtaaatctttaaaaattggacccggtatagaaaaagatacagacctaactcctgtcatatcagaaaatcagcttcaaaaagttgaaggttatgcgagatctggaattcaagaaggtgcagaagcagcatatggtggaaaaagattagatcgtgaaggatattttatggaaccaactgttctaaacaatgttaaacaaaatatgactgtagcaagagaagaaatttttggtccggtactctcagttcttgaatatgaagatcaagaagaagcaattgatattgcgaatgatactgagtatggtttaggtgctggagtttttacaaaagatcttaaaaaagcatcttggactgcaagcaaattagaagctggtcaagtatatgtaaacaaatggtttaccggaaatcatgcaactccttttggaggttataaacaatcaggatatagccgtgaaaaaggagtagatgggcttaaatcttatcttcaagtcaaaaatgttggtattagtttaggttaaa

SEQ ID NO: 213719 - DNA, 724 bp, Unknown
  Bacterial polypeptide expressing nucleotide sequence isolated from the Sargasso Sea
aatgcagcagatactattaaaagagtttgcttagaattaggaggaaaaggaggtaatattgtttttagtgattcacattcagaagcagtaagagagggtgttagaaacataatgagtaattcaggtcaatcctgtgatgcaccaacaagaatgctagttgaaaaatcaatctataaaagagcaatagaagaggctgctgatgaagcgaataaaattaaagttgacattgcttctaaacatggaaatcatatcgggccagttatttcacaaactcagtatgataaaattattgatctaataagaagtggaataaaagagggagccacacttgtagcaggaggtcctgataaaccaaatggtttagacaaaggttattttgttaagcctacaatttttacagacgtaactaatgatatgagaatcgcaaaagaagagatttttgggccagtactttctataattccatttgaagacgaagatgaagctgtatcaattgttaatgatacatcatacgggttaggcaactatgttcaaactcaagataaagaaaaggcaaaaagagtagcaagaaaatttagatctggaggtgtatatataaatgggaatactgctgatccaggaactccttttggtggttacagacaatctggcaatggaagggaaggcggtgattggggtttagaagaatatttagaaataaaaactatttgtggatgggaatgat

SEQ ID NO: 213720 - DNA, 899 bp, Unknown
  Bacterial polypeptide expressing nucleotide sequence isolated from the Sargasso Sea
tggttttgaaccatcagaaatagctcctctttcttctatgttattggcagagatgatcgatgaagtaaaatttccagctggagtatttaatttagtcaatggagatggtgctgttgccggaaacgctttaactagtcatccagatgtaaatatgatttcttttactggatcaactagggccggagctcttatttcaaagaacgcagcaaatgattttaaaagagttagtttggagctaggtggtaaaggcgcaaatattatttttaaagatgcagatgccgaagctgtagaaagaggagctttaagatgttttagaaatactgggcaatcctgcaatgcaccaacgcgtatgttggttgaaaaatctatttataaaaagactatagataaagttaaggaagttgctgctaaaaccaaagttgatttagcatcaaaaaaaggtgaacacataggacctgtagtttcaaaaactcaatttgataaaattcaagctttaattcaaaaaggaattgatgaaggcgcgaaattagtagctggtggaataggaaaaccaaaaggattagacaaaggatattttgttaaaccaacggcttttgcagatgtgaataacaacatgcaaattgctagaacagaaatttttggtccagttttatcaattattccttttgaaactgaggatgaagcaatttcaattgcaaacgatacaccttacggtcttttaaattttattcaaacacaggatcagaaaaaagcaaatagagtagcaagaaaactaagatcaggaatggtagatataaatggagctggacttgctgcagatgctcctttcggtggatacaaacattctggcattggacgagaagctggtgttttaggtttggaagaatttcttgaagtaa

SEQ ID NO: 213721 - DNA, 364 bp, Unknown
  Bacterial polypeptide expressing nucleotide sequence isolated from the Sargasso Sea
gggttagaaaaaggttggtttactaaaccaactatattcataaatgttaataacagcatgcgagtagctcaagaagagatttttggccccgtacttgtaataattccatttgaagatgaaaaagaagctattgaaatagctaatgacacaccttacggacttgccgcatatttacaaacaggcgacaccgaaagggcagaaagagtttcaagacaacttagagctggcggtgtacatgtaaacggaggcggttataactatggctctccttttggcggttataaagagtctggaaacggccgcgaaggcggtgatatggggcttgaagactatcttgaaacaaaagcattacatattgcttaaa

SEQ ID NO: 213722 - DNA, 667 bp, Unknown
  Bacterial polypeptide expressing nucleotide sequence isolated from the Sargasso Sea
catcatattcaaagacgcagatacggaagcagttgagagaggagccttacggtgctttagaaactcagggcagtcctgcaacgctccaacaagaatgctagttgaaaaatctatgtatgaagaggcaattgaaaggttaaagaaatatgctaatgaatttaaagttgatgatcccaataaagaaggtgaacacattggacctgttatttcagaaacacaatttaataaaattcaaaaattaatacaaaaaggtattgacgaaggtgcaaaattagttgccggaggaactggaaagccagatggtttaagtaatggttattatgttaaacctactgtgtttgcagacgtcaacaataatatggaaattgcgaggacagaaatttttggacctgtattgtcagtaataccatttgaaaacgaaaatgaagcaattaaaattgcaaacgacactgattatggtttaacaaactatattcaatcacaagataaagaaaaaattcaaagagttgcaagaaaattacgatcaggaatggtagatgtaaatggagcagggatcgctgttgacgcgccctttggtggttataaacactcaggaattggaagagaagctggtaaagagggtttgcttgaatttcttgaagttaaatctgtaggtggttggaattaa

SEQ ID NO: 213723 - DNA, 756 bp, Unknown
  Bacterial polypeptide expressing nucleotide sequence isolated from the Sargasso Sea
taaaatggaaaaagtttggtgttgactacgtgtttgagtgcaccggcaagaataattcaaaagaaaaacttatttcacatattaaaaatggtgctaaaaaagttattgtatcagcgccatgtaaaaatgctgataaaacaatagtatatggtgtaaatgataatttgctctctaaaagtgaccaaataatatctgcagcttcatgtacgaccaattgcttagcgccagttgtacatgtcctaaatgaaaactttcatatagaaaaaggttttatgaccaccattcacgcttttacaagtgaccaaagaattttagacaattctcataaagaccctagaagagcaagatctgcaagccaatctattgtacccacttctactggagcttccaaagctatagcagaaataattccaagccttaaaggaaaattagaaggaattgctatgagagttcctacacccaatgtttcattagttgaatttgttttctgttcaaaaaaagagataaataaagaaaatattaataaatcatttgagatagcctcaaaaaaacaactaaaaaatgtattaaaaataacttatgaaaaattggtatcaattgatttcaatcacaatgccgcatcagcaattattgacggctctctgactaatacagttggcaagaatatggggaaaatatctgcatggtatgataatgagtggggcttttcaaatagaatgtgtaacattgctgagaaacttcataaagtttcttaat

SEQ ID NO: 213724 - DNA, 686 bp, Unknown
  Bacterial polypeptide expressing nucleotide sequence isolated from the Sargasso Sea
tatgagtaagcttttgacacatgaagaatatacaagtcttggagcatcattagattttccacaaagcccatttattgatgggaagtattacaaaggttcaggagaactaatgactacaataaacccctccactggcatggaaataacaagtataactaccgctagcgatgaagatgtggatcttgcagttgaaaaagcaagggaggcatttgatcaaggtcgttggtgtcgcctccacccgtctgaaagaaaagatatactaataaagttatgtaagttgttaacgcgaaatcaaaaagaactggccgtgatggagagcctagacagtgggaaaccaatacgagactgcgttcaaatcgatttgccggaaacaatacatactattcagtggcatgctgagctaattgacaaaatctatgaccaaactgctccaagtggtgacgaagcgttatctattataatgagagagccaataggtgtagttgcagcaattcttccatggaactttccattattgatgcttgcctggaaaataggccctgctcttgcctctgggtgctcggttattgtaaagcctgccgagcaaacctctcttactgctcttagggttgctgagctagctgctgaggcaggaattcctcgaggagttttacaggtgctaccaggttctgggccgatagttggcg

SEQ ID NO: 213725 - DNA, 592 bp, Unknown
  Bacterial polypeptide expressing nucleotide sequence isolated from the Sargasso Sea
gaagatcaacaagagtgatagaattatttcagcagcttcttgcacaacaaactgtttagctcccgtagcagacgtaattaataaaaaatttataattcttaacggatttatgacgaccatacatgcgtttacaagcgatcaaagaatattagataattctcacaaagatccaagaagagcgagatctgcaagtcaatcaattgttcccacatccacaggtgcatcaaaagctattggtgaaattataccttcattaaaaggtaagctagaaggtgtagcaatgagagtgccaacaccaaatgtttcattaatagaatttatatttaatgtaaaaaaaaatattaccgtaaaagaattaaataactctttgttttcagcatctagaacgaaacttaaaaatattctaaatgttacagatgagaagctagtctcggttgattttaatcacaatagttcatctgcaatcatagactcatcacttactaatgttgtaggcaataaaatgggaaaaatttcagcttggtatgataatgaatggggtttctcgaatagaatgtgtgatattgctgattatgtaagcaagatcaaataa

SEQ ID NO: 213726 - DNA, 802 bp, Unknown
  Bacterial polypeptide expressing nucleotide sequence isolated from the Sargasso Sea
agaggccggaatacccgatggagtcttgaatgtacttccgggttatggtgatgttggtgaggctttaggtcgacacaaagatgttgatgcagtttcttttacaggctcaactgaagtaggtggtttttttttaaaatactcaagtgaaagtaatttaaaacctgtcgcattagagatgggaggaaaaagtccatttatagttttagaggatgctaaaattacagatgatttaatagataatgctattaattctgctttttggaatggtggacagaactgttcagcaaatatgagacaaatagttcacaaaaaagttaaagatgaatttttagacaaagttattaaaaaagttaaaaaattaaaagttggagatccattagatttaaaatcaaatatgggatctatgatttcaaaaggacatttgcaaactgttgatggatatatccaaaaaggaatagatgagggagctaaacttttaactggtggagtttcaaacaataaacaaaaaggtttttatgcaaaaccaactttatttgatggattaaaagaaaatatgaccatagctcaagaagaaatatttggaccagtactcggtgttttaacagttaaaaatgatgaagaagctttgaaagttgctagtaattctaaatacggattacatgctagtgtatttactcaagacataaacagagcatttcatctagctaaaagcttgccttgtggaactgtatcagtaaatactttttctgaaggagatattaaaactccatttggaggttataagcaatctggctcactaagt

SEQ ID NO: 213727 - DNA, 855 bp, Unknown
  Bacterial polypeptide expressing nucleotide sequence isolated from the Sargasso Sea
attggcgttggatggtgagtggggcaggatgattccggccgagcgggggaggttgctttattcattgggacagttgatcctagatcatgaagatgaactggcggaacttgaatcaagggatgttggtaaacccctccgacagtcacgggttgatgttcgggcatctgctcggtatttcgagttttatgccggtgctgtggataaaatctatggtcagaccatcccctaccttgaaggttatacggtcctgaccttgagggaaccctatggagtaacggggcatatcatcccctggaactacccgatgcaaattatcggtcgaaccattggcggtgcactaacgatcgggaatgcatgtgtgcttaaacccggggaggaagcctctctgacttctctgaaaatcggagatttgagtctaaaagccggttttcctccaggagttttaaatatcgtcccaggattgggtgaagaagccggtgaagctctgcttaagcatcctggggtgagccactattcattcaccggttcgacggaaatcgggattaaggtccagcaggaggccgccaaacgtgccgtccctgtgacccttgaactggggggtaaatctcctcagttggttttttccgatgctgatatagataaagcccttccttttctggttaatgctgccattcagaatgcaggacaaacctgttctgctgcaaccagggtcctgatcgaaaagcccatattccaggaattaacggaaaggcttgccaagggaatcagttcactccgttctggcccggcattacaagatcttgaatgcggtccattgatcagtaagattcagaaagatcgggttgaaggatttct

SEQ ID NO: 213728 - DNA, 891 bp, Unknown
  Bacterial polypeptide expressing nucleotide sequence isolated from the Sargasso Sea
agaagtcatcaatcctgcaaccaacgaggcttgtggaacatgtgcagcaggaaatgaaaaagatatagataaggctgttgccgcagcaaaagaaagctttaaagcaaaaacttggaggaagatggcacccaggaaaagaatgggaatcatgatgaagtttgccgatcttcttcaagcaaatacagctgaacttgccctcatggattccatgaatatgggtaagccgatcagcgattgcttgaatgtcgatgttccagcttcagctgtgaacattcgattcatggcagagtgtatcgataagatgtatggaaaagttgccaatacacatgaaaaagcactaaacctttctgttagagagccatatggtgtggttggattgatttctccatggaattatccacttctcatgggtgtttggaaaattgctccagcattggctgcagggaattcaattgtacttaaaccagatgagcattcgcctcactcgtgtataaaaatggcagagctttttgtcgaagcaggtggacctccaggggtattcaatgtggtcacgggacatggtgaagaggccggacaatctttggcactccatcaagatgtctcgaagatcggattcactggatcaactgaggttggaaaacttcttttacaatatgccggtcagtccaatatgaaaaaagtcagccttgagactggtgggaaatcacccatgatttacttcgctgatttacctgatatggaactcgctgtctctacagcctatgattcaatctatgcaaatatgggcgaagtctgtaatgcaggatctagaatctatgttgaaagagcaatttatgcagatttcgttgatcaatttatttcagaaggccaaggcgcatatacgcctggtga

SEQ ID NO: 213729 - DNA, 955 bp, Unknown
  Bacterial polypeptide expressing nucleotide sequence isolated from the Sargasso Sea
aaatggcaaccatcggagaaaaacgaaacgtacgaagtaataaatcctgctactgaagaggttataggaaaagcgtctaaagctacaaaaaacgatgtacaaaaagcattaaagtcagcagaaaaaggattccaaacttggaaaaaaactccagcatggcaaagatcatacaagattagaaaaattgccgatttaatgagagaaagaaaaaaggatttagccaaatggcttgctttagaagttggaaaacctttagtagaaggtgagggcgaagttggtggagcagcagatatatttgaatggaatgccgaagaaacaaaaagaatatttggacaaacagtggaaagtagatttgaagatacacgtgttcaagttatttaccaacctgtcggagttgtagcagcacttataccatggaattttccaattattttagcagctagaaaaatttctacagctttagcagctggttgttccgtgatagtgaaacccgatgtaatcaccccaggtgcagtaatggaattaatgaatattattaacgatgcaggtttacctccaggagtggttaatcttttgtcaggcgatcctgaagaagtttcaaatgaattaatttcttccaatattattaaaaaagtttcaataacaggttctactagagttggtaaattgatactcaaaaaagctgcagataaagttcaaagagtaacaatggaattaagtggtcatgcaccatttattgtttttgaagattcaaacattgataaagtaaccgatatggccatcacatctaaatatagaaataatggtcaagtatgtatttctccaagcaggttttacatacatgagagtaaaaaaaacgaatttgcaaaaacttttattgaaaaaacaaaaaaacttaaattaggtgatggaatgaaggaaggtacaaatctaggacctattacaacaaaaaaaa

SEQ ID NO: 213730 - DNA, 415 bp, Unknown
  Bacterial polypeptide expressing nucleotide sequence isolated from the Sargasso Sea
atatttgagggcgctaatttaatagcaggtggaccaggaaaacctgatggttttaaagatggttattatgtaaagccaactgtttttgctgatgtaaataataatatggaaattgccagaactgagatttttggtccagtattatcggtaattccatttgaaacagaagaagaggcaatagaaatcgcaaatgatactccttatggtttgacaaactatattcaaactgaagatcaagaaaaagtaaaaagagttgcaagaaaacttagatcaggaatgatagttgtaaatactgcctcacttgctgtagacgctccatttggaggatttaaacactctggaataggaagagaaggtggaaaagaaggcttattagaatttttagaagtaaaatctattggtggttggaactaat

SEQ ID NO: 213731 - DNA, 331 bp, Unknown
  Bacterial polypeptide expressing nucleotide sequence isolated from the Sargasso Sea
ttaaaagaaaatatgaccattgctcaagaggaaatatttggaccagtgcttggtgttttgacagttaaaaatgacgaggaagctttgaaaattgctagtaattcgaaatatggattgcatgctagtgtatttacacaggatattaatagagcgtttcatttagctaaaagcctgccctgtggaactgtatcagtaaatactttttcagagggagatattaaaactccatttggaggctataagcaatcaggttcattgagtagagatcaaggtactgaggctctaaattcgtttcttcaaacaaaaacaatttggataagtcatagttaat

SEQ ID NO: 213732 - DNA, 820 bp, Unknown
  Bacterial polypeptide expressing nucleotide sequence isolated from the Sargasso Sea
ttttgatgatgatcatttgattatcaacaagaataaaatcacttttactcaagagacagatttgaaaaatattgattggaaaaaacatgaggtagattatgtttttgagtgtacaggtaaatttaattctaaaaaaaaattagaggctcatttaaccaatggagcaaaaagagtcattgtttcagctccatgcaaaaatgctgataagactgttgtatttggagtaaatgaaaaagaattaaaaaagagtgataaaataatttcagcagcgtcttgtacaacaaattgtcttgcacctttagcacatgttttaaatgaaaattttcaaattgaaaaaggttttatgacaacaattcatgcttttacaagtgatcaaagaattttagacaattctcacaaagatcctagaagggctcgatctgctagccaatcaattgtgccaacctcgactggcgcatctaatgcaattggagagattataccttctcttaaaggaaaattagaaggtattgcaataagagtccctacccccaatgtttctttaatagagtttgtattttgcacaaaaaaagatttaagtgtggaaaaaattaattcagcattcctgaactttagtaaaaaaaataaaattcttgaagttataaaggaaaaactagtatctatagattttaatcataatccatcctcatcaatcgtagatacgaatttaacaaatgtagtaggaaaaaatatgggaaaaatttctgcatggtatgataacgaatggggtttttcaaatcgaatgtgcgatatagcagaataccttcataaaatttcttaa

SEQ ID NO: 213733 - DNA, 682 bp, Unknown
  Bacterial polypeptide expressing nucleotide sequence isolated from the Sargasso Sea
atgcgggaagcacaactggcagatcctatgcccggattggaaacccgccgggatcgtttacagaggctaatgaagggtctcgaggaacgcgaggaagccttcaccctggcaatttcagaggatttcggacagcgatccgcttttgaaacggccaattacgacatcaccgtcaccctggctgacatcaaatatcaaatccgcaatctggcgcgctggatgcggatccggaagcgttcggtcccgcttcacctgatgcccggaagagccaggattgtgcctcaaccgctgggggtagtgggggtgatttctccctggaattttccggtttttcttagcctctctcctgttgcgggcgccattgcagcaggcaaccgggtgatgctcaaacctagcgaatggacaccgaaaacctcagcacttctcgcggaattggcatcggaagcttttgaaccagatgaattcgcggtttttgaaggaggaatcgaggccggcagggccttttcggaattgccctttgaccacctgctttttaccggttccaccagggttgctaaagaagtttcaaactcggcagcgaaaaacctgacaccgttgaccctggaactcgggggaaagtcccccgccctagtctgccccgatgcaaacttgaaaagggctgcggaacggattgttttcggaaaac

SEQ ID NO: 213734 - DNA, 657 bp, Unknown
  Bacterial polypeptide expressing nucleotide sequence isolated from the Sargasso Sea
aagtaattgtttcagctccttgtaaaaattctgataaaactattgtatttggagtaaatgaaaatattcttacaaatgatgatgaaataatctcagctgcttcatgcactactaattgcttagctcctatcgcaaaagttctgaatgaaaattttgaaattgaaaaaggttttatgactacaatacacgcttttactagtgatcaaagaattttggataattcacataaagacccaagaagagcaagatctgctagccaatctatagttccaacatctacaggtgcctcaaaagctataggagaaattattcctagtttgaaaggtaaattagaaggagttgcaatgagagttcccactccaaatgtatctcttattgagttagttttttgcaccaaaaaagatatcgataaggaaaaaattaatgaggcatttaaattagcctctaaaactcaattaaaaaaagtgattgaaataacttcagaaaaactagtatcagttgattttaatcataattcatcttctgcaattgtagactcttctttgactaatgtagtaggaaaaaatatgggaaaaatttcagcttggtatgacaatgaatggggtttttcaaatagaatgtgtgatatagttgagcatcttcataaaatttcttgat

SEQ ID NO: 213735 - DNA, 830 bp, Unknown
  Bacterial polypeptide expressing nucleotide sequence isolated from the Sargasso Sea
taaaccatctgaaaaagatccatcttgttcaattagattagctgaactattttcagaagcaggattaccagatggagtgtttaatgttattcaaggagataagcaaatagttgatttaattatagagagtccagaaatatcatctattagttttgttggttctacaccagtagcaaaatatatttatgagcaatcttcaaaaaattttaaaagagttcaagctttaggaggagcaaaaaaccatttggttataatgcctgatgcaaatattgatcaagctgtagatggcatcataggtgctgcctatggatctgctggtgaaagatgtatggctatatcagttgctgtagcagtaggagatattgcagatgaattagtagaaaaagtagagaaaaatattgaaaagttaaaagtatcgccttggacagataatgaatcagatatgggccctgtaatatcaaaagaacataaagaaaaaatagaaaattatatctcaataggagttaatgagggtgcaaaattaattagggatggtagaaactttactattcaaggttatgagaatggatactttgttgggccaactttatttgataatgttactagagaaatgaagatctataaagaagaaatttttggtccagttctatcagttgtaagggcaaaaaattatgaagaagctctttccttagttaatgaccatccttttggtaatggaactaccatttacacttctgatggtgaagtagctagaaattttacctctaattctaaaattggaatggttggagttaatgttcctataccagtaccaatggctttcctatagt

SEQ ID NO: 213736 - DNA, 916 bp, Unknown
  Bacterial polypeptide expressing nucleotide sequence isolated from the Sargasso Sea
gcattcgaaactttttctaaaacaagcgtagctgaacgcctcgaacttcttactgcgataaggaatatttacaaacaaagatacgacgaaattgctaatgcaataatgatcgaaatgggtgcgccaataaatttagcctctggtgctcaagccagtgttggtttgagccatcttaaaactgctatacgagttcttgaaagccaaaaattcgaatacactcacaacaacatgattatacgaaaagaaccaataggtgtctgtggcttaattacaccatggaattggccaattaatcaagtggtatcgaaactggccccttgcattgcggctggatgcacatctgttttaaaaccaagcgaaatcgctccactctcatctatcctgttaacagaaataatacacgaagctggggtaccccctggggtttttaatatggtcaacgggtatggaccagttgttggtgaagcaatgtccaggcataaagatatcgacatgatgtcatttacaggatctactcgcggtggaatagccgtagcaacggcttcagcgcaatctgtaaaaagagttagccaagaattaggtggcaagtcaccaaacattgtcattgatgacgaaaaatttacagagtctatcgaacgcggagtcagaggctgtatgtcaaacactggtcagtcctgtaatgctccaactaggatgttagttccagcaagtagacataacgaagcattagaaatagctaagaaaacagcggagtccatgaaaactggaaatccgactttgcgagacactgatataggaccattagtaagtgaaacgcagtttaataaagttcaaacgcttttggaatcaggattaaagagcggtgccaaacttgtgaccggtggacctggaagaccctctggccttgataagggct

SEQ ID NO: 213737 - DNA, 869 bp, Unknown
  Bacterial polypeptide expressing nucleotide sequence isolated from the Sargasso Sea
tatgattgaaaagaaaaatttttatataaacggaaaatgggttgcaccggttaaacctaatgattttgatgtaattgatccatcaaccgaggaggcttttgctgtaatatctttaggatcaattgaagatacagataaagcagtaagtgctgctaaattggcatttgaaacctggagagaaacttcgaaggaagagagagtaaaattattagaaaaattttgtgaaatttataatagaagatgggatgaaatggttgaagcacaatcaatggaaatgggtgcgccattagattttgcatcagagatacatactaaaatgggggcagatatatctaaaaatgtaatagatattttaaaagattttaattttgaacatcagtttgattcaaaatcaaacaatcaaattagatatgaaccaattggagtttgcggattaataacgccatggaattatccaatgaaccaaatagtactaaaagttataccagcgcttgcagcaggttgcacaatgattttaaaaccatcagaagtggctccagtatcaggtgttttgtttgcggaaataattgacgaggctggatttcctccaggtgttttcaatttagttaatggtaacggagaagtagttgggaatcatatatctggtcatccagatattgatatggtctcgtttacaggatctacaagagcaggaaaattgatacagaaaaatgcagctgacacaattaagaaagtcacacttgaacttggcggtaaaggtggaaatatagtttttgaggactcttatccagatgctgtaagggacggagttagaaatataatgagtaacactggacaatcttgtgatgctcaaacacgaatgctagttc

SEQ ID NO: 213738 - DNA, 932 bp, Unknown
  Bacterial polypeptide expressing nucleotide sequence isolated from the Sargasso Sea
aataatagtatcagagcacggaaaagtatttgaggatgctaaaggatctcttgccagaggtttagaggttgtagagtatgcatgtggaattccacaagttttaaaaggcgagtttactgaaaatgtaggttctaatgtagatagttggtcgattagacaaccactaggagtttgtgcaggaatcaccccattcaattttcctgcaatggttcctatgtggatgtttcctatggcgattgcatgtgggaatacttttatacttaaaccatcagagaaagatcctacttgctctatgagacttgcagaacttttaaaagaggctggtttgcctgatggagttttcaacgtagtaaacggagataaagagtctgtagatgctttaattaataacaaagatattgctgcaatgagctttgttggatctactccaatagcaaaatatatttatgaaaactgtgctaaaaatgaaaagcgagttcaggctttaggtggagccaaaaatcattgcgtggttatgcctgactgtgatttagatcaagctgttaatggtttgatgggagctgcctatggttcagctggtgaaagatgcatggcccagtctgttgctgtagctgttggaagtataggtgatcaattagtgaaatcattggcaaagaaagttgaagcattaaaagtaggcccaggtatggataaagattctgaaatgggaccactggtgaccaaggaacacttagaaaaagtaaaaggttatgttgatattggtgtcaaagaaggagcaaaactagtagttgatggaagaaactttaaaattcaaggctatgagaaaggtttttacatcggcgggtgtttatttgataacgttacaaaaaatatgagaatctataaggaagaaatatttggaccagttttatcggtggttagggcaaatagtt

SEQ ID NO: 213739 - DNA, 382 bp, Unknown
  Bacterial polypeptide expressing nucleotide sequence isolated from the Sargasso Sea
ggggcaacgagtaggtgatcgtgggttttttgttgaaccaacagtttttacggaggttcatgacgagatggcgattgctcgagatgagatatttgggcccgtattatcggttcttcggttttcagatattgatgaattagtacgtcgcgcaaatgcaacaacatttggtcttgctgctgctgtgtggacacgagatgtgagtaaagcccatatgttggccgaacgattacgagctggaacagtgtgggtcaactgctatgacgtttttgatgcggccgcaccttttggtgggtttaagcagtccggctttggccgagagcttgggcagcgtgggctcgatgcctacttagaggataagacggtcacggtcagcctagggtga

SEQ ID NO: 213740 - DNA, 838 bp, Unknown
  Bacterial polypeptide expressing nucleotide sequence isolated from the Sargasso Sea
cacaacacccattgccggatctacgccccggtcggcgcgcatcgcgaccttctggcctatctcgtccgccgcctgctggaaaacggcgccaactcctccttcgtcaaccagatcgtggatgaggacgtgccgccggaaacggtggccgccgatccgttcgacaaggtcaagccgacgaagcttcgcaccggcacgaccctttttgcgccggagcgtcagaactccaccggcttcgaccttgcccaccgcccgacgctggcgatgatcgatgaggcccgcggccggtttgaaagccatcgctggaaggccggaccgattattgccgcagaggcccccgccggcgaaaccgcggagataagcaatccggcgcgccagcacgacgtcgtcggaacggtgagctgggcctcagttgaaacggttgacgccgcctgcgccgctgcccgcccctgggaggccgatgccgcgacccgccgcaaggtgctggaaaaggccgccgatctctacgagcagaatttcggcgagattttcgcgctcgtcgcccgcgaggccggcaagacgctgccggacgcggttgccgaactgcgtgaggccgtcgatttcctgcgttactatgccgctcaggccgagggcgcgccgccgatcggcgtgtttgcctgcatcagcccgtggaactttccgctggcgatattcaccggccagatcgcggccgcccttgccgccggcaacgccgtgcttgccaagcccgccgagcagacgccgctgatcgcttggcgcgcctgccagcttctccatgaggctggcgtgcccgaaaccgcgctgcagctcctgcccggcgccg

SEQ ID NO: 213741 - DNA, 959 bp, Unknown
  Bacterial polypeptide expressing nucleotide sequence isolated from the Sargasso Sea
tgagagccatcctatccttgaagaaatggcgaagttgaatttaggccctagtcatattgacgtgggtaagctcgctacaaaatacatggaagaagctgagtcccaacaagtcgacattgctagttttgttaaaaaagaatgtcaggatgtcatcgacagcgatgcgttgccattaaacgagccgcaagatgtagtgctttatgggttcggtcgtattggtcggttattggcgaggctgttgatagagaaaactggtagtggccaacagctcaggttgagagcagtggtcgttcgtaaaggaggagccgacgatttagctaaacgggcgagtttattgagacgcgattcagtgcatggaagttttcaggggacaatacgagtagatgaagaaaattcctgcattatcgcgaatggaaatgtgatccgatttttgtatgcgaattcgcctgatgagctcaattacgaggactatgagattagtcgagcgatattgattgataacacaggggtttggagagatagagatgggctatctaagcatctcgatagtaacggcgtggctaaagtggttttaaccgctccaggaaagggtgacttgaagaatgtcgtgtctggcgttaattcgaatttgattgatgctgaagacgagattatcgctgccgctagctgtacgacgaacgcgattgttcctcctttgaaggcgatcaacgaagaattctcgatagtatccgggcatatggagactgtgcacgcgtttactcctgaccagaatctgatcgataactatcacaagagtaatcgcaggggtcgtagcgcgccactaaatatggttatcacagagaccggtgcatcttcggctgtgacaaagttgttgccagaattagatggaaaactaactggcaacgcgattagagtgcctaccccaaatgtttctctggcgatcttgaatttgacagttg

SEQ ID NO: 213742 - DNA, 917 bp, Unknown
  Bacterial polypeptide expressing nucleotide sequence isolated from the Sargasso Sea
tgcttttaatagttggaaaaatgtttctgcatatgagagatcaaaaatactacgtaaagcagctgatattgttcgtagtaaagctgatcaaattgctactttgatgactatggaacaaggtaaacctctaatcgaagcaaagatggagacaatgggagcggctgattcaattgactggtatgctgaagagggtaggagagcctacggtagaataattccttctagagctcctcaaggtgtatatcaatttgtatttaaagaaccagttggcgttgttgctgcatttacaccatggaattttcctcttaatcaagttgttaaaaaagtagcggcagcttttgcagctggttgcacagccattgtaaagggacctgaagagacgccagctagtgtggcagaattaataaaagcctttgatgaggcaggaatgccaaaaggatcgattaatttggtttatggtataccagctgaaatttcagagtatttaattgcgcatccaattgtaagaaaagttacttttacaggatctacagctgttggaaaattattagcttcacaagcaggtactcacatgaaaagagtaactatggagcttggtggtcactcgcctgcgattgtctgtgaggatgctgacgttaaagccgcagtaaaaatattaagcgcgaataaatttaggaatgcaggacaagtttgtatttctccaacaagatttttagttcatgattcagtatatgaagaattcgttgatggttttgtaaaacaagctgaatccttaaatgtgggtaatggtctagacgagggtgttaaaatgggcccgcttgcccacgatagaagacttactgcaattgaaggttttgttgcagatgcagttgaaaatggtgcaaaagttttaactggtggtaagagaagagggtaat

SEQ ID NO: 213743 - DNA, 811 bp, Unknown
  Bacterial polypeptide expressing nucleotide sequence isolated from the Sargasso Sea
atgaaaataaaaattggaataaatggaatgggaagaattggtagaatgattcttcgatctataattgaaagtaataataataacattgagataaaacatataaataatagaacaaattctgaagcttgctgcaacctattaaaatatgactcgatacacggaaaatttaaagcagatataagttttgatgatgagcatttaattataaatcaaaataaaatttcttttagccaagaaacgaatttgaataatatcaaatggaaaaagaacaatgtggactatgtttttgaatgcaccgggaaatttaattctagagaaaaattagagcctcatctaaataatggagcaaaaaaggttattgtttcagctccgtgtaaaaatgctgataagactatagtatttggagttaatgagtctcaattaaaaaaaagcgataaaattatttctgctgcatcttgtactactaattgtcttgcaccagtagcttatgtgcttaatgaaaatttcggaattgaaaaaggatttatgacaacaatccatgctttcactagcgatcaaagaattttagataattctcataaagatccaagaagagcaagatctgcaggtcaatctatagttcctacctcaactggggcatcaaagacaattggtgaaatcataccatctcttaaaggtaagttagaaggcgtagcaatgagggttcctactccaaatgtttctttaattgaactcgtattttgcacaaaaaaagatttaagtattaataaaattaattcggcatttggaaacttcagtaaaaaaaataaag

SEQ ID NO: 213744 - DNA, 955 bp, Unknown
  Bacterial polypeptide expressing nucleotide sequence isolated from the Sargasso Sea
aggaacaggtgccagtcatataaaatcatttattcgatatttgaaagaatttaaatttgaaaaaccattaggagaacatgctccagaccagagaattatatatgaacctaaaggagtttgtgcactaattacaccttggaattggccaatgaatcaggtttgtttaaaagtaattccagctttatcggctggctgcacaatggttttaaagccctctgaactagctccgctttcatctatgattttagctgaaataatcgatgaagcaaaatttccatcaggtgtttttaatttggtgaatggagatggagcgattactggcgatgcccttactagtcatccagaagttaatatgatttcttttacaggatctactagagcaggtgctttaatttctcaaaatgctgcaaaagattttaaaagagttagccttgaattgggaggaaaaggtgcaaatattatctttaaagatgctgatcctgaagcaatagaaagaggtgcattaagatgttttagaaattcaggccaatcttgcaatgctccaacgaggatgttagtagaaaaatcaatgtatgaagaagcagtagaaagacttaaaaaatatgcaaatgaatttcaagttgatgatccaaacaaagaaggtgagcacataggtccagtcatctcagaaacacaattcaataaaattcaaactttaataaaaaaaggcatagacgagggagctaaattagtttcaggtggtcctggtaaaccaaatgggcttaacaaagggtactatgtaaaacctactgtatttgcagatgtaaaaaatgatatggaaatagctagaacagaaatttttggaccagttttatcagttatgccatttgaaacagaagaagaggcaattaaaatagccaatgataccccttacggtttacaaattatatacaaacccaagatcctgagaaagtaa

SEQ ID NO: 213745 - DNA, 337 bp, Unknown
  Bacterial polypeptide expressing nucleotide sequence isolated from the Sargasso Sea
gacccacaggtttttgcaaatgtgacaaatgatatgacgatagctaaagaagagatatttggccctgttcttgtaatgattaaatataataatgaagaagaggctatcaatattgctaatgatactgaatatggtcttgcaggttatgttcaaggtgatcccaatcatgccagagaagttgctcgaaaaataagagctggacaagtaataattaatggaggcgcaagaggaactggtgctccttttggaggatataaagcttcaggaaatggaagagagcatggtcttcatggtctagaagaatgtctagaaactaaagcaattattgctccataga

SEQ ID NO: 213746 - DNA, 851 bp, Unknown
  Bacterial polypeptide expressing nucleotide sequence isolated from the Sargasso Sea
ttattactattatgctggccttactgataagattgaaggatctacattacccattgataaacctgatatgcaagtttttacgacaagagaacctgtaggagttatagctgcagttataccttggaattctcaacagctgttaagtgcagttaaacttgctccagcacttgcaatgggaaacacaattattattaaagcctctgaagcagctccggcacctttattagaattagctaaattaatagataaagttggcttacctaaaggtgttgtaaatattattactggatttccagaagaatgtagcaaaattttaacttctcataaaaaaattaatcgtattgcatttacaggcggaaaggaaactgcaagacatataattcgtaattctgctgaaaatctatctcaagtaaccttggaacttggaggaaaaagcccagtagctgtttttaatgatgcaaatataaataatgcattaagtggagttacagccagtatatttggagcaagtggacaaagctgtatcgccggttcaagactttatttacaagaaggtatttataatgattttattgaaaaaatttctgaaaaagctggaaatattataattggccctcctatgaatgatgaaacgcaaatgggtcctttagctacaattgatcagcttaaaaatattcaaaagaatgttgatcaaactattaaacaagggggaagattaattataggtggtgaaaaaccaaaagatatgaagcaaggttggttttataaacctacaataattgagtgcgatcatcataatttaccagcagcagaaaatgaattatttggtccgagttttatcaagttatgaa

SEQ ID NO: 213747 - DNA, 703 bp, Unknown
  Bacterial polypeptide expressing nucleotide sequence isolated from the Sargasso Sea
tatgaatacaacacaaaacatagacgcaatatttaaaagtcagataaaaaatactttaccaactacatatcaagatcgaattgattatttatcaaggattgaacgatggatagaattaaatagagatagtataattgaagcgcacttttcagacctacataagccagaatctgaaacagagttggctgagatatggtatgtcctctcggaaattaaattagcaaaaaataacctaagaaagtggatgaggtcaaagcggatgggtgcctcaacactaactctgctcactgcacagtcttgggtgcattatgaacctaggggagtcgttctaataatagcaccatggaatttccctttcaacttaacgataggtccccttatttcagctttagcagcaggtaatagggtaataataaaaccatccgaaatgacgcctcatgtgagcagtctaattagtgaaatgattaatgagctctttgagccaaatagagttgcaatatttcaaggagatcaaagggtagctcaaagcttattaaaatatccatttcaccacatttttttcgttgggagtccctctgttgggaaaattgtcatggcggaggcagctaaacacctttcatccattacgctagagttaggaggaaaaactccaacaatcatagataaaaccgcaaatataaagatggccataaacaaattagca

SEQ ID NO: 213748 - DNA, 889 bp, Unknown
  Bacterial polypeptide expressing nucleotide sequence isolated from the Sargasso Sea
aaatctattgcacaaaaattaaaatttgaaggccgtgcctttataaatgggaagtatgttaatgctatagatggcaaaaaatttgaaactataaatcctgctacaggaaaaaagctttgcagtgtagcaaaatgtaattacaaagatgttgatttagcagttaaagtttcaagaaaagtttttaatagcggtgtttggtcaaaaagttcaccagagcacagaaaagaagttttattaaaatttgcagaattacttagaaagcatggagatgaaaattcggttttagaatgtgttgatactggaaaattggtgactgattgcattaatgaagttgcaaatgacgctccaatgcattttcaatggtatggagaattaatagataaagtttttggtaaagtaggtccaacagagccttcaataacaagcttaattgttaaagagccaataggtgttgttgcgggtattgttccttggaactttcctttaatgatggctgtttggaaaatggcaccagctcttgctgcgggctgttcagtgattattaaaccagcagaagatactccgctaacagcaattcgagttgcaaaaatagctcaagaatctggaattccagatggcgttttaaatgtgcttcctggttatggtgatgttggtgaagcattaggcaggcataaagatgttgatgcggtttcttttacaggttcaacggaagtaggtggttattttttaaagtattcaagtgaaagtaatttaaaacctgttgcgttagagatgggtggtaaaagtccatttatagttttagaagatgctaaaattaatgatgacttaattgataatgcaataaattctgctttttggaatggtggtcaaaactgtttcagcaaaacat

SEQ ID NO: 213749 - DNA, 916 bp, Unknown
  Bacterial polypeptide expressing nucleotide sequence isolated from the Sargasso Sea
taacggcggtgactggcccgctctgaccgcaacagcccgcggccacatgattcgcaaattcgctgatctcattgctgagaaagccgacgagctggcggaaatagaggttcgcgacaacggcaagctaatcgcggaaatgagcgcccagtgtaagtatctcacccagtggtactattactacgctgggctttgcgacaaggtcgaaggatcggttatcccgatcgataagccgggccatttcaattacacggtctgggagccactgggcgtttgcgcctgcatcgtgccatggaattcgccactgctgttgctggcttggaagctggcaccgctgcttgcggctgggaataccgcggttatcaagccatcggaatacacctccgcatcgaccctggaattcatgaaaattgccgagcaggtgtttccacccggcgttgtgaatgtggttaccggtttcggcgccgaagccggcagtccgctggtcgatcatcccaaggtcgccaaggtggcgtttacgggatccgacgtcaccggcgctgcgatttatgcccaggccgccaagcacatgaaaaaggtgacgatggaactgggtggcaaatcgccgaacatcgtgttcggggacgcccatattgataacgcggtcaaaggagtgatatccggtattttcgctgcaaccgggcagacctgtatcgcgggatcgcgcctgctggttcaggagtcaattcatgatgagttcgtcgagaaactggtggatctcggcaaatccgccaggatcggcgatccgtccagtttcgagacagaggtcggcccggtcacaaatatcccccaatacgaaaaggtgctgaactatattgatgtggcgaaaggtgaaggtgcggaagctgtactcggcggcggcaccccggcggggcccgaa

SEQ ID NO: 213750 - DNA, 897 bp, Unknown
  Bacterial polypeptide expressing nucleotide sequence isolated from the Sargasso Sea
atgtatccaatttctatagcttgcggaaatacgtttgtattaaaaccgtcagaaaaagatccaagctgtccaatgagactagctgaaatagcaatagaagctggtctgccagctggagtattgaatgtggtaaatggagataaagaagcagtagatacattgcttgaaaataaaacagttcaagcaattagttttgttggttctaccccaatagcggaatatgtttaccatacaggcacaaaaaataacaaaagagtacaagcgctaggtggagcaaaaaatcatatggttataatgccagacgctgatgtaaataaaactacagacgccattataggatcagcttttggttctgcaggagaaagatgtatggcaatttctgttgctgtctgcgtaggcaaacaaaccaaagaaaaaataaaaaaaaaattattggaggaagcagctaaactaaatgttggaccttacactgatgaaaaaagtgattttggacccttaaataataaagcacattttgaaaaagttctaggatatatcgatactggcgaaaaagagggggcaaaattattaactgatggtagaaattttaaaaaacaaggttatgaaaatggttattttgttgggcctactatttttgacgaagttaaacctgatatgaaaatctataaagaagaaatttttggaccagtcttaagtatgatgactacagatacttatgaggaagcactaaacctagtaaatgaccatgaattaggaaatggtgcagctgtttttacaaaaagtggaaatattgcaaaacattttacagaaaatgcaaaaattggaatgattggagtaaatgtacctattccagtacctgttgcttatcatagctttgggggatggaagcgatcttta

SEQ ID NO: 213751 - DNA, 400 bp, Unknown
  Bacterial polypeptide expressing nucleotide sequence isolated from the Sargasso Sea
aaggttgggaggaaatattaccatgaaggaaacaggtggttgctattttgagcctacaatatttaaaaatgtagaaaatagtatgagaatagctcaagaagaaatttttggccctgttcttactgcactcagttttaacaattttgaggaggctatttctattgctaatgatactgaatacgggcttgcagcaggtgtttggacaaaagatattaataaagcaatcaaagcgtctagagaaattcgtgccggcactgtttatattaacaattatgaagaaggtgtagattcaactataccactgggcggttataaacagtctggcattggcagagataatggctatcaagctctagaaaattatctacaagtaaagtcaacttggataaaagtttcttag

SEQ ID NO: 213752 - DNA, 863 bp, Unknown
  Bacterial polypeptide expressing nucleotide sequence isolated from the Sargasso Sea
cggacattcattaataaatcaatctcctattgaaataatgaagtcacatagatttataagaagagttgaagatactgagatttctgaacttgagacctatccctttttacaaagaattgaactccaagatattaaagattgtgagattgatctaggagagatagtagtggatttcatgaaagagaataaatctttagataattcagaaattgactctcacattaaatcatatattttagatccactagataaagttgatcagcaaagaccttcaaaaccccaggacatagttctgtatgggtttggtcgaatcggtaggttagttgcacgcattatggctcaaatgacaggcccaggtaattattatagactcagagcaattgtcgtgagaaaagtatcagatacaaacgatctgcttaaacgagctagtttgttgagacgtgattctgttcacggttcatttcatggaactattagagttgacaatgagacggaaactttagttataaatggaaatcctgtaaagatcatctatgcaaatggaccaaaagactttaattattccgattacgatatagacaatccaattgttattgataatacaggtgtctggagagaggagaaagatttatctcttcatctagaatctggcgctagcaaagttgttctaactgcacctgggaagggtcaaataaagaatattgttaacggtatcaataacgacatattgaatgaatctgataacgtaatctcagctgcttcttgcacgactaatgcaattgttccggttttagatattctaaataaagaatattcaataatatcaggacatatcgaaactgttcatgcatatacgaatgatc

SEQ ID NO: 213753 - DNA, 703 bp, Unknown
  Bacterial polypeptide expressing nucleotide sequence isolated from the Sargasso Sea
catgaaaactattcaccatttcgtagacggtaaaagcttctctggaaattctaaaagaacagggaaagtttttaatcctgccacaggtgaacaaagtgctgaggttaaattagcaactactaaagatgtagatcatgcagttgcaaatgcaaaaaaagcttttgagtcttggtcaaataagcccccacttcaaagggctagggtaatgtttaaatttaaagaacttatagaaaaaaattctgaagaacttactaaaataatcgtttcagaacatggaaaagtttttgaagatgcaagaggttctttaaccagaggattagaagtagtagaatatgcttgtggaattccacaattattaaagggagaattcactgaaaatgttggttcaaacgttgatagttggtctacgagacaaccgctcggtgtttgtgcaggtataacaccctttaattttcctgcaatggttcctatgtggatgttccctatggcaatcgcatgtggaaatacttttgtattaaaaccttcggagaaagacccatcttgctctttaagattagctgaacttttaaaagatgcagggcttcccgatggagtattcaatgttataaatggtgacaaagaatctgtagatgctttgatcaataataaagacgttgttgctatgagctttgtaggatcaactccgatagctaaatatattacg

SEQ ID NO: 213754 - DNA, 307 bp, Unknown
  Bacterial polypeptide expressing nucleotide sequence isolated from the Sargasso Sea
caggcaaattataaaattgcgacagaagaaatatttggtccagtattgactaccttaacatttcgaactccagatgaagctgttgaaatagctaacaatacagagtatggattatctgcagggatttggactgaaaaaggatccaaaatattatggactgcagacaggcttgatgctggtgttgtttgggctaatacgtttaataaattcgacccggcttctccatttggtgggtataaagaatctggttttggaagagaaggtggcaggcatggtctcctttcatacttaaaggcatcatcatgac

SEQ ID NO: 213755 - DNA, 814 bp, Unknown
  Bacterial polypeptide expressing nucleotide sequence isolated from the Sargasso Sea
ctcttcagagctagcacaactgcttaccgaggaacagggtaagccattggaagcggccacaaccgaagtttttggtatggcagcattttgcaggtacttcacttccttagatctccctgtggaggtattagaggatagcgaagggcgaaaagtcgaatcgcacaggaaccctctcggggtcgtgggagccatcgtcccctggaactttcctttgatgctgatggcttttaaattgcctccagctttaattgcaggaaatacgattgtccttaagcctgccccaacgacacccctcagttctttgagatttgcagaacttattgcagacgtagttcctgcaggcgtcgtcaattttgtaacagacgctaatgatttgggagcggccttgaccgcgcacccagatgtgagaaaagtttctttcactggatccactgcgacgggcgcaaaagtcatggctggagctgccggactgctaaaacgtatcactcttgaactgggaggaaatgatgcaggaatcgttcttaatgatgtcgatcctaaggaagcagcccctaaactatttgacagcgcttttcagaatacaggtcaggtctgcatcgcgatgaagagactctacgtccatgaagacatatacgatgaaatgtgtgcagagctcgctagcatcgcggatgaaacgccgattggaaatggcctggatcaaggcacgaagctcggacctcttaataacaagatgcaatatgagcgcgtaaaagaactaatagaagaagcaaaacgagatggcaacattatcgctgggcggggacgtcccccatga

SEQ ID NO: 213756 - DNA, 853 bp, Unknown
  Bacterial polypeptide expressing nucleotide sequence isolated from the Sargasso Sea
gaactggccaatgaatcaggtatgtttaaaagtaatgccagcaattgcatcaggatgtacgatggtcttaaaaccatcagaattagcaccactctcatcaatgatacttgctgaaattattgatgaagtaaaatttccaaaaggagtgtttaatttagttaatggtgatggagaaacaacaggtgatgctcttacgagtcatccagatattaatatgatttcttttacaggatcaacaagagcaggagctttgatttcacaaaatgctgccaaagattttaaaagagtaagcttagaattaggtggtaagggagcaaatataatttttaaagatgctgatccagaagcaattgaaagaggtgctctaagatgttttagaaattcaggacagtcttgtaatgcaccaacaagaatgttagttgaaaaatcaatgtatgatgaggctattgagagattaaaaaaatatactgaaaactttgaagttggcgatcctaaaaaagaaggagaacatataggtccagttatttcagaaactcaatacaataaaatacaaactttaattcaaaaaggaataaacgaaggtgcaaaattagttgctggaggaactggcaagcctgatggattagacaaaggttactttgttaaaccaactgtttttgcagatgttaataatgatatggaagttgcaagaacagaaatttttggacctgttttatctgttattccatttgaaacagaagaagatgcaattaaaattgcaaatgatactgcttacggattaacaaactatatccaaactcaagactccgaaaaagttcaaagagttgcaagaaaattaagatctggaatggtt

SEQ ID NO: 213757 - DNA, 865 bp, Unknown
  Bacterial polypeptide expressing nucleotide sequence isolated from the Sargasso Sea
tgttttaggtgttatgccatggaatttcccattttggcaggtttttcgattttctgttccagcacttattgctgggaatggagcaatcttgaaacatgcttcaaatgtccaaggttgtgcattcgcaatagagtctagttttttagaagctggttttccagcgaacatatttcgtaatatatcaatcagtggaaaaaatgtaaaagaagtgataaaaaataaggcaatttcagcagttactattactggtagtacacccgcaggtagttctgtagcacaaactgctgggaaatatttaaaaaagacggttttagaactaggaggtagcgatccatatatcatacttgatgatgctgacttggataaggcaataaaagcttgtattaatggacggattttaaatacaggtcaaagttgtatttcagctaaaaggttaatagtaacaaaattattatatcatgattttttaaaaaaactcaatgttgagttagctaaaatgataatgggtgatcctatcgataatgttgatattggtcctatggtgtcgataaatgctagaaatgaaattcatgatcaggtcacacgttctatagattctggtgcgacgcttgaacttggtggagaaatcccggatttaaaaggatgtttttatccggttactttgttatctaatgttaagccaggtatgccagcatttgatgaagaaatctttggccccgttttttcattaatcatggcaaaagatgaagatcatgcaattaggttgggtaatcagacaccgtttggattgggtgcagctttatttaccaaagatattaaaaagggggaagagattgccaaagcccggttaaatgctgggttatgc

SEQ ID NO: 213758 - DNA, 808 bp, Unknown
  Bacterial polypeptide expressing nucleotide sequence isolated from the Sargasso Sea
ggtagacataaagatgttgatgcagtttcttttacgggttcaactgaagtaggtggttattttttaaaatattcaagtgaaagtaatttaaaacctgttgctttagagatgggtggtaaaagtccatttatagttttagaagatgctaaaattaatgatgacttaattaataatgcaataaattctgctttttggaatggtggtcaaaactgttcagcaaatatgaggcagatagttcacaaaaaagttaaagatgaatttctagataaggtaattaaaaaagtaaaaaaaataaaagttggtgatcctctagatttaaaatctaacatgggatcaatgatatcaaagggacatttgcaaacagttgatggttatattcaaaagggaatagatgaaggtgcaaaacttttatcaggtggtatttcagatataaaacaaaaaggtttttacgcaaaaccaactttgttcgatggtctaaaagaaaatatgactattgcacaagaagaaatctttgggcctgttttaggagtattaactgttaaaaatgatgaagaagccctacaagttgcaagtaattcaaaatatggattgcatgcaagtgtatttactcaagatataaaccgtgcatttcatttagctaagagtcttccatgtggtacagtttcagtaaatactttttcagagggtgatatcaaaactcctttcggaggttataaacaatctggatctttatcaagagatcagggcacagaggcacttaattcatttcttcaaaccaaaacaatttggataagtcacaatagttaaa

SEQ ID NO: 213759 - DNA, 726 bp, Unknown
  Bacterial polypeptide expressing nucleotide sequence isolated from the Sargasso Sea
aaaatgctgctaaagattttaaaagagtaagcttagaattaggaggcaagggtgcaaatataatttttaaagatgctgatccagaagctattgaaagaggtgctttaagatgttttagaaattctggacaatcttgtaatgcaccgacaagaatgttagttgaaaaatcaatgtatgaagaagctattgagagattaaaaaaatataccgaaagttttgaggtgggtgatcctaaaaaagaaggagaacatataggtccagttatttcagaaactcaatacaataaaatacaaactttaatccaaaaaggaatagatgaaggtgcaaaattaattgctggaggaacaggtaaacctgatggattagacaaaggttactttgttaaaccaactgtttttgcagatgtaaataatgatatggaagttgcaagaacagaaatttttggacctgttttatctgttattccttttgaaacagaagaagatgcaattaaaattgcaaatgatactgcttatggactaacaaactatatccaaacccaagactctcaaaaagtacaaagagttgcaagaaaattaagatctggaatggttgatgttaatggagctggtattgcagttgatgcacctttcggtggttttaaacattctggaataggtcgagaagcaggtgaacacggtttagaagagtttttagaagtaaaagcagtaggtggttggagttaat

SEQ ID NO: 213760 - DNA, 928 bp, Unknown
  Bacterial polypeptide expressing nucleotide sequence isolated from the Sargasso Sea
taaatggcaacaatcttcgagcggagaaacttacgaagtaataaatccagcaacagaggaaatcataggtaaagcatctaaggcaaacagcaaagacgttcaaagagctctaaagtcagctaaaaaaggtttagaaatttggaaaaagacttctccttgggaaagatcaaaagtaataagaaggatttcagaattaatgagaaaaaaagttgatactttatcaaaatggcttacgctagaagtgggcaaacctttaaccgagggtcctggagaagtagggggagcagctgatatatttgaatggaactctgaagaaacaaaaagaatttttggtgaaataaatcaaagtcgttttccaaatacaaaaatacatgtgatttatcagcctgtaggtgtggtagctgcattagttccatggaattttccagttatattagcatcaagaaagatttctactgctttagctgctggatgttcagttatagtaaaacctgatgtgattactccaggtagtgtaatggagatagtcgatatatgtaaagaggccggcgtcccaccaggtgttgttaatttattatcaggagatccagcagctatttcatctgaattaattcaatcagatataataaaaaaaatatctattaccggttcaactagagttggtaaacttattcttaagcaagctgcagataaggtacaaagagtaacaatggaattaagtggtcattctccatttatcgtttttgacgatgttgatttaaataaagtaactgatatggccattacagctaaatttagaaataacggccaagtttgtatatccccaaacagattttatattcatgagaagaaaaaagatgaatttgcggacttaatggttcaaaaaactaaaaaattaaaaatgggtaacggtaggataaggatactt

SEQ ID NO: 213761 - DNA, 511 bp, Unknown
  Bacterial polypeptide expressing nucleotide sequence isolated from the Sargasso Sea
gtcggcgacccgatggcggacgatgtccagatgggcgcgctgatctccgagccgcacctgcagaaggttctcgactatgtcgcgtccggcaccgccgagggcgccacccttgccgtcggcggcagccgcctccacccgcagggtttcgaggccggctatttcatggaaccgacgatcctgaccaactgccgggacgagatgcggcatgtccgcgaggagattttcgggccggtcatgtcggtgctgaccttcgagaccgaggaggaggccgtacagcgggccaatgccacatccttcgggctgggcgccgggctgatgaccggcgacctggcgcgggcgcaccgtgtcgccgcgcagctcgaaagcggcaatgtctgggtcaacagctacaacatcctgccgccaggccttcccttcggcggggtcaagcagtccgggtttggccgcgagaacagcgcctactcgctggaggcctacagcgagattaaggcaacctacatccagctttagg

SEQ ID NO: 213762 - DNA, 580 bp, Unknown
  Bacterial polypeptide expressing nucleotide sequence isolated from the Sargasso Sea
tatgaaaattaaagttggaattaatggaatgggtagaattggtagaatggtacttagatcaattgtagaaaaacacagtaatttaataaaaattcaacatattaacaatagatctgatctagaatcaacttgctctctattaaaatacgattctatacatggaaagtttaatgcgaatataaattatagtaaaaaacatttaattgtaaacaaaaacagaatttcattttctcaagaatctaaattggaagatataaaatggaaaaaatttgatgttgactatgtatttgagtgtacaggtaaattcaattcaaaacaaaagttaattttacatataaaaaatggtgcaaaaaaagttatcgtatctgcgccgtgtaaaaatgcagataagactatagtatacggtgttaatgatgataaaattttgaaaaaagatcaaataatttctgcagcctcatgcacaacgaattgtttggctccggttgtaaaaattattaatgaaaattttgaaattgaaaaaggcttcatgactactattcacgcttttacaagtgatcaaagaattttagataattcacat

SEQ ID NO: 213763 - DNA, 820 bp, Unknown
  Bacterial polypeptide expressing nucleotide sequence isolated from the Sargasso Sea
tatgcaggataaaaaaaatttttatattaatggacaatgggtgtctccaatagaaccaagatcatttgcggtaattaacccagcaacggaagagccgtgtgctgaaatttcacttggaggaaaaaaggatgttgatgcagctgtaatatcagcgaaaaaagcttttgaaacttggggttttaccacaaaagaggaaagacttaacctttttgaaaaattatatgagatttacaaaaaaaattgggatcaaatggcaaaaactatttctcttgaaatgggtgcgccaattgatttttcaacagaacttcaaacaaaaacaggagccagtcatataaaatcatttaaaaatattttaaaaaattttaaatttgaaaaaactttagatgaagaaaaaaatcaaactattttatatgaacctaaaggtgtgtgcgcattaattacaccttggaattggccaattaatcaagtaaatttaaaagtaattccagcactagctgctggatgtacggtagttttaaagccatccgaaattgcacctttatcatcaatgctattagcagagatgatgcatgatgctggttttccaaaaggtgtttttaatttagtaaacggtgatggtgcggtaactggagatgctttgacaagccaccctgatatagacatgatatcatttactggatcgactagagctggtgctttgatttctcaaaatgcagcaaaagattttaaaagaataagtttagaactaggaggaaaaggagcaaatattgtatttaaagatgcggggccagatgcaatatcttggagtgtcaaagatgtt

SEQ ID NO: 213764 - DNA, 865 bp, Unknown
  Bacterial polypeptide expressing nucleotide sequence isolated from the Sargasso Sea
ttgttcagggtagttgcacaactaaaagaaaagattaactttttatctttaataaatactcaagaaacaggcaagccaatcaaagaaagcacactggttgagcttggaggtgttataaggacatttgagtattatgctgggctagctacgaaaataaaaggtacctcgcaagtaatcaacaaagaacttttttccttaactataaaagaaccaataggggttgttggacagatattgccatggaacttccccttattgctggcttcttggaaaattgcaccagcgctggcgtcaggatgtaccgtcgtaataaaaccttctgagttgactccacacggtacaattgagcttgcaaaaattatctctgattgtggcgttccagatggggtaattaatgtttgtcctggtagtggtgaagaggctggagatgctttagtaaaaaataaaaaaattgcaaagatttcctttactgggtcttcaatggttggaaagtctatagtaaggaatagctcggataacttaaccaaactctcactggagttaggaggaaaggctcctaatattatttttgatgatgcaaacttaggctcttgtcttgaggcgaacttaagaggcggtttttttaatcagggagagaattgtacagcagtaacaagattgtttgttcataagaaaatttacaataaatttattagcctttacaaaaaaaggattgctgaaattaatatggatgagcctgacaagaataatactgaaatgggatctttaatctccaaagctcatttaaaaaaagtaacctcttgtgtagataaaagtattaaacaggggtcgaagattatttttcaaggtaaaatcaagaaaggct

SEQ ID NO: 213765 - DNA, 496 bp, Unknown
  Bacterial polypeptide expressing nucleotide sequence isolated from the Sargasso Sea
ggttcaaaaaaaggtgatcatataggccctgtagtatctaaagttctttacgataaaataattaatcttatagatagtggcatttcagaaggagctacattggctgcgggcggtcctgatcggccaaatggattaaataaaggatattttattaaaccgacaatttttactgacgttacaaacgaaatgcggatagcaaaagaagaaatttttggacctgtactttctattattccttttgaaaaagaagaagaagcaatcaaaattgtgaatgatacttcttatggattaggaaattatttacaaacagatgataaagaaaaagcccacagagtagcaagagaacttagatcaggctgtgtttatattaatggaaaaggtgctgatgctggaacaccatttggtggttatagacaatctggaaatggacgcgaaggtggtgtttggggattagaagagtttttagaagtaaagactattactggctggaaataaa

SEQ ID NO: 213766 - DNA, 853 bp, Unknown
  Bacterial polypeptide expressing nucleotide sequence isolated from the Sargasso Sea
ataattttggccatgaatttaattcaacattttgtaaatggaaaaataatttcaggaaaatcagagagaagaggaaaagtatttaatccagcaatcggtgagcaagagtcagaagtaatattaggtttaaaatcagatttagacgaagctgttgatgtagcaaaaaaagcttttgagacatggtctttaaaaccaccaattcaaagagcaagaattatgtttaaatttaaagaattaatagaaaaaaattctgatgaattaacaaaaatgatagtctctgaacatggtaaggtatatgaagatgcaaaaggttcgttgataagaggactcgaggtagtagagtttacttgtggaattcctcaagttttaaagggagaatttacagaaaacgttggaacagatattgatagttggtcaattaggcaaccacttggtgtttgtgcaggtataaccccatttaattttccagcaatggttccaatgtggatgtttccaatggctattgcttgtggaaatacctttgtattaaaaccatcagaaaaggacccttctatttcaattaaattagcagagttatttcaagaagccgggctgccagatggagtatttaatgtaataaatggtgacaaggaagttgttgatgcaattttagtcaacaaagatattaaagctgtaagctttgtaggatcaacaccaattgcaaaatatatatatgagaatgcagctaaaaacgaaaaaagagttcaagcactcggaggtgcaaaaaatcactgtgttgtgatgcctgattgtgatttagatcaagctgttaatggtttgatgggagcagcttatggatctgctggtgagagat

SEQ ID NO: 213767 - DNA, 460 bp, Unknown
  Bacterial polypeptide expressing nucleotide sequence isolated from the Sargasso Sea
ttcaaaaactcaatacgataaaataattaatttaatagaaagcggaatatcagagggtgcaacattagcagcgggaggacctgagagaccgaatggattaaataaaggatattttattaaacctacaatatttactgatgttacaaatgatatgagaatagcaaaagaagaaatttttggaccagtgctttctattattccatttgataaagaagaagaggctataaaaattgttaatgatacatcttatggtctaggaaattatctccaaacagaagataaagaaaaagcccacagagttgcaaaagaacttaggtctggatgtgtttatatcaatggaaaaggggctgatgcaggaactccatttggtggttatagacaatctggtaatggacgagagggtggagtttggggtttggaagaatatttagaagttaaaacagtaacaggttggaaataa

SEQ ID NO: 213768 - DNA, 616 bp, Unknown
  Bacterial polypeptide expressing nucleotide sequence isolated from the Sargasso Sea
atgaaaaaaatatcaaactatatagctggcaaacattgtgagcctcacaataatgaatacatagacaatgttgatcctgcaaccggtgaggtatattcattaattcccaattcttcctctgaagatattgaaaaggcagttttagcatctcaagaagcatttcctttatggtcttccatgggaattgaaaaaagaagtgcgattttaatgaatgtagctgataaaatagagtctagattagaggaatttattgctgccgaatcaaaagataatgggaagcctctttctttagctcgaaatgtagatattccaagggcaatttcaaattttaggttttttgcaacttcaattcttcacttcagttcagagtcgcactacatggaaggcgttgggattaattatacaaccagaaaacccattggtattgtggggtgtatttcaccttggaatctaccgctatatttgttttcatggaaaattgcaccagctttagcggcaggaaattgtgttattgcaaaaccatctgaggttactccttatacagcatatttgttgtccactgttcttgaggaagcaggtgttcctgctggagttcttaatatagttcatggactcg

SEQ ID NO: 213769 - DNA, 881 bp, Unknown
  Bacterial polypeptide expressing nucleotide sequence isolated from the Sargasso Sea
attacgttcgcgcattgtagagctagaagaagaacttatctttgcagtatctaaagactttggctaccggactgcgtttgataccttacttggtgatattttgcctaccgtgcaagggctttcgcacattattaaaaaattacctaaatggtcaaagcctagtaaacgttctgtggggcttagcttatggccgtctaaagtgagtgttacctatcagcctaaaggcgtggtaggtgttatcgcaccgtggaattacccaatacagctagcggttgtgccagtgatcaccgctatcgcagccggtaataaagtaatgttaaaactcagcgaatttacaccacatactaatgccgtattagaaaagctttttgatgacaaaatgagtcagcatgtatgtgtggtccaaggcggcagcaacgttgccagcgaattttcgtctcttccttttgcgcacttattatttaccggctctactggggttggcaaattagtaatgaaagcagccagtaaaaacttaactcccgttactttagagcttggtggcaagtcaccagtgattattaccgagcaagctgatgttgcaaaagcagcacacgcactgttattcgggaaaatggcaaatgccgggcaaatttgtgtcgcgccagactatgtatttgtgcctaaaaccctagaaagccagcttattaaacagttatgtgagctttataaaaagcattttaagcagggtgttgaaggtaaaaacttaacctctattattagtgactcacattatgcgcgtctagccggatacttagtgcaagcacaagaacttggggcaaatgtcattaagccacttgaacaaaatcaacaagatgcagataaacatcgtatgggtctgc

SEQ ID NO: 213770 - DNA, 928 bp, Unknown
  Bacterial polypeptide expressing nucleotide sequence isolated from the Sargasso Sea
gaggtagtgaaatacgcctgtggtattccccaaatgctaaaaggagagtttacagaaaatgttgggactaacgttgatagctggtctataagacaaccattaggagtttgtgcaggaataacaccctttaactttccagcaatggttccaatgtggatgtttcctatggcaatcgcttgtggaaacacttttgttttaaaaccatctgaaaaagatccctcatgctcaatgagattagcagaactattgaaagaggctggtttacctgatggggttttcaatattgtgaacggagacaaggaagctgttgatgctcttataaaaaataaagatgttgttgctatgagctttgttggatctacacctattgctaaatacatttacgaaaattgtgcaaaaaatgaaaaaagagttcaggcgcttggcggagcaaaaaatcattgtgttgtaatgcctgattgtgatttggaccaagcagttaacggcttaatgggtgctgcatatggttcagcaggtgaaagatgtatggcacaatctgttgctgttgctgtaggtggtattggagataagcttgtaagctctttagcaaaaaaagttgaagtattaaaagtcggacccgggatggataaacaatcagaaatgggaccattagtaacaaaagagcatttagcaaaagtaaaaggttatgttgatattggagagaaagagggagctaaactagtagttgatggaagaaatttcaaactacaaggttatgaaaaaggatattatataggcggatgtttgtttgatcatgtaaaaaaagatatgagaatttataaagaggaaatatttgggccagttctatctgtaataagagctaaagattttgatgaggcgctacagttagtaaatgatcatgaatttggaaatggtgtgagcattttta

SEQ ID NO: 213771 - DNA, 583 bp, Unknown
  Bacterial polypeptide expressing nucleotide sequence isolated from the Sargasso Sea
gatgaaacattatcagcattacataaatggtgcattttgtgatccggtatcaggatcatattttgatagtgagaacccctacactggccaagtttgggcaaaggttgcgaagggtaatgcaagtgatgtggatgccgcagtgaaggcggcaagggctgcctttgatggtgaatggggtgcaataggtccaacagcgcggggtaagctattggtaaagcttgcggaaattatagaacgtgaagctgttaggcttggtgaaattgaagtgcgcgacaacggaaagctaattgctgaaatgggcgctcaaacaaaatatttggcagaatggtatcgctactttggtggtcttgcggacaaaattgaagggtccgtcattccatctgataagccaggcatttttaactttactcgttatgaaccgcttggagttataggcatgatcacggcgtggaattcaccgttgctattgttagcgtggaaattggcgccagcattggctgcaggcaatactgctgttatcaagccatcggaatatacctctgcatcaacactagaattcatggagcttgtagaagaagctgga

SEQ ID NO: 213772 - DNA, 937 bp, Unknown
  Bacterial polypeptide expressing nucleotide sequence isolated from the Sargasso Sea
cctgcaacagaagaggaaaattggtatagttgcgcttggctctactattgatgttgataaggccgtttattctgcaaaaaaagcttttagtgtaagttcaaagttatcaaagaaagatcgtttagatattcttgagacaattagagaaaattataaaaaacgttatagagatatttctgaagcaattcgactagagatgggggctccagtaaaacttgctgaaggggcacaaactgccacaggtcttggacatttaaaaacagcgatgcgtgttctagaaaaacatgaatttgaatatacacatgaggattatattgttcgtgaagagcctattggggtttgtggattaataacgccttggaattggccaataaatcaaattgtgtcaaaatttgcacctgcatttgctgcgggttgtacagttgtcctaaaacctagtgaacttgcacctctttctgcaatgataattgctgaaattatacatgaatctcaaattcccccaggaatgtttaatttagtcaatggtttaggaaatgttgttggtgaagctatgtcctctcataaagatattgatatgatgtcatttactggttctaccagaggaggagttgcagtggcaaaagcttcagcaactaatgtgaaaagagtatctcaagagttaggtggaaaatcaccaaatctcatattagatgataattcctttaatacttcaataactaatggagtcattcatgtaatgggtaattcaggtcaatcttgtaatgctcccactcgcatgttagttcccaaatcaagacatgatgaggcaataacaattgcacaaagtgcccttgaaaaagtaaaagttggtgatcctcttgatttgaattctgatttaggaccattagtaagtcaaaatcaatttgataaagtccaaaaacttataaaaaaggaatga

SEQ ID NO: 213773 - DNA, 429 bp, Unknown
  Bacterial polypeptide expressing nucleotide sequence isolated from the Sargasso Sea
tattaaaaaaaggaatagatgaaggtgcaacattagttgcaggaggtcctgtaaaacctgatggtttgaaaaaaggatattttgtaaagcttacagtttttacagatgttaataatgacatggatatcgctagaacagaaatttttggaccagtactatctgttatgccatttgagaccgaggaggaagcaattaaaattgctaatgatactccatatggattaacaaactatattcaaactcaggataaagaaaaagttaagagagttgcaagaaaattaagatcaggaatggtagatgtaaatggtgctggtattgcagttgatgcaccttttggtggctttaaacattctggaattggtcgagaggcaggacaacatggtcttgacgaatttttagaggttaaatcagttggtggctggagttaat

SEQ ID NO: 213774 - DNA, 859 bp, Unknown
  Bacterial polypeptide expressing nucleotide sequence isolated from the Sargasso Sea
atgtacgataaattcggacagttcattgatggtaagtggcaaaaatctgctagtggtgagacttatgacgtcatcaatcctgcaactgaagaactgttaggaaaagcctctaaggctaataattctgatgttcaaagagcgctaaaatcagcagaaaaaggtttagagatatggcgaaatacttccccatgggaaagagcaaaagtaataagaaaaatttcagagttaatgagaaaaaaagtagatattttatctaaatggttaactcttgaagtcggaaagcctctaacagaaggaccaggagaagtaggaggtgctgcagatatttttgaatggaattcagaagaaactaaaagaatatttggtgaaattaatcaaagtcgttttcctaacactcgtatacatgtaatataccaaccagttggagttgttgcagcattagttccatggaactttccagttgtcctagcttctagaaaaatctccacagcattagctgctggttgttctgtgattgttaaacctgatgttataacccctggatgcgtaatggaaattgtagatatttgtagagaagcaggagttcctccaggagtagttaatttattatcgggagatccagcaggtatatcagaggaacttattaaatcggatataattaaaaaaatttcaattacaggttccactagagtaggtaaattaatattaaaacaagctgctgataaagtacaaagagtaacgatggagttaagtggtcattcaccattcatagtgttcgatgatgttgatctgaacaaggtcagtgatatggctattactgcaaaatttagaaataatggtcaagttttattctccaaac

SEQ ID NO: 213775 - DNA, 523 bp, Unknown
  Bacterial polypeptide expressing nucleotide sequence isolated from the Sargasso Sea
tgaagcaaataaaattaaagttgatctggcatcccaaaaaggagatcatattggacctttagtttcaaaagtacaatatgataaagttgtaaatcttattaatgagggaataaaagaaggcgcaacattagctgcaggtggaccagatttaccaaatggacttaacaaaggttattttgttaaaccaacaatcttttcagatgtaaataatgaaatgaaaattgcaagaactgaaatttttggacctgtgctttcaattataccatttgaaactgaagaagaagcaatagcaattacaaatgatacatcttatggactaggtaattatctacaaactgaagataaagaaaaagctaaaagagttgctagaaaagttagagctggaacggtttatatcaatggtcaatccacagatactggaatgccgtttggtggctataaacaatctggtaatggtcgtgaaggtggtgtctggggtttcactgaatttttagaagtaaaagcaattaccggttggaattaa

SEQ ID NO: 213776 - DNA, 757 bp, Unknown
  Bacterial polypeptide expressing nucleotide sequence isolated from the Sargasso Sea
ttagcagaaggtattggtgaagttggaggatcagctgatatatttgagtggaatgcagaagaaacaaaaagaatttatggacaaacagtagaaagtagatttcctgatactagagtgcatgtttattatcaacccgtaggtgttgtagcagcattagtgccatggaactttccactagtattagcatctagaaaaatttctacagcgcttgctgccggatgctctgtaatttgcaaaccagatgtaattacaccaggatgtgtgatggaattagttgatatttgtagagaagctggagtacctgatggtgtagttaatttactatcaggagatcctcctgcaatagcagaacaattaattaaatctgatataattaaaaaaatttcattaactggatctacaagagttggaaaattaattttgaaacaagctgcagataaagttcaaagagtaacaatggaacttagtggccactcaccttttattgtttttgatgatgcagatataaataaagctactgatatggctataacttcaaaatttagaaataacggacaggtttgtatttcaccaaacagattttatattcaagagaaaaagaaagatgaatttattaatactttcataagtaaagtaaaaaaattaaaaattggaaatggaatggataaagatgttcaattgggtcctttaactacaaaaaaaagactggaagaagtagaaaaattagttgatataacaaaaaaagaaggagcaaaag

SEQ ID NO: 213777 - DNA, 670 bp, Unknown
  Bacterial polypeptide expressing nucleotide sequence isolated from the Sargasso Sea
atgagttcaggtaacaaatataaattaatagccagtaaacttaaatttgaaggaagagcatttattaacggtaaatatgtaaatgctattgatggtaaaaaatttgaaacaatcaatcccgcaactggtaaaaaactttgcgctgttgcaaaatgtaatcacaaagatgtaaatttagcggttaaagtttcaagaaaagcttttaatagtggagtttggtctaaaagctcacctgaacatagaaaagaggttttattaaaatttgctgaattacttagaaaacatggtgatgaaaattcggttttagaaagtgttgatacaggtaaacttatcacggattgtattaatgaagttgcaaatgatgccccaatgcactttcagtggtatggagaattaattgataaagtattcggaaaagttggtccaacagaaccttccattactagtttaattgttaaagaaccaattggagttgttgctggaattgttccttggaactttcctttaatgatggcggtgtggaaaatggcaccagctcttgcagcaggctgttcggtaataattaaaccagcagaggatacacctcttacggcaattagagttgctcaaattggaaaagaagctgggataccagatggagttttaaatgtacttcccaggttatggtgat

SEQ ID NO: 213778 - DNA, 655 bp, Unknown
  Bacterial polypeptide expressing nucleotide sequence isolated from the Sargasso Sea
aatgaatttaattgaacattttgtaaatggagaaattactaaaggatcttcaaagaaaaaatccaaggtatttaatccagccactggcgaacaaacagctgaagttattttagcgtctaaagcagatgtagatttagctgttgaaaaagcaaaaaaagcttttaccgactggtctagaaaaccaccagctcaaagagcaaagataatttttaaatttaaagaattagtagaaaaaaattccgatgaaataattaagcttatagtatctgaacatgggaaagtttatgaagatgcaaaaggctctctagcaagaggactcgaagttgttgagtttgcttgtggcatacctcatcttttaaaaggtgaatttactgaaaatgttggtaccgatgtagatagctggtcattaaggcagcctctaggagtatgcgcaggtatcactccatttaattttccagctatggttccaatgtggatgtttccaatagctatagcttgcggtaatacttttgttttaaaaccctctgaaaaagacccttcatgctcaattaaattagcaaaactttttaaagaagcagggttgcctgatggagtttttaacgtagtaaatggagataaagaatcggttgatgctttattaacaaataaagatgta

SEQ ID NO: 213779 - DNA, 483 bp, Unknown
  Bacterial polypeptide expressing nucleotide sequence isolated from the Sargasso Sea
atcatattggtcctgtaatttcgaaaactcaatacgataagattataaatttaattgaaagtggaatatctgagggagcaacattagcagcaggaggtcctgagttaccgaatggattaaataaaggttattttattaaaccaactattttcactaacgtaacaaatgaaatgagaattgcaaaagaagaaatttttggtccagtgctttctataattccttttgaaaatgaagctgaagcagtaaaaattgtaaatgatacgtcttatggtttgggaaattatttacaaacagaggatagagagaaagctcatagagtttcaaaaaaattaagatcaggatgtgtttatatcaatggaaatgcagctgatgcgggcacaccttttggaggatacagacaatcaggaaatggtagagagggtggagtttgggggcttgaagaatatttagaagtaaaaactgttacaggctggaaggattaat

SEQ ID NO: 213780 - DNA, 550 bp, Unknown
  Bacterial polypeptide expressing nucleotide sequence isolated from the Sargasso Sea
atgtatagcaaatttggtcaatttatagatggaaaatggcaaccttcaagtaacaatgaaacttatgatgttattaatccagcaacagaagaaataattggacaagcgtctaaggctaccccagccgatgttgataaagctttaaagtccgctgaaaaaggttttaatgtttggagaaaattttcaccatgggatagatctgcgattattagaagaattgctgatcttatgaggaaaaaaaataatgagctagcaaaatggatgacactagaaactggaaaaacactagcagaatctttagccgaagtaagtggatctgcagatatctttgaatggaatgctgaagaaacaaaaagaatttatggtcaaacagtacaaagtaggtttgaaaacacaagagtcattattaattatgaaccagttggtgtggttgcagccttatctccatggaattttcctcttgtcttagcttcaagaaaaatttcaacagctttagccgcaggatgttctgttatttgtaaacccagatgttattactcccaggtgtagt

SEQ ID NO: 213781 - DNA, 712 bp, Unknown
  Bacterial polypeptide expressing nucleotide sequence isolated from the Sargasso Sea
tatgtacgacaaatacggacagttcattgatggtaagtggcaaaaatctgctagtggtgaaacttacgatgtaatcaatccagctactgaagaagttttaggaaaagcctccaaagctaatagtacagatgttcaaaaagctcttaaatcagcagaaaaaggtttaataacttggagaaatacttctccatgggaaagagcaaaaattataagaagaatttctgaattgatgagacaaagggttgatgttttatctaaatggttaacactagaagttggaaaacctttaagtgagggaccaggagagataggtggggcggcagatatttttgagtggaattcggaagaaacaaaaaggatatttggagagataaaccaaagccgttttcccaatactcgtattcatgtaatttatcaacccgttggagttgttgcagctcttgttccatggaactttccagtagttcttgcgtctagaaaaatttctacagctctagcagcaggttgttcggttattgtaaaaccagatgttataacacccggaagtgtgatggaaattgtagacatttgtaaagaagcgggtgttcctccaggcgtagtgaatttattatcaggtgatccagctggtatatcagaagaactcattaaatccgatataataaaaaaaatttcaattacaggatctactagggtgggaaaattaattttaaaa

SEQ ID NO: 213782 - DNA, 354 bp, Unknown
  Bacterial polypeptide expressing nucleotide sequence isolated from the Sargasso Sea
gctggtatgtgaagcccacgatcttgcccgatgtagagagccacatgcgtgtggcgcgcgaggaaatcttcggcccggtgctggcgatcaccccgttcgaaagcgaggaggaggccatctcgatcgccaatgacacgccgtacggccttgccgcctatgtgcagacaagcgacgccggccgtgccgaaagggtggcggcgcggttgcgggccggagcggtgcatatcaatggtgcggctgtcggatacggcacgccgttcggcggctacaagcagtcaggcaacgggcgcgagggcggcatgatgggcctcgaggactatctcgagacgaagacgcttcacggaatgttctagc

SEQ ID NO: 213783 - DNA, 664 bp, Unknown
  Bacterial polypeptide expressing nucleotide sequence isolated from the Sargasso Sea
aatggctgactacaagttgcttatcggcggacagcttgttgctggcgacgcagtgatggacgtgatcaaccccgccaccgaggaggtgctcgccgtctgcccgcgcgcctcggaagcacaactcgatgccgcggtcgccgcggggaaggccgcgttcccggcctgggcacacacaccgatagccgagcgacgcgcgatgttgctgaagctcgcggacgcactatcagcgcgcatagatgaatttgcgcgactgctgacgcaggaacagggcaaaccgctcagcgagtcgacggccgaaatcgcctataccgaggcgtttgtccgccatctcgcgatgctcgaacttgaagccaggctgatcgaagatggcgagagccgacgggtcgtgatgcgccgtcgtccgctcggagtggtcggcgcgatcattccgtggaacttcccggtgctgatcgtcgcgttcaagctgccgctggcgctgcttgctggcaacaccatcgtggtgaagcccgcgccgacgacgccgctcaccacgctgctgttcggtgaactctgcgcggagatattccccgcaggcgtggtcaacattatcaccgatcaaaatgatctcaacacgcggctcacctgccatcctgacatcgccaaggtcacgtcacccggatccacc

SEQ ID NO: 213784 - DNA, 833 bp, Unknown
  Bacterial polypeptide expressing nucleotide sequence isolated from the Sargasso Sea
aggttatggcgatgttggtgaggctttaggtcgacataaagatgttgatgcagtttcttttacaggctcaactgaagtaggtggttattttttaaaatattcaagtgaaagcaatttaaaacctgtcgcattagagatgggaggaaaaagtccatttatagttttagaggatgctaaaattaccgatgatttaatagataatgctatcaattctgcattttggaatggtggacagaactgctcagcaaatatgagacagatagttcataaaaaagttaaagatgaatttttagacaaagttattaaaaaagttaaaaaattaaaagtaggagatcctttagatttaaaatcaaacatgggatctatgatttcaaaaggacatttacaaactgtagatggatatatccaaaaaggaatagatgagggagcaaaacttttatctggaggagtttcaaataataagcaaaaaggtttttatgcaaaacctactttatttgacggattaaaagaaaatatgaccatagcacaagaagaaatatttggaccagtacttggaattttaacaattaaaaatgatgaagaagctttgaaagttgctagtaattctaaatacggattacatgccagtgtatttactcaagacataaacagagcatttcatttagctaaaagcttgccttgtggaactgtatcagtaaatactttttctgaaggagatattaaaactccatttggaggttataagcaatcaggctcactaagtagagatcaaggtactgaggctctaaattcgtttctacaaacaaaaacaatctggataagtcataattaat

SEQ ID NO: 213785 - DNA, 710 bp, Unknown
  Bacterial polypeptide expressing nucleotide sequence isolated from the Sargasso Sea
tatgtacgaaaaatacggtcaattcatagatggtaagtggcacaaatcttcttcaggcgaaacttatgaagttatcaatccagctaacgaggaaattattggtaaggcatctaaagcttcatctgaggatgttgataaagctttgttgtctgctcaaaaaggtttagaggtttggaaaaaaacaccaccatggcaacgtgcttatattttaagaagaattgctgataagatgagagaaaagcaagacatacttgctaaatggatgactcttgaagttggaaaaccgattgcagaagcaaagggtgaagttaacggtgcagcagatatttatgagtggaatgcagaggagacaaaaagaatttatggccaaacagttgaaagcagatttgaagatactagagttcatgtttactaccagcctgttggagtagtagcagcattagtcccgtggaattttcctttagttttatctgctaggaaaatttctacagcattagcagcagggtgctctgtaattgttaaacctgatgtaataactcctggtgttgttatggaacaagttgagatttgtagagaatgtggagttcctccaggtgttgtaaatttattatcaggggatcctccaagtatcgcccaacaattaattgcctctgatatagtaaaaaagatttcaattacaggatcatcaagagttggaaagttaattttaa

SEQ ID NO: 213786 - DNA, 769 bp, Unknown
  Bacterial polypeptide expressing nucleotide sequence isolated from the Sargasso Sea
gatatcttttactggatcaacaagagcaggagctttgatttcacaaaatgctgctaaagattttaaaagagtaagcttagaattaggaggcaagggtgcaaatataatttttaaagatgctgatccagaagctattgaaagaggtgctttaagatgttttagaaattctggacaatcttgtaatgcaccgacaagaatgttagttgaaaaatcaatgtatgatgaggctattcagagattaaaaaaatatactgaaaattttgaggttggtgatcctaaaaaagaaggagaacatataggtccagttatttcagaaactcaatacaataaaatacaaactttaatccaaaaaggaatagatgaaggtgcaaaattagttgctggaggaacaggtaaaccagatggtttaggcaaaggttactttgttaaaccaaccgtatttgcagatgttaataatgatatggaagttgcaagaacagaaatttttggacctgttttatctgtaataccatttgagacagaggaagatgcaataagaattgctaatgatactacatatggactaacaaattatattcaaacacaagactctgaaaaagtacaaagagtagcaagaaaattaagatctggaatggttgatgtaaatggagcaggtattgcagttgatgcaccatttggaggctttaaacattcagggataggacgtgaggcaggtgaacatggtcttgaggaattcttagaggtaaaagcagtaggtggttggagttaa

SEQ ID NO: 213787 - DNA, 429 bp, Unknown
  Bacterial polypeptide expressing nucleotide sequence isolated from the Sargasso Sea
aaggcggcatcgccgagggcgcgaaagtggtctgcggcggaccgggtctgccagagggtattgaccggggctactatgtgcgacccacggtgttctccggcgtcagtaacggcatgagcattgctgagcaggaaatctttggaccggtcctcgtgatgattccctatgatagtgaggaagaggcgatccagattgccaacgacacgccctatgggttggcgggctatgtacagagcggggatctcgaccacgcacgacaggtagcgtcgcgtatccgcgcgggcaacgtgcacattaatggggcctctcctggtatggacgtgcccttcggcggttataagcagtcgggcaacggccgcgaatggggcgcgcatggcttcaccgattatctggagatcaaggcgatctctggatttgaggctgcctgaa

SEQ ID NO: 213788 - DNA, 865 bp, Unknown
  Bacterial polypeptide expressing nucleotide sequence isolated from the Sargasso Sea
agctagtgcacaagatgttgataaagcagttaaagctgcacaaaaagcctttgaaggtgaatggtcaaaattactaccaagagatagaggtaattatttgagagcaatagcaaataaacttagagaaaatgctgagcttttgggaaaaattgaaacaattgatactggcaaactttttagagaaacaaacaagcaagcaaattacattgctgaatattatgattattacgcaggcttggcagataaagttgaaggatctgtattgccaatagacaaaccaaatattcaagccattacaacaagaatacctataggggttattgctgcaatcattccttggaattcacaaatgcttttaacagtaacaaagttagctcctgctcttgcaatggggaatacagtggtaattaaatcatcagagctagcaccagctgtgatgtttgaatttgcaaaacttgttgaggagacaggcataccaaaaggagtagtaaatgttataaccggttttggagacccttgtggaaaagcattaactacccataatttagtagaaaagattgcttttactggtggccccgagactgcaagacatattattagaaattctgcagaaaatttatcagaagtaagtctagaacttggagggaaaagcccagttgctgtctttgatgatgctcatcaagaaaatgcaattaatggaataaccgcaggaatttttggggcaagtggtcaaagttgtatagctggatcaagattgtatttgcaggatggaatttataatgaatttttagataaacttgctatcagagcaaataaaattaaattggagctcctatggatccagaaagtgaaatgggccctctaa

SEQ ID NO: 213789 - DNA, 868 bp, Unknown
  Bacterial polypeptide expressing nucleotide sequence isolated from the Sargasso Sea
aatgcccgcaatagcgtctggttgtacatggttctaaaaccatctgaacttgccccattatcttcaatgattttagcagaacttatagatgaaactaagtttcctgcaggagtttttaatttaattaatggagatggagcaacaactggagatgcattaaccagtcatccggatgtaaatatgatttcatttactggttctactagagctggtgctttaatttcacaaaatgctgcgaaagattttaagagagttagtttagaattaggtggtaaaggagcaaatataatatttaaagatgcggaccccgaagcaattgagagaggtgctttaagatgttttagaaattcaggacaatcatgtaatgcaccaacaagaatgcttgtggaaaaatcaatttataaggaagcagttgaaagattaaaaaaatatacagaaaattttgaggtgggtgatcctgaaaaagggggagaacatataggcccagtgatatcagagacacaatataacaaaattcaaactttaattaaaaaaggaatagacgaaggtgcaacactagttgcaggaggtcctggtaaacctgaaggtttagaaaaaggatattttgtaaagcctacagtatttactgatgttaataatgacatggatattgctagaacagaaatttttggaccagtactatctgttatgccatttgagactgaagaggaagcaattgaaattgctaatgacaccccatatggattaacaaactatattcaaactcaagataaagaaaaagttaagagagttgcaagaaaattaagatcaggaatggtagatgttaatggtgctggtattgcagttgatgcaccttttgggggcttaa

SEQ ID NO: 213790 - DNA, 724 bp, Unknown
  Bacterial polypeptide expressing nucleotide sequence isolated from the Sargasso Sea
tatgtatagcaaatttggacaattcattgatggcaaatggcaagcatcacaaaataatgaaacttatgatgttttaaatcctgcaacagaagaagttttaggtaaagcatctaaagcaggtgaagaagacgtaaacaaagcacttaagtctgcagaaaaaggtcttgaagtttggagaaatactccaccttggcaaagatcaaaaattataagaaaaattgccgaccttatgagagagagaactgatgttttggctaagtggttaacattagaagttggaaagccattatcagaagcaaaaggggaagttggaggcgctgcagatatttttgaatggaattctgaagaaactaaaagaatttatggtcagatagttgaaagtagatttgaacatacaagaatgtatgtaaaatatgaacctgttggagttgttgctggattaataccctggaattttccaatagttttatcctcaagaaaaatttccactgctttagctgcaggatgttcagtaatttgtaagccagatgtcattactccaggaagtgtaatggaacttatgaatattataaatgatgcgggcgttcctccaggagtagtaaatttattatctggtgatccagctaaaatctcatctcaattaatatcatctgatatagttaaaaaagtttctattactggttcaactagagttggaaaattaattttaaaaacaagctgctga

SEQ ID NO: 213791 - DNA, 782 bp, Unknown
  Bacterial polypeptide expressing nucleotide sequence isolated from the Sargasso Sea
gatgaagctggatttcccaccaggagtattcaatttaataaatggtgatggcctcggtgtaggttcagaattatcagggcacaaagatattgatatgatatcttttacaggatctacaagagctggtaaattaattactaaaaatgctgctgatacgattaaaagagtatgccttgaactgggtggaaaagggggaaatataatatttgctgatgcacaacttgaggcagttagagaaggtgtaagaaatattatgagtaattcaggtcaatcatgtgatgcaccaacacgcatgcttgttgaaaaatcaatttatgaaagggcaataagagaagccgcagatgaggcttctaaaattaaagtagatattgctgaaaaaaaaggagaccatataggtcctgtcgtttcaaaaacacaatataataaaattattgatttgattcaaagcggcattgatgaaggtgcaactttgatagcaggtggaactgagaaacctgaaaaattgaaagaaggttattttgtacaacctactatttttacaaatgtaactaatgatatgagaatagcaaaagaggaaatttttggtccagttttatctattattccttttgaagatgaagaagaagcggtttcaatagttaatgatacagaatatggcttaggtaattatgtgcaaactcaagataaagcaaaagcaaaaagagttgctagaaaatttaggtcaggaggagtttctataaatggtaatagtgctgttccaggaacaccttttggaggatata

SEQ ID NO: 213792 - DNA, 832 bp, Unknown
  Bacterial polypeptide expressing nucleotide sequence isolated from the Sargasso Sea
cgcggagccggagggagacgcaataagtcgtcgcgcgaaaaacgcatcatgctgcacacaaaacctccaactaaaacagaccgactggtcaaactgcgacgtagttattgaggcatcagggcaaatgaaaaccgctcagcttttaagcgaatacctaaaccaaggcgttaagcaggttgtcgcgaccgctcctatcaaggaaccagaaattcttaatttggtgtttggggtaaatcatgagctgttcgaacaagaaaagccctcgataattaccgcttcttcctgcaccacaaattgcattgccccagcaatcaaggtagtccacgaacaattcgggatcgtccacggatcgataacaaccgttcacgacataaccaatacccaagtggtactcgatcagggtcacaaagatctaagaagagcaagatctagcggcaacaatctaatccctacaactaccggatctgcaaaggctatcgctcaaatatttcctgaattagagggcaagcttaacgggcacgcaatcagggtgcctttagccaacgcctcgctgactgattgcgtattcgaattaaacaagaaaactaatgctgaagaagtaaacagggctctggaacaagccgctaccggtagcctgaagggaatactcgggtttgaagaaaaaccgctggtctctactgactatatcggggattcccgttcgagcgtggtggatgccttatctaccatggtagtaaacaatacccagctcaagctctacctctggtatgacaatgagtggggttattcgaatcgggtgatagatctggtggagtatatctccaacgcataa

SEQ ID NO: 213793 - DNA, 907 bp, Unknown
  Bacterial polypeptide expressing nucleotide sequence isolated from the Sargasso Sea
gaaattgtggcaattaatgcttctgggtccctagaggggtgtgcaatgctgcttcagcgtgattctattcatggagagtttaagcacaaagtagaagttaataaaaattgtttgagaataaattctgaaaatatcaaatacataagcgatcgtgatcccagtaatctgccttggaaaagccttgatattgatattgtgttagagtgcacaggcaagtttacaactcatgactccgcaagcaagcatatcgactctggggccaaaaaggtgctggtatcggccccagtaaaaaatgcagataaaaccattgtatatggagtaaaccatcaacagctcacctctggagacagggttgtatcaaattcctcgtgcacgacaaattgtttggcaccgctcgcctatgtgctaaataaccatgtagggatacagaaaggatttatgaccaccgttcacgcctataccagtgaccagcggtctctggacaataaccattcagatccgcgcagagcccgctcatgtcacacttcaatcgttcccacctcaacaggggcggcaaaaagtttgagcttgataatcccagaattgcgcggaaaactggacggcacagccgtaagggtaccaattcctaatgtatcaatggtagatatgactttcttgtcggagcagcctactaccatcgaggatattaacctgtcagtaaaaaccgctgcagagacaaaattaaaagggatcctaggttataataatttacctctagtatctattgacttcaaccatgactcacacagctcctattttgattctactcaaacgcaagttataggcgaaaattttgtgcgcgtgctatcgtggtatgataatgagtgggggttttctaatcgaatggtggatacagctattgcaatga

SEQ ID NO: 213794 - DNA, 336 bp, Unknown
  Bacterial polypeptide expressing nucleotide sequence isolated from the Sargasso Sea
ctgtatttgctgatgttaataacaaaatggaaatagcaagaacagaaatatttggtccagttttatctgtaatgccttttgagacggaagaagaagctattgaaattgcaaacgatactccctatgggttaacaaattacattcaaactaaagataaagaaaaagtaaagagagttgctagaaaacttagatcggggatggttgatgttaatggtgctggtattgctgttgatgcgccttttggtggatttaaacattcagggattggtagagaagctggtgaacatggtctagaagagtttctagaggttaaatctgtaggtgggtggagttaat

SEQ ID NO: 213795 - DNA, 952 bp, Unknown
  Bacterial polypeptide expressing nucleotide sequence isolated from the Sargasso Sea
catgtggaatacatttatttaaaactttctgaaaaagatccatcttgttcaattagattagccgagcttttttctgaagctggtcttccagatggtgtattcaatgtaattcaaggtgataaaaaagtagttgatttaattttaaattcagaacaaatatctgcaattagttttgtaggatctacacctgtcgctaaatatatttatgaagaatcagcaaaaaatggaaaacgagttcaagcattaggtggggctaaaaatcatttggtagtaatgccagatgcaaatttggatcaggcagttgatggaattattggagccggatatggatcagctggagagcgttgtatggcgatatcagttgccgtagcagttggtgatatagctgatgagttagttaataaaattcaaaatgaagctcaaaaattaaaagttgctccttggactgatttagaatctgatatgggtcctgttatttctaaagagcataaagaaaaaatagagaactatatttcagttggagtaaaagaaggtgcaactttaattgaagatgggagaaattacaaaatacaaggttatgaaaatggttattttgtaggaccaacattatttgataacgtaacagaagaaatgacaatttacaaagaagagatatttggccctgtagtaagtgtagtaagagcaaagacatatgacgaggcattaaatcttgttaataatcatgcttatggaaatggtactagtatttatacatctgacggagaaatttctcggcattttaccactaattcaaggattggaatggttggcgtgaatgttccaatcccagtgccaatggcctttcatagtttcggaggttggaaacagtctttgtttggtgatcattctgttcacggaatggaaaatgttcatttttatacaaaattaaaaactattactagcaggggccaaa

SEQ ID NO: 213796 - DNA, 897 bp, Unknown
  Bacterial polypeptide expressing nucleotide sequence isolated from the Sargasso Sea
ataaaatgagagagaagcaagatatcctagctaagtggatgacacttgaagttggaaaacctttagcagaagcaaaaggagaaataggtggggcagcagatatttttgaatggaacgcagaagaaacaaaaagaatttatggtcaaactgtagaaagtagatttgaagacacaagggttcatgtttattatcaacctgttggtgttgtagcagccttaactccttggaatttcccagctgtattatcagcaagaaaaatttcaactgctttagcagcaggttgttctgttattatcaaaccagatgtaattacacctggagtagttatggaaatggtagatatttgcagagagtgtggagttccaccgggtgtcataaatcttttatctggtgatcctccaagtattgcacaacaattaatttcctcagacataataaaaaaaatttcaattactggttcatcaagagttggaaaactaattctaaaacaagctgctgataaagtccaaagagttactatggagctaagtggtcattcaccattcattgtctttgatgatgctgatataaaaaaagcagctgatatggcaattgctgcgaagtttagaaataatggacaagtttgtatttcacctaatagattttatattcatgaaagcaaaaaggatgagtttgtaaatttattcgtggataaaacaaaaaaacttaaaatcggtaatggaatggatgccgatactcaattaggcccactaacaacagagaaaagattaaatgagattgaagaattagttgaaaaaacgaaacaagagggtgctaaagttttactaggaggtaaaagaccagcaggctttaacaaaggatttttttatgaaccaacggaatatttgatgatgtaaa

SEQ ID NO: 213797 - DNA, 793 bp, Unknown
  Bacterial polypeptide expressing nucleotide sequence isolated from the Sargasso Sea
ttacagtcatccagatattaatatgatttctttcacaggttcaacaagagctggtgctttgatttctcaaaatgctgctaaagattttaaaagagtaagcttagaattgggtggtaaaggagcaaatataatttttaaagatgctgatccagaagctattgaaagaggcgctttaagatgttttagaaattctggacaatcttgtaatgcgccaacaagaatgttggttgagaaatcaatgtacgatgaggctcttgagagattaaaaaaatatactgaaaactttgaggtgggtgatcctaaaaaagaaggagagcacataggtccagttatttcagaaactcaatacaataaaattcaaagcttaattcaaaaaggtattgatgaaggagcaaaattagttgcaggaggaataggtaaacctgatggattagacaaaggctactttgttaaaccaactgtatttgcagatgtaaataatgatatggaagttgcaagaactgaaatttttggacctgttttatctgtaataccatttgagacagaggaagatgcaataaaaattgctaatgatacttcttatggattaacaaactatatccaaacccaagattctcaaaaggtacaaagagttgcaagaaaattaagatctggaatggttgatgtgaatggagcaggtattgcagttgatgcaccatttggtggttttaaacattcaggtataggtcgtgaagcaggtgagcatggtcttgaggaattcttggaagtaaaagcagtaggtggttggagttaa

SEQ ID NO: 213798 - DNA, 927 bp, Unknown
  Bacterial polypeptide expressing nucleotide sequence isolated from the Sargasso Sea
tatgaaagataaaaaaaaattttatattaacggagaatgggtcaatccaattaatgcaaaaaattttaatgtaatcaatccttctactgaggaagtttgcgcaataatttctctaggtagctcagaagatactgatcttgctgtaaaatctgcaaaattatcttttgaaacttggaaagaaacttcaaagcaagaaagaataaatcttttagaaaaattattagaaatctacaaatctagatgggatgaaatgactgatgccatatcaaccgagcttggttgtccaaaagattggtgttcagctaatcaaactgcatctggtgcgggtcatattgaagattttataaaaagattaaaagaatttaattttgaacctggttttgacaaaggatctgttaatcacattgtatatgaaccaattggtgtatgtggtttaattactccttggaactggccaattaatcaaatagctcttaaagttgtgccagcacttgcaactggttgtacaatggttttaaaaccttctgagatagctcccttatcagcaatgcttttcgcagaaatgattcatgatgcaaaatttccttcgggtgtatttaatttagtaaatggagatgggccaggtgttggtacagatttgtcgggacatcctaatgttgatatggtttcctttactggatcgacaagagctggaaagttaatcacaaaaaatgcagctgatacaataaaaagagtttgtttagagcttggaggtaaaggtggaaatattgtatttgcagatgcttatcctgatgcggtcagagacggaatacgaaatgtcatgagtaactctggtcaatcatgtgatgcaccaacaagaatgttagtagaaaaatcaatatacaaacgagcagtagatgaagctgccgatgaagctaataaaattaa

SEQ ID NO: 213799 - DNA, 528 bp, Unknown
  Bacterial polypeptide expressing nucleotide sequence isolated from the Sargasso Sea
aaaaatttgctaatgaatataaagttgatattccccaaaaagaaggagatcacattggtccagtaatatctgaaacacaatataataaaattcaaggtttaattaaaaagggtatagatgaaggtgctaatttaatagcagggggacctggaaaacctgagggttttgaagatggttattatgtgaagccaactgtttttgctgatgtaaataataacatggaaattgccagaactgagatttttggtccagtattatcagtaattccatttgaatcagaagaagaggcaattgaaatcgcaaatgatactccttatggtctgacaaactatattcaaactgaagatcaagaaaaagttaaaagggttgcaagaaaacttagatctgggatgatagttgctaatacagcttcactagctgtagatgctccatttggaggatttaaacactctggaataggaagagaaggtggaaaagagggtttattagaatttttagaagtaaaatctattggtggttggaattaat

SEQ ID NO: 213800 - DNA, 811 bp, Unknown
  Bacterial polypeptide expressing nucleotide sequence isolated from the Sargasso Sea
atgtacgaaaaatttggacaatttattgatggaaagtggcaacaatcatcggacaaaaaaacttatgaagttataaatcctgcaactgaagaaattattggtcatgcatcaaaagcatctccagctgatgttgataaagcacttaaatctgcagaaaaaggtttaggagtttggaaaaaaactccaccatggaaaagatcttctattattagaaacattgctgacttgataagaaaaaaacaagatgttttagcaaagtggatggctttagaagttggtaagcctttagcggaaggaaaagctgaagctggaggatcagctgatatttttgaatggaattcagaagaaacaaaaagaatttatggacaaacagttgaaagtagatttgaagacacaagagttcatgtttactatcaaccaattggagttgtcgcagcattaactccatggaattttccattagttttaagtgctagaaaaatttcaacagctttggcagcaggttgttcagtaattgttaaaccagatgtaataacccctggtacagttatggagcttgttgatatatgcagagaaagtggagtacctccaggcgtagtaaatttattatcaggagatcctccaagtattgcttcgcaattaatttcatcagatataattaaaaaaatttcacttactggatcaacaagagtaggaaaattaatattaaaacaagctgctgataaagttcaaagagttacaatggaactaagcggacatgcaccatttattgtctttgatgatgcaaatatagaaaaagctaccgatatgg

SEQ ID NO: 213801 - DNA, 925 bp, Unknown
  Bacterial polypeptide expressing nucleotide sequence isolated from the Sargasso Sea
tatgattgaaaagaaaaatttttatataaacggaaaatgggttgctccagtcaaacctaatgactttgatgtaattgatccatcaacagaagaggcttttgctgtaatttctctaggatctaaagaggatactgataaagctgtaattgctgctaaagaagcatttgaaacctggaaagaaacttcgaaagaagagagagtagagttattagaaaaattttgtgaaatttataatagaagatgggatgaaatggttgaggctcaatcaatggaaatgggtgcaccattagattttgcatcagagactcatactaaaatgggagcagatatatctaaaaatgtaatagatattttaaaaaattttaattttgaacatcagtttgatccaaaatcaaacaatcaaatcagatatgagccaattggagtttgtggattaataacgccatggaattatccaatgaaccaaatagtgcttaaggtcataccagcacttgcagctggttgcacaatgattttaaaaccgtcagaagtggctccagtatcaggagttttatttgcagaaataattgacgaagctgggtttcctccaggtgtattcaacttaataaatggtaacggagaagtagttggaaatcatatatctggtcacccagatattgatatggtttcatttacaggatctacaagagcgggaaagctgatacagaaaaatgcagctgatacaattaaaaaagttacactcgaacttggcggtaaaggtggaaatatagtatttgaggactcttatccagaagctgttagagatggagtaagaactataatgagtaacactggacagtcttgtgatgctccaacacgaatgctagttcaaagatcaatttatgatagagcagtaaaagaagctgtagatgaagcaataaaataa

SEQ ID NO: 213802 - DNA, 868 bp, Unknown
  Bacterial polypeptide expressing nucleotide sequence isolated from the Sargasso Sea
tcatccatgattttagccgaaataattcatgaagcaaaattcccatcaggtgtttttaatttggtgaatggagatggagcgactactggcgatgcccttactagtcatccagaagttaatatgatttcttttactggatctactagagcaggtgctttaatttctcaaaatgctgcaaaagattttaaaagagttagccttgaattgggaggaaagggtgcaaatatcatctttaaagacgctgatcctgaggcaatagaaagaggagcattaagatgttttagaaattcaggccaatcttgtaatgctccaactaggatgttagtagaaaaatcaatgtacgatgaagcagtagaaagacttaaaaaatatgcaaatgaatttcaagttgatgatccaaacaaagaaggtgagcacataggtccagtcatctcagaaacacaattcaataaaatccaaactttaataaaaaaaggcattgacgaaggagctaaattagtttcaggtggtcctggtaaaccaaatgggcttgacaaagggtactatgtaaaacctactgtatttgcagatgtaaaaaatgatatggaaatagctagaacagaaatttttggaccagttttatcagtcatgccatttgaaacagaagaagaggcaattaaaatagccaatgatactccttacggtttaacaaattatatacaaacacaagatcccgagaaagtaaaaagagttgcaagaaaattaagatctggaatggtagatgtaaatggtgccggtatagctgttgatgcaccgtttggaggatttaaacattcaggaataggcagagaagctggatcagaaggactagtagagtttcttgaggtaa

SEQ ID NO: 213803 - DNA, 861 bp, Unknown
  Bacterial polypeptide expressing nucleotide sequence isolated from the Sargasso Sea
atttgaagacactagagtgcatgtttattaccaacctgttggagtagtagtagcattatctccatggaattttccagctgttttatctgcaagaaaaatctctacagctttagcagctgcatgttctgttattataaaacctgacgtaataactccaggtgtagtcatggaaatagttgatatttgtaaagaatgtggtgtgcctccaggagttataaatcttttgtccggagatcctcctagtattgctcaacagttaattgcttctgatattgtaaaaaaaatttcaatcactggctcatcaagagttggaaaattaattctaaaacaagcagcagataaagttcaaagggtgaccatggaactctcaggacattctccttttatagtttttgatgatgcagatataaaaaaagcaacagatatggcaatagctgcaaagtttaggaacaatggtcaagtttgcatatctcctaatagattttatattcaagaaactaaaaaagatgaatttattaatttatttgttgaaaaaacaaaaaaacttaagataggtgatggaatggatccatcagttaatcttggtccattgactactaaaaaaagattaaatgaagttgaagaactagtagaaacaacaaaaaaagaaggcgctaaagtaattttaggaggcaagagaccaaaaggttttaacaaaggattttattatgaaccaacaatatttgatgatgtaaaagatgattttaccattatgaaagtagaaccgtttggacctttggtgccaatgctatcttttaaaacttttgacgaagttatagaaagagcaaataatcacgaacttggactttcaagctatatttg

SEQ ID NO: 213804 - DNA, 826 bp, Unknown
  Bacterial polypeptide expressing nucleotide sequence isolated from the Sargasso Sea
tctttggttgtcgaaagctgctcaggcagcaactggcgcaggtcatttaggtacatttcttgagatacttaaaaattatgaatttgaagaagatagagggaacacaagaatcagaaaagaggctgtaggtgtttgcggttttattactccttggaattggccaattaatcaaattacttgtaaggttgcaccagctctagctgctggttgtacaatggttttaaagccatctgaaattgcgccattgaacgcaatactattcgcagaaattttagatgaagcaggcgttccagcaggagtatttaatttagttaatggtgatggaccaactgttggtgaggcaatgtcttctcataaagacattgatatgatgagctttacaggttcgactagagcaggaatcgctgtagcaaaagcatctgctgatactgttaaacgagttgcacaggaattaggcggtaaatcagctaatattattcttgatgatgcagattttggttctgctattgcaggaggtgtcactagctgctttatgaattctggtcagtcatgtaatgctccaactagaatgttagttcctgccgataggcaagatgaagctatagcaattgccaaagaaactgctgaaaatactattgttgggaatccagctgaagttgcagctggaggaataggacctgtggtgagtgaattacaatatgataaaatacaagccttaattgaaaaaggtattgaggaaggtgccacattagttgctggaggaccaggtaaacctgaaggtctaaatgcgggctatttcgtaaacctactgtttttgccgatgtaa

SEQ ID NO: 213805 - DNA, 442 bp, Unknown
  Bacterial polypeptide expressing nucleotide sequence isolated from the Sargasso Sea
cgcgacgttagaacgggtggcgtaggtcggccagatggcttagacaaggggtacttcgtaaaaccaacagttttctctaacgtcagcaacgacatgaccatcgcgcgcgaggagattttcggccccgtgttatctcttataccttatgaagatgaggaccatgcggtggaaatcgccaacgatactgtttacggcctctccgcatatgttagttctggggatatcgaccacgcaagaaccatcggcgctcgccttcgagccggcaatgttcatctaaacggcgcacccctcgatatcaattctcctttcggcggctacaaacagtccggcaatggacgtgagtttagtgagtggggtctggaggagttccttgagaaaaaagctgttctaggtttcgtgccggtggaggccgcgccggctgaatcgaaaacactgttttgaa

SEQ ID NO: 213806 - DNA, 544 bp, Unknown
  Bacterial polypeptide expressing nucleotide sequence isolated from the Sargasso Sea
gatcatttattatttacaggtagtggtaacatcggtaagcatgtaatgcgtgctgcatctgaaaatttagtcccattaacactggaacttggaggaaaatcaccagttatagtcagcgattcttcaaatattgatataacagcaagaagagtaatgtttaataagactcttaatgcaggacaaatatgtctagcgccagattatgtttatgttcatgaaacagagaaggataattttgttgaagcatgcaagaatcaagttaatgaattttatagtgatcttaaatataaccctgactatacatcagtaataaataagaaacattatgacagattaaatggtcttctctcagatgctaaagatcatggtgcagagcttgtggaaattaatccggcaaacgaagatttctcccagcaagagtcacataaaattcctccaacacttgttttaaacccaactgatgaaatgcaaataatgaaagaagagatttttggtcccttacttccaataaagacttacaaggacataaatgaaccaattaact

SEQ ID NO: 213807 - DNA, 631 bp, Unknown
  Bacterial polypeptide expressing nucleotide sequence isolated from the Sargasso Sea
atggacgtgagaagtgcgaaagaatattccaaagacgattgggcgaaactagccagtgaagccgagagtaaggtcgaaggaagactgtttattaatggcgaatacgttgatgccgaagatggcggaaagatcgatgtaattaatccatcaaccaacgaagtttttggtacctgtgctgcaggcacaggaaaggatatcgacaaggctgtagcagcagcgaaagagagttataaagctaagacttggttaaaaatggcacccagaaaacgcatgggaattatgatgaagtttgcagatctgattagtaagaacgctgcagaactagcgctgatggagaccatgaatatgggtaagcccattagcgattgtttaaacatcgatgtcccagcttctgcggtcaatcttaaattcatggctgagtgcattgacaagatgtatggcaaagtagccaacacccatgaaaaagctttaaacctttcagtccgagagcctttcggcgtggtgggttgtatttcgccatggaattttccattgctaatgggtatttggaaaatagcaccagctttagcagccggtaattctgtggttctaaagcctgatgagcattctcctcattctcttatcaagatcg

SEQ ID NO: 213808 - DNA, 517 bp, Unknown
  Bacterial polypeptide expressing nucleotide sequence isolated from the Sargasso Sea
gttgcgactttggtgcgtgagcatacccatgagttggccgttcttgaaagtttggatactggcaaaactataaacgattgtatggaagaaattggcggcgaagtcgtaaatttctttcagtggtacgcagaactggcagataaaagctttggtaagattgcacccactggccccagcgcgcttgcgctaatcgtcaaggaaccggctggtgttgcaggagctgttttaccttggaattttccgcttgtcatggcggcttggaaaatagcgccttctctttctgtcggttgttctgccgtaattaaaccggccgaacaaacgcctctaagcaccatccgcctcgccgagcttatgcgggaggctggtgtacccgatggtgttatcaacatcgtgccgggttatggtgaaaccgccggtaaagccattgggatgcacaatgatatcgacactgtatcctttactggttccagtgaagttggccgcatgtttatgcgctactcgggcgatagcaatgtaa

SEQ ID NO: 213809 - DNA, 996 bp, Unknown
  Bacterial polypeptide expressing nucleotide sequence isolated from the Sargasso Sea
aatgcaagccgctacaggagctagccacattaaatcctttaaaaatatattaaaagattttaaatttgaaaaagatttgggagaagaaaaaaataatcaaaaattattgtatgaaccaaaaggtgtttgtgctttgattacgccttggaattggccaatcaatcaagttaatttaaaagtaataccagctttagcttccgcatgcacagtagttttaaaaccatctgagatagcacctttatcatctatgctacttgcagaaatgattgatgaggcgaaatttccttctggagtttttaatttagtaaatggtgatggagctattacgggcgatgctttaacaagccatcctgatattgatatgatttcttttactggatcaacaagagctggagcattaatttctcaaaatgctgcaaaagattttaaaagaataagtttagaattaggtggaaaaggagcaaatataatttttaaagatgcagattcagaagcaatagctagaggtgttctaagatgttttagaaattcaggacaatcttgcaatgctcccacaaggatgcttgttgaaaaatcaatttacaatgaaactgtagaaaaagtaaaaaaattagcaaatgatacaaaggttgattctccacaaaaagatggtgatcatataggaccagtggtttccgaagtacaatttaataaaatacaaactttaattcaaaaaggaatagatgagggagcaaaattagttgcaggaggtactggtaaaccaaaaggtttagaaaaaggttattatgtaaaaccgactgtttttgcggatgttaataatcaaatggaaattgcaagaaccgaaatttttgggccagtgttatcgataattccttttgaaaacgaagaagaggcaatatcaatagcaaatgatactccttatggtttgacaaactatattcaaacgcaagataaagacaaagttcaaagagttgcaagaaaacttaggtctggaat

SEQ ID NO: 213810 - DNA, 478 bp, Unknown
  Bacterial polypeptide expressing nucleotide sequence isolated from the Sargasso Sea
aatggaaaagattaaatcttatcttgagcttggaaaaaaagagggcgctaaagttctaacaggtggaagtgttgctaaacttaacagtgggttggaaaaaggtaattacattcaaccaactgtttttgaggcaaaaaatgacatgcgaatttctcaagaagagatcttcggaccagttgtatctgtgattaaatttaaagatgaagcagaggcattgaaaattgctaatgatactctttatggtttaggagcagctgtatggactagaaatggtaatatagctcacagaatgggtagagcgatacaagcaggaatagtatggactaattgttatcatgcttacccagctcactcaccatttggtggatacaaacaatctggagttggtagagaaactcacaaaatgatgcttaatcattacagacagaataagaatcttcatgtttcttatgctgagaaaaaattaggcttcttttaa

SEQ ID NO: 213811 - DNA, 403 bp, Unknown
  Bacterial polypeptide expressing nucleotide sequence isolated from the Sargasso Sea
tactttagctgcgggtggccctgaacttcctaacggtatgaataaaggttactttattaaaccaactatttttacggatgtaactaatgatatgcgggttgctaaagaggaaatatttggccctgttctttcaattattccatttgaaactgaagaagaagctatcaaaattgtaaatgaaacagaatatggtcttggcaactatttgcaaactgaagataaagaaaaggcaaaaagagtttctaaaaaacttaaggcaggtacaatttatgttaatggtaatggtgctgatccaggagcgccatttgggggttataaacaatcagggaatggacgtgaaggaggagtgtggggattgcatgaattcttagaagtaaaaacaattacacactggccaaaatag

SEQ ID NO: 213812 - DNA, 871 bp, Unknown
  Bacterial polypeptide expressing nucleotide sequence isolated from the Sargasso Sea
atggataaagcattaataaaaaataaatcctatataaatggcaaatggacttgtgaaggaaataaaacttttaaagtttcgaatccagcaaatggtaaaactataggatatgtaaatgatggtggaattgagattacaaaaaaaggaattgaatctgcctataaagcatacaaatattggagtcaatatactgctaaggataggtctatgattcttgaaaaatggaataatctaatacaagaaaaatctgatagtttagcagaaataataactctagaatgtggaaaacctataaatgaaagtaaaacagaagttacttatgctgcttcatttgttaaatggtttgccgaagaggggaaaagaacatatggagatattattccatcacacacaaaagacagaagaatcaatgtaatcaaacaaccaattggtgtggttgcagcaattactccttggaattttcctttagctatgataacaagaaaggtttcgcccgccctagcagttggatgtacagtcgtaattaaaccagctgatgaaactccattcagtgctcttgcattggctcatcttgctgataaagctggttttcccccaggagtttttaatttaattgttggaaaggattcagctagaattggtaaaactatgtgtgaaaataatctagttaaaaaaatatcttttacagggtctacaaaaattgggcaacttttgatgtcccaaagttcaaaaacactaaaaaaactaagtcttgaattaggtggaaatgcaccatttattgttttcgaggatgccaatattgacagtgctgtggaaggggctattttgtctaaatttagaaactctggtcaaacctgtgtttgtgttaata

SEQ ID NO: 213813 - DNA, 1000 bp, Unknown
  Bacterial polypeptide expressing nucleotide sequence isolated from the Sargasso Sea
atgaaaataaaaattggtatcaatggaatgggaagaataggaagaatgattcttcgctctatttatgaagggaacaaaaaaatagaggttatgcatattaataatagaacaaactctgagacctgctcaactcttttgaaatatgactcaatccatggaaaatttaaagcagaaataagctacgatgaaaataatcttattgtaaataaaaacaaaatttcttttggtcaagaagctgatttaaatagaattgattggaaaaaatatggtgttgattatgtttttgagtgtactggaaaatttaattctaaagataaattagagacacatctaaataatggagcaaaaaaagtgattgtttcagctccgtgtaaaaatgcggacaaaactgttgtctttggagtaaatgagtctgaattaaataaagaagataaaattatctctgctgcttcctgtacaacaaattgtctggcaccagtggcacatgttttgaatgaaaatttcggaattgagaaaggttttatgacaaccatacatgcatttacgagcgatcaaagaattttagataattcacataaagatcctagaagagctagatctgctagtcaatcaatcgtcccgacttcgactggtgcatctaaagctataggtgaaataattccctctcttaaaggaaaactagaaggtgttgcaatgagagtaccaaccccaaatgtttcactaattgaactcatcttttgtacaaaaaaagaattgaatattgaaaaaataaattcagcatttgaaaattttagtaaaaaaaataaaattattgaaatcacaaaagaaaaactcgtttcaattgattttaatcataatcccgcctcatcaattattgatgcaagtttaacaaatgtagttggtaagaatatgggaaaaatctcagcatggtatgataatgagtggggtttttcaaatagaatgtgtgatatagctgaataccttcataaaatttcttaat

SEQ ID NO: 213814 - DNA, 553 bp, Unknown
  Bacterial polypeptide expressing nucleotide sequence isolated from the Sargasso Sea
agaacaaaagccgttgtccaagacaatcctcttaaaatggaaacaatgattggtgcccaagcatctgtagagcagatggaaaaaattaaatcttatctagatttaggtaagaaagagggtgctaaagttctaacaggtggtagtgttgctaagctaaacagtggattggaaaaaggtaactacatccaaccaactgtatttgaagctaaaaacgatatgagaatctctcaggaagagatttttgggcctgttgtatctgtgattaaatttaaagacgaagcagaagcattaaaaattgctaatgatactctttatggtttaggtgcagctgtttggacaagaaatggtaatattgcttacagaatgggtagagcaatacaagcagggatagtatggactaattgttatcatgcttatccagctcactcaccatttggtggttacaaacaatcaggtgttggaagagaaacacataaaatgatgcttaatcattacagacagaataagaacctacatgtttcttatgctgagaaaaaattaggcttcttttaaa

SEQ ID NO: 213815 - DNA, 1000 bp, Unknown
  Bacterial polypeptide expressing nucleotide sequence isolated from the Sargasso Sea
atgaaaataaaaattggtattaatggaatggggagaataggaagaatgattcttcgctctatttacgagggaaataaaaaaatagaaattatacacattaataatagaacaaattctgaaacttgctcgactcttttaaaatatgattcaattcatggaaaatttaaagctgatataagctatgatgaaaataatcttattgtaaataaagacaaaatttcttttagtcaagaaacagatttaaataaaattaattggaaaaaatatggtgttgattacgtgtttgagtgtacaggaaaatttaattcaaaagataagttacaaccgcatcttaataatggagcgaaaaaagtaattgtctcagctccatgtaaaaatgcagataaaactattgtctttggagtaaacgagtctgaattagaaaaagaagataaaattgtttctgctgcatcttgcacaacaaattgcctagcgccagtcgcacatattttaaatgaaaatttcggaatagaaaaaggttttatgacaaccatacatgcgtttaccagcgatcaaagaattttagataattcacataaagaccctagaagagctagatctgctagtcaatcaatcgtaccaacttctactggtgcgtcaaaagctataggtgaaataattccctccctcaaaggaaaattagagggtatagcaatgagagtaccaaccccaaatgtatcattaattgaatttgtgttctgtacaaaaaaagatttgaatgttgaaaaaataaattcagcatttaaggattttagtaaaaaaaataaaattattgaaatcacaaaagaaaaacttgtttcgattgattttaatcataatcctgcctcatcaattattgatgcaagtttaacaaatgtgattggtaaaaatatgggaaaaatctcagcgtggtatgataatgaatggggtttttcaaataggatgtgtgatatagctgaataccttcataagacttcttaat

SEQ ID NO: 213816 - DNA, 1933 bp, Unknown
  Bacterial polypeptide expressing nucleotide sequence isolated from the Sargasso Sea
ggtgcaagaagccacccccgccgacgtagaccaggccctggcgcacgcccaggccgctgcagccccctgggccgccacgccacccgccgagcgcgccgcagccctgctgcgcaccgccgacctgctggaagagcgcatgcagcccctgctgggcctgctgatgcgcgaagcgggcaagagcgccagcaacgccgtggccgaagtgcgcgaagccgtggacttcttgcgctactacgccgcgcaggtgcagagcaccttcgacaacaccacccacatcccgctgggccccgtggcctgcatcagcccctggaacttcccgcttgccatcttcatgggccaggtggccgcaacattggccgcaggcaatcccgtgctggccaagccggcagagcaaaccccgctgatcgccgccgaggccgtgagcctgctgtggcaggccggtgtgccccgcgccgccgtgcagttgctgcccggccagggcgaaaccgtgggcgcacgtttgattggcgatgagcgcgtgatgggcgtgatgttcaccggctccaccgaagtcgcgcgcatcctgcagcgcacggtggccgggcgcctggatgccgcagaccgccccatcccgctgattgccgaaacgggtgggcagaatgcgatgatcgtggattcgtccgcgctggtggaacaggtggtgggcgatgcggtgtcgtccgcctttgacagcgctggccagcgctgctccgccctgcgcgtgctgtgcgtgcaagaagaagctgccgaccgcgtggtcgagatgctgcagggcgccatgggcgaactgcgcgtgggcaaccccgccgagttgcgcgtggacgtgggccccgtcattgatgccgaggcgcaagcaggcattacccagcacatcgaaaaattcaaggcccaaggccaccgtgtgttccagcacccgaatcacgtttctgccgtcagcgcaccgggcacttttgtaccccctaccctgatcgaactgaaccacatcggcgagttgcagcgagaagtcttcggccccgtgctgcacctggtgcgctatgcccgcaacgacctgaaccagttgctcgaccagatcaatgccaccggctacggcctcacacaaggcgtgcacacccgcatcgacgaaaccattgcccgcgtggtcaaccgcgcccatgcgggcaacgtgtacgtgaaccgcaacatagtcggcgccgtggtgggcgtgcagccctttggtggcgaaggcctgtcgggcacgggccccaaggcgggcgggccgctgtacctgctgcgcctgctgtcgcagcgtccagccgatgcgctggcccgcaccttggccgaggctgaccgcaccagcccaccggacaccgagcggcgcgagcgtcagttggccccgctgggcaccttgcagcaatgggcgcacaaccaaggcaacctggcactggcgggccactgccagcgctttgcacaaaaaacgcagagcggcaccgcccgcaccctgcccggccccaccggcgagcgcaatgtctacaccctggccccccgcgcccgcgtgctgtgcatggcgcaaagcgcggacgacctcctggtgcagacggcagccgtgctcgccagcgggggcaccgccctgtggcccagcgcccacgccgggctgcgcgcaaagctgcccacgcacgtgcaggcccaggtcatgctgcaagacaacgccctgagcgatggcgccgtggcattggacgccgtgctgcaccatggcgacgccgcatcgctgcaagccgtatgcaccagcctcgcccaccgccctgggcccatcgtgggcgtgaccgcgctgcagcccggcgccacggacatcccgctggagcgcctgctgatcgaacgggcgctgagcgtgaacaccgcagcagcgggcggaaacgcaagcctgatgacgattggatga

SEQ ID NO: 213817 - DNA, 477 bp, Unknown
  Bacterial polypeptide expressing nucleotide sequence isolated from the Sargasso Sea
atatcggtcctgtagtttcggaaacacaatttaacaagatacagtctttaattcaaaaaggtatggatgagggagccaaacttgtagctggaggactaggaaaacctgctggtcttgaaaaaggatattttgtaaaaccaacagtatttgctgatgtagataataaaatggaaattgctagaactgaaatctttggacctgttttgtctgtaatcccgtttgaaactgaggatgaagctataaaaatagctaatgacacttcttacggtttaacaaattatattcaaactaaagataaagaaaaagctagaagagtagcaaaaaaattaagatctggaatggttgatgtaaatggtgctggaattgccatagatactccatttggtggttttaaacattcaggtattggaagagaggcaggcgaacatggtcttcaagaatttttagaggttaaatcagtaggtggttggaattaat

SEQ ID NO: 213818 - DNA, 1009 bp, Unknown
  Bacterial polypeptide expressing nucleotide sequence isolated from the Sargasso Sea
aatgactattaaaattggaattaatgggatgggtagaattggtcgtatggtagttagatcaatttttgaagctaataataaaagtttagagataagtcatataaataatagatcaaattcagaagctacttgtaaattaataaaatatgactctattcacggaaaatttcacgcggatttaaaatttggtgaaaatgaattaataataaataaaaataaaattacattttctcaagaatctaaaatcgaaaatattgattggaaaaagtataatgttgactatgtatttgagtgtaccggtaaatttaattcaaaagaaaaattaattgcacacatcaaaaacggagcaaaaaaagtaattgtttctgctccatgtaaaaatgtagataaaacaatagtttttggtgtaaatgaaaatattatatcaaaggatgataaaataatatctgctgcttcatgtacaactaattgtttagctccagttgtgaatgtgcttaataataattttgaaattgaaaaaggttttatgaccactattcatgcatttacaagtgatcaaagaattttagataattctcataaagatccaagaagagcaagggctgcaagtcaatcaattgtcccaacttcaactggggcatctaaaacaattggcgaaataattccaagcctaaaagggaaattagaaggagttgcaatgagagtcccaacacccaatgtatcgcttatagagttagtattttgcacaaaaaaagaagttgatgtaaaaaaaattaatgctgcatttgaaactgcctctaaaaatgaattaaataaaatcttagaagttacttacgaaaaactagtttccattgattttaatcatcattctgcatctgcaattgttgatgcttctctaacaagtgtagttggaactaacatgggtaaaatctctgcctggtatgataatgaatggggtttttcaaatagaatgtgtgatatagctgagaatttgcataaaatctcttaa

SEQ ID NO: 213819 - DNA, 880 bp, Unknown
  Bacterial polypeptide expressing nucleotide sequence isolated from the Sargasso Sea
ggtaaagctaattagatacgattctattcatgaaaagtttgatgcagatattaaatttgatagtaataatttaataataaataaaaaaaaaatttcattttctcacgagcctaagatcgaaaaaattaattggaaaaaatatgatgttgactatgttttagaatgcacgggtaaatttaactcaagagaaaaacttgtagctcatattaaaaatggtgcaaaaaaagtgattgtatctgctccatgcaaaaacgcagacaaaacaatagttttcggtgttaatgaaaacaccttaactaaaaaagatgaaataatctcagctgcctcatgtactacgaattgtttagcaccagttgtagatgtaattcacaaaaaatttgaaattgaaaaaggttttatgacaacgattcattcatttactagtgaccaaagaattttagacaattctcataaagatccaagaagagctcgatctgcaagccagtcaattgttcctacatcaactggagcatcagaaacaataggtgaaataatcccaagtttgaaagggaaattacaaggtgtggcgatgagagtacctacaccaaatgtttctcttatagaattagttttttgtactaaaaaagaaattaatataaaaagtataaataatgaatttgaattagcttcaaaaaaagaattaaaaagaattctagaagttacgtatgaaaaattagtttctattgatttcaatcataattcagcctctgcaatcgttgatgcatctttaaccagtgtggttggaggaaatatgggcaaaatttcagcttggtatgacaacgaatggggtttttctaacagaatgtgtgatatagctgaaaatctgcataaaatctcttaa

SEQ ID NO: 213820 - DNA, 1429 bp, Unknown
  Bacterial polypeptide expressing nucleotide sequence isolated from the Sargasso Sea
aatgaaggaagttttagctttgcaaaaaaaagcttatatcgatgaaggacctgcaagttatgaattacgtttagatagattaaatagactctctcagatgttaaaaaaatattctgatgagatagtagatactattagtgaagattacggaactagagataaaaacagtacttttttatcagaagttatgtctagcttaggaagtgttgattattcaatcaagaatcttaaaaaatggatgaagtcagaaaccagacaatcaaattcaagtcagccttttgtagctagattaatgatgcgtttattgggcgctaagacggaaattcaatatcaacctcttggaaccattggaatgattaaaccatggaattttccgataaatttaattatttctccgatagcgcaagcatttgctgccggaaatagagtaatgattaaaccctctgaaataactccgaaaacatcagatctaactaaaaagatgtttaatgaattttatgacaaagcagaagttgaagtttttctaggaggtcctgatgtggcagaggcctttggaaatctcgactttgatcacctactttttactggatcgaccaacaacggtagaaaagttatgcaatctgccgcgggaaacctcgttccagttacactggagctaggcgacaaatctccagtaattatggatgaaacagccgatgtttctttatcggctacaagattgatgcgtggtaaaacaatgaatgcaggtcaaatctgcattgctcctgattacatgatgatgcctaaaggtaaagttgacgaatttataaatgaaagcaccaaagctgtttctgaaatgtatccagatatgaaatacaacgatcactacacttcaattgttaatcaaagacattttgaaaggattaacagtcttatcgaagatgcaaaagaaaagggtgctgaaattaaaacaataaatcctgcaaatgaagattttgagcaacaagaaggacataaaattcctccaacttttgtcttaaatcctactgatgatatgaaaatcatgcaggaagagatctttgggcctgttatgcctattaaagaatatgaggatattgatgaaaccataagctacgttaattcaaaacctagacctttggctttatattactttggtaaaaataaagatacccaaaataaaattcttaatagaaccacatctggtggagcaactattaatgatgttgtgtggcactatggtcaggaagatatgccttttggtggagttggagacagtggtattggttcttatcacggtcatgaaggttttaagagattcagtcatcaaaaatcagttctaactcaatttagttctgacttattgaaaaacatgatgcctccttacaaaggtaaaatgtttgaatcagccaaaaagaacgctcttaaataa

SEQ ID NO: 213821 - DNA, 748 bp, Unknown
  Bacterial polypeptide expressing nucleotide sequence isolated from the Sargasso Sea
ttgggaatttgatgttgattatgtttttgaatgtacaggcaaatttaactctaaagataaattactaccacatttaaaaaatggagcaaaaaaagttattgtttcagccccatgtcaaaatgctgataaaactattgtatttggtgtaaatgaaaaagaattaaaaaaggaagataaaattatttctgctgcatcatgtacgactaactgtcttgcacccgttgcttacgttttgaatgaaaattttgaaattgaaaaaggttttatgaccacaatacatgcgtttacaactgatcaaagaatcttggataattctcacaaagatccaagaagagctagatccgcaagccaatccatagtaccaacttcaactggtgcatcaaaggcaataggtgaaattataccttctctaaaaggtaaactagagggtattgcaatgagagtgccaactccaaatgtttcattagttgaattaattttttgcacaaaaaaagatttgagtattgagaaaattaattctgcatttacaaattttagtaaaaaacaaaaggacaaaattctagaaataactcatgaaaaactcgtatcaattgattttaatcataacccttcctcttcgattgttgatgcaaatttaacaaatgttataggaaaaaatatgggtaaaatttctgcctggtatgataatgaatggggtttttctaataggatgtgtgatatagctgaatatattcataaaatttcttaa

SEQ ID NO: 213822 - DNA, 1447 bp, Unknown
  Bacterial polypeptide expressing nucleotide sequence isolated from the Sargasso Sea
atgtacgataaatacggacagttcattgatggaaagtggcaaaagtctacaagtggtgaaacttatgatgtcattaatcctgcgactgaagaagtaatagggaaagcatcaaaagcaaatagttcagatgttcaaaaagctcttaaatcagctgaaaaaggtttaaaaatttggaaaaatacatcaccttgggaaagatctaaaattataagaaagatatctgatttaataagaaaaagagttaatgttctttcaaagtggttgacacttgaagtaggaaagccattaacagagggtccaggggaaataggtggtgcggctgatatatttgagtggaattcagaggaaaccaaaagaatttttggagaaataaatcaaagtagatttccaaatactcaaatccacgttatgtaccaaccagttggagttgttgcagccttggttccatggaattttccagttattcttgcatcaagaaaaatttcaaccgctttagcggctggatgttcagtaatagtgaagccagatgtaataacaccgggcagtgtgatggagatagttgatatttgtagagaggcaggtgttcctccaggagtagttaatttattatcaggtgatccagctggcatttctgaagaattgataaagtcagatataataaaaaaaatttcaataactggatcaacaagagttggtaaactgattttaaagcaggctgcagacaaagttcaaagagtaactatggagttaagtggtcactcaccatttatagtttttgatgatgttgatttaaataaagttactgatatggcaataacttcaaaatttagaaataacgggcaagtgtgtatttcacctaatagattttatatacacgaaaagaagaaagatgaatttgcaaatttaatggttgaaaaaacaaaaaaacttaaaattggaaacggtatggataaggatacattgcttggtcctttatgtactaaacaacgattagaaggtgttgaaaaattagtagagactacaaaaaaagaaggtggcaaagttttacttggtggaaaaagagctgcaaattttaataaaggatatttttatgaaccaacaatatttgataatataaaagataattttactgttatgaaagaagaaccgttcggcccaatagttcctattttaacttttaaagattttgatgaagtgatggaaagagctaacaataatgatctaggtttatgtagttatgtttacacaactgatttaaaaaaagctaataaagcatctgaacaactagaaacaggttgtgtagcagtgaatactcctgttgttgcagtagcagaggcaccttttggtggaattaaacaaactgggtatggtagagaaggtggttcaatggcgattaaagattatttgaatataaaatacactcattttggtatctcatacgaatgag

SEQ ID NO: 213823 - DNA, 1333 bp, Unknown
  Bacterial polypeptide expressing nucleotide sequence isolated from the Sargasso Sea
actcggtcaggtaccctcgggtggaaaagacgatgctcttgccgccattgattccgcctccaaagccttaccttcttggtcctcgctgaccgcctaccaaagatcgaaattcctgattgatgcccatcggttgatgatggaatcccaacaggaaattgccgaaatcatgacacaggaacagggaaagcccattcgggcggcaatgaacgaggtccagtatgctgctgattttctgatctggtttgctgaagaagcaaagagggtttacgggagaaccattccttcctccagaagcgatcaaaggttccttgttctgaatcaacccgtgggggtcgtgggtgccattaccccctggaattaccctgtttccatgatcacccggaaagttgcaccggccctggctgcaggatgcacgattgtggtcaaacctgcggaagcgacacctttatgtgcaaaagccgtctttcagatttttgagaaagcctcatttccgccgggtgttgtgaatctcgtaaccgcagaaaatccaaaacccatcggcgagatgctcatcaacgatgaaagaatccggaaaatcaccttcaccggttccacaaaaatcggaaaaatgctggcagaaggtgcaggaagaggtttaaaacggatctccctggaacttggaggacacgcaccgttcatcgtttgtgccgatgccgatcccgttcatgcagccaaaggcttgtcattagtgaaatttttaaattccggacaggcttgcatcagcccaaaccggatctatgtccatgcacaacaggaaaaagcctttcttgatgaactcaaatcgagggtctcaaatttaaaggccgggccaggtctagagcaagattcgaagatcggccccttgatcaatcagcaagccctggaaaaagtagaaacgcaggttcaggatgcccttaaaaagggagcagaactgatctccggaggcgaacgagtcagagatgactcctgtgccaatggttttttctatgctcccaccatcctcaaccgggtcactcctgaaatgttgatctatcgggaagaaacctttggaccagtggctccggtaattatctaccaggatgaatacgatcttttggaaatggcaaacgacacccattacggccttgcgtcttatgtctacacacaaaacttgaaatccgccatgcagctttttgagggattggattttggaattgttggaatcaatgatatcaatccaacctcggcggcggctcccttcggcggaatcaaggatagcggaatcggcagagaaggggcatcagaaggcatccacgaatacctgaaaccaaactcg

SEQ ID NO: 213824 - DNA, 730 bp, Unknown
  Bacterial polypeptide expressing nucleotide sequence isolated from the Sargasso Sea
gctgctgaaaaagtacaaagagtaaccatggaacttggaggacatgctccctttatagtttttgatgatgccgatcttgaaaaagcaacagatatggcaatggcagcaaaatatagaaataatggtcaagtttgtatttcaccaagccgattctatattcatgagaataaaaaagatcagtttgcaaaaatatttgttgagaaaactagtaaacttaagattggtaatggacttgataaagatacaaaccttggtccaataacaacccagaagagattagaagagatagaaaatttagttgaagaaactaaggcatctggggcaaaagtgttatgcggtggtaaacgaccagcaggatttaataaaggctatttttttgagccaactatttttgatgatgtcaaagatgattttaaaattatgaaagaggaaccttttgggcctttatccccaatcacgacatttaaaagctttgaagaagttatagaaagagcaaacaaccatgaagttggtctcgctggctatgtttgcactgcctcaatggagactgctcagcgatcatctgaattaatgcaaaccggaatggttgctgttaatactccatttatttcttcagctgagacgccgtttggtggcattaaacaaagtggctatggaagagaaggtggatcttttggtatcaaagattatttaaacattaaatatacgcatcttggaatatcaggctaaa

SEQ ID NO: 213825 - DNA, 1097 bp, Unknown
  Bacterial polypeptide expressing nucleotide sequence isolated from the Sargasso Sea
aatgactgagcttaaaaaatataaaatgtttattggtggagaatgggttgagtccgataccaataaaacatttgaaacacttaatccagaaaataataaaccatgggcaatagttcctgaggctagtgcaagtgatgttgataaagcggttaaagctgcacaaaaagcttttgaaggtgagtggtcaaaattattaccaagggaaagaggtaattatttaagagcaatagctaataaacttagagaaaatgctgaactattaggaaaaattgaaacaattgatactggcaaactttttagagaaacaaacaagcaggcaaattatattgctgaatattatgattattacgcaggtttagcagataaagttgaaggaactgtattaccaatagacaaaccaaatattcaagctattacaacaagaatacctataggggttattgctgcaatcattccttggaattcacaaatgcttttaacagtaactaagttagcacctgcgcttgcaatgggaaatacagtggtaattaaatcgtcagagctagcaccagccgtgatgtttgaatttgcaaaacttgttgaagagacaggaataccaaaaggagtagtaaatgttataaccggttttggagacccttgtggaaaagcattaactacccataatttagttgaaaagattgcttttactggtggaccggagactgcaagacatattattaaaaattctgcagaaaatttatcagaagtaagtctagaacttggaggaaaaagcccagttgctgtgtttaatgatgctcatcaagaaaatgcaattaatggaataaccgcaggaatttttggggcaagtggtcaaagttgtatagctggatcaagactatatttacaggatggtatttataatgaatttttagataaacttactgccagagctgaaaaaattaaaattggggctcctatggatccagaaagtgaaatgggtcctctaagtaattttaaacagcttgaaataattgaaaaaaatataaaacttactgtagatcaaggtggaaaaataaaatgtggcggaaagagacatgcattttctaatgagggatata

SEQ ID NO: 213826 - DNA, 441 bp, Unknown
  Bacterial polypeptide expressing nucleotide sequence isolated from the Sargasso Sea
aagagggcgctaaagttcttacaggtggaagtgaagctaagttaaatagtgggttagaaaaaggtaattacatacaaccaactgtatttgaagctaaaaatgacatgagaatctctcaagaggagatttttggacctgtagtatctgtaattaaatttaaagatgaagcagaggcattaaagattgctaatgatactctttatggtttaggagcagctgtatggactagaaatggaaatatagctcacagaatgggtagagcaatacaagcaggaatagtatggactaattgttatcatgcttatccggctcactctccatttggtggatacaaacaatcaggagttggaagagaaactcacaaaatgatgcttaatcattacagacagaataagaacttacatgtttcttatgctgagaaaaaattaggcttcttttaat

SEQ ID NO: 213827 - DNA, 1243 bp, Unknown
  Bacterial polypeptide expressing nucleotide sequence isolated from the Sargasso Sea
tatattatcagacgtatcgcagatagaatgagagaaaagcaagacgtgcttgctaaatggatgacactagaagttggaaaaccttttactgaagcaaaaggtgaagttaacggtgctgcagatatttttgaatggaatgcagaagagacaaaaaggatttatggtcaaactgtagaaagcagatttgaggacacaagagttcatgtttattaccaaccagtaggagtagttgctgcattatccccatggaattttccagcagttttatcagctagaaaaatttcaacagctttagcagcaggatgttccgttatcataaaaccagatgtaatcactccaggtgtagttatggaaatggttgatatttgtaatgagtgtggagttcctcctggagtagtaaatcttttatcaggagatcctccaagtattgctcaacaattaatagcatctgatattgtaaaaaaaatttcaataacaggatcttcaagagtaggaaaattaattttaaaacaagcagctgacaaagttcaaagagtgaccatggaactaagcggtcattcaccttttatcgtttttgatgatgcagatattaaaaaagccgcagatatggcgattgctgcaaaatttagaaataatggtcaggtatgcatatccccaaatagattttatattcatgaaaaaaagaaggatgaatttgtaaatttatttgttgaaaaaacgaaaaaattgaaaattggtaatggtatggatccagatacaaaattaggtccactcacaacccaaaagagattaaatgaagttgagacacttgttgaaaaaactaaacaggaaggtgccaaagttttgttgggtggaaaaagaccagctggctttaataagggatttttttatgagccaactatatttgatgatgtaaaagataattttactataatgaaagaagaaccatttggacccttagtacctatgctttcttttaaatcatttgatgaagtcataaaaagagctaatgatcatgaactcggactgtgtagttatgtttgtacaaattcgatggaaaaagctcatcttgcatcagaacagctagagacaggaacagttggagttaacactggttttattgcaatagcggaagctccttttggtggcatcaaacaaagtggctacggtagagaaggtggatcaggagccattaaagattatttgaatgtaaagtacactcatctaggcattaaaggttaat

SEQ ID NO: 213828 - DNA, 1495 bp, Unknown
  Bacterial polypeptide expressing nucleotide sequence isolated from the Sargasso Sea
atgaatttaattcaacatttcattaatggcaaaatagtttctggaaattcaaaaagaaaaggaaaagtatttaaccctgctacaggagatcaaaaatctgaagttaatttaggaacaaaatcagatttaaatgaagctgtggaaattgcaaaaaaagcttttgaaacatggtcactgaagccaccaatacaaagagcaagaataatgttcaaatttaaagaattaatagaaaaaaattctgatgagcttaccaaaatgattgtttccgaacatggaaaagtttatgaggatgcaaaaggttctttggttagaggattagaagtagttgagttcgcatgtggcataccgcaagttttaaaaggagagtttaccgaaaatgtaggtacagatattgatagttggtcaattagacagccactaggtgtttgtgctggtataacaccatttaactttcctgctatggttccaatgtggatgtttccaatggcaatagcatgtggaaatacttttatattgaaaccatcagaaaaagatccttcatgctcaattaaattagcagaattatttaaagaagcaggtttgccagatggagtttttaatgttgttaatggagataaagaggtagtagatgctatattaacaaataaagatattcaggcagttagctttgtgggatctacccccatagcaaaatacatttatgaaaatgctgcaaaaaatgaaaaaagagtacaagctcttggtggggcaaagaatcattgtgttgtaatgccagattgtgatttggatcaagcagttaacggattaatgggagctgcatatggatctgctggcgaaagatgtatggctcagtcagttgctgtggccgtaggagatattgcagacaatttagttaatcaattatccaaaaaagttgaagctctaaaaattggaccaggaatggataagagttctgaaatggggccattagttacgaaagagcatttagaaaaggtaaaaggttatgtagatcttggagtaaaagaaggagcaaaattagtagtagatggaagaaaaattaaattacagggttatgaaaatggtttttatattggtggatgcttatttgataatgtaaaaaaaaatatgagaatttacaaagaagagatatttggtcctgtgctctctgtagttagagtaaaagattttgatgaagctacaaagcttattaatgatcatgaatttggaaatggaacaagtatttatacaagagatggtgatgtaggtagaacttttgcaagcaaaattaaagttggcatggtaggtattaacatacctatacctgtgccagttgcctttcatagttttgggggctggaaaagatcattattcggagatcagcatatgcacggaatagagggtgtgagattttatactaaactaaaaacaataacttcaagatggccatctggaataagatcaaatcctgaatttgttatgccaacaatgaagtaaa

SEQ ID NO: 213829 - DNA, 895 bp, Unknown
  Bacterial polypeptide expressing nucleotide sequence isolated from the Sargasso Sea
ttttaattggaaaaataaaactgctaaagaaagatcaattatattaaaaaaatggcaagaccttataataaaaaatgttgatgatttagcacatattatgaccgttgaacaagggaagcctcttgctgaatcaaaaggtgaaattttaatgggtgcttcttatatagaattttatgctgaggaagtaaaaagagtttatggagatataataccagatccacttcctgatagaaggattattgtaattaaacaacctgtaggagtagttggagctattacaccttggaattttcctagcactatgattactagaaaatgtgctcctgctttaggagtaggttgtcctgtagtaattaaacctgctagtcaaacacctttttcagctttagctttagctgtattagctgaagaggcaggttttccacctggtgtttttaatgttttaactggttctgcttctgaaattggtaaagaattaactgaaaatcctatagttaaaaaaatatcatttactggttctacagaggttggaaagattttgcttaaacaaagtgcctcaactgtgaaaaaagtatcaatggaattaggagggcatgctccttttatagtatttgatgatgcggatattgatgaagcagtttctggagctataatgagtaaatttagaaactcaggtcaaacttgtatatgtgctaacagaatatttgtacatgaaaaaatttatgaagaatttttagaaaaatttgtaaaaaaagttgctgatataaaagttggcaatggattagagaaatccactaattcaggacctttaatagacaaatactctcttaaaaaagttaaagatcatgttgaagatgcagtaagaacaggagcagaaatagctatagggtggtaa

SEQ ID NO: 213830 - DNA, 1312 bp, Unknown
  Bacterial polypeptide expressing nucleotide sequence isolated from the Sargasso Sea
atgatacaatataaatcatttggtgattgtggaaattgggttaataacgcatactctgaaagtagttcaggcgatagaataagtgttaccagtccttactttgataaggaaattgccacgattcctgattctggaaaaaccgaccttgatattgcagtaagtaaagctaaatcagcatttccaaattggtctggaacgaatattcgtgatagagcacagattatgttcaaatttaaatctatcattgaaaatgatatggaagacctcgcagctttaattgctcttgataatggtaaaacaattgcagatgcaaaaggcagtatactacgtggaattgaagttgttgagtatgcgactagtttacctaatgtgttaaaaggagaatcttcagatgttagtgagggaattaactgtacgatgacacatgagcccctgggagttgtcgcgggcattactccatttaattttcctgttatggtgccgttgtggatgattcccttagcaataaccgcaggcaacacctttattcttaaaccatcggagcaaacaccactatccggtatgcgtcttgctgaatatttaaaagaggcaggtcttcctgatggagtgtttaacgttgtgaatggtgcaaagacaattgttgagtctctttgtgaccacccagatataaaggcattagcctttgtaggttcatctagtgttgcaaaaatagtatacacaaggtgctcacagaatagcaaacgttctatctgccttggaggagcaaaaaatcatatgattgtggttcctgacgctgataaagattccacggcaaaaggtctattagctagttcaatgggaagcgcagggcagaggtgtatggcagcaagtgttgcagttggtgtttcagatattgatcatattattgaacaattgattgaagaggcaaagaatttcaaacttggtgtggatatgggtactattattagcaaagatgcattaaatagaattaatggatacatagacgaagctgaaaaaatgggcgcaaaagttttggtggatggcaggaatatgagccccccagatgattataaagatgggtattggcttggtgctacgatactggataatgttgatccagaatggcccagtgcaaaagaagaaatctttgggccggtactatcgatcatacgtgcagatacaattgaagatgcgatgaagattgaaaatgacaacccgtatgggaatgctgcggccgtatttaccacatcgggtcagatcgcaaaagtagtttcagaaaaggcttctgctggtatgattggggtaaatattg

SEQ ID NO: 213831 - DNA, 1057 bp, Unknown
  Bacterial polypeptide expressing nucleotide sequence isolated from the Sargasso Sea
tggaaaagtttatgaggatgcaagaggttcactaacaagaggtctcgaagtcgtagagtttgcttgtggaattccccaaatgcttaaaggtgaattcactgaaaatgttggatcaaatgtagatagttggtctattcgtcaacctcttggagtctgtgcaggaattaccccttttaatttccctgcgatggttcctatgtggatgtttcccatggctatcgcgtgtggaaatacatttgtcttgaagccgtctgaaaaagatccttcttgttcaatgagattagccgaacttttaaaagaagctggccttccagatggagtttttaatgtagttaacggagacaaggaagcagtagatgctttgataaataataaagatgttgttgcgatgagctttgttggttcgactccaatagctaaatatatttatgaaaattgtgcaaaaaatgaaaaaagagttcaagctcttggtggagctaagaatcactgtgtagtaatgccagattgtgatttggatcaagcagtaaatggtttaatgggtgctgcatacggatcagcaggtgaaagatgcatggctcaatcagttgcggttgctgttggaggtattggagataagttagttgagtcattagcaaaaaaagttgaagtattgaaagttggtcctggtatggacaaacaatctgaaatgggaccattggttacaaaagaacatttagcaaaagttaaaagttatgtagatattggtgagaaagaaggggcaaagttagttgttgatggaagaaattttaaattacaaggatatgaaaacggttactacataggcggatgcctttttgatcacgtaactaaaaatatgaggatttacaaagaggaaatctttggaccggttctatcagtaattagagcaaaagattttgatgaagcattacgactagtcaatgatcatgaatttggaaatggtgtaagcatttttaccagagatggtgactcaggaagaacattttcaagtaaagcaaaaattggaatggtgggaataaacatacctataccggtacca

SEQ ID NO: 213832 - DNA, 1009 bp, Unknown
  Bacterial polypeptide expressing nucleotide sequence isolated from the Sargasso Sea
tatgagaaaagttcttaatgaacaaaaacaattttttataaaaaatggacctccatcaattgaattaagaattgataggttagaaagacttagaactttaataatagataataaaaatcaatttgttgaagctttaaataatgactttggagttagatcaagaaattcatcaatgttagctgatgtatatggaatacttcctgcaattacacatgctgtaaaaaatataaaaaaatggaataaaattgaaaaaaagtcttctaattttccattcggtcttatcggtgctaaatcttatattaaatatgaaccattaggtactgttggaatgatttcaccttggaactttcctgttaatttagcttttatgccattggtatgtatttttgctgctggtaatcaggttatgcataaacctagtgaacacacgccactaactgcatcattattaaaagatttatgtgataaagcatatgatcaaaatgaatttgctacatttcttggagggcccgaagttggagcagcatttacacaattacaatttgatcacttaatttacacaggtggaaatgttgtagctaaacatgtttataattctgcttcaaaaaatttagtaccttgtacacttgaattaggcggaaagtctccagttattattggtaaaactgcagatataaaaactacagctaaaagaattatgtttggcaaaaccttaaatgctggacaaatatgtttagctccggattatgtagttgtacataaagatcaaaaagatgatttcattaaagaagtaaaagaagctgtttctgaatattatccagagataaaaaataatgaagattatacttcgataatcaatcaagctcattatgaaagattaactgatttattagaggatgctattgaaaaaggagcaaatgttgaagccataaatccagctaatgaagattttagtcaacaagaattttataaaattccaccaactttagttactaacacaactgataat

SEQ ID NO: 213833 - DNA, 1143 bp, Unknown
  Bacterial polypeptide expressing nucleotide sequence isolated from the Sargasso Sea
tatgcctgtttttgatccctctactggcgaagaaatatcaaaggttgttttatcaaatgaggaagattttgatattgctatcaaaaactctaaagaaagtcagaaagaatgggcagattttactcctcttaaaagatcaagaattttgtcaaattataaatcattaattgaaaaaaatttgcaagaaattgcagaattagtatcaaaagaacatggaaaaactcttgatgatgcaaaaggttctgtgacaagaggtttagaggtggttgaatttgcttgtggaattcctcacttattaaaaggtgagttttcacaaaatgttggttcgaatattgactcttggtctattagacagcctttaggagtttgttctggcatcactccttttaactttccagctatggttcctatgtggatgtttccaatttcaatagcttgtggaaactcttttattttgaagccttcagaaaaagatccctcgtgctcaataaagcttgcagaacttttttcaaaggctggccttcctgatggagtatttaatgttatccaaggagataaagaaatagttgatttaattcttcaaagccctcatatttcctcagttagttttgttggctcaacgccagtagcaaaatatatttatgaacaagcagctaagaatttaaaaagagttcaagctttaggcggagctaaaaatcatttggttgttatgccagatgctaatttggatcaagctgtagatggcattatgggggcagcttatggatcagcaggtgaaagatgtatggctgtatcagtagctgtagcagtgggagatattgctgatgaattagttaataatataaatattcaatgtcaaaaacttaaagttgctccttggaccgatcctgattccaacatggggccagttatatcaaaagaacataaagaaaaaattgaaaattatatttctaaaggtattgatgaaggcgctgaacttattgcagacggtagaaattacaagattcaggggtatgaaaatggatattttgttggacctacattatttgacaaagtgactaaagacatgactatttacaaggaagaaatatttggaccggtactttccgttgtaagggctaaagattatgatgaagcattatc

SEQ ID NO: 213834 - DNA, 643 bp, Unknown
  Bacterial polypeptide expressing nucleotide sequence isolated from the Sargasso Sea
gctccatgtagaaatgcagataaaacaattgtttttggggtaaatcaaaaaaaaattggaaagaatgataatattatttcagctgcatcttgcacgaccaattgtcttgctcctattgcggatgttgtaaataaaaattttacaatccaaaatggttttatgacaaccattcatgcttttacgacggatcagagaatattagataattcgcataaggatccgagacgagcaagatctgctagccaatcaatagtgccaacttcaagtggagcttctaatgcaattggcgagattatcccttcattaaaaggaaagcttgaggggattgcaatgagagtgccaactcccaatgtatctttggttgagtttgtttttaatgttaaaaagaatatttctaaagaaaaattaaataattcattttcagaagcatcaaattcttatctaaaaaatatcttagatatcacaaaagaaaaattagtatcaatagatttcaaccataatagctcatcagcaatattagatagttccttgactaatgttgttggttcaaaaatgggaaaaatctctgcatggtatgataatgaatggggtttttcaaatagaatgtgtgatattgcaagacatttaagcaaaaccaattaat

SEQ ID NO: 213835 - DNA, 934 bp, Unknown
  Bacterial polypeptide expressing nucleotide sequence isolated from the Sargasso Sea
tgaaactgaatttgctacatttctaggtggcccagaagttggcgccgcttttactcagcttaagtttgatcatttgctatttacaggaagcggaaatatcggtaagcatgtaatgcgtgctgcctctgaaaatctagttccattaacattggagcttggaggaaaatctccagttatagtcagtgattcttcagatatagatataacagcaagaagagtaatgtttaataagactcttaatgcaggacaaatatgtctagcccctgattatgtttatgtgcatgaaacagagaaggataattttgttgaagcatgcaaaaatcaagttaataaattttatagcgatcttaaatataaccctgattacacatcagtaataaatgaaaaacattatgacagattaaatggtcttctctcagatgctgaagatcatggtgcagagcttgtagaaataaatccagcaaatgaagatttctctcaacaagagtcacataaaatccctccaacacttgttttaaatccaactgacgaaatgcaaataatgaaagaagagatttttggtccattacttccaatcaagacatacaaggacataaatgaaccaattaactatataaataaaaatgataaaccattgggattgtattattttggaaacaataaaaatgaagaagcgaaggttattaattcaacaacctctggtggagttacagtaaatgatattatgggacatatccaacaaaatgaattaggttttggaggagtgggtccttcgggaatgggtaaatatgacggctttgatggatttacgaacttttcaaataataaaccaatctataagcaaataggatttggtttagataaattacttgatgctataagacctccatataagagtagtattgaagacgtcctaaaaaaactattaaagtaa

SEQ ID NO: 213836 - DNA, 517 bp, Unknown
  Bacterial polypeptide expressing nucleotide sequence isolated from the Sargasso Sea
aataacaccaaagtagattcgccacaaaaagatggcgatcatattggaccagtagttcttgaagttcaatttaataaaattcaaactttgatacaaaaaggaatagatgaaggggcaaaattagttgcaggtggaacaggtaaacctaagggtttagaaaaaggttattatgtaagaccaacagtttttgctgatgtaaataatcaaatggaaatagcaagaactgaaatttttggtcctgtgttatctataataccttttgaaagtgaagatgaagctatatcaattgctaacgatacagactatggtttaacaaattacattcaaacacaagataaagaaaaagttaaaagagtagcaagaaaactacgatcaggaatggtagatgttaatggagtaggtattgcggtaagttctccatttggtgggtataaacattctggtattggacgagaggctggaaccgaaggtcttatagaatttttagaagtcaaaacggtaggtggctggaattaaa

SEQ ID NO: 213837 - DNA, 1204 bp, Unknown
  Bacterial polypeptide expressing nucleotide sequence isolated from the Sargasso Sea
agatgaactgtcggaacttgaatcaagggacgttggtaaacccctcagacagtcacgggttgatgttcgggcatgtgctcggtatttcgagttttatgctggtgcggtggacaaaatccatggtcagaccatcccctatcttgaaggttataccgtcctgaccttgagggagcctcatggagtgacggggcatattattccctggaactacccgatgcaaatcatcggtcgaaccattggcggtgcgctcacgatggggaatgcatgcgtgcttaaacctggggaggaagcctctctgacttccctgaaaatcggagatttgagcctaaaagccggttttcctcctggagttttaaacatcgtcccagggttgggcgaagaagccggtgaagctctgttgaagcatcctggggtgagccactattcattcaccggttcgacggaaatcggagttaaggtccagcaggaggctgccaagcgagctgttcctgtgacgcttgaactggggggtaaatctccccagttggttttttccgatgccgatatagataaagcccttccttttctggtgaatgctgccattcagaatgcaggacaaacctgttctgctgcaaccagggtcctgatcgaaaagccgatattccaggaattaacagaaaggcttgccaaggaaatcagttcactccgttctggcccggccttacaagatcttgaatgcggtcccttgatcagcaaggtgcagaaagatcgggtcgaaggatttcttcagcgtgcgaggcaggacggggttgaattcctcgcagaaggaagcattgtaaaggatgcacctcaagggggaaattatgtggctccttgtatggttggcagcgtgcctccgaaacataccctggcacaggatgaggtttttggcccattgctcgtcaccatgccttttgaaggagaagaagaggggattgaacttgcaaataacacggtttacggtttggtttcaggtgtttggacaaaggatggcggacgtcagttaagggttgctaggagacttaaatcggggcaggtattcatcaataattacggagcaggtggaggggttgaacttccattcggaggagtcaaactcagtggccatggacgtgaaaaaggctttgaagcactttatggtttttccgtgaccaaaaccgttgccattcatcacggagcatcatga

SEQ ID NO: 213838 - DNA, 580 bp, Unknown
  Bacterial polypeptide expressing nucleotide sequence isolated from the Sargasso Sea
acatgaaagcattcatgatgactttctaggtaagttagtggataagctcaagggattaaaagtcggaaacccacttgatgaagcaactcatatgggatcaataatcaatgaaaagcaattcaatcgggtatgcagttatattgaggatggattggggcaagaaggctcagaaatagtacttggggggatgcctccctcacatggtccgcttgcagaaggctattatgttactcctacggtgataacgcgtgctaataatgattggcgagttgcacgtgaggaaatctttggccctgtgcttgtcgtagtgccttggtcagatgaagaagatgtaatccgcatggcaaacgacagtcattatggattggcagcctatgtctggtgcaaaaatattaaacaagctctcaatgcggctcataagattgaatctggttgggttcaagtcaacagaggattagggcaattgccaggacattcctacggtgggtataagatgagtggaattggaagggaattctctcttgaaggcatgttagatagctttactcagcgaaagagcgttacagtaaacttggaataa

SEQ ID NO: 213839 - DNA, 1045 bp, Unknown
  Bacterial polypeptide expressing nucleotide sequence isolated from the Sargasso Sea
gcaaaaaatcaaaggattttgtatgaaccaaaaggagtatgcgctttaattacaccatggaactggccaatgaaccaggtttgtcttaaagttattccagctttagcatcgggatgtacaatgatactaaaaccatcagaactagcaccactatcggcaatggttcttgcagaattaattgatgaagcaaaatttccaaatggagtttttaatttagtcaatggagacggtgcaacaactggagatgctttaacaagtcatcctgacgtaaatatgatttcatttacaggctcaacaagagcgggctcccttatatctcaaaatgcagcaaaagattttaaaagagttagcttagaattaggtggcaaaggagcaaatattatttttaaagatgcagacaatgaggcagttgaaagaggtgctttaagatgttttagaaattctggccaatcctgtaatgctccgactagaatgttggttgaaaaatctatgtatagtgaagcaatagaaagattaaaaaaatatgctaacgaatttaaagtagacgatcctaataaagaaggtgagcatattggtcctgtaatttctcatacgcaatttaataaaattcagagtttaattcaaaaaggtatcgatgagggtgcaaaattaatcgctggtgggccaggaaagccagatggtttgtcaaatggttattatgtgaaacccactgtatttgctgatgttaataataatatggaaattgcaagaactgaaatttttggaccagtactatctgtcataccatttgaaaacgaagaagaagcaatcgaaattgctaatgacactgaatatggtttaaccaattatattcaaagtcaagattctgaaaaggtaaaaagacttgcaagaaaactaagatctggaatggttgatgttaatggcgctggcattgcagttgatgcaccttttggtggatttaaacattctggaattggaagagaagcaggaaaagagggactgcttgaatttctggaagtcaaatcagtcggtgggtggaattagt

SEQ ID NO: 213840 - DNA, 1204 bp, Unknown
  Bacterial polypeptide expressing nucleotide sequence isolated from the Sargasso Sea
atggaacttaaaaataatgaacttttcaaagaaaattgttttatcggcggtaaatggattgaaagcaattctggtgaaaagattgatgtagacaatccagcaaatggtgaaattattggtaaagttcctaaatgttcaacttctgaaactagtaaggcaattgatgaggcacaaaaagcttttcctgcatggagagataaaactgctaaggaaagatctgtagtactacaaaaatgggcaagattaattgaagaaaatgttgatgatttagcaaaaattatgactgtcgaacaaggcaaacctttagctgaagcaaaaggtgaaattttaatgggagtgacatatattgatttttatgcagaagagggaaaaagagtctacggtgatatcatttctgatccaatgccagacagaagaatagttgtcataaaacaacctgttggtgttgtaggagcaattaccccctggaatttccccagcacaatgattacgagaaaatgtgcaccggcacttgctgtgggctgtactgttgtaatcaaaccagctagtcaaactccttattctgcacttgctcttggagttttggcaaaagaagcaggctttcctgatggtgttgttaatattataactggttctgcaaatgctatcggtaaagaattaacagaaaatcctatcgtaagaaaaatatcttttacaggatcgacagaagttggaaaaattctattacaacaaagcgcttctacggtaaaaaaagtatcaatggaattagggggtcatgcgccatttgtagtatttgatgatgcagacattgatgaagctgttacaggagctatgcaaagtaagtttagaaattcaggccaaacctgtatttgtgctaatagaatttttgttcatgaaaaaatttacgatgattttttaaataaatttattcaggaagttaataaaataaaagttggaaatggcttagatgaaggtattgcatctggaccccttattgatcaaccatctcttatgaaagttcatgatcaggtaaaggatgctgttaatcaaggtgcaaaaattgcagttggaggtgatgtgcatcctctgggtggtaacttttatcaacctacagttctctcagatgttactaaaaaagcaaaaattacttatgaagaaacttttggccctgttgctcctttatacaaatttaaatcagatgaag

SEQ ID NO: 213841 - DNA, 940 bp, Unknown
  Bacterial polypeptide expressing nucleotide sequence isolated from the Sargasso Sea
aatgcggaacacagacaagttttacatcaacggcgaatgggttgccccgttaacaaacgaaacctgtgaagtcatcaacccggctacagaggaaccgattgcaaccatcgctctggggggtaaacaggatgttgacgcagctgtttcagcagcaaagactgcgtttacaaccttttcacaaacctcggtggaagagcggctggatcttcttggtcgcattatcgacgcatataaagcgaagatgggtgagattgcgaagacagtctcgatggagatgggggcaccaatgggcctcgccaacgctgcgcaagcgcctgctgggttaggacatttaatttttgcgcagaaggcgctcgaaaatttcgagtttacagaagacgttggcacctctcgcgtcattagagaacctattggggtttgtggattgatcactccatggaactggcccgtcaaccaaatcacagcaaaggttgggcctgccttggctgcaggctgcacaatggttctaaaaccatctgagattgccccactgaatgctttactgtttgccgaggtcatggaagaagctggtactccgccgggggttttcaatctagtcaatggcgatggcccaaccgttggtgttgcgctttcatcacatcctgatatcgacatgatgtcgttcacgggatcgacgcgtgctggaatttcggtagcgcaagaatcggctacgaccgtgaaacgagtcacgcaggagctaggcggcaagtcagcaaacataatccttgaggatgccgactttgagaaagctatcgcgagggatactttcggggtctgcatgaatacgggggcagagttgcaatgcgccaacaagaatgctggtgccagcaagcagaatggcagaggctgcagaaattgcaaaagccacggcagaacaaatcgccgtcggcgacccaaatga

SEQ ID NO: 213842 - DNA, 1414 bp, Unknown
  Bacterial polypeptide expressing nucleotide sequence isolated from the Sargasso Sea
aatggtaaatggtcagatgctgataatggagaaataaatgaaattacaaacccatccaatggaaaggtattaggtaccgttccgaattgcggggctaccgaggctaaaaaagctatagaagcagcaaataatgcgtggccaaaatggcgttctaaaacatcaaaagaacgtgcattaatattacgcaggtggtacgaactgatgatggaaaaccaggaagaccttgcacgcctaatgactgcagagcaaggtaaacctcttacagaatccatcggagaaatagcatacgcagcaagctttgtggagtggttcggagaagaagggaagcgactctatggcgatactatccctgcacatgcatcagataagcgtattgtagttatcaagcagccaattggagttacagtcgcaataactccatggaattttcctgcagcaatgatcaccaggaaagcagctcctgccttggctgcaggatgtccaatggtaatcaaaccggctcccgacacacctttttcagcttttgcactttgtgagctggctgaaagagctggcgtacctcccgggatattaagcacaattacaggagatgcagttgaaataggtggtgaatttactagcaatccaatagtaagaaaactaagtttcacaggttcaactggagtaggtaagctactaatgaaacaatgttcgggcactgtcaaaaaactcgcacttgaactgggaggtaatgcaccttttattgttttcaatgatgctgatttggaagcagcggttttaggagcattggccagcaaattcaggaatgcaggtcaaacctgtgtttgtgccaaccgaattatggcgcagaataaagtatatgacaaattttgtgatatgctggcagaagcagctaataatataaaggttgcagatggttttgaagatggatcccagcagggaccacttattaatgaggctgctgttgaaaaagttgaaagccatgttaaagatgcactttccaaaggagcaaaacttctggcgggaggacaaagacaccaacttggcggaactttttttgagcctacagtgctttcaggggtaacaaaaggaatgctggttgcaaaagaagagacatttggaccgatggctcctgtatttaaatttgaaacagaagaagaagctattgaaactgcaaatgacactgaatttggattagctgcatatttttatagcagggatataggacgtatatggagagtctctgaagcccttgaatacggaatcgttggagtaaatgagggaattatttctactgaaatggctccatttggcggagtaaaagagtccggaacagggcgtgagggttctaaatatggtattgaagactacctagaaattaagtatctttgtatgggtgggataaacaattgat

SEQ ID NO: 213843 - DNA, 584 bp, Unknown
  Bacterial polypeptide expressing nucleotide sequence isolated from the Sargasso Sea
taaagaggataaaataatatctgcagcatcatgcacaactaattgtctggcaccagtaatcagtgttcttgatgaaaaatttgaaattgaaaaaggttttatgactacaattcacgcatttactagcgatcagagaattttagataattcacacaaagatccaagaagagcaagatcagcgagtctatcaatagttcctacatcaacaggagcttcgaaagcaataggagaaataataccaaacttaaagggtaaactagaaggcgttgcgatgagggtgcccattcctaatgtttctcttgtagaattagttttttgtacaaaaaaagacattaacataaaaaaaattaatgatacttttgaacaagcatcaaaaaaaaaattaaaaaacatcttagaagttactcatgaaaaattagtatctatagattttaatcatcatcctgcttctgcaatagtagatgcttctttaacaaatgtagttggaagtaatatgggtaaaatttcagcctggtatgataatgaatggggcttttctaatagaatgtgtgatatcgctgaaactttgcataaaatctcttaat

SEQ ID NO: 213844 - DNA, 988 bp, Unknown
  Bacterial polypeptide expressing nucleotide sequence isolated from the Sargasso Sea
tatgtatagtaaatttgggcagttcattgatggtaagtggcaacaagcggaaaaaaaagaaacttacgatgttataaatcctgctacggaagaaattattggccaagcgtctaaagcgtcttcagcagatgttcaaaaagctcttaaatctgcagagaaaggtttggaagtttggaaaaacactttaccttggcagagatcatatattattagaaaaattgctgatcttttaagaaaaaaacaagatgttttagcaaaatggttaacgattgaagttggaaaacctttagcagagggaattggcgaaactggtggggctgctgatatttttgagtggaatgctgaagaaacaaaaagaatttatggacaaacagtcgaaagtcgatttccagatacgagagttcatgtttattatcagccagttggagttgtagcagctttagtgccatggaattttcctttaattctagcagcaagaaaaatttcaacagcattagctgccggatgttcagtaatttgtaagcctgatgtaattactccaggaacagtaatggagttggtagatatttgtaaagaagcaggagtccctcctggagttgtaaacttattatcaggagatcctgaaagtatttcaaatgagttgttagagtctgatattattaaaaaagtttcaattactggatcaacaagagtaggtaaattaatcttaaaaaaggccgcagataaagttcaaagagtcacaatggagcttagtggacactcaccttttatagtttttgatgatgttgatataaataaagttgcagatatggcaattactgcaaaatttagaaataatggtcaagtttgtatttcacctaacagattttatatacaagaaaataaaaaagacgaattcattaatgcgtttattgaaagaacaaaaaaattaaaaattggaaatggtttagatgagggagttcaattaggtcctctaacaactgcaaaa

SEQ ID NO: 213845 - DNA, 921 bp, Unknown
  Bacterial polypeptide expressing nucleotide sequence isolated from the Sargasso Sea
aatgaattcaatagagcattttattaacggtaaaattgtaaaaggtttatcaaaaagaacagcaaaagttttcaatcctgcaactggagatgtaagttcaaatgttaatcttgcaaatactgaagatatagataaagcagtaaatgctgcaaaaaaagcttttccagcatggtctgaaaaaacaccattatttagggctagaattctttttaaatttaaagagttaattgaaaaaaactacgacgaacttacaaaaattatcgtttccgaacatggaaaagtttatgaggatgctaaaggctctctaaccagaggcttagaggttgtagagtttgcttgtggcataccacaattactcaaaggtgaatttactgagaacgttggttccaatgtagacagctggtcgatgagacaaccaattggagtttgtgcaggtataacaccttttaactttcctgcaatggttcctatgtggatgtttccaatagctattgcctgcggaaatacatttgttttaaaaccatccgaaaaagatccatcttgttcaataaaattagctgaattattttcagaagcgggacttcctgctggagtgttcaatgtagtaaatggagacaaagaggcagtagatgcaataattaacaataaagatatttctgcagtaagttttgttggctcaacgcctattgctaaatatatttatgaaaattgtgctaaaaaagaaaaaagagttcaggcattaggcggagcaaaaaatcactgtgtaataatgccagattgtgatttggaccaagctgtcaatggtttgattggagcagcatatggatctgccggtgaaagatgtatggcccaatcggttgctgttgctgtaggaaaaattgctgaccctcttgtaaaaaatttatcaaaaaaagtcgagtc

SEQ ID NO: 213846 - DNA, 1480 bp, Unknown
  Bacterial polypeptide expressing nucleotide sequence isolated from the Sargasso Sea
atgactgaaataaaaaaatatcagatgtatatcaacaatgagtttgttgaagccgaggatggtaagcgatttgatagcttgaatcctgaaaataatcagccttgggcatcttttcctgaagcaaatactaatgatgtgaacaaggctgttcaagcagcaaaggatgcatttcaaggatggtcaaaattagaggtcaaagaacgagcacaatatctaagatcaattggagatttattaaaagaaaacgctgagcttctaggtagaactgaaacaatagatagtggaaagctattaaaagagaccaaatttgcaactgaatatgtaagagagtacttctatttttatgcagatctagctgaaaaaatggaaaatgaatttccaattccaaagatcgataagcccgatatggatgtggtggaagtgagagaacctataggggttgttgcctgtattattccatggaatcaacaaatgtttctaatgacaacaaaacttgctcctgctttagcagctggaaatacaattgtgataaagtcttctgaatttgcacctgcaccattaattgagtttgcaaggttactcgatagtattggattacctaaaggagttgtaaatattattagtggtggaatagaggcaggggaagctttaacttctcacaaatcaattggaaagattctatttactggcggatcagtgacaggatcgcatgttattaaaaattcatcacataactttgcacagctgactttagaacttggaggcaagtccccagttattgtttttgatgattgtgatcaagataatgctttaaataatatcatgacagcaattttttctggcaatggttgtagttgtattgcaggatctttattaatacttaatgaaaatatttacgataccttcctggaaaaattagtgagtagagcaaaagatattaaacttggctctccattagatgatcaatctcagatgggtccattaaataatttaaatcaagtagagttcattgaaaaaaatatccaagcaacaatcaagcaaggtggaaaagtattatgtggaggcgaaagaccaaaagatttaagtgatggatgttattttctcccaacagttatcgaatgccctaacagaaatgtagatactgcaaaaatagaactatttggtcccgtattatctgtggttaaatttaaaactgaagaagaagcaattcaaatcgctaatgataatgattacggattatcctcaggcgtttttacagaagatgcagagcgttgtgatcgagttagcaggtctctagaagcaggtatttgttttaaaaattgttatagatttatatcttatgcagcaagctttggtggacgtaagcaaagtggctatggtcgggaaagtggatatgatgctatctctgcgatgcaaatcaagaaaacaatatggacttctaattctagagttacggtagaccctttcaagattaggtaat

SEQ ID NO: 213847 - DNA, 1444 bp, Unknown
  Bacterial polypeptide expressing nucleotide sequence isolated from the Sargasso Sea
atgtatagtaaatttggacagttcattgatggtaaatggcaagaagcagaaaaaaaagaaacttacgaagtaattaatcctgcaactgaagaaattattggtaaagcgtcaaaggcatcaaagatagatgttcagaaagctttgaaatcagcagagaaaggcttagaagtttggaaaaatacttcaccatggaaaagatcttatgttatcagaaaaatagctgatttaatgagacaaaaacaagatgtgttagcaaaatggcttaccttagaagttggtaaaccaatagccgagggaattggagaaacaggtggagcagcagatatattcgaatggaatgctgaggaaacaaaaagaatttatggtcagacagtgcaaagtagatttcctgaaacaagggtacacatttattatcagccagttggagtagtggcagcgttagttccatggaattttccattagttttagcagctagaaaaatatcaactgcattagctgctggatgctctgtaatttgtaaaccagatgttattacacctggtactgttatggaattgattgatatatgtaaggaagctggagttcctccaggtgttgtaaatcttttatcaggtgaccctgctgaaatatcaaatgaattattagagtcagatatagttaaaaaggtttctattacaggatctacaagagtaggaaaactaatattgaaaaaagctgcagataaagttcaaagagttactatggagctaagtggtcactctccttttattgtttttgatgatgtagatataaataaagttgctgacatggcaattacagcaaaattcagaaataatggacaagtatgtatttctccgaatagattttatattcaggaaaaaaagaaagatgaattcataaaagcttttatagataaaactaaaaaacttaaaataggaaatggattagatcaagatgttcagctaggtcctttaactacagctaaaagattatcagaggttgaggctttagttgaaaaaacaaagaaagaaggtgcaaaagttttattagggggaaaaaggccgtctggatttaataaaggatatttttacgaaccaacaatttttgataatgtaaaagataattttacaattatgaaagaagaaccatttggaccgctagttccaatgttatcatttaaaacatttgatgaggtaattgagagagctaataataatgatctcggactttgtagttatatatatacaaattctatggatcaggctcatagagcatctgaacttatggaaactggaacagttgcagtgaatacacctgctgtagcagtggcagaagcaccttttggtgggatcaagcaaaccggttatggacgtgaaggtgggtcgatggctattaaagattatctaaatattaaatatactcatttgggattgaaaatataat

SEQ ID NO: 213848 - DNA, 1432 bp, Unknown
  Bacterial polypeptide expressing nucleotide sequence isolated from the Sargasso Sea
aatgttagataaaagaaaattttatattaaaggtgaatggataacaccccataaaccaaatgatttaaaagttataaatccttcaaacgaagatccctttgctgtaatatcgttaggatcaaaagaagatgtaaataaagcagttgatgcagcaaaaagtgcttttaaagattggaaagatactaataaagaattcagagtagatttactagaaaaacttttacaaatttataaaaaaagatttgatgaaatggcaaaggctatttctgatgaaatgggtgcacctattgattgggcatctgaagttcaaacagcttctggtcaaactcatttagaagattttatttttagactaaaagaatataaatttgaaaaaaattttaatgaaaaatcaaataattatatttgttgtgagccaattggtgtttgtggattaatcaccccttggaattggccaataaaccaaattgctttaaaggttgttccagctcttgcaacaggttgtacgatgattttaaagccttctgaaatttctcctttatcaggaatgatttttgctgaaatgattcatgaagcaggatttccaaaaggagtttttaacttagtaaatggagacggaaatggagttggaactattctttcatcacataaagatattgatatgatatcttttacaggttcaacaagagcaggaagattaatttcaaaaaattctgctgacacgattaaaagagtatgtttagaacttggcggtaaaggaggaaacattgtatttgaagatgcttacccagaagctgtaagggatggaataagaaatgttatgagtaattcaggccaatcatgtgatgccccaacaagaatgttggttcaaaaatcaatttatagtaaagcagtaaatgaggctgttgatgaagcaaataaaatacatgtcgatttggcttctaaaaagggaaatcatattggtccagtggtctcaaaagtacagtatgataaaattattaatttaattaaaagtggaattgaagaaggtgccactttagcagctggaggtcctgaaatgcccgaaaatcttaagtcaggatattttataaaaccaactatttttactgatgttacaaacgatatgaaaatagccaaagaagaaatttttggacctgttctttctataataccttttgaaacagaagatgaagcagtaaatattgttaatgatacgtcttatggtcttggtaattatcttcaaactagtgataaagaaagagctaaaagagtttcaaaaaaattaagatctggttgtgtttatattaacggtaatagtgctgaccctggaactccttttggtggctatagacaatccggaaatggaagagaaggaggtatttggggtttagaggaatatcttgaggttaaaactgtaacaggttggaagtaa

SEQ ID NO: 213849 - DNA, 1495 bp, Unknown
  Bacterial polypeptide expressing nucleotide sequence isolated from the Sargasso Sea
gatgaatttaattcaacattttattgatggaaaagtttatgctggttcgtcaaataaaaaaggtaaaatatttaatccagcaacaggaaaacaggaatccgaggttatattaggttcaaaatcagatttggatcttgctgttgaaaaggcaaaaatagcatttgaaacttggtctaatgtaccagctatccaaagagcaagaattatatttaaatttaaagagttaattgaaaagaattcagatgagctaacaaaactaattgtttcagaacatggtaaggtctatgaagatgcaaaaggttcattaacaagaggattagaagttgttgaatttgcctgcggtataccacaaatgctaaaaggtgaatttacagaaaatgttggaacaaatatagatagttggtcaactagacaaccactaggagtttgcgcaggtataacgccatttaattttcctgctatggtacctatgtggatgtttccaatggcaatagcatgtggaaatacttttgtgttaaaaccttctgaaaaggatccctcttgtgctatgaaattagctcatttatttaaagaagctggtttgccagatggtgtttttaatatcgtaaatggagataaagaagtggtggatgccattttacaaaataaagatattcctgcagtaagttttgttggttcaactccaattgcaaaatatatttatgaaaatgcagcaaaaaatgaaaaaagagttcaagcattaggaggagctaaaaatcactgtgtagtaatgccagattgtgatttagatcaagctgttaatggattaatgggggctgcgtatgggtctgcaggtgagaggtgtatggctcaatcagtagctgttgcggtaggaaatattggagatgatttagtcaatcaaatatcaaaaaaagttgaaaatcttaaagtaggtccaggaatggataaaacttctgagatgggaccgttggtaactaaagagcatttagaaagagtcagaggctatgttgatttaggagtaaaagaaggtgcaaaattagttgtagatggaagagatattaaactgcaaggttatgaaaatggttattatattggtggttgtttatttgatcatgttacaaaagatatgagaatatataaggaagaaatttttgggccagttttatctgttgttagagttgataattttgatgaggctcttcaactagtaaatgatcatgagtttggaaatgggacaagtatatatacaagagatggagatgcaggtagaacttttgcaaataaaattaaagtaggaatggttgggataaatataccaattccagtaccagtagcttatcacagctttggaggatggaagagatctttatttggagaccaacatatgcatggcccagaaggggtaaggttttatacaaaattaaaaacaattacttcaaggtggccatctggtgttaggtcaaatccagaatttatcatgccagtaatgaaataa

SEQ ID NO: 213850 - DNA, 1492 bp, Unknown
  Bacterial polypeptide expressing nucleotide sequence isolated from the Sargasso Sea
tatgacatcaattattaatcattggattaacggtgaattacaaccatcagcatctgaaagatatggtgatgtattcaatcctgcaacaggagaagtcagcgcatcggtctcaatgggtaattctgatgatctagaaaaagcagttgaatctgcttcaaaagcatttgagacttggtcacaaacctctgtgacaaaacgtgctcagattttcttcaaatacaaagagttacttgaatcaaatagagaagagctaatagatctcattacggcagaacatggaaaagttgctgccgatgctgcaggatctttgcagaggggcattgaagtcgttgattttgtatgtggcatccctcatttgctaaaaggcgaattcagtgagcaagttgggacgggcattgattgctattctacgcgacagccaatcggggtttgttctggtgtaacaccatttaattttccagcaatggtaccgatgtggatgtttccgattgccattgcttgtgggaatacgtttatcttaaaaccttcagaaaaggatccatcatgtgcaatgaaacttgctgaacttctgcaagaggctggattacccaagggggtcttaaatgtattaaatggcgataaggaaatagtcgatgccattttagatcacccttcaattaagacatttagttttgttggttcaactcctgtagcccaatatgtgcatgagaaagcatcagccaatggaaagagagttcaagcattgggaggagcaaagaatcatgcaattgttcttgaggatgcgtcgcttgatcaaactgcgaatgcgatcattggagcggcatatggctcagcaggagaaagatgcatggcaatttcagttgtggtggctgtagagagtgttgctgatgagctttgtggtcttttaaccaaaaaagctgagtcactgagaataggtccaggaaatgaacctgaaaatgaaatgggaccgctcataacagatgatcataaaaataaagtcattgattatattcaacaaggtgaagacgctggagcaactatcttattggatggtcgtgatcatgaggtcacaagcaaacccggatttttcctaggtcccacactctttgatcatgtcaatccagagatgagcatctataaggaagaaatatttggtccggttctagttgtgctcagagtgaaagattttaatgctgccattaaattagcgaatgagcaccaatttggaaacggagtagccatttttaccaatcaaggctcaaaggctagagaatttgttcactcagtcgaggttggaatggttggaatcaatgtcgcaatacctgtgccactgtctttttacacatttggtggatggaaagattcaatttttggttcatccaatatttatgggatggacgggattaggttttttacaagaacgaaaacagttacagccagatgggttgatgatgatggatcaattaatctctcaatgccaacagttaagtag

SEQ ID NO: 213851 - DNA, 949 bp, Unknown
  Bacterial polypeptide expressing nucleotide sequence isolated from the Sargasso Sea
ggtaattcagttatattaaaaccagctgaacaatcccccatgagtgctataaaaattggagctttgctgtcagaggctggtctaccggatggagtattctctgtacttccaggtgatggtccaattacaggtaaatcattatgtctgcataatgatattgattgtgttgcttttactggatcaggtgaggtaggaaaactagtcttacaatattctggtcagtctaatatgaaaagagttcaattagagtgtggggggaaatctccaaatattatttttgctgactgtcccgatcttgatgctgcggcagaagcttcagcatatgctatctttggtaatcagggggaagtatgctctgcaggttcaagacttattgtgcagaaagaaatagaggacgagtttgtagataaagttgctaagttaagtaaaaatatgcatccagctgatccttttgatccagaatcatttgctggggcaatagtaaatactgaacagttagataaaattaataaatatgtaaatattggcaaggaagagggagctagtgttaaagttggaggcaatattaccatgaaagaaacaggtggttgttattttgagcctacaatttttaaaaatgtaaaaaacaatatgaaaattgctcaagaagaaatttttggacctgttcttacatctttaactttttctaattttcaagaagctatatcaatcgctaatgatacagaatatggacttgcggcaggggtttggacgaaggacatcaacaaagccattaaagcatctagagaaatacgagcaggaacagtttatataaataattatgaagaaggagttgattccacaattccacttggtggatataaacaatctggtattggtagagataatggatatcaagcgttggaaaattatgttcaagttaaatctacttggattaaaattacttaaa

SEQ ID NO: 213852 - DNA, 964 bp, Unknown
  Bacterial polypeptide expressing nucleotide sequence isolated from the Sargasso Sea
tatggttgttagatcaattgtcgagagtaaaaataaaaatttaaaaattaatcatataaacaacaggtcaaattcagaaactacatctaaattaatcaaatatgattctatacatggaaaattaaatgctgatttagattatgatccaaatcatttaataattaataaaaataaaattacattttctcaagaaacaaaaattgaagacataaattggaaaaaacatgatgttgattatgttttcgaatgtactggaaaatttaattcgaaagaaaaacttcttgctcatatagaaaatggtgcaaaaaaggtgatcgtttctgctccatgtaaaaatgctgataaaacaatagtatttggtgttaatgaaaatataattactaaagaggataaaataatatctgcagcttcgtgcacaactaattgtctagcaccagtaaccagtgttcttgatgaaaaatttgaaattgaaaaaggttttatgactacaattcatgcgtttactagcgatcagagaattttagataattcacacaatgatccaagaagagcaagatcagcgagtcaatcaatagttcctacctcgactggagcttcgaaagcaataggagaaataataccaagcctcaagggaaaactagaaggtattgcgatgagggtgcctactcctaatgtttctcttattgaattaattttttgtacaaaaaaagatattaatataaaaaaaattaatgatgcctttgaacaagcatcaaaaaataaattaaaaaacatcttagaggttactcatgaaaaattagtatctatagattttaatcatcatcctgcttccgcaatagtagatgcttctttaacaaatgtagttggaagtaatatgggtaaaatatcagcatggtatgataatgaatggggattttcaaatagaatgtgtgatattgctaaaactttgcataaaatctcttaa

SEQ ID NO: 213853 - DNA, 976 bp, Unknown
  Bacterial polypeptide expressing nucleotide sequence isolated from the Sargasso Sea
tatgaaaattaaaatcggtatcaatggtatgggtagaataggaagaatgatagttagatctattgttgaaaatgattatagcaatatagagattaaacacattaataatagaacaaactctgaaagatgttcaactctattaaaatatgactcaattcatggaaaatttgatgcagacataagtttcgatgagaaacatctaattataaataaaaataaaatttctttcggtcaagaaacggatttggaaaacattaattggaaaaaacatgatgtagattatgtttttgaatgtactgggaaatttaattctaaggataaattaatatctcatttaaagaatggtgcaaaaaaagttattgtttcagctccatgcaaagatgcagataagacaattgtatacggggtaaatgaaacagaattaaaaaatgatgataaaattatttcagctgcatcctgtacaactaattgcttagcaccagtggctcatgtactgaatgaaaattttgaaattgaaaaaggttttatgacaacaattcacgcttttacgagtgatcagagaattcttgataattctcataaagatccgagaagagctagatctgcaagtcaatctattgtaccaacctctactggtgcatcaaaagcgattggtgaaattattccttcgctaaaaggaaaattagaaggtgtagcgatgagagtacccactccaaatgtttctttgattgagcttattttttgtactaagaaagatttaagtattgaaaaaataaattcagcatttcaaaactttagcaaaaaaaataaggtgcttgaaatcacaaaagaaaaacttgtatctatagactttaatcataattcatcttcttcgatagtagacgcaagtttaacaaatgtagtaggaaaaaatatgggtaaaatttcagcctggtacgataatgaatggggtttttcaatagaatgtgtgacctag

SEQ ID NO: 213854 - DNA, 1450 bp, Unknown
  Bacterial polypeptide expressing nucleotide sequence isolated from the Sargasso Sea
ctgcctgaagattcttttggtgactggaagtggagagaggcacttgcagagctaatggttccgttaataggttctctttatagaaatggtataaatataatgatttatggtaagtcattagtaaatgagtcaccagtttcaataatgaaagcacatagatttgtcagacaagtcgacaataacgaacttagtgaatcagaaacatttccaattataaaatatataagcactttagatcttaaagattgtgaaattgatattggtgagatagcagttaaatgtccattttttaatgaaataaaagacgatcaatcaaaaatacctgattatataaattctgaattaaattcagtaattaataaaaaatcaaataggccaaaagaacctaagaatattgttttatatggtttcggaagaattggaagacttgtggctagaatgatgacccaaacaacaggaccaggaaattattttatacttaaagcaattgttataagaaaaggttcagatgatgacatttttaaaagagctagtttattagctagagattcagttcatgggtcatttgatgggacagttcgagttgatgaagagaattcaaacttagttattaatggtaatgttgtaaatgttatatatgcgtcagctccagaagatgtaaattattcagattatgccattaaagatccaatagtaattgataataccggagtatggagaaatgaagaaggattatctaaacatataaaatcaggagctagcaaggttatattaactgcacctgctaaaggagatttaaagaatgttgtccatggtataaatgatgatattttggatgctggagattctataatttcagcagcatcatgtaccacaaacgcaattgttcctatcctaaaggttattaatgatgaatatggtattgaaagtggccatattgaaactgtacatgcatatactaatgaccaaaatttaattgataattttcataaaggtgaccgtagaggtagaggcgcaccacttaatatggttattacaacaacaggggctgttaaagcagtatccaaagctttacctgaattagaaggcaagcttacaggcaatgcaatacgtgtcccgacgccaaatgttagtttagcaatcctatcgttatcacttgataaaagtattacaactgatgtagtgaacgaatatctaagaggtattgcgtttcattcaaaatatagagaaattattggctttgttaattcaccagaaattgtttcaacagatttttactcaagttcgtttgcatctgttattgactcacaagctactattgtaagcgataagagacttactttatattgctggtatgacaatgaatatggctatacaaaacaagttataggattaactaaaaaagttgctaatattgaccttccacgattgcctacaccaatttcttaaa

SEQ ID NO: 213855 - DNA, 657 bp, Unknown
  Bacterial polypeptide expressing nucleotide sequence isolated from the Sargasso Sea
aatggattataaaaattatataaatggtaaatgggttgaagcaaagtctgggaaaacatttccagtggaaaatccatataatcaacaaattatatcacatgttcctgatagtgataagcatgatgttaatgaagctgtttccgcagcaaatacagcatacaacgattggcataaaatgagtgcatcagagagaagagacctgatgaaagaattggctaataaatcaagagagaatgccaatgaattagcaaaaacgatttcaatggaaatgggtaagcctttctctgaggcattagatgagattgatacagtcgcagattttttagattattatggagaactagccagagatgaagttggaagaatagtagccccagtggataggaatacaatgtctctcgttcggtatgaatcaataggtgtgattggttgtatcatcccctggaactatcctcttgcgctaatgggttggaaattagcgcctgctttagcggctgggaatacagtggttatgaaaccatctgaaataactccactgtcgatattgcactggtgtaatgttgttgaatctgttctccccagtggcgtaatcaatgtaattaccggttttggccaatctgcgggagaaccaattgtaaaaacacccggatgtgccgg

SEQ ID NO: 213856 - DNA, 1173 bp, Unknown
  Bacterial polypeptide expressing nucleotide sequence isolated from the Sargasso Sea
catgaatttaatacagcattttgttggtggtgaactattcctaggttcatcaaataaaaaaggtaaagtttttaatcctgccacaggggaacaagaatccgaagtattattagctaacaaatctgatctaaataaagcagttgatatcgcaaaaaaagcatttgagtcgtggtctttaaaaccagctcttcaaagagctagagttatgtttaaatttaaagaattaatagaaaaaaactcagaggagcttaccaagctgatagtatctgagcatggaaaggtttatgaagatgcaaaaggatctctaacaaggggattagaagttgtcgaatttgcatgtggtattccacaagttcttaagggagaattttcagaaaatgttggtacaaatgttgatagttggtccatgcgtcaaccattaggagttgtcgcgggaataactccttttaattttccagctatggtaccaatgtggatgtttccaattgcaattgcatgtggaaacacttttattttaaaaccttcagaaaaagatccgtcttgttcaataaaattggcaaaactgcttaaagatgcaggtctcccagatggagtgtttaatgttgttaatggagataaggaagctgtagatgcaattttagaaaataaagaaattcaagctgtaagttttgttggttcaacaaatattgcaaaatatatttatgaaaattcagcaaagaatgagaagagagttcaagctttaggaggggcaaaaaatcatttagttgttatgcctgattgcgatattgatggagcagttaatggattgatgggggcagcatatggatcggctggcgaaagatgtatggcgcaatctgttgcagtagccgtaggaaatattggagatgaacttgtttctcgcttatcaaaaaaagtggagttattaaaagttggaccgggtatggataaaaattcggagatgggaccactggtaacaaaagaacacttagaaaaagtaaaaggatatgtagatttgggtgtaaaagaaggagctaatctagttgttgatggaagaaatttaaaacttcaaggttatgaaaatggtttttttataggtggttgcctttttgataatgttaaaaaagatatgagaatttataaagaggaaatatttggtcctgtattgtcagttgt

SEQ ID NO: 213857 - DNA, 932 bp, Unknown
  Bacterial polypeptide expressing nucleotide sequence isolated from the Sargasso Sea
gtgtacgatgatacttaaaccatctgaaatagctcctatctctgggatgttgtttgctgaaatgattgatgaagttggatttcctgatggtgtatttaatttagtcaatggtgatggcgcaggtgttggaacacaaatatcatgtcatcctgatattgatatggtttcttttacagggtcaactcgtgctggaagacttatttcaaaaaatgcagcagaaacaattaaaagagtttgtttagaacttggaggcaaaggtggaaacatagttttcgcagatagttacaaaaatgctgttcgagatagcataagaaatgttatgagtaattctggtcaatcttgtgatgcaccaacaagaatgttagttgaaaaatctatttacaaaagagcagttgatgaagcagttgatgaagcaaataaaattaatgtagatcaagcctcaaagaaaggggatcacataggacctgtaatatctaaaactcaatatgacaagatcatcaatttaattgaaagtggaatttctgaaggtgcaacgttagcagccggtggtccagagttacctaacggattaaataaaggttattttataaaaccaacaatttttacaaatgttacaaacgacatgagaatagctaaagaagaaatctttggtcctgtcctttctattattccgtttgaaactgaagatgaagcagtaaacattgttaatgatacttcttatggtttggggaattatttacagacagaagatagagaaaaagcacatagagttgctaaaaaattaagatctggttgtgtttatattaatggcaatgcagctgatgctggaaccccttttggaggttacagacaatcaggaaatggtagagagggcggtgtttggggtcttgatgagtatctagaagttaaaactgttaccggatggaaataaa

SEQ ID NO: 213858 - DNA, 1444 bp, Unknown
  Bacterial polypeptide expressing nucleotide sequence isolated from the Sargasso Sea
tatgtatagtaaatttggacagttcattgatggtaaatggcaacaggcagaaaaaaaggaaacttacgaagtaatcaatcctgctactgaggaaataattgggaaagcttcaaaagcttcgtcattagatgtacagaaagctttaaaatctgcagagaaaggattggaagtttggaaaaatacttctccatggaaaagatcatatattattagaaaaatagcagatttaatgagagaaaaacaagatgtgttagcaaaatggttaacaatagaagtaggtaaacctttggctgaaggaattggagaaacaggtggtgccgcagatatatttgaatggaacgcagaagaaacaaaaagaatttatggacaaacagttcaaagtaggtttccagaaactagggttcatgtttattatcaaccagtaggagtagtcgcagcattagtaccttggaattttccattagttttagcagctagaaaaatatctactgctttagcagctggatgttctgtgatttgtaaaccagatgtaataacccctggaacagttatggaattagtagatatttgcaaagaggctggcgttccgccaggtgtagtaaatcttttgtcaggagaccctgagagcatttcaaacgaactattagaatctgatatcattaaaaaagtttcaataactggatctacaagagtaggtaaattaatattgaaaaaagcagcagataaagttcaaagagttacaatggaacttagtggacattcaccttttatagtttttgatgatgttgatattaataaagttgctgacatggcaattactgcaaaatttagaaataatggacaagtgtgtatttcaccaaacagattttatattcaggaaaaaaggaaagaagaatttatagaagcattcatagataaaactaaaaaacttaaaattggcaacggattagatgaagatgttcaattaggtcctttaactactgcaaaaagattatcagaggttgaagcattagtagaaataacaaaaaaagaaggtgccaaagtgttacttggtggaaaaagaccatctggatttaataaaggatatttttatgaaccaactatatttgatgatgttaaagataattttacaattatgaaagaggaaccatttggaccattagttccggtgttatcttttaaatcatttgaagaggtagttgacagagcaaacaataatgaccttggtttatgtagctatatatatacaaattcaatggaccaagctaatagagcatcagaattaatggaaactggaactgttgcagtaaatacagctgctgtagcagttgcagaggcaccttttggtggtatcaaacaaactggatatggcagagaaggtggttcttctgcaataaaagattacttaaatgtaaaatatacacatctaggtttaaaaatataa

SEQ ID NO: 213859 - DNA, 1342 bp, Unknown
  Bacterial polypeptide expressing nucleotide sequence isolated from the Sargasso Sea
atgagtaatgatttaaatttttatatagatggagaatgggtaaaatcagattcaaatgagttaattgatgtaattaatcctgcaaatgaagaagttattggtcaggttactgcagggactaaagatgatattgataatgctgttaatgcagccagcaaagcatttcaaaccttttctaaatcttcacagaaagagaggattgaactcttaaagagtattattcaagaatatgagaatagatataaagattttgtagaagtaataacaaaagagatgggtgcaccaaattggttatcagaaagagcacaagccaatacagggttaattaattttaaagaaacattagaagcccttgaggagtatgagtttcaaaaagaagagggtggatatatattaagaagagagccaataggagtgataggtatgataactccatggaattggccgatgaatcagattaccacaaaagtatctgcagccattgcttcaggctgcactatgattttaaagccgagtgaaatctcaccttattgctccatgttgcttgcagaggttatgcatgatgctggattaccaaaaggagtatttaatttagttaatgggtatggtcctgttgtgggcgctgctttatcagaacatgaaaaagtagatatgatgtcattcactggttcaactagagctggaattgcggttgctcaagcatcagctgcaactgttaaaagagtacagcaagagttaggcggaaaatcagcaaatattattttggatgatgtcgcagacttagaaaaatcagttaaaggtggtgctggtcattgctttttaaattctgggcagtcatgcaatgcaccaactagaatgctagtttcttcaaaaaattatgacaaagctgtagaagttgctgtcgctactgcaaatagcacaacagttggtgatccaaatggggagtttagaataggaccaatttcaaataaaacccaatatgaaaaaattattaagttaattgagattggagttaaagaaggtgcaaaactcgttgcaggaggccctgaaaaacctgatggttgtgagaaaggttattatgtaaagccaacggtatttgctgatgtaactaatgatatgacaatagcaaaagaagaaatttttggcccagttttatgtatgatgaaatatgaaactgaagatgaagcaattgaaatagcaaatgatactgaatatgggcttgcaggttatgtccaaggcgagttatctcatgcaatagaagttggaaatcaaatacgtgcaggacagataactatcaatgggggcgctagagggaatgctgctccatttggaggttataaat

SEQ ID NO: 213860 - DNA, 631 bp, Unknown
  Bacterial polypeptide expressing nucleotide sequence isolated from the Sargasso Sea
atgtacgaaaagtttggacaattcattgatggcaattggtcgccctcagaaaataaagaaacatacgaagtaattaatcctgcaactgaagaagttttaggtcatgcttcaaaagcttcttctgctgatgtccaacgtgcattacagtcagctgaacaaggattaaaagtttggagaaaaattccaccttggcagaggtcatatgttttgagaaagattgctgacaaaataagagaaaaaaaagatcttcttgcaaaatggatgactttagaaaatggaaaacctttagcagaaggtattggagagacaaatggagcagcagatatttttgaatggaatgcagaagaaacaaaaagaatttttggtcaaacaatagaaagtaggtttgaagatacaagagttcatgtgtattaccaaccagttggagttgttgctgcattatcaccttggaatttccctcttattttagctgcaagaaaaatttctacagctcttgcagcaggctgttcagtaataattaaacctgacactattacacctggcatagtcatggaattagtagatatttgtagagaatgtggcgttccacctggagtaattaatttgttatcaggcgacccaccagtatagc

SEQ ID NO: 213861 - DNA, 646 bp, Unknown
  Bacterial polypeptide expressing nucleotide sequence isolated from the Sargasso Sea
tatgagctcaggtaacaaatataaagtgatagccaataaacttaaatttgaaggaagagcattcattaatggtaaatatgtaaatgctatagatggtaaaaagtttgaaacaattaatcctgcaactggaaaaaaactatgtgttgttgcaaaatgtaatcataaagatgttgacttagcagttaaagtttcaaggaaagcttttaatagtggagtttggtctagaagttcacctgaacatagaaaagaagttttattaaaatttgctgaattgcttagaaaacatggtgatgaaaattcagttttagaatgtatagatacaggtaaacttattacagattgtataaatgaagttgcaaatgatgcgccaatgcatttccagtggtatggagaattaattgataaagtatttggaaaaattggtccaacggaaccatccattactagtttaattgttaaagaaccaataggagttattgctggaattgttccttggaactttcctttaatgatggcggtatggaaaatggcgccagctcttgcagctggttgttcagtaataattaagccagcagaagatacacctcttacagcgattagagttgctcaaatggaaaagaggctggaataccagatgggagtttga

SEQ ID NO: 213862 - DNA, 1378 bp, Unknown
  Bacterial polypeptide expressing nucleotide sequence isolated from the Sargasso Sea
atgaatttaattgaacattatattgatggaaaatcttattctggttcttctgataaaaaaggcaaaatctttaatcctgcaactggcaaacaagaatctgaagtaatactaggatcaaaagctgatttatacttagcagtagaaaaggcaaagaaagcttttgaaagttggtctaatgtaacgcctctacaaagagcaagaataatttttaaatttaaggaactaattgagaaaaattctgatgaactaaccaagctgattgttaatgagcatggaaaagtttatgaagatgctaaaggttctttaacaagaggtttggaagttgttgaatttgcttgtggtataccacaaatgcttaaaggtgagtttacagaaaatgttggtacaaatatagacagttggtccacaagacaaccattaggagtttgtgcaggtattaccccatttaattttcctgcaatggtaccaatgtggatgtttccaatggctattgcttgtggaaatacatttgttttaaaaccatcagaaaaagatccttcttgtgcaatgatgttggcaaaattgttcaaagaagcaggtttacctgatggagtttttaatattgtaaatggagataaagaagttgttgatgctattttagaaaataaagatattccagctgtaagttttgttggttcaacaccaatagcaaaatatatttatgaaaatgcagcaaaaaatgaaaaaagagttcaagctttaggaggagctaaaaatcactgcgtagtaatgcctgattgtgatttggaccaagctgtaaatggattaatgggagctgcatatggatctgctggagaaagatgtatggctcaatcagtagcagttgctgtaggtaatattggtgatgaattagtaaatcaaatgtcaaaaaaagttgaggcactcaaagtaggacctggtatggataaatcatctgaaatgggacctttagtaactaaagaacatttagaaaaagtaaaaggatatgttgatttaggagtaaaagaaggcgcaaaacttgttgtagatggtagagatattaatcttcaaggttatgagaatggttattatattggaggatgtttatttgatcatgtcaaaaaagatatgagaatatataaagaagaaatttttggacctgttttatctgtagtcagagttaaaaattttgatgaagcacttcagcttataaatgaacacgagtttggaaacggaacaagtatttatacaagagatggagacgtaggaagaactttcgcaaataaaataaaagttggaatggtaggtattaacatacctataccagtaccggttgcttatcacagtttggaggctgaagagatcattattggagaccagc

SEQ ID NO: 213863 - DNA, 1492 bp, Unknown
  Bacterial polypeptide expressing nucleotide sequence isolated from the Sargasso Sea
atgtctgcaaaaacaaaagctgaatgggaaaaattaagcttaaacttgaactttcataatgaggcttttattgatggtaaatttgttaaagcaaagtcagagaagacgtttgactgttttaatccctcaaatggaaagcttttaacaaaagtctcatcatgtgatgaaaccgatgtagataatgctgtgaaatcttgtagaaaagcatttgataatggtcactggtcaagaatgtcaccctctgaaagaaaaaagatacttttaaaactttctgatctcattttaaaaaatcataatgaacttgctttgttagattctatggatatgggcaaaactgtctctgatgcttttacttatgacattccaggagctgcagaccttttaagttggaatgctgaagcaattgataaaattatggatgagatcgcacctacagagaagaataatttggctatgattagaagagtgcctttaggtgtcgttggagctgttgtaccatggaattatccattggatatggcaatgtggaaatgtgctcctgctcttgcaacaggtaactcaattattcttaaacctgccgaacaatcgcccttaagcgctttaagatttgcggaattagccgctgaagctggtttacctgatggtgttttaaatgttgtacccggctatggagaaacagctggaaaagcaattggcatgcataatgatatagattgtgtttcatttacaggttcaacagaagttggaaaatacttttttgaatattctgctaaatcaaatatgaaattaatttggacagaatgtggaggtaagagtccaaatataatctttgaaaaatccaaaaaattagatttagccgctcagttatccgcaaacggaggattttttaatcaaggtgaagtatgcagtgccaatagtagagttttagttcatgaaaatgttttaaatgagtttatagatttacttaaaaaggaagccagcaattgggtaacaggtgatccttttgacccaaattcaaatattggttgtcttgtttcagaagatcacgctgcaaaagttaaaaattttattaataatgctaaaaatgaaactgaattattatttgaaggtaagatagaaagtaaagaaaatgtcgggacatttgtagcgccaacaatctttaaggatgacactgggaaaaaagaaatatcgactgatgaagttttcggacctgtgctctcaataattccattttcttcagatgaagaagcaattaaaattgctcatgactcaaagtatgcactggcagcttcaatatggactgatgacttaagtcaagcacacgacatatcagataaattacatgtaggcactgtttcagttaatacagttgatgcattcagtacgatgacaccttttggtggttttaaacaatctggtacaggtaatgacttatctattcacgcttttgataaatacacaggactaaaaacagtttggattaaatattaag

SEQ ID NO: 213864 - DNA, 1009 bp, Unknown
  Bacterial polypeptide expressing nucleotide sequence isolated from the Sargasso Sea
tatggcaatcaaaattggaattaatggaatgggtagaattggtcgaatgattgtcagatcaatttttgaaagtcgaaataaaaatttaaagattcaacatattaataatagatcaaattcagaagctacaagtaaattaattagatacgattctatccatggaaaatttgatgctgatactaaatttgatgaaaataatttaataataaataagcaaaaaatttcattttctcaagagcctaagatcgaaaaaattaattggaaaaagtatcatgttgactacgttttagaatgtacaggtaaatttaactcaagagaaaaacttgaggcccatattaaaaatggtgcaaaaaaagtgattgtatctgctccatgcaaaaatgcagataaaacaatagtttttggcgttaacgaaaacaccttatccaaaaaggataaaataatctcagctgcctcatgtacgacgaattgtttggcaccagttgtaaatgtcattcacaaaaaatttgaaattgaaaaaggttttatgactacaattcattcatttactagtgaccaaagaattttggacaattctcataaagatccgagaagagctcgatctgcaagccaatcgattgttcctacatcaactggagcatcaaaagcaataggtgaaataattccaagtttgaaaggaaagttagaaggtgtggcgatgagagtacctacgccaaatgtttctcttgtagaattagttttttgtacaaaaaaacaaattaatataaagaatataaataatgaatttgaactagcttcaaaaaaagaattaaaaagtattttagaagttacttatgaaaaattagtttctgttgatttcaatcatcatccagcctctgcaatcgttgatgcgtctttaaccagtgtggttggagcgaatatgggaaaaatttcagcttggtacgacaacgaatggggtttttctaacagaatgtgtgatatagctgaaaatttgcataaaatctcttaa

SEQ ID NO: 213865 - DNA, 1366 bp, Unknown
  Bacterial polypeptide expressing nucleotide sequence isolated from the Sargasso Sea
atgataaaaattgaatttaaagattttggtgaaagaaagaattggatatcaggtaagcttgaagattcaagttcaggtaaaaaaatatctattatatcaccttactatgataaagagatcgctacggtgcctgattcaaactctaatgaccttgatattgcagtccaagctgcagaatcaattttcccagattggaaaagaacaaatattcgcgatcgtgcagagatcatgtttcgttttaaaacgctcttggaatcgaatattgatgaattagctcatcttatatcgttagacaatgggaaaacaatcgaagatgctaaggcgagtattaatagagggaaagaggtagtagagtttgccacatcattaccaaatattttaaaaggtgattcgtctcaagtagcagatgggatcacatgtactatgacgcatgaaccacttggtgtagttgctggtatcacgccttttaatttccctgctatggtccctttatggatgattccgttagccataacatcagggaactgttttattttaaaaccctcagaaaaaacgcctctttctactttaaagatcgctgaatatttaaaagaggctgggttaccagatggtgtattccaaatattgaatggttctcaagaagccgtagaggctatctgcgatcatccagacattaaagctgtagcattcgttggctcatcaaaagttgctaagatcgtttatactcgtacgacagctcagggaaaaagagcattatgtttaggaggtgctaaaaatcatatgatcgtggttccagatgcagaccttgatagtactgcaaaaggacttttagctagttcgatgggtagtgctggacagagatgtatggctgctagtgtagcagttggcgttgcaaatgttgatcccattattaaccaattaatagaggaagctaataagttcgtattggggttagacatgggcactataataagtaaatcagcatttgatcggatcaagggatacatagacgaggctgaaaatatgggtgcaaaggtattggtggatggacgaaacccagttcctcctgcaggttatgaaaatggatactggctaggacccacaattttggatggtgtcgatccagattggccttgtgcaaaagaagagatctttggtccagtattatcaatcattcggaccgacaccatagacgaagcaatgaaaatagaaaataataatatttatggaaatgctgcggcagtgtttactacctcaggagaggttgcaaagactatttctgaaactgcctcttcaggaatggtaggtgtgaatattggagttcctgtccctagagaaccatatagtttttgggggttggaatgaa

SEQ ID NO: 213866 - DNA, 1495 bp, Unknown
  Bacterial polypeptide expressing nucleotide sequence isolated from the Sargasso Sea
gatgaatatagttaatcattttattaatggtaaagagtacgtgagtaagtcagatagatttggtgacgtatataaccctgcaaatggagaaaaaataagagaagttaactttgctaacaaagaagatgtatccgtggcaataagttgtgcagtcaaagcaggtaaagaatgggctgctactccatcactgactagatctcgagttttatttaaattcaaagatttaattctcagagatatggacaaattagctctggaattaacaacagagcatggaaaaattttatcagactcagttggctcaattacaagaggcatggaagtagttgagtttgcttgtggtattcctcatttgcttaaaggagaatattctgaaaacgttggatcaaatatcgacagctggagtatgcgacagcctcttggggtttgtgtgggaatttcacctttcaattttcctgctatggttccaatgtggatgtttgttatgtctattgcatgcggtaattcatttattttaaaaccgagtgaaaaagatccaacggttccatacatgatgggagatttacttaaagaagcagggttgccagatggtgtttttaatgtggttaacggcgataaagaagcagtagatcttctgatcaccgatcctgaagttgcatcagttagttttgttggctcgactccagttgctgagtacatttatcatacatcttctaaacacaataagcgcgtccagtcattaggcggtgcaaaaaatcatatggttgtaatgcctgatgcagatttagaccaagttgttgatggtctgatcggcgcagggtatggatctgcaggagagcgatgcatggctctctctgttgctgtagctgttggtgatgtgggtgataaattaattgaaaagcttacccctcgcgttcagggacttaaagttggccccggaacagatccagaagttgaaatgggtccactcatcagtgatgtacatttatcaaaagtaaaaagctatgttgactctggagttgctgaaggagctgatctcatagtggatggaagatcaatatctcttcaaggttatgaaaatggatacttcatcggaggctgtttatttgatcatgttaaggaagatatgaagatatatagagaagaaatatttggacctgtattatctgttgtacgtcaacctacttttgacgatgctttaaaaatggttaacgatcatgaattcggaaacggcaccactatttatactcgtgatggtgacacagctagagcttttgctaatcaatgtaaaattggaatggttggagtgaatgttcctatacctgttcctatggcttttcatagctttggtggttggaagcgatccttatttggggatcatgcaatgcatggtatggacggggttaggttctttacgcgtcttaaaactgttacttcgagatggccaactggtatcagaaaaggtgctgaatttaccattccaaccatgaagtaa

SEQ ID NO: 213867 - DNA, 1495 bp, Unknown
  Bacterial polypeptide expressing nucleotide sequence isolated from the Sargasso Sea
atgaatttaattgagcattttatcgatggtaaaattgtttcaggtacatctgatagaaaaggaaaagtatttaatcctgctataggcaaacaagagtctgaggttagacttggtacaaaacaagatcttgatttagcagtacaaaaagcaaaaaaagcatttgaaacatggtcaaatgtaactccaatacaaagagctagaataatatttaaatacaaagaaataattgaaaaaaattctgacttgctagccaagatgattgtatcagagcatggaaaagtttatgaagatgctaaaggttctctcacaagaggtttagaggtagttgaatttgcatgtggaattccacaaatgctaaaaggtgactttacagaaaatgtaggtacaaacattgatagctggtcagtgagacagccattaggtgtatgtgcaggtattacaccatttaattttcctgcaatggttccaatgtggatgtttccaatggcaatagcttgcggaaatacatttgtattaaaaccttctgaaaaagatccatcttgtccattaaaacttgcagagctatttagtgaagctggtttaccagatggggttttgaatgttgttaatggagataaagaagttgtagatgcaattttggaacataaagatatatccgcagtaagttttgttggatcaacacctattgctaaatacatttatgaaaatgcagccaaaaatgaaaaacgtgttcaagctcttggaggagctaaaaatcattgtgttgtcatgccagattgtgatttagatcaagcagtaaacggtctaatgggtgcagcatatgggtctgcaggagaaagatgtatggctcaatctgttgctgttgctgttggtaatgtaggtgacaaactagtcgatgaattatctaaaaaagtggaagctttaaaaattggaccaggcatggataagaattctgaaatgggtcctttagtaacaaaagagcatcttgaaagagtaagaggttatgttgatttaggtattaaagaaggagcagaccttgtggttgatggaagagatatcaaacttcaaggttatgaagacggttattatattggtggttgcttattcgataatgttaaaaaagatatgagaatttataaagaggagatatttggacctgtattatctgttgtcagagctaaagattttaacgaagcattaaatttaattaatgaccatgagtttggtaatggaacaagtatttatacaagagatggagatgcaggaagaacatttgcaaatcaaattaaagtaggaatggttggaattaatatccctatccctgtgccagttgcttttcatagttttggtggatggaagagatcattatttggagatcaacatatgcacgggccagaaggagttagattttatactaaattaaaaacaattacttcaagatggccttcaggtgttagatcagatcctgaatttataatgccaacaatgaaatagt

SEQ ID NO: 213868 - DNA, 1453 bp, Unknown
  Bacterial polypeptide expressing nucleotide sequence isolated from the Sargasso Sea
gatgcagagtatttccatgctgatcgccggcgcagccgtgcaggcgagtaatggcgccaccttcgagcgtcgcaatccgctggatggcgaagtcgcgacgcgcgctcccgccgccacggttgccgatgcggtagccgcggctgatgcggcggcagcggcatttcctgcatggtccgcgctcgggccgggcgagcgccgcgcgctgctgatgaaagcagcgcacgccctcgaggcgcgcagcgaggcgttcgccagcgtgatggccgcggagacgggggcgtcggcgatgtgggcgggcttcaatgtccatctcgcggctggcggattgatggaagccgcagcgctcacgacgcagattggcggcgagttgatcccgtccgatgtgcccggcagtctcgcgatgggcgtgcgtcagccggctggcgtcgtgctcggcatcgcgccgtggaatgcgccggtgatcctcgcggtgcgggcgattgcgctgccgcttgcgtgtggaaataccgtcgtgctgaagggttcggagatctgccccggaacgcacgggctgattatcgaagtgctgcaggaagcgggtttgcccaagggcgtggtgaacttcgtcaccaacgcaccggccgacgccggcgctgtggtcgaggcgctgattgcccatccgaaagtccggcgcgtcaatttcacgggctccacgcacgtgggcaagattatcgcggccacctgcgcacgctatctgaagccgtcggtattggagctcggcggcaaggccccgttgatcgtgctcgacgacgcggatctcgacgcagccgtcaatgccgcggcattcggcgcgttcgccaactccgggcagatctgcatgtcgacggagcggatcatcgtcgacgaacggatcgctgatcagtttgttgcaaagctcgcgcggaaggcgcgcggcctgccgctcggcgatcctcgcaaaggtcccgtggtgttgggatcggtcgtcgatatggcgacggtggaacgctgcaacgcgctgatcgacgacgcgctggccaaaggcgccacgctcgtctgcggcggcaaggtggacagcaccctgatgcccgccacgctgctcgatcatgtcacgccggcgatgcgtatttatggcgaggaatcgttcgggcccgtgaagggcatcgtgcgcgtcaacggcgaagacgaagccgtggcctgtgcgaacgacaacgagtatgggctttcatcggcggtgttcagccgcgatgtagcacgcgcgatgaatgttgcaaggcgcatcgaatcgggcatctgtcacgtcaatggaccgaccgttcacgacgaagcgcaaatgccgttcggcggcgtgaaaggcagcggctttggacgcttcggcgggcaggcgggcgttgctgaattcacggatctgcgctggatgaccgtgcaaaccacgccacgtcattatccgttctga

SEQ ID NO: 213869 - DNA, 1194 bp, Unknown
  Bacterial polypeptide expressing nucleotide sequence isolated from the Sargasso Sea
gatgtctgatttaaatgaaaatattaaaaaactaaaaaaacatttagatatcattaaagaacaaggagttttgaatgtcgtcgatggtgaattaaagaattcaaattccagaaagaaattttctaatttttctcctgtggatgaaacatacatttgtgaagttgctcaaagtaatgctgaagatattgatgaggcatcatcatcatctaaagatgcttttaaagaatggtcaaaaacaagtcctgctacaaggaaaaaaatcttacacaaaatagctgataaaatagttgaaaggtcagaagagatagctttatgtgagacttgggatactggtcaagcaataagatttatgtcaaaagcagctataagaggttcagagaactttcgttattttgctgataaagctatttctgcccaagacggattaacattaccatcaggttcattactaaatatcactaaaaggtatccaattggtccagttgggattattacaccatggaacacgccttttatgttatctacatggaaagttgcacctgcccttgctgctggatgtacagtagttcataagcctgcagaattatccccagttacagcaaaaatacttaatgaaatagctttagaagcaggacttcctcctggtgtttggaaccttgtgaatggttttggtgaagaggcaggagttgctcttacaaagaataaggatattaaagctgttgccttcgttggagagtcaaaaacaggttcagctataatgcgacaaggatctgagactttgaaaagagtccactttgaacttggaggtaagaacccagtgatagtttttgatgatgctgatctagaacgtgctttagatgctgtaattttcatgatttattccttaaatggagaaagatgtacttcttcaagtaggcttttgattcagaaaaatattgcagaggaatttatcagtaaattggtagatcgagttaataaaattaaggttggtaatcctttagacccaaatactgaagttggtcctttaataagtgaaaatcacttagaaaaggttgtttcttattttgatatagctaaaagagagggtgcagaaattgctgttggaggaaatgcgcataagaaacttggttggtttgtttcgccaaccttatttaaaaatgcaaagcctgaaatgagaatttctcaagaagaaat

SEQ ID NO: 213870 - DNA, 674 bp, Unknown
  Bacterial polypeptide expressing nucleotide sequence isolated from the Sargasso Sea
taataatggtgcaaaaaaagttattgtatctgctccttgtaaaaatgctgacaaaacaattgtttttggtgtaaatgaggaagaacttacaacaaatgatcaaataatttctgctgcttcttgtacaacaaactgtttggcaactgttgcaaacacccttcacaaaaattttgaaatagaaaacggttttatgaccacaattcatgcttttacaagtgatcaaagaattttagataattctcataaggatcctaggagagcaagatctgcaagtcaatcgattgtaccaacatctactggagcatcaaaagcaattggagaaataattccttcattaaaaggaaaattagagggtattgctatgagagttccaaccccaaatgtatctcttattgaattagttttttgtactaaaaaagatatagacaaagaaaaaattaacaatgcatttaaagaagtctcaaaaaatcagtcaaaaaaagtattagaaataacttctgagaaacttgtatctattgattttaatcataattcatcatcagcaattgttgactcatcacttactagcgtagtaggtaaaaatatggggaaaatttctgcctggtatgataatgaatggggattttcaaataggatgtgtgacatagttgaatatgtcaataaaatctcttaat

SEQ ID NO: 213871 - DNA, 1092 bp, Unknown
  Bacterial polypeptide expressing nucleotide sequence isolated from the Sargasso Sea
aatgggagctccaatatggttatcccaagttgctcaggttgcttctggtcttactcattttaaggatactctaaatgttcttaaaggctatgattttgagtatgagaaagatggttatttagttcgaaaagagcctgtgggtgttgttggaatgatcactccctggaactggccaatgaatcagatgtgcacaaaagtagcatcaggcatagctgctggatgcaccatggtgcttaagccaagtgaaataactcctttctgcggaattattcttgcagaaattattcacgacgctggtgtacctgctggaatctttaatttagttaatggcatgggtccagttgttggtgcctcaatgtctgaacacaaagatatagatatgatgcattttactggttcaacacgggcaggagttgctgttgctcaagcatcagctccaacagtgaagagagttgctcaggagcttggtggtaaatctgccaatatagtccttgatgatgcagacattgaaaaagccgtatctgctggcgtctcttcatgtttcttaaatacaggacaatcatgtaatgccccaacaagaatgcttgtgtcatctaagaattatgataaagcagttgaagttgctgctaatactgcaaatgctatgaaagtaggagatccttttgatgctgatacaaaaatgggcccaatttctaataagacccaatacgagaaagttcaaaggatgattcagattggtattgatgaaggagcaacattatctgctggtggcgttggtcttccagaaggttgtgagagcggttattacgtaaaaccaactatattttctgatgtaactaatgatatgactattgcaagagaggaaatttttggcccagttttatgtttaattaaatatgaaaccgaagaagaagccattgagatagcaaatgatactccttatggccttgccggatatatccaaggtgagcatgcgcatgcagttgaagttgcctcaaaaataagagctggccaaattactatcaacaaaggagctagagtcagatcagcaccatttggtggttatggttcatctggtaacggaagagagca

SEQ ID NO: 213872 - DNA, 1210 bp, Unknown
  Bacterial polypeptide expressing nucleotide sequence isolated from the Sargasso Sea
tatgtatagcaaatttggacaattcattgatggtaaatggcaaccatctcaaaataatgaaacttacgatgttttaaatcctgcaactgaagaagtaattggtaaagcatcaaaagctggtgaagaagatgtaaataaagctcttaagtcagctgaaaaaggtcttgaagtttggagaaatactccaccttggcaaagatcaaaaattataagaaaaattgccgatcttatgagagagagaactgatgtactcgcaaaatggcttacattagaagttggaaaacctttgtcagaagcaaaaggagaagtaggtggagcagcagatatttttgaatggaattctgaagaaacaaaaagaatatatggtcaaatagttgaaagcagatttgaacacacaagaatgtatgtaaaatatgagcctgttggtgttgttgcaggattaataccatggaattttccaatagttttatcttctagaaaaatttctacagctttagcagctggttgctcagttatatgcaaaccagatgtcattactccaggaagtgtaatggagttaatgaatattataaatgatgcaggagttcccccaggtgttgttaatttattatcgggtgatccagcacaaatttcatcacaacttatatcatctgatatagtaaaaaaagtttctattactggatcaactagagtaggtaaacttattttaaaacaagccgctgagaaagttcaaagagtaacaatggaattaagtggtcactcaccttttatagtttttgatgatgtagatataaacaaagttacagatatggcaataacggcaaaatttagaaacaacggccaagtttgcatatcaccagcaagattttatatccatgaaaagaaaaaagatgagtttgcaaaaacattagttgaaaaagtttctaaacttaaaattggaaatggaatggatgacgacacaatattaggtccattaacaacagaaaagagattgaatgaaatagaagcattagtcgagaaaacaaaaaaagaaggagcaactgttttatgtggcggaaagaggccttcaggttttaataaaggatatttttatgaacctactgtttttgataatgttcaagataactttacaattgcaaaagaagaaccttttggaccattagttccgctactaacatttaaagatacagatgaagttgtcaaagagcta

SEQ ID NO: 213873 - DNA, 433 bp, Unknown
  Bacterial polypeptide expressing nucleotide sequence isolated from the Sargasso Sea
tcttattgaaaaaggtattgaagaaggcgctgaacttgtttcaggaggacctggaaaaccagagggattaaatgcaggttattatgtaagacctactgtttttgccaatgtaaataacgatatgaccatagcccgagaagaaatatttggtccagttctttccattcttccttataaagatgaagaagaagctttagaaatagctaatgatactgagtatggactttatggttatgtgtcttctggcgatgttgagcatgctaaaaaggtagcaaaccgaatcagagcaggtagcattgcaatcaatggagctcaagcagactttacagctccttttggaggctataagcagtccggtaacggaaaagaatggggtccttttggattcgaagagttcctagaaactaaagctgttgttggttactctgactaa

SEQ ID NO: 213874 - DNA, 886 bp, Unknown
  Bacterial polypeptide expressing nucleotide sequence isolated from the Sargasso Sea
attggcggtgctcgctgagaaggccgggattccggccggggtgttcaacatcgtgtccggcgatgcgatcgaaatcggcggcgtgctgacggcgtccgaggtggtgcgcaaattgtcgttcaccggttcgacacgcgtcggcaaactgctggcgaagcaatcggcggacacgctaaagaagctgtcgctggagttgggtggcaacgcgccgttcatcgtattcgacgatgctgacctcgacgcggccgtgcaaggcgcgatggcatcgaaattccggaataccgggcaaacctgtgtctgcgtgaatcgcttttacgtgcaagacggcatttacgacgcattcacgcaggcgttgaccgcggcggtgcgcaagatgcgcgtcggcaatgcgttacagggcgatgtcgagcaaggtccgctgatcaaccagtcggcgctgcgcaaggtggaggcgcacgtcgccgacgcgctgcagaaaggcgcgacggtgctgaccggcggtaagccgcacccgctcggcggcacgttctacgaaccgacggtattggcgaatgcatctgcttcgatgctgatcgcgtcggaagaaacctttgggccggtcgcggcgtgtttccgtttccacaccgaagaagaggcgatcgcggctgcgaacgacacgccgttcggcctctccgcctatttctacacacgtgatctggcgcgtgcatggcgggtcggcgaggcgttggaaagcggcatggtcggcatcaacgaaggcatcttatcgaccgaagttgcgccgttcggcggcgtcaagcaatcgggcctcgggcgggaagggtcgaagtacggtctcgacgaatacaccgaactgaagtacatgatgatgggcggcctgcgcggctag

SEQ ID NO: 213875 - DNA, 964 bp, Unknown
  Bacterial polypeptide expressing nucleotide sequence isolated from the Sargasso Sea
atgatagtgagatccattatcgagagtcaaaataaaaatttaaaaattagccatattaacaacagatcaaatgcagaaatcacttgtaaattattaaaatatgattctatacatggaaaatttaatgcagaattaaaattttatgaaaacgagttaataattaataaaaataaaatttcattttctcaacagtctaaaatcgaaaatattgattggcaaaaatatgatattgattatgttttcgagtgcactggtaaattcaattcaaaagaaaaactccttgcgcatatcaaaaatggggcaaaaaaagtaatagtatctgctccatgcaaaaatgctgacaaaacaatagtatttggtgtaaatgaaaatattttatcaaaaaatgataaagttatatctgctgcatcatgtacaactaattgtttagccccaattgtaaaagtgcttaatgataattttgaaattgaaaaaggttttatgactactattcatgcatttaccagtgatcaaagaattttagataattctcataaagatccaagaagagctagggctgcaagtttatcaatagtaccaacttcaactggcgcatcaaaggcaataggtgaaatagttccaagcctaaaagggaaactagaaggtgttgcaatgagagtcccaacgccaaatgtgtcgctaatagagttagtattctgtaccaaaaaaaaaattgatataaaaaaaattaatgatgtatttgaaactgcttctaaaaatgaattaaataaaattttagaggtttctcatcagaagcttgtttctattgattttaatcatcattctgcatctgcaattgtagatgcctctttaacaaatgtagttggagctaacatgggtaaaatctctgcttggtatgataatgaatggggtttttcgaatagaatgtgcgatatagctgagagtttgcataaaatctcttaat

SEQ ID NO: 213876 - DNA, 1009 bp, Unknown
  Bacterial polypeptide expressing nucleotide sequence isolated from the Sargasso Sea
aatgacaataaaaattggaattaatggaatgggacgaattggtcgtatggttgtaagatcaattatcgaaagtgaaaataaaaatttaaaaattaatcatataaacaacaggtcaaattctgaaactacatctaagttactcaaatatgactctatacatggaaaattaaatgctgatttagattatgacccaaatcatttaataattaataaaaataaaattacattttctcaaaaaacaaagattgaagaaataaattggaaaaaacaagatgttgattatgttttcgaatgtactggaaaatttaattcgaaagacaaacttcttgctcatatagaaaatggtgcaaaaaaggtgatcgtttctgctccatgtaaaaatgctgataaaacaatagtatttggtgttaatgaaaacataattactaaagaggataaaataatatctgcagcttcttgcacaaccaattgtctagcaccagtaatcagtgttcttgataaaaaatttgaaattgaaaaaggttttatgactacaattcatgcttttactagcgatcagagaattatagataattcacacaaagatccaagaagagcaagatcagcgagtctgtcaatagttcctacctcaacaggagcttcgaaagcaataggagaaataataccaaaccttaaaggaaaactagaaggtgttgcaatgagagtgcccactcctaatgtttctcttgttgaattagttttttgtacaaaaaaagatattaatataaaaaaagttaatgatgcctttgaacaagcatcaaaaaataaattaaaaaatatcttagaagttactcatgaaaaattagtatcaatagattttaatcatcatcctgcttccgcaatagtagatgcgtctttaacaaatgtggttggaagtaatatgggcaaaatatcagcctggtatgacaatgaatggggcttttctaatagaatgtgtgatatagctgaaactctacataaaatctcttaa

SEQ ID NO: 213877 - DNA, 577 bp, Unknown
  Bacterial polypeptide expressing nucleotide sequence isolated from the Sargasso Sea
aatgttagttgaaaaatctatttataaaagagcagtggatgaggcagtagatgaagccaataagataaaagtagatcaagcatcaaaaaaaggagatcatattggtccggttatttctaaaacacagtatgataaaattataaatttaatcgaaagcggaatatcagaaggagcaacattatctgcgggtgggccagagttgcctaatggattaaataaaggctattttattaaaccaactattttcacaaatgtaacaaatgaaatgagaattgcaaaagaggaaatttttggtccggtgctttccataataccttttgaaagtgaagatgaggcagtaaatattgtaaatgatacatcttatggtttaggaaattatttacaaactgaagatagagaaaaagcacatagagttgctaaaaaattaagatctggttgtgtttatattaatggaaatgcagctgatgctggcacaccatttgggggatatagacaatcaggaaatggaagagaaggtggagtttgggggcttgaggaatatttagaggtaaaaactgttacaggctggaaagattaa

SEQ ID NO: 213878 - DNA, 1495 bp, Unknown
  Bacterial polypeptide expressing nucleotide sequence isolated from the Sargasso Sea
aatgaaagttattaatcagtttattaatggtaaagaacatattagtaaatctgaacggtttggtgacatatttaatcctgcgaatggagaaaaaacaaaaaaagtctcatttgctaattctgaggatgtaaagcttgcaatagaatgtgcagttgaagcaggaaaaagatgggctgcaactccacctttaacaagatcaagagttttttttaggttcaaaaatttaattctgcgagacatggataagcttgcactggaactgacttctgaacatggtaaaattttatctgactcagcaggttcaattaccaggggcatggaagttgtagaattcgcctgtggtattcctcatcttcttaagggagaatactctgagaacgtaggatccgatattgatagttggagcatgagacagccattgggtgtaagcgttggtatttctccatttaattttcctgccatggttccaatgtggatgtttgtaatttcgatagcatgtggcaattcatttattcttaagccaagtgaaaaagatccaactgttccttatatgttggctgaattgttaaaagaagctgggcttccagatggagtatttaatgtaattaatggagataaagaagcagttgatttattaataactgatccagctgtagactcagtaagctttgtaggatcaaccccagttgctgaatacatttatcatacgtcttcaaagcacaataaaagagttcagtccttgggtggcgctaaaaatcatatggttgttatgcctgatgctgatcttgatcaagtcgttgatgggttaattggtgcaggatacggttcagctggcgagagatgtatggctctatcggtcgccgttgctgttggtgatgtaggtgataagctaattgaaaaattaacacctcgcgttcagaacttgaaggtaggtcctggaactgatccagaagttgaaatgggcccactaatcagtgatgttcatcttgcaaaagttaaaagctatgttgacgcaggggtatctgaaggagctgaattaattgttgatggaagatcaatttcacttcaagggtatgaaaacggatattttataggtggctgtttatttgatcatgttaaagaggacatgaagatatatagagaagaaatatttggtcctgtactctcagttgtgcgtcaaccaacatttaatgatgctttaaaaatggttaatgatcacgaatttggaaacggtactactatttatactcgggatggagatactgctcgtgcattttctaatcaatgcaagatcggtatggtaggagttaatgtacccataccagttccaatggcttttcacagttttggcggatggaaaagatcgttatttggtgatcacgcaatgcacggcatggatggagtaaggttttttacacgattgaaaacagttacttcaagatggccgactggcatgagagaaggtgcggaatttacaattccaacgatgaaataa

SEQ ID NO: 213879 - DNA, 1444 bp, Unknown
  Bacterial polypeptide expressing nucleotide sequence isolated from the Sargasso Sea
tatgtatagcaaatttggtcagttcatagatggtaaatggcaacaagcagaaaagggtgaaacttatgaagttgttaaccctgcgacagaggaaattattggcaaggcatcaaaagcctcatcactagatgtgcagaaagctctaaagtcagctgaaaaaggtttagagatttggaaaaatacagctccgtggcaaagatcatacacaattagaaaaattgcagacttacttagagaaaaaaagaaagtgatggcaaaatggctgacgttagaggttggtaaaccattgttagaaggtgagggagaaacaaatggagctgcagacatttttgaatggaatgcagaagaaactaaaagaatttatggtcaaactgtagaaagtcgatcgccagacacaagggttcacgtatattatcagccagtcggggttgttgcagcgttagtgccctggaactttcccttaattttagcagcaagaaaaatttctactgctttagctgctggttgttcagtaatttgtaaaccagatgtgattacaccaggaacagtaatggagctagtggatatttgtaaagaagctggtgttccgcctggagtagtaaatcttctttcaggagatcctccaagtatatctaatgaattactcgaatctgatattattaagaaagtttcaattacgggctctactagagtaggtaaattaattttaaaaaaagcagctgataaagttcaaagagttactatggaattaagtggtcattcaccttttatagtttttgatgatgttgatataaataaagttgcagatatggctattacagcaaaatttagaaacaatggacaagtctgtatttcaccaaatagattttatattcaagaaaaaaggaaagaagaatttataaatgcattcatagagagaacaaaaaaattaaaaataggcaatggtatggacgatggagtgcaattaggaccattagcaacagctaaaagactctcagaagtagaggaattagtagatataacaaaaaaagaaggtgcgaaagttttattaggtggaaaaaggccatcaggatttaataaaggctatttttatgaaccaactgtattcgatgaagttaaagataattatacaattatgaaacaagaaccttttggtccattagtgcccatgttgtcatttaaaacttttgatgaggttattgaaagagcgaataataatgatttaggtctttgtagttatatttacacagattcaatgaagcaagctcataaagcatctgaattaatggaaacaggaacagttgctgttaacacgcctgtagtagctattgcagaagcaccttttggtggaattaaacaaactggctatggtcgtgagggtggatcaatggcaattaaggactacttaaacataaaatatacacacttaggactcaaaacttga

SEQ ID NO: 213880 - DNA, 1090 bp, Unknown
  Bacterial polypeptide expressing nucleotide sequence isolated from the Sargasso Sea
atgagtttaacctttgaaaatattaaaaaaacaaaatctaatttaaattatccctctcaattatttattaatgggaaatatcaaaaatcaatttcagaaaaatcatttgaaaatatttctccaattgacggaagtattgtaaatcaagttttttttgctgagcaagaagatattgatttagctgtttctaaagctaaagaaacttttaataaaggatattggtcaaatctttcaccaggtgaaagaaaaaaaatacttttaaaatttgctatactattggaaagagatcgtttggagttatcactccttgataccatagacatgggtaaaacaattaatgatacttacaatgctgacttaccaactagcatagataatattgaatggtatgctgaaataattgataaactttttgatgacatttcaccaagttcaaaagaatatttgggcttaattaccaaagagccaattggagttgtagcagcgatagtaccttggaattatccattatggatggcaatatggaaaattgctccagcgcttattactggtaattctgttatattaaaacctgcagaacaatctccgatgagcgctattaaaattggtgctttgctctcagaagctggagtacctgatggagtattttcagtacttccaggagatgggcctattacaggcaaatcattatgtcttcataatgatattgattgtgtagcttttactggatcgggcgaagttggtaaactagtacttcagtattctggtcaatccaatatgaaaagagtgcaactggaatgtgggggaaaatcaccaaatattatttttgcagattgtgatgatcttgatagagctgcagaagcatctgcttatgctatctttggaaatcaaggtgaggtttgttcagcaggatctagacttataatccaaaaagatatcgaaaaagacttcatcaataaagttgttcaattaagtaaaaaaatgcaaccttctgatccgctaaatccagattcatttgctggagcaatagtaaatactgaacagttagaaaaaattaataaatatgtaaatatagggaaaaaagaggggg

SEQ ID NO: 213881 - DNA, 1390 bp, Unknown
  Bacterial polypeptide expressing nucleotide sequence isolated from the Sargasso Sea
aatgagtgagacaatcaatacctacaaccctgctacaggtgaaaagatcgatcattatcatttgatgtcagccgaggacgccgagcaagcagttacccgttcacaagaagcctatttgaactggcgccgtacgtcatttgagacccgcgcagatttatttaataaccttgcaaacctgatggaagagcgaattgacgatctcgccagcctgatgacacgggaaatgggtaaggttaccgcgcaaggaaagcaagaagtgcagctatgcgctgaaatatgccgctatacggcagagcacggcgcttcaattttggaagacgaacaccgcattttcgaaggcggtcgagcaatcattacgtaccagcccattggcgttattcttggcatccaaccgtggaattttccgttgtaccaagttattcgttacagcgcctcaaacataatggcgggtaacaccacggtactgaaacatgctaaaaacgtgtttggtatggcgcaagccattcagcaaatgtacgaagatgctggctttcctaaaaatgtttatcagtcgctgctaattgatggcagcacggcaagtgacttaatcaagcacaaatacgttcgcggcgttacttttaccgggagtgacgaagtaggtaaagaagtggctaaggaagctgcaagcttgtctaagaaaaccgtaatggagcttggtagtaacgacgcctttttggtgttagaggatgcggatatcgaccatgctgtagaaatgtgtatccaaggacgggttattaataacggtgaaacctgtgtggcggctaaacgctttgttattgtggatagcgtctatgaagaattccgagacaaatttgtggcgcagtgtaaaaagctaaaagttggcgaccccacaaacgaaaacacggatttgggcccaatggcgagagaagacttgcgcgatgaacttcatgagcaagtgaaaaagtcgctagaaaacggcgctacgctatcactgggtggagaaattccagactctgatggttatttctacccaattacggtgctggaagatgtatcgccaggtatgcccgcttatgatgatgagctatttggaccagttgcgtcgctcattcgcgtgcgcgacgacaagcaagccatggaagtagcaaatgattcacgttatggcttgggcggcggtatcttcagtacagataccgacaaagcaatagcattggcgaaagatgaatttgataccggtatggttaatatcaatgggtactctttggcacaaccaaacttaccttttggtggtgtgaaagacagcggttacggtcgtgagcacggaggctatggtatgcgtgaattcgtcaatatcaaaactatcatggtcgctgagaaatcggccgagtag

SEQ ID NO: 213882 - DNA, 673 bp, Unknown
  Bacterial polypeptide expressing nucleotide sequence isolated from the Sargasso Sea
atgtatagtaaatttggacaattcattgatggtaaatggcaacaagccgaaaaaaaagaaacctatgatgttattaatcctgctacagaagaactaataggaaaagcttctaaagcaagttcagtagatattgaaaaagcattaaagtcagcagaaaaaggtttaaagatatggcgaaatactgctccttggcaaagatcatatattattagaaaaatcgctgacttgatgagagagagaaaagaaattcttgctaaatggttaacacttgaagttggtaaacctcttgctgaaggaattggcgaagttggaggagctgcagatatttttgaatggaatgcagaagaaacaaaaagaatttacggacaaacagttgaaagtagattgcctgatacacgagtacatgtttattatcagcccgttggagttgttgcagctttggtcccttggaattttcctctcgttttagcttcaagaaaaatttctacagcgttagctgcaggatgttctgttatttgtaaacctgatgtaattactcctggctgtgtaatggagttagttgatatttgtaaagaagctggtgtgccagctggtgtagtaaatttgttatcaggagatcctcccacaattgctgaacaattaataaaatccgacataattaaaaaaatatctg

SEQ ID NO: 213883 - DNA, 1063 bp, Unknown
  Bacterial polypeptide expressing nucleotide sequence isolated from the Sargasso Sea
tttggcagagggtgttggtgaagttggaggagctgcagatatttttgaatggaatgcagaagaaacaaaaagaatatatgggcaaacagttgaaagtagatttcccgatacaagagtacacgtatattatcaaccggttggtgttgtagctgcattagttccatggaattttccaatagtattagcatcaagaaaaatttctactgcattagcagcaggatgttctgtaatctgtaaaccagatgttattacccctggagcagttatggaactagtagacatatgtaaagaagcaggagttcctccaggagtggtaaaccttttatctggtgatccagcatcaatatctgaacaacttattaattcagatataataaaaaaagtttcaattaccgggtcaacaagagttggaaaattaattttaaaacaagctgcaaataaagttcaaagagtaacaatggagttaagcggtcattcaccttttattgtttttgatgatgcagatattaataaagctactgatatagcaattacatctaaatttagaaataatgggcaagtatgtatttcaccaaatagattttacattcaagaaaagaaaaaagaagaatttattaattcttttattggaaaggccaaaaaattgaaaattggaaatggaatggataaagatgttcaactaggacccttaacaacagaaaaaagacttaatgaggtagaacaacttgttgaaacaacaaaaaaagagggtgcaaaagttttgatgggaggaaaaagaccagcaggatttaacaaggggtatttttatgaaccaacagtttttgataatgttttagataattttacaattatgaaagaagagccttttggtcctctagttccaattctttcgtttaaagattttgatgaagtcattgaaagatcaaataaaaatgatttgggattatgtagttatatttgtacaaattctatggatcaagctcatagggcatctgaactcatggaaacaggaacagtagcagttaatacaccggtagtagcattggccgaggcaccatttggg

SEQ ID NO: 213884 - DNA, 1495 bp, Unknown
  Bacterial polypeptide expressing nucleotide sequence isolated from the Sargasso Sea
catgaatttaatcaaacattttgttggtggaaaagtaatatcgggtaattcagagagaaaaggaaaaatctttaaccctgctactggggaacaagactctgaggttattttagcctcaaaagcagatttagatggtgcagtagaaattgcacaaaaagcttttcagacttggtcgttaaatcctccacttcaaagagcaagaataatgtttaaatttaaagagctcatagaaaaaaattttgatgaactggcaaaactaatagtctcagagcatggaaaagtttatgaggatgctaaaggatcattaataagaggattagaagttgttgagtttgcatgtggaattccacacctacttaaaggagagttttctgaaaatgttggaacaaacgttgatagttattcaatgcgacagcctttgggagttgcagctggtataaccccatttaattttccagcaatggtaccgatgtggatgtttccattagctatagcatgtggtaatagttttattttaaaaccatcagaaaaagatccctcatgcccgatgaaattggcagaactgcttcatgaagctggtcttcctgagggagtttttaatgttgtaaacggtgataaagaggttgttgatgcgatattaacaaaccaaaatattaaagctgtaagttttgttggatcaactcctattgctaagtacatttatgaaaatgcagctaaaaatgaaaaaagagttcaggcattaggtggagcaaaaaatcatttagttgtaatgccagattgtgatttagatggtgccgtaaatggtttaatgggtgctgcatatggttcagctggagaaagatgtatggcgcagtcagtagcagtagcggtcggtgatgtaggtgatgagttagtatcaagactatcaaaaaaagctgaagcattaaaaattggacctggtatggataaatcatccgagatgggccctttagtaaccaaagaacatttggaaaaagtaaaaggctatgtagatctaggagttaaagaaggagcaaaacttgttcttgatggaagaaatttgaaattgcagggctatgaaaatggtttttatattggtgggtgtctttttgatcatgtgactactgatatgagaatttataaagaggaaatattcggaccagttttatctgtggttagggtaaaaacatttgaagaggctacaaaaatgattaatgagcacgaatatggaaatggagttagcatttatactagagatggggatgcaggaagaacattcgcaagcaaaattcaagttggaatggtaggaataaatgttccaataccagttccaatggcttttcatagttttggaggatggaagaggtctttatttggagatagtggaacacatggtatggaaggtgtaaaattttatactaaattaaaaacaattacttccagatggccatcaggaattagatctaatcctgagtttattatgccaacaatgaaataa

SEQ ID NO: 213885 - DNA, 1051 bp, Unknown
  Bacterial polypeptide expressing nucleotide sequence isolated from the Sargasso Sea
atgtacgagaaatttggacaatttattgatggtaaatggcaacaatcttcagacaagggaacttacgaagttatcaatccagcaaatgaagaaattttaggccatgcatcaaaagcaacatctaaagatgtaaatgcagcattacaatctgcagaaaaaggactagaagtttggaagagaactgctccctggcaaagatcatatatcattagaagaatagcagataagatgagagaaaaaaaagatgttttagctaagtggatgacactcgaagttggaaaacctttagctgaagctaaaggagaaataggtggagctgcagatatttttgaatggaacgctgaggaaacaaaaagaatttatggtcagactgtagaaagcagatttgaagatacaagagtgcatgtttattatcagcctgtgggagttgtagcagcgttaacaccttggaattttccagctgttttatcagctagaaaaatttcaactgctttagcagctggttgttctgttatcattaaaccagatataatcaccccaggcatagttatggaaatggtagatatttgtagggaatgtggagtacccccaggtgtagtcaatcttttatctggtgatccacctagcattgctcaacaattaattgcctcagatataattaagaaaatttcaattacaggatcttcaagagttggaaaacttatattaaaacaagctgctgataaagttcaaagggttactatggaacttagcggtcattcaccttttattgtatttgatgatgcagatattaaaaaagcagctgatatggcaatctcagcaaagtttagaaataatggacaagtatgtatatctccaaatagattttatattcatgaaactaaaaaagatgagtttgttaatttattcatagacaaaacaaaaaaattaaaaattggtgatggtatggatccaaatacacaattaggtccattaacaacaaaaaagagattaaatgaaattgaagagttagttgaaaaaactaagcaagaaggtgctaagttttattagg

SEQ ID NO: 213886 - DNA, 1453 bp, Unknown
  Bacterial polypeptide expressing nucleotide sequence isolated from the Sargasso Sea
catgcaaaccgtatcgatgctgatcggcggcgaacgtcgccattcatccagcggcgcgaccttcgtgcgccgcaacccgctcgatggcgaagtcgcgtcagaagcgccggcatgcaccgtcgacgatgcgcgcgcggcggccgatgcggccgcccgagcgtttcccggttgggccgcgctcggccccggtgcacgccgcgcgctgctgctgaaggcggccgccgcgctcgaagcgaagcacgagcagttcgtcgccgcgatggcggcggagacgggcgcgtccgcgctgtgggccggcttcaacgtgcatctcgccgcgagcgggctcgtcgaggctgcgtcgctgaccacgcaaatcggcggcgagctgatcccgtccgacgtgcccggttcgctcgcgatgggcgtgcggcagccggccggcgtcgtgctcggcatcgccccgtggaatgcgccggtgatcctcgcgacgcgcgcgctcgcgctgccgcttgcgtgcggcaacacggtcgtgctgaagggctcggagctgtgtcccgtcacgcacggtctgatcgtcgaggcgttgcaggaagccgggctgccgccgggtgtcgtcaatttcgtgacgaacgcgccagaggatgcaggcacgatcgtcgatgcattgatcgcgcatccggccgtgcgccgcgtgaatttcacgggatcgacgcgtgtcggcaggatcgtcgccgaagcttgcgcgcgtcacctgaaaccgtcggtgctggagctcggcggcaaggcgccgttcgtcgtgctcgacgacgccgacctcgacgccgcagtggcggcggccgcgttcggcgcgttcgcgaattccgggcagatctgcatgtcgaccgaacgcatcgtcgtcgacgcatcgatcgccgatgcgttcgtcgcgaagctcgccgacaaggccgcgtcgctgccgctcggcgatcctcgccaagggcccgtcgtactcggttcgctgatcgacacgaaggccgtcgagcgctgcaacgcgctgatcgacgatgcgctcgcgcacggcgcgacgctcgtgtgcggcggcaaggccgacagcacgctgttcccggccacgctgctcgaccacgtgacgccggcgatgcgcatctatgccgaggagtcgttcggcccggtgaagggtatcgtgcgcgccgacggcgaggatgccgcgatccgttgcgcgaacgacaacgcgttcgggttgtcgtcggccgtgttcagccgcgacgtcgcgcgtgcgatgcgcgtcgcggcccgcatcgaatcgggcatctgccacgtgaacggcccgaccgtgcacgacgaggcgcagatgccgttcggcggcgtgaaggacagcggcttcggtcacttcggtggcaacgcaggcatcgcggcgttcacggacctgcgctggatcacggtgcagaccgcaccgcgccactatccgttctga

SEQ ID NO: 213887 - DNA, 1277 bp, Unknown
  Bacterial polypeptide expressing nucleotide sequence isolated from the Sargasso Sea
aatgttagataaaaagaatttttatattaatggcaaatggactgctccaatagagccaagaaattataaagtaattgatccatcaaatgaagaaccttgtgcagaaatatctttaggaggaaaaaaagatatcgataacgctgttggttcagcaaaaaaagcttttcaaacatgggccttttcacaaaaagaagaaagactagaattactagaaaaattatatgtagtttataaaaagcgatgggcagaaatggcaaagcttatctctcttgagatgggagcaccaatgaaattttctacagaattacaagcagcaacaggagcgagccacatcaaatcatttaaaaatatattaaaagattttaaatttgaaaaagatttaggtgaagaaaaaaataatcaaaaattattatatgaaccaaaaggcgtatgtgcattgattacaccttggaattggccaataaatcaagttaatttaaaagtaatacccgcattagcttcagcgtgtacagtagtattgaagccatctgagatagcacctttgtcatcaatgttacttgcagaaatgattgacgaagtaaagtttccggctggagtttttaatttggttaatggagatggagctattactggggatgctttaactagtcatcctgatattgatatgatttcttttacaggatcaacaagagctggagctttaatttctcaaaatgctgctaaagattttaaaagaataagcttagaattaggtggaaaaggtgcaaatataatttttaaagacgcagactcagaggctgtagcaagaggagttttgagatgttttagaaattcaggacaatcttgcaatgctcctacaagaatgctcgtagaaaaaacaatttataatgcaactgtagaaaaagtaaaagaattggcaaataataccaaggtagactcaccccaaaaagacggtgatcatattggtccagtagtatccgaagtacagtttaataaaattcaaactttaatacaaaaaggtatagatgaaggagcaaaattaattgctggcggaaccggtaaacctaagggatttgaaaaaggttattatgtaaaaccaacagtttttgctgatgttaacaatcaaatggaaattgcaagaactgaaatatttggtcctgtgctatctatcattccttttgaaaatgaagaggaggctatttcaatagctaatgatactccttatggtttaacaaattatattcaaactcaagataaagaaaaagtaagagagtgca

SEQ ID NO: 213888 - DNA, 893 bp, Unknown
  Bacterial polypeptide expressing nucleotide sequence isolated from the Sargasso Sea
tttctggatgctatttgcagaaatgattgatgaagcaggttttccaaaaggactattcaatttagtaaatggcgatggtgaaggagtaggaactgatatttcaagccaccctgatattgatatggtttctttcaccggctcaacacgagcaggaagattaatttcaaaaaacgctgcagaaacaattaaaagagtttgtcttgaattaggcggtaaaggtggaaacattgtttttgctgacagttataaagatgcagtaagagatggcattcgaaatgtaatgagtaattctggtcaatcttgtgatgcgccaacaagaatgctggttgagaaatcaatttatgaaagagctgttaaagatgcagtagatgaagcaaacaaaattaaagtagatcaagcttcaaaaaaaggagatcatataggaccagtaatttctaaaattcaatatgataaaattataaatcttattgaaagtggaatttctgaaggcgcaactcttgcagcaggtggccctgagttaccaaacggtttaaacaaaggatactttatcaaaccaactatatttacaaatgtaactaatgaaatgagaattgctaaagaagagatttttggacctgtcttatgtataattccatttgaaactgaggatgaggcagtcaatattgtaaacgatacctcttatggtcttggaaattatttacaaactgaagatagagagaaagcacatagagttgcaaaaaaattaagatcaggctgtgtttatattaatggcaatggagctgatgctggaactccatttggtggttacaggcaatcgggtaatggtagagaaggaggtgtttggggccttgaggaatatcttgaagtaaagaatgttactggttggagttaac

SEQ ID NO: 213889 - DNA, 1483 bp, Unknown
  Bacterial polypeptide expressing nucleotide sequence isolated from the Sargasso Sea
atgtctaatttaaaaaaatataatatgtttattgatggtgagtgggttgaatctgaaagtaaaaaaacatttaagtcacttaatccagaaaacaatgaaccttgggtggaagttcctgaggctagcgaaaaagatgtcgacaaagctgttaaagcagctcaaaaagcttttgaaggtaaatggccaaaactatttccaagagaaagagcaaaatatttaaaagcaatagcagaacaacttagagcaaatgccgaactacttggaaaaatagaaacaatagatactgggaaactatttaaagaaacgaaaactcaagcaaactatattgctgaatactatgattactacgctggtcttgctgataaagttgagggaacagttctgccaatcgataaaactaatatgcaagtgataactactagagtgcctattggagttgtggctgcaataataccttggaattcacaaatgttgttaacagctgtaaagttagctcctgcacttgctatgggaaatactatagtaattaaatcttctgaattggctcctgcaacactatttgaatttgcaaaattgattgaaaaaacaggtatacctaaaggggtggtgaacattgtttctggatttggagatccatgtggaaaagcattaacttcacataacttggtagaaagagttgctttcaccggtggtccggagactgctagaaatattataaaaaattctgcagaaaatttatcacaagtaagtttggagttaggaggcaaaagtcctgttgctgtttttgaggacgcagatcaagaaaatgctttgaatggaattaccgcaggaatttttggtgctagtggccaaagttgtatagcaggttcaaggctatatatacaaaatagtatttatgaaaattttttagaaaaaatagtaaataaagcaaataaaattaagttaggtcctcctatggactccgacacacaaatgggtcctttaagcagtttaaaacaattagaaattattgaaaaaaatattaaacttactttggatcaaggtggaaaactaaaatgtggaggcaaaaggcatagcttttcaaataaaggttattattttccacctactgtaattgaatgtgaaaatcataatttgccggctgcagaaaatgaattatttggacctgttctttctgtaatgaaatttaatgatgaaaaagaagtaatagataaaatgaatgacaaccagtatggattatcatctgggatttatactaaagatataaatagaggtataagagtttcaaattcaattcgagctggaattacttttgtaaatacttacagattaatttctccttcagctccatttggaggtatgaaagatagtgggtatggtaaagaggcaggtattgaatctattaaagattataccagaataaaaactacttggtttaatacttcagataagcctatggatgatccttttactatgggttaat

SEQ ID NO: 213890 - DNA, 1138 bp, Unknown
  Bacterial polypeptide expressing nucleotide sequence isolated from the Sargasso Sea
atgttgtgtacagacgtgatcccatcaggggttataggccttatctctgcctggaactatcctatgaatgtagcattccgcaaagttgctcccgctctagtcgcaggcaactgtgctatcttgaagccatcagagattgcaggattgacatgtatgtttataggaaagcttgccaaagatgctggaattcctcctggtgtctttaacattgtcactggtgaccgcgacgcaggcgctgctctggcgaactctccgtcagtttcgatgatttcttttacaggttcgtccttaacgggtagtaagattatggaggcttgtgcccctaaactctctcaggtcgctcttgaactggggggcaagtcggccttagtgatatttgatgacacagatcttgataaagctgtagagaccacaatgaagggattcctcaccaacggtggccagatttgtaccgcacatacacgtcttgttgttcaagatagttttaaagctcctttattgaagaagttaaaagaagaactcgaaaaacttcctttttgtaacgacccgatcactgaaaaagatcgaggtgacagagcctgggaagatggaatgacagatgtggtccaacccattgtctgcgaatcgcagcacaagaaggtcttgagattccttgatgaagccaagagtgcgggcgtagagtttttaacgggtggaaatgttcctgatgccgaaactgttggaaatgcaggcggatattttattcaacccacggtgctggtcaacgtggagcgcgatgcagatgtttggcagaaggaggtctttggccctgttctatctgtgcgaacgttctcgacagagcaagaggcagtgctcgaggcaaattccacagcctttgggttggcatcaacggttatgtcttcggacccggcaaaggcaatgcgggttgccaaccgaattagggcaggcgctgtttatgccacatctaatggtgaaggtttattagcagagcatcctgctgtttcaagaggtggttttggatgttctggtgttggtcgggaacttgggattggaggcttacacgaatatacagaactgaagagtattaactacaccggttttacactgaaagatgccaagataaatcgcacaagttagt

SEQ ID NO: 213891 - DNA, 844 bp, Unknown
  Bacterial polypeptide expressing nucleotide sequence isolated from the Sargasso Sea
atgcaaactttaggtaactacattaacggccagcatatcgccagccaaagcggccgcagccagagcgtatttaatccggctacaggtgaagcccagactcaggtcagtctggctagcgcagacgaaacccgcgacgctattgccgcagcagcgactgcctttcaaagctggagtcaggtgactccgttgaaccgctcccgtgtgatgtttaaatttaaagccttactggaacagcacagagatgaactggcgcttttaatcaccaaagagcatggcaaagtattttccgatgctcagggtgaactgacccgcggtattgaagtagtcgaatttgcctgtggtattccacatttactcaaaggcgaacattcgatgaacgttggccgtggtgtcgacagctacagcctgatgcagcctttgggtgtctgtgccggtatttcgccttttaacttccctgccatggtgcctttgtggatgtttcctattgcactcgcctgcggcaacagctttgtgatgaaaccttcggaaaaagacccgactgtgcctttaaaactggcggagttattaaccgaagcgggtttaccagcaggtgtgtttaacgtggtgaacggtgataaggaagcagtggatgtgctgctgaccgactctcgcgtgcaggctgttagttttgtcggctccacaccaatagcagaatatgtttatgccacaggcagcgcgcatggcaaaagagtacaggctttgggcggtgcgaaaaaccatatgctggtgatgccagatgccgatctggaacaagtcaccagcgctttaatgggcgcagcttatggttcagccggtgaacgttgta

SEQ ID NO: 213892 - DNA, 1441 bp, Unknown
  Bacterial polypeptide expressing nucleotide sequence isolated from the Sargasso Sea
atggaagaggcgaagcacttcatcgcgggcgaatgggcgttgcccgcgcaactggaaaccatcgcggtcgtcgatccctccgacggccagccgttcgcgtcgatcgcccgcggcacggcgcccgacatcgagcgggcggtcgccgcggcccgcgacgcattcgcgggcccgtggggcgccgccagcgccgccgagcgcggccgcgtgctgatgcgcctgtcggcgcgtgtcgccgcctcgatcgaggagctcgccgcgatcgaagcgcgcgataccggcaagccgctgaaacaggcacgcgccgacgcggccgcgctcgcgcgctacttcgagttttatgcaggcgccgccgacaagctgcacggcgaaaccctcccctatcaagccggctacacggtgctgacggtgcgcgagccgcacggcgtcacgggccacatcgtgccgtggaactacccgatgcagatcttcgggcgcagcgtcggcgccgcgctcgcggccggcaacgcctgtgtcgtcaagccggccgaggatgcgtgcctgtcgttgctgcgcgtcgccgagctggccgtcgaggccgggttgccggccggtgcgctcaacatcgtcaccggctacggccatgaagccggcgccgcgctcgcacgccatcccggcatcgaccacatctcgttcacggggtcgccggccaccggcaagctggtcacgcagatggcggccgagaaccacgtacccgtcacgctcgaactcggcggcaagtcgccgcagatcgtgttcgccgacgccgatctcgaagcggcgctgcccgtgctcgtgtccgcgatcgtgcagaacggcgggcagacctgctcggccggcagccgcgtgctgatcgagcgcgcggtgtacgagccgctcgtcgagcgcctcgccaccgcattcagcgagctgcgcgtcggcccgagccgcgccgacctcgactgcggcccgctgatcaacgcgaagcagcagcagcgcgtgtgggatttcctgtccgacgcacagcacgacggcattccgatggccgcacacgggcaggtcgtcgccgacgcgcccgaaagcggcttctaccaggcgcccgcgctgttgcgcgacgtgccgccgtcgcaccggctcgcgcaggaggaagtgttcggccccgtgctcgccgcgatgcgtttcgtcgacgaggacgaagccgtcgcgctggcgaacggcacaccgtacggcctcgtcgcgggtatctggacgcgcgacggcgcacgccagatgcggctcgcacggcgcctgcgggcgggccaggtgttcatcaacaactatggcgcgggcggcggcgtcgagctgccgttcggcggtgtcggccactcggggcatggccgcgagaaaggcttcgaggcgctgtacggcttcaccgcactgaaaacgatcgcgatccggcacggctgac

SEQ ID NO: 213893 - DNA, 904 bp, Unknown
  Bacterial polypeptide expressing nucleotide sequence isolated from the Sargasso Sea
atgttagaaaaattacaaatgtatataaatggagaatgggttgattctcattcaactgagacgattgaagtcatgaacccatcagatgattctgttcttggagttataactgcaggtaattctgatgatgtggataaagcggttgctgcagctaaagcagcttttgttgattttagtttttcaactaaagaggaaagagtccagattttagaaaatattattgcagaatatgaaaaaagatctgaggaattagcagaaacaatatctaaggaaatgggagctccaatatggttatcccaagttgctcaggttgcttctggccttactcattttaaagatactctcaatgtccttaagagctatgattttgagtatgaaaaagatggctatcttgttcgcaaagagcctgtgggtgttgttggaatgatcactccttggaattggccaatgaatcagatgtgcacaaaagtagcatcaggcatagctgctggatgcactatggtgctcaaaccaagtgaaataactcctttctgcggaataattcttgcagaaattattcatgatgcaggtgttcctgccggaatctttaatttagttaatggtatgggtccagttgttggtgcctcaatgtctgagcataaagatatagatatgatgcattttactggatcaacacgggcaggagttgctgttgctcaagcatcagccccaacagtgaagagagttgctcaggagctaggtggtaaatctgcaaatatagtccttgatgatgcagatattgaaaaagcagtatcagcaggagtctcttcatgtttcctaaatacaggacaatcatgtaatgcacccacaagaatgcttgtgtcatctaagaactatgacaaagcagttgaagttgctgctaata

SEQ ID NO: 213894 - DNA, 1443 bp, Unknown
  Bacterial polypeptide expressing nucleotide sequence isolated from the Sargasso Sea
tatggaaattaaagactcaaaattttatagagataagtgctacattaacggtgaatgggttaatgccgactcaggtgagacaatatctgttaacaatccagctaacttgaaagagatcggcacagtacctaagtgcggaacatctgaaactagaaatgctatagaagcagcaaataatgcttggcctgaatggagggcaaaatctgcacgtcaaagatcagaaatactcagaaaatggtttgatttaatgattgaaaataaagaggaattagctcaaatcatgacagttgaacaaggaaaaccaataaatgagtcacgtggagaaataggctatggagcctcttttgtagaatggttctcagaagaagccaagagggtttatggagatacaattccagatcccatgaccgatcgaagaattgttgttttgaagcaaccagttggtgtagtggcatctattacaccatggaattttcctaatgctatgattacaagaaaatgtgcaccagctttagctgttgggtgcccagttgtaattaaaccagcaagtcaaactccttattctgcactcgcactagctgttttggctgaggaggcaggtttcccaaaaggaactttaaatgtaattacaggaaaggcctctgaaatcggagaggaattagccacaaatccaattgtcagaaaattatcttttacaggttcaacagaaattggaaaaatacttttacagaaatgttctggaactgtaaaaaaagtctcaatggaacttggtggtcacgcacccttcattgtatttaatgatgcaaatattgatgatgcagttgccggtgcaatccaaagcaaatttagaaatacaggacaaacttgtgtttgtgcaaatagaatttatgtccaagaaaaagttcatgatgagttctgttcaaaatttgttgatgctgtttctaaaataaaagtaggagatggtttaaatgaggaaaatgcctctggacccatgattgatgagcactctttaagtaaagtagaggagcacgtccaagatgcattacaatatggcgcaaaagttgcaattggtggatctaagcattctttgggaatgaacttttatcagcctacaatcctaactgaagtcgcaccagaagcgaaaattacaactgaagaaacatttgggccagtggctccaatatacaaatttaaagatgaaaaagaagtaattaaactcgcaaataactcaccatatggacttgcatcctatttttattccagagatatcggaagaatatggagagttgctgaggcacttgaatacggtatggttggagtcaatactggattaacttcaaaagcagaggcaccatttggaggaataaaagagtctggtcttggcagagaaggctcaaagtatggaattgatgattttattgagataaaatacatcaatatgtg

SEQ ID NO: 213895 - DNA, 2674 bp, Unknown
  Bacterial polypeptide expressing nucleotide sequence isolated from the Sargasso Sea
ttgaagtattttgatgaagagaaattaattgaaaatatcatcaatgaaagtaactggttaaatgatgaagagatttcaattaatgctgaatctattgttgaaaagtgtagaagtgatagaaataagacaaagcttgataatttttttcttgaatacggattaagcaatcaggagggtgttgccctaatgtgcctagctgagtcacttttaaggattccagataattctacatgtgatgaaattattgaagaaaaaataggcggcaaaagctggctaaatcatttaaataattctccatctctttttgtgaatgcgactacatttggtctttttttagctgaacaagttgtagaactagatccaaaaattggctcaaatccaattagctggctgtccggtatgacttcaaaaattggagaaccagttttaagagaagcaattaaaaaaggtatggatattttgagtgaagaatttgtttcaggaacaagtattgaaaaagcattaacaaagtttgattcaccaaatactccatgctcttttgatatgctcggtgaagcagctcgaactaaatctgatgtagatttcttttttgaggcctatgaaaatgcaattaggtgtgttggagaaaaaaatgctcttctgtctaaatcctttcatgaaatttctataaaactctctgcattacatcctcgttatgaggcattaaaagaggaaagagttatgaacgaactttatgaaagtgtttatgaactatctttacaagcagctaatcaagatattgctttaacaatagatgctgaagaacaagatagacttgaacttagtctaaaaattattgaaaagcttgcagaaaataaaaagcttaaagattggggtggattaggtttagcaattcaaggttacggaagaagatcctcctctgtagtgaaattcattgattatcttggaggccgaagaaatggactcatgatgcgattagtaaaaggtgcttactgggatcaagaagtcaaaattcatcaaacaaaaggttcaattgatttgcctgtttttactgcaaaatccttcactgatttgaattatttacacacagctaaagttatttcggaaagtaaaaatctcaagccttattttgctactcacaatgctcatacgatagctgcaataatgagcatttttaaagggcaggaagaaaaaatcgagtttcaaagaatatttggaatgggcgatctagtttatacaaacgctaaaaaatgctttaaagattttccaacaacaagaatatatgctcctgttgggtctaagaaagaattgctgccttatcttgttagaaggttgattgagaatggagcaaataattcatttgtaaataagtatttagataagaaaattcctattactgaagttgtaaaaaatccccttctcaattgcaaagatcagttaataaataaaactttccttaataacgtaaaaagaccaaaagaaatttttaaaggaagagaaaattctttaggttttgattttggcgatctttatgaaattaaaacactgcaaaatgatgttaaaaatatgagaaagcgtgattatatagctagttcaattttaggtaataatgaatttactggggagtctatcaaaagactttctcctcatgaattaaaaaatgaaattggctcagttacgtacttaaaaacaaaagatattaagtatgtttttgaagattttgataattctgattggtcgaaaacttctttgaaaaaaagaattgagattttgtcaaaggttggagagttgctatctaacaatagggcaatgcttttccatcttttgataaatgaggctggaaaaacattgaaagattgcgacgcagaattaagagaggcaattgattttattaattactacaatgcccaggcaaaaaaaatcttcaaaagaaaaagaatgcctggtccttctggtgaagaaaactatcttgaacacgcccctaaagggacattcctctgtataagtccatggaattttcccttagcaatatttgtggggcaaattacagcagcgctagtaacaggaaataatgttattgcaaaacctgctgaagatacttctatcattgggtgtgaagttgtaaaaatcttccatgaatctggtgtgccgaaatcagcattaaaactagtacttggtgacaaaaaaattggcaatgaattaactaaaaaccctcttattgccggcgttgcttttacagggtcaagttttgctgcaaagcaaataaataagaatcttgctgactcaaatggtcctataaaaagtcttattgcagaaacaggtggtcagaatgcaatgatcgttgattcgtcttccctcaaggagcaagttatagatgatgtaatcagatcagcatttttgagtgctggtcaaagatgtagtgcattgagagttttatatgttcaagacgaaattgctgacgaatattgggattatcttaatgaggcattgcaagaatatactattggagatccaaatctaccaaaagttgatattggtcccatcattaacaaaaattcgaaagatagattgttgaaacatatatcagctttgaaaaaatcagcgaaaagaactattgaacatcatcataaacaagataaaggtaatttatttatcacaccgattggtttttgaa

SEQ ID NO: 213896 - DNA, 685 bp, Unknown
  Bacterial polypeptide expressing nucleotide sequence isolated from the Sargasso Sea
cttgggtggaaaatcttcaaacattatccttgatgatgtagctgatttagaaaaatctgtcaaaggcggtgcaggacattgttttttaaattcaggacaatcttgtaacgctccaacaaagatgctcgtctctgcagaaaattatgacagagctgtagaaattgctgtttcaactgcaaacagcactactgttggagatccaaatggtgaatttagattgggtccaattgcaaataaagttcaatacgaaaaaattattaaattgatagaaataggcattgaagagggtgcaacgttagtcgcaggaggagttgaaaagccggacggatgtgataaaggttattatgtaaaaccaactgtttttgcaaatgtaacaaatgatatgactatagcgaaagaagagatatttggccctgttctagtgataattaaatataacaatgaagaagaggctattaatattgcgaatgatactgaatatggtcttgcaggttatgttcaaggcgatcccgaccatgcaaaagaagttgctcgaaaaataagagctggacaagtaattattaacggaggtgcaagaggaactggtgcaccttttggaggctacaaggcttcaggaaatggaagagagcatggtcttcatgggttagaagaatgtcttgaaactaaagcaattattgctccatag

SEQ ID NO: 213897 - DNA, 1483 bp, Unknown
  Bacterial polypeptide expressing nucleotide sequence isolated from the Sargasso Sea
aatgcctgaattaaaaaaatataaaatgttcataggaggagaatgggttgactctgatactaagaaaacttttgaaactttaaatccggaggataataaaccatgggcaattgttcctgaggcaagtgcttctgatgtagataaagcagttaaagcagctcaaaaagcctttgaagcagattggcctaaaattttacctcgagaaagagcaaagtttctaagagctattggaaataagctcagagataacgcagaattacttggaaaaattgaaactatagatactggaaaactttatagagaaacaaataaacaggcaaattatattgctgagtactatgattattatgctggtatggcagacaaggttgaaggcacagttctaccaatagataaaccaaatattcaagctataacttcaagaatacctattggtgttattgctgcaatagtaccttggaattcccaaatgtttttaacagcaacaaaacttgcacctgctttagcaatgggaaacactgtggtaattaagtcatctgaacttgccccagcagtaatgtttgaatttgcaaaattgatagaggaaacaggtattcctaaaggagtagtaaatgttattactggttttggagacccatgtggaaaagctttaactacacataatttagttgaaaaagttgcttttacaggaggacccgaaactgcaagacatattattagaaattctgcagaaaatttatcagaagtaagcttagagcttggaggaaaaagtcctgttgcagtatttgatgatgctcatcaagaaaatgctattaatggaattactgcaggaatatttggagctagcggacagagttgtattgctggttcaagactatatctacaaaaaggaatttacgatgagtttctcgataaactcacaaaaagagctgaaaaaattaaaattggtgctcctatggatccagatacagaaatggggcctttgagtaattataaacagttagaaattattgaaaaaaacataaaaaaaactacagagcagggtggaaaaataaaatgtggtggtgaaagacatccattttcaaatgagggatattactttcctcctacaataattgaatgtgataatcataatcttccaacagctgaaaatgagctttttggcccagttttgtcagttatgaaatttgatagcgaaaaagaggtaatagagaaaatgaatgataatcaatatggattatcttctggagtttatactagtgacttctcgagaggtctaagagtttctaatgcaataagagcaggtataacgtttgtaaatacctatcgattgatttctccttcggcaccttttggtggaattaaagatagtggatatgggaaggaagcgggaatggactcaataaaggattatactagagttaaaacaacttggtattacacatctgatgaaccaactttagatcctttctcgataagataa

SEQ ID NO: 213898 - DNA, 793 bp, Unknown
  Bacterial polypeptide expressing nucleotide sequence isolated from the Sargasso Sea
tatgagctcaggtaatagatataaagtaattgccagtaaacttaaatttgaaggaagagcatttattaatggcaaatatgtaaatgctattgatggtgaaaaatttgaaacaatcaatcccgcaactggtaaaaaactttgtactgttgcaaaatgtaatcataaagatgttaacttagcagttaaagtttcaagaaaagcttttaatagtggagtttggtctaaaagttcgcctgagcatagaaaagaagttttattaaaatttgctgaattacttagaaaacatggtgaagaaaattcagttttagaaagtgttgatacaggtaaacttataacagattgtattaatgaagttgcaaatgatgctccgatgcactttcagtggtatggagaattaattgataaagtttttggaaaagttggtccaacagaaccatctattacaagtttaattgttaaagaaccaattggagttgttgctggaattgttccttggaactttcctttaatgatggcagtatggaaaatggcaccagctcttgcagcaggttgttcagtaattatcaaaccagcagaggacacccctcttactgcaataagagttgctcaaatcggaaaagaagctggcataccagatggagttttaaatgtacttccaggttatggtgatgttggagaggctttaggtcgacacaaagatgttgatgcggtttcgtttacaggttcaactgaagtaggtggttattttttaaaatactcaagtgaaagtaatttaaaacctgttgcattagaa

SEQ ID NO: 213899 - DNA, 1422 bp, Unknown
  Bacterial polypeptide expressing nucleotide sequence isolated from the Sargasso Sea
aatgaaaataattaaaaactatattgatggaaagcatttagagtcacttagtggtaatttttcagaaatatttaacccttcaactggagaagttattggtaaagttaatctgtccaatagcgatgacttaaaaattactattgagtcttctaagaaagttatgcagcaatggcaaaatacctcacctcttaaaaggtcgagaattatgtttgagttcaaaaatattttaaatagcaatattgaagaattagctaaaactgtttctttagagcatggcaaaacaatagaagatgctaagggttctataactaggggtttagaagttgttgaatttgcttgtggcatccctcatttattgaaaggagagttttcacaaaatgttggtaacgaaattgattcatggagcgtaagacagccacttggtatatgcgcaggtattactccattcaattttccagctatggtacctatgtggatgtttccaatatctctagcttgtggaaatacatttattttaaaaccgtcagaaaaaaatccaagttgtgcaattatgttagcagaacttttaactaagtctggcttgcccgatggagtctttaatgtaatcaatggagatcaaaatattgttaaaaatattatggagactgaagctatatcatcaataagctttgtaggaagtacaccagttgcaaaactgatttatgaaaactctgctaaaaataataaaagggttcaggctttaggtggtgcaaagaatcatttagttgtcatgcctgatgcaaatattgatcaagccgtagatggaattataggagcagcttatggttcagctggggagaggtgcatggctgtttcagttgccgtagctgtaggcgatatagctgataatctggtaaacaaaattaaaactgctgctgaaaatttaattgtagcaccttatatggactcaaattcagaaatgggcccattaatttcaaaagatcacttaaataaagtaaaaaaatatattgatataggtgttgaagaaggtgctaatcttcttttagatggtcgaaacttacaaatacaaggatatgaaaatggatattttgttggtccgagtttatttgacaatgtcgacaaatcgatgagaatttataaagaagaaatatttggacccgtgttatctgtagttagggctagcacatatgatgaagctttaagcttagttaacgaacatgagtttggaaatgggactagtatttatacctcagacggagaagtatccaggcatttttcaacaaattgtaaaataggaatggttggagtaaatgttccaattccagtaccaatggcttttcatagttttgggggttggaaaaattcactatttggagatcatgctatgcatggaattgagggagtaaagttttattctaggct

SEQ ID NO: 213900 - DNA, 1101 bp, Unknown
  Bacterial polypeptide expressing nucleotide sequence isolated from the Sargasso Sea
tagaagattttatactaagattaaaaaattttaagtttgaagaacattttgacacaaaatcaaacaatcacataagttatgaaccaattggagtatgtggtttaattactccatggaattggccaattaaccaaatagcattaaaagtaattccagctttcgcaactggttgcacaatgattcttaaaccatctgaaatagcgcctatttcggcaatgttgtttgctgaaatgatagatgaagcaggttttcctgctggggtatttaatttagtcaatggagatggtgcaggagttggaacccaaatatctagccaccctgatattgatatgatttcttttactggatctacacgtgcaggaaaacttattactaaaaatgctgcagatacaattaaaagagtttgcttagaactgggtggtaaaggtggaaatatagtttttgcagattcatatccaaacgcagtaagagatggaattaggaatgtaatgagcaactctggacaatcatgtgatgcaccaacgagaatgcttgtagaaaaaactatttacaaaagagccattaaggaagcagctgatgaagcaaataaaattaaagtagatattgcatcaaaaaaaggagatcatatagggcctgtagtttcaaaagttcaatacgataagataattaatttaattaatagtggaattgatgaaggagcaacattagcagctggaggtcctgaccttcctaatgatttaaacaaaggttactttattaaaccaactatatttacgaacgttacaaatgatatggagatagcaaaaaaagaaatttttggaccagtactttctataataccatttgaaacggaagaagaagcaatcaaaattacaaatgatacagaatatggtcttggaaactacttacaaactgaagacaaagaaaaagctaaaagagttgcaaaaaaattaagatcaggggttgtttatataaatggaaacgctgctgactctggtacaccttttggaggttacagacagtctggaaatgggagagaaggtggagtctggggtcttgaagaatatttagaagtaaaaacagtaactggttggaaatagc

SEQ ID NO: 213901 - DNA, 1174 bp, Unknown
  Bacterial polypeptide expressing nucleotide sequence isolated from the Sargasso Sea
atgcgcaatgacttaaatttttatataaatggtgaatggattaaatcagaatctaatgaacttatagatgttgtaaatcctgcaaatgaagagattattggtcaagttactgctggcaccaaagaagacatcgatatggctgtaaatgctgcaagcgatgcatttaaatcattttctaaaacgactcaaaacgagagaattgatttattaaaaaatattatcaaagaatacgagaataggtaccaagactttgtagaaattatcacaaaagaaatgggtgcaccaaactggctttcagagagagcacaagcaaatactggattaatcaattttaaagaaaccttagaggccctagaggaatataaatttgaaaaagaggaaggtggttatactcttagaaaagaaccaattggagttataggaatgattactccctggaactggccaatgaatcaaataaccacgaaagtttctgctgctattgctaccggttgcacaatggttttaaaaccaagtgaaatttcgccatattgttcaatgctgcttgctgaggtaatgcatgatgctggtgtacctaaaggagtttttaatttagtcaatggctatggtccaatagtaggagctgctttatcagaacacgagaaggtagacatgatgtcatttactggttcaacaagagctggcattgcagtggcacaagcttctgcaacaactgtaaaaagagttcagcaggagttaggaggtaaatctgcaaatattattttggatgatgttgcagatcttgaaaaatccgtgaaaggcggtgctgggcactgttttttaaattcaggtcagtcatgtaatgctccaacaaggatgcttgtatcagctaaaaattatgacaaagctgtagaagttgctgttgcaactgctaacagtacaacagttggtgatccaaatggtgagtttagactgggacctattgcaaacaaagctcagtacgaaaaaataatcaaaatgatagaaattggtattgaggagggtgctcgacttgtagctggaggaactgataaaccagatggatatgaaaaagggtattacgtaaaacctactgtatttgctgatgtaacaaatgatatgacaatcgcaaaagaagaaatctttggccccagttttgtgcatcatgaagtatgag

SEQ ID NO: 213902 - DNA, 1150 bp, Unknown
  Bacterial polypeptide expressing nucleotide sequence isolated from the Sargasso Sea
ccccatttacttaaaggtgaattttcagaaaatgttggaactaatgtcgacagttggtcaatgcgacaaccattaggagtagttgcgggtatcacaccatttaattttccagcaatggtgccaatgtggatgtttcctatcgcaattgcttgtggaaatacctttatattaaagccgtctgaaaaagatccatcgtgtgcaataaaactagcagaattattaaaagaagcaggtcttccagatggagtttttaatgttgttaacggagataaagaagttgtagatgcaatcttaacaaacaaagatattaaagcagtaagttttgtaggttcgacaccaatagcaaaatatatttatgaaaattccgcaaaaaatgaaaagagagttcaggcactaggaggagcaaaaaatcatttagttgttatgccagattgtgacttagatggtgcagtaaatggtttaatgggtgccgcatatggatctgcaggtgaaagatgtatggcccaatcagttgcagtagctgttggagatataggagatgagctagtatcaagattatcgaaaaaagcagaggctttaaaagttggtcctggaatggataaaagttcagagatgggacctttagttactaaggagcatctagaaaaagtaaaaggatatgttgatttaggggtaaaagaaggtgccaagttagtagttgatggaagaaacttaaaattacaaggttatgaagatggtttctatattggaggctgtttgtttgatcatgtaaaaaaagaaatgcgaatatatcaagaagaaatatttggaccagttttatctgtagtaagagtaaaaacttttgaagaagctacaaaacttattaatgatcatgaatatggaaatggagtaagtatttatacaagagatggtgatgcaggaagaacttttgcaagcaagatacaagttgggatggttggtattaatgttcctatacctgttccaatggcctttcatagttttggaggttggaaaagatcattatttggagatagtgcaatgcatggtatggaagggataaaattttatacaaaacttaaaacaataacctcgagatggccttctggaattagatcaaatgctgagttcataatgccaacaatgaaataag

SEQ ID NO: 213903 - DNA, 1465 bp, Unknown
  Bacterial polypeptide expressing nucleotide sequence isolated from the Sargasso Sea
atgaccatcaagcactggatcgacggccgggaagtcgagagccgcgagaggttcacgacgctgaatcccgcgacgggcgaagtcatcaccgacgtcgcatcgggcggcgaggccgaagtcgatgcggccgtgcgcgccgcgaaggaagcgttcccgaaatgggcgggcacgcccgccaaggagcgcgcgaagctgatgcgcaagctcggcgagctgatcgagaagaacgtgccgatgctcgcggcgctggagacgcaggacaccggtctgccgatcgcgcagacgagcaagcagctgattccgcgcgcgtccgagaacttcaacttcttcgcggaagtgtgcgtgcagatgaacggccgcacctatccggtcgacgaccagatgctgaactacacgctgtaccagccggttggcgtgtgtgcgctggtgtcgccgtggaacgtgccgttcatgaccgcgacctggaagacggcgccgtgtctcgcgctcggcaacacggccgtgctgaagatgtcggaactgtcgccgctgacggccgaccagctcggccgcctcgcgctcgaagccggcattccgccgggcgtgctcaacgtggtgcagggctatggcgcgacggccggcgatgccctcgtgcgccatccggacgtgcgtgcggtgtcgttcacgggcggcacggtgaccggcaagcggatcatggagcgtgccggtctcaagaagtattcgatggagcttggcggcaagtcgccggtgctgatcttcgacgatgccgatttcgaccgcgcgctcgatgcgtcgctgttcacgattttctcgatcaacggcgaacgctgcacggccggctcgcggatcttcgtgcagcgcacgatctacgaccgtttcgtgcaggaattcgcgcgccgcgcgaacaatctggtggtcggcgatccgtccgatccggccacgaacctcggcgcgatgatcacgcgccagcactgggagaaggtgacgggctatatccgcatcggcgagcaggaaggcgcgcgcgtggtcgcgggcggcgcggacaagccggcgggcctgcccgaccatctgcgcaacggcaacttcgtgcggccgaccgtgctggccgacgtcgacaaccggatgcgcgtcgcgcaggaagagatcttcgggccggtcgcgtgcctgattccgttcgaagacgaggaagaagggctgcggctcgcgaacgacacgtcgtacgggctggcttcgtacatctggacgcaggatgtcggcaaggtgcatcgtctcgcgcgcggcatcgaggccgggatggtgttcgtgaacagccagaacgtgcgcgacctgcgccagccgttcggcggcgtgaaggaatcgggtaccgggcgcgagggcggcgagtacagtttcgaggtgttcgcggagatcaagaacgtgtgcatctcgatgggttcgcaccacattccgcgctggggcgtgtgac

SEQ ID NO: 213904 - DNA, 945 bp, Unknown
  Bacterial polypeptide expressing nucleotide sequence isolated from the Sargasso Sea
aatgactattaaaattggaattaatgggatgggcagaattggtcgtatgatagttagatccattattgagactcaaaacagaaatttaaaaattcaacatataaacaacagaactaatgctgagactacttgtaaactaattaaatacgattctattcacggtaaatttaatgcggaattaaaatttgatgaaaatgaattaataattaataaaaataaaatttcattttcaaaagaaagtaaaattgaaaatattaattggaaaaagtatgatgttgattatgtctttgagtgtactggtaaatttaattcaaaagaaaaattactcacacacatcaaaaatggtgcaaaaaaagtaattgtttctgctccgtgtaaaaatgcagataaaacaatagtatttggtgtaaatgaaaaaattatatcaaaggatgatagaataatttctgctgcctcatgtacaactaattgcttagcaccagttgtaaatgttcttcatgatcactttgaaattgaaaagggttttatgactactattcatgcatttactagtgatcaaagaatattggacaattcccataaagatccaagaagagcaagggctgcgggccaatcaatagttccaacttcaacaggagcatcaaaagcaataggagaaataattccaagcctaaaagggaaattagaaggagttgcaatgagagtgcctacacccaatgtatcgcttgttgagttggtattctgtacgaaaaaagaaattgatataaaaaaaattaatgatgtatttgagattgcttctaaaaatgaattaaataaaattttagaggtcacacacgaaaaactagtttctattgattttaatcatcgatctgcatctgcaattattgatgcttctttaacaaatgtggttggaactaaaatgggtaaaatctcggcttggtatga

SEQ ID NO: 213905 - DNA, 736 bp, Unknown
  Bacterial polypeptide expressing nucleotide sequence isolated from the Sargasso Sea
atgagttcaggtaacaaatataaattaatagccagtaaacttaaatttgaaggaagagcatttattaatgggaaatatgtaaatgctattgatggtaataaatttgaaacaatcaatccagcaactggtaagaaactatgtgctgtggcaaaatgtaatcacaaagatgttaacttagcagttaaagtttcaagaaaagcttttaatagtggagtttggtctaaaagctcacctgaacatagaaaagaagttttattaaaatttgctgaattacttagaaaacatggtgatgaaaattcagttttagaaagtgttgatacaggtaaacttatcacggactgtattaatgaagttgcaaacgatgccccaatgcattttcagtggtatggagaattaattgataaagtatttggaaaagttggtccaacagaaccttccattactagtttaattgttaaagaaccaattggagttgttgctggaattgttccttggaactttcctttaatgatggcggtatggaaaatggcaccagctcttgcagcaggctgttcggtaatagttaaaccagcagaggacacacctcttacagcgattagagttgctcaaattggaaaagaagctggtataccagatggggttttaaatgtacttccaggttatggtgatgttggtgaagctttaggtcgacataaagatgttgatgcagtttcatttacaggttcaactgaagtag

SEQ ID NO: 213906 - DNA, 829 bp, Unknown
  Bacterial polypeptide expressing nucleotide sequence isolated from the Sargasso Sea
tatgattgagaaaaaaaatttttatataaacggtaaatgggtttctcctacaaaaccaaatgactttgaggtaattgatccatcaactgaagagtcttttgcaataatttctcttggatctaaagaggacgccgataaagcaatcaatgctgctaaaatagcttttgaaagttggagagaaactacaaaagaagaaagattaaagttattaaaaaaatttgatgaaatttataatagaagatgggatgaaatggttaaggctcaatcaactgaaatgggagctccacttgattttgcttcagaaattcacacaaaaatgggtgctgatatttcaaaaaatacaatagaaattttagaaaattttaattttgaacatcaatttgatactaagtccaacaatcacatcaggtatgaacctattggagtatgcggattaataactccttggaattttccgatgaaccaaatcgtattaaaagttattcctgccttagctgctggttgtacgatgatattaaaaccttcagaaattgccccaatatctggagttttgtttgctgaaatgattgatgaagctggttttccaccaggagtttttaacttagtaaatggaaacggagaagttgttggaaatcacatctcaggacatcctgatatagacatggtttcatttacaggatcgacaagagctggaaaattaattcaaaaaaatgcagctgacacaattaaaaaagtaactcttagaattaggcggaaaaggtggaaacatagtttttgcagactcatatccagatgcagtgagagatggtgtgagaaatataatgagtaa

SEQ ID NO: 213907 - DNA, 565 bp, Unknown
  Bacterial polypeptide expressing nucleotide sequence isolated from the Sargasso Sea
aatgttggtatctgccaagaattacgataaagcagtagaggttgcagttgctactgcaaacaatacaaccgttggagatcctaacggtgaatttagaattggaccaattgcaaataaaactcaatacgacaagatcattaaattaatcgaaataggtattgaagagggtgcaacgttagttgcaggcggagttgaaaagcctgaaggatgtgagaaaggttattacgtgagaccaacagtttttgcaaatgtaacaaatgatatgacgatagctaaagaagaaatatttggtcctgttctggtaatgatcaaatatgaaagtgaagatgaagcaatttctttagcgaatgatacggaatatggtcttgcaggttacgtccaaggagagcctgagcatgcaagggaagttgcaggaaaaattcgagctggtcaagtaatcataaatggtggcgcaagaggaacaggcgctcctttcggtggctacaaagcttcaggaaatggaagagagcatggcattcatggtctagaagaatgcttagaaacaaaggctattattgctccttag

SEQ ID NO: 213908 - DNA, 922 bp, Unknown
  Bacterial polypeptide expressing nucleotide sequence isolated from the Sargasso Sea
atgaatttaattcaacattttgtaaatggaaaaatagttccaggaaaatcaaaaagaaaaggaaaagtatttaatccagcaattggagagcaagagtcagaggtaattttaggttcacaatcagatttagatggagcagtagatgtagcaaaaaaagcatttgagacatggtctttaaaaccaccaattcaaagagcaagaattatgtttaaattcaaagaattgatagaaaaaaattctgacgaattaacaaaaatgatagtttctgaacatggcaaagtatatgaagatgcaaaaggttcattaataagaggacttgaagtagtagaatttacttgtggaattcctcaagttttaaaaggagaatttactgaaaacgttggaactgatattgacagttggtcaattaggcaaccacttggtgtttgtgcaggtataactccgtttaattttccagcgatggttccaatgtggatgtttccaatggctattgcttgtggaaatacttttgtattaaaaccatcagaaaaagatccatctatttcaattaaattagcagagttatttcaagaagctggattaccggatggtgtatttaatgtaatcaatggtgataaggaagtagttgatgcaattttgactaacaaagatattaaagctgtaagctttgtgggatcaactccgattgcaaaatatatatatgagaatgcggcaaaaaatgaaaaaagagttcaagctttgggaggagcaaaaaatcattgtgttgtaatgccagattgtgatttagatcaagctgttaatggtttaatgggagcagcttatggatctgctggcgaaagatgtatggctcagtcagtcgcagtcgcagttgggaatattggagataatttagttaatgaattgtcaaaaaaagttgaagcat

SEQ ID NO: 213909 - DNA, 1357 bp, Unknown
  Bacterial polypeptide expressing nucleotide sequence isolated from the Sargasso Sea
aaggtaaagtctataacccagcaactgggtgagcaagaatccgaagtaagacttgcttcaaaatctgatctagatcaagcagttgaagttgcaaaaaaagcttttgaaacttggtcatcgaaaccgtctcttcagagagcaagagtaatgtttaaatttaaagaattaattgaaaaaaactctgatgagctcacaagattaattgtttctgaacatggtaaagtttatgaagatgcccaaggttcattaacaagaggactagaggtcgttgagtttgcgtgtggcattcctcatttattaaagggtgaattttcagaaaatgttggaacaaatgtggatagctggtcaatgagacagccactaggtgttgttgctggaataacaccttttaactttcctgcaatggtaccaatgtggatgttcccacttgctatagcatgtggaaatacattcatacttaaaccatcagaaaaagatccttcatgcgctattaagttagcagaactcttaaaagaagcaggacttccagatggagtgtttaatgttgttaatggtgataaagagactgttgatgcgattttagaaaataaagatataacagcagtaagtttcgtgggatcaacacctattgctaaatatatttacgaaaattcagctaaaaatgaaaaaagagttcaagcattaggtggagccaaaaaccatttagtagttatgcctgactgtgatttagatggtgctgtaaatggattgatgggtgcagcatatggttctgctggcgaaagatgtatggctcaatcagttgctgtcgcggttggagatataggtgatgaattagtatcaagattatcaaaaaaagctgaagttttaaaagttggtcctggaatggataaaacatctgaaatgggacctttggtaaccaaagaacatttagaaaaagttaaaagctatgtagaccttggcgttaaagagggagcaaaactagttgtggatggaagaaatttaaaacttcaaggttatgaaagtggattctatatcggtggatgtttatttgatcatgtttcaaaagatatgagagtttacaaagaagaaatatttggtcctgttttatcagtagttagagtaaaaacttttgaggaagcagctaaattaattaatgatcacgagtatggaaatggtgtaagtatttatactagagatggtgatgcaggcagaacttttgcaagcaagattcaagtaggtatggttggtattaatgttccaatcccagttccaatggcgtttcatagttttggaggatggaaaaggtctttatttggagatagtgcaatgcatggtatggaaggaattaaattttata

SEQ ID NO: 213910 - DNA, 1012 bp, Unknown
  Bacterial polypeptide expressing nucleotide sequence isolated from the Sargasso Sea
atgatcaagattgccatcaacgggtacgggcggatcggccgcaacgtgctgcgggccctctacgagagcggccgcgacaagaacatcaagatagtggccatcaacgagctggccgcccccgaggccatggtgcacctgacccgcttcgacaccagtcacggtcgcttccaccatccggtgcagctggccggcaacagcatgctggtgggggaggatctcatctccctgttcgccgagcgggatccgtcgcgcttgccgtggcgggcgctgggggtggatgtggtgctggactgcaccggggtgttcggctcgcgggctgatgccgagctgcatctggcggcgggggcgggcaaggtgttgttctcccatccggccgaggcggacgtggacgccaccatcgtctacggggtcaaccatcaggtgctgacggggcgcgagcgaatcgtctccaacgcctcctgcaccaccaactgcgtggtccccgtcatcgaaacattgcatcgagaatttgagataaattgtggtactattacgacaattcattcggccatgcatgatcagcaagtcatcgatgcctaccacagcgacttgcgtcgaacccgcgctgccagccagtccatcatcccggtggataccaagctggccaaggggttggagcggatcctcccccacttcgccggcaagttcgaggcgatcgcggtacgggtaccgaccatcaatgtaacggcaatggatctcagtattactgttcgtaaaaaagtgacggttactgacgtaaatcaagccctgcaacgggcatccagaggtacattaagcggtattctggattacacggaagagccactggtctccgtagactttaatcatgatgctcactcctgcatcattgatggtacccagacccgggtcagcgatgccaacctcgtcaagatgttgatgtggtgtgataacgaatggggcttcgccaaccgcatgctggataccacccgggccatgatggccgcaggctgag

SEQ ID NO: 213911 - DNA, 1444 bp, Unknown
  Bacterial polypeptide expressing nucleotide sequence isolated from the Sargasso Sea
atgtacgaaaaatttggtcaatttattgatggaaaatggcaacaatcatctgacaatggaacctatgaggtaataaatcctgctactgaagaagtgattggtaaggcttctaaggctactccccaagatgttgatagagcgttaaattctgcaaaaaaaggattagaggtttggaggaaaactgctccttggcaaagatcttatataatcagacgaattgctgacaagatgagagaaaaacaagatgtacttgctaagtggatgactttagaagttggcaaaccattagcagaagcaaaaggagagattaatggtgctgcagatatttttgaatggaatgcagaagaaacaaaaagaatttttggtcaaactgttgaaagtagatttgaagacacaagagttcatgtttactatcaaccagtaggagtggtagcagcattatctccttggaattttcctgcagtattatctgctagaaaaatagcaactgctttagcagcaggttgttctgtaatcataaaaccagatgttattactccaggagttgttatggaaatggtagatatttgtaatgaatgtggagttcctccaggtgttgtaaatttattgtcaggagatcctccaagtattgctcaacaattaattgcttcagatataattaaaaaaatatctataactggttcctcaagagtaggaaaattaatattaaaacaagctgctgataaagttcagagagtaactatggagttaagtggccactcaccttttatagtatttaaggatgcagatataaaaaaagctacagatatggcaattgcagcaaaatttagaaataatggacaagtatgtatatctcccaatagattttatatccaagaagaaaaaaaagatgaatttgttaatttatttgtagaaaaaacaaaaaaattaaaaattggcaatggcatggatccagatacccaactaggacccttaacaactcaaaagagattgaatgagattgaagctctagttgaaaaaactaaaaaagaaggagctaaggttttacttggtggaaaaagacctgcaggctttaacaaaggatttttttatgaaccaacagtatttgatgatgttaaagacaattttaccataatgaaagaagaaccttttggaccattagttccaatgctttcttttaaatcttttgatgaagttattgaaagagctaataatcatgaacttggattaagcagttatgtttgtacaaactctatggaaacagctcatttagcttcagaacaattggaaactggaacagtaggagtaaatactggtttcatagctattgctgaagctccttttggtggaattaaacaaagtggatacggtagagaaggtggttctatggctataaaggattatttgaatgtgaaatatactcacatgggtattaaaggttaat

SEQ ID NO: 213912 - DNA, 1444 bp, Unknown
  Bacterial polypeptide expressing nucleotide sequence isolated from the Sargasso Sea
atgtatagcaaatttggacaattcattgacggtagatggcaggcatcacaaaacaatgaaacttatgatgttttaaatcctgcaactgaagaagttttaggtaaggcatctaaagcaggtgaagaagatgtaaacaaagcacttaagtctgcagaaaaaggtttagaagtttggagaaatactccaccttggcaaagatcaaaaattataagaaaaattgccgaccttatgagagagagaactgatgtattagctaagtggttgacattagaagttggaaaaccactatctgaagcaaaaggagaagttggaggagccgcagatatttttgaatggaactctgaagagacaaaaagaatttatggtcaaatagttgaaagtagatttgaacatacaagaatgtatgtaaaatatgagccagttggagtagttgctggattaataccatggaattttccaatagttttatcttcaagaaaaatttctactgctttagctgcaggatgttcagtaatttgtaagcctgatgtaattactccaggtagtgtaatggaactcatgaatattataaatgatgcaggtgtaccgccaggagtagtaaatttactatctggtgatccagctaaaatttcatctcaattaatatcatctgacatagtgaaaaaagtttccataactggttcaacgagagttggaaaactaattttaaaacaagctgctgaaaaagttcaaagagttactatggagttaagtggtcattcaccttttattgtttttgacgacgtagatattaacaaagtaactgatatggcaatcactgctaaatttagaaataatggtcaagtttgtatatcacctgcaagattttatattcatgaaagtaaaaaagatgaatttgctaaaacattagttgaaaaggttactaagcttaaagttggtaacggaatggatgaagatacaattttaggacctttaacaacagaaaaaagattaaatgaaatagaggcattagtagaaaaaactaagagtgaaggagcaacagttttatgtggtggaaagagaccagctggttttaataaagggtatttctatgaaccaactatttttgataatgttaaagataattttacaattgctaaagaagagccatttggacctttagtgccattgcttacttttaaagacacagatgaagttgtggaaagagcaaatgacaatgaccttggtttagcaagttatatttacactaattctttagaaaaagcgcacaaagtctcagaaaaaatggaaactggaacatgtgctgtaaaccatccaacaattgcttttgctgaagtgccttttggaggaataaaacaaacaggctatggaagagaaggtggttctatggctatcaaagattatttgaacgttaagtacactcacttcggtctcaattattaat

SEQ ID NO: 213913 - DNA, 839 bp, Unknown
  Bacterial polypeptide expressing nucleotide sequence isolated from the Sargasso Sea
catgaatttaatacaacattttgtagatggtaaaataattccaggaaaatcagatagaagaggaaaagtatttaatccagcaattggagaacaagagtcagaagtaatattaggtttaaaatcagatttagatcaagctgttgatgttgcaaaaaaagcttttgagacttggtctataaaaccaccaattcaaagagcaagaattatgtttaaatttaaagaattaatagaaaaaaattctgataaattaaccaaaatgatagtctctgaacatggtaaggtatatgaagatgcaaaaggatccttaataagaggacttgaggtagtagaatttacttgtggaattcctcaagttttaaaaggagaatttacagaaaacgttggaacggatattgatagttggtcaattagacaaccacttggtgtctgtgcaggtataactccatttaattttcctgcaatggttccaatgtggatgttcccaatggctattgcttgtggaaatacttttgtattaaaaccatcagaaaaggatccttctatttcaattaaattagcagagttattccaagaagcagggctaccagacggagtatttaatgtaataaatggtgataaggaagttgttgatgcaattttaactaacaaagatattaaagctataagttttgtaggatcaacaccaattgcaaaatatatttatgagaatgcagctaaaaatgaaaaaagagttcaagctttagggggcgcaaaaaatcactgtgttgtgatgcctgattgtgatttagatcaggccgtaaatggtttgatgggtgcagcttatggatctgctggcgaaa

SEQ ID NO: 213914 - DNA, 771 bp, Unknown
  Bacterial polypeptide expressing nucleotide sequence isolated from the Sargasso Sea
aatgacaattaaaattggaattaacgggatgggaaggattggtcgtatggttattagatcaattgtcgaaagtaaaaataaaaatttaaaaattaatcacataaacaataagtcaaattcagaagctacatctaaattaatcaaatacgattctatacatggaaaattaaatgttgatttagattttgatccaaatcatttaataattaataaaaataaaattacattttctcaagaagcaaaaatagaggacataaattggaaaaaatatgatgttgattatgtttttgaatgtactggaaaatttaattcaaaagaaaaacttctagctcatataaaaaatggtgcaaaaaaagtggtcgtgtctgctccatgtgaaaatgctgataaaacaatagtattcggtgttaatgaaaatataattactaaagaagataaaataatatctgcagcctcatgcaccactaattgcttagcaccagtaacaagtgttcttgatgaaaattttgaaattgaaaaaggttttatgaccacaattcatgcatttactagcgatcagagaattttagataactctcacaaagatccaagaagagcaagatctgcaagtcaatcaatagttcctacttcaacaggagcttcgaaagcgataggagaaataataccaaacctaaaaggtaaattagaaggtgttgcgatgagagtacctactcctaatgtttctcttgttgaattagttttttgtacaaaaaaagatattaatataaaaaa

SEQ ID NO: 213915 - DNA, 2086 bp, Unknown
  Bacterial polypeptide expressing nucleotide sequence isolated from the Sargasso Sea
aataatggtgacggtacgtggacgctggctgatgacgtagtcgctacactcgctgaaggtagttacccaacatctgttactgcaactgacaatgcgggtaataccgataccgacactggtactgtagtaattgataccactgcgcctacggttgcaataaacgatcttactaccaatgacaccacgcctgagcttaccggtacggtgaacgatccgaatgcagttgtggtggtgaccattgacggcaatgattacaccgctaccaacaatggtgatggcacctggacgttagctgataacgtagtcgctacgcttgctgaaggtagctatccaacatctgttactgcaacagacgccgcgggcaacactgtcaccaatacaggaacagtggtaattgatactaccgcacctaccgttgcaataaacgatctaaccaccaacgacaccacgcctgagcttaccggtacggtgaacgacccgaatgcggttgtggtggtgaccattgacggtaatgattacaccgctaccaacaacggtgatggcacctggacattggctgacaatgcagttgctgcgctagcagaaggcagttacccaacatctgttactgcaacggacgccgcgggtaatactgtcgccaacacaggtacagtgataattgataccaccgcgcctaccgttgcaataaacgatctaaccaccaacgacaccacgcctgagctaactggtacggtgaacgcccccaatgcggttgtggtggtgaccattgacggcaacgattacaccgctaccaacaatggtgacggcacgtggacactggctgataatatcgtcgccctgcttgcggaaggcaattacacggctgtggttaccgccacagatgcggtaggcaatgttgcaactgacacgggtacagttgttatcgacaccagtattgatgaaaacaataacggtcagacagtaacgttcgacagtatctcaaacgactctggggtggctggagactttattactagcgatagcacgcttattttcaatggaacagttgatcttggtgacaatactaccctaaccgttaccgttgatggcacatcctatacctttggcactgaccctgaacttaccattgatggcagcggtaattggagccttgatttaacaggcacagcgctaacagcaggtacctacgcggtggtggcaacagtcaccgacgaagcaggtaactcggcgagcacagcaagtcagaatgttgtcgtacaggctctcgatgcgataaacgacggtaacaccgttgatatgggcgaacctgtggttactgtaaatccaccggaaaccaccagcgacgtgcaggtgattggcttagcagaatctacaggtggcgtggatgcaagcgcctcctttaccgtttcccctaaccatgtaggtgaagtgctagtagaagttgaccaaatagcactggttgctgttgccgatgcctacattgttgaagtgtatgacgagagcggtcaacttgtttacaaaggagtaagcgcaaactcacaacttgccgatgtcggtggcctagacatttttgatgttaccggcgacgagaccatttcgttcgcgttagctggccttgatgctggcaactacagtgtggtggtccgcaatgatgagaacttacttgaagacttgttagacaacgacaatagtaacgatgttaaccttcaagaacttggttcagctggtgttgtacttggtccagacaatcaagctgttgttcttgatactattgaaacaacgttaaataccggcgttttaggtattccaattggtacggttggtacgcaggtaaggggagtactagagacacttctggaagctaccacagtaattggcgcgggccagcttgttaatttacttaccgcgcctcttgatgcaattggtttaactggcttccttgatgacattctaagtgtcattgccgatgcattgctcagcaatacattaaccttattgcaagacactgatatcaccaccacattaaccgaatacacttatacgggtgatttagtagcccaaggtaacttaattgacggtgatatta

SEQ ID NO: 213916 - DNA, 788 bp, Unknown
  Bacterial polypeptide expressing nucleotide sequence isolated from the Sargasso Sea
tcatcctgatataaacatgatatcatttacaggatctacaagagcaggtgcattaatttctcaaaatgcagcaaaagattttaaaagaataagtttagaattaggaggaaaaggtgcaaatataattttcaaagatgcagattcagaagcagtatcaagaggagttctaagatgctttagaaactcaggacaatcgtgcaatgcaccaacaagaatgctagtagaaaagtcaatttacaatgaaactgtagaaaaggtaaaagaattagcaaacaacacaaaggtagattctccagaaaaagatggtgatcatattggaccagttgtttctgaaatacaatttaataaaattcaaactttaattcaaaagggaatagatgaaggtgcaaaactagttgcgggaggaactggaaaaccaaaaggtttagaaaaaggctattatgtaaagccaactgtttttgcagatgttaataatcaaatggaaattgctagaactgaaatttttggtcctgtactatctataattccttttgaaaatgaagatgaagctatttcaatagctaatgatactccatatggattaacaaactacattcaaacacaagataaagagaaaatcaaaagagttgcaagaaaacttagatctggaatggtagatgtaaatggagttggtatagctgttagctcaccatttggcggatataaacactctggcattggaagagaagcgggaactgaaggattaatagaatttttagaagttaaaactgttggtggatggaactaga

SEQ ID NO: 213917 - DNA, 1431 bp, Unknown
  Bacterial polypeptide expressing nucleotide sequence isolated from the Sargasso Sea
tgatactaaaaaaactttttgaaacattaaacccagaagataacaaaccatgggctgttgttccagaagcaagtgccaatgatgtcgataaagcagttaaagctgctcagaaagcttttgaaggggattggccaaaaatattaccaagagaaagagctaaatttttaagagctattggaaaaaaacttagagacaatgcagaattacttggcaagattgaaacgattgatactggaaagctatttagagaaaccaacaagcaagcaaactatatagcagaatattatgactattacgctggtatggctgataaagttgaaggtactgttcttccaatagacaaaccaaatattcaagctataacctcaagaatacctataggtgttattgcagcaattgtgccatggaactcccagatgtttttaacagcaacaaaacttgctccagctctagctatgggaaatacagttgtgattaaatcctctgagcttgcacctgctgtgatgtttgaatttgcaaaacttatagaggaaactggtattccaaaaggagtagtaaatgtgattacgggatttggagatccatgtggtaaagctttaaccacgcatgatttagttgagaaagtggcttttacaggaggacctgaaactgcaagacatattattagaaattctgcagaaaacttgtcagaggttagtttagaattaggtggaaaaagtccagttgcagtatttgatgatgcacatcaggaaaatgctatcaatggaattactgcaggtatatttggtgctagtggacaaagttgtattgcaggttcaagattatatttgcaaaaaggaatttatgatgagtttcttgataaacttacaaaaagagctgaaagaattaaaattggcgctccaatggatccagatactgaaatgggccctttaagtaactttaagcaactagaaattatcgaaaaaaatataaaaaaaacaatagagcaaggtggaaaggttagatgtggaggaaaaagacatccattttctaatgaaggttattattttcctccaacaataattgagtgtgataatcacaatcttccaactgctgaaaatgaactatttggaccagttttatctgtcatgaaatttaatgatgaaaaagaagtcatagaaaaaatgaatgataatcaatatggattatcttctggtgtatacaccagtgactttgcaagaggtttaagagtatctaatgctattagggcaggaataacatttgttaacacgtatagactaatttcaccatctgcaccttttggaggaattaaagatagcgggtatggaaaggaagcaggaatggaatcaattaaagattatactagagttaaaactacttggtattatacctctgatgaaccaactttagatcctttctcaatcagataat

SEQ ID NO: 213918 - DNA, 1095 bp, Unknown
  Bacterial polypeptide expressing nucleotide sequence isolated from the Sargasso Sea
gatatagacctagctgttgaagcagccaaagaggcgtttaaaacttttggcttttcttctaaagaagaaagaattgagttaatcgaaagaattatttcagaatatgaaaaacgttcagaagaattagcaaaaacaatttctgaagaaatgggtgcgccattatggctatctaacgtagctcaagttacctcaggtttatctcactttaaagatactttagaggtattaaaaacgtttgaatttgaggggaccgaaaataactacttggtaagaaaagagccaataggtgttattgggatgattactccatggaattggcccatgaatcagatgtgcacaaaagtagcatctgcaattgcatctggatgcactatggttttaaaaccaagcgagatcactccattttgtggaattatatttactgaaatattggatgctgcaaaagttccagcaggagtttttaatcttgtaaatggaatgggtccaattgttggagctgctctatctgaacatcaagatattgatatgatgcactttacgggctcaacaagagctggagttgctgtagctatcgcctcagccccaactgtgaagagagttgcccaagagcttggtggtaaatcagcgaatattatcctagatgatgctgatatcgagaaagctgctgctgctggcgcaaatcattgctttatgaatactggacaatcatgcaatgccccaacaagaatgcttgtttcatctaagaattatgaaaaagcagttgaagctgctgctaatgtggcaaattcaacagttgttggttcgccagaagaagagggagtaaaaattggaccaatttctaataaagttcaatatgaaaaagttcaaaggttaattcaaattggaattgatgaaggtgcaaagcttgtagcaggaggtcttggaaggccagaaggtatttcagaaggttatttcgttaagccaacagtgtttgcaaatgttactaatgatatgaccattgcaagagaagaaatttttggtcctgttctttgtattttaaagtatgagtctgaagacgaagctatagaaattgctaacgacactgagtacggctta

SEQ ID NO: 213919 - DNA, 476 bp, Unknown
  Bacterial polypeptide expressing nucleotide sequence isolated from the Sargasso Sea
ggaaaagattaagtcttatcttgaacttggaaaaaaagaaggcgccaaagttctaacaggcggcagtgttgctaagcttaatagtggactagaaaaaggtaattatatccaacccactatttttgaagcgaataacagtatgcgaatctctcaagaggagatttttggacctgttgtatctgtgattaaatttaaagacgaagcagaagcattaaaaattgctaatgatactctttatggtttaggagcagctgtatggactagaaatggtaatatagctcacagaatgggtagagagatacaagcaggaatagtatggactaactgttatcatgcttatccagctcactcacctttcggcggatacaaacaatcaggagttggaagagaaactcacaaaatgatgcttaatcattatagacagaataagaacttacatgtctcttatgctgaaaagaaattaggcttcttttaaa

SEQ ID NO: 213920 - DNA, 1057 bp, Unknown
  Bacterial polypeptide expressing nucleotide sequence isolated from the Sargasso Sea
aattttaactctaagtctaataatcatatagctcttgaaccaataggagtgtgtggtttaattactccttggaattggccaatcaatcaaatagctttaaaagtaattcctgcttttgctacaggttgcacaatgatactaaagccatctgaaatagctcctatctcggcaatgttgttcgcagaaatgatagatgaagcaggttttcctgcaggagtttttaatttaataaatggagatggagctggagttggaacacaaatatctggtcatcctgatatcgatatggtttcttttactggctcaacaagagctggaaaattaattacaaaaaatgccgccgacacaattaaaagagtttgtttagagttaggcggtaaaggtggaaatattgtttttgctgactcctaccctgatgcagtaagagatggtattagaaatgtaatgagcaattctggacaatcatgcgacgctccaacaagaatgcttgtagaaaaatctatatataaaagagccgttaaagaagcaacagatgaggctaataaaattaaagtaaatgttgcatcaaaaaaaggagatcatataggaccagtagtttcaaaagttcaatacgataaaataattaatttgattaaagatggtataaatgaaggggcaacacttgctgcaggcggtccagaactaccaagtggtttagagaaaggttattttataaaaccaactatattcacagatgttacaaatactatgcagatagctaaaaaagaaatttttgggccggttctttcaataattccatttgaaacagaagaagaggcaatatcaattacaaatgaaactgaatacggtcttggaaattatctgcaaacagaagataaagaaaaagcaaaaagagttgctaaaaaattaagatctggatgtgtatatattaatggtaatggtgcagaccccggcactccttttggaggatatagacaatctggaaatggacgtgaaggtggtaattgggggttagaagaatatcttgaggtaaaaacgattactggttggaagtaat

SEQ ID NO: 213921 - DNA, 720 bp, Unknown
  Bacterial polypeptide expressing nucleotide sequence isolated from the Sargasso Sea
tatggaattaaacaagaaatcactctttagagaaaaatgttttgtaaatggccagtggtcagatagtaaaaaaggtaatactataaaagttaataatcctgctactcttgaaattattggtaaagtgccaaacttttcagctgaggaaacaaaatctgcaataaatgacgctgatgaagcatttcagtcctggaaaaatacaactgcaaaagaaagatcaattattttaaaaaaatggagtgatcttattattgaaaatgttgatgacctggcaaaaataatgactattgaacaaggcaaaccgcttgctgaagctaaaggcgaaatattgatgggagcctcttatattgaattttatgcagaggaagcaaagcgagtttatggtgatattgtgcctgatccaagaccaggaaaaagaattgtaataatcaaacaaccagttggagtagttggagccataacaccatggaattttccaaattcaatgattacccgaaaatgtgcagcagcattagctgttgggtgtacaactgtagtcaaaccagctagtcaaacacccttttcagctttagcagtggctgagcttgcaaaagaagctggatttcctaacggagtttttaatattattactggttcagcaaaagaaataggattggaattaactaagaatccaaaaattaaaaaaatatcatttactggatcaactgaagtaggaaaaat

SEQ ID NO: 213922 - DNA, 589 bp, Unknown
  Bacterial polypeptide expressing nucleotide sequence isolated from the Sargasso Sea
aatgcaccaacaagaatggctggttgaaaaatcaatgtacaatgaagcgattgagagattaaaaaaatatacagaaaattttgaggtaggagatcctaaaaaagaaggtgaacatattggacccgttatctcagaaactcaatttaataaaattcaaacattgatacaaaaaggtattgatgaaggggcaaaattagtagccggaggtacaggaaaaccagatggtttagacaaaggttattttgtgaaaccaactgtatttgctgatgttaataacgatatggaagttgcaagaacagaaatttttggccctgttctttctgtgatgccatttgagacagaggaggatgcaattaaaattgcaaatgacactgcttatggattaactaattatattcaaacacaagactctgaaaaagtgcaaagagttgcaagaaaattgagatctggaatggttgatgttaacggagcaggaattgcagttgatgctccatttgggggttttaaacattctggaataggtcgagaagccggtgaacatggtctagatgaatttttagaagttaaagcaataggtggctggagttaa

SEQ ID NO: 213923 - DNA, 397 bp, Unknown
  Bacterial polypeptide expressing nucleotide sequence isolated from the Sargasso Sea
tctgaagtctcttgcgggcggcaagccggtcgatctgccgggctactacgtgcgccccacggtgatcgccgacgtgccgcacgacgcggcaatcgtgcgtgacgaagtgtttggtcccgtgctcgccattgttccgttcgacgatccgctcgaggcattgcgcctcgccaacgattcacagtacggcctcgccgcgagtctgtggagcaatgatctgaagacggtgatgaacctcgtgccgcaaatggaggcgggcaccgtgtgggtcaattgccatgtaccgctcgaccctggcatgccgttcggcggtttcaaacagtcgggcatcggccgagagttcggcaagtacgccatcgaaggctttacggaaaccaagtccgtgtgcatcgcgcattga

SEQ ID NO: 213924 - DNA, 1047 bp, Unknown
  Bacterial polypeptide expressing nucleotide sequence isolated from the Sargasso Sea
aaaaacataacaccttctctaacaagttggcaaactgagagcttttattactatgctggaatgtgtgacaaatttgaagggcgattgataccttctgaagttcctaatatgcataattatttaaaatgggaaccattcggtgttgttgctcttgtgcttccttggaactcaccaattggaacattaatttggaaactagcacctgctcttgcagcaggtaatacagttgtaataaaaccttctgaaagggcatcatgttcaactttagagttaatgagtattttagaggaggcagacttacctgagggtttaataaacgttgtaactggttttggaaaaactactggcgcacctttaattgaacacgaagacgtaagaatgataagctttactggtggcacaaaaggcggaagtgcagccagtttaagtgcatcaaaaaaagttaagccaataattatggaacttggaggaaaatctcctcaaattatttttaaagatgctgatttaaatttagcagtaaatggagttgtctcaggtatattccctgtaacaggtcatagttgcatttctggttctagaatattagttcacaaagatattaaacaaaagtttacaaaaaaattgttggaagttgttagaaaagcaaaagtaggtcatcccaatgactcatcaactcaaattggaccaattgcaaacaaagaacagtatgaatttatattatcgaaaatagatgatgctgaaaaaagaggcttaaaattattaattgatggaagaagtgaaaaacgaactgaaggttactatattggtccaacaatatttgataatgttcctaatgaagatgatttagcacagaatgaagtatttggcccggttgcatctttacaatcatgggacaatgaaaatgaagttattaatatagctaatgatagtatttatgggttagcagctggaatatggtctaaagatgttaataaagctatacgtactgcagataaaatagaagccggcacagtgtatataaataattattttaatgcctcaacccaa

SEQ ID NO: 213925 - DNA, 1099 bp, Unknown
  Bacterial polypeptide expressing nucleotide sequence isolated from the Sargasso Sea
tcccatactctaaggcaaccactaggagtttgtgcaggtattactccttttaattttcctgcaatggttccaatgtggatgttccctgttgcaatcgcttgtggaaatacattcgttttaaaaccatctgaaaaagatccaagttgtccaatgagattagcagaattagcaattgaagctggcctaccagctggagttctaaacgttgtaaatggtgacaaagaagctgtagatacactattagaaaataaaactgtccaagcaattagttttgtaggttctactccaattgcagaatatgtatatcatactggaacaaaaaataataaaagagtacaagctcttggtggtgcaaaaaatcatatggttatcatgccagatgcagatgtaaataaaacaactgatgcaataataggatctgcttttggttctgcaggagaaagatgtatggcaatttctgttgcggtttgtgtaggaaaacaaactaaagaaaaaattaaaaaaaaattattagaggaaactgcaaaattaaatgtaggaccttatactgatgaaaaaagtgattttggtcctttaaataacaaagcacactttgaaaaagttttagggtatattgatactggtgagaaagagggtgcaaaattattagcagatggaagaaattttaaaaaacaaggttatgaaaatggatattttgtaggaccaactatttttgatgacgtcaagcctgaaatgaaaatttataaggaagaaatttttggtcctgttctaagcatgatgactactgaaacttatgaagaagcattgaatttggtaaatgatcatgaacttggaaatggagctgctgttttcactaaaagtggaaatattgccaaacattttactgaaaatgctaaaattggaatgattggagtaaatgtacctattcctgttccagttgcttatcatagttttgggggatggaaacgatctttattcggagatcattcaatgcatggtcctgaaggtgtaagattttatactaaattaaaaactgcaacaatcacttgggttgaggataatgctggtcctgaattcacaattccagttttatcttaaa

SEQ ID NO: 213926 - DNA, 829 bp, Unknown
  Bacterial polypeptide expressing nucleotide sequence isolated from the Sargasso Sea
atgtacgaaaaatttggtcaattcattgatggaaaatggtgtcaatcctctgacaaatctacatacgaagtaattaatccagctaatgaggaaactttaggtcacgcatctaaagctacaccaaaagatgttgatagagcattaaaatctgctgaaaaaggtttgcaggtttggaaaaaaacacctccttggcaaaggtcatacatcataagacgtattgctgataagataagagagaaacaagatgttctagcaaaatggatgacattagaagttggcaaaccttttgtagaagctaagggtgaggtaaatggagctgcggatatttttgagtggaacgcagaagaaactaaaagaatttacggtcaaacagttgaaagtagatttgaagatactagagtacatgtttattaccaaccagtaggtgttgtagctgcattatctccttggaattttccagcagttctgtctgcaaggaaaatttctacagctttagcagctggttgttccgtaataattaaaccagatgtgataactccaggagttgtaatggaaatggtaaatatttgtagtgaatgtggtgtgccaccaggtgtagtaaatcttttatcaggagatcctcctagtatcgctcaacaattaatagcatctgatattataaaaaagatttcaataactggctcatcaagagttggaaaattaattttaaaacaagcagctgataaagttcagagagtgacaatggagttaagtggtcattctccattcatagtttttgatgatgctgatattaaaaaagctacagatatggcaatcgcagcaaaattca

SEQ ID NO: 213927 - DNA, 1080 bp, Unknown
  Bacterial polypeptide expressing nucleotide sequence isolated from the Sargasso Sea
ctcttggcgtggtggcgggaattacaccatttaactttccggccatggtgcccctttggatgtttccgcttgccattgtatgcggcaacacctttgttttaaaaccctctgagcgagatccaagctgcgctattttcctagcaaagctacttaaagaagcagggctacccgacggcgtttttaacgttataaatggcgacaaagaagcggttgatcaaatactagatgacgagcgcattaaagcagtgagttttgtgggttcaacgcccatcgccgaatacatctattcgaaagccaatgctaatggcaagcgctgccaagcattaggtggagctaaaaaccacgctattgtgatgcccgatgccgacatcgacaacgcagtgaatcagcttttaggtgctgcttttggctcgtcaggcgagcgctgcatggcgttgtctgtcgtggttgccgtaggcgacaaagtggcggatgaaattgtagataaaatgcaatcagccatggaaagcttaaaagtaggggcttttgacgatgcgactaacgatttcggaccgcttattacacttcagcacaaagagaaagtagaaggctacataaccagtgcggctgagcaaggggctgatgtagtcgttgatggcagaaaccctagcgtaaaaggctacgagacggggttcttcttaggtgcaacacttatcgacaaggttacgccggaaatggccagctacaaagctgagatttttggccctgtactacaagttatgcgcgttaagagcatggaacaagctatgcagctcattgacagccatgaatacggcaatggtacgtgtattttcacccgagatggcgaggctgcccgctacttctcagacaatatccaagtgggcatggtaggcataaacgtaccgctgccagtgcccgtgtcttatcacagctttggtggttggaagcgctcactctttggtgaccttcacgcatacggcccggatggcgttcgcttttacaccaaacgcaaaaccattactcaacgttggccttcaagcggcattcgagaaggagtgagcttttcatttccaagttaat

SEQ ID NO: 213928 - DNA, 1495 bp, Unknown
  Bacterial polypeptide expressing nucleotide sequence isolated from the Sargasso Sea
atgaatttaatcaaacattttgttggtggaaaaataactccaggcaattcagaaagaaaaggtaaagtctttaatcctgctactggagaacaagaatctgaggtcattttagcctcaaaatcagacttagatggtgcagttgaaattgcacaaaaagcttttgagacttggtcattaaatcctccacttcaaagagctagaataatgtttagatttaaagagcttatagaaaaaaattttgatgaactggcaaaactaatagtctcagagcatggaaaagtttacgaggatgccaaagggtcattaataagaggattagaagttgtagagtttgcatgtggaattccacatttacttaaaggagagttttctgaaaatgttggaacaaacgttgatagttattcaatgcggcagcctttaggagttgcagctggtataaccccatttaattttccagctatggtgccgatgtggatgtttccattagctattgcatgtggaaatagttttattttaaaaccatcagaaaaagatccttcatgtccgatgaaattagctgaacttcttcatgaagctggtcttcctgagggtgtttttaatgttgtaaatggtgataaagaggttgttgacgctatattaacaaaccaaaatattaaagctgttagttttgttggatcaactcctattgctaagtacatatatgaaaatgcagctaaaaatgaaaagagagttcaagcattaggtggagcaaaaaatcatttagttgttatgccagattgtgatttagatggtgccgtaaatggtttgatgggtgctgcatatggttcagctggagaaagatgtatggcgcagtcagtagcagtagcggtaggagatataggtgatgagttagtctcaagactatcaaaaaaagctgaagcattaaaaattggacccggtatggataaatcatctgagatgggccctttagtaaccaaagaacatttagaaaaagtaaaaggctatgtagatataggagttaaagagggagcaaaactcgttcttgatggaagaaatttgaaattacagggatatgaaaatggtttttatattggtggttgtctttttgatcatgtgactactgatatgagaatttataaagaggaaatatttggaccagttttatctgtagttagggtaaaaacatttgaagaggctacaaaaatgattaatgagcacgaatacggaaatggagttagcatttatactagagatggagatgcaggtagaacattcgcaagtaaaattcaagttggaatggtaggaataaatgttcctattccagttccaatggctttccatagttttggaggatggaaaaggtcattatttggagatagtggaacgcatggtatggaaggtgtaaaattttatactaaattaaaaactattacttctagatggccatcaggaattagatctaatcctgaatttattatgccaacaatgaaataaa

SEQ ID NO: 213929 - DNA, 1297 bp, Unknown
  Bacterial polypeptide expressing nucleotide sequence isolated from the Sargasso Sea
aatgaatttaatagaacattatattgatggaaaatcttattctggttcttctgataaaaaaggtaaaatctttaatcctgcaactggtaaacaagaatctgaagtaatacttggattaaaagcagacttagacttggctgtagaaaaggcaaagaaagcttttgaaagttggtctaatgtaactccactacagagagcaagaataatttttaaatttaaggatttaattgagaaaaattctgacgaactaactaagttgattgttaatgagcatggaaaagtttacgaagatgccaaaggttctttaacaagaggattagaagttgtcgaatttgcttgtggtataccacaaatgcttaaaggtgagtttacagaaaatgttggtacaaatatagacagttggtctacaagacaaccattaggagtttgcgcaggcattaccccatttaattttccagcaatggttccaatgtggatgtttccaatggcaattgcttgtggtaatacatttgttttaaaaccatcggaaaaagatccttcttgtgcaatgatgttggccaaattatttaaagaagcaggtttgcctgatggagtttttaatattgtaaatggagataaagaagttgttgatgctattttagaaaacaaagatattcctgcagtaagttttgttggctcaacaccaattgcaaaatatatttatgaaaatgctgcaaaaaatgaaaaaagagttcaagctttaggaggggccaaaaatcactgcgtagtaatgcccgattgtgatttggaccaagctgtaaatggattaatgggagctgcttatggatctgctggagagagatgtatggctcaatcagtagctgttgctgttgggaatattggtgacgatctagttaatcaaatgtcaaaaaaagttgagacactcaaagtaggtcctggtatggataaatcatctgaaatgggacctttagtaaccaaagaacatttagaaagagtaaaaggatatattgatttgggagtaaaagaaggtgcaaaacttgttgtagatggtagagatatcaatcttcaaggttatgagaatggttattatatagggggatgtttatttgatcatgtcaaaaaagatatgagaatatataaagaagaaatttttggacctgttttatctgtagtgagggttaaaaattttgatgaagcacttcaacttataaatgaccacgaatttggaaacggtacaagtatttatacaagagatggagatgtaggaagaacttttgcaaataaaataaaagttgaa

SEQ ID NO: 213930 - DNA, 314 bp, Unknown
  Bacterial polypeptide expressing nucleotide sequence isolated from the Sargasso Sea
agtgagagtgccgaccatcaatgtttcattggttgatctcagctttgtcgcctccagagaaacttcggtcgatgagatcaatgaggtggtcaaagcggcatcagagggtgctttaaaaggtgtgcttgattacagcgatggaccattggtatcaatcgatttcaatcacaaccctgcatcttccacatatgatgcaaccatgacaaaagtacaagagggaactttggtgaaagtatgctcttggtatgacaatgaatggggtttttcaaatcgcatgcttgatacaacactcgcattggtcaacgctgagtaat

SEQ ID NO: 213931 - DNA, 598 bp, Unknown
  Bacterial polypeptide expressing nucleotide sequence isolated from the Sargasso Sea
caatcttgtaatgcgccaacaagaatgttggtcgaaaaatcaatgtatgatgaggctattgatagactaaaaaaatatactgaaaactttgaggtgggtgatcctaaaaaagaaggagagcacataggtccagttatttcagaaacccaatacaataaaattcaaactttaatccaaaaaggtattgatgaaggagcaaaattagttgctggaggaacaggtaaacctgatggattagacaaaggttattttgttaaaccaactgtttttgcagatgtaaataatgatatggatgttgcaagaactgaaatttttggacctgttttatctgttatcccatttgaaacagaagaagaggcaattaaaattgcaaatgatacttcttatggattaacaaactatattcaaactcaagactctgaaaaagttcaaagagttgctagaaaattaagatctggaatggtggatgttaacggagctggtattgcagttgatgcaccatttggaggctttaaacactctggtattggtagagaagcaggtgaacacggcttagaagaatttttagaagtaaaagctgtgggtggttggagttaat

SEQ ID NO: 213932 - DNA, 665 bp, Unknown
  Bacterial polypeptide expressing nucleotide sequence isolated from the Sargasso Sea
tatatttaaagatgcagaccccaaggcaattgaaagaggagctcttagatgttttataaattccggtcaatcgtgtaatgcaccaacaagaatgttagttgaaaaaagtatgtatacccaagcagttgagagagtaaaacaatttgctaacgaaatgaaagttggcgatcctaataaagaaggagaacacattggcccagttgtttctgaagttcaatataaaaaaatccaatctttaattcaaaaaggaatagatgagggcgctacacttgtagctggcggtattggaaaaccagatggtattgaaaaagggtactttgtaaaacccactgcttttgctgatgtcaataataatatggaaattgctagaacagaaatctttggtcctgttttatcaattatacctttcgaaaatgaagaggaggcaattgaaatagctaatgacactgattatggactaacaaattatattcaaactcaagataaagaaaaagcaaatcgtgttgcaagaaaattaagatctggaatggttgatgttaatggcgctggtatagcagtagatgctccttttggtggatttaaacactcaggaattggaagagaggcaggtaaagaaggtttattagaatttttagaagtcaaatctgttgggggctggaattaat

SEQ ID NO: 213933 - DNA, 886 bp, Unknown
  Bacterial polypeptide expressing nucleotide sequence isolated from the Sargasso Sea
atgttacttgcggaaatgattgatgaggccaaatttcctccaggtgtttttaatttagtaaatggagatggagctgttacgggagatgctttaactagtcatcctgatattgatatgatttcttttacagggtcaactagagctggtgcattaatttctcaaaatgccgcaaaagattttaaaagaattagtttagaattaggtggaaaaggtgcaaacataatttttaaagacgccgattcagaagcgatagcacgaggtgttctaagatgttttagaaattcaggacaatcttgcaatgctcctactagaatgcttgtcgaaaagtcaatttacaatgaaactgtagaaaaagtaaaaaaattagcaaatgacacaaaggtagattctccacaaaaagacggtgatcatattggacctgtagtttcagaagttcaatttaataagattcaaactttaattcaaaaaggaatagatgaaggagcaaaattagttgctggtggaaccggtaaacctaaaggcttagaaaaaggttattatgtaaaaccgactgtttttgctgatgttaataatcaaatggaaattgcaagaactgaaatttttggaccagtactatctataattccttttgaaaatgaagaagaagctatttcaatagcaaatgacaccccttatggtttgacaaattatattcaaacgcaagataaagaaaaagttcaaagagttgcaagaaaacttagatctggaatggtagatgttaatggagttggtatagctgttgcatctccttttggtggatataaacattctggtattggacgagaagctggaactgaaggtttaatagaatttttagaagttaaaacagttggtggctggaattaga

SEQ ID NO: 213934 - DNA, 799 bp, Unknown
  Bacterial polypeptide expressing nucleotide sequence isolated from the Sargasso Sea
catgcgcaaaatcacacatttaatcgatgcacaaagtgttgaatctacttcaggaaatgtaggacctgtttataaccctgctacaggggagcagacaggagaagtggatcttgcttcagttgcagaagtcgatcttgcagttgaatcgtctaaaaatgcttttcaagaatggggaaatgtttctattgctagacgagtaaaacttttacataatttcagaaatttagttattgaaaatgaaatggagattgcctcacgattaacacaagagcatgggaaagtggctgatgatgcaagaggagaggttgctagaggtatagagaatattgagttcgcctgtggatttgcagattccttaaaaggcacttacagcgaacatgcatcaacaggagttgacgtttatacagtaaggcaacctcttggtgtatgtgctggtataacaccttttaattttccagcgatggtgccattgtggatgattcctaatgcagttgcatgtggaaatactttcgttttgaaaccttctgaaagagatccttccgctccgagatttttaattgaattgatacaagaagccggatttccaccaggcgtagttaatttggtcaatggtgataaaactgcagttgacagattattggaacacccagatattgctgccgttagtttcgtgggatctactccaatagccaagtacgtttattcaacaggtacttccacgggaaagcggattcaggctctcggcggagccaaaaaccataaattggttttacccgacgctgatttggatctgcagcgg

SEQ ID NO: 213935 - DNA, 943 bp, Unknown
  Bacterial polypeptide expressing nucleotide sequence isolated from the Sargasso Sea
ttggctgaacttctatctgaggctggtcttccagatggagtgtttaatgtaataaatggtgataaagaagctgtagatgcaattttagaaaataaagatattaaagctgttagttttgttggatctactcctattgcaaaatatatttatgaaaattcagctaaaaatgaaaaaagagttcaagctttgggtggagcaaaaaatcatttagttgttatgccagattgtgatttggatggtgctgtaaatggattaatgggtgctgcttatggttcagctggagaaagatgtatggctcaatcagttgcggttgcagttggagacattggagatgaacttgtatcaagattatcaaaaaaagctgaagcgttaaaagtgggtcctggaatggataaaacttcagaaatgggacctttagttacaaaagaacatttagaaaaagttacaagttatgttgatttaggtgtcaaggaaggtgcaaagctagtggttgatggaagaggtttaaaacttcaaggttatgaaaatggtttctatataggtggatgtttatttgatcatgtaaaaaaagacatgagaatttacaaagaagaaatattcggtccagttttatcagttgttcgagtaaaaacttttgaagaagctgcaaaattaattaacgaccatgagtacggaaatggagttagtatttatacaagagacggtgatgctgggagaacttttgcaagtaaaattcaagtaggtatggttggtattaacgtgccaatcccagttccaatggcatttcatagttttggtggttggaaaagatcattatttggagatagtggaatgcatggtatggaaggaataaaattttatactaaacttaaaacagtaacatctagatggccttcaggtgtccgatcaaatgtggaatttgttatgccaacaatgaaataaa

SEQ ID NO: 213936 - DNA, 1090 bp, Unknown
  Bacterial polypeptide expressing nucleotide sequence isolated from the Sargasso Sea
cattttatagatggccaaattaccaaaggatcttcaaaaaaaaaatctaaggtatttaatccagctactggcgaacaatcagctgaagttaatctagcttctaaaactgatatagatttagctgttcaaaaagcaaaaaaagcatttatcgattggtctcgaaaacctccagctcagagagcaaggataatttttaaatttaaagagttaatagaaaaaaattcggacgaaataactaaactgatagtttctgaacacggaaaagtgtacgaagatgctaaaggatcattaaacagaggattagaggtagtagaatttgcatgtggaataccgcaccttcttaaaggagaatttacagagaatgtaggaactgatgttgacagttggtcaattcgacaaccactaggagtttgtgcagggattactccttttaattttccagcaatggttccaatgtggatgtttcctatagctattgcatgtggcaatacatttgttttaaaacctagcgaaaaagatccatcatgttcaattaagttagcaaaattatttaaggaggcaggattacctgatggagttttcaatgtagtaaacggagataaagaggcagtagatgctttgcttacaaacaaagatgtagtagccataagctttgttggttcaactccagtagcaaaatatatttatgaaaatgctgcaaaaaatgaaaaacgtgtacaagctttaggtggagccaaaaatcattgtgtagttatgcctgactgcgatttagatcaagcagtgaatggtttaatgggagcagcttatggctctgctggagaaagatgtatggcccaatcagttgcggttgctgtaggtaaaattggcgatcaacttgtgaataaaatttctaaaaaagttgaatcattaaaaattggaccagggttagataaaaattcagaaatggggcctttgataacaaaacagcatttagaaaaagtaaaaggatatgtagatcttggagttcaagaaggggcaaaattagttgttgatggcagaaatataaaacttcagggctatgaaaaaggtttttatataggaggttgtcttt

SEQ ID NO: 213937 - DNA, 298 bp, Unknown
  Bacterial polypeptide expressing nucleotide sequence isolated from the Sargasso Sea
gagaacagaaatatttggtccagttttatctgtaatgccttttgaaacggaggaagaagctattgaaattgcaaacgatactccctacggattaacaaactacattcaaaccaaagataaagaaaaagtaaagagagttgctagaaaacttagatcgggaatggttgatgtcaatggtgctggtattgctgttgatgcgccttttggtggatttaaacattcggggattggtagagaagctggagaacatgggctagaagagtttctagaggttaaatctgtaggtggatggagttaa

SEQ ID NO: 213938 - DNA, 1444 bp, Unknown
  Bacterial polypeptide expressing nucleotide sequence isolated from the Sargasso Sea
atgaatcctcagacttttttgaactggatcgacggccgctgggtggccggcgaaacggttgtcgagaaccgcagtccgtccgacacggacgacctgatcggctgctacacgcaggcaaccagcggccaggttcacgcggccattgcagcggcggccgtcgcgcaacccgtctgggcagcaactggactcgaaaagcggcacgacgtgctgcgggctatcggcgacgaactgatcgcgcgcagtcaggaactggggcggctgctggcgcgcgaagagggcaagacgctcgcggaaggcgtcggcgaagtcacccgttcaggacagttcttccattacttcgccgccgaggtgctccgtcagttgggcggcaaggccgattcggtccgcgcgggcatcgagatcgatatccagcgcgaggcgcttggtgtcgtcggcgtgatcacgccctggaatttccccatggcgaccgcaagctggaaaatcgcacccgcgctcgcattcggtaacgcggtgctgttcaagccagccaatctgacgcccgctagtgcctgggcgctcacggaaatcatcagccgccaggcattgcctgccggcaccttcaacctgctgatgggcgcgggcgcatcggttggcaacgagcttgctgcttcccaatcggtcaacggtatttcctttaccggctcggtggacaccggccggcgcctcgcgggcgtcgccgcgccgaatctcatcaagctacagatggagatgggcagcaagaatgcgctcgtggtgctcgacgatgcggacctcgacctcgccgtcgaatgcgcgtttcagggcgcctattcgggcacggggcagaaatgcacagcctcgtcgcggctggtggtgacacacgcggtgcaccggccgttcgtcgagcggctcaccgcaaaactgcgcagcgtgaaggtgggacgctcgctcgacgacggcgtgcagatgggtccggtggtcgatgcccgccaactcgaacagaatcttcggtacatcgagatcggcaagcgcgaaggcgcgcggctcgtgcatggcggtgaacatctcgcgcagcccgaacgcgcatattgcatgtcgccggccttgttcgacgatggccgcaacgacatgcaactcaatcgcgacgaagtgttcggcccgattgcctgcgtgatccctgtgcgcgactacgacgaggcgctggcggtttcgaacgatacgcccttcggcctgacggcgggcatcgtcacgcaatcgctgaagcacgccacgcattttcgtcgcaatgcccaggccggctgtgtgatggtgaatctgccgacggcgggaaccgactatcacgtgccattcggcggtcgcaagtcatcgagctacggcccgcgcgagcagggtcccaatgcagctgagttctatacgacgctgaagacttcttacacgcgcgcctgaa

SEQ ID NO: 213939 - DNA, 559 bp, Unknown
  Bacterial polypeptide expressing nucleotide sequence isolated from the Sargasso Sea
aaaaaatgctacaatgaagtaattgatattgcaaaaaaaactgctgaagaaattaatgtaggtgatccgacactagatggtgaccatctagggccactttttgataaaattcaatttgatcgggttcaaaatatgattcaagttggtattgatgaaggagcaaaactattagtaggtggccttggaaagcccgatggccatgaaaaagggtggtttgtaaaaccaacaattttttctgacgtaaataataatatgagagttgcccaagaggaaatatttggtccggtattagttataattccttttaatgacgaggatgaggcaatcagaatagcaaatgataccccttatggtcttgctgcttatttgcaaacgggagataaagaaagagcagaaagggtctcaaggcaattaagagcaggcggtattcatgttaatggtggtggttataattatggttcaccttttggaggatataaagaatctggtaatggccgagaaggtggagacatggggcttgaagattaccttgaaactaaagcacttcacattgcctaag

SEQ ID NO: 213940 - DNA, 790 bp, Unknown
  Bacterial polypeptide expressing nucleotide sequence isolated from the Sargasso Sea
aagtcatccagatattaatatgatttcttttacaggatcaacaagagcgggagctttgatttcacaaaatgctgctaaagattttaaaagagtaagcttagaattaggtggcaagggtgcaaatataatttttaaagatgctgatccagaagctattgaaagaggtgctttaagatgttttagaaattctggacaatcttgtaatgcaccgacaagaatgttagttgaaaaatcaatgtatgaagaagctattgagagattaaaaaaatatactgaaagttttgaggtgggtgatcctaaaaaagaaggagaacatataggtccagttatttcagaaactcaatacaataaaatacaaactttaatccaaaaaggaatagatgaaggtgcaaaattagttgctggaggaacaggtaaacctgatggattagacaaaggttactttgttaaaccaactgtttttgcagatgtaaataatgatatggaagttgcaagaacagaaatttttggacctgttttatctgttattccatttgaaacagaagaagatgcaattaaaattgcaaatgatactgcttatggactaacaaactatatccaaacccaagactctcaaaaagtacaaagagttgcaagaaaattaagatctggaatggttgatgttaatggagctggtattgcagttgatgcacctttcggtggttttaaacattctggaataggtcgagaagcaggtgaacacggtttagaagagtttttagaagtaaaagccgtaggtggttggagttaa

SEQ ID NO: 213941 - DNA, 1141 bp, Unknown
  Bacterial polypeptide expressing nucleotide sequence isolated from the Sargasso Sea
atgaatttaatagaacacttcgtaaacggtaaaataattccgggatcttcagataaaaagggaaaagttttcaatccagcaactggtgaacaagagtctgaggtaagacttgcttcaagatctgatttagacagtgctgttgaggcagcaaaaaaagcatttgaaacttggtctttaaaacctgctctacaaagagctagaataatatttaaatttaaagaattaattgaaaaaaattctgatgaattaactaagttaatagtttcagagcatggaaaggtttatgaagatgcaagaggttctttaactagaggacttgaagtagtggaatttgcttgcggaattccacatttattaaaaggtgagttttccgaaaatgttggcactaatgttgatagttggtcaatgagacaacctttaggagttgttgcaggtatcacaccttttaactttccagcaatggttccaatgtggatgtttccaatagcaatagcatgtggaaatacttttattcttaaaccatcagaaaaagacccatcttgtggtctaagattggctgaacttctatctgaggctggtcttccagatggagtgtttaatgtaataaatggtgataaagaagctgtagatgcaattttagaaaataaagatattaaagctgttagttttgttggatctactcctattgcaaaatatatttatgaaaattcagctaaaaatgaaaaaagagttcaagctttgggtggagcaaaaaatcatttagttgttatgccagattgtgatttggatggtgctgtaaatggattaatgggtgctgcttatggttcagctggagaaagatgtatggctcaatcagttgcggttgcagtcggagacattggagatgaacttgtatcaagattatcaaaaaaagctgaagcgttaaaagtgggtcctggaatggataaaacttcagaaatgggacctttagttacaaaagaacatttagaaaaagttacaagttatgttgatttaggtgtcaaggaaggtgcaaagctagtggttgatggaagaggtttaaaacttcaaggttatgaaaatggtttctatataggtggatgtttatttgatcatgtaaataaagatatgagaatttacaaag

SEQ ID NO: 213942 - DNA, 1261 bp, Unknown
  Bacterial polypeptide expressing nucleotide sequence isolated from the Sargasso Sea
aatgactgagcttaaaaaatataaaatgtttattggtggagaatgggttgattctgataccaaaaaaacatttgaaacacttaatccagaaaataataaaccttgggcagtagtcccagaagctagtgcaaatgatgttgataaagcagttaaagctgcacaaaaagcctttgaaggtgaatggtcaaaattattaccaagagataggggtaattatttaagagcaatagcaaataaacttagagaaaatgctgaacttttaggaaaaattgaaacaattgatactggcaaactttttagagaaacaaacaagcaggcaaattacattgctgaatattatgattattacgcaggtttagcagataaagttgaaggaactgtattaccaatagacaaaccaaatattcaagctattacaacaagaatacctataggggttattgctgcaatcattccttggaattcacaaatgcttttaacagtaactaagttagcgcctgcgcttgcgatgggtaatacagtggtaattaaatcgtcagagctagcaccagctgtgatgtttgaatttgcaaaacttgttgaagagacaggaataccaaaaggagtcgtaaatgtcataacaggttttggtgacccttgtggaaaagcattaacttcacataatttagttgaaaaggttgcttttactggtgggcccgagaccgcaagacatattattagaaactctgcggaaaatttatcagaagtaagtctggaacttggaggaaaaagtccagttgctgtatttgatgatgcacatcaagaaaatgcaattaatggaataactgcaggaatttttggggcaagtggtcaaagttgtatagcaggatcaagactatatttgcaggatggaatttataatgaatttttagataaacttgctgtcagagcaaataaaattaaaattggagctcctatggatccagaaagtgaaatgggtcctctaagtaattttaaacaactagaaataattgaaaaaaatataaaacttactgtagatcagggtggaaaaataaaatgtggaggaaaaagacatgcgttttctaacgaaggatattatttttcgcctacaataattgaatgtagtaatcataatcttccagttgcagaaaatgaactctttgggcctgtattgtctgtaatgaaatttaaaactgaagatgaagtaatagaaaaaatgaatgataaccagtacggattaagctctggtgtttatacaagt

SEQ ID NO: 213943 - DNA, 526 bp, Unknown
  Bacterial polypeptide expressing nucleotide sequence isolated from the Sargasso Sea
ccattaaaaatggaaactatgattggagcccaagcttcagttgagcagatggaaaagattaaatcttatcttgatcttggtaaaaaagaaggtgcaaaagttcttgcaggtggtgctgttggtaaacttaatagtggtctggaaaaaggaaattatatccagcccacaatttttgaaaccaacaacaaatctcgtatttctcaagaagaaatatttggccctgtagtatctgtaattaaatttaaagatgaggcagaagcattggaaattgctaatgatactctttatggtttaggcgcaggtgtttggactagaaatggtaatattgcctacagaatgggtagagcaatacaagcaggaattgtgtggactaattgttatcacgcatatccagctcactcaccatttggtggttacaaacaatcaggagttggaagagagactcataaaatgatgcttagtcattatagacagaataagaacttacatgtgtcttatgctgaaaagaaattaggcttcttttaaa

SEQ ID NO: 213944 - DNA, 1153 bp, Unknown
  Bacterial polypeptide expressing nucleotide sequence isolated from the Sargasso Sea
gagctccaatatgtgttatcccaagttgctcaggtagcttctggccttactcattttaaagataccctgaatgttcttaaaaactacgattttgagtatgagaaagatggttatctagttcgcaaagagcctgtgggtgttgttggaatgatcactccctggaattggccaatgaatcagatgtgcacaaaagtagcatcaggcatagctgctggatgcaccatggtgcttaagccaagtgaaataacccctttctgcggaataattcttgcagaaattattcacgaagctggtgtacccgctggaatctttaatttagttaatggcatgggtccagttgttggtgcctcaatgtcagaacacaaagatatagatatgatgcattttactggttcaacacgggcaggagttgctgttgctcaagcatcagccccaacagtgaaaagagttgctcaggagcttggtggtaaatctgccaatatagtccttgatgatgcagatattgaaaaagctgtatctgctggtgtctcttcatgtttcttaaatacaggacaatcatgtaatgcaccaacaagaatgcttgtgtcatctaagaactatgacaaagcagttgaagttgctgccaatactgcaaatgctattaaagttggagatccttttgatgctgatacaaaaatgggtccaatttctaataagacccaatatgagaaggttcaaaggatgattcagattggtattgatgaaggagcaacattatctgctggtggcgttggtcttccggaaggttgtgagagcggttattacgtaaaaccaactatattttctgatgtaactaatgatatgactattgcaagagaggaaatttttggcccagttttatgtttaattaaatatgaaaccgaagaagaagccattgagatagcaaatgatactccttatggccttgcaggatatatccaaggtgagcatgcgcatgcagttgaagttgcctcaaaaataagagctggccaaattactattaacaaaggagctagagttagatcagcaccatttggtggttatggttcctctggtaacggaagagagcatggaacacatggccttgaagaatgtttagagacgaaagctgtaattggagctttagtcgaataaa

SEQ ID NO: 213945 - DNA, 1111 bp, Unknown
  Bacterial polypeptide expressing nucleotide sequence isolated from the Sargasso Sea
tatgtatagcaaatttggacaattcattgatggcaaatggcaagcatcacaaaataatgaaacttatgatgtttttaatcctgccactgaagaagttttaggtaaggcatctaaagcgggtgaagaagatgtaaacaaagcacttaagtctgcagaaaaaggtcttgaagtttggagaaatactccaccttggcaaagatcaaaaattataagaaaaattgccgatcttatgagagagagaactgatgttttggctaagtggttaacattagaagttggaaagccactatcagaagcaaaaggggaagttggaggagctgcagatatttttgagtggaactctgaagaaacaaaaagaatttatggtcagatagttgaaagtagatttgaacatacaagaatgtatgtaaaatatgaacctgttggagttgttgctggattaataccatggaactttccaatagttttatcctcaagaaaaatttccactgctttagctgcaggatgttcagtaatttgtaagcctgatgtaattactccaggtagtgtaatggaacttatgaatattataaatgatgcgggcgttcctccaggagtagtaaatttattatctggtgatccagctaaaatctcatctcaattaatatcatctgatatagtgaaaaaagtttctattactggttcaacaagagttggaaaactaattttaaaacaagctgctgaaaaagtccaaagagttacaatggaattaagtggccattcacctttcattgtttttgacgacgtagatattaacaaggtaaccgacatggcaattactgctaaatttagaaataatggtcaagtttgtatatcaccagcaagattttatattcatgaaagtaaaaaagatgaatttgctaaaaaattagttgaaaaggttactaaactgaaagttggtaacggaatggatgaagatacaattctaggacctttaactacagaaaaaagattaaatgaaatagaggcattagtagaaaaaactaaaagtgagggagcaacagttttatgtgggggaaagagaccagccggttttaataaaggatatttctatgaaccaactgttttttga

SEQ ID NO: 213946 - DNA, 712 bp, Unknown
  Bacterial polypeptide expressing nucleotide sequence isolated from the Sargasso Sea
gatggaggacattaaaaattatcaaatgctaatcgacggcgattgggtagatgcatctgatgggggtgtttttgatagtgtgaacccaaacacagacaatgtttggagccaggttccagaggcaactgaagcggacgttaatcgagccgtttcttctgctcacaaggcattaaacgaaggcccatggtcaaagtttacaccaacagagcgtggaaaatgccttcgaaagctcggtgacttgctcgctgacaactctgaaagtttgggtcgcattgaaaccattgatactggcaaaatgctgaaagaaacgcgctggcaagctaagtatattgcagagttcttccatttttttgcaggctgtgctgataaggtaagtggtgaaactttaccaattgataagcccgatatgtttgtgttcacgaagcgagaaccacttggcgtcgtcgccgctgtggtgccgtggaactctcaattattcctagtggcagtcaaaattggacctgcgttagccgctggaaatactgtagtactcaaagcttctgaacatgccagtgctgctatgttagaatttggcaaattaattgagcaagcaggtatcccaccaggtgttgtaaatattgttactggtcatggagaaccttgtgggcgagtcctaacgtcacatccacacgttgcccgtgttctttcactggcggccctaacgccgcccgcc

SEQ ID NO: 213947 - DNA, 995 bp, Unknown
  Bacterial polypeptide expressing nucleotide sequence isolated from the Sargasso Sea
catgcagcagtataaaaattttattgatggaaaatggattattagcgaatcaaaggaaacaataaaggttgatgatccttcaaatggtaaaatcattggcgaaatttcatgtgcaaaaaaaaatgaagttgatcttgcagtagaagcagctaaaaattcttataacagcagagttcttgtagatatgcctttactttcaagagcaaagcttatgagaaaaattgccgaagagacaagaaaggtttcaaaagaaggtggtgagcttctttgttatgaaaatggaaaaaatattgcttcagcaattaaagaattcaatgatgtagcagatatgtttgattattatgcaggcttaacagataaacttgagggtaaaacaatacctgttgcaaaaaatgtttttgattacacagttttagaaccatttggtgtatcagcacatgttgtgccatggaattttccattatcaatgattggaagatcactgtcatgttcttttgctacaggaaattcaacaattataaaaactgcagaattaactcctttgtccgcaacaatttttgctaaagcaatacaaaatgctgatgtaccagaaggactaatcaacataatttgtggatatggaaatgaagcaggatcttatcttgtatctcatgaagatgtaaatcacgtagtctttacaggttcggtcgcaactggaaaaaagatacttcatgcttgtgcagacaaagctattcctgctgtagttgaattaggtggaaagtcagctggtattgtttaccctgatgctgatttaaatgaagttctagaaagtgcacgttcaggaatttttagtgttgctggtcaaatatgtacagcgatgtctagattggtagttcataaatcgatcaaagatgaattagtagataagcttgttgatatgagtaaatctttaaaaattggacctggtatagaaaagagatacagatcaagcgctacaaatgatgagataaagaaaa

SEQ ID NO: 213948 - DNA, 709 bp, Unknown
  Bacterial polypeptide expressing nucleotide sequence isolated from the Sargasso Sea
atgactaattatagttttgaagagtggaagaaagctgcaagtaaaattaactttagaaataaagcatttattaatggaaaatttgttgaagctaaatcaggcaaaacctttgactcaatcaatcctgctacagatgaagttttaacttctgttgcagagtgtggtcaagaagatgtagattttgcagttgaaatagctagaaaatcttttcaaaaaggtagttggtctaaaatgcctccagcagagagaaaagctgtattacttaaattagctgatttaatcagagaaaatctagaagagtttgcccttctcgatagtttggatatgggtaaacttataactgatgctgtaactatagactctccaggttcagcagcattttttcaatggcatgcagaggctattgataaaatgtatgatgaaattgctccaacaggaccaggtgatttagcaatggtaacaagagaacctcttggagttgtaggagctgtagtgccatggaattttccccttgatatggcgacatggaaagcatctgctgcgcttgcagcaggaaattctttagttttaaaaccagctgaacaatcgcctttatcagctctgcgattagcagaacttgcgattgaagcgggtgttccagaaggagtctttaatattgttcctggatttggtgaaactgctggtaaagcacttggcctacatcaagatg

SEQ ID NO: 213949 - DNA, 1483 bp, Unknown
  Bacterial polypeptide expressing nucleotide sequence isolated from the Sargasso Sea
aatgtctgaattaaaaaaatataaaatgtttattggaggagaatgggttgattctgatactaaaaaaacttttgaaacattaaacccagaagataacaaaccatgggctgttgttccagaagcaagtgccaatgatgtcgataaagcagttaaagctgctcagaaagcttttgaaggggattggccaaaaatattgccaagagaaagagctaaatttttaagagctattgcaaacaaacttagagacaatgcagaattgcttggcaaaattgaaacaattgatactggaaagctttttagagaaacgaacaaacaagcaaactatatagcagaatattatgactactacgctggtatggctgataaagttgaaggtactgttcttccaatagacaaaccaaacattcaagcaataacttcaagaatacctataggtgttattgcagcaattgtgccatggaactcccaaatgtttttaacagcaacaaaacttgctcctgctctagctatgggaaataccgttgtaattaaatcctctgagcttgcccctgctgtgatgtttgaatttgcaaaacttatagaagaaactggtattccaaaaggagtagtaaatgtgattacgggtttcggagatccatgtggcaaagctttaactacacataatttagttgagaaagttgcctttacaggagggcctgaaactgcaaggcatattattagaaactctgcagaaaacttgtctgaggtaagtttagaattaggcggaaaaagcccggttgcggtatttgatgatgctcatcaagaaaatgctattaatggtattactgcaggtatttttggagcgagcggacaaagttgtattgcaggttcaaggctgtatttgcaaaaaggaatttatgataagtttcttgataaacttataaaaagagctgaaaaaataaaaataggtgcacctatggatccagaaactgaaatgggtcctttaagtaactttaagcaactagaaattattgaaaaaaatataaaaaaaacagttgaacaaggtggaaaaataaaatgtggaggtaaaagacatcctttttctaatgacgggtattattttcctccaactataattgaatgcgataatcataaccttccaactgctgaaaacgaattatttggtccagttttatctgttatgaaatttaatgatgaaaaagaagtcatagaaaaaatgaatgataatcaatatggattatcctcaggagtttatactagcgactttgctagaggcttaagagtatctaatgcaattagagctggaataacatttgttaacacttatagattaatttcaccttcagcaccttttggcggaattaaagatagtggatatggaaaggaagcgggaatggactcaattaaagactatactagagtaaaaactacatggtattacacttctgatgaaccaactttagatcctttctctataagataa

SEQ ID NO: 213950 - DNA, 1483 bp, Unknown
  Bacterial polypeptide expressing nucleotide sequence isolated from the Sargasso Sea
aatgactgaaataaaaaaatataaaatgcttatcaatggtaattggacatctggttccgaaaataaattttttgagagtttaaatccctatactggagaaatctggtcaagcataccaactgcaagtgtaagtgatgttaattctgcagttgaggcagcacatcacgctttttctgaagggccttggtcaaaaatgacgcctactcagcgaggttcttgtttgaggaaattagctgagcttttaagcgaaaagtccgaaccactaggaaaaacagaaaccatagatacaggtaaaatgcttaaggaaacacgttggcaagctaaatatatttctgaattctttcaattttatgcaggttgtgcagataaaataagtggtgaaactttaccaattgataaacctgatttattggttttaaccgaaagggaacctcttggtgtaatagcagcgattgttccatggaattcccaattgttcttagtagcagtcaagcttggtccagctcttgctgctggaaatacagttgttttaaaagcttcagagcatgcttctgcagctatgttagagtttggtgagttaattgaaattgcaggttttcctcctggcgttgtaaatattattacaggtcatggtgatccttgtggaaaagaattaacttcccatccactcgtagctcgtgtttcatttacaggtggtccaaaatcagctcaaaatataattaataatagtgctaacaattttgctgaagtatcattagaattaggtggtaaatctccattcattgtctttgatgatgcaaatattgaaagtgctgtaaatgggtctatagcaggaatatttggagcatctggccagagttgtgttgcaggttctagactatatcttcatgaaaaaattgcagataaatttctgcataagatgatgaatgtagttaattcaataaaacttggtgatccattagaagaagatactcaaatgggccctctatgtactttaaatcaaattgaaaatattgaaagagaaattgcttttgcaagatctgaaggtgctgaaattttgtgtggtggaaaaagaccatcaaatcttcaaggctttttctttaatccaacaattatttcgtgtccaaaacaagcattgagaattgtagatacagagctttttgggccggttcttagtgttcttacctttagagatgaacaagaagtaataaaacttgcaaatgacaccaagcatggcttggcggctggaatctttagtgaaaatagtgctcgctctcttagagtagcaaggtccgtaagagctggaatagtatgggtaaatacttatagagttgtatcgcccatagctgaatttggaggatttaaaggatcaggttatggtagggaaagtggatttcaagcaatgtatgattacacgcgtccaaaaactatttggcttaatacttctaatgaatccatgagtaacccatttgtaatgagataa

SEQ ID NO: 213951 - DNA, 946 bp, Unknown
  Bacterial polypeptide expressing nucleotide sequence isolated from the Sargasso Sea
atgaattataaagatattagccagagtgacttttctctcgactacacaactggcttttctggtgaaatattcgatgttgttgaacctgctactggtaaagtactggggagcattaatgctgccactacagaagaagccaataaggtaatcgaacattgtaaaaaagctcaacctgaatgggcgaccagtacatttgaagtgcgtgcaggtattttgagaaaatttgccaaggcacttgaagacaacgcagagctcattcatacgtggaatgctcgcgaatgtggctctattcgcccaaaaagtgaatgggaattacaagcgtgtattgagcagtctcatactgctgctagtttagcacaagcgccaagtggtgagctttatccatcaaccatgcccacacgtaaaaacatgcgtgtacgcattccagtaggtgtggttggtgtcattgctccgtggaatttccctctactcctatcattgcgtgccgtgctaccagcactcgccatgggtaacaccgtggtattaaaacctgatccacagagctactttaccggtggagttatcattcaggagctgatgaaaattgctggactacctgacggtgtattgggtttattaccaggtggtgcagaaccaggacaagctgttgttgaacacccagcaacaggcatgattgcttttacaggttctaccgcagttggacgctcgattgctcagcattgtgctaagacatttaaaaagacgtcattggaactaggcggaaacaatgccttcattgtactggaggatgccgatattacttctgcagcttcgtgtgctgcgtggggtgcattcctgcatcagggtcagatatgtatgcaatcaggacgtcatattgtgcacgaagatattgctgatgcgtatatagaagcgttagcacagcgtgccaacaaccttcatgttggta

SEQ ID NO: 213952 - DNA, 3964 bp, Unknown
  Bacterial polypeptide expressing nucleotide sequence isolated from the Sargasso Sea
tctggtatccgaagaaggaaacatggctagcaccaccctcggcgtcaaggtcgacgacctcctgcgttcccggctgaaagatgccgctacgcgcctcgaacgtactccgcactggctgatcaagcaggcgatcttcgcatacctcgaaaagatcgaacacggtcagttacccccagaactgtcaggccacacgggctcggccgatctggccgacggcgcggcggtggagcacgacgaagagagcgcgtcgcatccgttcctcgaattcgcgcagaacgtgcaaccgcaatcggtgctgcgcgcggcgatcaccgcggcgtatcgccgtcccgaaccggaatgcgtgccgttcctgctcggtcaggcgcgtctgccggccaatctcgcgggcgatgtgcaggccatggccggcaagctggtcgaaacgctgcgcacgaagagcaagggcggtggcgtcgaagggctgatccacgaattctcgttgtcgagccaggaaggcgtggcgttgatgtgcctcgccgaagcactgctgcgcatccccgatcgcgccacgcgcgacgcgctgatccgcgacaagatcagcaagggcgactggaagtcgcacgtcggccaggcgccgtcgctgttcgtcaatgccgcgacgtggggcttgatgatcaccggcaagctggtggggaccaacagcgaggcaagcctctcgtcggcgctcacgcgcctgatcggcaaaggcggcgagccgctgatcaggaagggcgtcgacatggcgatgcgcctgatgggcgaacagttcgtcaccggcgagaacatctccgaagcgctggccaacagccgcaaatacgaagcgcgcggcttccgctactcgtatgacatgctcggcgaagcggcgaccaccgaagccgacgcgcagcgctactacgcgtcgtacgaacaggcgatccacgcgatcggcaaggccgccggcggccgcggcatttacgaaggcccgggcatctcgatcaagctgtcggcgctgcatgcacgctattcacgttcgcagcaggaacgcacgatgagcgaactgctgccgcgcgtgcgctcgctggcgatcctcgcgcgccgctacgacatcggcctgaatatcgatgcggaagaagccgatcgcctcgaaatctcgctcgacctgctcgaagccttgtgcttcgacccggaactggccggctggaacggtatcggtttcgtggtgcaggcgtatcagaagcgttgcccgttcgtgatcgaatacctgatcgatctggcgcgccgcagccgtcaccgcatcatggtccgccttgtgaagggtgcgtactgggataccgaaatcaagcgcgcgcaagtggacggtctggaaggctatccggtctacacgcgcaagatctacacggacgtgtcgtacctcgcctgcgcgaaaaagctgctcggcgcaccggacgcagtctatccgcaattcgccacgcacaatgcgcacacgctgtcggcgatctaccatctcgcgggcaacaactactaccctggccagtacgagttccagtgcctgcacggcatgggtgaaccgctgtacgaggaagtcaccggccgcgacaagctgaaccgtccgtgccgcgtgtacgccccggtcggcacgcacgaaacgctgctcgcctacctcgtgcgccgtctgctggaaaacggcgcgaacacatcgttcgtgaaccgcatcgccgatgaaagcgtcgcgatcaaggacctgatcgccgatccggtcgacgaagcgtcgaagatcgtgctgctcggcgcgccgcacgcgaagattccgctgccgcgcaatctgttcggtgccgagcgtctcaattcgatgggtctcgatctgtcgaacgaacaccgcctggcctcgctgtcctccgcgttgctggcgagcgcgcatcacccgtggcgcgccgcgccgatgctcgaagacaatgagatcgccgtcggtgtcgcacgtgacgtgcgcaacccggccgatcatcgcgacctcgtcggcacggtcgtcgaagcgacgccggaacacgtgagcgcggcattggcgcacgccgttgccgccgcgccgatctggcaagccacaccggtcgaggctcgcgccgattgcctcgcgcgtgccgccgatctgctcgaagcgcagatgcacacgctgatgggtctcgtcgtgcgggaagccggcaagtcgctggcgaacgccgtcgcggaaatccgcgaagcgatcgatttcctgcgctactactcgacgcagatccgcaatgaattctccaacgacacgcaccgtccgctcggcccggtggtgtgtatcagcccgtggaacttcccgctggcgattttcatgggccaggtggcggcggccttggcggccggcaacaccgtgctcgcgaagccggcggaacaaaccccgctgatcgccgcgcaagctgtgcgcattctgcgcgaagccggtgtgccggcgggcgccgtgcaactgctgccgggcgacggcgaaacggtcggcgcagcgttggtggccgatccgcgcacccgcgcggtgatgttcaccggttcgaccgaagtcgcgcgtctgatcaacaaaacgctgtcgagccgccttgacccggaaggcaagccgattccgctgatcgccgaaaccggcggtcagaacgcgatgatcgtcgattcgtcggcgctcgccgagcaggtggtcgcggacgtgctgcagtcgtcgttcgattccgccggtcaacggtgttccgcgttgcgcgttctttgtctgcaggaagatgtggcggaccgcacgctggaaatgctgacgggcgcaatgcgcgaactgtcggtgggcaatccggatcgtctgtcgattgacgttggcccggtgatcgatctcgacgccaaacgcgggattgacgcgcacgtcgcggcgatgcgcgagaaaggccgcaaggtcgagcaactgccgatgccggaaggcggcgcacaaggcacgtttgttccgccgacgctgatcgagctcgatagcatcgacgaattgaagcgtgaagtgttcggcccggtgctgcacgtggtgcgttaccgccgcagccagctggacaagctgctcgaacagatccgtgcgacgggctacggcctcacgctcggtatccatacgcggatcgacgaaaccattgctcacgtgatcagccgcgcgcatgtcggcaacatctacgtgaaccgcaacgtgatcggcgcggtggtgggagtgcaaccgttcggcggcgaaggtttgtcgggcacggggccgaaagcgggtggcgcgctgtatctgcaacgtctgctggcgacgcgtcctgcgggcttgccgaagtcgctcgcgcagtcgttgatcgccgacgtaccgcaagccggcccgaacggggataatcgcggcgacaatccgtccgcggcgttgacggcgctgcgcgactggctgatcagcgaacagcagccggtgctggccgcgcgctgcgacggttatctgtcgcatatgccggcgggcgcaacggcggtgttgtcgggccccacgggcgagcgcaacacgtacacgctcggcgcgcgcggcacggtgctgtgcatcgccgcgacggccagcggcgcgcgcgtgcaattcgccgcagcgctggctacgggaaatcgcgcgctgttcgaaggcgcggcgggtgaacaattggtatcgcaattgcccgctgcgttgaagtcctacgcaagcgtgaagaagagtgccgatacgccgttcgacgcggtgctgttcgaaggcgatagcgacgaactgctcgcgctggtgaaagaagtcgcgaaacgtccggggccgatcgtttcggtgcagggcgtcgcggcgcgcgcgctggaaagcggcgatgaagactacgcgctcgagcgtctgttgacggaacgctcggtcagtgtgaataccgcggcagcaggcggcaatgcaaatttgatgacgatcggttga

SEQ ID NO: 213953 - DNA, 1202 bp, Unknown
  Bacterial polypeptide expressing nucleotide sequence isolated from the Sargasso Sea
tctgcgccatcgtgcggaagagatggcgcagtgtatctcacgtgaaatgggtaaacccattaagcaggcgcgtgctgaagtcgccaagtcagcagcgttgtgtgactggtacgccgagcatggaccggcgatgctcagtccggaacccacgctggtggagaataaccaggcggtgattgagtatcgtccggtaggaactattctggcgatcatgccgtggaacttcccactctggcaggtaatgcgaggtgccgtcccgattctgttggccggaaatggttacctgttaaagcatgcgcctaacgtaaccggctgtgctgcaattattgcgcaggttttcgctgatgcgggtgtacacgcgggggtttacgtttgggtgaatgccgataacgcaggggtcagtcagatgatcaatgacccgcgtatcacggcggtaacggtgacgggtagtgttcgtgccggtgcggcgattggcgcccaggcgggggccgcgttgaaaaaatgcgttcttgaactggggggctccgatccatttattgtccttaatgatgcagacctcgatctggccgttaaggcggcggtcgccgggcgttatcagaacaccgggcaggtttgtgcggcagccaaacgctttattatcgaagaagggatagcggcagaatttacttcacgctttgtggccgcagcgagcgcgctcaaaatgggcgatccgctgaacgaagaaaacgatctggggccgatggcgcgatttgatctgcgtgatgagctgcaccagcaggttgaagccacccttgccgaaggggcgcggttacttctcggcggggaaaaaattgcgggtcatggtaattactataccgtgacggtactgggcgatgttactccagagatgacggcgttccgccaggagctgtttggtccggttgcggcaattactgtggcgaagaatgcggaacatgccttagcgctggcgaatgacagtgatttcggcttatctgccacggtgtttactgcggatgaagtgctggcgcagaagatggcgtcacgcctggagtgtggtggcgtattcatcaatggttacagtgccagcgatgcccgcgttgcgtttggcggtgtgaagaaaagtggttttggccgagagctttcgcactttggtttgcatgagttttgtaacgtgcagaccgtctggaaaaaccgcctttgat

SEQ ID NO: 213954 - DNA, 625 bp, Unknown
  Bacterial polypeptide expressing nucleotide sequence isolated from the Sargasso Sea
atgtatgaaaaatacggacaattcactgatggtaaatggcatcaatcatcaagtggcgaaacatacgaagttttaaatcctgcaaatgaggaaattattggacatgcttcgaaggcttcaccagaggatgttgagagagctttaaggtctgctgaaaaaggtttggaagtttggaaaaaaacaccaccttggcaacgtgcttatattttaagaagaattgctgacaagatgagagaaaagcaagacattcttgctaaatggatgacacttgaagttggcaaaccgtttgctgaagcgaaaggtgaagtgaacggtgctgcagatatttatgaatggaatgcagaagaaacaaaaagaatttacggtcaaaccgttgaaagtagatttgaagacacaagagttcatgtttattatcagccagtaggagtagttgcagctttagttccctggaattttcctttagttctatcagctagaaaaatttctactgctcttgcagcaggttgttcagtaatcgttaaaccagatgtcataacaccaggtgttgtaatggagcaagttgaaatttgtagagagtgtggcgtgcctcctggagttgttaatttattatcaggagaccctccaa

SEQ ID NO: 213955 - DNA, 601 bp, Unknown
  Bacterial polypeptide expressing nucleotide sequence isolated from the Sargasso Sea
gcaatcatgtaatgctccaacaagaatgttggttgaaaaatcaatgtatagtgaggctgtagagagattgaaaaaatatactgaaacttttgaagttggtgatcctaaaaaagaaggtgaacacataggacctgtaatttctgaaactcaatacaacaagattcaatctctaattaaaaaaggaatagatgaaggtgctaaattaattgctggaggaactggtaaacctaaaggatttgaaaaagggtattttgtaaagcccacagtgtttgctgatgtaaataacaatatggatatagctagaacagaaatttttggacctgtattatctgtaatgccttttgaaactgaagaggaagcaattcaaattgctaatgacaccccttatggtttaacaaattatattcaaactcaagataaagaaaaagttaagagggtagcaagaaagctaagatctggaatggtagatgtgaatggtgcaggtattgcagtcgatgctcctttcggaggctttaagcattctggtataggtcgggaggctggagaacatggtcttgaagaatttttagaagtcaaatcagtaggtggttggaataactaa

SEQ ID NO: 213956 - DNA, 1444 bp, Unknown
  Bacterial polypeptide expressing nucleotide sequence isolated from the Sargasso Sea
atgtccataccataccccaacactagtctttatataaacggaaaatggaggcctgccgactcaggtgatacactcgaggtgattaatccagcaaccgaagaagtcattggaaccgttgcacgtgccgggacatccgatctagacgaagcattagacgcggcagataaggcctttaaaatttggaaaacaactagtccctttgatcgctaccatgtcctgcgtaaagccgctgagctgttgaggaaaagggcggatataatcgctgaaatcatgacgatggaacaaggcaaaccattggccgagtcaaaaggcgagacgcttattggagctgacagaatagactggatggccgaagaaggccgtcgaacttacgggcgtgtcataccggcgaggacagatagtgtatatcaattcacggttaaagaacctgttggacctgttgctgcgtttaccccctggaattttccattaaatcaaatacttcaaaaggttccggcagcgatcgctgctggttgctctattattgttaaaggccccgaggaggctcctgcctgttgtgcggaattggcaaaaatttttgaagaggcgggattgcctccgggcgtcctaaacttgatatatggtataccagcagagatatcagattacctgataccgcatcccgtaataaaaaaagtaaccttcacaggttcgacggcagtcggaaaacagttggctgctaaggctggagaatacatgaagcttgtaactatggagctgggcgggcattcaccggctattgtgtttgaagatgccgacttagatgtggcattaaacgtactctcaatgaataaataccgcaatgcgggccaagtttgtgtatctcccacgcgcttcctcgttcatgagtcagtctatgataaatttgtgtcaggtttcaaagaggtatcacagaatttaactgtcggagacgggctgttgcctgatacaaaaatgggtcctctagcgcatgatcggcgtttagaagctatcgacgaatttgtaaaagatgcggttaagcgaggcggcaggattcaaacagggggagaaagaaaaggtaataaagggtacttttatgaaccgactgttttaacagacgtgccactagatgctaggattatgaacgaggagccgtttggtccggtggcgcccatcactccatttaagtcctttgacgacgtagtagaagaagcaaaccgcctaccttatgggctggcagcgtatgcttataccaactcaaacaagactgcggaggctataggaagtgctctctctagcggtatggtgtcgatcaatcatcacggactagctatgcccgaaacgccgtttggaggtattggtgagtctggatatgggaaagaaggcggagtagaagggattgaggcatatcttcaaacaaaattcataacccaggctaatatttaaa

SEQ ID NO: 213957 - DNA, 1483 bp, Unknown
  Bacterial polypeptide expressing nucleotide sequence isolated from the Sargasso Sea
aatgtctgaattaaaaaaatataaaatgtttatagatggtgagtgggttgactccgagagtaaaaaaacatttcaaacattaaatccagaaaacaatgaaccttgggcggaagtgccagaagcaagtgaaaaagatgttgataaagctgtaaaagcagcacaaaaagctttcgaaggaacatggccaagtttgtttccaaaagaaagagcaaaatatttgaaagcaatcgcagaacagctccgaaaaaatgcagagcttcttggaaaaattgaaacaattgatactggcaaattgtttaaagaaacaaaaacccaagcaaattatatagctgaatattatgattactatgcaggtcttgctgataaagttgaaggaacggttttaccaattgacaaacccgatatgcaagtaataactactagagttccgattggagttgttgcagcaattattccttggaattcacaaatgcttttaacagctgtgaaattagctccagctttagcaatgggaaatacagtagtgattaaatcatctgaattggctcctgcaactttatttgagtttggaaaattaattgaaaaaactggaattcctaaaggaacaataaatataatttctggttttggagatccgtgtggaaaagctttaacttcacataatctagtagaaagagttgctttcaccggtggacctgaaactgctaggcacataattagaaattctgcagaaaatttatctcaagtaagtttagagcttggaggtaagagtcctgttgctgtttttgaagatgcagatcaagaaaatgcattaaatggaattactgctggaatttttggcgcaagtggacaaagctgtatagcaggttcaagattatacattcagaatagcatttatgataattttttagaaaaaattattaataaagcaaataaaattaaattgggatcccctatggatacaaatacacaaatgggccccttaaatagtttaaaacaattagaagttattgaaaaaaatatcaaacttaccatagatcaaggtggtaaacttagatgcggtggcaaaagacataatatgtcaaataaaggatattattttccaccgactgtgattgaatgtgaaaatcataatttgcctacttctgaaaatgaattatttggtcctattttatctgtaatgaaatttaatacagaagaagaggttatagataaaatgaatgacaacaagtatggtttatcatctggaatttatacaaaaaatattaataaagcattaagagtttcaaaagctatacgtgcaggaattacatttgtaaacacatatcgattaatttcaccaaccgcgccttttggtggaattaaagatagtggttatggaaaggaagctggaattgagtctataaaggactataccagaataaaaacaacttggtttaatacttctgacaaaccaatggatgacccgtttacaatgggttaa

SEQ ID NO: 213958 - DNA, 1378 bp, Unknown
  Bacterial polypeptide expressing nucleotide sequence isolated from the Sargasso Sea
ggcagttgtgcctgaagctaatgcaaaagatgttgataaggctgtaaaagctgcgcaagctgcttttgaaggagaatggcctaaattacttcctagagaaagagcaaaatttttaagagcaattggtgacaaacttagagataatgctgagttacttggaaaaattgaaacaatagatactggtaaattatttagagaaacaaataaacaagcaaactatatagcagagtattatgattattatgctggactagcagataaagtagaaggaactgttttacctatagacaaacctaatattcaagcaattacaacccgtattcctattggagtaatagctgcaatagtgccttggaactctcaaatgtttttaactgcaacaaaattagcaccggctcttgcaatgggaaacacagttgtaattaaatgttcagaattagcacctgcagtaatgtttgaatttgcaaaattaattgaggaaacaggtattcctaaaggagttgtaaatgtagtaactggttttggtgatccatgtgggaaagctttaacagctcatcctttggttgaaaaaattgcttttactggaggtcctgaaactgcaagacatataattagaaattctgcagaaaatttatctgaagttagtttggaattaggaggaaaaagtccagttgctgtatttgatgatgcaaaacaagaaaatgcaataaatggaattacagcgggtatttttggtgcaactggtcaaagttgtatagctggttctagattatatttgcaaaaaggaatttataatgaatttttagacaagctatctgctagagctgaaaaaataaaaattggagcgcctatggatccagatacagaaatgggtcctctaagtaattttaaacaactagaagttatagaaaaaaatatcaaacttactattgaacaaggtggaaaaataaagtgtggtggtaaaagacattctttttcaaatgaaggttattattttccaccaacaattattgaatgtgataaccacaacctacctactgcagaaaatgaattatttggtcctgttctttctgttatgaaatttaataccgaagaagaggttattgaaaaaatgaatgataaccaatatggattatcatcaggtgtttacactagtgatttagcaaggggattgagagtatctaaagctataagagcgggtataacatttgtaaacacttataggttaatttctccttctgctccatttggcggcattaaagatagtggatatggaaaagaagcaggaatagactctataaaagactataccagagtgaaaacgacatggtattatacctctgatgaaccaactttagacccattttcaattagatag

SEQ ID NO: 213959 - DNA, 307 bp, Unknown
  Bacterial polypeptide expressing nucleotide sequence isolated from the Sargasso Sea
atgaaagttgcaattaatggtttcggaagaatagggcgctcagtatttagaattcttaattcacaacaaaacattgatgtggtagctattaatgatattgctgacaatgaggcaatggcttatcttctcaaatatgatacggtaatgggtccctttaaagactctgtagaaataaatggtgacatattaaaaacatcttacaatgagattaaaatgctagccgaaagagagcccggccatttgccttggggtgagatgggggttgatgtagtgatagagtctactggaatatttagaacaaaaaaac

SEQ ID NO: 213960 - DNA, 1453 bp, Unknown
  Bacterial polypeptide expressing nucleotide sequence isolated from the Sargasso Sea
atggaacttaaaaataatgcgcttttcaaagaaaattgtctaatcggtggtaaatggattgaaagcaattctggtgaaaagattgatgtagacaatcccgcaaatggtgaaattattggcaaagttcctaaatgctcaacatctgaaactagtaaggcaattgatgaggctcaaaaagcttttcctgcatggagagataaaactgcaaaggaaagatcgataatactccaaaaatgggcaagattaattgaagatcatgttgatgatttagcaaaaattatgacggtcgagcaaggaaaacctttggcagaagctaaaggtgaaattttaatgggagtaacgtatattgatttttatgcagaagagggaaaaagggtttacggtgatatcatagctgatccaatgcctgacagaagaatagttgttattaaacaaccagttggtgttgtaggagcaattactccttggaatttccctagcacaatgattacaagaaaatgcgcgcctgcacttgctgtaggttgtacggttgtaataaaacctgctagtcaaactccttattctgcacttgctcttggagttttggcaaaagaagctggctttcctgatggtgttattaatataattacaggatcagcaggtgctattggtaaagaattaacagaaaatccaattgtaagaaaaatatcatttacaggttctacagaagttggaaaaattcttttacaacaaagtgcttctacagtgaaaaaagtatcaatggaattggggggtcatgcaccatttgtagtatttgatgatgcagacattgatgaagcagttacaggagctatgcaaagtaagtttagaaattcaggtcagacctgtatctgtgccaacagaatttttgttcatgaaaaagtttatgatgattttttaaataaatttattcaggaagttaataaaatcaaagtcggaaatggcttggaggaaggtattgtctcaggaccactcattgatcaaccatctcttattaaagtacatgatcaagtaaaggatgcagttaatcaaggagcaaaaattgcagtagggggagatgtgcatccattaggaggtaatttttatcagccaacaattctctcagatgttaccacaaaagcaaaaattacatatgaagaaacttttggtcctgttgcccctttatacaagtttaaaacagatgaagaagtaattaaacttgcgaatgatacaccttatggccttgcatcatatttttactcaagagatataggtagaatatggagagtggcagaggcgcttgaatatggcatggttggtgtaaatacgggactgacaactaaggcagaaataccttttggaggagttaaagaatcaggtcttggaagagaaggttctcggtacgggcttgatgattacttaaatataaaatatatttcaatggccggtatttaag

SEQ ID NO: 213961 - DNA, 1279 bp, Unknown
  Bacterial polypeptide expressing nucleotide sequence isolated from the Sargasso Sea
atgcttgataaaaaaaatttttatataaatggaaaatgggttaaacctttaaaaccaaaagattttgaagttataaacccatcaaacgaagagccttttgctgttatttcattaggatcaaaagatgacactgatgcggctgttaatgcagcaaaaaaagcttttttaaaatggaaagaaacttctaaggaagaaagaataaagttattagaaaaacttctaagtatttataaaaaaagatttaatgaaatggcagaagctatttcaatggaaatgggagcaccaatggactgggcatctgatgttcaaactgcttctgggcaaacacatttagaagattttattttaagattaaaaaattttaactttgaaaagcaattcgatacaaaatctaacaatcatatatgttatgaacctattggagtatgtgctctaatcactccttggaattggccaatcaatcaaatagcgttaaaagtaattcctgcttttgcgacaggttgtacaatgatactcaagccttcagaaattgcaccggtgtcagcaatgatttttgctgaaatggttgatcaagctggttttcctcctggtgtatttaatttagtaaatggtgatggtgcaggagttggaacgcatttatctggtcacaatggaatcgatatggtttcttttactggctcgacaagagctggaaaactaatttctaaaaacgcagcagatacaattaaaagagtttgtttagaactaggtggtaaaggaggaaatatagtttttgctgattcttatccaaatgcagttagagatggaattagaaatgttatgagtaattctgggcaatcgtgcgatgctccaacaagaatgcttgttgaaaaatcaatttatgaaaaagctactaaggaagcaacagatgaagctaataaaattaaggtagatatagcttctaaaaaaggaaatcatatagggcctgtagtttcaaaagtacaatacgataaaataatcaacttaataaaagacggaattaatgaaggagcaacacttgcggccggaggtcctgacttaccaaataatttaaataaaggttatttcattaaaccaacaatattcacaaatgttacaaatgagatgcaaatagcaaaaaaagaaatttttggacctgttctttctataattccatttgaaacagaggaagaggcagtcgctattacaaatgatactgagtatggtcttggaaactatttacaaactgaagataaagagaaagcaaaaagagttgcaaaaa

SEQ ID NO: 213962 - DNA, 580 bp, Unknown
  Bacterial polypeptide expressing nucleotide sequence isolated from the Sargasso Sea
tatgagctcaggaaacaaatacaaagtaatatcaaataaacttaaatttgaaggaagagcattcattaatggtaaatatgtaaatgctatcgatggtaaaaagtttgaaacaatcaatcctgcaactggtaaaaagctttgtgctgttgcaaaatgtaatcataaagatgttgatttggcggttaaagtttcaagaaaagcttttaatagtggagtttggtcaaagagttcacctgaacatagaaaagaggttttattaaaatttgctgaattacttcgaaaacatggtgatgaaaattcagttttagaatgcatagatacaggtaaacttatcgctgactgtattaatgaagttgcaaatgatgcaccaatgcattttcagtggtatggagaattaattgataaagtattcggaaaagttggtccaacagaaccatctataactagtttaattgttaaagaaccaataggagttgttgctggaattgtcccctggaactttcctttaatgatggcggtatggaaaatggcaccagctcttgcagctggttgttcagtaattattaaaccagcagaagat

SEQ ID NO: 213963 - DNA, 1102 bp, Unknown
  Bacterial polypeptide expressing nucleotide sequence isolated from the Sargasso Sea
ttggaagatttcattttaagacttaaagaatttaattttgatgaacaatttgataaaaaatcaaacaaccatatatattatgaaccaattggagtttgcgggctaattacaccttggaactggcctataaaccaaattgctttaaaagttattccagcattagctacaggatgtacaatgattttaaaaccttcagaaattgctcctatttcaggaatgctatttacggaaatgattgacgaggtaggttttccaaaaggagtatttaatttagttaatggtgatggagctggagttggtactaatatttcaagtcacccagatattgatatggtttccttcacaggttcaacaagagctggaaaactaatctctaaaaatgcagctgaaacaattaaaagagtttgtttagagttgggaggaaaaggtggaaatattgtttttgctgatagttacaaaaatgcagtaagggatggaatacgaaatgttatgagcaactcagggcaatcttgtgatgcacctacaagaatgttagttgaaaaatctatttatcaaagagcagtgaatgaagcgatagatgaagcaaataaaataaatgtagatcaagcttcaaaaaaaggtgatcacattggacccgtaatttctaaagttcaatatgataaaatcataaatttaattaaaagtggaatttctgaaggggctactttagctgctggcggtcctgagttaccagatggtttaaataaaggatactttataaagccaactatattcactgatgtaacaaatgatatgagagttgcaaaagaagaaatttttggacctgttttgtctattattccttttgaaaatgaagatgaagcagtaaaaattgtaaatgatacttcttatggcttgggaaattacttgcaaacagaagataaagaaaaagctcatcgtgtggcaaaaaaattaagatctggatgtgtatatataaatggcaaagcagcagattcaggaactccttttggaggatacagacaatctggaaatggtcgtgaaggtggtgtttggggattagaagaatatttagaagtaaaaacaattacgggatggaaataat

SEQ ID NO: 213964 - DNA, 469 bp, Unknown
  Bacterial polypeptide expressing nucleotide sequence isolated from the Sargasso Sea
tatgatttcaaaaggacatttgcaaacggttgatggatatattcaaaaaggaatagatgagggagcaaaacttttaactgggggagtttcagataacaagcaaaaaggtttttatgcaaaaccaactttatttgacggattaaaagaaaatatgactatagctcaagaagaaatatttgggccagtactcggtgttttaacagttaaaaatgatgaagaagctttgaaagttgcaagtaattctaaatacggattacatgctagtgtatttactcaagacataaacagagcatttcatctagctaaaagcttgccttgtggaactgtatcggtaaatactttttctgaaggagatattaaaactccatttggaggttataagcaatcagggtctctaagcagagatcagggtactgaggctctaaattcatttcttcaaacaaaaacaatctggataagtcataattaa

SEQ ID NO: 213965 - DNA, 496 bp, Unknown
  Bacterial polypeptide expressing nucleotide sequence isolated from the Sargasso Sea
attggatccagaaacaaacatgggtccattgatgtcagcacaagctcaaaaaagagtattgggcttcattgaatcaggaaaaaatgaaggtgcgaaactcaaatttggtggaagcattccaactggacttgagtctggatgttttgttgaaccaaccatgtttgcagacgtaaacaatgacatgaccattggtcgtgaagaaatctttggaccggttgcttccattattccgtttgattctgaggaagaagccatcgaaatggctaatgatacgatctatggcctttgtgcatccgtatggacgagcaatgtaagtcgagctcacaacatggcgaaagccattgagtcaggcatggtttatgtcaactgctacgacgttggcgatatgacctttgagtttggtggatacaagcaatcaggcaataccaaagattcatgctttgagtcagtgcttgggtacacacaaagcaaatcgatttggtataacctcgggtaa

SEQ ID NO: 213966 - DNA, 1468 bp, Unknown
  Bacterial polypeptide expressing nucleotide sequence isolated from the Sargasso Sea
tatgtctaaaacagtggatttttcaacaaaattgatcataggaggtaggcctcttcctggatctgaaggcaaaacatttgagactattaaccctgctaatggaaaggttttagcaagtatcgctgaggcttcaggtgaagatgttaataaagctgtgtccgcagcaagaaaagcttttgaggagggtccttggtctaagatggcacctgctgagagaaaaaaagttttattgagatttgcaacagtcatagaggctcatgcagaggagttagcgatgatggaagctatggaagcaggcaagcctataactgattgtctagaaatagatatgccagaaacagttaatactattcgctggcacgcagaagccattgataagctctatgatcaaatttctccaagtgacccaagtatcctctcgatgattgtcagagagccgatgggtgttgtcgcggctattttaccatggaattttcccgcaatgatggctgcctggaagcttggccccattcttgcaactggaaatacagtggtcctgaaacctgctgaacaaacctctctttcaacaattcgaattggagagcttgctgcagaggcaggcattcccgatggtgttataaatattgtttgtggttttggtgagaccgtaggaaaagcgctaggtgaacatcctgatgttgattgcgtagcttttactggttctactgaaactgggcgaatgtttcttcgttactctgctgatactaatcttaaaagagttttattagagtgcggtgggaaaaatccttttattgtaatgggtgacactgaggacttagatacagcagctgatcatgccactaattctatattttggaatatgggagaaaactgttcttcaaattctcgtttacttgtccatcagtcaatcaaagatgaactactagaattaattgtcgagaaatccaaagagtgggtagtgggagatcctctagatgcttcaactaaaattggccctatgattgaacaagcacatctagacaaggttatgggcttcattgatcaagctaaccaggataaaaataaattagttattggaggcaaaagaactagagaagatacaggtggatattttgttcagccaaccatatttgatgacgtaaagcctgaaaatacactattttctgaagaagtttttggccctgtcttagggatcacaacctttaaaaatccagaagaaggcatagctctagctaatcaaaataagtacggactggccgcttctgtttttactagttctaataagacagctcatgtagccgcaagaaaaattaaggctgggactgtagcagttaattgttacggtgagggcgatatcactactccttttggtggttataaactctccggcttcgggggcagggataaatctttagctgcacatgatcagtattgtgagctaaaaactatttggatagatttaacgtga

SEQ ID NO: 213967 - DNA, 1318 bp, Unknown
  Bacterial polypeptide expressing nucleotide sequence isolated from the Sargasso Sea
ttggttaaaagatttaatcccgacaaaagacgcagaccaaaggtcgatgaccactttggggactggaaatggagagaagctcttgctgaatctatggttcctatgatcggtaaactctatcgcaatggggttagattgttaatgtatggtcgtcctttaattaattgttcagcaattgagatcatgaaacttcatcgatttgtacgtgaagtagagggtaatgaattaagtgagcttgagacatatcctgtgatagagcaaatctcaaaaatgaaattaatgccttgtgagattgacgttggggaagtagtagttcatcttcttgataacgataagctggatcctgtaaagcacgttaaaaatatgcttaaagagcagatcagaactaaaagatctcaccctttaaggcctaaagacatagttttatacggttttggaagaataggaagaattttaaccagaatccttgttagtgaaacaggacctggagtaaattggcgcttaagagctgttgttgtaagagattcagaaaatcctgaagatctaatcaaaagagcaagcctacttagaaatgacagcgttcatgggacatttccaggaacaattagagtaaacagaaaaaataactccttaatagtcaacggtaatgaaattgtgtttatttatgccagtgatccaagaaaagtagattacaaaaaatatgggatcaaaaaggctactataattgataatactggggtttggagagatgaagatgggcttaaaaaacatgtcaaaaacccatcagttgaaagagttgtgcttaccgctccaggaaagggcaaaattaaaaatattgtatatggcataaatgatcataaagtcagcgaagaagataagattttaggtgctgcatcttgtacaacaaacgccattgttccagcactcaaggttgttgatgataattttaaaatcttaagtgggcatattgagaccgtacatgcctatacaaacgatcaaaacttaatagataactatcattcagctgatagaagaggcagaagtgcggccttaaatcttgttattacagacacgggtgcagcaaaagcaatttctggtatcttgcctgaacttaaaggaaaaataacagctaatgcgatcagagtgccgacaccaaatgtgagtctggctatcatgcaccttaatattaaaaagggtgtttctgttgaagatttaaatcaatgtttcagaaatgcagcctttcactcaaacttaagaactacaattgactattcaaactccttagatgctgtttcttctgatttttatagccaatgaa

SEQ ID NO: 213968 - DNA, 1492 bp, Unknown
  Bacterial polypeptide expressing nucleotide sequence isolated from the Sargasso Sea
gatgttaattgaacactttgttgacggaaaattattttcaggttcttctgatagaaaaggtaaagtttttaatccagctacgggcgaacaagcttccgaggttaaattggcttcgaaatcagatttagatcaagcggttaaaattgcgaaaaaagcttttgaaacatggtctttaaagccagctcttcaaagagcaagagtaatgtttaaatttaaagaattaattgaaaaaaattcagatgaattaactaaactgattgtttctgaacatggaaaagtttttgaagatgccagaggttctttaacaagaggacttgaagtagtcgaatttgcttgtggaatacctcatttattaaaaggagaattttctgaaaatgttggaacaaatgttgacagctggtcaatgagacaacctttaggagtagttgcaggaattaccccatttaattttcctgctatggttccaatgtggatgtttccaatagcaatcgcatgtggaaacacatttatcttaaaaccatctgaaaaggacccgtcatgttctataatgttagctcaattgcttacagaagcaggtcttccagagggtgtatttaatgtagtgaatggtgacaaagaatctgtagatgcaatattagagaactcagatattaaagcagtaagttttgtaggatcaacaccaattgctaaatatatttatgaaaactcagctaaaaatgaaaagagagttcaagcactgggtggtgctaaaaatcatttggtggtaatgccagattgtgatttagatggagcagttaatggtttaatgggtgcagcttatggttctgcaggcgaaagatgtatggctcaatcagttgcggttgctgttggagatattggagatgagcttgtttcaagattatctaaaaaagctgaagctttaaaagttggccctgggatggataaagcatctgaaatgggtcctttggtaacaaaagaacatttagaaagagttaaaggatatgtagatttaggtgttaaagagggtgctaaactagttgttgatggaagagatcttaaacttcaaggttatgagaatggattttatattggtggttgtttatttgatcatgtcaataaagatatgagaatatacaaagaggaaatatttggcccagtattatcagttgtaagagttaaaacttttgaagaggctgcaaaattaattaacgatcatgaatatggaaatggagtaagtatttatactagagatggagatgctggaagaacattcgctagcaaaattcaggtaggtatggttggtattaacgtacccataccagtgccgatggcctttcatagttttggaggctggaaaagatctttatttggagatagtgcaatgcacggtatggaaggaataaaattttatacaaaacttaaaacagtaacatctaggtggccttctggtatccgttcaaatgcggaatttgtaatgccaacaatgaaataa

SEQ ID NO: 213969 - DNA, 472 bp, Unknown
  Bacterial polypeptide expressing nucleotide sequence isolated from the Sargasso Sea
aggtccagttatttcagaaactcaatacaataaaatacaaactttaatccaaaaaggaatagatgaaggtgcaaaattaattgctggaggaacaggtaaacctgatggattagacaaaggttactttgttaaaccaactgtttttgcagatgtaaataatgatatggaagttgcaagaacagaaatttttggacctgttttatctgttattccttttgaaacagaagaagatgcaattaaaattgcaaatgatactgcttatggactaacaaactatatccaaacccaagactctcaaaaagtacaaagagttgcaagaaaattaagatctggaatggttgatgttaatggagctggtattgcagttgatgcacctttcggtggttttaaacattctggaataggtcgagaagcaggtgaacacggtttagaagagtttttagaagtaaaagcagtaggtggttggagttaa

SEQ ID NO: 213970 - DNA, 1459 bp, Unknown
  Bacterial polypeptide expressing nucleotide sequence isolated from the Sargasso Sea
tacagcgataaaaaatcaggaaaaggtcccatctttaatcctgctattggtgagcagattgctgaggttgaattagcgagcaaagcaactgttgaaatggcaattgaaagttctgctaaagcttttttaaagtggtcaaaaactacaccaataaatagagcaagaattttatcaaaatataaagatttacttataaaaaatatggaagaactggctgttttggtttcagaacaacatggaaaaactatcccagatgcaaaaggttctgtacaaaggggtattgaagttgttgaatatgcaacaggaattacggactcattaaaaggtgatcattccgcaaacgttggaacaaatgttgactcacatactttaagacaaccattaggagtttgtgcgggtattactccatttaattttccagcaatggttcctatgtggatgtatccagtttcgatagcttgcggaaacacttttgttttaaaaccatctgaaaaggatccaagctgtccgataagattagctgaattggcaattgaagctggattaccagctggtgttttaaatgttgttaatggtgataaggaggctgtagatacattactagaaaataagactgtacaagctataagttttgttggatctactccaattgctgaatatgtttatcatactggaacaaaaaataataaaagagtgcaagctcttggtggcgcaaaaaatcatatggtaatcatgccagatgctgatgttaataaaacaactgacgcaataataggatcagcttttggttcagcaggtgagagatgtatggcgatttcagttgctgtttgtgtgggtaaacaaacaaaagaaaaaattaaaacaaaattattagaagaaactgcaaaattaaatgttggcccttatacagatgaaaaaagtgattttggtcctttgaataataaagctcattttgaaaaagtattaggttatatagatacaggtgaaaaagagggtgctaaattattagctgatggaagaaaatttaaaaaacaaggttatgaaaatggatactttgttggaccaacaatctttgatgatgtaaagccagatatgaaaatttataaagaagaaatatttggaccagttttgagtatgatgacaactgaaacttatgaagatgctctaaaattagttaatgatcatgaactgggaaatggtgcggctgtttttacaaaaagtggaaatattgcaaaacactttactgaaaatgctaaaattgggatgattggagtaaatgttcctattccagttccagttgcctatcatagttttgggggctggaaacgctcattatttggagatcattcaatgcacggaccagaaggtgtaagattttatacgaaattaaaaactgccactgttacttgggtagaagataacgctgggccagaattcaccattccagttctatcttaat

SEQ ID NO: 213971 - DNA, 1009 bp, Unknown
  Bacterial polypeptide expressing nucleotide sequence isolated from the Sargasso Sea
tatgaaaataaaaattggaattaatggcttaggaagaattggtagaatggttataagatccatatatgaaaaaaattataaaaatattgaaatcaaacatattaataatcgatcaaactctgaaactgcctctcagttattgaaatatgatacaattcatggaaaatttaattgtcaaattaaaagtgataaaaattatttgataataaataataaaaaaattacttacacacaacatacaaatatagatgatattaattggaagaaatatggcgctgatattgttttggaatgtactggaaaatttaattccaaagaaaaattaattcctcacataaaaaatggtgcaaaaaaagttatagtttcagctccttgcaaaaaaacagataaaacagtggtttttggtgtgaatgaaaatgtaattaaaaaagaagataagattatttccgcagcatcatgtacaaccaattgtctcgctccaatagcaaatataataaatgatagttttattattgaaaaaggatttatgaccacaattcattctttcacaactgatcaaagattattggacaactcccataaagacccgagaagagcaagatcggcagttcaatctatagttccaacatctactggggcatctaaatctattggagacataattccggatttaaaaggcaagcttgaaggagtggcgatgagagttcctaccccaaacgtttcgttaatagaactggtattttgcactaaaaaaaacctaacaattgataaaattaataatagtttgattaattcatcaaaaaaaaaattaaaaggaatactagatgttacaaaggaaaaacttgtttcaactgattttaatcataatccaaattctgcaatcgtagattcttctttaacaaatgttgtaggaaaaaatatgggaaaaatatctgcgtggtacgataatgaatggggtttttctaatagaatgtgtgatttagttgagttcatcaacaaaaaaatttaa

SEQ ID NO: 213972 - DNA, 998 bp, Unknown
  Bacterial polypeptide expressing nucleotide sequence isolated from the Sargasso Sea
tcgcgcggctttggggggtgtcgaacgcgatgattcctgcccgcagcgggacacccggcttgatgtcgtccacgtgaacgagatttccgggggggccgaaacgacggcgcacctccttgaatttgacagccttcagggccgctggcgcgcgaatatagaaaccgaatcggaggacgcgatctcgatcggcggcaagaggatcgggttcaccgatgcggccgaccccggctctgtcccctggggcgaactgggctgtgacgtcgttctggaatgcacgggaaaattccgcagtcgggaaacccttaaggggtattttgagcgcggtgttaaacgggtaattgtggccgcaccggtcaagggtgtcgatgtgctaaacatcgtgatgggtgtgaatgacgaccgctacgacagggtctcgcacgatctcgtcactgcggcttcatgtacaaccaattgcctcgccccagttgtcaaagtggtgcatgaagcctttggaatccgccatgggcagatcacaacgatccacaaccccaccaatacaaacgtcgtgatcgacgcacatcaccgggatttgcggcgggcgcgttcggccatgttgtcgttgcaaccgacgacaactggaagcgcgacagccataggccttatttttcctgaactggttggtaagttgaacggccatgccgttcgggtaccggtgatgaacgcgagcctgaccgattgcgtgttcgaactgaaccgcgaaacggattccgacgaggtcaataatctgttctgggaagctgcggccggaccacttgcgggtattctcgggttcgagagccgtcctctggtttccgctgatttcgctcgcgacagccgcagctccatcattgatgggccaagcactatggtcacggacggtacgctcctaaaagtgtatgcatggtatgataatgagctggggtattcctgccgtatggtcgatctggcgaaaaagctgatagccgaaggtccataag

SEQ ID NO: 213973 - DNA, 1216 bp, Unknown
  Bacterial polypeptide expressing nucleotide sequence isolated from the Sargasso Sea
ggcacgaaagaagatattgataaagctgtatcagccgcattagaagctttttctacttttcaacaaactacaaaagaacaaagaatagaacttctcaataacataattggtgagtatgaaaacagatatgatgattttgttcaaattatcacaaaagaaatgggtgctccaatatggttatctgaagctgctcaggccaaaacaggaataaaaaatattcatgaaactttagatgcgctgaaagactatgaatttgaaagacctgaaggtgactatactttaattaaagaacctattggtgtaataggcatgataactccatggaactggcctatgaaccaaataacaactaaagtgtctgcagcgttagcagcaggttgcacaatggttttaaagcctagtgagatatcaccttattgtgcaatgcttttagctgaggtgtttgataaggctggtgtgccaaatggcgtattcaatgttgtaaatggatatggtcccactgttggtgcagcactttccgaacatccagatgtggctatgatgtcatttactggttcaaccagagctggaatcgctgtagcacaagcttctgcaatttcagtaaagcgtgttcaccaggaattaggtggaaaatcatcgaatataattcttgacgatgttgctgacttagaaaaatctgttaaaggtggagcaggacattgttttttaaattcaggtcaatcttgtaatgccccaacaaaaatgttggtatctgccaagaattacgataaagcagtagaggttgcagttgctactgcaaacaatacaaccgttggagatcctaacggtgaatttagaattggaccaattgcaaataaaactcaatacgaaaagattattaaattgatcgaaataggtattgaagagggtgcaacgttagttgcaggaggagttgaaaagcctgaaggatgtgagaaaggttattacgtgagaccaacagtttttgcaaatgtaacaaatgatatgacgatagctaaagaagaaatatttggtcctgttttggtattgattaaatatgaaagtgaagatgaagcaatttctgttgcgaatgatacggaatatggtcttgcaggttacgtccaaggagagcctgagcatgcaagggaagttgcaggaaaaattcgagctggtcaagtaatcataaatggtggcgcaagaggaacaggcgctcctttcg

SEQ ID NO: 213974 - DNA, 1240 bp, Unknown
  Bacterial polypeptide expressing nucleotide sequence isolated from the Sargasso Sea
ctaattgtttctgaccatggaaaggtttatgaggatgcaaaaggatctttaactaggggattagaagtggttgagtttgcgtgtggaattccacaagttcttaaaggagaattttcagaaaatgttggaacaaatgttgatagctggtctatgcgacaaccattaggagttgttgctgggataacaccatttaatttcccagctatggttcctatgtggatgtttccaattgcaattgcatgtggaaatacatttattttgaaaccttctgaaaaagatccatcgtgttcaataaaattagctcaacttttaaaagaagcaggattaccagatggagtatttaatgtgattaatggtgacaaagaatctgttgatgcaattttagaaaataaagatattaaggcggtaagttttgtgggctcaacacctattgcaaaatatatttatgaaaatgcagcaaagaatgaaaagagagtacaggcattaggtggagcaaaaaatcatttagttgttatgccagattgtgacattgatggtgcagttaatggtttgatgggtgcagcttatggatctgcaggtgaaagatgcatggcacaatctgttgctgtagctgtaggaagcataggtgatgagcttgtttcgcgtttatcaaaaaaagcagaagcattaaaagtaggccctggtatggataaaaattctgaaatgggcccgttagtaacaaaagaacatctagaaaaagtaaaaggatatgttgatttaggtgttaaagaaggagctaatttagttgttgatggaagaaacttaaagcttcaaggttatgaaaatggtttttttatagggggatgtttgtttgataatgttaaaaaaaatatgagaatttataaagaagaaatatttggaccagttttgtcagttgtgagagttaagacttttgaagaggcaacaaagttaattaatgaacacgagtatggaaatggcgttagtatttatacaagagatggagatgctggaagaacatttgctagcaaaattcaggtaggtatggttggaattaacgttccaatacctgttccaatggcctttcatagttttggaggatggaaaagatctttatttggagacagtgcaatgcatggagtagagggagtgagattttatacaaaattaaaaacaataacatcaagatggccttctggaataagatctgatgcagaatttgtaatgccaacaatgaaataag

SEQ ID NO: 213975 - DNA, 1444 bp, Unknown
  Bacterial polypeptide expressing nucleotide sequence isolated from the Sargasso Sea
aatgtattcaaaatttggtcaattcatagacggaaaatggcagccttctgaaaaaaaagaaacttacgacgttataaatccagcaactgaagagctcattggtaaggcatcaaaagcaacaaaagcagatgttttaaaagcacttaaatcagccgaaaagggttttcaaatttggaagaaaactcctgcctggaagagatcatacaaaattagaaaaatagctgatttaatgcgtgaaagaaaaaaagaattagcaaaatggttagcattagaagttggtaaaccattagtagaaggcgaaggtgaagtaggcggtggcgctgatatttttgaatggaacgcagaagaaactaaaagaatatttggtcaaacagttgaaagcagatttgaggatactagagttcaagttatttaccagcctgttggagtagtagcagcacttataccctggaactttccaatcatattggcttcaagaaaaatctcaacagcattagctgcaggatgttctgtaattgtaaaaccagatgtaataactcctggggctgttatggaattaatgaatattatgaatgatgcaggtatacctccaggtgttgttaatcttttatcaggagatccagaagaagtatcaaatgaacttatctcctcaaatattgtaaaaaaagtttcaataactggttcgacaagagtaggaaaactaattttaaaaaaagcagctgataaagttcaaagagttacaatggagctaagtggtcatgcgccttttattgtttttgaagactctaatattgacaaagttactgatatggcaattacatcaaaatatagaaataatggccaagtgtgtatttcgccaagccgtttttatattcatgagagtaaaaaaaatgaatttgcaaaaacatttgttgagaaaacaaaaaaacttaaacttggcgatggaatgaaagaaggcgttaatcttggaccgattacaacaaaaaaaagattagaagaaattgaaaaattagtagaaaaaacaaaaaaagaaggtggaaaagttctttatggcggtaaacgaccagcaggatttaacaaaggttatttttatgagcctactataattgataatgttcaagatgattttactgtaatgactgaagaacctttcggaccaataactgctataacaacctttaaaaattttgatgaagtaattaaaagagcaaacaaacacgattgcggtttagcaggatatgtttgtacaaattccatggaaaaagcatttaaggcttctgaacaactagaaacaggtgttgtggctgtaaacaccccggtagttgccacagcagagacacctttcggcggtataaaacaaactggctatggtcgagaaggtggttcagttggtattaaggattatttgaacattaaatatactcatcttggcctttctggttaa

SEQ ID NO: 213976 - DNA, 815 bp, Unknown
  Bacterial polypeptide expressing nucleotide sequence isolated from the Sargasso Sea
gttggagttggaaacatgtatatctggtcatcctgatattgatatggtgtcttttactggatcaacaagagcaggaaaactaattacaaaaaatgcagccgaaacaattaagagagtttgtttagaattaggtggtaaaggtggaaatattgtatttgcagactcgtaccctaatgctgttagagatggaataaaaaatgtaatgagcaattctggacaatcttgtgatgccccaacaagaatgcttgtagaaaaatctatatacgaaagagctgtaagtgaagcagtggatgaagccaataaaattaaagtagatatagcatcaaaaaaaggagatcatataggtccggtagtttcaaaagttcaatacgataaaattattaacttaataaaagatggaattaatgaaggtgcaacattagctgcaggaggtcctgaaatgcctaatggtttaaataaaggatattttattaaaccaaccatatttactgatgttacaaatgatatgcagatagcaaaaaaagaaatttttggaccagttctttctattataccttttgaaacagaagaggaagcaattagagttaccaatgatacagaatacggccttggaaattaccttcaaactgaagataaagaaaaggcaaaaagagtatctaaaaaacttagatctgggatcgtttatattaatggaaattctccagactctggaactccttttggtggatacaaacaatctggaaatggacgcgaaggtggttcttggggattagaagaatatctagaggtaaaaacaattaccggctggaaataaa

SEQ ID NO: 213977 - DNA, 1474 bp, Unknown
  Bacterial polypeptide expressing nucleotide sequence isolated from the Sargasso Sea
tatgtcagaaataaaaacctataaatattatgcaggtaacaaatggtatgaaccttcatctggtgaatactttgaaagtgaagatccttcaattggtaaagtttgggcaaaacttcctgactgtaatgaagtagatattaatattgcagttaaaagtgctaaaaaggctttttatgaaggaccttgggggaaaatacattcagctgaaagaggaagagttttaaacagaattggagatattattgctaaaaatgctgaaagaattggacagattgaaacaaaagataatggtaagttgccaaaaaacataacaccctctttaacaagttggcaaactgagagcttttattactatgctggaatgtgtgacaaatttgaagggcgattgataccttctgaagttcctaatatgcataattatttaaaatgggaaccatttggtgttgttgctcttgtgcttccttggaactcaccaattggaacattaatttggaaactagcacctgctcttgcagcaggtaatacagttgtaataaagccttctgaaagggcatcatgttcaactttagagttaatgagtattttagaggaggcagacttacctgagggtttaataaacgttgtaactggttttggaacaactactggtgcacctttaattgagcatgatgatgttagaatgataagctttactggtggaacaaaaggtggaactgcagctagtttaagtgcatcaaaaaaagttaagccaataattatggaacttggtggaaaatctcctcaaattatttttaaagatgctgatttaaatttagcagtaaatggagttgtatcaggtatattccctgtaacaggtcatagttgtatttctggttctcgaatattagtgcataaagatattaaagaaaagtttacaaaaaaattattgagagttgtaagaaaagcaaaagtaggtcatcccaatgactcatcaactcaaattggaccaattgcaaacaaagagcagtatgaatttattttatcaaaaataaatgatgctgaaaaaagaggtttgaaattattaattgatggaagaagtgaaaaacgaactgaaggttactatattggtccaacaatatttgataacgttcctaatgaagatgatttagcgcagaatgaagtatttggcccagttgcatctttacaatcatgggacaatgaaaatgaagttgtcaatatagctaatgatagtatttatggattagcagctggaatatggtctaaagatgttaataaagctatacgtactgcagataaaatagaagcgggtacagtatatataaataattattttaatgcctcaacacaatctccagttggaggttttaaacaatcaggatacggcagggaaaatggttgggagggaatgcaatgttatatgcaaaccaaatccacttggttatcaacagagcctagtcagcctgatccattttaa

SEQ ID NO: 213978 - DNA, 844 bp, Unknown
  Bacterial polypeptide expressing nucleotide sequence isolated from the Sargasso Sea
tatgtatagcaaatttggacaattcattgatggtaaatggcaaccatctcaaaataatgaaacttacgatgtgttaaatccggcaactgaagaagtaattggcaaagcatcaaaagctgatgaagaagatgtaaataaagctcttaagtcagctgaaaaaggtcttgaagtttggagaaatactccaccttggcaaagatcaaaaattataagaaaaattgcagatcttatgagagagagaactgatgtactagcaaaatggcttacattagaagttggaaaacctttgtcagaagctaaaggagaagtcgggggcgcagcagacattttcgaatggaactcagaagaaacaaaaaggatatatggtcagatagttgagagcagatttgaacacacaagaatgtatgtaaaatatgaacctgttggtgttgttgcaggattaataccatggaattttccaatagttctatcttctagaaaaatttcaactgccttagcagctgggtgctcagttatatgtaagccagatgtcattactccaggaagtgtaatggaactaatgaatattataaatgatgcaggagttcctccaggtgttgttaatttattatcgggtgatccagcacaaatttcatcacaacttatatcttctgatatagttaaaaaagtttctattactggatcgactagagtaggtaaacttattttaaagcaagccgctgagaaagttcaaagagtaacaatggaattaagtggtcactcaccttttatagtttttgatgatgtagatataaataaagttacagatatggcaataacggcaaaatttagaaacaacggccaa

SEQ ID NO: 213979 - DNA, 1009 bp, Unknown
  Bacterial polypeptide expressing nucleotide sequence isolated from the Sargasso Sea
tatggcaatcaaaattggaattaatgggatgggtagaattggtcgtatgattgtcagatcaatttttgaaaatagaaataaaaatttaaagattcagcacatcaataacagatcaaattcagaaactgcaggtaaattaattaaatacgattctatacacggaaaatttaatgctgatattaaatttgatgaaaataatttgataataaataaacaaaaaatttcattttctcaagagcttaagatcgaaaaaattaattggaaaaagtatgatgttgactatgttttagaatgtacaggtaaatttaactcaagagaaaaacttgaagctcatattaaaaatggtgcaaaaaaagtaattgtatctgctccatgcaaaaatccagacaaaacaatagtttttggtgttaacgatagcaccttatctaaaagagataaaataatctcagctgcctcatgtactacgaattgtttggcggcagttgttgatgtcattcacaaaaaatttgaaattgaaaaaggttttatgactacgattcattcatttaccagtgaccaaagaattttggacaattctcacaaagatccaagaagagctcgatctgcaagccagtcgattgttcctacatcaactggagcatcaaaagcaataggtgaaataattccaagtttgaaaggaaaattagagggtgtggcgatgagagtacctacgccaaatgtttctcttgtagaattagttttttgtacgaaaaaagaaattaatataaaaaatataaacaatgaatttgaattagcttcaaaaagagaactaaaaaggattttagaaattacttatgaaaaattagtttctgttgattttaatcatcattcagcctccgcgatcgttgatgcgtctttaacaagtgtagttggaacaaatatgggtaaaatttcggcttggtatgacaacgaatggggcttttctaatagaatgtgtgatatagctgaaaatttgcataaaatttcttaa

SEQ ID NO: 213980 - DNA, 475 bp, Unknown
  Bacterial polypeptide expressing nucleotide sequence isolated from the Sargasso Sea
ttggaccactagtttcaaagttcagtatgacaaggtgataaatcttattaatgccggaataaaagaaggcgcaacattagctgcgggtgggcctgatttacctgatggtcttaataaaggatattttgtaaaaccaacaattttcacagatgtaaataatgatatgagaattgcaagagaagaaatatttggacctgtactttctattattccatttgaaactgaagaagaagctattgctatagtaaatgacacatcttatgggttaggtaattatctacaaactgaagataaagaaaaagctcaaagagttgcaagaaaagttagggctggaacagtttatatcaatggtcaaggaacagatgtaggagcgccctttggaggttataaacaatctggaaatggtcgagaaggtggtgtttggggttttaatgaatttttagaaataaaagctattactggttggaagcattaa

SEQ ID NO: 213981 - DNA, 934 bp, Unknown
  Bacterial polypeptide expressing nucleotide sequence isolated from the Sargasso Sea
attacttaaagatgcaggcctaccagatggtgtttttaatgttattaatggagacaaagaagcagttgatgcaattttaactaatcaaaatatcaaagcagtaagttttgtgggatcaacgccaattgctaaatatatttatgaaaatgctgcaaaaaatgagaaaagagttcaagctttaggaggtgcaaaaaatcatttagttgtaatgccagattgtgatttagatggtgcagtaaatggtttaatgggagctgcttatggttcggccggagaaagatgtatggcccagtcagttgcagtagcagtaggtgacattggagatgaattagttgcacgtttatctaaaaaagctgaagctttaaaagtagggcctggtatggataaaaattctgaaatgggacctcttgtaacaaaagaacatctcgaaaaagtaaaaggatatgttgatttaggagttaaagaaggtgccaagcttgttgttgatggaagaaatttaaaacttcaaggatatgaaaatggattttatattggtggatgtttatttgatcacgtaaataaagatatgagaatctataaagaggaaatatttggtcctgttttgtctgtggtaagagttaaaacttttgatgaagctactaaattaataaatgaacatgaatatggtaatggagttagtatttatacccgagatggagatgctgggagaacatttgcaagtaaaattcaagtaggtatggttggaattaacgtaccaattcctgtgccaatggcatttcatagttttggaggctggaaaagatctttatttggagatagtggcatgcatggagcggagggtgttaagttttatactaaattaaaaacaattacttcaagatggccatcaggcattctgtttaatgcagaatttgttatgcctacaatgaaataa

SEQ ID NO: 213982 - DNA, 421 bp, Unknown
  Bacterial polypeptide expressing nucleotide sequence isolated from the Sargasso Sea
atagatgaaggtgcaaaacttttatcaggtggtatttcagatataaaacaaaaaggtttttacgcaaaaccaactttgtttgatggcctaaaagaaaatatgactattgcacaagaagaaatctttggacctgttttaggaatattaagtgttaaaaatgacgaagaagccctacaagttgcaagtaattcaaaatatggattgcatgcaagtgtatttactcaagatataaatcgtgcatttcatttagctaaaagtcttccatgtggtacagtttcagtgaatactttttcagagggtgatatcaaaactccttttggaggttataaacaatcaggatctttatcaagagatcagggcacagaggcacttaattcatttcttcaaactaaaacaatttggataagtcacaatagttaaa

SEQ ID NO: 213983 - DNA, 374 bp, Unknown
  Bacterial polypeptide expressing nucleotide sequence isolated from the Sargasso Sea
cagagtagatagaaaaggtttcttctttgaacccacaatttattcagatgttaagcccaacatgacaattgcacaggaagaaatttttggaccattcttatctgttttagattatgaagatcatgaagaagcaatccatattgcaaatgacacagattatggtttagcggctggtgtgtttactaaagatgttgacatggccacaaaaacagcttcacgtttaaatggtggtcaagtttatgtgaatagttggttcacaggaagtattgcaactctatttggaggttataaacaatcaggttacagtcgtgagaaaggccaacaagcaattaaaagctacctgcagttgaagaatgttggtatacaactttaaa

SEQ ID NO: 213984 - DNA, 1495 bp, Unknown
  Bacterial polypeptide expressing nucleotide sequence isolated from the Sargasso Sea
aatgaatttaattcaacactttgtaaatggcaatttatccaaaggtgactccaatagaagaggcaaagttttcaatcctgcaactggagaacaaacctctgaagtgatactaggatctaaaaaagatttagataatacagttttaatcgcaaaaaaagcttttgaaagctggtcacttaagccaccacttcaaagagcgagagtaatgtttaagtttaaagaattaattgagaaaaactctgacgagataacaaaaatgattgttgaagaacatggaaaagtttatgaagatgcgaaaggttctttgacaaggggtttagaagttgtagagtttgcatgtgggattcctcaaattttaaaaggagaatttactgagaatgttggctcagaggttgatagttggtctataagacaaccattgggagtttgtgctggtattaccccatttaattttccggccatggttcccatgtggatgtttccaatggcaattgcatgcggaaatacatttatactcaaaccatctgaaaaagatccttcatgttcaataaaactagcggaactatttaaagaagctggtttaccagatggtgtatttaatgttgttaatggagataaagaagttgtggatgcaattttagttaatgaggatattcaggctgtaagttttgtgggatctactccgattgcaaaatatatttatgaaaatgctgctaaaaatgaaaaaagagttcaggcacttggtggagcgaaaaatcattgcgttgtaatgcctgactgcgacttagatcaagcagtaaatggcttgatgggagcagcttatggatctgcaggagaaaggtgtatggctcaatccgttgcagttgcagttggtggcattggcgataaattagttgagaaactatcaagaaaagtagaagccctaaaagttggccccggcatggataaaaactctgagatgggtccattggtaactaaagaacacttagataaagtgaaaggatatgttgatttaggtgttaaagagggagcaaaacttgttgtagatggaagaaacttaaaactacaaggatatgaaaaaggtttctttattggaggatgtttgtttgacgatgttaaaaaagatatgagaatttataatgaggaaatatttggaccagtactatcagtagtgcgtgcaaatgatttttctgaagctacacaattagtaaatgatcacgaatttggaaatggagtgagtattttcacaagagatggtgatgcagctagaagtttttccagtaaaataaaagttggaatggttggaataaatattccaatacctgtaccaatggcgtttcatagttttggaggttggaaaagatctctttttggcgatcaacacatgcatggaccagagggtgtcagattttatacaaaacttaaaactgtaacgtcgagatggccatcaggcataagatcaaacccagagtttgttatgcctacaatgaaataa

SEQ ID NO: 213985 - DNA, 666 bp, Unknown
  Bacterial polypeptide expressing nucleotide sequence isolated from the Sargasso Sea
aatgacaataaaagttggcattaacggtatgggaagaattggcagaatgattgtgaggtcaatttatgaaaattacaaaggtaaaatagttatcaaacatattaataatagatcgggctctgaaatttgtgcaaatttattaaaatatgattcaatacatggtaattttagttctctagtaaaatctggagaaaattacataaaaataaataaagaaaaaatatcttatactcaacactctataatcaatgacataaagtggaaaaaatatggtgttgattatgtttttgagtgcacaggtaagtttaattctaaagatcaattactgccacatatagtaaatggggtaaaaaaagttattgtatcagccccatgtaaaatggcagataaaactatagtatttggcgtaaatcataagaagatcaacaagaatgatagaattatttcagcagcttcttgcacaacaaattgtttagctcccgttgcagacgtaattaataaaaattttataattcttaatggttttatgacaaccatacatgcttttacaagtgatcaaagaatattagataattctcacaaagatccaagaagagcgagatctgcaagtcaatcaattgtacccacatctactggtgcatcaaaagctattggtgagattatacc

SEQ ID NO: 213986 - DNA, 580 bp, Unknown
  Bacterial polypeptide expressing nucleotide sequence isolated from the Sargasso Sea
agatgatgaagtaatatctgccgcttcatgtacaactaattgcttggctccagttgtaaatgttcttaataataattttaaaatagaaaaaggttttatgactactattcatgcatttaccagcgatcaaagaattttggataattctcataaagacccaagaagagcaagagccgctagtcaatcaattgtgcctacttcaactggggcatcaaaagcaattggtgagataattcccagccttataggaaaattagaaggagttgcaatgagagtcccgacacctaatgtatcgcttatcgaattagtattctgcacaaaaaaagaaattgatgtacaaaaaattaatgatgtatttgaaactgcctctaaaaatgaattaaataaaatcttagaaattactcacgaaaaactggtttctattgattttaatcatcattctgcatctgcaattgttgacgcctctttaacaagtgtagttggtactaacatgggtaaaatttctgcatggtatgataatgaatggggtttttccaacagaatgtgcgatatagctgagaatttacataataactcttaa

SEQ ID NO: 213987 - DNA, 1150 bp, Unknown
  Bacterial polypeptide expressing nucleotide sequence isolated from the Sargasso Sea
aaagattttgcatcaaaactacaaactgtacagggagcaagtcatacgaaatcatttataaagtatcttaaagcttttgattttgaaaaacctttaggagatcatgcgcaagatcagagaattatttatgaacccaaaggagtttgtgtattaattacaccctggaattggccaatgaatcaagtttgcttaaaagtaatcccagctttagcagcaggatgcaccatgatcttaaaaccttctgagctagcacctttatcatcaatgatacttgcagaacttattgatgaggcaggttttccaaaaggtgtatttaatttagttaatggagatggggaaactacaggtaatgcactgacaagtcataaagatgtaaatatgatatcttttactggttcaacaagagcaggagctctaatttctcaaaacgcagcaaaagactttaaaagggtaagccttgaattaggtggaaaaggagcaaatattatttttaaagatgcagatactgaggcaattgaaagaggagctgcaagatgttttagaaattcaggccagtcatgtaatgcacctacaagaatgctcgtagaaaaatcaatctatcatgatgcagttaacagattaaaaaaatttgctaatgaatataaagttgatattccccaaaaagaaggagatcacattggtccagtaatatctgaaacacaatataataaaattcaaggtttaattaaaaagggtatagatgaaggtgctaatttaatagcaggaggacctggaaaacctgaaggttttgaagatggttattatgtgaagccaactgtttttgctgatgtaaataataacatggaaattgccagaactgagatttttggtccagtattatcagtaattccatttgaatcagaagaagaggcaattgaaatcgcaaatgatactccttatggtctgacaaactatattcaaactgaagatcaagaaaaagttaaaagggttgcaagaaaacttagatctgggatgatagttgctaatacagcttcactagctgtagatgctccatttggaggatttaaacactctggaataggaagagaaggtggaaaagaaggtttattagaatttttagaagtaaaatctattggtggttggaattaat

SEQ ID NO: 213988 - DNA, 1414 bp, Unknown
  Bacterial polypeptide expressing nucleotide sequence isolated from the Sargasso Sea
aatcctcgaacaggcgactatgattttgaaataaaaataacggacagcgatagattatccgagcaagccaaaaatagcagagcagcgcagcaaaaatggtcaagcaaaacgctagatgaaagaatattagccctgcaagaactaaaaaatagtttaatcagaaatggggaacttatcgttcaagccttgagcattgacacgggcagaacgacgatatcaaaaagagagttggacggactttgcggaagtatcgacagatggtgtgaagaagctatcctttacattgatgatagtgagcgacaatcaaaagccattccgagtatctcaataaaaaaacaccgagatccatatcctcttcttggtgtaataagcccttggaactttccgttgcttctctccttcattgatgctgtgccagccttactggctggatgcactgtaatcataaagcccagcgaaataacacccagatttgtagaacctcttatgatggcaatcagtgaggtagaagaattagaaaatgtaatttcttttgttcatggtgacggctcaacaggtgctaatttaattaaatacgttgatatcgtagctttcactggaagtgtatcaacaggaaaaaaagtcgctgctgctgctgcaaaaaaatttataccggtatgtcttgagcttggtggaaaagatcccgctattgtgatgaaggatagtgatattgatagagctacgacttctatactcagagcctcgacaattgcaacgggtcaggcatgtcagtcactagagagaatttatgttgatgcggtaatttgtgatgaatttacaaatttactcaccgaaaaatcaaaaaaaattgaactcagcctcaatgaaggtgacggaggcatgattggcccattgatatttgaaaagcaagctgaaaccatatctgaacacataaaagatgcaaaaaataaaggcgcgaagattcattgtggcggtgaaattgaaaatcatcacggtgggttatggataagaccaactgtaatgagtcacgtcacacatgatatgaaaatcatgacagacgaaactttcggtccaataatgccaattatgtcattcaattcaactcaagaagcaattgatctggcaaatgattctcgttacggcttatctgctgccgtttttggtaagaatcatgaagaaataactgagattgcaaaaaaaataaactgcggtggaatcagtatcaatgacgcaggacttacttcaatgatttttgaggaagaaaagaatacttataaaaattctggtatgggcccatcacgaaatggtcctgagggattcacaagattttttagaaaaaaagcattatttttaaacaagggcaatgttttttcgatggaagacatttttaaagctaacaatccaaggaaataaa

SEQ ID NO: 213989 - DNA, 1447 bp, Unknown
  Bacterial polypeptide expressing nucleotide sequence isolated from the Sargasso Sea
ttgttaaaagacccgagtctgctgcgtcagcaatgttatatcaatggtcagtggtgcgatgcgcagtcaaaagaaaccgtcgctatcgccaatcccgcgacgggcgcggtgatcggcagtgtccctgtgatggggcaagccgaaacgcaagcggcgattgcggcagccgaagcagccttgcccgcatggcgagcacttaccgcaaaagagcgtggtgccaagctgcgtcgctggtttgaattactcaatgaaaacagtgatgacttagcgctaatgatgaccactgagcagggcaaacccctcgccgaagctaagggtgaagtcacctacgccgcctcctttatcgaatggttcgccgaagaggcgaagcgcgtctatggcgatacgattcctggacatcagggcgataaacgcatcatggtgatcaagcagcccgtgggcgtgactgcggctattactccttggaacttccctgcggcgatgatcacccgtaaagccgcgccagcactggctgcgggttgtactatggtggtgaaacctgcgccgcaaacgccttttaccgcattagccttagccgtgctggccgagcgcgccgggatccccgctggggtattcagtgtgatcaccggtgatgctatcggcattggtaatgagatgtgcagtaacccaatcgtgcgtaagttgtctttcaccggctcgacccaagtgggcattaagttgatggagcaatgcgcgccgacgctgaagaaattatctttagaattaggcggcaacgcgccatttatcgtattcgatgatgccaatatcgatgcggcagtcgaaggtgccatgatcgctaagtatcgcaatgcggggcaaacctgtgtctgcgctaaccgcatttatgttcaggagggcgtgtatgatgaatttgctcgcaagctcagcattgccgtgggcaaattaaaggtgggcgaggggattactgaaggcgtcactacgggaccgcttatcaatcgcgcggcggtagaaaaagtccagagccaccttgaggatgcgctcagtaaaggggcgacagtagtcgcgggcggtaagccccatagcttaggcggcaacttcttcgagcccacggtactgacgcatgtcgatagcagtatgcgcgtggcccgtgaagaaacctttggcccactggcgccgctgtttaagtttaccgatgtggacgatgtgattaagcaagccaatgataccgagtttgggttagcggcttatttttatggccgtgatatctccttagtgtggaaagtggccgaggcattggaatacggcatggtaggtgtcaacactgggttgatctccaccgaagtcgcgccgtttggcggaatgaaatcctcagggctcggccgagaaggctctaagttcggtatcgaagaatatttagaaatcaaatatatctgtatgtctgtttaag

SEQ ID NO: 213990 - DNA, 1321 bp, Unknown
  Bacterial polypeptide expressing nucleotide sequence isolated from the Sargasso Sea
catgaatttaattcaacattttgtaaatggaaaaataattccaggaaaatcagagagaagaggaaaagtatttaatcctgcaattggggaacaagagtcagaagtaatattaggtttaaaatcagatttagatgaaactgtagaaatagcaaaaaaagcttttgatacatggtctttaaaaccaccaattcaaagagcaaggattatgtttaaattcaaagaattaatagaaaaaaattctgatgaattaactaaaatgatagtttctgagcatggcaaagtatatgaggatgctaaaggttcattaataagaggactcgaggtagtagagtttacttgtggaattccgcaagttttaaaaggcgaatttacagaaaacgttggaacagatattgatagttggtcaataaggcaaccacttggtgtttgtgcgggtataactccatttaattttccagcaatggttccaatgtggatgtttcctatggctattgcttgtggaaatacttttgtattaaaaccatcagaaaaagatccctctatttcaatcaaattagcggagttatttcaagaagctggattaccagatggtgtatttaatgtaataaatggtgataaggaagtagtcgatgcaattttgactaacaaagatattaaagctgtaagttttgtaggatcaactccgattgctaaatatatatacgagaatgcagcaaaaaatgaaaaaagagttcaagctttagggggagcaaaaaatcactgtgttgtgatgccagattgcgatttagatcaggctgttaatggtttaatgggtgcagcttatggatcagcaggagaaagatgtatggctcagtcagtcgcagtcgcagttggaaatatcggagataatttagttaatgaattatcaaaaaaagtcgaagcattaaaagttggtccgggtatggataaaaaatctgaaatggggccattagttacaaaagagcatttggaaaaagttaagggttatgttgatttaggagttaaagaaggagcaaaattagtagttgatggaagaaacttaaaactacaaggctatgaaaatggttactatataggtggatgtttgtttgatcatgttaaagaaaatatgagaatttacaaagaagaaatttttggtccagtactttcagtagttagggcaaaagattttgatgaggctactaagttaattaacaaccatgagtttgggaatggaacgagtatttatacaagagatggcgatgttggaagaacatttgcaagtaatattaaaattggaatggttggtataaatatacctata

SEQ ID NO: 213991 - DNA, 802 bp, Unknown
  Bacterial polypeptide expressing nucleotide sequence isolated from the Sargasso Sea
tactggtttttagcgaacgcgacccagccaaaatcccctgggcgtcaacgtgaagtcgatattgtcattgaagcaaccggcttcttcactgaacgagacaaggcggcagtacatatccacagcggtggcgcaaagcgcgtaattatctctgctccaggtaaaaacgatgatttaaccatcgtgatgggcgttaacgatcatctctactcggcggataaacactttgtcgtcagcaacggtagctgcaccaccaacggtctggcacctgccgcgcaggttttgcaccaacatttcggtattaagcatggtctgatgaacaccacccatgcctacaccaacagccaggcgctgcacgaccaaccggaaaaagatcttcgtggcgcccgcgccgctgcattgtcgatagtgccctactcaagcggtgctgcaaaggcgcttggcaaagtcatccctgagctggatggtcgcttaaccggttattcgctgcgcgtaccagttccggtagtgtcaattgtcgacctgaccgtcacgcttgagcgggatgtaacggaagaagaagtcaataatgcatttcgtaacgccgccgcgacggggccgctgaaagggatcctgggctatagcgatgaaccgctcgtttcaagcgactaccagggtgacccgcgttcatccattatcgacggcctgtcaacgttggtaattggtggcaatatggtcaaaattctcgcctggtacgataacgaatggggattctccaatcggctcgtcgacctggcgctgttaatggcaaaaaacgagcgctaac

SEQ ID NO: 213992 - DNA, 1312 bp, Unknown
  Bacterial polypeptide expressing nucleotide sequence isolated from the Sargasso Sea
atgactgagcttaaaaaatataaaatgtttattggtggagagtgggttgaatctgataccaaaaaaacatttgaaacacttaatccagaaaataataaaccttgggcagtagtcccggaagctagtgctaatgatgttgataaagcagttaaagctgcacaaaaagcctttgaaggtgaatggtcaaaattactaccaagagatagaggtaattatttaagagcaatagcaaataaacttagagaaaatgctgaacttttgggaaaaattgaaacaattgatactggcaaactttttagagaaacaaacaagcaggcaaattacattgctgaatattatgattattacgcaggtttagcagataaagttgaaggaactgtattaccaatagacaaaccaaatattcaagctattacaacaagaatacctataggtgttattgctgcaatcattccttggaattcacaaatgcttttaacagtaactaagttagcgcctgcgcttgcgatggggaatacagtggtaattaaatcgtcagagctagcaccagctgtgatgtttgaatttgcaaaacttgttgaggaaacaggcataccaaaaggagtagtaaatgttataaccggttttggagacccttgtggaaaagcattaactacccataatttagtagaaaagattgcttttactggtggccccgagactgcaagacatattattagaaattctgcagaaaatttatcagaagtaagtctagaacttggaggtaaaagcccagttgctgtctttgatgatgctcatcaagaaaatgcaattaatggaataactgcgggaatttttggggcaagtggtcaaagttgtatagctggatcaagactatatttacaggatggtatttataatgaatttttagataaacttactgctagagctgaaaaaattaaaattggagctcctatggatccagaaagtgaaatgggccctctaagtaattttaaacagcttgaaataattgaaaaaaatataaaacttactgtagatcaaggtggaaaaataaaatgtgggggaaagagagatacactttctaatgagggatattatttttcacctacaataattgaatgtgacaatcataatcttccagttgcagaaaatgaactctttggccctgtattgtctgtaatgaaatttaaaactgaagatgaagttatagaaaaaatgaatgataaccagtacggattaagttctggagtttacacaagtgatttttcaagaggtttaagagtttcaaaagctataagagcaggtattacat

SEQ ID NO: 213993 - DNA, 583 bp, Unknown
  Bacterial polypeptide expressing nucleotide sequence isolated from the Sargasso Sea
cctacaagaatgctggtagaaaaatcaatttatgatgatgcagtaaatagattaaaaaaatttgctaatgaatataaagttgatgttcctcaaaaagaaggggaccatataggtccagtaatatcagaaactcaatataataaaattcaaggtttaattaaaaagggtatagacgaaggagctaatttaatagcagggggacctggaaaacctgatggtttagaagatggttattacgtaaagccaactgtttttgctgatgtaaataataatatggaaattgccagaactgagatttttggtccagtattatcagtaattccatttgaaacagaagaagaggcaatagcaattgcaaatgatactccttatggtttgacaaactatattcaaaccgaagatcaagaaaaagttaaaagagttgcaagaaaacttcgatcaggaatgatagttgcaaatactgcttcacttgctgtagacgccccatttggaggatttaaacactctggaatagggagagaaggtggaaaagaaggtttgttagaatttttagaagtaaaatctattggtggttggaattaat

SEQ ID NO: 213994 - DNA, 1495 bp, Unknown
  Bacterial polypeptide expressing nucleotide sequence isolated from the Sargasso Sea
catgaagttaattgaacactttgttggcggtaagttattttcaggttcttctgatagaaaaggtaaagtttttaatccagcaacaggggaacaagagtctgaggttaacttagcctcgaaatcagatttgaaccaagcagtggaaattgccaaaaaggcttttgaaacatggtctttaaaacctccccttcaaagagcaagagtaatgtttaagttcaaagaattaattgaaaaaaattctgatgaattaacaaaattaattgtttcagaacatggaaaagtttttgaagatgctagaggctcattaacaagaggtcttgaagttgttgaatttgcttgtggaatcccacatttattaaaaggtgaattttctgaaaatgttggaacgaatgtggatagttggtcgatgagacaacctttaggagtagttgcaggaattactccatttaattttcctgcaatggttcctatgtggatgttccctatagcaatagcgtgtggaaatacatttatattaaagccatctgaaaaagatccttcatgttctataatgttagctcagttactttcagaagcaggtcttccagaaggtgtttttaatgtagtgaatggtgacaaagagtctgtagatgcaatactagagaactcagatatcaaagcagtaagctttgtaggctcaactcctattgcaaaatatatttatgaaaattcagctaaaaatgaaaaaagagttcaagcattaggtggagcaaagaaccatctagttgtaatgccagattgtgatttagatggcgcagtcaatggtttgatgggtgcagcttatggttctgcaggcgaaagatgtatggcccaatcggttgcagttgcagttggtgatattggtgatgaacttgtttcaagattatctaaaaaagctgaagcacttaaagttggtccagggatggataaaacttctgaaatgggtcctttggttacaaaagaacacctagaaagagttaggggatatgttgatttaggtgtcgaagagggtgcaaagttagttgttgatggaagagatctcaaacttcaaggttatgaaaatggattttacataggaggatgtttgtttgatcatgtcaataaagatatgagaatatacaaagaggaaatatttggtccagttttgtcagttgttagagtaaaaacttttgaagaggctgcaaaattaattaacgatcatgaatatggaaatggtgtaagtatttatactagagatggagatgctggaagaacatttgccagcaaaatacaagtaggcatggtaggtattaatgttcctataccagtgccaatggcctttcacagttttggaggctggaaaagatctttatttggagatagcgcaatgcatggcatggagggaattaaattttatacaaaacttaaaacaataacttcaagatggccttctggtatccgttctaatgcggaatttgtaatgcctacaatgaaataa

SEQ ID NO: 213995 - DNA, 530 bp, Unknown
  Bacterial polypeptide expressing nucleotide sequence isolated from the Sargasso Sea
tgttgatgaagcaaataaaattaaagttgatctggcttctaaaaaaggagatcatattggacctttagtttcaaaagtacaatatgataaagttgtaaatcttatcaatgagggaataaaagaaggtgcaacattagctgcaggtgggccagatttaccaaatggacttaacaaaggttattttgttaaaccaacaattttttcagatgtaaataatgacatgaaaattgcaagaactgaaatttttggacctgtgctttcaattataccctttgaaactgaagaagaagctatagcaattacaaatgatacatcttatggactaggtaattatctacaaactgaagataaagaaaaagccaaaagagttgctagaaaagttagagctggaacggtttatatcaatggtcaagccacagatactggaatgccgtttggtggttacaaacaatctggtaatggtcgtgaaggtggtgtctggggtttcactgaatttttagaagtaaaagcaattaccggttggaattaat

SEQ ID NO: 213996 - DNA, 440 bp, Unknown
  Bacterial polypeptide expressing nucleotide sequence isolated from the Sargasso Sea
aatctcttatattgaaaaaggaaaacaaaacgctgatttaataattggtggggagcgaattcatcttgatggaaaaggatgttacgtgcaacccactatttttaataatgtaaaggctaatgatgtaattgcgaaagaagaaatattcggacctgttttatctgttatatcatttgatacagaagaagaagctctatcgatagctaacgatagtgagtatggtttggcggcatcggtttggactgatgacttatcacgtgcgctcagagtttctgatcatctacatgctggaaccgtatctgttaatactgttgatgcattaaatactgtaactccatttgggggtgtgaaacaatctggttatggcaaagatttatcactgcattcttttaataaatatacatctttaaaaacaaggtggattaaatataaagcctaat

SEQ ID NO: 213997 - DNA, 838 bp, Unknown
  Bacterial polypeptide expressing nucleotide sequence isolated from the Sargasso Sea
atggataaactactcagattcagaaaagattttaaggaaatctatgttggtggcagatggtggccaattgaggcaagctttgaagacacaaacccatctgacaattccttatgggcaacggttccagatgttgaagtaaaagacgtacagaatgctattacatccgccgatcatgcttttgaaaattggtctaatttaaaatttaatgaacgatctcactacatgatcaaaatcgctgaagttttagaagaaaataagatggatatagtaaaagctttgagagctgaagcaggcggctggtttggcaaggccatgtttgaagccggttatctaccagaactttttcatgctgctgctgctgccaattatcaggctattggcgaagttataccatcagattctgggaaattttctatggcggtgaggcgccccataggagttatatcggtgatcagtccgtggaattttccttgtatattaacggctcggggtatggcttttgctttggctgcaggaaacacggtggttcttaaaccttctgaggagacgccttacacgggtggacttttgtgggctgaaatatttgaagaagcaggtgtacctggcggagtactaaatgttgtaacatgctcccgagaaaatgtagctgaggttggaacagagttagtagaaaatccactcgtaaaaggagtatccttcactggctcaacaccagttgggagagagatcgccgctagggcaggagcacatttaaaaaaatgttgtgtagaactgggtggaaaagatgctctcatagtctgcgaagatgcggaaatggatagagctacaggagccgcaa

SEQ ID NO: 213998 - DNA, 1522 bp, Unknown
  Bacterial polypeptide expressing nucleotide sequence isolated from the Sargasso Sea
catgaccacggttcccgcctatacgtccgacgccgacgtcggccactacatcgacggcgcgcccgtcgccggccgcagcggccgcttccaggacgtcctcaacccgtcgctcggccgcgcggtgcgccgcgtggcgctcgccggcaacgacgaagtcgagcaggccgtcgcgtccgcccacgccgcgttcccggactgggccgcaacgccgccgatccgccgcgcgcgcgtgctgcaccgcttcctgcaactgatgaacgagcaccgcgacacgctcgcggcgatcatcacggccgagcacggcaaggtgttctccgacgcgcagggcgaagtcgcccgcggcatcgacatcgtggaattcgcgtgcggcgtgccgcagctcctgaagggcgacttcaccgaccaggtcagcaccggcatcgacaactggacgatgcgccagccgctcggcgtcgtcgcgggcatcacgccgttcaacttcccgtgcatggtgccgtgctggatgttcccggtcgcgatcgcaacgggcaacacgttcgtgctgaagccgagcgagcgcgacccgtcggcggccctgttcatcgccgacctgctcacgcaggccgggctgccggccggcgtgttcaacgtcgtgcagggcgacaagggcgcggtcgatgcactgctcgaccacccggacgtacaggccgtcagcttcgtcggctcgacgccgatcgcggcctacgtgcagcagcgtgccgtgcagtcgggcaagcgcgtgcaggcgctcggcggcgcgaagaaccatctcgtcgtgatgcccgatgcgaacctcgagcaggcggtcgatgcgctgatcggcgccgcgtacgggtcggccggcgagcgctgcatggcgatcagcgtcgcggtgctggtgggcgacatcgcggaccagatcgtgccgctggtggccgagcgcgcacgcaagctggtgatcggcgacggcatgtcgccggaagtcgagatgggcccgatcgtcaccggcgatgcgttgaagcgcatcgaaggctatatcgagcaaggcgtgaacgaaggcgcgcaactggtggtcgacggccgcgggctgcgcgtgccgggccgcgaggccggcttcttcaccggcggcacgctgttcgatcacgtgacgcccgacatgcgcatctacaaggaagaaatcttcgggcccgtgctcggctgcgtgcgcgtgaaggatttcggcgaggcggtcgacctgatcaacgcgcatgaattcggcaacggcgtgtcgtgcttcacgagcgacggcggcatcgcgcgcgagttcgcgcggcgcatccaggtcgggatggtcggcatcaacgtgccgatcccggtgccgatggcatggcacggcttcggcggctggaagaagagcctgttcggcgacatgcacgcgtacggcgaggaaggcgtgcgcttctatacgcgccagaagtcggtgatgcagcgctggtcgtcgagcatcggcaagggcgccgaattcgcgatgccgaccgcgaagtaa

SEQ ID NO: 213999 - DNA, 601 bp, Unknown
  Bacterial polypeptide expressing nucleotide sequence isolated from the Sargasso Sea
ctggtcatcatgtgatgcacctacacgaatgttagttgaaaaatcaatttatgaaaaagctgttgaggaagctgcagatgaagctaaaaagataggtgtagatttaccatctaaatcaggagatcatattggccctgtaattaataaatctcaatttgagaaaattcagtcgttaattcaaagtggtattgacgagggtgctacacttgtagctggtggagcaggtagaccatcaaatcttgaaaaaggctactatgtaaaaccaactgtattcacaaatgttagtaatgatatgagaattgctaaagaagaaatatttggtccagtgctgtcaattatcccatttgagtctgaagaagaggctatttctataactaatgatacaccttatggattaggtaattttttacaaactgagaataaagaaagagctagaagagttgcaaaacaattaagggctggtgtagttcaaatcaatggaaatgctcccgacgctggaacaccttttggaggttacaaccaatctggtaatggaagagagggtggaacgtggggtctgcatgaatatttggaagttaaagcaattagtggttggaagtag

SEQ ID NO: 214000 - DNA, 1435 bp, Unknown
  Bacterial polypeptide expressing nucleotide sequence isolated from the Sargasso Sea
atgagcgctgataaacacctacaaagttggcaagaacgttttgaaatggcagaggcaatgcaacctttgctgggcaagttataccgtaaccaaggcgtcgaagttgtggtttatggtaagccattactcaatgcttctactattgagattattaaagcgcaccgtttagttcgtcgtcatgtcggtgagaaattacgtttacgcgagagtttcccgtttgttcaagccttaagcagactcgctgttaaacaatgtaaagtggatattggtaagcttgctgtcaaatactgggctgaacataccgataccaacgaaattgaaagctatatggcacgcgaattagcggctgcgattgatcatgctgatgatatcgctccgcgtgatgtggtgttgtatggttttggtcgtattggccgcttattagcgcgcttactgatcgaacgtactggtcgcagcaacaagttaagactgcgtgcaatcgtattacgtggtggtaagaagggcgatttagaaaaacgcgcaagcttactgcgtcgtgactctgttcatggtccatttaacggttctgttgaagtggatgaagagaacaacgctatcatcgctaacggtacttatatccaagtgatttacgcaaactcaccagatgaagtggattacactaaatacggtattacagatgccttagtggtagacaacacgggtatttggaaagacgaagcaggccttggcttacacttgaagagccctggtgcaagcaaagtgttactgacagcaccagcaaaaggcgccatcaagaacatcgtttacggtgtgaacgaaggcgatattacgccagaagacatcattgtgtctgcagcgagctgcaccactaacgccattacaccagtactgaaagcggtaaatgataagtacggtatcgagaatggtcacgttgagacgattcactcatatacaaacgatcaaaacctgatcgacaactaccacagtgctgaccgtcgcggtcgcagtgcaccattaaacatggtgatcactgaaacgggcgcagcgaaagccgtcgctaaagctctgccagtattagcgggcaaactgactggcaacgcgattcgtgtgccaacgccaaacgtgtctatggcaatcatcagcatgaacttaaatgctgagaccaacaaagacgaattgaacgaatacctaaaagacacggcgctgcaatcacccttgcagaaccaaatcgactacacagattcaactgaaatcgtatcaagcgacttagtgggttctcgctatgcgggcgtggttgattctcaagcgaccatcgccgaaggtaaacgcgccattctgtacgtatggtatgacaacgaatttggttacagctgccaagtagtcggtgtgatgcaaacgatgttaggcttaacaacgctgtctctgcctgcttaat

SEQ ID NO: 214001 - DNA, 1447 bp, Unknown
  Bacterial polypeptide expressing nucleotide sequence isolated from the Sargasso Sea
gttgttaaaagacccgagtctgctgcgtcagcaatgttatatcaatggtcagtggtgcgatgcacagtcaaaagaaaccgtctctatcgccaatcccgcgacgggcgcggttatcgccagtgtccctgtgatggggcaagccgaaactcaagcggcgattgcggcagccgaggcggccttgcccgcatggcgagcacttaccgcaaaagagcgtggtgccaagctgcgtcgttggtttgaattactcaatgaaaacagtgatgacttagcgctaatgatgaccactgagcagggcaagccccttgccgaagctaagggggaagtcacctacgccgcctcctttatcgaatggttcgccgaagaggcgaaacgcgtctatggcgatacgattcctgggcatcagggcgataaacgcatcatggtgattaagcagcccgtgggcgtgactgcggccattactccttggaacttccctgcggcgatgatcacccgcaaagccgcgccagcactggcagcgggttgcactatggtggtgaaacctgcgccgcaaacgccatttaccgcattagccttagccgtgcttgccgagcgcgccgggatccctgcaggggtattcagcgtgatcactggcgatgctatcggcattggtaatgagatgtgtagcaatccagtcgtgcgtaaattgtcttttactggctcgacccaagtgggcattaagttaatggagcaatgcgcgccgactctgaagaaattatctttagaattaggtggtaacgcaccatttatcgtattcgacgatgccaatatcgatgcggcggttgaaggcgccatgatcgctaagtatcgcaatgcggggcaaacctgtgtctgcgctaaccgcatttatgttcaggccggcgtgtatgacgagtttgcccacaagctcagtattgccgtgggcaaattaaaggtgggcgagggtattggcgagggcgtaactacgggtccgcttatcaatcgcgcggcggtcgaaaaagtccagagccatcttgaggatgcgctcagcaaaggggcgactgtggttgcgggcggtaagccccatagcttaggcggcaacttcttcgagccaacggtactgacacatgttgatagcagtatgcgtgtcgcccgtgaagaaacctttggcccactggcgccgctgtttaagtttaccgatgtggacgatgtgattaagcaagccaatgataccgagtttgggttagcggcttatttttatggccgtgatatctccctcgtgtggaaagtggccgaggcattggaatacggcatggtgggcgtcaacacaggattgatttccaccgaagtcgcgccgtttggcggaatgaaatcctcggggcttggccgagaaggctctaagtacggcatcgaagaatatttagaaatcaaatatatctgcatgtctgtttaa

SEQ ID NO: 214002 - DNA, 1246 bp, Unknown
  Bacterial polypeptide expressing nucleotide sequence isolated from the Sargasso Sea
catgcaagataaaaaaaaattctatattaatggtaaatgggtagatccaaagaaaaaaaatgattttaacgtcattaatccatctaccgaagaaagttgtgcggttatttctttaggaagcgtagaagatattaatacagctgtaagcacagcaaagaaagcttttgaaagttgggctttcaccacgaaagaagaaagaataaagttattagagtctctgtattctctttataaaaaaagatgggctgaaatggcagaagctatttctttagagatgggagctccaattgatttttcaacacagcttcaagctggaactggtgccagtcatataaaatcatatatcaaagttttaaaagattataagtttgaaaaaatattaggagaccacgcaccaaataataaaattttatatgaaccaaaaggagtttgcgctttaataaccccttggaattggccaatgaatcaagtttgtttaaaagtaattccagctttagcaacgggatgcactatggttttaaaaccatcagaaatagctcctctttcttctatgttattggcagaaatgatcgacgaagtaaaatttccagctggagtatttaatttagttaacggagatggtgctgttgctggaaacgctttaactagccatccagatgtaaatatgatttcttttacaggctcaactagagccggagctcttatttcaaagaatgcagcgaatgattttaaacgtgttagtttagaactaggcggcaaaggtgcaaatattatttttaaagatgcggatgcagaagctgtagaaagaggagcaatgagatgttttcgtaacacagggcaatcatgcaatgcaccaacgcgtatgttggttgaaaaatctatttataataaaactatagataaagtaaaagaagttgcggccaaagtaaaaattgatttagcttcaaaaaaaggtgaacatataggacccgtagtttcaaaaactcaatttgataaaattcaaacattaattcaaaaaggaattgacgaaggtgccaaattagtagctggtggtacaggaaaaccaaaaggattagacaaaggatattttgttaaacccacagctttcgcggatgttaataataatatgcagattgcaagaacagaaatttttggtccagtattatcaattataccttttgaaactgaggatgaagcaatttcaattgcaaacgatacaccttatggtcttttaaactttatcaaa

SEQ ID NO: 214003 - DNA, 464 bp, Unknown
  Bacterial polypeptide expressing nucleotide sequence isolated from the Sargasso Sea
tatttctcaaaagcaatatgataaaataattgaattaattaaaagtggaatagaggagggcgctactcttgttgctggcggtcctgaaaaacctactggattagaaaaaggtttttttattaagccaacaatatttacagatgtaagtaatgatatgagaattgcaaaagaagagatttttggaccagtgctttctataattccttttgaggatgaagatgaggctgtatcaattgtaaacgatacttgctatggtctaggaaattatgttcaaactcaagatatagaaaaggcaaaaagagtagcaagaaaatttagatctggaggtgtttatataaacggaaatagcgctgatccaggaacaccttttggtggttatagacaatctggtaatggaagagaaggtggcgattggggtttggaagaatatttagaaattaaaacaatctgtggatgggaatgat

SEQ ID NO: 214004 - DNA, 608 bp, Unknown
  Bacterial polypeptide expressing nucleotide sequence isolated from the Sargasso Sea
aggtgaggtttgttcagcaggttctagacttataatccaaaaagatattgaaaaagattttattaataaagttgttcaattaagtaaaaaaatgcaaccttcagatccgctaaatccagattcatttgctggagcaatagtaaatactgaacagttagaaaaaataaataaatatgtaaatataggtaaaaaagagggggctgatattgaagtcggaggaaatataacaatgaaagaaacaggtggttgttattttgaacctactatttttaaaaatgttaagaacaatatgaagattgctcaagaagaaatttttggacccgtgttaacaactttagctttttctaattttgatgaggctgtttcaattgctaatgactctgaatatggactagcagctggtgtgtggacgaatgatattaacaaagcaataagggcctcaagagaaattcgtgcaggaacagtttatataaataactatgaggaaggtgttgactcaacaatacctcttggtggatataaacaatctggaattggaagagataacggtgcacaggctctagaaaattatcttcaagtaaaatcaacttgggtaaaaataacttaaa

SEQ ID NO: 214005 - DNA, 728 bp, Unknown
  Bacterial polypeptide expressing nucleotide sequence isolated from the Sargasso Sea
ggaaatctccaacattttctttgaagatgttatggaaaaagatgacgacttctttgataaatgtattgaaggatttgttatgttcaatcttaaccaaggtgaagtttgcacttgtccaagcagagctttaattcaagagtcaatctatgacaaattcatggagagagctatagctagaactaaagctgtaaaacaagataatcctttaaaaatggaaacgatgataggagctcaagcgtcagtagagcagatggaaaagattaaatcttatcttgaactcggtaaaaaagagggcgctaaagtcctaacaggaggaagtgttgctaaacttaatagcggattggaaaaaggaaactatattcagccgactatttttgaagcaaaaaacaacatgcgtatctcgcaagaagagatcttcggacctgttgtatctgttattaaatttaaagatgaagcagaagcattaaaaattgctaatgatactctttacggtttaggagcggcagtatggactagagatggtaatacagctcacagaatgggtagagcaatacaagccggaatagtgtggacaaattgttatcacgcttatccagcacactcaccatttggtggttataaacagtctggtgtgggtagagaaactcacaagatgatgctcaatcattatagacaaaataagaacttacacgtttcttacgctgagaagaaattgggattcttttaac

SEQ ID NO: 214006 - DNA, 297 bp, Unknown
  Bacterial polypeptide expressing nucleotide sequence isolated from the Sargasso Sea
tcaatgtgtcgttggttgatctcagttttattgcctcaagagagacttctgttgatgaaatcaatgaggttgtgaaagccgcatcagagggtgctcttaagggagttctcgattacaacgatggcccacttgtatcgattgactttaaccacaatcctgcttcatctacctacgatgcaaccatgactaaagttcaagagggaactttggtgaaggtatgctcttggtatgacaatgaatggggattctcaaatcgaatgctcgatacaacacttgcgttagtcaacgccgattgat

SEQ ID NO: 214007 - DNA, 952 bp, Unknown
  Bacterial polypeptide expressing nucleotide sequence isolated from the Sargasso Sea
gtatgaaaattacaagaaaagatggccagatattgcagaggctataactcttgaaatgggtgccccaaaagattttgcatcaaaattacaaacaggtacaggcgcaagtcatattaaatcttttataagatacttaaaaaattttgaatttgaaaaaccattaggtgagcatgctccaaatcaaagattgatttatgaaccaaaaggtgtttgtgctttaatcactccgtggaattggccaatgaatcaagtatgtttaaaagtaatgccagcaattgcctctggatgcactatggttttaaaaccttcagaattagcaccgttatcttcgatgatactcgcagaaattattcatgaagttaaatttcctaaaggagtgtttaatttgatcaatggggatggagataccacaggtgatgcgctaacaagtcatccagatattaatatgatttctttcactggatctactagagcaggagcattaatctcacaaaatgcagcaaaagatttcaaaagagtcagtcttgaacttggaggtaagggagcaaacattatttttaaagatgctgatcccgaagcaattgaaagaggtgctttgagatgttttagaaattctggtcagtcatgtaatgcaccaacaagaatgctagttgaaaagtcaatgtatgatgatgcaattgagaggttaaaaaaatatactgaaaattttgaggttgctgatcctaaaaaagaaggtgaacatatcggtcctgttatttcagaaacacaatacaataagattcaaactctaattcaaaaaggtatagatgaaggtgcacaattgattgcaggaggaacaggtaagccagaaggattaaataaaggttattttgttaaaccaacagtatttgccgatgttaataatgatatggaagtagcaagaacagaaatttttggacctgttttatctgtc

SEQ ID NO: 214008 - DNA, 1009 bp, Unknown
  Bacterial polypeptide expressing nucleotide sequence isolated from the Sargasso Sea
atgaaaattaaaattggaattaatggaatgggaagaattggaaggttagttcttcgttcaataatagaaaaaaataataaaaattttgaaattaagcatataaataatagaactagaattgaggtagtttcctcattaattaaatacgattctattcatggtcctctaaatgtcaaaattaacaattcaaaaaatcgattaacaattaataaaaaaaaaatttcttattctcaagaaactaatattgaaaatataaaatggaataaatatggtgttgatattgtttttgagtgcactggaaaatttaattctaaagataaagtcttaagccatattaaaaacggtgctaaaaaagtaatagtatctgccccatgtaaaaatgctgacaaaactatagtttttggagttaatgaaaaaaaaatttctaaaaatgataaagttatttctgcagcttcatgtacaactaattgtctagctccagtagcagatgtcctaaacaaaaattttggaattaaaaatggatttatgacaacaattcatgcctttacaagcgatcaaagaattcttgataattctcataaagatccccgacgagcaagatcagctagccagtctataatacctacaacgactggggcttcaaaagctctagctgaaattattccatctcttaaaggcaaaattggaggtattgcaatgagagtgcctactccaaatgtatctttaattgaattggtatttaatacaaacaagaaattgagcgaaaaattaataaataatgcatttaaaaaagctagcaaaaaacaattaaaaggaattttagatataactgatgaaaaattagtatctgttgattttaatcacaattcttcatcagcaatagtagatagttcacttacaagtgttgttggtgataaaatgggtaaaatttctgcttggtatgataatgagtggggtttttcaaatagaatgtgcgaccttgctaaatatcttcaaaaaatttcttaat

SEQ ID NO: 214009 - DNA, 409 bp, Unknown
  Bacterial polypeptide expressing nucleotide sequence isolated from the Sargasso Sea
ggtgcaaaattagttgctggaggaacaggtaaacccgatggattagacaaaggttactttgttaaaccaactgtttttgcagatgtaaataataatatggaagttgcaagaacggaaatttttggacccgttttatccgttatcccatttgaaacagaagaagaggcaataaaaattgcaaatgatactgcttatggattaacaaactacatccaaacccaagactctgaaaaagtacaaagagttgcaagaaaattaagatctggaatggtagatgttaatggagccggtattgctgttgatgcaccttttggtggttttaaacattctggaataggacgtgaagcaggtgaacacggcctagaagaatttttagaggtaaaggcagtaggtggttggagtaactaac

SEQ ID NO: 214010 - DNA, 310 bp, Unknown
  Bacterial polypeptide expressing nucleotide sequence isolated from the Sargasso Sea
atggagatcgcaagaactgaaatttttggtcctgtattatccataattccttttgaaaatgaagacgaagctatttcaatagctaacgatacaccatatggcttaacaaattatattcaaactcaagataaggaaaaagtaaaaagagttgcaagaaaacttagatctggcatggtagatgttaatggagttggcatagctgtagcctcgcctttcggtggatacaaacactctggcattggacgagaagctggaactgaaggcttaatagaatttttagaagtaaaaactgttggcggctggaattaac

SEQ ID NO: 214011 - DNA, 1453 bp, Unknown
  Bacterial polypeptide expressing nucleotide sequence isolated from the Sargasso Sea
aatgaaccaggtatcgatgttgatcaacggcgagcgtacgatggctcgcgatggggcgacattcgagcgccgtaacccgctcgatgacacggtcgcatcgacggcgccggccgcgactgtcgccgatgcgcaagcggcggtgcacgctgcggccgcggcgtttcccgcatggtcggcaatgggtcccggcgaacgacgcgcattgctgaatcgagccgcggatgcgctcgaagagaaggacgacgctttcgcgctggccatggcagccgaaacgggcgcgtcccgcctttgggcggatttcaacgtcaagcttgcagccgacgggttgcgcgaagccgctgcgatgatcacgcagatttcgggcgaagtgattccatcggacgtaccgggcagtctcgcgctgggcgtgcggcaggctgccggcgtcgtgctcgggatcgcaccatggaacgcgcccgtcatcctgggcgtacgtgccatcgcgttgccgctggcgtgcggcaataccgtcgtgctcaaaggttccgaaatttgccccgcgacccacggcctcatcatcgaggcgttacaagatgccggactaccgcgcggcgtcgtgaacttcgtcacgaacgcgccggcgaatgcgggcgacatcgtcgaagcgatcattgccgagtcggcggtcaggcgggtgaactttacgggctcgacccgcgtcggccgcatcgtcgcgacccagtgcgcgaaatacctgaagccttcggtactcgaactcggtggaaaggcgccgtttctggtgcttcacgatgccgatatcgacgctgccgttcaaggcgcggcattcggggcgttcgccaattccggccagatctgcatgtcgaccgaacgcatcgtcgtggacgcggcgatcgccgatgaatttgttgcgcgactagccgaaaaggcaaagagcctgccgctcggcgatccgagaaagggcccggccgtgctcggctccgtcgtggacatggcgaccgtcaggagatgcaacgacctgatcgacgacgcgctggccaaaggcgcgacgctggtatgcggagggaaatccgagaccacgctcatgcccgccacgttgctcgatcacgtgacggcggacatgcatatctatcgggaggagtcgttcgggcccgtcaaggcgatcgttcgcgtcgacggagacgaagaggccatcgcatgtgcaaacgacaacgaatatggtctgtcggcggcagtcttcagccgtgacgtcgcgcgtgcgttgacggtggcgaagcgtatcgagtccgggctttgtcacgtcaatgggccgacggttcacgacgaggcgcaaatgccgtttggcgggatgaagtccagtggcttcgggcatttcggcggcaaggccggaatcgcggaatttaccgatttgcgctggatcaccgtgcaaacgacgcctcggcactatccgttctga

SEQ ID NO: 214012 - DNA, 1561 bp, Unknown
  Bacterial polypeptide expressing nucleotide sequence isolated from the Sargasso Sea
atgggttacaacataatcaatggagagttgcgtccagcaagcgatggcgagacgttcgaaagcaggaacccagcatggtcggatgactgcttgggagtgtttcccctatctacgaaagatgacgtacacgacgcactgatttcagctagggaggctttctctcagtggtcacaaacccctgctccaactagggggcagattattggaaacatgggaagactgctgatggagcacaaagacgatattgtcagagtggaatctagggaaattggaaagactctgaaagagagtgctggcgaggttcaggaagcaatcgacacatgcctatttttccaatcggagggaaggagattgtatggtcagacggtgaactcagagttacctgacaaggagttgttcacctatcggaggccacttggcgtgtgtggaatcataaatgcaagtaatttcccttctgcagtgcccttctggaagatgattcctgcaataatgtgtggaaacacgtgcgtttggaaaagtccccaggactcgcccctgctatcattcatgctcactagaataatgcacgaggcagggctccccaacggcgtggtcaatttgattcatggcaaaggtagtggagcggggcagttccttgttgattcggttgacgagggactagtgaataagatcagtttcactggttcaacacctgttggaaagatgatcggagaggtctgtggaaggaacctagtctcatgttcactggagttggggggcaagaatcccctagttgtgatgccatcagcgaacatcgaaaatgcggttgaaggtgcgtattgggctgctttcggaacagcaggtcaacgttgcactagcctggggaatctgatacttcacaaggacatatacgaagagttcatggataaattcatggcaaaggtgaaggaaactaaaatcggagattcactaagaaatgatgatgtattgtacggttctatgctatcggaaaagtatgccagcgatttcctaagggacctagggatgtgtgaaaccgacggggctaccaaactatggggagaaggcaaaattaccaatgagaataagcctgagaatttccaaggtgacgcttcggagggtgcgtacatgtggccgcatgtttacgcggacgtaactgaagaaatgcaatgcttccagcaggagattttcggacctgttgtgactgtagttagggctgaggatttcgaaaatgctctccatctggccaatgcatctccatttggattatccagtgcttgctacactaacgatagacttgaggcataccgtttcaagactggaataaaggctggaatgacaggcataaacaactccactacaggggctgaggcacatctaccatttggtggagttaaggacagtggaaatggaactagagagtcaggaatatgggtgatagaagcttactcatactggcatgcggtgaacgacgagttatctggaaaactccagctcgctcaaatggacgtggatgagatacatgtcaaagaggcagaagcagactatgcttcattggcctaga

SEQ ID NO: 214013 - DNA, 565 bp, Unknown
  Bacterial polypeptide expressing nucleotide sequence isolated from the Sargasso Sea
atgcttatatcttcaaagaattacgataaagctgtagaaattgctgttgcaactgcaaacagtactactgttggagatccaaatggtgaatttagattgggaccaattgcaaataaagttcaatacgaaaaaatcttaaaattaatagaaataggcattgaagagggcgcaacattagtcgcgggaggagttgaaaaaccagatggatgtgacaaaggttactatgttagaccaacagtttttgctaacgtaacaaacgatatgacaatagcaaaggaagaaatatttggccctgttcttgtaatgattaaatataacaatgaagaagaggctattaaaatcgctaatgatactgaatatggattagctggatacgttcaaggtgatcccaatcacgctagagatgttgctcgaaaaataagagctggacaagtaattattaatggaggcgcaagaggaactggagctccatttggaggttataaagcttcaggaaatggaagagaacatgggcttcatggcatagaggaatgccttgaaactaaagcaataattgctccataga

SEQ ID NO: 214014 - DNA, 1444 bp, Unknown
  Bacterial polypeptide expressing nucleotide sequence isolated from the Sargasso Sea
tatgtacgaaaaatttggacaatttatcgatggtaaatggcaaaaatcatcagatggaggaacttacgaagtaattaatccagcaaatgaagaagttttgggaaaagcctctaaagctacacctgaggatgttgatagagcattaaagtctgctgcaaaaggattagaagtctggaaaaaaactgctccttggcaaagatcttacatcatcagaagaatagcagacaaaatgagagagaaacaagatgtgcttgctaaatggatgacattagaagttggaaaacctttcgcagaagccaaaggtgaagtaggaggtgctgcagatatttttgaatggaatgccgaagaaacaaaaagaatttatggacaaactgttgaaagtagatttgaggatacaagagtacatgtttactatcaaccagttggtgttgttgcagcattaacaccttggaattttcctgcagtattatctgctagaaaaatttcaactgcattagctgctgggtgttctgttatagttaaacctgatgtaataactccaggaattgtaatggagatggttgatatatgtagagaatgtggtgtcccaccaggcgtagtgaatcttttatcaggtgatccaccaagtatcgctcaacaattgatagcttcagatatagtcaaaaaaatttctataactggatcatcgagagttggaaagctaatattaaaacaagctgcagataaagttcaaagagtaacaatggagttgtcaggtcattcaccttttattgtgtttgatgatgctgatattaaaaaagcagctgatatggcaattgctgctaaatttagaaacaatggtcaagtttgtatatcacctaacagattttatattcacgagagaaaaaaggacgaatttgtaaatttatttatcgagaaaacaaaaaaattgaaaataggtgacggtatggatccttcaactcaattaggtccattaaccacaaaaaagaggctaaacgaaatagaggaattagttgaaaaaactaaagaagaaggtgcaaaagttttacttggtggaaaaagaccctctgggtttaataaaggtttttattatgaacctacaatatttgatgacgtaaaagatgattttacgataatgaaacaagagccttttgggccattggttccaatgttatcattcaaatcttttgatgatgtaattaaaagagctaataatcatgagcttggtttgtgtagttatgtatgcaccaactcaatggagacagcacatcttgcgtcagaacaattagaaacaggttcagttgctgttaacacacctatggtagctattgcagaagcaccttttgggggaattaaacaaagtggttatggacgtgaaggtgggtcaatggcaataaaagattatctaaacattaaatatactcatcttggtattaaaggttaa

SEQ ID NO: 214015 - DNA, 616 bp, Unknown
  Bacterial polypeptide expressing nucleotide sequence isolated from the Sargasso Sea
atgtatagcaaatttgggcagtttattgatggaaagtggcaacaatcaaaaaataaagaaacctatgaagtaataaatcctgctactgaagaaatattaggcaatgcatcaaaagcatcaagagaggatgttgataatgcacttaagtctgctgaaaaaggtttagaaatttggaaaaatacttcaccatgggagagatcaagtatcataagaaagatagcagataagatgagggaaaaacgcgacacccttgcaaaatggatgactttagaagtgggtaaaccttttaaagaggctcaaggtgaagttaatggttccgctgatatctttgaatggaatgcagaggaaacaaaaagaatttttggtcaaacagtagaaagtagatttgcggatacaagagtccatgtttattatcagcctgttggagttgttgcggctctaacaccttggaattttcctttagttttatcttcaagaaaaatttctacagcacttgctgcaggttgctctgtaattgttaagcctgatgttattactccagggacagtaatggaactggttgatatatgtagagagtgtggtgttcctccaggagtagtaaatttattgtcaggag

SEQ ID NO: 214016 - DNA, 1181 bp, Unknown
  Bacterial polypeptide expressing nucleotide sequence isolated from the Sargasso Sea
atcgatggtcaaaagatgccaacccattatcctgcgacaggtgaagtttttcatgaactgccaaaaggtaatgccaatgacatagggtcagccatccgcgcagccgaagctgcttggtcagatggtgcttgggcaaatatgcccgcttcagcacggggtgatttagttgctcgcatggcgcaaggtattgaggaaaacatcgaggttttagctgcaattgaagctgcagatgttggcaagccctttcgtcaagctgcaatggtacttggtggcgctgctagtgagggtaaatactgggcgtcgctcggtgccgttctggacgcagagcaggataaaccggttaactctggtggaggtatgggcggacttccccccgctgaatgggatgttgtttaccgacgggacccgattggtatcgttggtttaatttcagcatggaattacccactaaatgttgcttttcgaaaggtagctccagcgttggtagccggaaattgcgccatcctcaaaccctcagaaatagcaggtctttcctgcatgttcttaggcaagctagcacaggatgtaggtattcctaaaggcgtgtttagcgttgtaactggcgatcgtgaaactggtgccgctcttgtggcctcgccctcagtttcaatggtttctttcacgggttcgtcactgacaggcagcaagattatggaagcttctgccccaaaactttcgcaggtagcattagaattgggtggtaagtcggccatggtgatatttgaagatacggacatcgaacgagcggttgaagccactattaagggatgcctaactaatggcggccaaatttgcactgcacatagccggctaatagtacaggaaggaataaaagacgaattattgacaaaactgaaaaacgtgttggagaagataccttactgtagggaccccattacggaaagggaacgcggtgatagagcatgggaaaccggggtgacagatgtgatccaaccagtggtttctgcttctcaacacgaaaaaatcttgggtttccttaatgaggtcgaagctgcaggtatcgaaatctacactggcggaggcgttcctaatctcgtagaagtaaaaaaatccggcggttattttatccaaccaactattttgactaatgtaccacgcaactcagacgctggcaaaaggaa

SEQ ID NO: 214017 - DNA, 139 bp, Unknown
  Bacterial polypeptide expressing nucleotide sequence isolated from the Sargasso Sea
atgataaaagttgcaattaatggatttgggagaattggtaaattagtttttagagctataatagaacaaaatttaaaaaatgtacaaattgtagctataaatgaattaggttcattagaatctagtcttcatttagtta

SEQ ID NO: 214018 - DNA, 974 bp, Unknown
  Bacterial polypeptide expressing nucleotide sequence isolated from the Sargasso Sea
aatgggtttaggtggaataaatactgacagtatatttgatgatatttcttatgatgacttatcagtaaagctcaataaattaaagaccaggtatattgaaggtaatattcctaagttaactgagagaaaagagagactaaaaaagctaattgatatagtcgaaaataatgcagatgctcttggagacgctattcaaagtgattttggaactagacacaaacaattaagcttaatggcggacgtgagaagtactctgtcatttgcaaaccattcttataaaaatttatcttcgtggataggtccagaaaaaagaagcgcaaattttccacttaatttactaggagctaaagctaaagttcattatcagccttatggggtagttggaattatatctccatggaactttccagttaatctaagcataggacctctcgtagatgctttttcagcaggtaatgctggcatgattaaactttcagaatttgttccatccacaagtagattattagaacaattaatatgtgaaaaatttgacgaaagtgaagtcgtggtaataaatggaggaatgcaaacttcaattgattttacaaagttgccatttgatcatttaatatatactggatcgacagatatagctcgaaaagtatcaagcgaagcagcaaaaaatcttgttcctttaactttagaactaggaggtaaatccccaacaattttgagtaacggagcaagcattgataaaagcgttaataaaattctttttggaaaattattaaacggaggccaaatttgtgtttcacctgattatagttttataccagagcaaaaagtagagcaatttattgaaacctcaagaaacttcatatcagaaaaattcccaacaattaaaaataatccagactacacttctttagttcaccaatctcattatgagagagtaaagagttatattgaggacgcaagatctaaaggtgctg

SEQ ID NO: 214019 - DNA, 1474 bp, Unknown
  Bacterial polypeptide expressing nucleotide sequence isolated from the Sargasso Sea
atggcaactaataatattcaaaattatcaaatgttcatagatggtcaatggactgaagcagggaataatcaaagattcgaaagtactaatcctgagaataataaaccttggtcttcatttccagatgcaacagtcaatgatgttaataatgcagttgcagccgctaaaaatgcatttaagtcgtggtcagcaagtgatgtaaaaataagagctcaatatcttcgggcaataggagatcagcttaagaataacgctgagcatattggaaaaatagaaactatagatagtggtaaattactgaaggaaacaaaatttcaagctgaatatatgaaagactatttttactattatgcagagctcgcagagaaaatggaaaatacaaaaattatttctgatatagataagcctgatatggaagttattgaagtaagtgaaccaataggcgttattgcctgcatcattccatggaactcacaaatgtttttaacagcgactaaagttgcacctgcactggctgcagggaatacagtggtgataaaatcatcagaacttgctccagcacctttagctgaatttgtaaaattaacagaacaagtagaattgccaaaaggtgttataaatctagtgagtggaggagcagaagttggaaaaaatttaacatctcataaagatataggcaaagtgctctttacaggcggaaccgaaacaggatctcatgtaataagaaatacagctgaaaattttgcacagttaacccttgaacttggagggaaatcgccagttatagtatttgaggacgcagatatagagaatgcattaaataatattacgactgctatcttttccggaaatggctgcagctgcattgctggttcagtattgattctgcatgataaaatttatgatgaatttcttcaccaattaaaaaatagagctgagagtattaaattgggttccccgcttgaagcggaaactcaaatgggaccgttaaataatctcaaacaagtaaagttcatcgaaaaaaacattgagttatctattaaacaaggagctaaaatattgtgtggtggcaagcggcaaaatagttgttacttccccccgacaattattgaatgtccagataaatcaatcaatacagccaatacagaactttttggaccagttctctctgtgattagatttagttctgaggaagaagccataaatatagcaaacgataatcgctatggcctttcatcaggtgtattcagtgaaaataaagaaatatgtgagagagtaagtaaaaagattgaagctggtatttgttttacaaattgttataggtttatttcatatgctgcaagttttggcggtagaaaaaatagtggctatggaagagagagcggagctgaagcaataagtgatatgcaattaagaaaaactatctggacctcaactgcaagagtaacagaagatccatttaagatcagataag

SEQ ID NO: 214020 - DNA, 1291 bp, Unknown
  Bacterial polypeptide expressing nucleotide sequence isolated from the Sargasso Sea
gatgttcaaatttaaagaattagtagaaaagaactcagaggaaattactgaactcatagtttctgagcatggaaaagtttatgaggatgcaaaaggatctttaacaagaggattagaagtagttgaatttgcatgtggaattcctcaagtgttaaaaggtgaattttcagaaaatgtaggaacaaatgtggatagctggtcaatgcgacaaccattaggagttgttgcaggaataacgccatttaattttcctgctatggttcctatgtggatgtttccaatagcaatagcatgtggaaatacttttattttaaaaccatccgagaaagatccatcatgctccataaagttggctcaacttttgaaagaagcagggttgcctgatggagttttcaacgtaatcaatggcgataaagagtcggtcgatgcaattttagaacataaagacgtaaaagcagtaagttttgtaggctcaactcctattgcaaaatatatttatgaaaatgcagcaaaaaatgaaaaaagagttcaggctttaggaggagcaaaaaatcatttagttgtaatgccagattgcgacattgacggtgcagttaatggattaatgggtgcagcatacgggtctgctggagaaagatgtatggcacaatcagtcgctgtcgctgttggaaatataggtgatgaacttgtttctcgtttatcaaaaaaagtagaggcattaaaagtaggacccggcatggataaaagttctgaaatgggcccattagtaactaaggaacatttaaaaaaagtaagtggatatgtagatttaggtgttaaagaaggagcaaatttagttgttgatggaagaaatttaaaactacaaggttatgaaaatggttttttcataggaggatgtctatttgataatgtaaaaaaagatatgagaatctataaagaagaaatatttggaccagttttatcagttgtcagagttaaaagctttgaagatgcaactaaattaattaacgaacatgaatatggtaatggtgtaagtatttataccagagatggggatgccggaagaacttttgctagcaaaattcaggtaggtatggttggtattaatgtaccaatacctgttccaatggcatttcatagttttggcggatggaaaagatcattatttggagatagtgcaatgcatggaatagaaggagtaagattctatacaaaattaaaaacaataacatcaagatggccttctggagtaagatcaaatccagaatttgtaatgccaacaatgaaataa

SEQ ID NO: 214021 - DNA, 436 bp, Unknown
  Bacterial polypeptide expressing nucleotide sequence isolated from the Sargasso Sea
tataaaccttattaatgagggaataaaagaaggcgcaacattagcagcaggtggtccagacttgccaaacggtcttaacaaaggttattttgtaaaaccaacgattttttctgacgtaaataataatatgaaaattgcaagacaagagatatttggaccagtgctttcaattataccatttgaaactgaagaagaagcaatagcaattacgaatgatacatcttatggactaggaaactatctacaaactgaagataaagaaaaagctcaaagagttgcaagaaaagtaagggctggaacagtttacataaatggccaaagtacagatactggaatgccatttggtggttacaaacaatctggcaatggtcgtgaaggtggagtttggggctttaacgaatttttagaagtaaaagctatcacaggttggaaataa

SEQ ID NO: 214022 - DNA, 319 bp, Unknown
  Bacterial polypeptide expressing nucleotide sequence isolated from the Sargasso Sea
tatgactattgctcaagaagagatttttggtccagtgttaggagttttgacagttaaaaatgataaagatgctcttaaagttgcaagtaattctaaatatggtttgcacgcaagtgtatttactcaagacatagatagagcatttcatttagcaaaaagtttaccttgcggaacagtttctgttaatacattttcagagggagatataaaaactccgtttggtggatataaacaatctggatctttatcaagagatcaaggtaccgaggctttaaattcttttcttcaaacaaaaacaatctggattagtcattcttaa

SEQ ID NO: 214023 - DNA, 1417 bp, Unknown
  Bacterial polypeptide expressing nucleotide sequence isolated from the Sargasso Sea
tgccacaggagaacaaaaatcagaagtaattttagcaaataaatcagatcttaataaagcagttagtattgctaaagaagcatttaaatcttggtcagtcaaaccagcacttcaaagagctagagttatgtttaaatttaaagaattaatagaaaagaactcagaagaactcactgaactaattgtttctgaacatggaaaggtttatgaggatgcaaaaggatctctaactagaggattagaagttgttgaatttgcatgtggaatcccgcaagttcttaaaggagaattttcagaaaatgttggaacaaatgttgatagctggtctatgcgacaaccattaggagttgttgctgggataacaccatttaattttccagctatggtccccatgtggatgtttccaatcgcaattgcatgtggaaatacatttattttaaaaccttcagaaaaggatccgtcctgttcagtaaaattagcccaacttttaaaggaagcaggattaccagatggagtatttaatgtaattaatgggaacaaagagtctgttgatgcaattttagaaaataaagacattaaagcagtgagttttgtgggctcaacacctattgcaaaatatatttatgaaaatgcagcaaagaatgaaaagagagtacaggcattaggtggtgcaaaaaatcatttagttgttatgccagattgcgacattgatggtgcagttaatggtttgatgggtgcagcttatggatctgcaggcgaaagatgtatggcacaatctgttgctgtagctgtaggaaacataggtgatgagcttgtttcgcgtttatcaaaaaaagcagaagcattaaaagtgggtcctggtatggataaaaattctgaaatgggcccgttagtaacaaaagaacatctagaaaaagtaaaaggatatgtggatttaggtgttaaagaaggagctaatttagttgttgatggaagaaacttaaagcttcaaggttatgaaaatggtttttttataggaggatgtttgtttgataatgttaaaaaagacatgagaatttataaagaagaaatatttggaccagttttgtcagtggtgagagttaagacttttgaagaggcaacaaaattaattaatgaacacgagtacggaaatggagttagtatttatacaagagatggagatgctggaagaacatttgcaagcaaaattcaggtaggtatggttggaattaatgttccaatacctgttccaatggcttttcatagttttggcggatggaaaagatcgttatttggagatagtgcaatgcatggagtagagggagtgagattttatacaaaattaaaaacaataacatcaagatggccttcaggaataagatctgatgcagaatttgtaatgccaacaatgaaataa

SEQ ID NO: 214024 - DNA, 1528 bp, Unknown
  Bacterial polypeptide expressing nucleotide sequence isolated from the Sargasso Sea
catgaacgccgcagttccccagaccaccctcgccctgcccaccgccaagctgctgatcgacggcgcgttcgtcgaatcgcaaagcgccgaatggggcgacatcgtcaacccggcgacgcaggaagtgatcggccgcgtgccgtttgcgacgctcgacgaggtcgatgccgcgatcgcgtccgcgcagcgcgcgttccagacgtggaagacgacgccgatcggcgcgcggctgcgcatcatgctgaaattccaggatctcgtgcgccgcaatctcgaacggatcgcgcacacgttgacggccgagcaaggcaagacgctgcccgacgcgcagggcgacatcttccgcggcctcgaagtggtcgagcacgcgtgctcgatcggcacgctgcagcaaggcgaattcgcggagaacgtcgcgggcggtgtcgatacctacacgctgcgccagccgatcggcgtgtgcgcgggcatcacgccgttcaacttccccggcatgatcccgctgtggatgttcccgatggcgatcgtgtgcggcaacacgttcgtgctgaagccgtcggagcaggacccgctgtcgacgatgcagctcgtcgaactcgcgatcgaggctggcgtgccgcaaggtgtactgaacgtcgtgcacggcggcaagacggtggtcgaccggctctgcacgcacccggacatcaaggcgatctcgttcgtcggctcgacgcgcgtcggcacgcacgtgtacaacctcggcagccagcacggcaagcgcgtgcagtcgatgatgggcgcgaagaaccacgcggtcgtgctgcccgatgcgcaccgcgagcagtcgatcaacgcgctcgtcggcgcgggcttcggcgcagccggccagcgctgcatggcgacgtcggtcgtcgtgctggtcggcaaggctcgcgactggttgcctgaactcgtcgagaaggcgaaggcgctgaagatcaacgcgggccacgagccgggtaccgatgtcggcccggtcgtgtcgaaggccgcgcatgcgcgcatcaccgcgctgatcgacgaaggcgtgaaagccggcgcgaagctcgaactcgacggccgcaacgtgaaggtgcccggctacgagcagggcaacttcgtcggcccgacgatcttctcgggcgtgacgaccgacatgtcgatctacacggaagaaatcttcgggccggtggtggtcgtgctcgaagccgacacgctcgatgaagcgatcgcgctcgtcaaccgcaacccgatgggcaacggcgtcggcctgttcacgcagagcggcgcggccgcacgcaagttccagagcgagatcgacatcggccaggtcggcatcaacatcccgatcccggtgccggtgccctacttcagcttcaccggctcgcgcggctcgaagctcggcgatctcggcccgtacggcaagcaggtcgtgcagttctatacgcagaccaagacggtcaccgcgcgctggttcgacgacgacgcgaccgccggtggcgtgaacacgacgatcgcgctgcgctga

SEQ ID NO: 214025 - DNA, 1495 bp, Unknown
  Bacterial polypeptide expressing nucleotide sequence isolated from the Sargasso Sea
aatgaattcaatagagcattttattgatggtaaaactgtaaaaggtacttctaaaaggacagcaaaggtatttaatcctgctactggcgaggtaagttctaatgtgaatctcgcaagtacgagtgatttaaataaagctgttgatgctgcaaaaaaagcttttcctagttggtcagaaaaaactcctctttttagagccagagtactttttaaatttaaagaattgattgaaaaaaattatgatgaacttacaaagattattgtttctgaacatggaaaagtttatgaagatgccaagggatctttgacaagaggtttggaggtcgtcgagtttgcctgtggtataccacaattacttaagggagaatttactgagaatgttggtacaaatgtagatagttggtcaatgagacagcctcttggagtttgtgctggtattacaccttttaactttccggcaatggttcctatgtggatgtttcctattgcaatagcctgtggaaatactttcattcttaaaccatctgagaaagacccatcatgttcaatgaaattagcagaattatttttagaagctggtcttcctcctggtgtttttaatgttgtaaatggagataaagaggcagtagatgcgattattaataataaagatatcgccgcagttagttttgtaggctcaacacctatagctaaatatatttatgaaaactgtgcaaaaaatgaaaaaagagttcaagctttaggtggtgcaaaaaatcattgtgtggtcatgccagactgtgatttagatcaagcggtaaatggtttgatgggagcagcatatggatcggctggggagagatgtatggctcaatcagttgcggtggctgttggaaaaattgctgatccattagtagaaagtttatcaaaaaaagttgagtcacttaagattggtcctggactagataagaaatctcaaatgggaccactggttaccaaagagcacttagaaaaagttaagggatatgttgacattggtgtaaaagagggagcaaagctagttgttgatggaaggaatttaaaactccagggttatgagaatggtttttatatggggggatgtctattcgacaatgttaaaaaagatatgagaatttataaagaggaaatatttgggccagtactttctgttgtaagagctaaagattacggagaggcattatctttagttaatgaccatgaatttggaaatggaacaagtatatttacaagagatggagatacaggcagatcttttgcaagtaatgtaaaaattggaatggtaggaattaatataccaatacctgttccaatggcttttcatagttttggaggatggaaaaggtctttatttggagatcaaagtatacatggacccgaaggagtaagattttatacaaaattaaaaacaattacatcaagatggccatcaggaattaaatcagatccagaatttgtgatgccaacaatgaaataa

SEQ ID NO: 214026 - DNA, 357 bp, Unknown
  Bacterial polypeptide expressing nucleotide sequence isolated from the Sargasso Sea
tttacatcgagccaacagtctttacgcaggtaactgacgagatggccattgcgcgagatgagatttttggaccggttctctcagtactcaaattctcagagcttgaagaacttgtacgtcgttcaaatgccaccaattttggtttggcagctgcagtatggactcgtgacgtgtcacgggcgcatgatgttgcacgacgattgcgggcagggacggtctggatcaattgttatgacgtatttgatgctgccgcaccgtttggtggcttcaaacaatctggctttggtcgggaactcggggagcgaggccttgatccgtatctagaaacaaagaccgtgacggtcaacctggagtgat

SEQ ID NO: 214027 - DNA, 1129 bp, Unknown
  Bacterial polypeptide expressing nucleotide sequence isolated from the Sargasso Sea
tactatgcagagctcgctgagaaaatggaaaatacaaaaactatttctgatatagataagcctgatatggaagttactgaagtaactgaaccaataggcgttattgcctgtatcattccatggaactcacaaatgtttttaacagcgacaaaagttgcacccgcactggctgcagggaatacagtggtgataaaatcatcagaacttgctccagcacctttagccgaatttgcaaaactaacagaacaagtagagttaccaaaaggcgttataaatctagtgagtggaggagcagaagttggaaaaaatttaacatcccataaagatataggcaaagtgctctttactggcgggaccgaaacaggatctcatgtaataagaaatacagctgaaaattttgcgcaattaaccctagaacttggagggaaatcaccagttattgtatttgcagacgctgatatagagaatgcattaaataatattacgactgctatcttttctggaaatggttgcagttgcatcgcaggatcagtattgattctgcatgataaaatttatgatgaatttctttatcaattaaaaaatagagctgagagtattatattgggttcaccgcttgaggcggaaactcaaatgggaccgttaaataatctcaaacaagtagagttcatagaaaaaaacattgagttatcgattaaacaaggagctaaaatattatgtggtgggaagcggcaaaataattgttatttcccaccgacaattattgaatgtccggataaatcaatcaatacagccaacacagaactttttggaccagttctatctgtgattagatttagttctgaagaagaagccgtaaatatagcaaacgacaatcgctatggcctttcatcaggcgtgttcagtgaaaataaagaaacatgtgagagagtgagcaaaaaaatagaagctggtatttgctttacaaattgttataggtttatttcatacgctgcaagttttggtggtagaaaaaatagtggctatggacgagagagcggagctgaagcaataagagatatgcaattaagaaaaactatctggacctcaactgcaagagtaacagaagacccatttaagatcagataag

SEQ ID NO: 214028 - DNA, 1444 bp, Unknown
  Bacterial polypeptide expressing nucleotide sequence isolated from the Sargasso Sea
tctagaaaaggcaaagtatttaacccagcaactggagaacaaatagccgatgttgaattggctagtaaagatatagtaaaaatggcagtggaaaactcattgcaagcatttgataaatggtcaaaaacaacgccaataactagagcaagaattttttcaaaatataaagatttattagttcaaaatatgaatgaactagctgaacttgtttcgaagcaacatggaaaaacaataccagatgcaaaaggatctattcaaagaggtattgaagttgttgaatatgtaactggtattacatcttccttaaaaggtgaacattcgtcaaacgtaggaactaatgttgactcacacacgcttcgtcaaccgctaggggtttgtgctggaataaccccatttaatttcccagcaatggtacctatgtggatgtttccagtagctattgcttgtggaaatacttttgttcttaaaccttctgaaaaagatccaagttgtccattaaaattagcagaactagcaatagaagctggttttcctcctggggtattaaattgtgtaaatggagacaaagagtctgtagatgctttattagaggataaagatgtgcaagccattagttttgtaggctcaacaccaatcgcagaatatgtttatcatacaggaacaaaaaacaataaaagaattcaagcacttggaggagcaaaaaatcatatggttataatgccagatgcagacgttgaaaaaacaacagatgcgattattggctcagcttttggatctgctggtgaaagatgtatggcaatatctgttgcagtatgtgttggcaaagaaacaaataataaaattaaaaaatctctactagaaaaaacatctaaattaaacgttggaccttatactgacgaaaaaacagattttggacctctaagtagtgaagcacattataaaaaagttctaggatatatagatagtggggagaaagagggagctaaattattaactgatggaagaaattttaagaaacaaggctatgaaaacggttattttgttggaccaactatatttgatgaggttaagcctgaaatgaaaatatacaaagaggaaatatttggaccagttttaagcatgatgacaactaaaaaatatgaagatgctttaaaattagttaatgatcatgagcttggaaatggagcagcagtgtttactaaaagtggtaatatagcaaaacatttcactgaaaatgctaaaattggaatgataggagttaatgttccaattcctgtacctgtcgcttatcatagttttgggggttggaagcgttcactttttggagatcactcgattcatggtccagatggggtaagattttatacaaaacttaaaactgctactattacctggaatgaagataatgctggcccagaatttactattccagttctatcttaat

SEQ ID NO: 214029 - DNA, 961 bp, Unknown
  Bacterial polypeptide expressing nucleotide sequence isolated from the Sargasso Sea
aatgactaaacttaagcagtataaaatgtttatcaatggagagtgggtagactctgatactaaaaaaacttttgaaactttaaatccagaaaataataagccatgggctgtagttcctgaagcgagcacaaacgatgttgataaagcagtgaaagcagctcaaaaagcatttgaaggggaatggccaaagttacttccaagagaaagaggtaaatatttaagagcaatagcagacaaacttagagagaacgctgagttacttggggaaattgaaactattgatactggaaaattatttagagaaacaaaaaagcaagcgaactatattgcagaatactatgactattatgctggtatggcagataaagttgagggaacggttctgccaatagataaaccaaatattcaagcaataactacaagagttccgataggtgttatagctgcgataattccttggaactcacagatgttattaacagtaactaaactagcccctgctttagcaatgggaaatactgttgtcataaagtcatctgaattggctccagcagtattatttgaatttgcaaaattggttgaagaaacaggaatacccaaaggtgttataaatgttattacaggatatggtgatccgtgtgggaaggctctaacaacacataatttagtagaaaaaattgcttttactggtggaccagaaactgcaagacatataattagaaattcagctgagaatttatcagaagtaagtttagaacttgggggaaaaagtcctgtagcagtatttgaagatgctcatcaagaaaatgcaataaatggaattactgcaggaatttttggtgcaagtggacaaagttgtatcgccggatcgagattatatttacaaaaaggaatttataatgaatttctagataaacttactgaaaaagcaaacaaaataaaaattggagctcctatggat

SEQ ID NO: 214030 - DNA, 1444 bp, Unknown
  Bacterial polypeptide expressing nucleotide sequence isolated from the Sargasso Sea
atgtacgaaaaatttggacaatttattgatggtaagtggcaacagtcatctgacaaatcaacatatgaagttattaatccagctaatgaagaagttataggtcatgcatcaaaagcaacacccgctgatgttgataaagcattaaagtctgctgcaaaaggtttagaagtttggaagcaaacacctccttggcaaagatcttacattattagaaaaatagcagacaagatgagagcaaaacaagatgtattggctaaatggatgacacttgaagtaggtaaaccatttgcagaagctaaaggtgaagttggtggagcagcagatatttttgaatggaatgctgaagaaacaaaaagaatttatggacaaacagttgaaagtagatttgcagatactagagtacatgtttattatcagccaataggagttgttgcagctcttacaccttggaattttccattagttttatcttcaagaaaaatttcaacagctttagcagcaggatgttcagtaatagttaagccagacgttattacaccaggtacagttatggaacttattgatatatgtagagaatgtggggttcctcccggagtagtaaatttattatctggagatcctccaagtattgcacaacaattaatttcatcagatataattaaaaaaatttcagtaacaggatcgacaagggttggaaaattaattctcaaacaagccgctgataaagtgcaaagagttacaatggagcttagtggtcattccccatttattgtttttgatgatgcaaatatagaaaaagctactgatatggcaatttctgcaaaatatagaaataatggacaagtttgtatttcaccaaatagattttatattcaagaaaagaaaaaagatgaatttgttaatttgtttattgaaaaaacaaaaaaattaaaaataggtgatggtatggatccaagtgttcaacttggtcctttaacaacaaaaaaaagattaaacgaagtagaagaattagttgagacaaccaaaaaagaaggtgcaaaagtactattaggtggaaaaagacctgctggatttaacaaaggtttttattatgaaccaacaatttttgataatgtaaaagatgattttacaattatgaaagtggagccatttggtccactagtaccaatgttatcctttaaatcatttgacgaagtaattgaaagagcaaataataatgatttaggtctaagtagttacatatgtacaaactcaatggaacaagctcatagagcatcagaactaatggaaacaggtactgttgcggttaacactcctttagtagccatagcagaagcaccttttggaggcatcaaacaaacaggttatggaagagaaggtggatcaatggcgattaaagattatttaaatgtaaaatatacacatcttggaattaagggctaaa

SEQ ID NO: 214031 - DNA, 1444 bp, Unknown
  Bacterial polypeptide expressing nucleotide sequence isolated from the Sargasso Sea
atgtatagcaaatttggacaattcattgatggcaaatggcaagcatcacaaaataatgaatcttatgatgttttaaatcctgcaactgaggaagttttaggtaaggcatctaaagcgggtgaagaagatgtaaacaaagcacttaagtcagcagaaaaaggtctagaagtttggagaaatactccaccttggcaaagatcaaaaattataagaaaaattgctgatctaatgagagagagaacagatgttttagctaagtggctaacattagaagttggaaaaccactatcagaagcaaaaggagaagttggaggagctgcagatatttttgaatggaactctgaagagacaaaaagaatttatggtcagataattgaaagtagatttgaacatacaagaatgtatgtaaaatatgagccagttggagttgttgctggattaataccatggaattttccaatagttttatcttcaagaaaaatttccactgctttagctgcaggatgttcagtaatttgtaagcctgatgtaattactccaggtagtgtaatggaacttatgaatattataaatgatgcgggtgttcctccaggagtagtaaatttattatctggtgatccagctaaaatctcatctcaattaatatcatctgacatagtaaaaaaggtttctataactggctcaacaagagttggaaaactaattttaaaacaagctgctgaaaaagttcaaagagtcaccatggagttaagcggtcattcaccttttattgtttttgacgacgtagatattaacaaagtaactgacatggcaatcactgctaaatttagaaataatggtcaagtttgtatatcacctgcaagattttatattcatgaaagtaaaaaagatgaatttgctaaaactttagttgaaaaagtcaccaagcttaaagttggtaacggaatggatgaagatacaattctagggcctttaacaacagaaaaaagattaaatgaaatagaggcattagtagaaaaaactaaaaatgaaggagcgactgttttatgtggtggaaaaagacctgctggttttaataaagggtatttttatgaaccaactgtttttgataatgttaaagataattttacaattgctaaagaagagccatttggacctttagttccattgcttacttttaaagacactgatgaagttgtgaaaagagcaaatgacaatgaccttggtttagcaagttatatctacacaaattctttagaaaaagcgcacaaagtctcagaaaaaatggaaactggaacatgcgcggtgaaccatccaacaattgcatttgctgaagtaccgtttggaggaataaaacaaacaggttatggaagagaaggtggttctatggctatcaaagattatttgaacgtcaagtatacacatttcggtctcaattattaat

SEQ ID NO: 214032 - DNA, 1281 bp, Unknown
  Bacterial polypeptide expressing nucleotide sequence isolated from the Sargasso Sea
tatgaaaacaaatattttaattaataacgaattaattcaaggagattctactccagaaaaaattattaatccggtcaattcagaattaattgtcgaggttcctcaatcaagtgaagagcaggtaaataaagctgtgtctgcagcaaaaaaagcatttgcaacatggtccaagactactccggcagatcgttcaggaatgttattaaagcttgccgacttaattgatagtaaagcagaagagattgcaaaattagaatctcttaatacgggtaaaccttttcacttggcattaaatgatgaattgccagccatatcagatgtatttagattctatgctggagcttgtagaaatatgccgggagctgccgcaggtgagtacatggcaggatttacaagtatgataagacgagatccagttggagttatagcttcaattgccccgtggaattatcctttaatgatggctgcttggaaattaggacctgctttagcagcaggaaatacagttgtccttaaaccatctgaacagacgccgcttacaactttttttattagtgaattattagcagaagtatttcctgaaggggttgtgaatattgtttatggaattggagagactgttggttcatctctaattaatcatcaagatgttaatatgatttccttaacaggagatatcgcaacaggatctaaagttttagaggcagctagtaacagtattaaaaaaacacatttagaattaggcggtaaggcacctgttatagtttatgatgatgctgatattgatcaattaattgagggcataagagcatttggatattataatgcaggacaagattgtacggctgcctgcagaatatttgctgataaaaaagtttatgacaatgttgttgctgatttgtcttctgcagtatcctcaattggtttggcaaatgatgaagatgaaaaaaatgaaataccaccgcttatcactcaagagcatttaagcagagtttccaattttgttgagaaagcaaagtctttaaaacacattgagattactactggaggatctcaactgggtgagaaaggaaacttttataaaccaactgtaattgctggcgcaaaatacgatgatgatattgctaaaaatgaagtatttggtcctgttgtatcagtaacaccgtttagaaatgttgatgatgcagttaattgggcaaatgatacgaagtatggcttggcatcatctgtttggacaaaagatattaaaaaaggaatgaaaactgctgcgcagttacaata

SEQ ID NO: 214033 - DNA, 1044 bp, Unknown
  Bacterial polypeptide expressing nucleotide sequence isolated from the Sargasso Sea
ttccagctatggttccaatgtggatgtttccaatagctatatcatgcggcaacacttttgttttaaagccatcagaaaaagatccatcttgttcaattaaattggcaaaattatttaaagaagcgggtttgcccgatggggtttttaatgtagttaatggggataaagaagcggtggatgccctactaaccaacaaagatgttcttgctataagttttgttggctctactccaattgcaaaatatatatatgaaaatgcagcaaaaaatgaaaaacgtgtacaagcattaggcggagccaaaaatcattgtgttgttatgccagattgtgatcttgatcaggctgttaatggattgatgggtgcagcttacggttcggctggagaaagatgtatggcgcaatcagttgcggttgcagtgggaaacataggtgatcaacttgttgcaaaactatctaaaaaagttgagtcacttaaggttggcccgggattagacaaaaattctgaaatgggcccgcttgttaccaaggaacatttagagagagtgaaagggtatgtagatcttggagttaaagaaggagcaaagcttgttgtcgatggcagaaatataaaactacaaggctatgagaaaggattttatattggaggatgtctttttgataatgttcaaaaaaaaatgagaatatataaggaagaaatttttggaccagtcctttcagtgattagagttaaggattttgattctgctttgaatttaattaacgaacacgaatttggaaatggaacaagcatttatacgcgcgatggggatgttggacgaacttttgcaagcaaaattaaaattggaatggttggtataaatattccaataccggtacctgttgcttatcactcttttggtggatggaaaagatctctatttggtgattcagcaatgcacggaacagaaggtattaaattttatactaaattaaaaactataacttccaaatggccgtctggactaagatctgacccagactttgtaatgccaacaatgaaataaa

SEQ ID NO: 214034 - DNA, 1165 bp, Unknown
  Bacterial polypeptide expressing nucleotide sequence isolated from the Sargasso Sea
atgaaggataaaaagaatttttatattaatggacaatgggtgtctccaatagaaccaaggtcatttgaagtaattaacccagctacagaagaaccttgtgctgaaatttcacttggtggaaaaaaggatgttgatgcagctgtaacatctgcgaaaaaagcttttgaaacttggggttttactacaaaagaagaaagacttaatctttttgaaaagttatatgatatttacaaaaaaaattgggatcaaatggcaaaaaccatttctcttgaaatgggagcaccaattgatttttcaacagaacttcaaacaaaaactggagctagccatataaaatcatttaaaaatattttaaaaaattttaaatttgaaaaaactttagatgaagaaaaaaatcaaactattttatacgaaccaaaaggtgtatgtgcgttaattactccttggaactggccaattaatcaagtcaatttaaaagttattccagcactagctgctggatgtacagtagttttaaagccatctgaaattgcacctttatcatcaatgttattagctgaaatgatgcatgatgctggttttccaaaaggtgtgtttaatttagtaaacggcgatggtgcggtaacaggagatgctttgacaagccacccggatatagacatgatatcatttactggatcgactagagctggtgctttgatttctcaaaatgcagcaaaagattttaaaagaataagtttagaactaggaggaaaaggagcaaatattgtatttaaagatgctggaccagatgcaatatcttggagtgttcaaagatgttttagaaattcaggacagtcttgtaacgcgcctactagaatgcttgttgaaaaatcaatttataatgaaacaattgagaaagtaagagagtttgcaaataaaaccaaagtagacagtccaaataaaaatggaaatcatataggaccagtaatttctgaaactcaatttaataaaattcaaactttaattcaaaagggaattgatgaaggtgctaaattagttgcaggaggtgttggaaaacctgaaggtctagaaaaaggttattatgtaaaaccaactgtatttactgatgttaataatcaaatggaaatagctagaaccgaaatatttggacctgttttatcta

SEQ ID NO: 214035 - DNA, 1108 bp, Unknown
  Bacterial polypeptide expressing nucleotide sequence isolated from the Sargasso Sea
tatgtatgaaaagtttggacaatttatagatggtaaatggcaaaagtctcaaaataatgagacctacgaagtaataaatcctgcaacagaggaaattttaggtcatgcatctaaagcttgccgtgaagacgttgaaaaggcactactctcatctgagagtggtttcaaaaaatggaaaaacactacaccttgggaaagatctaaagttttaaggagaatagctgataagataagaaagaagaaagatattttagccaaatggatgactttagaggttggaaaaccattggcggagggggttggtgaagcaggtggtgcagccgatatttttgaatggaactcagaggagacaaaaagaatatatggacaaactgttgaaagcagattttcagatactagagttcatgtttactaccagcctgttggggttgttgctgcactagtaccatggaactttcctctaatattagcgtctagaaaaatttctactgccttagctgcaggatgctcggtaatttgtaaaccagatgtaataacacctggaacagttatggaattagttgacatctgcaaagaatgtggtgttcctgatggagttgttaatttattgtctggtgatcctccctcaatttctgagcaattgcttgagtcagatattgtaaaaaaagtttcaattacaggatcaaccagagttggaaaattaatacttaagaaagcagctgataaagttcaaagagtaacaatggaattaagtggtcactctccttttattgtatttgaagattgtaatattgaaaaagttgctgacatggccattgctgcaaaatttagaaataatggacaagtatgtatttctccaaatagattttacattcaagaaagtaagaaagatgaatttgttaacaaatttattgaaaaaactaaaaaattaaaaataggaaatggtatggagcaagatgttcaattgggtcctataacaactttaaaaagattaggcgaaattgaagagcttgtagaaacaactaaaaaagaaggtgctaaagttttaataggtggaaaaagaccatcaggcttcaacaaaggatatttttacgagccgactgtattt

SEQ ID NO: 214036 - DNA, 646 bp, Unknown
  Bacterial polypeptide expressing nucleotide sequence isolated from the Sargasso Sea
aatgaataatgtacttaataaacaaaaagaatattttattaagaatgggcctccaccaatagaattacgtatcgatcgtctagaaagattaaaaacactaattatggataatcgttacgattttgttgaggctttaaattcagattttggaaacagatcaaaaaatgcatctatgttatctgatgtttatggaataatgcctgcgattaatttagctattaaaaatgttaaaaaatggaataaggttgaaaagaaatcttcaaattttccatttggcctcttaggagcaaaatcttatgttaaatatgaaccattaggaactgttggtatgatttcgccgtggaattttccagttaatcttgcatttgtgccactcgtttcaatttttgcagcaggaaatcaggttatgcataaaccaagtgaacatacacctataacatcttcattactcaaagatttatgtgatgctgcatatgatgaaaatgaatttgcaacatttttaggtggaccagatgttggagagtcatttacaaaattaaattttgatcatcttctgtatacaggcggaggttctgtagctaaacatgtcatgaatgctgcttcaaaaaatcttgttccatgtacgcttgagcttggaggaaaatct

SEQ ID NO: 214037 - DNA, 1291 bp, Unknown
  Bacterial polypeptide expressing nucleotide sequence isolated from the Sargasso Sea
atgaaaaaaattagtcactttatagatggaaaaatttatagtgatagcaaatcaagaattggtccaatatttaatcctgcaataggagaacaaatagcagaagtagagttagcgagtaaatctactgttgagatggctataaaaagttcgtcaaaagcttttcaaaaatggtccaaaactacaccaataaacagagcaagaattttagcaaaatttaaagatcttttaataaaaaatatgaatgatcttgcagtaatggtatcagagcaacatggtaaaactattgcagatgcaaaaggttcaatacaaagaggtattgaagtagttgaatatgcaactgggataactgactctcttaaaggcgatcactcctcaaatgttggcactaatgtagactcacatactttaagacaaccgttaggagtttgtgcgggaataacgccttttaattttcctgcgatggttccaatgtggatgtttcctgtcgctattgcatgtggaaactctttcgtattaaaaccttctgagaaagacccaagttgtccaatgaaattggcagaattagcaatcgaagcgggtttgcctcctggtgttttaaattgtgtaaacggagataaagaggcagtagatactttattagaaaataaaacagttcaagcaataagttttgttggatcaacaccaattgctgaatatgtttatcatacaggaacaaaaaataataaaagagtccaagctttaggtggtgcaaaaaaccatatggttataatgccagatgcagacgtcgataaaacaactgatgctctaattggatctgcttttggatctgcaggagaaagatgtatggcaatatcagtcgcagtttgtgttggaaaacaaactaatgaaaagattaaagcaaaacttttaaaggaagcttctaaattgaatgttggtccttatactgatgaaaaaagtgattttggtcctttaaacaataaggcacattttgaaaaagttttaggttatatcgatactggtgaaaaggaaggtgctaagctattagctgatggaagaagttttaaaaagcaaggttatgagaatgggtactttgtaggtcctacaatttttgatgatgtaaaaccagatatgaaaatttataaagaagaaatttttggtccggttttaagcatgatgacaactgaaacctatgaagatgctttaaaactagttaatgatcatgaattaggaaatggtgctgctgtttttacaaaaagtgggaacattgcaaaacattttactgaaaacgcaa

SEQ ID NO: 214038 - DNA, 925 bp, Unknown
  Bacterial polypeptide expressing nucleotide sequence isolated from the Sargasso Sea
atgaatttaattgaacattttataaacggaaaaataactaaaggatcttcaaagaaaacatccaaagtttttaatcctgcaactggtgaacagacggctgaggtaagtttggcttcaaaaaacgatgttgaccttgcagttcaaaaagcaaagcttgcgttcacagattggagtagaaaaccaccagctcaaagagcaagaataatttttaaatttaaagagttaatagaaaaaaattctgatgaaataattaaacttatagtttctgaacatggaaaagtttatgaagatgctaaaggatcactaacaagaggtttggaagttgtagaatttgcatgcggtataccacatcttcttaaaggagaatttacggaaaatgttggtaccgatgtagatagctggtctattagacagcctttgggggtgtgcgctggaattactccatttaattttccagcaatggttcccatgtggatgtttcctatagctatcgcttgtggcaatacttttgttttaaagccatcagaaaaagatccttcatgttcaattaaattagctaaattatttaaggaagctggattaccagatggggtatttaatgtagttaatggaaacaaagaggcggtggatgcattactaacaaacaaagatgtggaggctataagttttgttggatctacaccaatcgcaaaatacatttatgaaaatgctgcaaaaaatgaaaagcgtgttcaagctttaggtggagccaaaaaccattgtgttattatgcctgattgtgatcttgatcaggcagtaaatggtatgatgggagccgcttatggatcagcgggcgaaagatgcatggctcaatctgttgcagtcgctgtaggtaaaattggaaatcagttggtaaataaacttgctaaaaaagttgaatcttaaa

SEQ ID NO: 214039 - DNA, 904 bp, Unknown
  Bacterial polypeptide expressing nucleotide sequence isolated from the Sargasso Sea
cttgcacccttgtcatctatgatacttgctgagatcgtagatgaggtaaagtttccaaaaggtgtgtttaatttagtcaatggtgatggagcaactacgggtgatgctttaactagtcatccagatatagatatgatttcttttactggatcaacaagggctggagctctaatttcacaaaacgctgcaaaagattttaaaagggtaagtttagagcttggaggcaagggggcaaatataatttttaaagacgctgataatgaagctatagaaagaggtgcttttagatgttttagaaattcaggacaatcttgtaatgcacccacaagaatgcttgttgaaaaatctatgtacaacgaggctattgagagattaaaaaaatatacagaaaattttgaggttggtgatccaaaaaaagaaggagagcatataggtcctgtcatttcagaaaatcaattcaaaaaaatacaagctttaattcaaaaaggtattgatgagggtgcaaaattagttgctggagggacaggaaaaccagacggcctagataagggtttttttgttaaaccaacagtatttgctgacgttaataacaatatggaagttgcgagaacagaaatttttggtccagttctatctgttataccatttgagtcagaggaggaagcaattaagattgcaaatgatactacttatggattaacaaattatattcaatcaaaggatcatgataaagtaaaacgagttgcgagaaaattaagatctggaatggttgatgtaaatggagctggtattgcagttgatgctccatttggaggttttaaacattctggaataggtcgagaagcaggggagttcggtttagaagaattcttagaggttaaagctgtaggcggctggagttaat

SEQ ID NO: 214040 - DNA, 1090 bp, Unknown
  Bacterial polypeptide expressing nucleotide sequence isolated from the Sargasso Sea
gatgagacaaccattaggtgttgttgctggaataactccatttaacttcccagccatggttcctatgtggatgtttccaatagcaattgcatgtggaaatacatttattttaaaaccatcagagaaagatccatcatgttcaataaagttagctcaacttctaaagcaagcgggtttaccagatggtgtatttaatgttgttaatggggataaagagtctgtagatgcaattttagaaaataaagatatcaaagcagtaagttttgtaggttcaacaaaaattgctaaatatatttatgaaaatgccgcaaaaaatgaaaaaagagtgcaagctttaggaggtgcaaaaaatcatttagtagttatgccagattgtgacattgatggtgcagttaacggattaatgggcgcagcatatggttctgctggcgaaagatgtatggcacaatcagttgccgtagctgtaggagatataggagatgagttagtttctagaatttcaaaaaaagtagactccttaaaagtaggacccgggatggataaaaattcagaaatggggccattagtaacaaaggagcacttagagaaagtaaaaggttatgtagacctaggagttaaagaaggagcaaaattagttgttgatggaagaaatttaaaacttcaaggatatgaaaatggcttttttataggcggatgtttgtttgacaacgttcaaaaagatatgagaatttataaagaagaaatatttggaccagttttgtcagttgtaagagttaaaacttttgaagaagcaaccaagttaattaacgaacatgagtatggtaatggtgtaagcatctatacaagagatggtgatgctggaagaacctttgctagcaaaattcaggttggaatggtgggtattaatgtaccaataccagtcccaatggcttttcatagttttggtgggtggaaaagatcattatttggcgatagcgccatgcatggagttgagggagtaagattttatactaaactaaaaacaataacatctagatggccttctggcataagatcaaatccagaatttgttatgccgactatgaaataa

SEQ ID NO: 214041 - DNA, 1450 bp, Unknown
  Bacterial polypeptide expressing nucleotide sequence isolated from the Sargasso Sea
catgaccgacagacggatgctgatcgccggcgagtggtgcaccgcccgcgatgggcgcaccttcgaccgattcaatcccgcgacgggcgcgctggcgtcacgcgcgccggcggccggcgcagccgacgccgacgcggcgatcgacgccgcgcaccgcgcgtttccggcatggtcggcgcttgcgccgaccgagcgccgccggctgctgctgaaggcggccgacctgatggacgcgcgcatcgacgcgttcatcgcgacgggcgtagccgaaaccggcgcgacgcccggctggatcggcttcaacgtgacgctcgcggcgaacatgctgcgcgaggccgcgtcgatgacgacgcagatcgccggcgacgtgatcccgtccgacgtgcccggcaatctcgcgctggcgatgcgcgtgccgtgcggcgtcgtgctcggcatcgcgccgtggaacgcgccggtgatcctcggcacgcgcgcgctggcgatgccgctcgcttgcggcaacacggtcgtgctgaaggcctccgaagcgtgccccggcgtgcatgcgctgatcggcgcggtgctggacgaagcagggctcggcgcgggcgtggtcaacgtggtcacgcacgcggcggccgacgcacccgaactcgtcgagcgcctgatcgcgcatccgcacgtgaagcgcatcaacttcaccgggtcgacgcatgtcgggcgcatcatcgcgcgccacgcggccgcccacctgaaaccggtgctgctcgaactcggcggcaaggcgcccgtgctcgtgctggacgatgccgatctcgacgcggccgtcgacgcgatcgcgttcggcgcgttcttcaaccaggggcagatctgcatgtcgaccgagcgcgtgatcgccgcgcggccgattgccgatgcgctggtcgaacgcctcgccgcgaaggcgcgcacgctggtcgcgggcgatccgctggccggccatccgctcggcacgatggtcgacgcgtcggccgccgtgcgtgcggcgtcgctggtcgaggatgcgcgggcgcttggcgctcaactgccgctcgggtgccgcgtggaaggcgcgacgatgcagccggcgatcgtcgatggcgtgacgcgcgacatgcggctgtatcgcgaggagtcgttcgcgccggtcgtcgcgatcctgcgcgcggacagcgacgacgaagcggtcgcgctcgcgaacgacagcgagttcgggctgtcggcgagcgtgttcagccgcgatgtcgcgcgcgcgatggcggtcgcgcgccggatcgaatcgggaatctgccacatcaacgggccgaccgtgcacgacgaggcgcagatgccgttcggcggtaccaaggcgagcggctacggccgcttcggcagccgtgcgtcgatcgccgaattcaccgagctgcgctggatcaccgtgcagaccacgccgcggcattacccgatatga

SEQ ID NO: 214042 - DNA, 604 bp, Unknown
  Bacterial polypeptide expressing nucleotide sequence isolated from the Sargasso Sea
catgaatttaatagaacacttcgtaaacggtaaaataattccgggatcttcagataaaaagggaaaagttttcaatccagcaactggtgaacaagagtctgaggtaagacttgcttcaagatctgatttagacagtgctgttgaggtagcaaaaaaagcatttgaaacttggtctttaaaacctgctctacaaagagctagaataatatttaaatttaaagaattaattgaaaaaaactctgatgaattaaccaagttaatagtttcagagcatggaaaggtttatgaagatgcaagaggttctttaactagaggacttgaagtagtggaatttgcttgcggaattccacatttattaaaaggtgagttttccgaaaatgttggcactaatgttgatagttggtcaatgagacaacctttaggagttgttgcaggtatcacacctttcaactttccagcaatggttccaatgtggatgtttccaatagcaatagcatgtggaaatacttttattcttaaaccatcagaaaaagacccatcttgtggtctaagattggctgaacttctatctgaggctggtcttccagatggagtgtttaatgta

SEQ ID NO: 214043 - DNA, 919 bp, Unknown
  Bacterial polypeptide expressing nucleotide sequence isolated from the Sargasso Sea
tatgattttactcaaaaaagcaggcctgccagacggcgtgataaacatggtcaatggaagagggtcagtaacaggtgctgcgatcacacaaaatgaaaacatcgatgtaatcgcctttactggggggactgagacaggaagggtcataggcgcagagtcgggcaaaacacttaaaaaaattgttactgaactgggcggtaaatcagcaaacattatattttcagacgcagattttgaacgagcactggacgcagcaatggttgcaatattttcaaataatgggcaacaatgcttagctggctccagaatccttgttgaaaaacccattgcaaaggagtttaaaaaaaggatggtagaaagggcgagaaacttgattatcggcgatccttttgactcaaaaacagagattggcccccttatttcaaaagagcaaattgagaaagtcatgtcttttgctcaaacagccgaagaatccgatgacaccaacatactttgtggaggaaagcgatgtgagtcctttcaaaaaggttattattttgagcccaccattgtagaaacgaagagcaatcgaaacactgtatgccaagaagaaatttttggccctttcgcgaccattctcgagtttgatggcattgatgaggcaatggaattagccaatgacagcgagtttggtttggtgtcatatatatggtctactgacattaggaaaatcatgcgagctcaagccgaaataagagcgggagtggtttgggtcaatacgcccctgatgagagagctcagagcaccatttggggggtataaaaactctggaattggcagagatggaggcgaatggagcagaaatttattcactgaggaaaaaaccgtatccattccattaaaagactttccaattacaaagctcggggaaaacgattga

SEQ ID NO: 214044 - DNA, 1136 bp, Unknown
  Bacterial polypeptide expressing nucleotide sequence isolated from the Sargasso Sea
catggatacatatcagctgtatatcggcggaaaatttgtcgacgcggaaggcggcgcgagcaagcctactttcaatccctggaacggcgaagccatcgccaatattccggttgccagcatagccgacgcggaagcggctatcgcggcggcacgcgatgcgttcgataacggtccgtggccgaaaatgaccggtgccgagcgtggagaaatcatctgcgcgctgtcgtccaagatgaaggaacggatgaaggatctggcgcggctggaatcgctcgattccggcggcacgatcaccaagaccggtgccgacgccttcctcgcccagcgccagatgaactatttcggcacgatggccgaaaaattcaattctgagcccaaggaaatcgagggcatgtcgcgccccggccggtcgtacaattacaccattcgcgaacccatgggcgtctgcgcgtcgatcattccgtggaatttcccgctgatgatggcggtgtggaaactggggccggcactcgggaccggcaatacgatcatcctgaagcccgcgtcggacacgcctttgtcggcgatggagctggcgcggatcgtcgacgaatgtggcttcccgcccggcgtcgtcaacatcatctccggtcccggcggcaagataggcgaactgctgacgacgcatccggacgtcgacaagattgcctttaccggctcgaccgaggtcggcaaggatatcatggccaaggcgtccggcacgctgaaaaaggtgacgctggagtgcggcggcaagtccccgaatattgtcctgcacgacgccaactgggagattgccatcgacgggtcgatctttgcgtcattctatcatcagggccaggtttgcgaatccggcacgcggctgctgctacctgccgatcagcacgacgatttcgtcggccagatggttgctaagctgaactcgctgcctatgggcgatcctctcgatccggcgaccaaggtcggtccggtggtatcggaaagccacatgaacacggttctagactatatcgaaaagggcaagaccgagggggccacgttggcctgcggcggcgaacgcgccaccgatggcgatctcgccaacggctattttatcaagccgacggtctttaccgacg

SEQ ID NO: 214045 - DNA, 895 bp, Unknown
  Bacterial polypeptide expressing nucleotide sequence isolated from the Sargasso Sea
tatggaattagttgacatttgtagagagtgtggagttcctgcaggcgtagtaaatctattatctggtgatccgccaagtatcgctcaacaattaatctcatcagatattgtaaaaaaaatttcaataactggctcaacaagagttggtaaattaattcttaaacaagctgcagataaagttcaaagagtaactatggagttaagtggtcattctccatttatagtttttgatgatgcagatatccaaaaagcaactgatatggcaatttctgcaaaatttagaaataatggtcaagtttgcatttcaccaaatagattttatattcaggaaaataaaaaagacgaatttgtaagtctatttgttgagaaaacaaaaaaattaaaaataggtgatggaatggatcctaatgttcagcttggacctttaactacaaaaaaaagattaaatgaggttgaagaattagtagaaacaacaaaaaaagaaggtgcaaaaattttgctaggcggtaaaagacctgcaggttttaataaaggtttttattatgaaccaacaatttttgacaatgtaaaagatgattttaccattatgaaagttgaaccatttggacctcttgtacctatgttgtcatttaaatcatttgatgaagtaattgaaagagcaaataataatgatttaggtctttgtagttatatatgtacaaattcaatggaaaaagctcatagagcatcagaattaatggaaacaggcactgttgctgttaatactcctttagtagcaatagcagaagctccatttggaggaataaaacaaactggctatggaagagaaggtggatctatggcaataaaagattatttaaatattaaatatactcatttaggtattaaaggttaa

SEQ ID NO: 214046 - DNA, 601 bp, Unknown
  Bacterial polypeptide expressing nucleotide sequence isolated from the Sargasso Sea
aatgattgagagaaaaaatttttatattaatggtaagtgggtttctccttcaaaaccaaacgattttgaagttattgatccgtcaaccgaggagccttttgcaataatttctttaggatccactaaagatgcagatgatgcaattaatgctgctaaagtagcttttgaaacatggagagaaacttctaaagaagaaagattagaactattaataaaatttgatgaaatttataatagaagatgggatgaaatggttaaagcacagtcaacagaaatgggagccccgctggattttgcttcagaaacacatactaaaatgggtgctgatatttcgaaaaacactttaaaaattttaaaagattttaattttgaacatgaatttgatgctaaatctaataatcacattagatatgagcctataggagtatgtggcttaataacaccttggaatttcccaatgaaccaaatcgtattaaaggttatacctgctttagctgctggttgcacaatgattttaaagccttcagaaatcgctccagtatctggagtattatttgcagaaatgattcatgaagccggttttcctcctggagtttttaac

SEQ ID NO: 214047 - DNA, 932 bp, Unknown
  Bacterial polypeptide expressing nucleotide sequence isolated from the Sargasso Sea
aatggaaaaatataagaattttataaataataaatggattgaaagtgagtccaaagaaacaataaaggttgatgatccttcaaatggtaaaatcattggtgaaatttcatgtgcaaaaaaaaatgaagttgatcttgcggtagaagcagctaaaaattcttataacagcagagtacttgtagatatgcctttactttcaagagcgaaactaatgagaaaaattgcagaagagacaagaaaggtttcaaaagaaggtggtgaacttctttgttatgaaaatggaaaaaatatcgcttcagcaattaaagaattcaatgatgtagcagatatgtttgattattatgcaggcttaacagataaacttgagggtaaaacaatacctgttgcaaaaaatgtttttgattacacagttttagaaccatttggtgtatcagcacatgttgtgccatggaattttccattatcaatgattggaagatcactgtcatgttcttttgctacaggaaattcaacaattataaaaactgcagaattaacacccttgtcagcaacagtttttgctaaagcaatacaaaatgctggagtacctgaaggattaataaacataatttgtggatatggaaatgaggcaggttcttatcttgtatctcatgaagatgtaaatcatgtagtatttacaggctcagtcgcaactggaaaaaaaattcttcatgcttgtgctgataaagctatacctgccgtagttgaattaggtggtaaatcagctggcatagtgtaccctgacgcagatctaaatgaagttttagaaagtgcacgttcaggaatatttagcgttgcaggacaaatttgtacagcgatgtctagattggtagttcataaatcaatcaaagatgaattagtagataaactttgtgatatgagtaaatctttaa

SEQ ID NO: 214048 - DNA, 717 bp, Unknown
  Bacterial polypeptide expressing nucleotide sequence isolated from the Sargasso Sea
tatgcaaagcattgatacaacatttaaatcgcagcaagaaaaaagcattgctttaagaagcagctcctttaaagaaagaagatctaagctaaagcttcttcttaaaaactttttagaaatggaggaggaggttcttgcggcgctttcaaaagacctgggaaagtctaaaaccgaggcgcttttggcagaaatttatggtgttaaagcagaggcaaactttgcaataaaaaatattaaaagctggatgaagacaaaaagggttgcaagtccacttgcaatatcttttaccaaaagctgggttaagccagaaccaaagggaaacattttaataatttcaccctggaactatccagttatgctctgccttaaccctctcattgccgcaatagcgtcgggcaacaccgctataatcaaaccctcagagcttactcccgcctctggagagcttgtaaaagccttaatagaaaaaaccttttcatctgatgaggttgctgtttttttgggtgaaaaagatgtagcacaaaaacttttaaaccttcccttcaaccatataatgtttactggtagcccaaaggttggaaaggttgttatggaggcggcttcgcgacaccttgcgggcgtaacccttgagctgggtggtaagtctcctgttattgttgacaaacacgcaaacataaaagacgctgcgtggaaaatttctttttataagtttgcaaa

SEQ ID NO: 214049 - DNA, 1105 bp, Unknown
  Bacterial polypeptide expressing nucleotide sequence isolated from the Sargasso Sea
aatgactgatctcacaaaaaatccagatctcaggttaagagacaaaccagatgatttttttggtgactggaaatggcgtgagggtttagcagaacttatggttcctataataggaaaactttataggaacggtgtacatgttctcatgtatggacattcattagtaaatcaatcacctattgaaataatgaaatctcataggtttataagaaggattgaagatactgagatttcagaactagaaacctatccttttttacaaagaattgaactccaagatattaaagattgtgaaattgatttaggagagatagtagtagatttcatgaaagaaaataaaaatctagatgaccctcaaattgatactcacataaaatcatttattttagatccattagatcaagttgatcagaaaagaccttcaaagccacaagatattgttttatatggatttggtcgaataggtagattagtctctcgtattatggctcaaacaacaggaccaggtaactattatagacttagagcaattgttgttagaaaaggatctaataccaatgatctacttaaaagagcgagtttattgagacgagattctgttcacggatctttccatggaactatacgagtcgataatgagtccgaaactttgataataaatggaaatcccgtaaaaataatctatgcaaatggtccaaaagactttaaatattcaaattatggtatagataatccaattgtaattgataatacaggcgtctggagagaggaaaaagatttatcacttcatttagaatctggtgcatgtaaagtcattttaactgctcctgctaagggaaaaataaagaatattgtaaatggcatcaataacgatattttgaatgaatctgataatataatttcagcagcttcatgcacaactaatgcaatagtgccagttttagatattctaaataaagaatattccataacttctgggcatattgaaactgttcacgcttacacaaacgatcaaaatctaattgacaattatcataacaaagatagaagaggaagaagtgctgctctaaatatggtaataacatctacaggagcagtaaaagca

SEQ ID NO: 214050 - DNA, 1402 bp, Unknown
  Bacterial polypeptide expressing nucleotide sequence isolated from the Sargasso Sea
atgacgatcgacggcggcgagacaagcgctgcctcgtggttcgacgtcgtcaatccggccaccggcgagatctttgcgcaagccccgcaatgcacccaggatcagctcgacgacgcgatggccagtgcggcgcgcgctttcgtgtcgtggggcgtaagcgacgacagcgtgcgccgcgcggcgctgcaaggcattgccaatgcattgatcgcggcacaactggagcttgcggaactggtgacaaaagaacaaggcaagccgctcatggcggccgccttcgaagtgaccgagaccgcgcgctggttcagctattttgcggagctgccgctgcggccggaggcgcttcaggacgatgcacggggtcaggcagtgctcgtgcgccgtccgctgggcgtcgtcgccgcgatcacaccgtggaatttcccgttgcttctactcggaatgaagctcgcgcccgcactgctcgcgggcaatacgatcgtgttgaagccttcgccgtttacgccattgtcgacactcgccgcggggcgaatcatcgctgggcatttaccgcctggcgtactcaacgtggtcagcggcggcgatgcgctgggtgcgtggatgaccggtcatccggcggttcgcaagatcagctttacaggatccgtcgcaacgggcaaggcggtcgccgctgcggcatctccggacctcaagcgcatcactctcgaactgggcggcaacgacgccgcgatcgtgctggatgatgccgatccctcacgtgtcgcggcgggcattttctggggagcgttcacgaacaacggacagatttgcgcgggaatcaaacgcgtttatgtgccggaccggctgcatgatgcagtggtcgaagcgctcgcggagcgcgcccgtcgagcacgggtcggcaacggcatggacgatggcgtgcagctcggtccgatcaacaacaagccacagttcgagcgggtctcgagcctcgtcgctgatgcgttggctgacggcgcactggccgccgccggcggacacgcgatggacaggccgggctacttcttcgagccgacgattttgcacgatgcgcgtgagggcatgcgcatcgtcgatgaagagcagttcggtccggcgttacccgttctgcgctacagcgatctcgacgaagcgatcgcacgggccaatgcaacgccgtacggattgtctggatcggtctggagctcgaacgaggagcgtgcagcacgcgtggccgcccggctcgattgcggaagcgcctacgtcaatacgcacctggtcgtgcagccacatttaccgttcggcggctggaaatggagcggcatcggcatagagaacggctcgtggggactcgacgcgttctgttcgcttcaggtccgctattgccctcgcggccgctcgtgac

SEQ ID NO: 214051 - DNA, 499 bp, Unknown
  Bacterial polypeptide expressing nucleotide sequence isolated from the Sargasso Sea
aatgcagacattaaatgttggcaatccattagataaaaatactgatgtaggtgctatcaattcaaaagatcaattagataagattgaaaaattggtaaatgaaggtgttgcagatggtggagatttattccaaattgaatgtgaacttcctaaaaatggattttggtttaagccaagtttatttacaagcgttcaggcaaattataaaatcgcaactgaagagatatttggacctgttcttactactttaacttttagaactccggaagaagctgttgagattgctaacaatactgaatatggtctttctgcaggtatttggacagaaaaaggttcaaaaatattatggactgctgataggctcgaagcaggagtaatttgggcaaatacattcaataaatttgatccagcatcgccttttggtggttataaagaatcaggctttggtagggaaggaggaagacatggtcttctttcatacttaaaggtgtcatcatga

SEQ ID NO: 214052 - DNA, 1528 bp, Unknown
  Bacterial polypeptide expressing nucleotide sequence isolated from the Sargasso Sea
aatggctattttttctatttcaaaatctgaaactgggcaaaaattattaaccttacaaagtccagttgacctatctcatatcgatacctatgaatgtacatcctctgaagatatttcaaaaataatgacgcacgcaaaaattgcacaaagtgaatggaaaaaaacatcacttaaagagcgagttgaattgatgcataaggttgctgatattgtgattcagcaacaagacagaatcatggaagtagttatgagggaaacaggcaagcctcaacaggaggctatggcaatggaagttttttctgccgttgattcattggttttttatgcaaaaagagctaaaaaatggttatctgacaagaaaattaagatgcatgggcctatgcagttcttaaaaaaaactattgtaacctacaagccaagaggggtagttgctgttattactccttggaatggaccattcatcttatcaattaatcccgtgattcaggctgttttatgcggtaatagtgttgttgtaaaaccatctgaagtaacgccaatgtcaggagctttggttgaggagatatttgcattggcagaagctccagtgcatttagttcaaactgtaattggagacggcgaaacaggcgcagaactaattgatcatggtcctgataaagtgtcttttactggcagtgttgctacaggaaagaaaatagctaccaaatgtggggagatgctaattccttatagcctggaattgggtggcaaagatgcaatgattgtttgctctgatgctgatgtcaaggatgcagccagtggtgctgttgtaggttcatgtatgaatgctggtcaatattgctgtggcacagaaagaatttatgtaatggatgatatttacgatgagtttgtaggcgaagttgtttctattacgaagacactaattcaatcaaatgattgtaagggtgatgtcggcccaactttttgggataaacaaatagaaataattgaggatcatgtaaaagatgcaatagataaaggagcgaaagttctggttggaggaaagcgtaatccaaattttgaagggctatattttgaaccaacggttttgaccgaggtcactcatgaaatgaagataatgaaggatgaaacttttggacctatcatttcaataatgaaagttagctctgaagaagaagctttaatgctagccaatcaatctcactatggattgaatgggaatgtttggaccaaagatttaattaaaggaaaaaaattagctcaatctattgaaacaggagcatgctctgtaaacgatatggcaatgagctatggcgttaatgaagttccttttggaggtgttaaagaaagtggcctaggagtagttaatggagaggagggcttactagcgtatgctcatgccatgccaattatcattggaaagaaatcagcatctgcatatccttatacagataaatcttttgagcaactaaaaggcgcactcaagattttctggggaaacagattagttagaaaattatttggctaa

SEQ ID NO: 214053 - DNA, 1315 bp, Unknown
  Bacterial polypeptide expressing nucleotide sequence isolated from the Sargasso Sea
aatgaattcaatagaacattttattgatggtaaagttataaaaggttcttccaaaagaacgggaaaagtctttaaccctgctacaggtgaggttagttcaaatgtgaatcttgcaagctctgcagatttagataaggcggtaaatgctgcaaaaaaagcttttaaaagttggtctgaaaaaacaccactatttagagccagagttctttttaaatttaaagaattgatcgaaaaaaattatgacgagcttacaaaaattatagtttctgaacacggaaaagtttatgatgatgccaaaggttctttaaccagaggtttagaagtggtagagtttgcttgtggtattccacagttgcttaagggagaatttacagaaaatgttggtacaaatgttgatagctggtctacgagacaaccacttgggatttgtgcagggataacaccatttaactttccagcaatggttcctatgtggatgtttcctatagcaattgcatgcggaaatacatttgttttaaaaccatctgaaaaagatccatcttgttctatgaaattagcagaattatttttagaggccggtcttcctccgggcgtttttaatgttgttaatggcgataaagaggctgttgatgcaataattaataataaagatatttctgcagtaagttttgttggctcaacacctattgctaaatatatttatgaaaattgtgcaaaaaatgaaaaaagagttcaggctttaggcggtgcaaaaaatcattgtgtagttatgcctgattgtgatttagagcaagcagttaatggactgatgggtgcagcctacggatctgccggtgaaagatgtatggcacagtctgtagcggtggcagttggtggaataggagacaaattagtagattcccttgcaaaaaaagttgaggcattaaaagtaggacccggtatggataagcagtcagaaatgggaccgttagtaaccaaagagcaccttgaaaaagtaaaaggttatgtagacataggagaaaaagagggagcaaaactcatagttgatggaaggaattttaaaattcaaggatatgaaaaaggtttttttataggtggatgtttatttgactatgttaagaaagatatgagaatttataaggaggaaatatttggacccgtattatctgtagtaagagtaaaagatttcgacgaagccttaaaattagtaaatgatcatgaatttggaaacggtgtaagcatatttactagagatggagactcagggagaaccttctcaagtaaagctcaaatcggaatggtaggaataaatatt

SEQ ID NO: 214054 - DNA, 478 bp, Unknown
  Bacterial polypeptide expressing nucleotide sequence isolated from the Sargasso Sea
tatgggatctatgatttcaaaaggacatttacaaactgttgatggatatatccaaaaaggaatagatgagggagcaaaacttttatctggaggagtttcaaataataagcaaaaaggtttttatgcaaagccaactttatttgatggattaaaagaaaatatgaccatagctcaagaagaaatatttggaccagtactcggtgttttaacagttaaaaatgatgaagaagctttgaaagttgctagtaattctaaatacggattacatgctagtgtatttactcaagacataaacagagcatttcatctagctaaaagcttgccttgtggaactgtatcagtaaacactttttctgaaggagatattaaaaccccatttggaggttataagcaatcaggctcactaagtagagatcaaggtactgaggctctaaattcgtttcttcaaacaaaaacaatctggataagtcataattaa

SEQ ID NO: 214055 - DNA, 340 bp, Unknown
  Bacterial polypeptide expressing nucleotide sequence isolated from the Sargasso Sea
gcttttgcggatgttaataataatatggagattgcaagaacagaaatttttggtccagtattatcaattataccttttgaaactgaagaagaagcaatttcaattgcaaatgatacaccttatggcctattaaattttattcaaacacaagaccagaaaaaagcaaatagagtagcaagaaaactaagatcaggaatggttgatataaacggtgcaggacttgcgccagacgcaccttttggaggatacaaacattccggtataggacgtgaagctggagttttaggtttagaagaatatcttgaagtaaaagctgttagcggctggaacgacaattaat

SEQ ID NO: 214056 - DNA, 1429 bp, Unknown
  Bacterial polypeptide expressing nucleotide sequence isolated from the Sargasso Sea
aatgaaaacgagctacatcggtgggcaatggcgtcccggttcggacggttaccgaaacatcaacccgtccgatacatctgacgtggtcgacgaattctcacaggcggacgagagcctggctctcgaggcaatcgacgccgcgtaccaggcgttcactaccgggcaagtactcggcgtgcaagctcgcgctgatgcactggatcgcgtgggcactgagctcctcgcccggaaagaagagctgggcgagctgctttcacgggaggaaggaaaaacccgtgcggaaggtatcggtgaagtggcgcgcgccggccagatcttcaaatttttcgcgggcgaagtccttcgcgtacggggtgaacacctcgaatctgtcagacccggcttgagcgtcgacatcacccgtgagccagtcggcgtcgtcgggatcatcgcgccgtggaacttcccgattgccatcccggcgtggaagattgcgccggcactcgcttatggcaactgtgtggtgttcaagccggcagaactggtgccatcgtccgcgtgggcattgagcgaaatcatcagtcgcgccgggtttccggcgggcgttttcaacctcgttatcggccgtggcagcgtcgtagggaaggcgctcctcgagagtccgaaggttcatgcgatcagtttcaccggctccaccgggactggcgcgcgggtcatggcaacggccggcgcacgctttgcaaagttgcaactcgagatgggcggaaagaacccgttgctcgtgacggatgacgcggacatggagacggcactcacctgtgctatccagggatccttttactctaccggccagcgatgcacggcatcgagccgaatcatcgtcacgcacggcatctattccagattccgcgacgcgctcgtcgagcggctttcgcacttgcgcgtcggtcacgcgctctctgccgacacgcacattgggccggtggtcgattccgagcagttgcagaccgacctggaatacatccgaatcggacgggaagaaggtgcgacgcttgcgtttggcggagagcgtatcaagcgcgacacggacggatttttcctctcgccggcactcttcgcggacgtgaccagcggaatgcgtatcgcccgcgaagaaatattcggcccggtagcatgcctcatcccggcacgagatttcgacgacgcgctccagatagccaatgatacggaattcgggttatcggcaggcatttgtacgacgtcgctccaatacgccacacgcttcaagcgcgaagcgcaggccggcatggtgatggtcaacgttcccaccgccggggtcgattatcacgtccctttcggcgggcgcaagggctcgagctacggctcgcgggagcaaggcagctacgcagcggagttcttcactaccgtgaagaccgcttataacggttag

SEQ ID NO: 214057 - DNA, 1200 bp, Unknown
  Bacterial polypeptide expressing nucleotide sequence isolated from the Sargasso Sea
tatgatgagagaaaccttagaactacaaaagaaagcgttcataaaagatgggccgccaacgtataaccaaagagtggatagtctaaaaagatgtatagctctaattgaaacacatgacgatcagattattgaagctctaaatcaagactataaaaatagatctcatcatgagataagaacatctgagattgatcaaagtattagaaattttgcattcacccttaagaatttaaaaaaatggatgaagccttccaagagatcatcatcatttggaactgatcttatgggcgcaaaaacaattatgaagcctatgccattaggaagtgttggagttatagctccatggaatttcccagttggaatggtgttttatccagctgcttccattcttgctgctggaaataagattatggctaaaccatcagagtttacgcctcatacttctcaagttatgaaagatgcggtagagaaatactttgataaatctgaatttgcagtctttcttggaggcccagaagtaggtgcagaatttacttctatgccttttgatcatcttctttataccggaagcaatagaattgctaaaaaagttctagcaaatacagctgacaatttagttcctacaacactagagctgggaggaaaaagtccaactattatttctgaagatgcagaccttagtcttgtcgcaaaaagaattatgtttgttaaaacattaaatgctggacaaatatgtttatcccctgactatgtatttctaaaaagaggtctcgaagataaatttattaatgaattgaaaaatgtgtttgctgatttctatccagatggaaatgaagatgactacacatcaatggtaaatgatcatcacttcaatagaatgaaatcctatattgaagatgctaaatcaaaaggcgcagaagtaattagcttgggtgattttgattcggaacctaaagacactatgacaacgaaagttcttatgaatgtagatgattctatgcaggttatgcaagatgagattttcggacctctcctgccaataatgctatacgatgaattgtcagaagttgttgactacataaatgctcatgatcatccattaggcctttatttctttggcaataaaaagtctgagcaagattttgtaattaataatacgcgttcaggaggagtaacaattaatgacactatgttccatta

SEQ ID NO: 214058 - DNA, 700 bp, Unknown
  Bacterial polypeptide expressing nucleotide sequence isolated from the Sargasso Sea
tatgattgaaaagaaaaatttttatataaatggaaagtgggtttctcccactaagccaaatgactttgaagtaattaatccctcaactgaggaagcttttgcaataatatctttgggctctgctgaagatgcagataaagcaattaatgccgccaaaattgcattcgagacttggagagaaactacaaaggaagaaaggttagctttacttgaaaagtttgatgaaatttataatagaagatgggatgaaatggttgaggctcaatctaaagaaatgggcgctccactagattttgcttccgaaactcacactaaaatgggtgcagatatttgtagaaataacattgaaattttaaaaaattttaattttgaacataaatttgaccctaaatctaataatcatataagatatgaaccaattggagtttgtggattaataacgccttggaattttcctatgaaccaaatcgtattaaaagttattcctgctttagctgctggatgtacaatgattttaaaaccatccgagattgctccggtatcagcagtattgtttgcagaaatgattgacgaagctggctttcctgctggagtttttaatttagtgaatggaaatggagaagttgttggaaatcatatttctggtcatgctgacattgatatgatctcgttcacagggatcaacagagctggaaaacta

SEQ ID NO: 214059 - DNA, 1435 bp, Unknown
  Bacterial polypeptide expressing nucleotide sequence isolated from the Sargasso Sea
aatgagcgctgataaacacctacaaagttggcaagaacgttttgaaatggcagaggcaatgcaacctttgctgggcaagttgtaccgtaaccaaggcgtcgaagttgtggtttatggtaagccattactcaatgcttctactattgagattattaaagcgcaccgtttagttcgtcgtcatgtcggcgagaaattacgtttacgcgagagtttcccatttgttcaagccttaagcagactcgctgttaaacaatgtaaagtggatattggtaagcttgccgttaaatactgggctgaacataccgataccaacgaaattgaaagctatatggcacgcgaattagctgcggcgattgaccatgctgatgatatcgcaccgcgtgatgtcgtgttgtatggttttggtcgtatcggccgcttattagcgcgtttactgatcgaacgtactggccgcagcaacaagttaagactgcgcgctatcgtattacgtggtggtaagaagggcgatttagaaaaacgcgctagcttactgcgtcgtgactctgttcatggtccattcaacggttcagttgaagtggatgaagagaacaacgccatcatcgcgaacggcacctatatccaagtgatttacgcaaactcgcctgatgaagtggattacaccaaatacggtattacagatgccttagtggtagacaacacgggtatttggaaagatgaagctggccttggtttacatttgaagagcccaggtgcaagcaaagtgttactgacagcaccagcaaaaggcgccatcaagaacatcgtttacggtgtgaacgaaggcgacatcactgcggaagacatcattgtgtctgcggcgagctgtaccactaacgccatcacacctgtactgaaagcagtaaacgacaagtacggtatcgagaatggtcacgttgagacgattcactcatacacgaacgatcaaaacctgatcgacaactaccacagtgctgaccgtcgtggtcgcagtgcaccattaaacatggtgatcactgaaacgggtgcggctaaagccgttgctaaagctctgccagtattagcaggtaaactgacaggtaacgcgattcgcgtgccaacaccaaacgtatctatggcgatcatcagcatgaacctcaatgctgagaccaacaaagacgaattaaacgaataccttaaagacacggcgctgcaatcaccattgcaaaaccaaatcgattacaccgactcaactgaaatcgtatcaagcgatttagtgggttctcgctatgctggtgtagttgattcacaagcgactatcgccgaaggtaaacgtgccattctgtacgtatggtatgacaacgagtttggttacagctgccaagtagtcggtgtcatgcagaccatgttaggcttgacgactctgtctctgccggcataa

SEQ ID NO: 214060 - DNA, 1345 bp, Unknown
  Bacterial polypeptide expressing nucleotide sequence isolated from the Sargasso Sea
aaaaaaagcttttcttagttggtctcaaaaaaccccactatttagagccagaattctttttaaatttaaagagttgatcgaaaaaaattatgatgaacttacaaaaattattgtttctgagcacggaaaagtttacgaagacgccaaaggctcactgactagaggcctagaggttgtcgagttcgcttgtggtataccacaattacttaagggagagtttaccgagaatgttggaacaaatgtcgacagttggtctatgagacaaccacttggtgtttgtgcaggcattacaccttttaattttccagcaatggtgccgatgtggatgtttcccattgcaattgcatgtggaaatacatttgttttaaaaccatctgagaaagatccatcttgttcaatgaaactagcagaattatttttagaagccggcctccccccaggtgtatttaatgtagttaatggtgacaaagaagcggttgatgcaattattaataataaagatattgccgcggtaagttttgttggctcaacacctatagctaaatatatttatgaaaattgtgcaaaaaatgaaaaaagagttcaagccttaggtggtgcgaaaaatcattgtgtagtcatgccagactgtgatttagaccaagctgtcaatggtctgatgggtgcagcttatggttcggctggtgaaaggtgtatggcacaatcagttgcagtggcagtaggaaaaattggtgaccctcttgtaaagagtctatctaaaaaagtggagtcactaaaggtcggtcctggattagataaaaaatctcaaatggggcccttagttactaaagaacatttagaaaaagtaacaggttacgttgatattggactaaaagagggcgccaagttagtggtggatggaagaaatttaaaattacaaggttatgaaaatggtttttatatgggaggttgtttatttgatcatgtcacaaaagatatgagaatttataaagaggaaatcttcggacctgttttatcggttgtaagagccaaagattataatgaagcattatcattagttaatgatcacgaatttggaaacggtacaagtatattcactagggatggagatacaggaagatcatttgcaagcaacgtacaaattggaatggtgggtataaatataccaatcccagttcctatggcatttcatagttttggcggatggaaaagatctttatttggagaccaaagtatacacggacctgaaggagtgagattctacacaaaattaaaaacaattacttcaagatggccatcaggaataaaatctgatccggaatttgtaatgccaacaatgaaataa

SEQ ID NO: 214061 - DNA, 1223 bp, Unknown
  Bacterial polypeptide expressing nucleotide sequence isolated from the Sargasso Sea
gggaaaagtttatgaggatgcaaaaggctcactacaaagaggtttagaagttgttgagtacgcctgcggtataccacaaatgcttaaaggtgagtttacagaaaacgtgggatccagcgttgatagctggtctattcgtcaacctctcggtgtttgtgcagggattacaccatttaattttcctgcaatggtaccaatgtggatgtttccaatggctattgcttgtggaaatacttttgttttaaaaccatctgaaaaagatccgtcatgttcaatgaggctagcagaacttttaaaagatgctggcttacctgatggggtttttaatgttgttaatggagataaggaagcagtagacgctttaataagtaataaggatgtcgtggctatgagttttgttggttctactccaatagcaaaatatatttacgagaattgtgcaaaaaacgaaaaaagggtgcaggcacttggtggagcaaaaaatcattgtgttgtaatgccagattgtgatttggatcaagcagttaatggtttaatgggtgcagcttatggttcagcaggtgaaagatgtatggctcaatcggtagcggttgcagtaggtggaattggagataaacttgtagaatctttagcaaaaaaagtcgaagcattaaaagttggcccgggtatggataaactatctgaaatgggaccgttggtaacaaaagagcacttagcaaaagttaagggttatgttgatattggagagaaagaaggagctaaattaattgtggatggaagaaattttaaattacaaggttatgaaaatggatattacataggtggatgtttgttcgatcatgtaaaaaaagatatgagaatttacaaagaagaaatttttggcccagtattatctgttgtaagagctaaagattttgatgaagctttacaacttgttaatgatcacgaatttggaaatggcgtaagcatatttacaagagatggtgatacaggaaggacattttctaataaagctaagattggtatggttggaattaatattccaattccagtaccaatggcattccatagttttggtggatggaagagatctttgtttggagatcagcacatgcacgggccagagggagtaaggttttatactaaattaaaaaccattacctcaagatggccaacaggcttgagaactgaccctgagtttgtgatgccaacaatgaaataaa

SEQ ID NO: 214062 - DNA, 925 bp, Unknown
  Bacterial polypeptide expressing nucleotide sequence isolated from the Sargasso Sea
attaaaaattaatcatataaacaataggtcaaattctgaaactacatctaaattaatcaaatacgattctatacatggaaaattaaatgctgaattagattttgatctaaatcatataataatcaataaaaataaaattacattttctcaggaaacaaaaattgaagacattaattggaaaaaacatgatgttgactatgtttttgaatgtactggaaagtttaattcaaaagaaaaacttcttacccatatagtgaaaggtgcaaaaaaagttatcgtttctgctccatgtaaaaatgccgataaaacaatcgtatttggtgttaatgaaaatataattactaaagaggatgaaataatatctgcagcttcatgcaccaccaattgtctagcaccggtaaccagtgttcttgatgaaaattttgaaattgaaaaaggttttatgactacaattcatgcatttactagcgatcaaagaattttagataattcgcacaaagatctaagaagagcgagatctgcgaatctatcaatagttcccacttcaacaggagcctcgaaggcaataggagaaataataccaaacctcaaagggaaactggaaggtgttgcgatgagagtgcctactcctaatgtttctcttgttgaattagttttttgtacaaataaagatattagtataaaaaaaattaatgatgcctttgaacaagcatcaaaaaataaattaaaaaatatcttagaagttactcatgaaaaattagtatctatagattttaatcatcatcctgcttctgcaatagtagatgcttctttaacaaatgtagttgggagtaatatgggtaaaatatcagcctggtatgataatgagtggggcttttctaatagaatgtgtgatatcgctgaaactttgcataaaatctcttaa

SEQ ID NO: 214063 - DNA, 771 bp, Unknown
  Bacterial polypeptide expressing nucleotide sequence isolated from the Sargasso Sea
aggccatcgccgacaccgactggagtggttgcgacctggtgctggaggccagcggcaagatgaagacggtcgccgtgctgcagggctatctggatcagggcgtgaagcgcgtggtggtctgcgcgccggtcaaggagcagggcgcgctgaacgtggtgatgggcgtcaaccagcacctgttcgacccggcgcagcaccgcatcgtcaccgccgcgtcctgcaccaccaattgcctggcaccggtggtcaaggtgatccacgaggcgctgggcattcgtcacggctctatcaccaccatccatgacctgaccaatacccagagcatcctcgaccagccgcacaaggacctgcgtcgcgcccgtgcctcgggcatgagcctgatcccgaccaccaccggttcggccacggcgattgccgagatcttccccgagctgcgcggcaagttgaacggccatgccgtgcgcgtgccgctggccaacgcctctctgaccgactgcgtgttcgaggtcgagcgcgccaccacggccgaggaagtcaacgcgctgctcaaggccgccgccgatggcccactgaagaacatcctcggctacgaggagcgcccgctggtgtccatcgactatcgcaccgatccgcgctcttcgatcatcgatgcgctctcgaccatggtagtggccggcacccaagtgaagatctatgcctggtacgacaacgaatggggctatgccaatcgtgcggtggagctggcgcgcctggtcggccaggccggctgat

SEQ ID NO: 214064 - DNA, 1074 bp, Unknown
  Bacterial polypeptide expressing nucleotide sequence isolated from the Sargasso Sea
tctgcgaaaaaagcttttgaaacttggggttttactacaaaagaagaaagacttaatctgtttgaaaagttatatgagatttacaaaaaaaattgggatcaaatggcaaaaactatttctcttgaaatgggagcaccaattgatttttcaacagaacttcaaacaaaaactggagctagccatataaaatcatttaaaaatattttaaaaaattttaaatttgaaaaaactttagatgaggaaaaaaaccaaactattttatacgaaccaaaaggtgtatgcgcattaattaccccttggaactggccaattaatcaagtcaatttaaaagtaattccagcactagctgctgggtgcacagtagttttaaagccatctgaaattgcacctttatcttcaatgttattagctgaaatgatgcatgatagtggttttccaaaaggagtttttaatttagtaaatggagatggagcggttacgggagatgctttgacaagccaccctgatatagatatgatctcattcactggatcgactagagctggtgctttgatttcacaaaacgcagcaaaagattttaaaagaataagtttagaactaggaggaaaaggcgcaaacattgtatttaaagatgcaggaccagatgcaatatcttggagcgttcaaagatgttttagaaattccggacagtcttgtaacgcacctactagaatgttggttgaaaaatcaatttataatgaaactattgaaaaagtaaaagaatttgcaaataaaaccaaagtagacaatccaaataaaaatggaaatcatataggaccagtaatttcagaaactcaatttaataaaattcaaactttaattcaaaaaggaattgacgaaggtgctaaattagttgcaggaggtgttggcaaacccgaaggtctagaaaaaggatattatgtaaaacctaccgtatttacagatgttaataatcaaatggaaatagctagaacagaaatatttggacctgttttatctatcatacctttcgaaaacgaagacgaagctattaaaatagctaatgatactccttat

SEQ ID NO: 214065 - DNA, 439 bp, Unknown
  Bacterial polypeptide expressing nucleotide sequence isolated from the Sargasso Sea
tcaaagcttaattaaaagtggaattgaggaaggggcaactttagttgctggtggacctgataaaccagaggattttaaaaaaggatattttattaaaccgactgttttcacagatgtaaataatgacatgaggattgctaaagaggagatatttggtcctgttctatctattattccgttcgaaaatgaagaggaggcaattaaaataactaatgatactgagtatggtcttggaaattatttacaaactgaggataaagaaaaagctaaaagagtctctaaaagattaagagctggaataatttatgttaataataaacctgcagactctggtactccttttggtgggtatagacaatcaggtaatggacgtgaaggtggaacttggggattgcatgaatacctcgaggttaaaacaataactgaatggaataagtaa

SEQ ID NO: 214066 - DNA, 1377 bp, Unknown
  Bacterial polypeptide expressing nucleotide sequence isolated from the Sargasso Sea
atgtaataaatccagcaacagaagaagtgattggaaaggcatcaaaggcgggagaagaagatgtcaataaagctcttaaatctgcagagaaaggtttggaagtttggaaaaaaactcctccttggcaacgagctaaaattattagaaagattgcagacttaatgagagaaaaaacagatgttttagcaaaatggttaactcttgaagtgggaaaacctttgtctgaagctgctggagaagttggtggtggagcagatatatttgaatggaattcagaagagactaaaagaatatatggtcaaatagttgaaagcagatttgaaaatacaagaatgtatgtaaagtatgaacctgtaggagtagtagcaggtttaattccttggaactttccaatagttttagcatcaagaaaaatttctacagctttggcagctggatgttctgttatctgtaaacctgacgttattactccaggaagtgtaatggaattaatgaatataattaatgaagcaggagtacctccaggtgttgttaacttgctatcaggagatcctgcaaaaatttcatctcaattaatttcatcagacataattaaaaaagtttctataactggctccacaagagttggaaaattaatattaaaacaagctgctgagaaagttcaaagagtcactatggaattaagtggtcattctccttttattgtatttgatgatgtagatataaatcaagtaactgatatggcaattactgcaaaatttagaaataacggtcaagtatgtatatctccagcaagattttatattcatgaaacaaaaaaagatgaatttgcaaaaactttagttgataaagtaactaaattaaaaattggtaatggtatggataaggacactatattgggacctttgactactgaaaaaagattacttgaagtagaagcactagctgaaaaaacaaaacaagaaggtgctaaagttttatgtggaggcaaaagacctgcgggatttaacaaaggttatttttatgaacctacaatatttgatgacgttaaagataattttacaattataaaagaagaaccttttggacctttagttcctatattaacatttaaagatagagacgaagttgtcaaaagagctaatgataatgatctcggtttagcaagctatatttacacaaattctctagaaaatgcgcataaagtttctgaaaaaatggaaactggaacatgtgcagtcaacactccagctgtagcttttgctgaagttccttttggtggtattaagcaaacaggttacggtagagagggtggctccatggctattaaggattacctaaatattaagtatacccatttcggtatcaattattaat

SEQ ID NO: 214067 - DNA, 1168 bp, Unknown
  Bacterial polypeptide expressing nucleotide sequence isolated from the Sargasso Sea
cgagtttgcgtgtggcattccgaatctgttgaagaccgatttcaccgaccagattggcggcggcatcgacaattggaatctgcgtcagccgttgggtgtggtcgccggcattacgccgttcaatttcccgatgatggtgccgtgctggatgtttccggtagcgattgcatgtggcaatacgtttgtgctgaagccttcggagcgtgatccttccgcttcgaaccgactggctgaattgctgaaagaggcaggattgccggatggcgtgttcaacgtcgtgcatggcgacaaggtcgcggtggatgcgttgctcgtgcatcccgaggtgagtgcgttgtcgtttgtcggttcgacgccgattgcggagtatatctacacggaaggcacgaagcacggcaagcgtgtgcaggctctggggggagcgaagaatcatctggtggtgatgccggacgcggatctcgatcaggcggtggatgcgttgatcggcgccgcgtatgggtcggcgggcgagcgttgcatggcgatttcggtggccgttgcggtggggcatattgccgatgagttgatcgagcgactgacaccgcgagtgaagagcctgaagattttgaacgggatggaaaaggaagccgagatggggccgttggtgacggcggcgcatcgcgagaaggtggtgggttatatcgatgccggcgtggcggcgggtgcgaagctggttgtcgatgggcggagtcatcaggtggccgggcatgagaaggggttctttctcggcggcacgttgttcgatgatgtctcgaccgacatgaagatttatcgtgaagagattttcggtcctgtactgtgtgttgtgcgggtgccggatttcgcttcagctgtggagcttatcaacgctaacgagtttgctaatggggtggcgttgttcacctccgatggtggcgtggcgcgggctttttcgcggcagattcagatcgggatggtgggcattaatgtgccgattcctgtgccgatggcgtggcattcttttggtgggtggaagcggtctctgtttggggatcatcatgcctacggggaggagggggtgcggttttatacgcggtacaagagcattatgcagaggtggccggatagtattgggaagggggctgagttcactatgccggtggctaagtag

SEQ ID NO: 214068 - DNA, 799 bp, Unknown
  Bacterial polypeptide expressing nucleotide sequence isolated from the Sargasso Sea
gttggaacgaatgttgatagttggtcaatgcgtcaaccattaggagttgttgcaggcatcacaccatttaattttccagcaatggtgcccatgtggatgtttccaatagcaattgcgtgtggaaatacttttatattaaagccttctgaaaaagatccgtcatgctcaattagattagctgaattattaaaggaagctggtcttcctgatggagtttttaatgttgttaatggagataaggaagtagtagatgcaatcttgacaaataaagatattaaggcagtaagttttgttggatcgactccaatagcaaaatatatctacgaaaattctgctaaaaatgaaaaaagagttcaagcacttggaggtgcaaaaaaccatttggtagtaatgccagattgtgatttagatggagcggtaaatgggttaatgggagctgcttatggttctgctggagaaagatgtatggctcaatcagttgcagtagctgttggagatataggagatgatttagtatcaagattatcaaaaaaagcagaagctttaaaagttggcccaggtatggataaaaattctgaaatgggtcctttggttaccaaagaacatttagaaaaagtaaaaggatacgttgatttaggagtaaaggaaggcgctaagctaattgttgatggtagaaatttgaaattacaaggatatgagaacggtttttatattggaggctgtttatttgatcatgtaaaaaaagaaatgaaaatttataaagaagaaatatttggaccagttcttatctgttgttaga

SEQ ID NO: 214069 - DNA, 1315 bp, Unknown
  Bacterial polypeptide expressing nucleotide sequence isolated from the Sargasso Sea
ttgtcatctcgctatcagttctgcaaggaatgcctttaaattatggtctcagagtcagcttgaggagagaaaaaaaatactcgaccagatcggtgatgcactgataaataacagtcaagaaattggaaaattaattgctcgtgaagaaggcaaaactgtggctgaaggtgctggtgaagtgtatcgttcaggacagttttttcagtattttggtgctgaagtattgagacaaatgggtgaggtgaccacgtccgttagaccaaatattgatattgaggtgacaagagagcctcttggggttattggtgtaataacaccgtggaattttcctgttgccgttgcagcatggaagatagcgcctgccattgcatttggtaattctgtcgtactaaagccctctgagattgttccagccagcgcttcggcattcgctgaaatcatccatcagagtgagctgcctgatggagtttttaactgtgttcagggttcaggtgatgtagggcaaattattacgaacagtaaaaatatagatggcatatcattcactggctcggttaggacaggcaagcaaatcgcacaaaatgcaatgaaaaacatggttaggatacagatggagatgggcagtaagaatgctttagtgatcctaaatgatgcgaatatagaaacagctgtgcagtgtgccatcaatggcgctttttttggtaccggtcaaaaatgtactgcctcatcaaggttaattgtagaagaaaaaattcacgatgaatttgtggccgcacttactgaagccacaaaagcgctcgttgttggccatgctcttgacgagaaaacacaaattggtccggcagttgatgaccgtcaatttaaacaaaataaaaaatacctggatgaggctctaaaaaaaggcgccaaaatggttgcaggcgatgaaaagattgatgtaagttcaaatgggttcttcatgaggccaacgttactcatagataccgataacaatatgaagattaaccgagaagaggttttcggtcccattgcctgtgttatcaaggcaaatgattacgatcatgcactagcgatttcaaatgattctgattttggccttacctcaggaatcgttactgattcacttaagcatgcaaatcactttaaaagaaactcccaatcgggttgtgtcatggtaaatctccctactgctgggacggattatcatgtgccatttggtggcaggaaagcatccagttatggaccgagagaacaaggtcagtatgctaaagagttttttacgatagtaaagaccagttatatatcatccgcttaa

SEQ ID NO: 214070 - DNA, 1066 bp, Unknown
  Bacterial polypeptide expressing nucleotide sequence isolated from the Sargasso Sea
gattttgagtatgagaaagatggttatctagttcgaaaagagcctgtgggtgttgttggaatgatcactccttggaattggccaatgaatcagatgtgcacaaaagtagcatcaggcatagctgctggatgcactatggtgcttaagccaagtgaaataactcctttctgtggaataattcttgcagaaatcattcacgatgctggtgtacccgctggaatctttaatttagttaatggcatgggcccagttgttggtgcctcaatgtctgaacacaaagatattgatatgatgcattttactggttcaacacgggcaggagttgctgttgctcaagcatcagccccaacagtgaagagagttgctcaggagctaggtggtaaatctgccaatatagttcttgatgatgcagacattgaaaaagctgtatctgctggtgtctcttcatgtttcctaaatacaggacaatcatgtaatgcgccaacaagaatgcttgtttcatctaagaactatgacaaagcagttgaagttgctgctaatactgcaaatgctatgaaagtaggagatccttttgatgctgatacaaagatgggcccaatttctaataagacccaatacgaaaaagttcaaaggatgattcagattggtattgatgaaggagcaacattatctgctggcggcgttggtcttccagaaggttgtgagagcggttattacgtaaaaccaactatattttctgatgtaactaatgatatgactattgcaagagaggaaatttttggcccagttttatgtttaattaaatatgaaaccgaagaagaagccattgagatagcaaatgatactccttatggccttgctggatatatccaaggtgagcatacacatgcagttgaagttgcctcaaaaataagagctggccaaattactatcaacaaaggagctagagttagatcagcaccatttggtggttatggttcctccggtaacggaagagagcatggaacacatggccttgaagaatgtttagagacgaaagctgtaattggagctttagtcgaataaa

SEQ ID NO: 214071 - DNA, 364 bp, Unknown
  Bacterial polypeptide expressing nucleotide sequence isolated from the Sargasso Sea
tgaatgtgaacttcctggtaatggattttggtttaaaccaactttatttacagatgtccagccatcatattcaatcgcaagggaagagatattcggtcctgtactcacaactcttacatttagaactccgcaagaggcagttgagatagcaaacaatacagagtatggattatctgctggagtatggactgagaaaggttcaaaaatactatggactgctgacagacttcaagctggagtagtctgggcaaatacttttaacaagtttgatccatcatctccatttggtggatataaggaatctggatttggaagagagggaggtaggcaaggtcttctctcatatttaaaggcagaatcatga

SEQ ID NO: 214072 - DNA, 565 bp, Unknown
  Bacterial polypeptide expressing nucleotide sequence isolated from the Sargasso Sea
tgaaaaatcaatttatgaaagagctgtaaaagaagctgttgatgaagcaaacaaaattaaaatagatcaagcaactaaaaaaggagatcacattggtcctgtaatttcaaaagttcagtacgataaaattataaatcttattgaaagtggaatttctgagggggcaactttagctgctggaggaccagaattaccaaacggtctaaataaaggatattttattaaaccaactatttttacagatgttacaaatgagatgagaattgcaaaagaagaaatatttgggcctgttttatcaattattccatttgatactgaagatgaagcggtgaaaattgtaaacgatacttcctatggtttaggaaattatcttcaaactgaggatagagaaaaagctcatagagttgcaaaaaaattaagatcaggatgtgtctatataaacggtaatgcagctgatgttggaactccttttggtggttacaggcaatctggaaatggtagagaaggtggagtatggggtttagaagaatttttagaagtaaaaaatgtaactggttggaattaa

SEQ ID NO: 214073 - DNA, 652 bp, Unknown
  Bacterial polypeptide expressing nucleotide sequence isolated from the Sargasso Sea
taccctaatgcagtgcgtgatggaataagaaatgtaatgagtaattcaggtcaatcatgtgatgctcctactagaatgcttgttgaaagatcaatttatgacagagcagtaaaagaagcggttgatgaagcaaatttaattaaagtagatcatgcttctaaaaaaggagaccatattggaccagtagtttctaaagttcaatatgataaaattattaatttaattcaaagtggtattgatgaaggtgcaactttagctgcaggaggtcctgaattacctggaggattaaacaaaggttattttataaaacctacaatttttacagatgtcacaaatgatatgagaattgcgaaagaagaaatttttggtcccgttttgtcaattattccatttgagacagaagatgaagctgtaaatatagtaaacgaaactgaatatggtttaggaaattatttacaaacagaagataaagaaaaagcaaaaagagttgcaagaagattaaatgctggaacaatatatatcaacggtaatggagcagactctggaacaccttttggtggattcaagcagtctggtaatggtcgtgaaggtggtgtttggggcttagaagaatatttagaagttaaaactgtaacaggatggccaagctaag

SEQ ID NO: 214074 - DNA, 1195 bp, Unknown
  Bacterial polypeptide expressing nucleotide sequence isolated from the Sargasso Sea
catagggaacaaaacgttagaattttactttacggcaatcctttaattaccctatctgtatctcaaattatgcaagaacatagattggttagggaaacagaaaaaaatgaacttagtgaatttgaaacttttgaagttataaacatactcaaggatcttgatctgggcccatgcgaaattgatgtagggattatcgcagcaggtcacatgttcgattctaaatctttatctcttaaagaatttgttaaagaacaagttgctgatgcaattggtaacaaaaatccggttcttcagaaacctcaagacttagttctttttggatttggaagaattgggagattaattactagacttttacttgaggatactggatcaggagaaactttatcgctgaaagctgtcgttgtcaggaaaaaaagtgatgatgatctttttaaaagagccgaattaatgagaagggactctgttcatggaaatttcaaaggaactattagggtagatttagacgaatatggattagtaattaacggaaatttaattagatttattgatggagatccatctagcatcgattataaaaagtatggaatagataatgctgtaattatagataattctggagtctggagagacgagaaaggtttatctgctcatttaaagtctaaaggagcaaagaaggttttgttgaccgctccaaccaaatctccactcaaaaatattgtttatggtgttaatgaaaatgacctagatgataaggataagattgtcggtgctgcttcatgcacaacgaatgcaatagttcctcttttaaaagctctcgatgatgattatggaatcataaacggacatgttgaaacaattcattcatacactaacgatcaaaacctaattgataattatcattcaaaatctagaagaggaagaagtgctgctttgaatatggtaattacagaaaccggagctgcctcagctgtaagtcagattcttccaaatttaaaaggaaaattaacagcaaacgcaataagagttcccactccaaatgtttcattggcaattcttaaactttccttgaataaatctttgaacgataaagaggctgctaatgaatatttcagacaattagcatttcattcaatatacaaagaccaaatagattttacgaattcttcagagattgtttcttctgacttagttg

SEQ ID NO: 214075 - DNA, 1111 bp, Unknown
  Bacterial polypeptide expressing nucleotide sequence isolated from the Sargasso Sea
tatgggggataagagggatataaatttccagtctactgaaaggcaaaaaagaattttgcctgaagattcttttggtgattggaagtggagagaagcattagctgaattgatggtaccgttgattggctcactttacagaaagggtataaatattatgatttacggtaagtcattagtaaatgagtcacctgttgcgatcatgaaagctcataggtttgcaagacagaccgataataatgaactaagtgaacttgaaacatatcctatactacaacacataagcacattagaacttcaagattgtgaaatagatataggagaaattgctgtcagatgtcctttttttgatgatattaaagacgattcttcaaagattcctaattatatcaattcagagctcaaatcagtaataaatgtagattctaaaaggcctaaagttcctgcaaacattgttttatatgggtttggaagaattggcagacttgtaacaagaatgatgactcaaactactggtccaggaaattatttcagattaaaagctattgtcattagaaaggcagctgatgatgatatcttcaaaagagctagtttattaacaagagattctgttcatggtccatttgacggaactgtaagggttgatgaagaaaactcaacacttgtaattaatggtaatccagtaaaagtaatatatgcaacaaatccagatgaggttaactatgcagattatgaaattcacaatcctatagttattgataatactggtgtttggagagacgagaaaggcttatcaaaacatattaaatcaggagcatccaaagtaattctcacagcaccagccaaaggtgatctaaaaaatatagtttatggaataaatgatgacattcttgccgataatgattcaataatttcagcagcatcatgtacaacaaatgcaatagttcctattttaaaagctgttaatgatgagtataaaattagaggcggtcatattgaaactgttcacgcatatacaaatgatcaaaatctaatagataactttcataaaggtgatagaagaggtcgtggtgctcccttgaatatggttattacaacaacaggtgcagttaaa

SEQ ID NO: 214076 - DNA, 730 bp, Unknown
  Bacterial polypeptide expressing nucleotide sequence isolated from the Sargasso Sea
atgcaaagcattgatacaacatttaaatcgcagcaagaaaaaagcattgctttaagaaacagctcttttaaagaaagaagatctaagctaaagcttcttcttaaaaactttttagaaatggaggaggaggttcttgcggcgctttcaaaagatctgggaaagtctaaaaccgaggcgcttttggcagaaatttatggtgttaaagcagaggcaagctttgcaataaaaaatattaaaagctgggtgaagacaaaaagggttgcgagtccgcttgcaatatcttttaccaaaagctgggttaagccagaaccaaagggaaacattttaataatttcaccctggaactatccagttatgctgtgccttaatccgcttattgctgcaatagcgtcgggcaacactgccataatcaaaccctcagagcttacacccgcctctggagagcttgtaaaaactttaatagaaaaaactttctcatctgatgaagttgctgtttttttgggtgaaaaagatgtagcacaaaaacttttaaaccttcccttcaaccatataatgtttactggtagcccaaaggttggaaagattgttatggaggcggcttcgcgacaccttgcgggcgtcacccttgagctgggcggcaagtctcctgttattgtcgataaacacgcaaacataaaagacgctgcgtggaaaatttctttttataagtttgcaaacgcgggtcaaacat

SEQ ID NO: 214077 - DNA, 880 bp, Unknown
  Bacterial polypeptide expressing nucleotide sequence isolated from the Sargasso Sea
atgcactttcagtggtatggagaattaattgataaagtatttggaaaagttggtccaacagagccttccattactagtttaattgttaaagaacctatcggagttgttgctggaattgttccttggaactttcctttaatgatggcggtatggaaaatggcaccagctcttgcagcaggctgttcggtaataattaaaccagcagaagacacacctcttactgcaataagagttgctcaaattggaaaagaagctggcataccagatggagttttaaatgtacttccaggttatggtgatgttggtgaagctttaggtcgacacaaagatgttgatgcagtttcgtttacaggttcaactgaagtaggtggttattttttaaaatacgcaagtgaaagtaatttaaaacctgttgcattagagatgggaggaaaaagtccatttatagttttagaggatgctaaaatcactgacgatttgattgataatgctatgaattctgcattttggaacggtggacagaactgttcagcaaatatgagacagatagttcataaaaaagtaaaagatgaatttttagataaaatttttaaaaaagttaaaaaattaaaagtgggagatccattagatctaaaatcaaatatgggatctatgatttcaaaaggacatttacaaactgttgatggatatatccaaaaaggaatcgatgaaggggcaaaacttttatctggaggagtttcagataataagcaaaaaggtttttatgcaaaaccaactttatttgatggattaaaagaaaatatgaccattgctcaggaagaaatatttggaccagtgcttggtgttttaacggttaaaaatgatgaagaagctttaaaaa

SEQ ID NO: 214078 - DNA, 739 bp, Unknown
  Bacterial polypeptide expressing nucleotide sequence isolated from the Sargasso Sea
taaaaattttcaaaatatttcttatggaccagctcctgaagatagcaatgaagtaaatagttggataaaaaatttaaaagaccccaataacctttttataaatggtaaatttgtaaaatcttctagttcaaaaaaaataaatattattaatccttctaccaataaaaaaattgcttcactttgtatagcctctaaaaaagatgttaatgcagcagtaagtgctgcaaaaaacgctcatgttaaatgggctaaattatcctcttttaagcgatcaaaatatttatatgcacttgcccgtcttattcaaaaaaattccaggtttatttccgttttagagactattgataacgggaagcctataagagagacaagagatattgatataccacttgtttcaagacatttttattatcatgctggctgggctgctagaaatataaataattttgataattcaattggtgttgttgggcaaattataccgtggaactttcctttattaatgttagcttggaaaattgcaccagcaattgctcttggaaacacagtagtgctaaaacctgcagaatatacttctcttactgcattatactttgctgaactttgtcaaaaagcaaaaattcctagtggtgtaattaatattattacaggagatggttctactggtgaattaataacatctcataaagacattaaaaaaattgcatttactggatcaacagaagtggaaaaaaaataa

SEQ ID NO: 214079 - DNA, 944 bp, Unknown
  Bacterial polypeptide expressing nucleotide sequence isolated from the Sargasso Sea
aatgcattttcaatggtatggagaattaattgataaagtatttggaaaagttggtccaacagaaccttccattactagtttaattgttaaagaaccaattggagttgttgctggaattgttccttggaactttcctttaatgatggcggtatggaagatggcgccagctcttgcagcaggctgttcggtaataatcaaaccagcagaggacacgcctcttacagcaattagagttgctcaaattggaaaagaagctgggataccagatggagttttgaatgtacttccaggttatggtgatgtaggtgaagctttaggtcgacacaaagatgttgatgcagtttcgtttacaggttcaactgaagtaggtggttattttttaaaatactcaagtgaaagtaatttaaaacctgttgcattagagatgggaggaaaaagtccatttatagttttggaggatgctaaaattactgatgatttaatagataatgctatgaattctgctttttggaacggtggacagaactgttcagcaaatatgaggcagatagttcataaaaaagttaaagatgaatttttagataaaattattaaaaaagttaaaaaattaaaagtaggagatccattagatctaaaatcaaacatgggatctatgatttcaaaaggacatttacaaactgttgatggatatatccaaacaggaatcgatgaaggggcaaaacttttatctggaggagtttcagataataagcaaaaaggtttttatgcaaaaccaactttatttgatggattaaaagaaaatatgaccatcgctcaggaagaaatatttggaccagtactcggtgttttaacggttaaaaatgatgaagaagctttaaaaattgctagtaattctaaatatggattacatgcaagtgtatttactcaagatataaatagagcat

SEQ ID NO: 214080 - DNA, 919 bp, Unknown
  Bacterial polypeptide expressing nucleotide sequence isolated from the Sargasso Sea
aatgggggcgcctattgacatgtctcttagtgaccaagctcagtccggacgaggtcatctcaaggcttttatccgtgcactagggtcaattgaatttcagcgaccattgcgccctggcgtcgaaggacaagatatcgtctttgaagcggctggtgtcgccgcgctgattacaccatggaattggccaatgaatcaggttgtgctgaaggtcggtgcagcgttggcggctggatgcactatggtgctaaaaccatcggaaattgctccgatgtccagcatgctgtttgctgaatgtgttgatgccgcagatttcccagctggtgttttcaatatggtaaatggggacggtgcgggagttggcagtctgttatcagcccatcctaatatcgatgttgtgtcatttaccggctcaactcgtgctggtgtgctgataagcaaagcggccgcagatactgttaaaaaagtgtcgcttgaacttggcggcaaatctccaaatcttgtgtttgacgattgcgatatatcagcggcggtggcacgcggtgcctcgttttgttttaataatactgggcaatcatgtaacgcggcgtcacggatgcttgttgaacgcaatgcttatgaacaggctatcgaagtagccgccgcaacagctggcgcaacaactgttgatctgccatcaaagccgggcaatcatatcgggccattggtatcagaagcgcaatttaacaaagttcaagcgctcattcagtcaggaattgatgaaggggcgcgtctggttgctggcggcgttggccggcctgaaggcataaatcgtggctggtttgtaagacccacagtttttgccgatacgacgcgggatatgacaattattcgtgaagaaatctttggcccggtattagcgattatgccatttgacaccgag

SEQ ID NO: 214081 - DNA, 898 bp, Unknown
  Bacterial polypeptide expressing nucleotide sequence isolated from the Sargasso Sea
aatggcaccagctcttgctgcaggctgttcggtaataattaaaccagccgaagacacacctcttacggcaattagagttgctcaaattggaaaagaagctgggataccagatggagttttaaatgtacttccaggttatggtgacgttggtgaagctttaggtcgacacaaagatgttgatgcagtttcgtttacaggttcaactgaagtaggtggttattttttaaaatacgcaagtgaaagtaatttaaaacctgttgcattagagatgggaggaaaaagtccatttatagttttagaagatgctaaaattactgatgatttgattgataatgccatgaattctgcattttggaacggtggacagaactgttcagcaaatatgagacagatagttcataaaaaagtaaaagatgaatttttagataaaatatttaaaaaagttaaaaaattaaaagtgggagatccattagatctaaaatcgaatatgggatctatgatttcaaaaggacatttacaaactgttgatggatatatccaaaaaggaatcgatgaaggggcaaaacttttatctggaggagtttcagataataagcaaaaaggtttttatgcaaaaccaactttatttgatggattaaaagaaaatatgaccatcgctcaggaagaaatatttggaccagtacttggtgttttaacggttaaaaatgatgaagaagctttaaaaattgctagtaattctaaatatggattacatgcaagtgtatttactcaagatataaatagagcattccatttagctaaaagtttaccttgtggaactgtgtcagtgaataccttttctgaaggagacatcaaaactccttttggtgggtataaacaatctggttcactaagtaga

SEQ ID NO: 214082 - DNA, 771 bp, Unknown
  Bacterial polypeptide expressing nucleotide sequence isolated from the Sargasso Sea
tatgttagataattctacactatttgtttacccaggtgacgatggcgcgaaattaatgccaaaaagcagatatgaaaattatattggtggtgaatggtgcgcgccaaaagacggaaaatactttgaaaatacttcgcccactaccggaaaagtaatttgtgaaatcccgcgatctaattctaaagatattgagctagctcttgatgctgcccataaggcagctccggattggggtaaaactggccctgcaataagggcaaatattttacttaaaatagcagatcgcattgagcaaaataccgaaatgcttgctcttgccgaaacacttgataatggtaaaccaattagagaaggtcatgccgctgatattcctctaacagttgatcattttagatattttgcaggtgccattcgttctcaagaaggtacaattggcaatattgatgggatgcaatctgggggtggaaactctgctcttggaatgatggcatatcattatcccgagccactaggtgttgtaggtcaaattataccgtggaacttcccgatattaatggctgcatggaagcttgctccggcgttagcagctggtaatgcagttgttttgaaaccggctgagcaaacgccattttctatctgtgttttgatggaattaatagaggatttgctacctcccggggttgtgaatattgtacaagggttcggcgtggaagcagggaaaccattggcttcaagcaatcgtatcgcaaaagtcggttttactggtgaaac

SEQ ID NO: 214083 - DNA, 904 bp, Unknown
  Bacterial polypeptide expressing nucleotide sequence isolated from the Sargasso Sea
gctggtttgtctggagagttaaaaggagaaaattatccaaccaatattccaaatagtattcattataccaccagagatccaattggggttgtttgtgcaatcgtcccttggaatgcgccattatttttaacagtagcaaaaatcgctccagctatcgtagcaggaaatagcgttgttttaaaaacagctgagcaagctccattttgtgctcttctactatcggagatatttcaacaagaacttcctccgggtgttttaaatgtaatttcaggctatggagaagagtgtggcgaacctctggtaactcatgaaaaagtaagaaaagtaacgtttactggatcttttactgtaggaaagattatagcgcaaaaagcagctcctaaattatgtccagttaccttagagcttggaggaaaaaatccaaatattataatgagtgatgcagatttagatattgcaattcaaggggttattgatggaatgagatatactcgacaaggacaagcatgtactgctggttcaagagtttatattcaggaaaaaatttatgatcaagtactaggtggagctgctgaaaaattaagtaaattaaaaatgggtaatgccctagatgaaagttctgacattggagcaattatttccgaagaacaactgaaaagaactttacattacatggatattgccaaaaaaaactctacaaccaatgttgtgcatggtggcaatcaaataacaggtggtgattataaaaatggtttcttctatgaacctacattgatgtcaggtgttccagtaagctctccagtttgtcaagaagaaatatttggtcctgttgcttgtgcaataccatttaaaacatttgatgaagtaatgaacagtgcaaatgatacaccattggatatcagca

SEQ ID NO: 214084 - DNA, 1031 bp, Unknown
  Bacterial polypeptide expressing nucleotide sequence isolated from the Sargasso Sea
cggtcaggcaggtgccctggtcagcttcaagtcccgttacgacaacttcatcggtggtgaatgggtggcgccgcgcgccggccgctactttgaaaacatctcgccggtggacggcaaggtgttctgcgaagtggcccgctccgacgccgccgacatcgagctggcgctggacgccgcccacaaggcatttgccagctggagcaagaccagcgtcaccgagcgcagcaacctgctgctgcgcatcgccgatcgcatcgaacagaacatcgaagtgctcgccatcgccgaaacctgggagaacggcaaggcggtgcgcgaaaccctggccgccgacctgccactggtggtggatcacttccgctacttcgccggctgcatccgcgcccaggagggttcggccgccgagctggatcagaacaccgtcagctaccacttcaaggagcccatcggggtggtcggccagatcatcccgtggaacttcccgctgctgatggcggcctggaagctggccccggtgctggcggcaggctgctgcagcgtgctcaagcccgccgagcagactccggtcaccatcatgctgatgatggatctcatcaaggacatcctgcccgccggggtggtcaacgtggtcaacggcttcggcgccgaggcgggccaggcgctcgccaccagcgaccggatccagaaactggcgtttaccggttcgactgaagtcggcgcccatatcctgcgctgcgccgccgacaagctgatcccctccaccgtggagctgggcggcaagtcccccaacatctacttcgccgacgtgatgcagcacgagagcagctacatcgacaaggcggtggaagggatgctgatgaccttcttcaaccagggcgaggtgtgcacctgcccctcccgcgccctggtgcaggccagtatctatgacgacttcatggacaaggtgctggcccgcgcccgcaccatagtgcagggcaatcccctcgacaccgccacccaggtcggtgcccaggctcgcgcgagcagtcgac

SEQ ID NO: 214085 - DNA, 841 bp, Unknown
  Bacterial polypeptide expressing nucleotide sequence isolated from the Sargasso Sea
atggaattggccaatgaatcagattacaacaaaagtttctgctgcattggctgcaggttgtactatggtccttaaacctagtgaaatatctccttattgtgcaatgcttttagcagaagtatttgataaggcgggtgtccctgatggagtattcaacgtagtcaatggatatggacctactgttggagcagcattatcagagcatccagatgtagctatgatgtcctttactggttcaactagagctggaattgctgtagcacaagcatctgcaaattcggttaaacgtgttcatcaagaacttggtggcaaatcttcaaacataattcttgatgatgtagttgacctagaaaaatctgtaaaaggtggtgcaggacattgttttttaaattcaggacagtcctgtaatgctccaacaaaaatgcttatatcttcaaagaattacgataaagctgtagaaattgctgtagcaactgcaaataatactactgttggagatccaaatggtgagtttagattaggaccaattgcaaataaagttcaatatgaaaaaatcttaaaattaattgaaataggtattgaagagggcgcaactttagtagctggaggtgttgaaaagccagatggatgtgacaaaggttactacgtaagaccaacagtttttgctgacgtaacaaacgatatgacgatagcaaaagaagagatatttggccctgtccttgtaatgattaaatatgacaatgaagaggaggctataaatattgctaatgatactgaatatggtttagcaggttatgttcaaggtgatccagatcatgccagagaggttgctcgaaaataa

SEQ ID NO: 214086 - DNA, 913 bp, Unknown
  Bacterial polypeptide expressing nucleotide sequence isolated from the Sargasso Sea
gtattttgataatactactcctatcactaatgaagttatctgtaaggtgccacgatcgaacgataaagacgtcgattttgctttagacgcagctcacgcagcatttcctgcatggggaaaaacatcaatcacagagagatcaaatattctcctaaagattgctgatgtgatagagaaaaatcttaacgttttagcaacagcagaatgtttagacaatggaaagccaatcagagaatgtatggcggcagacttacctttggtaattgatcattggagatattttgcaggagtaattagagcagaggaaggttcagttgcagaaataagcaacagtgagtattcttaccacatacctgagccattaggtgtagttggtcagataataccatggaacttcccattattaatggctacatggaaactagctccagcattggcagcaggaaactgtgtagtattaaaaccagctgaacaaacgccagcatcaataatgttgctaatggaattaattggagatctattaccagcaggtgttgttaacgttgtaagcggatatggtcttgaagcaggtaaacctttagcttcttcaaaaagaattaagaagattgcttttacaggtgaaactactactggacgtttgattatgcagtatgcatctcaaaacttaataccaattactttggaattaggtggtaaatcgccaaacattttctttgaagatgtaatggctaaagatgacgacttctttgacaaatgtttagaaggttttgctatgtttacgcttaaccagggagaagtttgtacttgtccgagcagagctttaattcaaaaatccatttatgataaatttatggagaaagcaatcgcaagaactaaagccgtaaaacaagacaatcctttaaagatggaaact

SEQ ID NO: 214087 - DNA, 925 bp, Unknown
  Bacterial polypeptide expressing nucleotide sequence isolated from the Sargasso Sea
ttgcaacattttaggtggtccagatattggagaggagtttcaaatctcaaatttgaccatttgttatatacaggaagtagtaatgttggcagacacgtaatgaaagcagcatctaataatctagttccagtgactttagagttaggaggaaagtctccagtaataattagtaatactgctgatattaaaacttctgcaaaaagaataatgtttggtaaaacacttaatgcaggtcaaatatgtctagctccagactatgtaatagttcaaaaacaagtaaaagacgatttcatagcagaggcaaaaaatgctgtaactgagttttttccagatataaaaaataataatgattacacttcaataattaatcaaaaacactatgatcgaataaatgaattagttacagatgcaaaagaaaagggtgctaaggttatagaaattaatccagctgatgaagactttacccaacaagagttctataaaataccaccaactcttatagtaaacgcaaatgatagtatgaatatcatgcacgaagaaatatttggaccagttctcccagttgtttcctatgacgaattagatgaagctgttgaattaattaactcaaaagataaacctcttggactatattattttggtaaagataacaaagagcaagcaaatgttttatcaaaaacctcatctggtggcgtaaccataaataatgttgttggacatatacaacaaatggatcttccttttggcggtgtaggaaattctggaacaggcagataccaatctcatgatggttttaaaaatttctcaaatactagagcgatatacaaagatgttgattcaagatgggataaattattacttggagctataaggcctccttataaacaaagcattgaaaaaatattaaaagtattaatgaaataat

SEQ ID NO: 214088 - DNA, 984 bp, Unknown
  Bacterial polypeptide expressing nucleotide sequence isolated from the Sargasso Sea
ttatctacactcgaggcactggatgttggaaaaccctttactcaagctcaagcagatgtaagagcgttggctcggtatatggaattttatggtggtgcagctgataaagttcacggggagacaataccgtatttagaaggatacacggtatacactttgcgagaaccccacggtgtaactggtcatattgttccttggaattaccctatgcagattattggtcgatctgttggcgcagccctagcaatgggaaatacatgtgtattgaaaccagctgaagaagcctgcttgactgccttaacttttgctaatcttgctattgaagcgggtctgccaaaaggtgtgcttaatgtggttcctggactgggcgccaaagcaggtgctgctctttgcgcgcataaaggaattaatcacataagttttactggatcagttgcaacaggccgcttggtgcaagcatcagctgctaataatattgtccctgtaacgttagaacttggaggtaaatcaccccaattattctttgaagacgcaaatctggaaagtgcgcttccctttcttgtgaactcagggatccagaatggcggtcagacttgttccgctagtagccgtatattggtccatcgttcccgatataacgaagtggttgaccatatgtcccaaaagtacaaaggcttaatcgttcgaccagcaattaatgatggtgccttggggcctttgatatcagaaaggcaaaaatcaattgtggaagattttatttctaaaggtcagaagctgaacttagttgctaatggagaaatagacagcagtgctccaacaaaaggacattatgttgccccacacttgtttgcagatgttccagaagatcatattttggccaaggatgaaatatttggtcctgtgcaagttattatgcctttcgacacagaagaaaaagctatcagcatcgcgaatggtacagactacggtttagtcgccagcatt

SEQ ID NO: 214089 - DNA, 796 bp, Unknown
  Bacterial polypeptide expressing nucleotide sequence isolated from the Sargasso Sea
cgccgacgtgccgctggccgccgaccacttccgctacttcgccggctgcatccgcgcccaggaaggcagcaccgccgagatcaacgacggcaccgtggcctatcacttccacgaaccgctgggcgtggtcgggcagatcatcccgtggaacttcccgctgctgatggccgcctggaagctggcaccggccctggccgccggcaacgccatcgtgctcaagccggccgagcagaccccgctgtcgatcaccctgctggccgagctcgtcggcgacctgctgccgcccggcgtgctcaacatcgtccagggcttcggccgcgaggccggcgaggcgctggccaccagcaagcgcatcgccaagatcgccttcaccggctccaccccggtcggctcgcacatcctcaagtgcgcggccgagaacatcatcccgtccaccgtcgagctgggcggcaagtcgccgaacatcttcttcgccgacatcatgaacgccgagccggccttcatcgagaaggccgccgagggcctggtgctgggcttcttcaaccagggcgaggtgtgcacctgcccgtcgcgcgcgctggtgcaggagtcgatctacgagccgttcatggccgaggtgatgaagaaggtcaagcagatcaagcgcggcaacccgctggacaccgacaccatggtcggcgcccaggcctcgcagcagcagttcgacaagatcctcagctacctggagatcgcccagcaggagggcgctcaggtgctcaccggcggggcggccgagcgcctggagggcgacctggcc

SEQ ID NO: 214090 - DNA, 841 bp, Unknown
  Bacterial polypeptide expressing nucleotide sequence isolated from the Sargasso Sea
tatgggattaggaaatgtatctatagggagcacttatccagaggtaagtagagacaaaatgctctcaaaactaaataaattaaaacaaccatttttaaaaaactttaacccagatttaaaggtacgcattgatcgtataaaaagaatacaaactttagttgaggaaaatatagatgcttttcacgacgcgttaagatctgattttggcacaagacatgaacagttaagcctaatggctgacacaatgcctgtaattaataatgcaaaagacgctttaaaaaatattaagagatgggtaaagcccgataagagaaaacctaactttcccttaggaatgcttggtgcaaaggcctatgttcaatttcagccttatggagtagttggtgttatttctccgtggaactttccactaactctaagtattgcgcctttaattgaaatatttgcagctggaaataatgcaatgatgaagctctcagagtttgtcccagcaacctccgaattaactgaagaacttattaataaattttttagtgatgaagaagttgttattgtaaatggaggtcctcaaacttcgcaagattttgcaggattgccatttgatcatctgcttttcactggatcaacaaatgtagctaaaaaagtagcatctgaggcagcttcaaatttagtgccactcacccttgaattaggtggcaagtcaccagtaatagttggtccaaacgccaaaatgaaaaaaagtgttgataagataatgatgggaaagctcttaaatggagggcaaatttgtatatcacctgattatgtaatggttcctgagggacaaacagatgaatttgtt

SEQ ID NO: 214091 - DNA, 694 bp, Unknown
  Bacterial polypeptide expressing nucleotide sequence isolated from the Sargasso Sea
tttgaaggttaaatttccatttaaagctaaatatggaaactacattaacggaaaatttgtagaacctaaatctggaaagtattttgataatactactccaatcactaatgaagttatctgtaaggtgccacgatcgaacgaaaaagacgttgatttagctctagacgcagcccacgcagcatttcctgcttggggaaaaacatcaatcacagagagatcaaatatactcttgaaaatagctgatgtaatagagaaaaatttaaacgtgttagctacagcagaatgtttagacaacggtaagccaatcagagaatgtatggctgcagacttacctttggtaattgaccattggagatattttgcaggagtaataagagcagaggaaggatcagttgctgaaattagtaacagcgaatattcttaccacatacctgaaccattaggtgtagtaggtcagattataccttggaacttcccgttgttaatggctacatggaaactagctccagcattggcggcaggaaattgtgtagtattaaaaccagctgaacaaacaccagcatcaattatgcttttaatggaacttatcggagatctattaccagcaggcgttgtaaacgttgttagtggatatggtcttgaagcaggtaaacctttagcatcttcaaaaagaattaagaagatcgcttttact

SEQ ID NO: 214092 - DNA, 929 bp, Unknown
  Bacterial polypeptide expressing nucleotide sequence isolated from the Sargasso Sea
gtgctcagcggtacaaactgcatctggagcttctcatattgaagattttataaaaagattaaaagaatttaattttgaaccaggttttgataaaggttcccaaaatcacattgtttatgaacctattggagtttgtggacttatcactccttggaattggcctataaaccagattgctcttaaagtaattccagccttcgcaacaggatgtacaatggttttaaaaccttcagaaattgctccactttctggaatgctttttgctgaaatgattaatgaagccggtttcccacagggagtttttaatctggtaaatggagatggagctggtgttggaacagatttatcaggtcatccagatatagatatggtttcttttactggatctactcgtgcaggtaaattaataacaaaaaatgcagctgatacaataaaacgagtatgtttagagttgggaggaaaaggaggaaatattgtttttgcagattcttaccctgacgcagttagagatggaataagaaatgttatgagtaactctggtcagtcatgtgatgcacctactagaatgctagttgaaaaatctatatatgaaagagcagttaaagaggctgctgatgaagcaaacaaaatcaaagtagatttagctagtaaatcgggagagcatattgggccagtaatttcaaaaattcaatacgataaaattcaaagccttattaagagtgggatagaagaaggtgcaacgttagttgctggaggtcctgataaaccagaaaattttaaaaaaggatattttattaaaccaactgtatttacagacgttaaaaataatatgagaattgcaaaagaggagatttttggaccagttttatcaatcataccttttgaaaacgaagatgaagcaataaaaataacaaatgatacagagtatg

SEQ ID NO: 214093 - DNA, 724 bp, Unknown
  Bacterial polypeptide expressing nucleotide sequence isolated from the Sargasso Sea
atgcaacagctggtgcgcgcaggtagcacccgccagctggcctggcgccaagagcaactcaacaacctcgaagctctccttcaggaactagaggcaccccttcaagctgccctggctgctgatcttggcaagccagcggtggaagcctttttcgaaattgtgggcgtgcaaggtgagctcaagctcgccaagaagcaactcaagcgctggatggccccgcgacgtgtggccttaccggctgtgcagcaaccaggccgcacctgggtgcaagacgagcccctgggcaccgtgttgatcctgggtccttggaattacccgttgatgctggtgttgcggccgctggtctcagccctggccgccggcaacacagcggtgttgaaaccatctgagcaagcgcctgccgtggcgaagctgctggccgagatggtgccgcgccatttcgaggctgatgaggtgcgggtggaactggggggagcagaaacagcccaagccctgctgaagcagccctttgaccatgtggtcttcaccggcggcacaacgatcggccgcgaggtgatgaaagccgcagctgagcagctaattccggtaacgctcgaactggggggcaagagcccctgcatcgttttagatgacgctgatctgcaggtgagtgcccggcgcattgcctggggccgcttcctcaatgccggccaaagctgcgggccccggactacgtgctggtgac

SEQ ID NO: 214094 - DNA, 826 bp, Unknown
  Bacterial polypeptide expressing nucleotide sequence isolated from the Sargasso Sea
gtcgcgaaggtggcctttacgggtggaagcgcgactggcgcacaagtttatgcaaaagccgctaaaacgctcaaacgctgcaccctcgaactaggtggaaaatcacccaatattatattcgatgatgctgacctagatgacgcggtcaaaggagcagtgtcaggaatttttgctgcaaccggacaaacatgcatggcgggctcaaggcttttagtgcaagatggtatatacgaggaatttgtcgaatctctgatcgattttgcgggccaagcaaaaatgggggatccgatggataaaagcacccaagtaggaccggtgacgacacctccgcaatataaaaaagtcttggactatatcgcgatcgcaaagagagaaggcgccgaagtactattgggaggagccccagcatcaggaagaccagaatgtggtgaaagtaagtatttcatcgagcccacaatcttgggaaaggttgagaactcgatgaggatagcgcaagaagaagtattcgggcctgttctggtaattattcggttcacttcggatcaagaagcgattgatatcgctaatgacatatctttcggcctagccgcaggaatctggacgcgttctatcaaaagggccatgagagtgtccaaggcgatacgagctggcacaatctgggttaacacatatcgggcgataagctatatgtctccctttggcggctataaaatgagtggtctaggacgcgagaatgggatggaggcaatacgcgagtatctccaaactaaaagtgtttggatatctaccgccgatgaaacgccgaatccttttgtgatgcgttgat

SEQ ID NO: 214095 - DNA, 809 bp, Unknown
  Bacterial polypeptide expressing nucleotide sequence isolated from the Sargasso Sea
ccagaaacccggccgcgcctgggtgcagtgcgattcgctcggcacggtcttgatcctggggccttggaactaccccttcatgctgctgctgcggccgctggtgacggccctggcggcggggaataccgcgatgctcaagccgtcggagcacgcccctgccgtggcggacttgatcgcagaagcgctgccgcgccacttcgccccggatgtggtgcaactccagcaagggggaccggaaaccgcccaagccttactgcgtcagccgtttgaccatgtcttcttcaccggggggaccgcgattggacggaaggtgatgaaggctgccgccgagcagctgatgccggtgactctggagctgggaggcaagagcccctgcatcgttctcgatgacgctgatctgcacgtcagcgcgcggcggatcgcctgggggcgctttctcaattccggccagagctgtgtggccccggattacgtgctggtgacacccgccatgcgccagcccctggaaacagccctggccgaggccattgatcagttctacggaacagatccgcgcgaatcagtggattttggccgggtggtgaacaccgtccaattcgatcgcctcgatgggctgctgcagaacgccaccgtgctcaaaggcggagaacgcgaacgggaacagcttttcatcgcccccaccctggtggagggcgatccagaagggggcctcatgcaggaggagatctttggaccggttctgccgttgatcacagtcgacgatctggagcaggccctggaattcatccgtggcagagccaagccgctgg

SEQ ID NO: 214096 - DNA, 946 bp, Unknown
  Bacterial polypeptide expressing nucleotide sequence isolated from the Sargasso Sea
ttccgttatttcgctgcgtgccttgaaacgctcgacgaagaagtcacgccctcacgtggcgactatctgacgatgagcatttacgagcccatcggggtgatcgcggcaattacaccgtggaattcgccgattgcttcggacgcgcaaaagctggctcctgctttggcgggcggcaacgcagtggtgttgaagccggctgaagtcacgccgctggtctcgcttgcgctggcgcgtatctgcgaagaagccggtgtgccgaagggcgttttgagcgtcgtgccgggtaaaggctcggtgatcggcgacgtgctggtgcgccatccgctggtcaagaaggtgtcgttcacgggcggcactgaggtgggccgcggtatcgcgcgcattgccgcggacaagctgatgcccgtgtcgctggaactgggcggcaaatcgccgaccatcgtattcgatgacgccgatctcgaccatgcagtaaacggcgtgctgtacggcattttcagttcgtcgggcgaagcgtgcatcgcgggctcgcgtctgttcgtgcagcgctcgatctacgacgccttcatgaaacgtctcgcggaaggcgcgcgcaaactgcgcgtcggcgatccgtcacgcgcggaaacgcaaatgggtccgttgattaccgcggcgcatcgcgagacagtcgagcggtatgtcgcgttgggtctggaagagggcggccgcctgctgtgcggcggcgagcgtccggttggcgatggccgcgagcagggtacttactttcagccgacgatactcgaaggcctcacgaacgacgcccgcatctgccaggaggagatctttggcccggtgctggtcgcgatgccgttcgacgacgaagcctcgctgctgaaagaagccaacaacagcgtgttcggccttgccgccggcatctggacgcgcgattacaaacgcgcctacc

SEQ ID NO: 214097 - DNA, 718 bp, Unknown
  Bacterial polypeptide expressing nucleotide sequence isolated from the Sargasso Sea
aatgaaagtgtcatctgttttagatacatctcatttaaaggtaaaatttccattcaaatcgaagtatggaaactacattaatggaaaatttgtagaacctttatcaggcaagtattttgataatcctagcccgatatcaaatgagactatctgttcagttgcaagatcaaatgaaaaagatgtggaggcagcattagatgcagctcacgcagcttttacaacatggggaaaaacggacattactacaagatcaaatataatgatgaaaatagctgatgttcttgaaaaaaatctaaatttattagctacagctgagtgtttagataatggaaaacctataagagagtgtatggcagcagatttaccattggtaattgaccactggagatattttgctggagtaataagagctgaagaaggttctgttgctgagattagtaattcacaatactcttacaatatacctgaaccattaggagtagttggtcagattgttccatggaattttccattattaatggcaacatggaaattagctccagccttagctgcaggtaattgctctgttttaaaaccagcagaacaaacaccagcttcaattatggttatgatggaactgattggtgatttattgcctccaggagttgtaaatatagtaagcggttttggtttagaagcaggtaaacctttagcgtcttctaaaagagtcgcaaaagtt

SEQ ID NO: 214098 - DNA, 880 bp, Unknown
  Bacterial polypeptide expressing nucleotide sequence isolated from the Sargasso Sea
atgctgcacatcgataaaatttatatcaacggtgaatttgtcaccccgcacggcagcgaaacctttgcgctgttcaacccggcgacggaagagatgattggccaggcgcggctggcggacgaagaggatgcccggcgagcgattgccgccgcaaaagcggcctttccttgctggtcacggacgacgaaacagcagcgtctggatgtccttgagcggatgtaccaggccgtccgggcgagagaggcggatttactcgaggcgattgtcaccgaatatggcgccccggcttcgcgctcgcaatggatggcgacatggccggcacaaaccattaaacaggcgatggagacgctggcgagcttcgaatttgttgaaccggcggggcgtgcgcaggtggtgatgacgccggtcggcgtggcggggttgattacgccgtggaacagcgatgccggttttatctgtagcaagctggcgacggcgatggcggcaggctgtacggcggtgattaaacccagcgagatgagcgcctggcagacgcagatcgtcaccgaagcgctgcacgcggcgcagatccccgccggggtcgttaacatcgtgaccggacggggcgaagtggtgggggatattattaaccatcaccccgatattgctaaaatttctttcaccggttctaccgccgtagggaaacatattatcgaaagcggggcgcaaacgctgaaacgcgtcacgctggaacttggcggtaaatcaccgaccctcattctggatgatgccgatgtgcagcaggcggtgcccctggcgctggctgccgggtttatgaatagcggacaggcctgcatcgccgggacgcgaattctggtgcctgccgggcgtctggcggagt

SEQ ID NO: 214099 - DNA, 850 bp, Unknown
  Bacterial polypeptide expressing nucleotide sequence isolated from the Sargasso Sea
atgatttcgccctggaactttcctgtaaatttaacatttgtacccttagtatcaatttttgctgctggcaatcaggtaatgcataaaccaagtgaacatacgccagttacatcagttcttttgaaagatctatgtgataaaacatatgatcaaaatgaatttgcaactttcttagggggacctgatgtaggtgaagcttttacaaaattaaatttcaatcatcttctttatacaggtggaggtgaagtagcaaaacatgttatgaacgcagcatctcaaaacttagttccttgtactcttgaacttggaggtaagtctccagtggttattggtaaatcagctgatttgaaaacctccgcaaaaagaattatgtttggtaaaacaatgaatgctggacaaatttgtttagcgcctgattatgttattgttcataaagataaaaaggatgactttatcagagagacaaaagatgcagttacagagtactttcctgacatcaagaacaacgaagattacacatcaataattaatcaaaagcactacgatcgacttaaagatttgttggatgatgcagttgctaagggagcaaatgtcaacgaaataaatccagcaaatgaagatttttctcagcaagagttttataaaataccgcccacaattgtcactaatacaacagatgatatgaaaataatgcaagaagaaatttttggacctatattgccagttgttgaatatgaagaaattgatgaagcaacaagattaataaattccaaagatagacctcttggtctctactactttggaacagataaaaaagaggaagataatatcttaaataatacatcttctg

SEQ ID NO: 214100 - DNA, 709 bp, Unknown
  Bacterial polypeptide expressing nucleotide sequence isolated from the Sargasso Sea
ataaaaaaagttacccttgaattgggtggaaaaggtggaaatatagtttttgcggactcttatccaaatgccgttagagatggtgtaagaaatataatgagtaattcaggacaatcatgtgatgctccaacaagaatgttggttgaaaaaccaatttatgaaagagctgttaaagaagctgttgatgaagcaaataaaattaaagttgatctggcttctaaaaaaggagatcatattggacctttagtttcaaaagtacaatatgataaagttgtaaatcttatcaatgagggaataaaagaaggtgcaacattagctgcaggtggaccagatttgccaaatggacttaacaaaggttattttgttaaaccaacaattttttcagatgtaaataatgacatgaaaattgcaagaactgaaatttttggacctgtgctttcaattataccctttgaaactgaagaagaagctatagcaattacaaatgatacatcttatggactaggtaattatctacaaacagaagataaagaaaaagccaaaagagttgctagaaaagttagagctggaacggtttatatcaatggtcaagccacagatactggaatgccgtttggtggttacaaacaatctggtaatggtcgtgaaggtggtgtctggggtttcactgaatttttagaagtaaaagcaattaccggttggaattaat

SEQ ID NO: 214101 - DNA, 921 bp, Unknown
  Bacterial polypeptide expressing nucleotide sequence isolated from the Sargasso Sea
aactatagcttgcgccagccaattggcccggttgggattatcactccctggaatactccattcatgctatcaacctggaagatcgctccagcgttagctgcgggttgtacaatagtgcataaaccagcggaatggtcaccttgtacagcggccatgttagtgaagatcatgcatgaggcagggttaccagcaggagttgtaaacacagtacagggtgctggtgaaactgcaggtaaagcattaacagagcacaaagccattaaagccatcgcatttgtcggcgaatcgcgaaccggcagtgagattatgaaacagggggctgatagtttaaagcgtgttcatttcgaacttggcggtaagaaccctgttatcgttttcgatgatgcagatttggatcgtgccttagatgcagttgtatttatgatttacagccttaatggcgaacgctgcacatcttccagtcgtttgcttattcaaaaatctatttctgcggaatttgttgaaaaagttaaggcgcgagtagcgatattaaatgttggtcatccattgaatcctgctacggaagtaggccctcttatccatgaacagcaccgcgaaaaagttgcttcttattttgatattgcaaaagaagacggtgcgacgattgccatcggtggcaacaagagtgatttggacggaaaaggatgctacgtagagccaacactttttacgaatgcaagtaactcgatgcgtatagcacaggaagaaattttcggtccggttcttaccgtgattgaattcgaggatgaggcagaggctgttgagattgcaaatggtgtgcgctatggcctggcagcctatatatggactggtgattccggacgtagcattcgattggggcgtgatttagacgtgggcatgatctgggtaactccgaaaaca

SEQ ID NO: 214102 - DNA, 774 bp, Unknown
  Bacterial polypeptide expressing nucleotide sequence isolated from the Sargasso Sea
aatgaatattgatttattgattaatggaaattttgaaaaaggtaattcgactgaagaaaaagttataaacccaaaaaatagagatttgattgttgccattccacaagcttctgatgatcaaattaacaaagctgtagattcttctgttaaagcatttaaaaaatggtcaagaacaacacctagtgagcgttcttcattattattgaaattagcaaataaaatagatgagaatgctgaggaaattgctaaacttgaatctcttaattgtggtaaaccatatcatttagcattagaagaggagcttccagcaactgccgatgtattccgattttttgcaggtgcttgccgttgcatgagtgcatcagcagcaggagaatatatggaaggttttacaagcatgattagaagagagccaattggagttatagcttcaatagctccttggaattatccaattatgatggcagcatggaaattagctcctgctttagctgcaggtaatacagtagttttaaaaccatctgaacaaactccgctaacaacttttaaattagcagaattaataaatgaaatatttcctgaaggagtagttaatgttgtatatggaattggagaaactgttggctctagtttagtaaataatccaaatataagcatgatatcattaacaggagatgttgctactggttcacaaatattaaaatctgctagtaatggtgttaaaagaactcatttagaattaggaggaaaagctccagtaattgtttttgatga

SEQ ID NO: 214103 - DNA, 766 bp, Unknown
  Bacterial polypeptide expressing nucleotide sequence isolated from the Sargasso Sea
catttgaaagtaaaattcccgtttaaagcaaagtacgggaactacataaatggtaagtttgtagaaccaaaatctggaaagtattttgataatacatcaccgatttcaaatgaagtaatctgttcagttgcacgatcaaatgaaaaagacgtagatgctgcattagatgcagctcatgctgctttcccaacatggggtaaaacctcaattacggaaagatcaaacattcttcttaaaattgcagatgtcattgagaaaaatcttaatgtattagcaactgctgaatgtttagataatggaaagccaattagagaatgtatggctgctgatttaccattagtaatagatcattggagatattttgctggggtaattagagcagaggaaggttcagttgctgagataagtaacagtgaatattcttatcacattccagaaccactaggtgtggttggacaaatcataccgtggaattttccattattaatggcaacgtggaaacttgctccggctttagcagcaggtaattgtgtagtgctaaaaccagctgagcaaacaccggcatcaatcatgttacttatggaactaattggagatttgttacctccaggagtagttaacgtggtaagtggttttggtttagaagctggtaaaccattagcatcatcaaaaagaatcaaaaagattgcttttacaggtgaaacaacaactggtcgtttaataatgcaatatgcatcacaaaacttaataccgatcacgttagagt

SEQ ID NO: 214104 - DNA, 724 bp, Unknown
  Bacterial polypeptide expressing nucleotide sequence isolated from the Sargasso Sea
gtagaccattttcgatattttgcaggagctataagggcacaagagggtactataggaaatattgatgggatgcaatcaggtggtggaaattctgcacttggtatgatggcttatcactatcctgaacctttaggtgttgttggacaaataataccgtggaattttccaattttaatggctgcatggaaacttgccccagcattagctgcaggtaatgcagttgttttaaaaccagcagaacaaacaccattttctatcaatgtactcatggaggttataggagatcttcttccagctggggtagcaaacatagttcatggatatggtgttgaagctgggaaacctttagcttctagtaaaagggttaaaaaggttgggttcacaggagaaacaaccactggacgattaatacttcaatatgcatctgaaaatcttatacctgttactcttgaacttggaggaaagagtccgaatatctttttcaaagatataatgggtggatctgatgattatatttcaagatgtgttgaaggtttcctgcacgcatattttaatcaaggcgaagtttgcacctgtccatcaagagcaattattcatgaagatatatatgaaccattcatggaaattgtaaaagaaagagtaaaagcaataaattgtgggtcaccttttgatttaaatacacaggtaggagcacaagcatcaaacgaacagttgaaaaaataat

SEQ ID NO: 214105 - DNA, 403 bp, Unknown
  Bacterial polypeptide expressing nucleotide sequence isolated from the Sargasso Sea
ttctcaacaccaaactgtaaaaaatatctgaaaactgtatccccatctactgaagaagtattagcttctctatcaattggaaataagaatgatgtagattcagcagttaattcggcaaaagaaggattgaagatttggtcaaaaactgcacctagtgaaagggctaaatatctatataaattagcaagattaatacaagagagatcaagagaattcgctgtacttgaaagcatggatggcggaaagcccattaaggaatcaagagattttgacttacctcaagttgcagccaattttttctattttgctggctgggctgacaaattagatatttcatggggtaccaaagaaatgaaaccttatggcgttgtcggacagattatcccgtggaattttcctttgc

SEQ ID NO: 214106 - DNA, 799 bp, Unknown
  Bacterial polypeptide expressing nucleotide sequence isolated from the Sargasso Sea
atgtacgaaaaattaggtcaatttatcgatggaaaatggtgccaatcttcagacaaaaacacttatgatgtaattaatcctgcaacagaagaagttataggtcaggcttcaaaagctactccagaagatgttgatagggctttgaaatctgctgaaaaaggattaagcatttggaaaaaaactccaccatggcaaagatcaaatattttaagaaaaattgcggatactattagattgaaaaaagatattttagctaaatggatgacattagaaaatggaaaacctctagcagagggttctgcagaagcgaatggaacagctgacatttttgagtggaatgcagaggaaacaaagagaatttatggtcagactattgaaagcagatttgatgatactagggtccatgtttactatcaaccagtaggagttgttgcagcattatctccttggaacttccctctaattttagcagcaagaaaaatttctacagctttaggagctggttgttcagtaattataaaaccagacacaattacaccaggtgtagtaatgcaattagttgatatttgcagagaatgtggtgttcccagaggtgttatcaatcttttatctggcgatccacctagtatagcttcacaattaatacaatcagatataattaaaaaaatttctattactggctcagttagagttggaaaattaatattaaaacaagcagcagaaaaagttcaaagagttacaatggagttgagtggccattcaccttttattgtttttgatgatgctgatataaaaaagc

SEQ ID NO: 214107 - DNA, 714 bp, Unknown
  Bacterial polypeptide expressing nucleotide sequence isolated from the Sargasso Sea
acacaataaaaaaagttacccttgaattaggtggaaaaggtggaaacatagtttttgcagactcctatcaaaatgcagtaagagacggcgtaagacatgtaatgagcaattcaggacaatcttgtgatgcgccaacaagaatgctagttcaaaaaccgatttatgaaagagctgttaaagaagctgtagatgaagcaaataaaattaaagtagatgtagcatcaaaaaaaggtgatcacattggaccactagtttcaaaagttcagtacgacaaagtaataaatcttataaatgttggaataaaagaaggtgcaacattagctacaggtggacctgatttacctaatggtcttaacaaaggttattttgtaaaaccaacaatcttcactgatgtaaataatgatatgagaattgcaagagaagaaatatttggacctgtactttctattattccatttgaaactgaagaagaagctattgcaatagtaaatgacacttcatatggacttggaaattacctacaaaccgaagataaagaaaaagctaaaagagttgccagaaaattgagagcaggaacaatttttattaatggccaaggagcagatgttggggcgccttttggaggatacaaacaatctggaaatggtcgtgaaggtggaatctggggtctaaatgaatttttagaagtaaaaactataacaggttggaagtaat

SEQ ID NO: 214108 - DNA, 883 bp, Unknown
  Bacterial polypeptide expressing nucleotide sequence isolated from the Sargasso Sea
tctcatgcaaaaaaacatttaaagtcctggatgaaggatgaaaagagaaaatctaacttcccgtttggactaatgggagctaagtcatatattcatagggagccgcttggagtcgttggaatgatatcaccatggaactttccaatgtatttatctcttgctcctttagctggaatctttagtgcgggcaatcaggtgatgcataagcctagcgaatttactcctattacttctgaacttttaaaagaaatttgtgatagtgcttttgatgaaactgaatttgcaacttttctaggcggtcctgatgtaggcgcagcttttactcagcttaagtttgatcatttgttatttacaggaagtggcaatatcggaaagcatgtaatgcgtgcggcttcggaaaatctagttccattaacattagagcttggaggaaaatctccagttatagtcagcgattcttcaaatatagatataacagcacgaagggtgatgtttaataagactcttaatgcaggtcaaatttgtctagcacctgattatgtttatgtgcatgaaacagaaaaagataattttgtagaagcatgcaaggatcaagttaatgaattttatagtgatcttaaatataaccctgactatacatcagtaataaatcaaaaacattatgacagattaaatggtcttctatcagatgccaaagatcatggtgcagagcttgtggaaattaatccagcaaatgaagatttctcccagcaagagtcacataaaattcctccaacacttgttctaaacccaactgatgaaatgcagataatgaaagaagaaatttttggtccaatacttccaataaagacttacaaggacataaatgaaccaattaactata

SEQ ID NO: 214109 - DNA, 903 bp, Unknown
  Bacterial polypeptide expressing nucleotide sequence isolated from the Sargasso Sea
tccattatggatggcaatatggaaaattgctccagcacttattactggtaattctgttatattaaaacctgcagaacaatctccaatgagcgctattaaaattggtgctttgctctcagaagctggagtacctgatggagtattttcagtacttccaggagatgggcctattacaggcaaatcattatgtcttcataatgatattgattgtgtagcttttactggatcgggtgaagttggtaaactggtacttgagtattctggtcaatccaacatgaaaagagtgcaactggagtgtggtggaaaatcaccaaatattatttttgcagattgtgctgatcttgatagagccgcagaagcatctgcttatgctatctttggaaatcaaggtgaggtttgttctgcaggatctagacttataatccaaaaagatattgaaaaagacttcatcaataaagttgttcaattaagtaaaaaaatgcaaccttcagatccgttaaatccagattcatttgctggagcaatagtaaatgctgaacagctagaaaaaataaacaaatatgtaaatataggtaaaaaagagggagctgatattgaagttggaggaaatataacaatgaaagaaacaggcggttgttattttgagcctacaatttttaaaaatgttaagaacaatatgaagattgctcaagaagaaatttttggacccgtgttaacaactttagctttttctaattttgatgaggctatttcaattgccaatgactctgaatatggactagcagctggtgtgtggactaatgatattaacaaagcaataaaggcctcaagagaaattcgtgcaggaacagtttatataaataactatgaggaaggtgttgactcaacaatacctcttggtgg

SEQ ID NO: 214110 - DNA, 867 bp, Unknown
  Bacterial polypeptide expressing nucleotide sequence isolated from the Sargasso Sea
gttgcgccaaaccgcctatctcaacggtgtgtggtgcgaggccgacagtggcgcgcgcaccgaaatcttcaatccggccaccggcgagctgatcggcgccgtgccgaacatgggccgcggcgaaacccgccgcgccatcgaagccgcgcaggcagcccaacaggcctggcgcgcgctgaccgccaaggagcgcgcggcgcgcctgcggcgctggtatgaggtgatgctggagaatcaggaagacctggcgcggatcatgaccgccgaacagggcaagccgttggccgaggcgcggggcgaggtggcctacgccgcatcctttctcgagtggttcgccgaggagggcaagcgcctctacggcgatgtgattcctgcccacgccggcgacaagcgcatcctggtgcagaaggagccggtcggcgtcaccgcggcgatcacgccgtggaatttccccagcgccatgatcacccgcaaggccggcccggcgctggccgccggctgtgccatggtgctcaagccagcgccgcagacaccgttctcggcactggcgctggccgcgctggctgagcgtgcgggcattccggcgggactgttcagcgtgatcaccgccgatgccgccacgtcccgtgaggtgggtgccgaactctgtgagaaccctatcgtgcgcaagctctcgttcaccggctcgacggcggtgggcatcaagctgatgcagcagtgcgcgccgacgctgaagaagctctcgctggagctgggcggcaacgcacccttcatcgtcttcgacgacgccgatctggatgcggcggtcgagggcgcgatgatctccaagtaccggcatgccgggcagacctgcgtgtgtgccaaccg

SEQ ID NO: 214111 - DNA, 699 bp, Unknown
  Bacterial polypeptide expressing nucleotide sequence isolated from the Sargasso Sea
aatctggtaagtattttgataatacttctccgatttcaaatgaggtgatctgttcagttgcacgatcaaatgaaaaagacgtagacgctgcattagatgcagctcacgcagctttcccaacttggggcaaaacttcaattacggaaagatcaaacattctccttaaaatagctgatgtgattgagaaaaatcttaatttattagcgactgcagaatgtttagacaatggtaagccgattagagaatgtatggctgctgatttaccactagtaatagatcattggagatattttgctggggtaattagagctgaagagggttcagttgctgagataagcaatagtgaatattcttatcacatacctgagccgctaggtgtggttggacagattataccttggaactttccattattaatggcaacttggaaacttgcaccagctttagcagcaggaaactgtgttgtgctaaaaccagctgagcaaacaccagcatcaatcatgttacttatggaactaattggagatttgttacctccaggagtagtaaacgttgtaagtggttttggtttagaagctggaaaacctctagcatcatcaaaaagaatcaaaaagattgcttttactggtgaaacaacaactggtagattgattatgcaatacgcatctcaaaacttgataccaattacctggaattagg

SEQ ID NO: 214112 - DNA, 902 bp, Unknown
  Bacterial polypeptide expressing nucleotide sequence isolated from the Sargasso Sea
atattacccagtggtgacatccttgtgcgcgaacctatcggcgtttgtggactaattacgccatggaactggccggtgaatcaggttgtcctcaaggtattgccggcgcttgcaacaggctgttgttgcattttgaaaccgagcgaacatacaccactgtccgcgatgatttatgcagaaatattgcatggcgcaggctatccagctggtgtgttcaatttagtaaacggcaaaggtccagttgtgggatctgcaatgtcacagcacccagatattcaaatgatgtcattcactggctcaactagagctggaacaactgtggttagagagtcggccgaaacagtgaaaagagtgacgctcgagcttggtggcaaatcacccaatattgtttttgcggactgtgagcttgaggatcgagtcacatactcggttaaagaatgcatgtctaacacaggccagtcatgtgacgcgccaactagattacttgttgaacaatcttgttacgactctgcgctggaaatagccaaatcagttgctgaaagtctaatagttggtgatccaaacgacgaaagcaccgaaattggaccactttttgacaaaatacagttcgaccgagtgcaaacaatgattaagttaggcataactgaaggttgtcgtttacttacaggcggcctgggcaagccaaatggtcttgatgtggggtggtttgttaaaccaacgattttttgtgatgccaacaacaatatgcgtgtagcgcgcgaggaaattttcggaccagttctagtcgttataccattcaaaagcgagagtgaagcaattgaaatcgctaacgacaccgagtatggtctggcatcctttatacaaactggggatagccaaagagccaaaagggtcgcaaaaaa

SEQ ID NO: 214113 - DNA, 898 bp, Unknown
  Bacterial polypeptide expressing nucleotide sequence isolated from the Sargasso Sea
tatgaataaagttctaaatgatcagaaagaatattttataaaaaatggttcaccttcaattgaattaaggattgataggctagaaaggcttagaacattaataatggacaatcggaatgattttgtagaagctctaaatacagactttggcgttagatcaaaaaatgcctcaatgttatctgatgtttatggaatactgcctgccattactcatgctgtaaagaatgttaaaaaatggaataagattgaaaaaaaatcatcaaatttcccgtttggtcttataggcgccaagtcatatataaaatatgaacccttaggtacagtaggtatgatttcaccatggaatttcccagttaatcttgcattcatgccgcttgtatgtatttttgctgctggaaaccaagttatgcacaaaccaagtgagcatacgcctttaacagcatcattattaaaagatttatgtgataaagcatatgatcaaaatgaatttgctacattcctaggtggccctgaggttggtgcagcttttacacaattacaatttgatcatcttatatatactggtggaaatgcagttgcaaaacacgtatataactctgcttcaaaaaatttagttccgtgtacactcgaactaggaggtaaatcaccagttattgtaagtaaaacggcagatatgaagactactgctaaaaggattatgtttggaaaaacattgaatgctggacaaatatgcttagctccagattatgttgttgttcataaagataaaaaagatgaatttataaaagaaacaaaagaagcagtttctaaatattatcctgatattaaaaataatgatgattacacctcaataatcaatcaagctcactatgaaaggttaaatgatttattagatgac

SEQ ID NO: 214114 - DNA, 487 bp, Unknown
  Bacterial polypeptide expressing nucleotide sequence isolated from the Sargasso Sea
tatgactactattcatagcttcactggtgatcaaagaaccgtagatcaggcacataatgatttgagaagggccagaacagcttcaagctctatgatcccagcttccactggtgcagctaaagctataggtttagttttaccaaaactcaaaggtaggctcgatggaactgctataagagtcccaacacctaatgtttcattaatagattttacttttataagtaaaaaaaagacaacttcagaaaaaataaactctacgatgataaaagcctcaaaaaaatctaatcttaaaaatatactaacaataaacgatttgcctttagtttccgtggatttcaaccataaccctagtagctctatttttgacacaactcaaactcaagttattgatcaaaatttttgtagagttttatcttggtatgataacgaatggggtttctccaatagaatgattgatactctgttagacttaaaaagattaatataa

SEQ ID NO: 214115 - DNA, 854 bp, Unknown
  Bacterial polypeptide expressing nucleotide sequence isolated from the Sargasso Sea
catggaaaaagttttagaaatacaaaaaaaagcatttttaaaggaaggtcctccttctttagagatgagaaaagaccttctgaggagatgtgctactcttattgaaacctatgaggaaaaaattattaaagctttaaatcatgattttcagaatagatctattgaagaaataaaaatttctgagattgaccaaacaataaggaatatcctattcacaattagaaaattaaataagtggatgaaacctcagagaaggttatcttcccttggaacagatttactcggtgcaaaaagttttttaaaaccaaccccactaggaacagtggggctaattaccccttggaattttccagtaggcttagttttttatcctcttgcatcaatttttgctgcaggaaatagggcaatggtcaagccgtccgaaattacatctgcaacttctagtgttatcaaagagggtgtagaaaagtattttgacgtttctgaacttgcggtaataaccggaggtccatctgtaggagaaagatttagtagtcttaaacttgatcacctactttttataggaagtaataatgttgcaaaaaaagtagcctcccaaacagctaaaaatttggttcccacaacgctagaacttgggggtaagagtcccacaattatcggacagagtgctaacatgaagctagcggcgaaaagaattttattttctaaaactctaaatgctggtcagatttgtttatcacctgattatgtttttgtaagaaaagatgatgaagtaaaatttatatctgaattacaagatacctattctaagtttttttctaaaccgaatagtatggatcaaacagctatggtta

SEQ ID NO: 214116 - DNA, 739 bp, Unknown
  Bacterial polypeptide expressing nucleotide sequence isolated from the Sargasso Sea
catgaatctggagactctctacgaaaaaatggaatacggtcctgctcctgaaagtcctaataatgctgaacaatggctgaaagatcaccagcacaagttcagtctattcatcaacggcaaatggactgaatcctctaagaaaaacagtttcgaaagcatcaatcctgcaacgggtaaatcccttgcctcgatcagtgaagcatctgaaaaagaggtcgaccaagccgtcaaagcagcaaagaaggcttttgaatcctggagtgggctggatccgcatcaacggtcccgttttctttacgcgatggcgagacacatgcagaagcatgcaagactgctggcggtactggaaaccctcgacaacgggaagaccatccgggaaacccgtgatatcgatgttccgcttgcggtgaggcatttctaccatcatacaggttgggctcaacttcttgatcaggaatttaaaaatcatcagcccttaggtgtcgtcggtcagatcatcccctggaattttcctctgctgatgttggcctggaaggtggcaccggccctggctgcaggaaacacggttatcttaaaacctgcagagttcaccccattgaccgcactatggtttgcggaaatgtgtcaaaggattggtctgcctccgggagttttcaacctgcttaccggctccggcacgactggtgcaatgttggcggcccatccgggtatttcaaaaatcgcatttaccggttctacc

SEQ ID NO: 214117 - DNA, 820 bp, Unknown
  Bacterial polypeptide expressing nucleotide sequence isolated from the Sargasso Sea
tattgtagcaggaaatagtgttgttttaaaaacagctgaacaagctccattttgtgctcttcttctatcagagatatttcaacaagaacttcccccaggtgttttaaatgtaatttcaggatatggagaagagtgtggcgaacctctggtaactcatgaaaaagtaagaaaagtaacgtttactggatcttttacagtaggaaagattatagcacaaaaagcagcccctaaattatgtccagttactttagagcttggaggaaaaaatccaaatataataatgagtgatgcagatttagatattgcaattcaaggggttattgacggaatgagatatactcgacaaggacaggcatgtactgcaggttcaagagtttatattcaggaaaaaatttacgataaagtactgggaggagctgttgaaaaattaagtaaattaaaaatgggtaatgccctagatgaaagttctgacattggagcaattatttctgaagaacaactgaaacgaactttacattatatggatattgccaaaaaaaactctacaactaatgttgtacatggtggcaatcaaataacaggtggtgattataaaaatggtttcttctatgaacctacattgatgtcaggtgtgccagtaagctctccagtttgtcaagaagaaatatttggtccagttgcttgtgcgataccatttaaaacatttgatgaagtaatgcatagtgcaaatgacacgccatttggattgtcagcagtattgtggacacaaaatttatctagagctttacaatttgttgaggaaattgaggcaggttttgtc

SEQ ID NO: 214118 - DNA, 918 bp, Unknown
  Bacterial polypeptide expressing nucleotide sequence isolated from the Sargasso Sea
taaggacgatgttaatttagctgtttctgctgccaaagaggcttttaaatcgttttcattgacttcaaaaaaagataggcttgtactattgcaagaacttctcgagattacaaaaaggcgttttgaggatctagcttgggctatgactaaagagatgggtgcccctataactatgtcgagggatgctcaagccgatagtggtattggacatctggaaggattcattagctgtttaaaagactcaaaagaaagagaaactctaccaaatggtgatgtattaatcagagaacctataggtgtgtgtggtttgataaccccctggaattggccaattaaccagatagttttaaaagtagttccagttttagcaacaggatgtacgtgtgttcttaagccctcagagcacactccattgtcagctaagatatacgcagaaataattgacgaagcaggttaccctcctggggtttttaatcttgtgcaaggtgatggattaactgttggagtcgccttatcggagcaccccaacattgaaatggtgtcttttaccggttcaacgcgtgctggtactgatgtttctaagagggcttcagatacggtcaaaagagttactttggaactcggtggaaagtcaccaaatataatttttggagactgtgatcttcctggcagggttgttgagtcagtaaaagagtgtttttataattccggacaatcttgtgatgccccaactcggttattagttgaacgtagttgctatgatcaggtccttaaaatttcaaaacaaactgcattatctcaagaagtaggtgatccaaataatgaaggcgaacacattgggcctctatttgatcaaattcaatttgaaagagttcaaaacatgatagatgttggaataaatgaaggcgctgaattatt

SEQ ID NO: 214119 - DNA, 856 bp, Unknown
  Bacterial polypeptide expressing nucleotide sequence isolated from the Sargasso Sea
tccagcaaatgaggaagtaataggaaatgcttcaaaagcaacaccccaagatgttgatagagcattaaagtctgcagagaaaggtttagaagtttggaaaaaaacccctccgtggcagagatcatatattattagaaagattgcagataaaatgagagagaagcaagatgtcttagccaaatggatgacacttgaagtaggcaagcctttttcagaggcaaaagcagaagttggaggttcggcagatatttttgaatggaatgctgaagaaacaaaaagaatttatggtcaaactgtagaaagtagatttgcagacacaagagtacatgtttactatcaacctgttggagtagttgcagctttatccccttggaactttccattagtattatcttctagaaaaatttctactgctcttgcagccggatgttcagtaattattaaacctgatgttattactccaggaactgttatggaattagttgatatatgtagagaatgtggagtaccacctggtgtagttaatttattatcaggagatccaccaagtattgcttcacaacttattcaatcagatatagttaaaaaaatttcaattactggttcatcaagagttggtaaattaatattaaaacaagcagcagataaagttcaaagagtaactatggagttaagcggtcattctccttttatagtttttgatgatgcggatattaaaaaagcaacagatatggctattgcagctaagttcagaaatacaggacaagtttgtatttcaccaaatagattttatatacaagaaaataaaaaagaagaatttattaatttatttattgaaaaaacaaaaaaattaaaa

SEQ ID NO: 214120 - DNA, 808 bp, Unknown
  Bacterial polypeptide expressing nucleotide sequence isolated from the Sargasso Sea
gggttcggcgctgtcacgccaccccgatatacaaatgatgtcgtttaccggatccacacgggcaggcacagcagtcactcatgacgcggcagattcggtaaagcgcgtcactctggagttgggcggcaagtcgcccaatctggtttttgctgattgtgatttggaggagcgggttacgcaatccgtagccgagtgcatgttcaacaccgggcagtcttgtgatgcgccgacgcgactgttggttgagcggtcctgttatgacgaggtcgtggagattgcccgacgcgcggcgggagccaccgctgttggaaatcccgaagaggagggcggtcacatcggacccttgtttgatcaaattcagtttgatcgagtgcaaaacatgattcaggtcggtatcgatgagggtgctacattactcgtcggagggctcggtcgccctgagggttttgatgccggttggtatgtgcggcccacggtattctctgatgtgaacaacaccatgcggattgcgcgagaggaaatctttgggccggtgttggcgatcattccgtttgatgacgaggaagcggcggtcgaaatagcgaacgacacgccctatggccttgccgcgtatgttcagaccggtagccctgagcgcgcagcgagattgtcacgatcgctgcgagcgggtgcggtgcacatcaatggcggcgcctacgaatacggctccccgtttggcggctacaaagcctcaggtaacggtcgggaaggcggggacatgggtctcgaagacttcctcgagaccaagatggtgcacggattggcgtaa

SEQ ID NO: 214121 - DNA, 756 bp, Unknown
  Bacterial polypeptide expressing nucleotide sequence isolated from the Sargasso Sea
gatcaacaagagcaggtgcattaatatctcagaacgccgcaaaagattttaagcgtgtaagcttagaattaggtgggaaaggtgcaaacataatatttaaagatgcagaccctgaagctatcgaaaggggtgctttaagatgttttagaaattcaggtcaatcttgtaacgcaccaacaagaatgttggtagaaaaatctatgtatgatgaagctgttcaaagactaaaaaaatatgctgatgattttaaggttgacgatccaaacaaagaaggtgagcacataggaccagtaatttccgaaacacaatttaacaaaatacagggactaattcaaaaaggtattgaagaaggtgctaaactagtttctggaggccctggaaaacctgatggtttaaaagatggttactatgtaaaaccaacagtatttgcagatgtaaataatagcatgaatattgcaagaactgaaatttttggtccagttttatcagtcataccgtttgatacggaggaagaagcaatcgaaatagcaaatgatactgattatggtttaacaaactatatacaaacccaagatggagaaaaagttcaaagagtagctagaaagttaagatcaggaatggttgatgtgaatggagcaggtattgccgttgatgcaccatttggtggttataaacattctggaataggaagagaagcaggtaaagaagggttagtagaatttctcgaagttaaatctgttggtggttggagctaat

SEQ ID NO: 214122 - DNA, 813 bp, Unknown
  Bacterial polypeptide expressing nucleotide sequence isolated from the Sargasso Sea
ccgtggaattggccgatgaatcaggtcgtgctcaaagtgcttcctgtcattgccacaggctgtacgtgcgtgcttaaacccagtgaacatacccctgtctcggccatgatttacgcggagatcctcgatgaggccggcgtgcctgcgggtgtttttaatctggtgaatggcgtcggtcccgttgtgggtggtgcgttgtctcgtcaccctggtgtgcaaatgatgtcgtttaccgggtcaacccgagccggtacggcggtgacccgcgacgcggctgactcggtgaagcgcgttactctcgagctcggtggcaaatcgcctaaccttgtatttgccgactgcgaccttgaggagcgggtcacgcaatccgttgccgagtgcatgtttaacacggggcagtcttgtgatgcaccgacgcggctgctggtagagcggtcctgctacgacgaggtcgtagagattgctaggcgcgcggcggaagccaccgctgtgggaaatccgaaagaggagggcgatcacatcggcccgttgtttgatcagattcagtttgatcgtgtgcaaaacatgattcaggtcggtattgatgagggtgccaatctgatcgctggtggcatgggccgtccggagggctttgaggccggatggtttgttcgacccactatttttgcggacgtgaacaacaccatgcgggtggccagagaagaaatctttggccctgtgctcgccattattcccttcgacaccgaagaagaggcggtcgagatagcgaacgatacgccctatggtctcgccgcgtatgttcagactgtagcg

SEQ ID NO: 214123 - DNA, 987 bp, Unknown
  Bacterial polypeptide expressing nucleotide sequence isolated from the Sargasso Sea
atcttatattcataagaaaaatcgctgataaaatgagagagaagcaagatgttttagcaaaatggatgacacttgaaatgggaaaaccgcttgtagaggcaaaaggtgaagtgaatggatcagctgatatttttgagtggaatgcagaggagacaaaaagaatttatggtcaaactgtagaaagtagatctaaaggtacaagagtgcacgtttattaccaacctgtcggagttgttgcagcattatcaccttggaattttcctttagttttgtcatcaagaaaaatttcaacagcattagcagctggttgttcagtaataattaaacctgatgttataacaccaggtacagttatggaattgataaatatttgtaaagaagctggtgttcctgctggtgttgtaaatttactttctggtgatcctccaagtatagcttctcaactaatatcttcagatattataaaaaaaatatcaattacaggttcgtcgagagtaggaaaattaattctcaaacaagctgctgataaagttcaaagagtaactatggagttgagtggacattctccatttatagtttttgatgatgcagatattaaaaaagcggctgatatggctattgctgctaaatttagaaataatggtcaagtatgtatatctccaagcagattttacatacaagaaaataaaaaagatgaatttattaatttatttgttgaaaagacaaaaaaattaaaaataggcgatggtatggatccctcagttaatttaggtcctttaactacgaagaaaagattaaatgaggttgaggaattagtagaaactacaaaaaaagagggtgctaaagttctacttgggggaaaaagaccaaaaggatttaataaaggattttattacgaaccaacaatctttgataatataaaggacgattatactattatgaaagtagagccttttgcacccattagttcctatggttatcattaaa

SEQ ID NO: 214124 - DNA, 869 bp, Unknown
  Bacterial polypeptide expressing nucleotide sequence isolated from the Sargasso Sea
cgccgatcgcatcgaacagaacatcgaggtgctcgccatcgccgagacctgggagaacggcaaggcggtgcgcgagaccctggccgccgacttgccgctggtggtggatcacttccgctacttcgccggctgcatccgcgcccaggagggctcggccgctgagctggaccagaacaccgtcagctaccacttcaaggagcccatcggggtggtcggccagatcattccgtggaacttcccgctgctgatggcggcctggaagctggccccggtgctggcggccggctgctgcagcgtgctcaagcccgccgagcagaccccggtcaccatcatgctgatgatggatctcatcaaggacatcctgcctgccggggtggtcaacgtggtcaacggcttcggcgccgaggcgggccaggcgctcgccaccagcgaccggatccagaagctcgccttcaccggctccaccgaggtgggcgcccatatactgcgctgcgccgccgacaagctgatcccctccaccgtggagctgggcggcaagtcccccaacatctacttcgccgacgtgatgcagcacgagagcagctacatcgacaaggcggtggaagggatgctgatgaccttcttcaaccagggcgaggtgtgcacctgcccctcccgcgccctggtgcaggccagcatctatgacgacttcatggacaaggtgctggcccgcgcccgcaccatcgtccagggcaaccccctcgacaccgccacccaggtcggtgcccaggcgtcgcgcgagcaattcgacaagatcttgagctacatggagataggtcgcggcgaaggggccaagatgctgatcggcggtggcccggccagggtgaggg

SEQ ID NO: 214125 - DNA, 823 bp, Unknown
  Bacterial polypeptide expressing nucleotide sequence isolated from the Sargasso Sea
tgaaaaagtcagaaaagtaacgtttacaggatcttttactgtaggaaagattatagcacaaaaagctgcccctaaattgtgcccagttactttagaacttggtggaaaaaatccaaatataataatgagcgatgcagatttagatattgcaattcaaggggttattgatggaatgagatatactcgacaaggacaagcatgtactgctggatcaagagtttatattcaggaaaaaatttacgacaaagtgctaaatggagctgttgaaaaattaagtaaattaaaaatgggaaatgctctagatgaaaattctgatattggagcaattatttctgaagaacaacttaaacgaactttacattatatgaatattgcaaaaaaaaactctacaaccaaagttttacatggtggcaatcaatcaacaggcggggattataaaaacggtttcttttatgaacctacattgatgtcaggtgttccagtaagctctccagtttgccaagaagaaatatttggtcctgttgcttgtgccataccatttaaaacatttgatgaagtaatgaacagtgcaaatgacacaccgtttggattatcagcagtattgtggacacaaaatttatctagagctttacagtttgttgaagaaattgaggcaggttttgtccaagtaaatcaatgtgtagcacctagagcaaatgtttcatatggtggtttaaaaatgagcgggctaggaaaagagtatgcctttgacagtatgataaatcattttactcaaagtaaaacggttttgattaatagaggaaaatcaaatatagatatttaa

SEQ ID NO: 214126 - DNA, 934 bp, Unknown
  Bacterial polypeptide expressing nucleotide sequence isolated from the Sargasso Sea
ttaggtgtagttggtcaaattatcccatggaactttccacttcttatggcaacatggaaacttgctccagcattggcagcaggaaactgtgtagttctaaaaccagctgaacaaactccagcgtctattatgttattaatggaactgataggtgatttattacctgcaggagttgttaatgttgtaagtggatttggtttagaggcaggaaaacctttagcttcatcgaaaagaatcaaaaagattgcttttacaggtgaaacaacaacgggtcgattgattatgcaatatgcatctcaaaacttaattccaataactttagaacttggaggaaaatctccaaatattttctttgaagacgtcatggataaagatgatgatttctttgataagtgtatggaaggttttgctatgtttactctcaaccaaggagaggtttgtacttgtccaagcagagtgctagtacaagagtctatctatgataaatttatggagaaggcgattgctagaacaaaagctgtaaaacaaggaaatccacttaaaatggaaactatgattggtgctcaagcatcagtagaacaaatggaaaaaatcaaatcttacttagatttaggtaagaaagaaggtgccaaagttctatgtggtggaaatgttgctaaagtaaatagtggtttagagaaaggaaactttattgaaccgactatttttgagggtaacaattcaatgcgtatcttccaagaagaaatttttggaccagtagtatctgttactaaatttaaagatgaggctgatgcagtaaaaattgctaatgacactctttatggtttaggtgcaggtgtttggactagaaatggaaatattgcatatagaatgggcagagcaaatgaagctggtagagtttggacgaactgctaccatgcatatccagctcatg

SEQ ID NO: 214127 - DNA, 595 bp, Unknown
  Bacterial polypeptide expressing nucleotide sequence isolated from the Sargasso Sea
atgagcacacaacaagcaacaagctcgaaagtgtcatcttctttagacacctctcatttaaaggttaaatttccatttaaagctaagtacggaaattacataaacggtaagtttgtagaacctaaatctggaaagtattttgataatacttccccgattacaaatgaagtgatctgtaaagtgccacgttcgaacgataaagatatcgattttgctttagatgcagcacatgcagcttttccaacatggggaaagacttcaattggggagagatcaaatattctcaataaaattgctgataaaatcgagcaaaaccttaatcttttagcagtagcagagtgtttagataacggtaagcctatcagagaatgtatggcagccgatctaccattggtagttgaccactggagatactttgcaggagtaataagagcggaagagggttccgtagcagagataagtaatagtgaatattcttatcatatacctgagccacttggtgtagttggacaaattataccttggaacttcccattacttatggctacatggaaattggctccagcactagcggcaggaaactgtgtagtgttaa

SEQ ID NO: 214128 - DNA, 691 bp, Unknown
  Bacterial polypeptide expressing nucleotide sequence isolated from the Sargasso Sea
gtccaagcacctcgaggcgggcgccgagaaggtgatcatcaccgcccccgccaagggcgacgacatccccacctacgtcatgggcgtcaacgcggacgactacaagcacaccgacaagatcatctccaacgcgtcgtgcaccaccaacggcctcgcgcccttcgccaaggtgctcgacgactccttcggcatcgtcaagggtctcatgaccaccacccactcctacaccggcgaccagcgcatcctcgacgcgtcccaccgcgacctccgccgcgcgcgcgccgcggcgctcaacatcgtccccaccggcaccggcgcggccaaggcggtggcgctcgtcctcccccagctcaagggcaagctcaacggcatcgcgctccgcgtgcccacccccaacgtctccgtcgtcgacatgtgcatccaggtggagaagaagtgcaccgccgaggagatcaacgccgcgttccgcgaggcggcggagggtcccatgaagggcatcctcgccgtgtgcgacgagcccctcgtctccatcgacttccgctgctccgacgtctccacctccatcgactcggcactcaccatggtcatgggcgacgacctcgtcaaggtcgtcgcctggtacgacaacgagtggggctactcccagcgcgtcgtcgacctcgccgagctcaccgcgtccaagtgggattaa

SEQ ID NO: 214129 - DNA, 933 bp, Unknown
  Bacterial polypeptide expressing nucleotide sequence isolated from the Sargasso Sea
cgtgtatgaagcggctggtgttgcaggcctgattaccccgtggaactggccgatgaatcaggttgttctgaaagttggtgctgctttggcggcaggctgtaccatggttttaaaaccatcggaaattgccccgctatcaagtgttgtatttgccgaaatggtgcatgaggctggttttccgcccggcgttttcaacatggtcaatggtgatggtgttggcgttggttcaattttatcgtcacatcccggcattgatgttgtgtcattcactggatcaactcgcgctggcattcttatcagcaaggcagctgcagatacggtgaaaactgtctcgctagaacttggtgggaaatcaccaaacctggtttttgatgattgcgatttggaaaaggcggttcggtcaggggccgcgttctgctttaataacacgggccagtcctgcaatgcagcaacgcggatgttggttcagcgttcaatctatgatgaggccgttgaaatcgcggcggccaaggcagctagtacaaaggtagacttgccgtcaaatgagggcaagcatattggaccactggtttcagaggcacagtttgagaaggtacagaggcttattcaaacagggattgatgagggcgcacggttagtggctggcggtgttggccgccccgaaggcttaaatcgtggctggtttgtcaggcccactgtatttgctgatgcaaaaccagatatgaccatcatgcgtgaagaaatttttggacccgtacttgctatgatgccgtttgatagcgaagatgaagccatttcgattgcgaacgatacgcaatatggccttgcagcttatatccagaccagggatatggagcgagcacgccgggtggccggacaactgcgttcgggcatggttcaggtgaatggtgcgccacgcgcttcaggcagtcc

SEQ ID NO: 214130 - DNA, 401 bp, Unknown
  Bacterial polypeptide expressing nucleotide sequence isolated from the Sargasso Sea
aggggcagaggcagttgcgggtggtaaaaagattgaaggaaaaggatatttttttgaatcaactgtattagatggcgtaaaacaagatatgactgttgctagagaagaaatttttggaccagttttatcaataatagaatatgaagattcagatgaagcaatacaaattgcaaacgacacagattatgggcttgctgcaggtgtatttacaaaaaatatagaccaagcaacagaagcatcaaataaattagaggcaggtcaaatttatgttaatagctggtttacaggaagtattgcaactccattcggtggatataaacaatctggttatagtcgcgaaaaaggacaacaagcattaaaaagctaccttcaagttaagaatgtaggtattcaactttaac

SEQ ID NO: 214131 - DNA, 655 bp, Unknown
  Bacterial polypeptide expressing nucleotide sequence isolated from the Sargasso Sea
atggataaatgggaatattcagaatcaattgaatcagatagtattgtttctatccaatcaaaatatgggcattttattgatggtaaattctcaacaccaaattctaaaaaatatctcaaaactgtatccccatctactgaagaagtattagcttctatatcaattggaaataagaatgatgtagattcagcagttaattcggcaaaagaaggattgaagatttggtcaaaaactgcacctagtgaaagggctaaatatctatataaattagcaagattaatacaagagagatcaagagaattcgctgtacttgaaagcatggatggcggaaagcccattaaggaatcaagagattttgacttacctcaagttgcagccaattttttctattttgctggctgggctgacaaattagatatttcatggggtaccaaagaaatgaaaccctatggcgttgtcggacagattatcccgtggaattttcctttgctcatgcttgcttggaaggtagcaccagctctagctactggaaacacggttgtattaaaaccagctgagacaacacctttaacagctttattatttgcagagctttgtgaagaagtagggcttcccaaaggagtctttaacttagttaccggagatggaactacag

SEQ ID NO: 214132 - DNA, 872 bp, Unknown
  Bacterial polypeptide expressing nucleotide sequence isolated from the Sargasso Sea
gaagagttttttgatgaatcagagattgcagtatttaccggtgatcctgaagtaggagctgcatttagtggacttgcttttgatcacttaatttttactggcggcactgctattgctaaacatgtaatgaaagcagcttcagagaatttagtgcccctgactctagagcttggaggaaaatctccagttgtagtcggtaaatcttctaaaattaaagagacagctacccgagttatgcaagggaaaacaatgaatgcaggtcaaatttgcttagctcccgattacgctctagttcctgaagatagtgtagatgagtttgttcaagcctctgttgatgtgacttcagagatgtatcctgatatgaaagataatgaagatttcacatcgattattaatcaaaagcattatgatcgtattcaaggctacatttctgatgctaaagaaaaaggagctgatattgtcgagattaacccttctaatgaagattttagtcagcaacctcaccataaaatacctcctaccattattttaaatcctactgaagatatgcaagttatgcaggaagagattttcggtcctgttttgccagtaaaaacatacaaagatgtttctgaaacagtagattatataaatggcaaggatagacctttagggttgtattactttggagaagactctaaagaaaaggactatgttcttgataatactacttctggtggtgttactgtaaatgatgttatctcccatataacaatggaggatttaccatttggtggagtaggtcctagtggaatgggttcttatcacggacatgatggctttaaagaatttagtcatgctaaatctgtatacaagcagtcttggttgaatct

SEQ ID NO: 214133 - DNA, 654 bp, Unknown
  Bacterial polypeptide expressing nucleotide sequence isolated from the Sargasso Sea
ttaatcttgttaaatggagttggggatgttgtgggaacagcgctttcaaaacataaagatattcaaatgatgtctttcactggctctaccagagccggaattttagttactaaagactctgctgacacaatcaagagagtgactcttgaattaggaggcaaatcaccaaacctcatatttgcagattgtgatcttgagaaagatgtaaaagcctctgtagaagaatgtatgtttaatagtggccaatcatgtgatgcacctactcgcttattagtagagcgatcttgctatgatgaagttttaaaaattgcaaaagagtcagcagaggctatttctgtagatgaccccaagaaagaaggagatcatttggggcctctatttgataaaattcaattcgaccgcgttcaaaatatgattgatgttggaattaatgaaggggctccacttcttacaggaggtcttggaaagccagagggctttgagcaagggtggtatgtgaaaccaacaatcttccatgatgtgaaaaataacatgcgaattgctcaggaagagatttttggacctgtattagtgattatcccttttgagaatgaggcagaagcgataactatcgcaaatgatactccttacggtttagcggcatatttgcaaact

SEQ ID NO: 214134 - DNA, 652 bp, Unknown
  Bacterial polypeptide expressing nucleotide sequence isolated from the Sargasso Sea
ttggaaaaacttaagcctgggtttgatcaattgcgggaagcacaactggcagatcctatgcccggattggaaacccgccgggatcgtttgcagaggctgctgaagggtctcgaggaacgcgaggaagcctttacccaggcaatttcaaaggatttcggacagcgatccgcttttgaaacggccaactacgacatcaccgtcaccctggctgacatcaaatatcaaaaccgcaatctggcgcgctggatgcggatccggaagcgttcggtcccgcttcacctgatgcccggaagagccaggattgtgcctcaaccgctgggggtagtgggggtgatttctccctggaattttccagttttccttagcctctctcctgttgcgggcgccattgcagcaggcaaccgggtgatgctcaaacccagcgaatggacaccgaaaacctcgacacttcttgcggaattggcatcagaagcttttgaaccggatgaattcgcggtttttgaaggaggaatcgagaccggcagggccttttcggaattgccctttgaccacctgcttttcaccggttccaccagagttgctaaagaagtttcaaactcggcagcgaaaaacctgacgccgctgaccctggaactcggaggtaagtcccccg

SEQ ID NO: 214135 - DNA, 898 bp, Unknown
  Bacterial polypeptide expressing nucleotide sequence isolated from the Sargasso Sea
gtggagtctgcgaagagggcttctgagcaacatgattggcggtataattctgctaataggtccaaaattctccacgatattgctgatcggctggatagcgagcaccagaagttgattgaaattgagataaatgacaacggaaaacggatccgagaagtcaaagctcaaatgtcaggactcggagattggtatcgtcattttgctgttgcattggttcatatggaagttgagaagttaaatcttaatctagatggtgtttcagcctatttggatcttataccgtatggagttgttggcgctattactgcttggaactctcctcttatgattgcggcttggaaagttgcaccagcgcttgcgggcggcaacgctgttgtaatcaagccatcagaatttgcctctgcctccacagttgtttttgctgagttgttgtccgacatcgtgccagatggattaataaatgttgtgactggttatggagacgaggttggcaccgcaattgttgaatcagatgaggttaaaaaagtctcgtttacagggtcggagatcggtggatcaaaagttgccgtgactgctgcaaaacacgtcaaaccggttacattagaactcggcggtaaatcaccgcaaattgtctttagggatgcagatcttgaaaacgcaattaatggtatcatgtctggcatctttttatcaaacggacagagttgtgttgctggatcgaggttaatcattcacgacaaaatcaagcaatcttttgttggtcgtttacaagaagaattgggacgacttcagtttggtgatccgttaagtgaggacactgacattggtccaatcgcgaataaagcacaatttgataaagtgttatcaatgataggtcgggcaaaaaaagagggtgtta

SEQ ID NO: 214136 - DNA, 801 bp, Unknown
  Bacterial polypeptide expressing nucleotide sequence isolated from the Sargasso Sea
aaagtatgaaccgcttggaacagtaggtatgatttctccatggaattttccagtaaatttaacttttgttccactagtttctatttttgccgctggtaatcaagttatgcataaaccaagcgaacacacacctacaacctcattattgctaaaagaactttgtgataaatcttttgatcaaaatgaatttgcaacatttcttggaggtcctgaagttggcgaatcttttactaatttaagttttgatcatcttttgtacacaggcggtggcgcagttgctaaacatgttatggcttctgcatcaaaaaacttagttccatgtacgctggagcttggtgggaaatcaccagtggttattggtaaatcagctgatctaaagacttctgctaagcgcataatgtttggtaaaacgatgaatgctggtcaaatctgtttagcaccagattacgttgttgttcataaagatcagaaagatgattttataaaagaaactaaagatgcagtttcagaatattttcctgatattaaagataacgatgattacacatctataattaatgaaaagcattatgataggctaaaagctctattagatgacgccgttgagaaaggcgctaacattgatgaaataaatccatcaaacgaagattttagccaacaagaattttttaagattccaccaacaattgttactaataccacagatgatatgaaaataatgcaagaagaaatttttggacctttattaccaatcattgaatataaccaaattgaagatgcaacaaaattaataaattctaa

SEQ ID NO: 214137 - DNA, 1033 bp, Unknown
  Bacterial polypeptide expressing nucleotide sequence isolated from the Sargasso Sea
aagctggaaaacccaataagcgattgtatggaaattgatctgccagagactataggcacattccgatggcacgcagaggctgccgataagatctatgacccactatccccgtccggtccaggagtagtctcaatgattgtgcgagagccaattggtgttgttgccgcaatactgccttggaactttccgcttatgatggcagcttggaagttgggacctattcttgcagaaggcaacaccacgattcttaaacctgctgaacaaacttcaatgtcaactatacggcttgctcaacttggaaccgaggcaggaattcccgatggtgtcataaatgttgttccaggtttcggcgaagaggtaggaaaagcattgggtgagcatatgggtatagattgcgtgggcttcacaggctcaaccgaaattggtcgaatgtttttgcgctattcagcagactccaatctgaagcgcgtcttgcttgagtgtggaggcaagaatccactagtggttatgcctgatgccacagatttggatgttgtcgctgatcatgctgcaaactcgatattttggaatatgggagaaaactgttcttccaacagtagggtactaattcataactccttaaaagatgaattcattgaattgctaatagaaagagctcgagattgggtaatagctgatcccctagattctgcttgtcgtttgggccctttgattgaagaggagcacatgaaaaaagttctttcccatatagagaaagcaaaaaaggaaggagcaaaactggtttatggtggtaatagagtaatgaccgattcgggaggatattttattgaacccacaatttttgatgaagttaatccaaaaatgtcgattgccaaggaggaaatattcggcccggttttagcaatcttgacatttgaaacgccggaagaaggtatagctatggccaatgatactgattatggtttgactgcttccgttttcagtgcttcaaacaagacagcccataatgcagctcgccagatacggcaggaac

SEQ ID NO: 214138 - DNA, 623 bp, Unknown
  Bacterial polypeptide expressing nucleotide sequence isolated from the Sargasso Sea
tttggatataagtttcccgtttaaaagtagatataacaattttataaatggtaagtttgttgaaccaaaaactggtcaatatttcgagaatccaactccaataactggagaagttttatgtgaaatggctcgatcaggagctgatgacgtagaggcggcgttagatgctgcacatgcggctaagacagcttggggtcaaacatcattgacagaaaggtcaatgatacttaatcgaattgcagacagaatggaggcaaatcttaaccttctaggcgcagcggagtctttggataatggtaagccaataagggaagcaattgccgcagatataactctttctattgaccatttcagatattttgcgggtgtaatcagagctgaagaaggtacaatttcagagattaatgcaaatacctattcctatcattataaggaaccaatcggggttgtaggacaaattattccttggaatttcccgataacaatggctgcttggaagttagctccggctttggccgcaggtaactgtgtagttatgaagcctgcggagcaaacgccagcctctattatggttttaatggagttaattgcggatctgctacccgaaggtgtagtaaatatag

SEQ ID NO: 214139 - DNA, 823 bp, Unknown
  Bacterial polypeptide expressing nucleotide sequence isolated from the Sargasso Sea
aatgcaaaatctacaaaaattttatattgatggtcaatgggtagtgccacaatctagtaaaaaaatgccagtagtaaatccagctacagaggaaattattagtgaagtcattttaggcaatgaggaagatgtaaatatcgcagtaaaggccgctaaaaatgcatttataagtttttccaaaacttctaaagaagagagaatgaatatattgaaaaatatacgaaaaatttcagaagaaagatttgatgacttagctgatgctatgacaattgagatgggtgcaccaagaaaaatgtcacgtgaagcccaagctgatgcagctataggtcatttggatggttttattagtgcattagaaaaacatgaagaaaaaattgagttatccaatacagatattttattaaaagagccaattggagtatgtggtttaatcactccatggaattggccaataaaccaaatcacattaaaagttttgccagtcattgcaactggctgtacttgtattttaaaaccatcagaacatacaccattatcagcaatggtttatgcagaaatactagataaagctggagtccctgcaggtgttttcaatttagttcatggtgatggtgagggtgtaggcatagccatgtctagacatcctgatattgagatgatgtcgtttaccggctctaaaagaggcggaaagtcagtcacaatagagtctgctgaaactgtcaaaaaggttacacttgagcttggaggcaagtcaccaaatttagtttttgcagattgtgatcttcaggaaaaagtaacagcgtctgtaaatgaatgtatgttt

SEQ ID NO: 214140 - DNA, 150 bp, Unknown
  Bacterial polypeptide expressing nucleotide sequence isolated from the Sargasso Sea
caataatgaatattcttatcatatacctgagccactaggtgtagttggacaaattataccttggaacttcccattactaatggcaacttggaaacttgctccggcattaactgctggtaactgcgtggtattaaaacctgcggagcgaac

SEQ ID NO: 214141 - DNA, 936 bp, Unknown
  Bacterial polypeptide expressing nucleotide sequence isolated from the Sargasso Sea
cagaactatccccagttacagcaaaaatacttaatgaaatagctttagaagcaggacttcctcctggtgtttggaaccttgtgaatggttttggtgaagaggcaggagttgctctaacaaagaataaggatattaaagctgttgccttcgttggagagtcaaaaacaggttcagctataatgcgacaaggatctgaaactttgaaaagagttcactttgaacttggaggtaagaacccagtgatagtttttgatgatgctgatctggaccgtgctttagatgctgtaattttcatgatttattccttaaatggagaaagatgtacttcttcaagtaggcttttgattcagaaaaatattgcagaggaatttattagcaaattggtagatcgagttaataaaattaaggttggcaatcctttagatccagatactgaagttggtcctttaataagtgaaaatcacttagaaaaagttatttcttattttgatatagctaaaagagagggtgcagaaattgctgtcggaggaaatgcacataagaaacctggttggtttgtttcgccaactttatttaaaaatgcaaagcctggaatgagaatttctcaggaagaaatttttggtccggttttaactgctattacctttgaagatgaagaagaagcattaaaaatatcaaatgatgtagaatacggtctgacaggttatatttggacaaataatgtaactagagcattaagattttctgatgagcttgaagctggtatgatttgggttaactctgagaatgttagacacttaccgacaccctttggtggaattaaatcaagtggaataggaagagatggcggagattggtcatttgaattttatatggaacaaaaacatataggttttgcaactgtaaaccatcaaatacctaaattaggtaaataaa

SEQ ID NO: 214142 - DNA, 821 bp, Unknown
  Bacterial polypeptide expressing nucleotide sequence isolated from the Sargasso Sea
gtttgttaatggtaaatgggttgatagtgaaaatggcagcacatttgagagtataaatcctagtataggcaagtcatgggctcttatcccagaagctacagcaaatgatgtgaataatgcagtcgaagctgcttataaagccttcaatgaaggcgaatggtcaaaaattactccaacacaaaggggtaagtatttaagaaaattaggtgatcttttagctgaaaaatcagaggaattaggaaaaattgaatcaattgatacaggaaagttattaaaagaaactcgttggcaagcaaaatacattgcagaatacttccattattacgctggacttgcagacaaaattgaaggctcaacacttccaattgataagccagatatgtacgcatttaatgtaagagaaccacttggtgtagtcgcggccatagttccatggaattcacaattatttttagttgcggttaaaattggaccagctttagctgcaggtaatacagttgtattaaaagcttccgaacatgcctctgctgcaatgttagaatttggtaaggttattgaagagactgggtttcctcctggcgttgtaaatataatttctggtcatggtgatccatgtggcaaaacactcactactcatcctctcgttcatagaataagtttcacaggtggccccgcaacagcaagacatgttattagaaattcagctgagaattttgctgaagtttctttagaattaggaggaaagtcaccgtttattgtttttgaggacgctgatattgagagtgctgtaaacggatcaattgcaggaattttcggtgcga

SEQ ID NO: 214143 - DNA, 864 bp, Unknown
  Bacterial polypeptide expressing nucleotide sequence isolated from the Sargasso Sea
aatgacaaaggttaaaaatgcttttaaaaaaatggattacgaagaagctctcgagagtaacattcagtcatcggagtggatagctgaacataatggccagtttgggcattttattgggggccgatttactaaaccaaaaaacttattcaaaaccattaacccctataataaaaaagaaattgctaaaatttctcagggaactgttgacgacattaaaaaagctgttcgggctgctagctcaggcctagaaaaatggcagtcactcagcccctttcaaagatcaagatatttgtatgctatcgcaagatatcttcaaaaagaatctcgtacaatctctgttttggagtcaatggaaaatggtaaatcaattcgggaaagtagagatattgacatacctcttgcagcaagacacttttactatcacgctggctgggctcaattactcgatgaagaatttcaagactattctgccataggagtatgtgggcaaattattccatggaattttccaatactaatgttagcatggaaggtagctccagcgattgcagcaggcaattcagttatccttaaacctgcagagcaaacctctcttacagccctttattttgcagaaatatgcaaaagaattaagttgccggaaggtgtagtaaacgtagtaaccggcgacggtacaaccggatcacatctcatagctcaaaaggatatttcgaaagtagccttcactggctcaacagaagttggcaaagaaattaagaaaaatatggcaggcactgggaaggcgttgactttagaattaggaggaaaatctccttttatcatatttgaagatgctgatctagatagtgctgttgaaggtttagt

SEQ ID NO: 214144 - DNA, 910 bp, Unknown
  Bacterial polypeptide expressing nucleotide sequence isolated from the Sargasso Sea
aatggtaggcctggggcatctaaaagcagcaatacgatctctcagtaatcatgaatttgaatatactcatggtaaatttcttattagacacgaaccaattggagtatgcggtttaattactccttggaattggcctgtgaaccaagttgtttctaaaattgcgccatgcattgcagcaggatgcactgccatcctaaagccatcagaaattgcacccctatcatcgatggttattgctgagataatacatgaagcgaatgtaccctctggagtttttaatctcgtgaatgggctaggtcccgaggtaggcgaggcaatgtcctcacaccctgatattgatatgatgtcgttcacaggttcaacgcgaggtggagtagcagtagcgaaagcatcagcagacagtgttaaaagagttagtcaggagctgggtggtaaatcccctaacataattcttgacgatgatcactttgaaaagtcagtgatggatggggttgaactttgcatggataatacaggtcaatcgtgcaatgctccgacccgtatgctagttcccgagagccgaaaagaagaagcatttgcactggcagttaaagaagcagaaaataccacagtgggtgacccaaaagctaatgacacgacaatcggaccacttgtaagtgatgttcaattcaacaaagttcagacgctaattgatgctggaatttctgaaggtgctacacttttagtcgggggtactgggaaacctgatggccttaataaaggctactatgttaaaccaacagtttttggtgatgtgactaacgatatgaccattgcacgcgaagaaattttcggaccagttttgtcaatcattacgtattcagatattgacgaggctgtatccatagccaatgattctgaatatggacta

SEQ ID NO: 214145 - DNA, 754 bp, Unknown
  Bacterial polypeptide expressing nucleotide sequence isolated from the Sargasso Sea
gatgccccattcagtacccagcccaaatattcggcagacgcagctgtttattaatggtcagtggattccatcgcagtccggaaagacctttgacacgattaaccccgcaaatgaggaggtgattgcggaggtggcagaaggggatgcggttgatgtcgaatgtgcagttgaagcagcccgtcgggctttcgatgaaggaccttggcctcgtctgaatgctcgggagcgagggaaaataatgcaccggttttgtgatcttattgatgaagaaattgatgaacttgcggctattgagtctcttgataacggaaaaccgctgaaagatgcacgtcatgttgatatcccgttagccgttgagtgcatccggtactatgccggctgggcagataaaatccagggcacgacaatcccggtgaacggcgattttctgtgctacacacgacgtgaaccagtaggtgttgcaggacaaattatcccatggaattttccaattctgatggtggcatggaagtggggcccggcgcttgcggcaggttgtacgcttgtaatgaagcctgctgaacagacgccgttgacctgtcttcggctggctcgtctggcgcagaaagctggggttcctgatggagtcattaacgttgtgccaggctttggtccaacagccggtgctgcaatcgtcaagcatcccggagtagacaagattgcttttactggatctggtgaaacagcgaaggcaatcatgcgtcagtcagcagat

SEQ ID NO: 214146 - DNA, 565 bp, Unknown
  Bacterial polypeptide expressing nucleotide sequence isolated from the Sargasso Sea
tttgaaggttaaatttccatttaaagcaaaatatggaaactacattaacggaaaatttgtagaacctaaatctggaaagtattttgacaatactactccaatcactaatgaagttatctgtaaggtgccacgatcgaatgaaaaagacgttgattttgctttagacgcagctcatgcagcatttcctgcatggggaaaaacatcaatcacagagagatcaaatattctcttaaagattgctgacgttatagagaaaaatttaaacgttttagcaacagcagaatgtttagacaatggtaagccgataagagaatgtatggctgcagatttacctttggtaattgatcattggagatattttgctggagtaataagagcagaggaaggttcagttgctgaaatcagcaacagtgaatattcttatcacatacctgaaccgttaggtgtggttggtcagattataccttggaacttcccattattaatggctacatggaaactagctccagcattggcagcaggaaactgtgtagtattaaaaccagctgaacaaacaccagcatca

SEQ ID NO: 214147 - DNA, 867 bp, Unknown
  Bacterial polypeptide expressing nucleotide sequence isolated from the Sargasso Sea
taatgagtaaaattataaaaaatttcaaaaatatttcttatggtcctgcaccagaagataataaggatgttatgtcctggattaattcacttaataatccaaattatttattcataaatggtgcatgggtaaaatctagatcatctaaaaagttacaagttatcaacccagcaacaaacaaaaaattaacatctatttcaatatctaataaagctgatgttaacgctgctgttggagctgcaaaaaaagcctttaactcttggtcaaaaacttctgcagataaaagagcaaaatatctttatgccctagcgagattaattcaaaaacattctcgatttttatctgtgttagaaacaattgataacggaaagccaataagggaaactagagatatagatattccactagtagcaagacatttttattatcatgctggatgggctaaaaaaattgatacaaaaaaaaataaaccaataggtgtaattggtcagataattccatggaattttcctttattaatgatggcatggaaaattgcaccagctatagcggcaggtaatactgttgttttaaaaccagctgaatttacctcactaacagctctttattttgccgaattatgtcaaaaggctagaattccaaaaggtgtagtaaatattattacaggagatggaagtactggtgagattattacttctcacttagatacaaaaaaaattgcttttacaggatctacagaagttggaaaaaaaataattcaatctacctcaaaacaagaaaaaaaattaacaatggaattaggtggaaaatcaccttttatagtttttgaagatcgcagcatcttgatagtgcagttgaaggtgtagt

SEQ ID NO: 214148 - DNA, 911 bp, Unknown
  Bacterial polypeptide expressing nucleotide sequence isolated from the Sargasso Sea
tgctgctggagcaaaaagattagaggaaagaaagtctgaaattgaaactttgttatcattagatacaggtaatgctttaagaactcaggccataccagaaacaggtgcttccattgaacttacaaatatgtttgctggtttgtctggagagttaaaaggggaaaattatccaaccaatattccaaatactattcattataccactagagatccaattggggttgtttgtgcaatcgtcccttggaatgcaccattatttttaacagttgcaaaaattgctccagctattgtagcaggaaacagtgttgttttaaaaactgctgaacaagctccattttgcgcacttttactatcagagatatttcaacaagaacttcctccgggtgttttaaatgtaatctcaggttatggagaagagtgcggtgaacctttggtaactcatgaaaaagtcagaaaagtaacgtttacaggatcttttactgtaggaaagattatagcacaaaaagctgcccctaaattgtgcccagttactttagaacttggaggaaaaaatccaaatataataatgagtgatgcagatttagatattgcaattcaaggggttattgatggaatgagatatactagacaaggacaagcatgtaccgctggatcaagagtttatattcaggaaaaaatttatgacaaagtgctaaatggagctgttgaaaaattaagtaaattaaaaatgggaaatgctctagatgaaagttctgatattggagcaattatttctgaagaacaacttaaacgaactttacattatatgaatattgcaaaaaaaaactctacaaccaaagttttacacggtggcaatcaatcaacaggtggtgattataaaaacggtttcttttatgaacctacattgatgt

SEQ ID NO: 214149 - DNA, 595 bp, Unknown
  Bacterial polypeptide expressing nucleotide sequence isolated from the Sargasso Sea
ttgaaggttaaatttccatttaaagccaaatatggaaactacattaacggaaaatttgtagaacctaaatcaggaaagtatttcgataatactactcctatcactaatgaagttatctgtaaggtgccacgatcgaatgaaaaagacgtagattttgctcttgacgcagcccacgcagcatttcctgcttggggaaaaacatcaatcactgagagatcaaatatactcttaaagattgctgatgttatagagaaaaatctaaacgttctagcaacagcagagtgtttagacaatggtaagccaatcagagaatgtatggctgcagatttacctttggtaatcgatcattggagatattttgcgggcgtaataagagcagaggaaggttcagtcgctgaaataagtaacagcgaatactcttaccatatacctgagccattaggtgtagttggtcagattataccatggaacttcccattgttaatggctacatggaaattagctccagcactggcagctggaaactgtgtagttttgaaaccagctggaacaaacaccagcatcaattatgcttttaatggaacttataggggat

SEQ ID NO: 214150 - DNA, 805 bp, Unknown
  Bacterial polypeptide expressing nucleotide sequence isolated from the Sargasso Sea
aaacttcaaagagagcatttcttaaatgaaggcccgccttcatatgaattaagaatagatagactagacagagtccaagatatggttattcaaaataaagaaagaataactgaagcattaaacgctgactttggatcaaggtcacctaatcaatctttgatatctgatgtttatgctgttctacctgcattttctcatgcaaaaaaacatttaaagtcctggatgaaggatgagaagagaaaatctaacttcccatttggatttcttggagctaaatcatatattcatagagagccgcttggagtagttggaatgatatctccatggaactttcccatgtacttatctcttgctcctttagctggaatatttagtgcaggcaataatgtaatgcataagcctagtgaatttactcctattacttctgagcttctaaaagaaatttgtgatagtgcttttgatgaaactgaatttgcgacatttctgggtggtcctgatattggagctgcctttactcagcttaagtttgatcatttgttatttactggaagtggtaatattggtaagcatgtaatgcgtgctgcttctgaaaatttagttccattaacgttggaacttggaggaaaatctcctgttatagttagcgatacttcaaatatagatataacagcaagaagagtaatgtttaataagactcttaatgcagggcaaatatgtctggcacctgattatgtttatgtgcatgaaactgagaagaataattttgttgaagcatgcaagaatcaagttaatgaattttataacg

SEQ ID NO: 214151 - DNA, 910 bp, Unknown
  Bacterial polypeptide expressing nucleotide sequence isolated from the Sargasso Sea
agaattgctgacaagatgagagaaaagcaagacatacttgctaaatggatgacacttgaagttggaaaaccatttgcagaggcaaaaggtgaagttaacggtgctgcagatatttatgagtggaatgcagaggagacaaaaagaatttatggtcaaacagttgaaagcagatttgaagatacaagagttcatgtttattatcagccggttggcgttgttgcagctttagtaccatggaatttccctttagtcctctcagctagaaaaatttctacagcgcttgcagcaggttgttcagtaattgtaaaacctgatgtaataacaccaggtgttgtaatggaacaggtagaaatctgtagagagtgtggagtgcctcccggagttgttaatttattatcaggagacccaccaagcatagcacaacaattaatcgcttcagatattgtaaaaaaaatatctattacaggttcatctagggttggtaaattaattttaaaacaagctgcagataaagttcaaagagtaactatggaactaagcggacattcaccttttatagtttttgatgatgctgatattaaaaaagcagctgaaatggccattgctgcaaagtttagaaataatggacaagtttgtatttccccaaacagattttatatacaagaaaagaaaaaagaagaatttgtaaatctttttgtagaaaaaacaaaaaaattaaaaattggtgatggtatggatccatcagttcaacttggtcctttaacaacaaaaaaaagattaaatgaaattgaagatttagtcgaaactacaaaaaaagagggtgcgaaagttttattaggtggcaaaagacctaaaggatttaataagggattttattacgagccaactatttttgacgatgtaaaagatg

SEQ ID NO: 214152 - DNA, 876 bp, Unknown
  Bacterial polypeptide expressing nucleotide sequence isolated from the Sargasso Sea
ttataggtccgatggaacatgctaaaaagaatttaaaaaaatggatgaaaacagaaaaaagaaaggccgctatagctcctctaggttctgcactttctctcttgggcgcaaaagctgaagtaaggtatcaacctaagggagttgtcggagcaataagtccttggaatttccctatgaatcttgctttagctcctttagcagggatcatttcggctggaaatagagttatgcataagccttctgaattaactcccgcaacatctgatctgctaaaacaaatgattgaagagtattttgatgaaggcgaaatggctgtttttgttggagatgcagaagtaggagcagcctttagtggactggcctttgatcatttaatttttacgggtggcacgtcaattgctaagcatgtaatgaaggctgcttctgaaaatctagtgcctttgactttagaattgggtggaaagtcaccggttgtagtaggtaaaaatgcaaaaattaaggaaactgcacaaagagtgatgcaaggcaaaaccatgaatgcagggcagatctgcttggctccagactatgctttagtcccggaagaaaaggttgaagaatttgttcaagctagtgttgaagcgacttccgagatgtacccagaaatgaaagacaacgatgacttcacgtcaataataaatcaacgtcactacgatagaattcaaagctatctagaagatgctaaagagaagggtgctgatgtggtagaaatcaacccatctaatgaggatttttcgcagcagcctcatcataaaattccaccaacaattgtattaaacccttcagaagacatgaaaattatgcaagaggagatatttggtccagtcttccagtaaa

SEQ ID NO: 214153 - DNA, 878 bp, Unknown
  Bacterial polypeptide expressing nucleotide sequence isolated from the Sargasso Sea
tatgaattatgtaataaggaaaccaatcggcgtagtgggtttgatctcaccatggaatctacccctttatttgctgacttggaaaatcgctcccgcattattgatgggtaattccataattgcaaaacctagtgaaataacgccacttaccgcacaccactttagcaaattactcggtgagattgattttccaaaaggtgtagtaaatattgtacacggctatggccctgaagtgggtcaggctattgttgaacatcctgatatcaaagcaatatcctttactggcggaactatgactggacgaatagttgcaagtactgctgccccgatgttcaaaaaactcagtcttgaacttggaggtaagaactccactattgttcttgatgatgctgattttgaatcagctgtacctggtgttgcgcgctctggttttcttaacagtgggcaaatctgcctatgtggatcaagaattttgattcatgaatcgatttatgacaaatttgtgccattacttctagaagaggtttccaacatggatattggtcctgtgatttcagaagaacatcgtactaaggttctatcatacatagaactagcaaagcaagaaggtggccaaatactgctgggtggaaaaattatcgataagcccggcgcatggattgaacctactgtgattgctggccttcctaccaattcaagaacttcgaccgaggaaatatttggccctgtagttacattacattccttttcaagcgatgatgaggcgattgaaattgcaaattctaccgagtatgggcttgcaggttcggtctggagtaaagaacgaggcaggcagattgcagagcgcattgaaagcgggatggtatgggtcaatactt

SEQ ID NO: 214154 - DNA, 727 bp, Unknown
  Bacterial polypeptide expressing nucleotide sequence isolated from the Sargasso Sea
atggataaatgggaatattcagaatcaattgaatcagatagtattgtttctatccaatcaaaatatgggcattttattgatggtaaattctcaacaccaaattctaaaaaatatctcaaaactgtatccccatctactgaagaagtattagcttctatatcaattggaaataagaatgatgtagattcagcagtaaattcggcaaaagaaggattgaagacttggtcaaaaaccgcacctagtgaaagggctaaatatctatataaattagcaagattaatacaagagagatcaagagaattcgctgtacttgaaagcatggatggtggaaagcccattaaggaatcaagagattttgacttacctcaagttgctgccaattttttctattttgctggctgggctgacaaattagatatttcatggggtactaaggaaatgaaaccatatggcgttgtcgggcagattatcccgtggaattttcctttgctcatgcttgcttggaaggtagcaccagctctagctactggaaacacggttgtattaaaacctgctgagacaacacctttaacagctttattatttgcagagctttgtgaagaaataggtcttcccaaaggagtctttaacttagttaccggagatggaactacaggttcagaattagtgaaccacgagggtatttcaaaaattgcatttacaggatcaacatctgttgaaaatatat

SEQ ID NO: 214155 - DNA, 736 bp, Unknown
  Bacterial polypeptide expressing nucleotide sequence isolated from the Sargasso Sea
aagatacttcatgcttgtgctgacaaagctatacctgctgttgttgaattaggtggtaagtcagctggtatagtataccctgacgcagatctaaatgaagttttggagagtgcacgttcaggaatatttagtgttgcaggacaaatttgtacagcgatgtctagattggtagttcataaatcaatcaaagatgaattagtagataagcttgttgatatgagtaaatcgttaaaaattggacctggtatagaaaaagatacagacctaactccagttatatcagaaaatcaacttcaaaaagttgaaggttatgcaagatcaggaatccaagaaggagcagaagcggcatatggaggaaaaagattagaacgtgatggatattttatggaaccaacagttctaaataatgttaaacaaagtatgactgtagccagagaagaaatttttggcccggtactctcagttcttgaatatgaagatcaagaagaagcaattgatattgctaatgatactgagtatggtttaggtgctggagtttttacaaaagatcttagaaaagcatcttggactgcaagcaaattagaagctggtcaagtatatgtaaacaaatggtttaccggaaatcatgcaactccttttggaggttataaacaatcaggatatagccgtgaaaaaggagtagatggacttaaatcttatcttcaagtcaaaaatgttggtattagtttaggttaaa

SEQ ID NO: 214156 - DNA, 712 bp, Unknown
  Bacterial polypeptide expressing nucleotide sequence isolated from the Sargasso Sea
ttgaatgttagggctaaaatacctaaaagaggtaaatatggaacatcacaaaataaaggaattttagcaaaacaaaaagctttttttattaaaaatggacccccgtcctatgaaatgagaattgataggttagatagaatgaaatcattgattatggaaaatcgctataaaattgtagatgcgttaaatgaagactttggtgtcagatctaagaatcagtctatggctacagatgtttatacaattgttccgagcattgaatatgctaagaagaatctaaaaaagtggatggctggctcaaaaagaaaagccaattttccacttggatttctaggagctaaagcttctgtagactatgaacctcttggtacagttgggatgatttctccatggaactttccggtttttttaactttctcacctgctgcatcaatttttgctgctggaaatcagattatgcataagccaagtgagtatacagagcagacatcggctttgttaaaagaattatgtgacactgcttttgatgaagaagaattcgcaacaattcttggaggtcctgatgtaggtgcatcctttacacaacaaaagtttgatcaccttctatatacaggcagtggcgcggtagcaaaacatattatgaaagctgcttctgaaaatttagttccagttacacttgaacttgggggcaaatctcctgtcatagtcagca

SEQ ID NO: 214157 - DNA, 635 bp, Unknown
  Bacterial polypeptide expressing nucleotide sequence isolated from the Sargasso Sea
tttagatagtgcaagaagtggaatctttggagttgcggggcaaatttgtacagcaatgtcacgtcttgtagtacataaatcgataaaagatgaactagtagataaattagttgatttaagtaaatcgctaaaaattggtccaggaattgataaagatactgatttaactccagttatatctgaaaatcaattacaaaaagttgaaggttacgcaagatcaggaattcaagagggagcagaagctgcacatggtggaaaaagagttaatcgagaaggttactttatggagccaactgttttgaataatgtaaaacaagatatgacagtagcaagagaagaaatatttggtccagtgctttcagtgttagaatataatgatgaagaggaggcaataaaaattgccaacgatacagattatggactaggttctggtgtttttactaaagatctaaaaaaagcttcgtggacagcaagtaaattagaggctggacaggtctatgttaataaatggtttactggtaatcatgcaactccatttggaggctataaacaatcaggctatagcagagaaaaaggtgtggatggattaaaatcttatctgcaagttaaaaacgtaggtattagtttaagctaat

SEQ ID NO: 214158 - DNA, 777 bp, Unknown
  Bacterial polypeptide expressing nucleotide sequence isolated from the Sargasso Sea
taatggaaaaagtataagagaaactacggccgctgacatacctttgggtattgatcattttagatatttcgcaagtgttattagagctcaggagggaactactgctgaaattaataatgatactatgtcttatctgataccagagcccttgggtgttgttggccaaataataccttggaattttccattattgatggctatttggaaattagctccagctttggcgacaggtaactgtgtggttttaaagccagcagaacaaacacctgcatctataatggttctaatggagttaataggtcatttgattcctgcaggagtagtaaatgtagttaatggttatggccttgaagcaggaaagcctcttgcctccagcactagaatagccaaaattgcattcactggtgagacaactacaggtagaatgatcttacaatatgcaagtcaaaacttaattccaagtacgttagaacttggtggtaagtctccaaatatcttctttaaagatattgcagatgctgatgacgatttctttgacaaatgtatcgaaggtttcgtgatgtttgcccttaatcaaggtgaagtatgtacatgcccaagtagagctttaattcacgaagatatttatgataaattcatagctcgttgtattgaaagaactaaagctattgttcagggtgacccattagactcaaatacaatgatcggtgctatggcttcagcagaacagtatgaaaaagttaaatcttacttagatcttggtaaaaaagagggagc

SEQ ID NO: 214159 - DNA, 914 bp, Unknown
  Bacterial polypeptide expressing nucleotide sequence isolated from the Sargasso Sea
aatgaggaacagagtaaatcagggcgctaatcatattaaaaactttatcaaaacattaaagaaattcgaatttgaatctacttttgacgaagaatcagataatcatattgtttatgagcctataggggtgtgtgcattaataactccttggaattggccaattaatcaaattactctaaaagtaattcccgctttagctgctggatgtacaatggtcttaaaaccatctgaaattgctcctttatctggaatggtttttgcagaaatggttcatgaagcaggatttccttcaggtgtatttaatttagttaatggaaatggtgaaggtgtgggaactcaattatctggtcatccaaaaattgatatggtctcatttactggatccactagagcaggtaaattaattactaaaaattctgctgatactattaaaagagttactttagaacttggaggcaaaggcggtaacatagtttttgctgattctgatcctgatgctgttaagcgaggtgtaaagcatgtaatgggaaattcagggcaatcttgtaatcatccaacgcgtatgcttgtagagaaatcaatctatgagagagctgttaaagaagctattgaacaagcacaaaatactaaagttaatgttgcttcaaaaaaaggagatcatataggaccagtagtttcaaaagttcaatatgataaaattcaaaacttaattcatactggaataaaagagggtgcaaatttagttgctggtggtccagatagacctgatgatttagaaaagggatattttgttaaacctacaattttttcagatgttaataatgatatgacaattgctcgtgaagaaatatttggtcctgttttatcaattataccatttgaaactgaagaagaggcaatagctatcactaatg

SEQ ID NO: 214160 - DNA, 865 bp, Unknown
  Bacterial polypeptide expressing nucleotide sequence isolated from the Sargasso Sea
gatgttgataaagcattaaaatctgctgcaaaaggtttagaagtttggaagcaaacaccaccatggcaaagatcttatattattagaaaaatagcagacaagatgagagaaaaacaagatgtcctagctaaatggatgactctcgaggtaggtaaaccgtttgcggaagccaaaggtgaagttggtggagctgcagatatttttgaatggaacgctgaagaaacaaaaagaatttatggacaaacagttgaaagtagatttgcagatacaagagtacatgtttattatcaaccaataggagttgttgcagctttaacaccttggaattttccattagttttgtcttcaagaaaaatttcgacagctttagcagcaggatgttcggtaatagttaagccagatgttataacgccaggaacagtaatggaacttatcgatatatgtagagaatgtggagttcctcctggagtagtaaatttattatctggagatcccccaagtattgcacaacaattaatttcatcagatataattaaaaaaatttcagtaactggatcaacaagggttggaaaattaattcttaaacaagcagctgataaggtacaaagagttacaatggaacttagcggtcattctccatttattgtttttgatgatgcagatattcaaaaagctactgatatggcaatttctgcaaaatatagaaataatggacaagtttgtatttcaccaaatagattttatatccaagaaagtaaaaaagatgagtttgtaaatatgtttgttgaaaaaacaaaaaaattaaaaataggtgatggtatggatccaagtgttcagcttggtcctttaacaacaaaaaaaaaaa

SEQ ID NO: 214161 - DNA, 802 bp, Unknown
  Bacterial polypeptide expressing nucleotide sequence isolated from the Sargasso Sea
aatgaagctctgcctcattatataaatgggagtaagttgttgagtaaatcaaatgagttttttgaaaatatttctccaataaataatgagataataggttcggttgcctcaggtggctcggaggatattaatgatgcttgtaatgcggcttcagcggcatttgatgaatggaaaaacatctctggcaaagagagaaaaaaattactgcataaaatagccgacggaatagaggatcgcgccagagaaattgcgcttatagagagctatgattcaggtcaggcaattcgttttatgagtaaggcagcaataagaagtgcaacaaatttccgtttttttgcagatatggctcctaatgcccgcgatggaaaatcacttccagctgatgaacatttaaactattcaattaggcaacctattggacctgttggtgtgattactccctggaatactccttttatgctaacgacatggaagatagctcctgctctagcatctggatgcacagtagttcataagccagctgaatggtcacctctttcatcaatgattttggcagatattacgaaagaggcaggagtcccagatggagtcttgaacgtagttcatggttttggtgaaacagcgggtaaatcattaactgaaaatgaaaaaatcaaagcaattgcatttgtaggtgaatcatccacaggttcaaagattatgaaacaaggtgcagattcattgaaaagagttcattttgaactcggaggaaagaatcctgttatagtttttgatgatgctgatttggataaagcattagatg

SEQ ID NO: 214162 - DNA, 613 bp, Unknown
  Bacterial polypeptide expressing nucleotide sequence isolated from the Sargasso Sea
tatggataaagtcatcaaaaattttaagaatatttcttatggccccgctccagaagatagttctgaagtttattcctggataaataatttaagtagtccaaataaaatttttataaataataaatttattaagtcatctggaaataaaaaattaaatataataaatccaagtaataaaaaaaatattggtagattatcggtttcttcaaaaaaagatgtagatctagctgtaaaagctgcaaaaaatgcatttccaaaatggtctaaattatcaccatttgagcgatcaaaatatttatatgctttagcaagaatgatacaaaaaaattccagatttttatctgttttagaaactattgataatggaaaaccgattagagaaacaagagacattgatattcctcttgtggcaaggcatttttattatcatgctggatggtctgctaaagatacaggttcaaaaaataaacctatcggtgttgttggacaaataattccgtggaactttcctttactaatgttagcatggaaagttgcacctgctttagcaacgggtaatactgttgtcttaaaaccagctgaatatacatctcttactgcattattttttgca

SEQ ID NO: 214163 - DNA, 898 bp, Unknown
  Bacterial polypeptide expressing nucleotide sequence isolated from the Sargasso Sea
cttgcaatatcttttaccaaaagctgggttaagccagaaccaaagggaaacattttaataatttcaccctggaactatccagttatgctctgccttaaccctctcattgccgcaatagcgtcgggcaacaccgctataatcaaaccctcagagcttactcccgcctctggagagcttgtaaaagccttaatagaaaaaaccttttcatctgatgaggttgctgtttttttgggcgagaaagatgtagcacaaaaacttttaaaccttcccttcaaccatataatgtttactggtagcccaaaggttggaaaggttgttatggaggcggcttcgcgacatcttgcgggcgtaacccttgagctgggtggcaagtctcctgttattgttgacaagcacgcaaacataaaagatgctgcgtggaaaatttctttttttaagtttgcaaacgcgggtcaaacatgcactgcaccagattatattttgtgcgacgaggctgtacatgaagaactagttgctgctttacaaaaaaacatgtctgaattctttcctggcgggatagatgaagccgccaaagactattgttctattgctaatgaacaccactttaacagactaaaaaatgcgcttgcagaagctgttagcggtggagcaagagttgcttgcggcggtgaaaccagtcaaggcggtttatatttttctccggctgttttaaccaacgttggctatgataacccaattatggaggaagagatttttggaccaattcttccggttgttaaggtcaaaagccttggtgagtcaattaattatgtaaacagcaacgaaaaacctttggccctatatctctttagctccaaacgttcttcccacaatagggttttaaaaaatacttcaagcg

SEQ ID NO: 214164 - DNA, 520 bp, Unknown
  Bacterial polypeptide expressing nucleotide sequence isolated from the Sargasso Sea
aaagttagcagcttcaataaaagtaggccctggtgatgaagaaggtgttgacctaacacctgtaatatctgaagaacagctccaaaaagtagaaaattacgcgcgttcaggtttacaagcgggtgcaaaagcagtctcaggtggcaacagagtagatagaaaaggtttcttctttgaacccactatttattcagatgtaaagcccaatatgacaattgcacaggaagaaatttttggaccattcttatctgttttagattatgaagatcatgaagaagcaatccatattgcaaatgatacagattatggtttagcggctggtgtgtttactaaagatgttgacatggctacaaaaacagcttcacgtttaaatggtggtcaagtttatgtgaatagttggttcacaggaagcattgccactccatttggaggttataaacaatcaggttacagtcgtgagaaaggtcaacaagcaattaaaagctacctgcagttgaagaatgtaggaatacaactttaa

SEQ ID NO: 214165 - DNA, 944 bp, Unknown
  Bacterial polypeptide expressing nucleotide sequence isolated from the Sargasso Sea
tttccgtttttttgcagacatggctcctaatgcctgcgatggaaaatcacttccggctgatgagcatttaaactattcaattaggcaacctattggacctgttggtgtaattactccctggaatactccttttatgctgacaacctggaagatagctcctgctctagcgtctggatgcacagtagttcataagccagctgaatggtcacctctctcatcaatgattttggcagatatcacgaaagaagtaggactcccagatggagtcttgaacgtagttcatggttttggtgaaacagcgggtaaatcattaactgaaaatgaaaaaatcaaagctattgcatttgtaggtgagtcatctacaggctcaaagattatgaaacagggtgcagattcattgaaaagggttcattttgaactcggaggaaagaatcctgttattgtttttgatgatgctgatttggataaagcattagatgcaactgtctttatgatattcagtctcaatggcgaacgatgcacatcatccagtagacttctgattcaagagtcaatcaaagatgatttcataaacaaattatgcgacaggatagcaaaactaaaagttggacatccccttgatccagatactgaaattggccctttgattcatgaaaaacacaaacagaaagttctcaattattttgctctagcaaaaaaagagggagctacgatcaaagctggcggcaatgaaatggcatcaaacagtaatggaaattatgttgagccaacgttattcactgatgtgagtaatgacatgcgtgtcgctcaagaggagatatttggcccagttttgagtgcaatcactttcaaaaatgaagctgaggcactagaaattgcaaatgatattgactttggcttagcggcttatctttggactaatgatgtgggaagaagtttgagat

SEQ ID NO: 214166 - DNA, 832 bp, Unknown
  Bacterial polypeptide expressing nucleotide sequence isolated from the Sargasso Sea
ttcttaagcaaagataaaaagctttatattaacggcaagtgggttgatccaaattcaaataagtcatttgatgtggaagatcctgcaactggaaaaaaaatagctacttgcgcagctggtaatagcaaagatgttgacgcagctgtaaaagcggcaagaaaagcatttgattcaggtgtgtggacaactatgtcaaatagtgaaaaaggaaaaataatttggaaaattggagaattgattgataaacacaatgaagaacttgcacagttagaatctcttgataacggaaagcctgtagcagtggctggagctgcagatgttccattatcctctgatattttcagatatatggctggttgggctacaaaaattgaaggaaacactattccttattcatgtttgtatacacctggagcacaataccatagttatacattaagagaaccagttggtgtttgtggacagattataccatggaattttccattattaatggcagcttggaaaattgctccagcattaaccgctggttgtacgattattctaaaaccagctgaacaaacacctttgtcagctcttcgattaacagaaataattcatgatgctggcatcttacctgaaggtgttttaaatgtagtaacaggttttggtgaagaagcaggtgctcctttagctgaacacccattagttgataaggtagcatttacaggatccacagaagttggaaaaattataactaaagcagcctctggaaatttaaaaaaagtttctttagaacttggtggaaaatctccaactataattttccctgatgcagatattgaagctgcaa

SEQ ID NO: 214167 - DNA, 790 bp, Unknown
  Bacterial polypeptide expressing nucleotide sequence isolated from the Sargasso Sea
aaaaacagctgaacaagctccattttgtgctcttctactatcggagatatttcaacaagaacttcctccgggtgttttaaatgtaatttcaggctatggagaagagtgtggcgaacctcttgtaactcatgaaaaagtaagaaaagtaacgttcactggatcttttactgtaggcaagattatagcgcaaaaagcagctcctaaattatgtccagttactttagagcttggaggaaaaaatccaaatataataatgagtgatgcagatttagatattgcaattcaaggggttattgatggaatgagatatactcgacaaggacaagcatgtactgctggttcaagagtttatattcaggaaaaaatttatgatcaagtactgggtggagctgctgaaaaattaagtaaattaaaaatgggtaatgccctagatgaaagttctgacattggagcaattatttccgaagaacaacttaaacgaactttacattatatggatattgccaaaaaaaactctacaaccaatgttgtgtatggtggcaatcaaataacaggtggtgattataaaaatggtttcttctatgaacctacattgatgtcaggtgttccagtaagctctccagtttgtcaagaagaaatatttggtcctgttgcttgtgcaataccatttaaaacatttgatgaagtaatgaacagtgcgaatgatacaccatttggattatcagcggtattgtggacacaaaatttatctagagctttacagtttgttgaagaaatcgaggcaggtttt

SEQ ID NO: 214168 - DNA, 784 bp, Unknown
  Bacterial polypeptide expressing nucleotide sequence isolated from the Sargasso Sea
tttgaaggttaaatttccatttaaagctaaatatggaaactacattaacggaaaatttgtagaacctaaatctggaaagtatttcgataatactactcctatcactaatgaagttatctgtaaggtgccacgatcgaacgaaaaagacgttgattttgctttagacgcagctcacgcagcatttcctgcatggggaaaaacatcaatcacagagagatcaaatattctcttaaagattgctgatgtaatagagaaaaatctaaacgttttagcgacagcagaatgtttggacaatggtaagccaatcagagaatgtatggctgcagatttacctttggtaattgatcattggagatattttgcaggagtaataagagcagaggaaggttcagttgctgaaatcagtaatagtgaatattcttaccacatacctgagccattaggtgtagttggtcagatcataccatggaacttcccattattaatggctacttggaaacttgctccagcgttggcggcaggaaactgtgtagtgctaaaaccagctgaacaaacaccagcatcaataatgcttttaatggaacttattggagatctattaccagcaggtgttgtaaacgttgtaagtggttacggccttgaagcgggaaaaccattagcttcttctaagagaattaagaagatagcttttacaggtgaaactactactggacgtttgataatgcagtatgcatctcaaaacttaataccaattactttggaattaggtggtaaatcaccaaat

SEQ ID NO: 214169 - DNA, 904 bp, Unknown
  Bacterial polypeptide expressing nucleotide sequence isolated from the Sargasso Sea
gaagctggcttcccaagcggggttattaattgtgtcactggctttggactggaggtaggacaacctttggttgatcataaagatgtgagcaaggtagcgttcactggatcagatatttcaggacaaaaaatatatgaaagtgctgctaaaaaaatcatgcccgtaacattagaactgggaggaaaatctccaaacatcgtttttgatgacgctgatatggatgctgcagtcatgggcgttatttcaggaatatttgctgctactgggcagacgtgcatagctggctcgagattactgttacatgaagacatacatgatgaatttgtctcaaaattagtttcggttgccaaagaagcctctattggtgatccaatgatggaaagtacaaatgttggaccagtgactacagaaccacagttcaaaaagattatcgattacatagacatagcaaaaagtgagggggctacatgcgtcttaggaggaaacaaatacaatggaccaggttccaaagggcaacgatttgtggaaccaacaatttttactgacgtaaagaataacatgagaattgctcaagaggaagtattcgggccagtcttatcaattattcgttttaaggacgaaaaagaagctatccagatcggtaatgatatactttttggtcttgctgctggcgtttggactagcaatatcggtagagctcttaggatggctgataagcttaaagctggaactatttgggttaacacttacagagcagtaagctatatgtctccttttggtggctataaaagatcgggtcagggtcgtgaaagcggccaagagtgcattaaggagtttttggaaacaaaatcagtgtggattagtcatgaaacctcatcagcaaatcccttcgttattaagtaaa

SEQ ID NO: 214170 - DNA, 797 bp, Unknown
  Bacterial polypeptide expressing nucleotide sequence isolated from the Sargasso Sea
ggtaggatttccgcccggggttataaatgtagtaacgggctttggcgcagatgtcggcgccccgctagtcgagcatcctaaggttgctaaagttgcctttaccggatccgataccacaggcacgcaaatttatcaggccgcggctaaacatatgaagcacgttacaatggagctgggcggcaaatcacctaatatcgttttcgatgatgctgaggtagataatgctgtaaaaggagctatctctggtatttttgcggcaacaggccagacatgtatcgcgggttcgcgtcttcttgtgcaggaaagtattcatgacgagtttgtcgacaggctggtagcgctggcggagaccgctaaaatgggtgaccccatgaatatggatactcaggtcgggccagttactaatatcccgcaatttgagaagatccttgactacatcaaaattgccaagggcgaaggtgcagaggcggtactcggcggcgcaaaggctaatgcgttggaatgcggtgacggttggtttgtcgagcccaccatctttactggggtaaaaaattcaatgcgaattgcccaggaagaagtttttggtccagtgttgtcagtgatccctttcaaagacgaagaagaagccatcgagattggaaatgatgttgtctatggcttggctgccggcgtttggacccaaaatattcgccgagcgatgattatggcggacagattggaagcgggaacggtttgggtaaacacttatcgagcggtaagttatatgtcaccatttggtgggtacaaacaatcgggac

SEQ ID NO: 214171 - DNA, 899 bp, Unknown
  Bacterial polypeptide expressing nucleotide sequence isolated from the Sargasso Sea
acttaataacgcaaaaagattaacggataaaattttaattgatggcaaattaatatctgctcaaacaaataataagataccggtattaaatccaagcacaggtgacaatattggatctgctcctcagtgtgataaaaatgatgtaaatattgcagttgagtcagcatacaaagcttttcaaaaatggaaaaaaataccagcaagagaaagaggaaaaatggttgctgctggtgcaaaaagattagaggaaagaaagtctgaaattgaaactttattatcattagatacaggtaatgctttaagaacacaggctataccagaaacggctgcttccattgaacttacaaatatgtttgcaggtttatctggagagctaaaaggagaaaattatcctaccaatattccaaacagtattcattatactactagagatccaataggggttgtttgtgcaatcgtcccttggaatgcaccattatttttaacagttgcaaaaatcgctccagctattgtagcaggaaacagtgttgttttaaaaactgctgaacaagctccattttgcgcacttttattatcagagatatttcaacaagaacttcctccgggtgttttaaatgtaatctcaggttatggagaagagtgtggcgaacctttggtaactcatgaaaaagtcagaaaagtaacgtttacaggatcttttgctgttggaaagattatagcacaaaaagctgcccctaaattgtgcccagttactctagaacttggaggaaaaaatccaaatataataatgagtgatgcagatttagatattgcaattcaagggggtattgatggaatgagatatactcgacaagggcaagcatgtactgctggatcaagagtttatattcaggaaaaaa

SEQ ID NO: 214172 - DNA, 579 bp, Unknown
  Bacterial polypeptide expressing nucleotide sequence isolated from the Sargasso Sea
tttgaaggttaaatttccatttaaagctaagtatggaaactacattaatggaaaatttgtagaacctaaatcaggaaagtattttgataatactactcctatcactaatgaagttatctgtaaggtgccacgatcgaacgataaagacgtcgattttgctttagacgcagctcatgcagcatttcctgcatggggaaaaacatcaatcacagaaagatcaaatattcttttgaagattgctgatgtaatagagaaaaatcttaacgttttagcaacagcagaatgtttagacaatggaaagccaatcagagaatgtatggcagcagacttacctttggtaattgatcattggagatattttgcaggagtaattagagcagaggaaggttcagttgcagaaataagcaacagtgaatactcttaccacatacctgagccattaggtgtagttggtcagataataccatggaacttcccattattaatggctacatggaagctagctccagcattggcagcaggaaactgtgtagtgttaaagccagctgagcaaactccagcatcaataatgttgttaat

SEQ ID NO: 214173 - DNA, 913 bp, Unknown
  Bacterial polypeptide expressing nucleotide sequence isolated from the Sargasso Sea
ctgggtgctaaatcctatataaaatacgaacctctaggaacagtagggatgatctctccatggaattttccagttaacctagcctttgtacccttggtatctatatttgctgctggaaatcaagtgatgcacaaaccaagcgaacatacaccattaacctctgcattattaaaagatttatgtgataaagcctatgatgaggttgaatttgcaacctttcttggtggaccagaagtaggagctgcttttaccaagctaaactttgatcatcttctttatactggtggagggtctgttgctaagcatgtcatgaatgcagcttctgaaaatttagttccacttacccttgaacttggtgggaaatctccagtagtgttaggaaaatctgctgatttaaaaacctctgcaaaaagaattatgtttggtaagacattaaatgcaggtcaaatttgtttagcgcctgattacgtagttgttcataaagatcaaaaaaatgattttatcaaggaaactaaagatgctgtttctgagtactatccaaaaattaaagacaatgatgattacacatctattatcaatgaaagtcattacaatcgattaaaagatatgattgatgatgcaatagaaaagggtgcaacagttgaagaaataaatccagctaatgaagatttctctcagcaagaattttataaaataccaccaacgattgtttcaaatacaaccgatgatatgaaaattatgcaagaggagatatttggtcctttattgcctgttgttgaatatgatgaaattgatgaagcaacacaattaattaattcaaaagatagaccactaggtctttattattttggcaatgataaaactgaagagaataatttattaaataaaacttcatcaggtggagtaacagtta

SEQ ID NO: 214174 - DNA, 714 bp, Unknown
  Bacterial polypeptide expressing nucleotide sequence isolated from the Sargasso Sea
catggcagttaactataaatctattgcaaaaaaattaaaatttgaaggtcgagccttcataaatgggaagtatgttaatgctatagatggtaaaaaatttgaaacaataaatcctgctactggagaaaagctttgctcagttgctaaatgtaatcataaagatgttaatttagcagttaaagtttcaaggaaagcttttaatagtggtgtttggtcgaaaagttcaccagagcatagaaaagaagttttattaaaatttgcagaattacttagaaagcatggagatgaaaattcagttttagaatgtgttgatactggaaagttggtgacagattgcattaatgaagttgcaaatgatgctccaatgcattttcaatggtatggagaattgattgataaagtatttggaaaagttggtcctacagagccatccattacaagtttaatcgttaaagaaccaattggtgttgttgcaggaattgttccttggaactttcctttaatgatggctgtttggaaaatggcaccagctcttgctgcaggctgctcagtgattataaaaccagcagaagacactccattaacagcaattcgagttgcaaaaatagcccaagaagctggaattccagatggtgttttaaatgtgcttcctggttatggtgatgttggtgaggcattaggtaggcataaagatgttgatgcagtttcttttac

SEQ ID NO: 214175 - DNA, 451 bp, Unknown
  Bacterial polypeptide expressing nucleotide sequence isolated from the Sargasso Sea
actgtcgatcaaagtcatagtgatctaagaagggcaagaggggcggctatatcgatgattcccacttctactggtgcagctaaagctcttagtttagttttgccaaaaatgaaaggaaagcttgatggaacagcaataagagttccaacgcctaatgtgtcactaattgattttacatttacctctaagaagaaaacaactgttgaaaaaattaacaaactagcaattaatgccagtaaaactaaggagttaaaaaatattttaacaactaatgaattgccattagtttcaatagattttaatcacaacccaagtagttctgtgtttgatttaactcaaactcaagttcttaatggtagattttgcagagttttgtcctggtatgataatgaatggggtttctcaaatcgaatgattgaaacgatgcttgatttaaaaaaattattatagg

SEQ ID NO: 214176 - DNA, 903 bp, Unknown
  Bacterial polypeptide expressing nucleotide sequence isolated from the Sargasso Sea
gcagatatttttgaatggaatggctgaagaaacaaaaagaatttatggtcaaactgtagaaagtagatttaaagatacaagagtacatgtttattatcaacctgttggagtagttgctgctttgtcaccctggaattttccattagtgctatcttctagaaaaatttctactgctcttgctgctggatgttcagttattattaaaccagatgtaataactcctggaaccgttatggagttagttgatatatgtaatgaatgtggagtgccgcctggcgtagtcaatttactatcaggagatccaccaagtattgcttcacaacttattaaatcagatatagttaaaaaaatttcaattactggttcatcaagagttggtaaattaatattaaaacaagcagcagataaagttcaaagagtaactatggagttaagtggtcattctccttttatagtttttgatgatgcagatattaaaaaagcaaccgatatggcggttgctgctaagtttagaaatacagggcaagtttgtatctctccaaataggttttatatacaagaaagtaaaaaagaagaatttgtaaatttgtttgttgaaaaaacaaaaaaactaaaaatgggaaatggtatggaaccagatgttcagttgggacctattactacaaagaaaagattaaatgaaattgaagaattagttgaaactacaaaaaaagaaggagcaaaagtattattaggtggaaaaagaccttctgggttcaacaaaggttatttttatgaacctacaatatttgataatgtaaaagatgattttactataatgaaagtagaaccatttggtccactagttccaatgttatcttttaaaacttttgatgaagttattgaaagagcaaataaccacga

SEQ ID NO: 214177 - DNA, 762 bp, Unknown
  Bacterial polypeptide expressing nucleotide sequence isolated from the Sargasso Sea
ggtcaacgcgagcaggcaccctggtcgctcagaatgcggcgcccaccgtgaagcgcatcagccaagagctaggcggaaagtctccgaacattatcttagaagacgcagacctagaaaaagcagtcaaaggcggcgtcatgcacatgtataacaacagcggtcaaagctgcaacgctcctagcagaatgctagtcccatcagcgaagctggctgaggcagaagagattgccgcagaagtctcgaaaaaggtcgtggtgggtgatccgaaagccgaagggaccaccatgggcccggtcgtgtcagaggttcagttcgagaaaattcaggggctgattgagaaaggcatctcagaaggagctaaattggttacaggcggaccaggcagacccgacggtttaaatcagggtttttatgttaggccaacggttttttcggaggcgaacaatgacatgacgatctcccgagaagagattttcggaccagtacttacgatgattccctatgactctgaagaagaagccattcagatcgcgaacgacacagagtacggattagcggcttacgtgcaaagctcagatttggataaagcacggaagatcgcatcgaaacttcgcgcaggaaacataaacctcaacggggcaggacaaaccccaaaccttccttttgggggatacaagaaatccggaaacggacgagaatggggcgcgcacggcttcgctgattatctcgaaataaaggcggtcgcaggcttcgaagaatagt

SEQ ID NO: 214178 - DNA, 799 bp, Unknown
  Bacterial polypeptide expressing nucleotide sequence isolated from the Sargasso Sea
attactaatgaagtgatatgtaaggtgccacgttcgaacgataaagatgtagattttgctttagacgcagcgcatgcagctttcccagcttggggaaagacttcgataacagagagatcaaatattctcttgaaaattgctgatgtcatcgaaaaaaatctaaatctattagcaacagcagagtgtttagataatggtaagcctataagagaatgtatggctgccgatttaccattggtagtagaccattggagatactttgcaggagttatcagagcagaggaaggatcagtagcagagataagtaacagtgaatattcttatcatatccctgaaccattaggagtagttggtcaaattattccttggaacttcccattattaatggcgacatggaaacttgcaccagctttagctgctggaaattgcgtagttttaaaaccagctgaacaaacaccagcatcaattatgcttttaatggaacttattggagatctattacctgcaggtgttgtaaatgttgttagcggttatggtcttgaagcaggaaaacctctagcttcttctaaaagaattaagaagatagctttcacaggtgaaactactactggacgtttaataatgcagtatgcatcacaaaacttaattccaataactttggaattaggaggtaaatctcctaacatattctttgaagatgttatgtcaaaagatgatgacttctttgataaatgtttagaaggctttgcaatgtttacgcttaaccaaggagaagtttgtacttgtcctagtagagcat

SEQ ID NO: 214179 - DNA, 778 bp, Unknown
  Bacterial polypeptide expressing nucleotide sequence isolated from the Sargasso Sea
tatgttagataaaagacaattttatataaatggaaaatgggtagaccctactacccctaatgatcttgaagtaattaatccatctaacgaagaagtttgcgctataatttcattaggtagttcatctgatactgatttagcaattgaatcagcgaatcaagcattgccatcttggagtaaaacttcaaaagaagaaagacttaaattaattgaaaaattatatgaaatttacaaagccagatggaatgatatgactgaatcaatttcattggaaatgggtgcgccttacgattgggcaaataatgaacaaagtaaatcaggcgctaatcatattaaaaattttattaaaacattaaagaaatttgaatttgaatcttcttttgacgaagaatcagataatcatattgtttatgagcctataggagtatgcgctttaattactccttggaattggcctattaatcaaattactctaaaagtaattccagctttagctgctggatgcacaatggtattaaaaccctctgaaattgctcctttatctggaatggtttttgctgaaatggtacatgaagcaggatttcctgcaggtgtttttaatttagttaatggaaatggtgaaggagtgggaactcatttatctggtcatccaaaaattgatatggtttcatttactggatcaactagagcaggtaagttaataactaaaaattctgctgacacaattaaaagagttactcttgaacttgggggtaaaggaggtaacatagtttttgca

SEQ ID NO: 214180 - DNA, 752 bp, Unknown
  Bacterial polypeptide expressing nucleotide sequence isolated from the Sargasso Sea
ttgtttactgggagtactaatacaggaaaactagttatgaaatctgctgcagaaaatttagttcctgtaactttagaattgggtggaaaatcacctgtgatagttgacgatgatgcagatatgaaatcagcaactactaggataatgagaggaaagacaatgaacgctgggcaaatttgtttagccccagattacgttatggtgcctaaaggtaaatcagaagaattttatgaaaaatcgaaagaagcaatagaaaaatctttcgatactctaaaatataatcctgactatacttccgtcatcaacgaaaaacattatgaaaggctaaatgatttaattgaggatgcaaaagcgaagggagctgacgtaaaagtaatcaatcctgccgatgaggatttttctcaacaagaagttcacaaaattcctcctactctcatcatgaacccaacagacgatatgcaaatcatgaaagaagaaatttttgggccggtgttgcctgtaaaagagtacgaaaattttcaggaaacaattaattacgtcaattccaaagacagaccattagggctttactactttggaaagaataaagaaagagaagaaaaagtactaaacaatactatctctggaggagttactattaatgatgtaatttggcacatcggtcaagaggacttaccttttggaggtgtaggaccaagtggaataggtaactatcatggatttgatggttttaaaacttttagtcacgccaa

SEQ ID NO: 214181 - DNA, 959 bp, Unknown
  Bacterial polypeptide expressing nucleotide sequence isolated from the Sargasso Sea
atctttatcatgttcttttgctacaggtaattcacaaattattaaatcagctgaattaacccctttatctgctgcaatttttgctaaagccattgaaaaagctggtgtgcctaaaggtttaataaatataatagctggttatggagaagaagctggctcttatcttgtatctcaccctgacgtcaatcatgttgtatttactggatcagttaacactggaaaaaaaattcttcatgcatgtgctgacaaagcaatacccgctattgtagagcttggaggaaaatcagctggtatagtttatcctgacgctgatttagattccgttattgaaagtgcaagacatggcatttttggtgttgcaggtcaaatttgtacagcaatgtcaagattagttgtgcataaatcaattaaagatgaattgattgaaaaacttgttactttgagcaaatctcttaaaattggagctggatatgaagaaggtactgaattaactcctgtaatttcagaaaatcaacttgagaaaattgaaggatatgctcgttcaggaattcaacaaggggctgaagctgtttatgggggtaaacgagttgatagagaaggttacttcatggaacctactgttcttaataatgttaaaaaagatatgactgttgcaagagaagaaatatttggtcctgttctttctgttttagaatacaatgaacaagaagaagctatagaaattgctaatgatacagattatggattaggtgctggtgtgtttactaaagatctaaagaaagcttcttggacagcaagtaaattagaagctggtcaagtatatgttaataaatggtttacaggtagccatgctacaccttttggaggatataaaaaatcaggctatagtcgtgaaaaaggagtagatgcacttaaatcttacttacaagtaaaaaatgttgggattagcctaaattgat

SEQ ID NO: 214182 - DNA, 901 bp, Unknown
  Bacterial polypeptide expressing nucleotide sequence isolated from the Sargasso Sea
gaaactataccctacttaaaagattacacagtctatacactaagagaaccccatggtgtaacgggacacatcataccttggaattatcctatgcaaatcattgggcgtacgttaggagcttctcttgcaatgggtaatgcatgtgttttaaaaccttctgaagaagcatgcctaactgcacttgctattggagagctagcaactgaagtgggtttcccagaagggtcaataaatatagtaccaggattagggaccaaagctggaacaagtcttatcagtcatccagacattgatcatatatcatttactggctctgttaaaattggaaaaactatacaatcagaggctgcaaaaaatttagttcctgttacacttgaactgggaggtaaatctcctcagatcgtatttgaggatgcaaatgtagataaagctttaccctttttaataaatgcaggtattcagaatgcgggacaaacatgttctgcctcttcaagaattttagtttcaaagaaaatttattcagaagtagtagaaaaaatgtcttcatcctattccaaattaaaagtagaccaggctatagaggaccaagacttaggtccagtaatttcaaataggcagaaaaaagtaattcaaaattacttatatttttctaaagatttagaatgtattgcagaaggtcggtttaatagcgacttaccgaaaaaaggtcattatgttttacctaaattgtttggagatgttaaatattcacataaacttgctcaagaggaaatttttggcccaattcaggtaattattccttttgaagatgaagaagatgctataaaaattgctaatagtacaaagtatggattagttgcttcaatatggactttagatggagcaagacaaatgcgggttg

SEQ ID NO: 214183 - DNA, 779 bp, Unknown
  Bacterial polypeptide expressing nucleotide sequence isolated from the Sargasso Sea
ctccgggtgttttaaatgtatttcaggctatggagaagagtgtggcgaacctctggtaactcatgaaaaagtaagaaaagtaacgtttactggatcttttactgtgggaaagattatagcacaaaaagcagctcctaaattatgtccagttactttagagcttggaggaaaaaatccaaatataataatgagtgatgcagatttagatattgcaattcaaggggttattgatggaatgagatatactcgacaaggacaggcatgtactgcaggatcaagagtttatattcaggaaaaaatttacgataaagtactgggtggagctgttgaaaaattaagtaaattaaaaatgggtaatgccctaaatgaaagttctgacattggagcaattatttccgaagaacaactaaaacgaactttacattatatggatattgccaaaaaaaactctacaaccaatgttgtgcatggtggtaatcaaataacaggtggtgattataaaaatggtttcttctatgaacctacattgatgtcaggtgttccagtaagctctccagtttgtcaagaagaaatatttggtcctgttgcttgtgcaataccatttaaaacatttgatgaagtaatgaacagtgcaaatgatacaccatttggattatcagcggtattgtggacacaaaatttatctagagctttacagtttgtggaggaaattgaggcaggttttgtccaagtaaatcaatgtgtggcgcctagagcaaatgtttcatatggtggataaa

SEQ ID NO: 214184 - DNA, 760 bp, Unknown
  Bacterial polypeptide expressing nucleotide sequence isolated from the Sargasso Sea
actggggaaaacaattgctaaaattgccgctcctatgtttaaaaaattaagtttagagttaggggggaagaaccctaatataatatttgctgattgtaatttagataaagcagtttctgtttcaatccttagttctttttctaatcaaggacaaatttgcttatgcggttcaagaatttttattgaaagaaaaatatacgacaattttaaaaagaaatttttaaaaaaagtaaaagaattatctattggcgacccattggataaaaaaacaaaaataggagccttagtttctaaagctcatatgaataaagtacttcaacatattaaaattgcaaaagatgaaggaggagttctattagctggggggaatagacattttaataaaggcagatgtgaaaaaggatattttttagagcctactgtttttgaaggattagcatatgattgtaacactaaccaagaagaaatttttggaccagtggtcactctgacaccttttgataatgaaaaagagttgataagatatgccaatagcactaaatatggattatctgcatctgtatggaccagtaatataagtaaagctaatcgattgtcaaattccttaatggctgggatagtttgggtaaattgctggttggtaagagaccttagaacaccttttggtggagttaaggaatctggtattggtagggagggaggaacttacgcaataaatttttttaccgaaacaactaatgtttgtataagttatgattaa

SEQ ID NO: 214185 - DNA, 883 bp, Unknown
  Bacterial polypeptide expressing nucleotide sequence isolated from the Sargasso Sea
tgttccttggaactttcctttaatgatggcagtatggaaaatggcacctgctcttgctgctggttgttcagtaataattaaaccagcagaagatacacctcttacagcgattagagttgcacaaattggaaaagaagctggaataccagatggagttttgaatgtgcttccaggttacggtgatgttggtgaggctttaggtcgacataaagatgttgatgcagtttcatttacaggctcaactgaagtaggtggttattttttaaaatactcaagtgaaagcaatttaaaacctgttgcattagagatgggtggaaaaagtccatttatagttttagaggatgctaaaattaatgatgatttaattgataacgctattaattctgcattttggaatggtggacagaactgttcagcaaatatgagacagattgttcataaaaaagttaaagatgaatttttagacaaagtaattaaaaaagttaaaaaattaaaagtaggagatccattagatttaaaatcaaatatgggatctatgatttcaaaaggacacttgcaaactgttgatggatatatccaaaaaggaatagatgaaggagcgaagcttttaacagggggagtttcaaataataagcaaaagggtttttatgcaaagccaactttatttgatggattaaaagagaatatgaccattgctcaagaggaaatatttggaccagtgcttggtgttttaactgttaaaaatgatgaagatgctttgaaagttgctagtaattctaaatacggattacatgctagtgtgtttactcaagatataaacagagcatttcatttagctaaaagcttgccatgtggaactgtgtcagtaaacactttttctgaa

SEQ ID NO: 214186 - DNA, 525 bp, Unknown
  Bacterial polypeptide expressing nucleotide sequence isolated from the Sargasso Sea
ccgaaagaagccaagcgcgtgtatggcgacgtgatcccaggccaccagccggacaagcgcctgatcgtcattaaacagccaatcggcgtcactgccgccatcaccccgtggaacttcccggcggcgatgatcacccgtaaagccggcccagccctggccgccggttgcaccatggtgatcaagccggcttcgcagacgccgttctccgccctggccctggttgaactggcgcaccgcgccggcatcccgaaaggcgtattgagcgtggtcaccggcagtgccggcgaagtcggcggcgagctgaccagtaacccgatcgtgcgcaagctgagcttcaccggctcgaccgaaattggccgccagctgatggccgaatgcgccaaggacatcaagaaggtctccctggaactgggcggcaacgcgccgtttatcgtgttcgacgatgccgacctggataaggccgtcgaaggcgcgctgatctccaaataccgcaataacggccagacctgcgtgtgcgccaaccgc

SEQ ID NO: 214187 - DNA, 841 bp, Unknown
  Bacterial polypeptide expressing nucleotide sequence isolated from the Sargasso Sea
atgaagacctataaccattacatcaacgacgaatgggttgaaccctcatcgggagactatctcgacagtgaaaaccccttcacaggcgaaatctgggcgcgggttgcaagagggaatgcagaggatgcggatatggcagtcaaagcggcaaaagaggcttttgaaaacagtgattgggccgacatgcggcctacccagcgcggtaagcttctggtcgggcttgctgaaatcattgaacgggaagccgttcgcctgggagaaatcgaagtccgggacaacggcaaactgattgcggaaatgggagcccagaccaaatatcttgcggaatggtatcgttattacggcgggttggcagacaaaattgaaggtgtggtcattccgtcggacaaacccgggattttcaatttcacacgatacgagccgctcggggtggtcggtatgatcaccgcctggaattctccgttgcttctgctcgcatggaaactggctcctgctctggccgcagggaacacggccgtggtcaaaccttcggaattcacttcagcctcttccctggaattcatggaactcatccgggaggttggtttccccaaaggggtggtgaactgcatcaccggactgggtttggaagtcgggcagccgatggtggatcatcctgatttggacaaggtcgcatttaccggttccgatgtggccgggcagaaaatttatgaaagtgctgcaaagaaaatcattccagtcacccttgaactgggggggaaatcgcctaacattgttttcgaagacgcagattttgaatcggcggtgatgggtgcgatttccgggaatttttgctgccacc

SEQ ID NO: 214188 - DNA, 907 bp, Unknown
  Bacterial polypeptide expressing nucleotide sequence isolated from the Sargasso Sea
ccgggtggtggtcaagcatcagccgatcgggccctgcctgttgatcacgccctggaacttcccgctgctgatgatcgtgcgcaaggcgggcgcggcattggccgccggctgcaccacgatcaccaagactgcccaggaaacgccgctcacgggcgcgctgtttgttgaggtgctgcatgatgcgggctttccggcaggcgtcgtcaatctgctgcacactaccaaatcctccggcgtctccgagccgcttttgaaggataagcgcctgcgcaaggtctcctttaccggctccaccggcgtcggcggcctgttgatggagcagggcgcgcgcaacatcctcaactgttcgatggagcttggcggcgacgggccgttcatcgtgctcgacgacgccgatatcgatctggcggccgagcaggcgatcatctgcaagttccgcaatgccggccaggcctgcgttgccgccaaccggatcattgtcgatgcccgcgtggagaccgagttcaccgagaaattcgtggccaaggtcaaggcgctgaaggtcggcgacggcatgggagcggttgatgtcgggccgatgatttcggccaagcagcgcgaccggctgggcgagaccctgaaccagctcaccgatgccggcggccggttgctcgccggcggcaggccggtggcgggcgagggctatttcttcgagccgacggtggtgcggtttgagggccgcaacgaagtgatgtgttcgaacgagttgttcgcgccgatcgccgcgatcttttcggtcgatggtccggaagccgcgctcgcctttgccaatgaaagcgatttcggcctggcctcctatgtgtttacaagggatctgtcgcgggcgctgaccttcggcgagcggctggaattcggcatggtcggcatc

SEQ ID NO: 214189 - DNA, 969 bp, Unknown
  Bacterial polypeptide expressing nucleotide sequence isolated from the Sargasso Sea
cggtcagaccattgccgtgaacaacccggcgactggcgagatcatcggccacgttccgaagatgggccgtgctgaaacccgccgcgccatcgaggctgccgagcaggcgctgccggcctggcgtgcgctgaccgccaaggagcgcgcgaacaagctgcgccgctggttcgagctgctgatggaaaatcaggacgacctgggtcgcctgatgactctggagcagggcaagccgctggccgaagccaagggcgagattgcctatgctgcgtccttcatcgagtggttcgccgaggaagccaagcgcgtctacggtgacgtgatccccggtcaccaaccggacaagcgcctgatcgtgatcaagcagccgatcggcgtcaccgcagccatcacgccgtggaacttccccgccgcgatgatcacccgcaaggccggcccggcactggccgccggttgcaccatggtgatcaagccggcttcgcagacgccattctccgccctggccctagtcgagctggcagagcgcgcgggcatcccgaagggcgtgctgagcgtggttaccggcagcgccggggaagtggggggcgagctgaccagcaaccccatcgtgcgcaagctgtccttcaccggctcgaccgagatcggtcgtcagctgatggccgaatgcgcccaggacatcaagaaggtatcgctggagctgggtggcaatgcgccgttcatcgtcttcgatgacgccgatctggatgccgccgtcgaaggcgcgctgatctccaagtaccgcaacaacggccagacctgcgtctgcgccaaccgcatctacgtgcagggacggcgtctacgacgccttcgccgagaaactgatcgctgccgtgggcaagctgaagattggcacggtctggaagacggtaccaccaccggtccgctgatcgacgagaaggccgtggccaaggtgcaggagcacatcgcccgacg

SEQ ID NO: 214190 - DNA, 898 bp, Unknown
  Bacterial polypeptide expressing nucleotide sequence isolated from the Sargasso Sea
aagtaaagcgcttcaatcagcagaaaatggattaaatatttggaaaaatacccctgcttgggagagatcttacattataagaagaatagcagataggatacgagaaaaaaaagatgtcctagcgaaatggatggcattagaggttggaaaaccattaacagagggattagcggaagtaaatggttcagctgatatatttgaatggaatgcagaggaaacaaaaagaatttatggacaaactgttgagagtagatttaaagacacaagagttcatgtttactatcaaccgataggcgtagttgctgctctgtcaccatggaatttccctttggtactttcatcaagaaaaatttctacagctctagctgcaggatgttcagttattattaaacctgatgtaattacaccaggtgtcattatggaattagttgatatatgtagagagtgcggtgttccaccgggagtggttaatcttctgtctggtgatccaccaactattgcacaacaacttatatcttcagatataataaaaaaaatatcaattactggatcctcaagagttggcaagttaatattaaagcaagctgctgataaagttcaaagagttacaatggagttgtctggacactctccatttatagtttttgatgatgctgatattcaaaaagctacagacatagcaattagtgccaaatttaggaataacggtcaggtatgcatttcgccaaataggttttatattcaagatacaaaaaaagacgaatttataaatttatttattgaaaaaacaaaaaaattgaaaataggaaatggcttagacccagaaacacaattgggtcctttgacaacaaaaaaaagattaaacgaagtcgaagaattagttgaaacaacaaaaaaa

SEQ ID NO: 214191 - DNA, 866 bp, Unknown
  Bacterial polypeptide expressing nucleotide sequence isolated from the Sargasso Sea
tatgggtttaattactaaggagcctattggtgtggttgcagctatagttccttggaattatcctttgtggatggctatatggaaaattgcaccagctctaattactggtaactctgttatactaaaacccgctgaacaatccccaatgagtgcaataaaaattggagctttattatctgaagctggggtgcctgatggagtattttctgttttgcctggggatggacctataacaggtaaatctttgtgtcttcataatgatgttgattgtgttgcttttacaggttctggggaagtaggaaaacttgttttgcaatactctgggcagtcaaacatgaaaagagtacaattagaatgtggtgggaaatcaccaaatattatatttgcagactgtcctgatcttgactctgcagcagaagcatctgcttatgcaatttttggaaaccaaggagaagtatgttccgcaggttctaggcttattgttcaaaaagaaattgaaaaagattttctggataaggtagctaaaataagtgaaacaatgcaaccagccgatcctcttgatccaagttcttttgctggagctatagtcaatactgaacaattagaaaaaattaataaatatgtaaatattggaaaagaagaaggtgcagaaattaaagttggtggaaatattaccatgaaggaaacaggaggttgctattttgagcctacaatatttaaaaatgtaaaaaatagtatgaaaatagctcaagaagaaatttttggtcctgttcttacagcccttacttttaaagattataatgaggctatttctattgctaatgatactgaatatggacttgcggcaggtgtatggactagagata

SEQ ID NO: 214192 - DNA, 834 bp, Unknown
  Bacterial polypeptide expressing nucleotide sequence isolated from the Sargasso Sea
ggagggcgctcccacattcaataccagcccaaaggtgtagtcggcatcgtcgcaccttggaacttcccggtcgcaatggtgttccagccgctggctggcattctcgcggcgggtaaccgcgccatgattaagccctcagagttcactccggagacctccaaggtgatcgatgaaatcgtcgccgaggccttcgaccccaccgaggtcaccacattctcgggcggtcccgaagtcggccaggcgttctccgccctgcccttcgatcacatgatctttaccggcgcgaccaacatcgcccgccatatcctcaccgccgcggcacgcaatctggtaccggtgactctggagctaggcggcaagtcgccggttgtgatttctcgctcagcggacctcgatcaggcaatgcaacgcgtgatgctgggcaagaccctgaacgctggccagatatgcctcgcgccggattacctgctggtgcccgaggagcagctggaggaagtgatcagccttgcgaccagagcggtcaacgagatgtactcgagcctgcgcgacaatgaccagtacacctcggtgatcaacgatcgtcaccacaagcgcctaggtggctaccttgaagatgccgagcaacggggctgtcgcatcatctcgctgaaccccgcgaatgaggacttcagcaatggtacgggcaagatccctcccacactgattgtgtcgcccgagaacgacgcgctctgcatggaggaagagattttcggtccgctactgccgatccgcacctacaagaacttcgatgagaccatcgactacatcaatgccaacccgcgtccgctggctgcc

SEQ ID NO: 214193 - DNA, 799 bp, Unknown
  Bacterial polypeptide expressing nucleotide sequence isolated from the Sargasso Sea
aatgggtgctgatatttgtagaaataacattgaaattttaaaagattttaattttgaacatcaatttgatcctaaatctaataatcatataagatatgaaccaattggagtttgtggattaattacgccatggaattttcctatgaatcaaatcgtattaaaggttattcctgctttagctgctggttgtacaatgatattaaaaccatccgaaattgctccagtgtcagcagtattgtttgcagaaatgattgatgaagctggttttcctgcaggagtttttaatttagttaatggaaatggagaagttgttggaaatcatatttctggtcatcctgatattgatatggtttcattcacaggatcaacaagagctggaaaattaattcaaaaaaatgcagcagatactataaaaaaagttactcttgaattgggtggaaaaggtggaaatatagtttttgcggactcttatccaaatgccgttagagatggtgtaagaaatataatgagcaactcaggacaatcatgtgatgctccaacaagaatgttggttgaaaaaccaatttatgaaagagctgttaaagaagctgttgatgaagcaaataaaattaaagttgatctggcttctaaaaaaggagatcatatcggacctttagtttcaaaagtacaatacgataaagtagtaaatcttatcaatgagggaataaaagaaggtgcaacactagctgcaggtggaccagatttgccaaatggacttaataaaggttattttgttaaccaacaattttttcagatgtaa

SEQ ID NO: 214194 - DNA, 487 bp, Unknown
  Bacterial polypeptide expressing nucleotide sequence isolated from the Sargasso Sea
gatgaaaagatttacttggggcccaatatctaataaaacacaatatgcgaaggtgcaagatttaattcagaaaggtatagatgagggagcaactctagcatgtgggggaacaggaagacctaatggattagagaaaggattttttgttaaaccaacagttttcactaacgttaaaaacaatatgaccattgctcgagaagagatatttggtcctgttatctgtttaataccttattctgatgttgaacaagcaattgagattgcaaatgattcagaatatggtctatcaagcatgatttcatgctctgatgaagtgaaaggccaagaaatagcaaagaaaataagaacaggacaagttattttaaacagaatctctcgaggagattatccagctccattcggtggatttaaaatgtcaggtaatgggcgagagcatgggctttttggtattgatgaatacttagaagttcaagctgttataacttaa

SEQ ID NO: 214195 - DNA, 837 bp, Unknown
  Bacterial polypeptide expressing nucleotide sequence isolated from the Sargasso Sea
tcatgaaactcatccgggaggccggtttccccaaaggggtggtgaactgcatcaccggactgggtttggaagtcgggcagccgatggtggatcatcctgaattggacaaggttgcatttaccggttccgatttggcagggaagaaaatttatgaaagtgcagcaaagaaaatcattccagtcaccctggaactgggagggaaatcacccaacattgttttcgaagacgcagattttgaattggcgatgatgggtgcgatttccgggatttttgctgccactggacaaacttgtatcgcaggatcgcgcctgttggttcagcgctccattcatgactcctttgttgaacgcctgatagaggtcgccaaagaagccaagatcggagaccccatctccacggaaactcatgtcgatccggttacgactcctccccagtatagaaaaatcctggactatatcgaagttgcccgaaaagaaggggccaagtgtgtgctaggagggaaaccctatgccggtgatggagtgaggagcgaccgatttgtggaaccaaccatcttcaccggagtttccaatcaaatgcaggtcgcccaggaagaaatcttcgggccggttctttccgtcattccctttgaggatgaagacgaggcgattgccataggaaacgacatcgttttcggtctggctgccggagtttggaccagtgacattggaagagccctgcggatttccgaaaaactcaaagccggaaccatctgggtgaatacctatcgggccgtgagttttatgagtcccttcggcggatacaagcgttcgggtaagggaagggaaagcgggtagg

SEQ ID NO: 214196 - DNA, 898 bp, Unknown
  Bacterial polypeptide expressing nucleotide sequence isolated from the Sargasso Sea
gcagggaactggtcagacgccgacagtggtgagaaggatgaagtcctgaatccggcaacaggtgggatcttggggacggttccgcaatgcggtcagcaggaaaccagaaaggccatcgaagcggcgaatcaggctatgccagcctggaaggcaacccctgccaaggagcgagggaaaattctgcggagatggtatgagttgatgattgagaacaaggaagaccttgccatcctgatgacggcagaacagggcaaaccactggcagaatcacatggggagatcctttatgcctcgtcgttttttgaatggttctctgaggaagcaaaacggatgtatggtgagaccattccgacccacatgcctgaccgccgattgctggtcgtaaaggagggggtcggggttacggctgcgatcactccttggaattttcctgcggcgatgatcacccgtaaagcagggccggcactggcggcaggttgtccaatgatcatcaaacctgcaccggatacacccttttccgcgttggcactgtgtgaattgggagaacgtgccggagttcctaaagggatcctcagcgtggttccaggagacgcgattgcggtggggggagaactgacctcaaacgcgatcgtccgcaagttgagtttcaccggttccaccggagtcgggaaactgctgatgaaacagtgttccgagacgatgaaaaaactttctctcgaactcggcgggaatgcgccatttattgtttttgatgatgcagacctggatgcggcggttcagggggcactggattgtaaattcagaaatgcggggcagacctgtgtttgtgcgaaccggatcatggcccaggatggaatctatgacgaattcacccgcaaacttgcggaaggggcggcaa

SEQ ID NO: 214197 - DNA, 856 bp, Unknown
  Bacterial polypeptide expressing nucleotide sequence isolated from the Sargasso Sea
aaattcaattcctgtcataaatccagcttcagaagagagcataggaaatgtaagtattgttcaaaagaggatgttgataaagcagtacaagcggcacgaaatgcttttaaaagtttctcaaaaacattggtttcagaaagagttgagttattaactgaaataagaaatatctataaaaagaggtttgatgatattgctactgctattcaaactgaaatgggtgcgccaaatagtttagcaagaggaagtcaagcaactgttggattgtctcacttgaaaactgctataagagttttagaaaaccataaatttgaatttaaacacggaagttatattgtgagacatgagccaataggagtttgtggattaataactccttggaattggccaataaatcaggttgtttcaaagttagctccatgtctagcttcagggtgtactgctgtattaaagccaagtgaaattgctccactatcttcaatggttatagcagaaattttccatgaggctggtgttcctaaaggggtgtttaatttagtaaatggtctaggtcctgtcgttggagaggcaatgtctaaccatgttggaatagacatgatgtcctttactggatcaaccaggggagggattgctgttgcaagagcgtctgcaaattctgtcaaaagggtttgccaagaattaggcggaaaatcacctaatataattttagatgatgaaaattttaaaatatcagtatctgatggtgtgaagagttgtatgagtaatacaggacagtcttgtaatgcaccaactagaatgcttgttccaaaaaaacgttatgatgaagcattagaaattgctattgaggcaaataaca

SEQ ID NO: 214198 - DNA, 945 bp, Unknown
  Bacterial polypeptide expressing nucleotide sequence isolated from the Sargasso Sea
tgcttccattgaacttacaaatatgtttgctggtttgtctggagagttaaaaggagaaaattatccaaccaatattccaaatagtattcattataccaccagagatccaattggggttgtttgtgcaatcgtaccttggaatgcgccattatttttaacagtagcaaaaatcgctccagctattgtagcaggaaatagtgttgttttaaaaacagctgaacaagctccattttgtgctcttctactatcggagatatttcaacaagaacttcctccgggtgttttaaatgtaatttcaggctatggagaagagtgtggcgaacctctggtaactcatgaaaaagtaagaaaagtaacgtttactggatcttttactgtaggaaagattatagcgcaaaaagcagctcctaaattatgtccagttactttagagcttggaggaaaaaatccaaatataataatgagtgatgcagatttagatattgcaattcaaggggttattgatggaatgagatatactcgacaaggacaagcatgtactgctggttcaagagtttatattcaagaaaaaatttatgatcaagtactgggtggagctgttgaaaaattaagtaaattaaaaatgggtaatgctctagatgaaagttctgatataggagctattatttccgaagaacaactgaaaagaactttatattatatggatattgccaaaaaaaactctacaaccaacgttgtgcatggcggcaatcaactaacaggtggtgattataaaaatggtttcttttatgaacctacattgatgtcaggtgttccagtaagctctccagtttgtcaagaagaaatatttggtcctgttgcttgtgccataccatttaaaacatttgatgaagtaatgaacagtgcaaatgatacaccatttggattgtcagcggtattgtggac

SEQ ID NO: 214199 - DNA, 850 bp, Unknown
  Bacterial polypeptide expressing nucleotide sequence isolated from the Sargasso Sea
ataggtgtggtatgtgcaattgttccgtggaatgcacctttgtttttgactgttgcaaaaatagctccagcaattgtagcaggtaatactgtagttttaaaaactgctgaacaagcacctttctgtgctctattattagcagaaatttttcaaaaagagcttcctccaggagttttaaatgttatttctggatacggagaagaatgtggagagcctttgttatctcatcctgatgtaagaaagatcacttttactggatcattcagtgttggaaaaattatagctcaaaaagctgctcctaaactttgtccagttactttggaacttggtggaaaaaatccaaatataattatgagtgatgcagatcttgatattgctatacctggagtaatcgatggtatgcgatatactcgtcaaggacaggcatgtactgcaggatctagggtttatatacaggaaaaaatttatgaaaaagttttagaaggtgttgttaataaattaaaaaatcttaagatgggaaatgccttagatgaaaattcagatataggagctataatttcaaaagagcaacttaatcgaacattgcattatatgaatattgcaaaggagaattcatcaacaaaggttttgcatggaggtaaccaaaaaaaagagggcgattataaaaatggttttttttatgaaccaactttgttatcaggtgttccagtagaatcccctgtatgtcaggaggaaatatttggacctgttgcttgtgctattccattcaaatcatttgatgaagtattaaaaagtgcaaataatactccttttggattatcagctgttttatggactcaaaaatttatca

SEQ ID NO: 214200 - DNA, 622 bp, Unknown
  Bacterial polypeptide expressing nucleotide sequence isolated from the Sargasso Sea
tatgagtactgaaaaatataaatctattgctgctaatttaaaacttgaaggaagagcttatatcaatggcaaatatgtagatgcagtagatggtgcaaagtttgaaactattaatccagctacaggcgaaactctttgctctgttgcaaaatgcaataacaaagatgttgaattagcggttaaggtttcaaggaaggtgtttgaaaatggtatttggtcaagatcaacacctgaacatagaaaagaagttttattgaattttgcaaaactattaagtgatcaaggaaaagaaaactcagttttagaaagtattgatactggaaaattaatagtcgattgtataaatgaagttgccaatgatgcgccgatgcattttcaatggtatggagaattaattgataaagtgtttggaaaagtgggacccacagatccgtcaataactagtttgatcgttaaagaacctattggtgtcattgcgggaattgttccttggaactttccattaatgatggctgtgtggaaaatggctcctgcccttgctgctggttgttctgtaataattaaacctgcggaagatactcctttaactgcaattaaagttgctgagatgcattcaaaagca

SEQ ID NO: 214201 - DNA, 835 bp, Unknown
  Bacterial polypeptide expressing nucleotide sequence isolated from the Sargasso Sea
tatggataaagttattaaaaattttcaaaatatatcttatgggccagcaccagaagacagtaaagaagttaatagttggataaaaaatttaaaaaatccaaataatctttttattaatggtaaatttgtaaaatcgtctagctcaaaaaaattaaatataattaatccttccacaaataaaaaaattgcaacgttatctgttgcttcaaaaaaagatgtaaatgctgcagtcagtgctgctaagaaagctcacattaaatggtctaaattatcatcttttgatcgatcaaaatatttatatgccctagctcgtctcattcaaaaaaattcaagatttatttctgttttagaaactattgataatggtaaaccaatacgagaaacaagagatatagatattccacttgttgcaagacatttttattatcatgctgggtgggctgcgaggaatacaaataattctgataattctattggtgttgttggacaaattataccgtggaactttcccttattaatgttagcttggaaaattgctccagctattgctcttggaaatactgtagtgctaaaaccagcagaatatacttctctaagtgctctctattttgctgaactttgtcaaaaagctaaaattccacaaggtgtaattaatattattacaggagatggttctactggtgaacatataacatcgcataaagatattaaaaaaattgcctttactggatcaactgaagttggaaaaaaaataattcaaacaaatactaacccagataaaaaaatgacaatggaacttggaggcaaatcaccttttattgttttgaagatgctg

SEQ ID NO: 214202 - DNA, 919 bp, Unknown
  Bacterial polypeptide expressing nucleotide sequence isolated from the Sargasso Sea
ccaagaaggtaccataggtaatattgatgggatgcaatcaggaggtggaaattcagcacttggtatgatggcttatcactatcctgaacctttaggtgtagttggacaaataataccatggaattttccaatcttaatggctgcatggaaacttgctccagcattagctgcaggtaatgcagttgttttaaaaccagcagaacaaacaccattttcgatcaatgtactaatggaggtaataggagatcttcttccagctggtgtggcaaatattgttcatggatatggtgttgaagctggaaaacctttagcctctagtaagagggtaaaaaaggttggatttacaggagaaacaactactggaagattaatacttcaatatgcatctgaaaacctcatacctgttactctagaacttggaggaaagagtccgaatatctttttcaaagatataatgggtggatcagatgattacatttcaagatgtgttgaaggttttcttcatgcctattttaatcaaggcgaagtttgtacctgtccatcaagagccataattcatgaagatatctatgaaccatttatggaaatggttaaagaaagagtaaaagcactaaattgtggatcaccatttgatttaaatacacaagttggagcacaagcatcgaacgaacagtttgaaaaaataatgtcctatttagatattggaaagcaagaaggtgcagaagttatttatggtggtgaaaaaagagaaatgaatggtaatttttcaggtggttattacgttgaaccaacagctttcaaaggtaataattcaatgagaattttccaagaagaaatatttggaccagtaatttcagttgcaacatttaaggacgaagcagaggctgtatccattgctaatgatacattgtatggatta

SEQ ID NO: 214203 - DNA, 838 bp, Unknown
  Bacterial polypeptide expressing nucleotide sequence isolated from the Sargasso Sea
agagttttagaagctcaaaaaaaatttttcatagaagaaggttcaccatctattgaattaagaattgatagacttaatcggctaaagtgtctaattatgaacaatagatacgattttgttgacgctttaaatgaagattatggcaatagatcaaataacatatctttattatctgatgcttatggaataatccctgatattaacaacgcaattaaaaatattagaaaatggactaaaattgataaacgttcatctaattttccatttggtttattcggtgctaaatcttatgtcaaatatgaacctataggcacagtaggtatgatatctccgtggaattttcctgttaacctatcatttaaaccattagctgcaatatttgctgctggtaatcaagtgatgcataagccaagtgaattaacgcctataaccgcttcattgataaaagatctttgtgataaagaatatgatgaaaatgaatttgcaacttttttaggtggacctgaaactggtgaagcttttactaaacttcactttgaccatcttctgtatacaggttcagggtccattggtaaaaaagtaatgaagtctgcatcgcagaatcttgtcccagtaacactagaattaggaggtaaatcaccagttattatcggaaattctgctgatattaaagtgtcagctaagagaattatgtttggcaaaacactcaatgcaggtcaaatatgtttagctcctgattatgtaattgttcataaagaaaagaaagatgagtttattactgaagttgaaaatgtaataaatgagtattatccaaccataaaagataatgacgattatt

SEQ ID NO: 214204 - DNA, 829 bp, Unknown
  Bacterial polypeptide expressing nucleotide sequence isolated from the Sargasso Sea
agatgtagataaagcgttaaaatctgcagaaaaaggattagaagtttggaaacaaactcccccatggcaaagatcttatattattagaagaattgcggacaagatgagagagaaacaggatgtccttgcaaaatggatgacccttgaagttggcaaaccttttgctgaagctaaaggtgaagtgggtggttcagcagatattttcgaatggaatgccgaagaaacaaaaagaatttatggtcaaacagttgaaagtagattcgttgatactagagttcacgtttattatcaaccagtcggagtagtagcagcattaacaccttggaatttccctttagtattgtcttcaagaaaaatttctacagccttggcagccggctgttctgtaatagttaaaccagatgtaataacacctggaactgtaatggagttagttgacatatgtagagaatgcggagttcctccaggagtggtaaatttattatcaggtgatcccccaagtattgctcaacagctgatttcatcagatataataaaaaaagtttctataacaggatcaacaagagtaggaaaattaattcttaaacaagctgctgataaagtacaaagagttacaatggaattgagtggccattctccatttattgtatttgatgatgctgatattcaaaaagcaaccgatatggctatttcagctaagtttagaaataatggacaagtttgtatatctccgaacagattttatatacatgaggaaaagaaagaagaatttataagttcatttatagacaaaacaaaaaaattaaaaataggaaatggcatggatcct

SEQ ID NO: 214205 - DNA, 862 bp, Unknown
  Bacterial polypeptide expressing nucleotide sequence isolated from the Sargasso Sea
ggcgtggcagcatcaattactccttggaattttccaaatgcaatgattacgcgtaaagccggacccgcactagctgctggatgcgcatttgtagcccgtccagcttcagagactcctttttcagctcttgcactgggtgtccttgctgaaagggcaggattaccaaagggtattctttcaattttaccatccactgacgcatctgggacaggtaaagaattctgtgaaaataaaaaggttagaaaactcactttcacaggttcaacagaggtggggcgtgttttattgggccaggcagccaaaaatgttttgaaatgttccatggagttgggcggtaatgccccatttattgtctttgacgatgctgacttggatgatgcagttcaaggtgcaattatgtgtaagttccgcaataacggacaaacatgtgtttgtgcaaataggatttatgtccaaactggagtgtataaagagtttgcagcaaagctacagaaggcagtttctaaactcaaagtaggagatggttttgaccctgaaactacacttggaccattgatcagtttgaatgcagttaagaaagtaaattcacatatagacgacgcaatatcaaaaggcgctgaacccatctattctaatacttacagtcaggaagatggaaactttattaatccaaccattctcacgggtgtaacaaaaaatatgaaagtagctaccgaagaaacatttggaccacttgctccactttttgagttttcaacggttgaagaggttatcgagttggccaatgatacaatatttgggcttgcttcatatttctacgcgaaagacttgagccgtgtatacgaggtagctgaagcgctgg

SEQ ID NO: 214206 - DNA, 589 bp, Unknown
  Bacterial polypeptide expressing nucleotide sequence isolated from the Sargasso Sea
atgaatctggagactctctacgaaaaaatggaatacggtcctgctcccgaaagtcctaataatgctgtgcaatggctgaaagatcaccagcacaagttcattcttttcatcaacggcaaatggactgaatcatccacgaaaagtcgtttcgaaagcatcaatcctgcaacgggtaaatcccttgcctcgattagtgaagcatctgaagaagaagtcgaccaggccgtcaaagcagcaaataaagcttttgaatcctggagtgggctggatccgcatcagcggtcccgttttctttacgcgatggcgagacagatgcagaagcattcaagactgctggcggttctggaaaccctcgacaacggaaaaaccatccgggaaacccgtgatatcgatgttccgcttgcggtgaggcatttctaccatcatgcaggttgggctcaacttcttgatcaggaatttaaaaatcatcagcccttaggtgtcgtcggtcagatcatcccctggaatttccctcttctgatgctggcctggaaggtggcaccggctctggcttcaggaaacacggtcgtcttaaaacccgccagagttc

SEQ ID NO: 214207 - DNA, 799 bp, Unknown
  Bacterial polypeptide expressing nucleotide sequence isolated from the Sargasso Sea
gccatcgggtgttgttggccaaataataccttggaactttcctactgtgatggctatttggaaattggcacctgcattggcaaccggaaactgtgttgttttgaaacctgcagaacaaactcctgcatctattatggtcttaatggaacttattggccatttaattccaccaggagttgttaatgtcgttaatggttatggtctagaagcaggaaagcctttagcttcaagtactagaatagctaaaatagcttttactggtgaaacaacaactggaagaatgatcttacaatatgcaagtcaaaacttaattcctagtactctagagttaggaggaaagtctccaaatattttcttcaaagatattgcagaagcggacgatgatttttttgacaaatgtatcgaaggatttgttatgtttgcacttaaccaaggtgaggtgtgtacttgtccaagtagagctttaattcatgaagatatttatgataaatttatagctcgttgtattgaaagaactaaagcaataattcaaggagacccattagattcaaacacaatgattggcgccatggcttcgagtgagcaatatgaaaaagtcaagtcatatttggatcttggaaaaaaagagggggcagaagttcttgttggtggagatgttgctcaaatgagtggtgaaatggcgaatggttattatattcagcctacaattttcaaaggccacaataaaatgagaatattccaagaagagatttttggcccagttgtttcagtttgcacctttaaaacagacgaagaagca

SEQ ID NO: 214208 - DNA, 931 bp, Unknown
  Bacterial polypeptide expressing nucleotide sequence isolated from the Sargasso Sea
gatagagagtttaatgctatggttcatggctcatcaaaagcaaaagtaataagacagccaaagggtgtaatgggtaatatggctccatggaattttccaattgaatgcgctcttgttatggtcaatgatatgttggctgctggaaacagagtcataataaagggtgctgaactcacaccagcaactagtgccgttttagaagaggcaattaaatctgaatttgatgaagatactgttgctgttgtgaatggggatatatcttttgcagaatatttttgtacactgccatgggatcatttaacttataccggtggagaaagggtagcaaaattagtaatgaacgctgcttctaagaatcttactccggttactttagagcttggaggaaaaaaccctacagtttttacaaatgagggagtctgtgatctcttagttgagcgttttttatacaatcgaatcttcaaagctggtcaagtgtgcagctctcctgattatgcactggtcccagaagagcatctaagtacatggattaatctagctaagagcaagtggtctgaaatgtaccccagttatattggtcatgcagatgccactgggacaataaacgatcatcattacgatagaattatgaattatattgatgaagctagagaagctgggtgtaaagttatctctttaaacggtgaagagcctaataaaacattaagacagattccaatgatgttagtaatcgatccagatgagtcattatcaattatgcaagaagaagtttttggtccagtaaccgctgttaaaacctactcaaatattgatagcgtaattgattatataaattcaaaaccaagacctcttgcagcttacctagttggcagagaaatagaaagtatacaaaaatttgaagaaaacattatttcaggcgggatggaattaa

SEQ ID NO: 214209 - DNA, 874 bp, Unknown
  Bacterial polypeptide expressing nucleotide sequence isolated from the Sargasso Sea
gcgcccatcaaactggccagcaccgcgcaggcgtatgccggactaggccacatcaccgaagccgcaaagattttgaaggactacagcttcaccgaggatctgggcccgcatcgggtggtgaaagagccgatcggtgtatgcggtttgattacgccttggaactggccgctgaatcaggtcagctgcaaggtcgcgccggcgctggcggtcggttgcaccatggtgctcaagcccagcgaaatcgcgccgctgtctgcctatctttatgcagagattatggatgaggcgggcatccccgtcggcgtattcaatctggtcaacggcgacggccccactgtcggcgaggctctgtcgcgccaccccgatgtcgacatgatgtcctttaccggttcaacgcgggcgggctcgctggtcgcacaaaatgctgcgcccacggtcaagcgagtgacgcaggagctgggcggtaagtcaccgaacatcattctcgcagacgcggatctcgaggcagcggttactcgcggtgtcatgcatatgtacaacaacacggggcaatcctgtaacgcgccgtcgcgcatgctagtcccccgcgacctgttgcccaaagccgaagctatcgctgccaaggtcaccgagagcgtggtgattggcccaaccgctgaagactcaacaacaatgggccctgtcgtgtccaaggtgcagtgggacaagattcaggcgctcatcgagggcggcatcgccgagggtgcgaaagtagtctgcggcggaccgggcctgcccgatggcatcgatcggggctattacgtgcgacccacggtgttctccgacgtcactaacgacaagagcatagccgagcaggaaatctttggtcctgtgc

SEQ ID NO: 214210 - DNA, 538 bp, Unknown
  Bacterial polypeptide expressing nucleotide sequence isolated from the Sargasso Sea
aactaaatatgcaatagcagcagcaaataatatgtctacaggagaccctttagatgaagacatttacttgggcccaatatctaataaaacacaatatgagaaggtgcaagatttaattcagaaaggtatagatgagggagcaactctagcatgtggaggaacaggcagacctaatggattagagaaaggattttttgttaaaccaacagttttcactaatgttaataacaatatgaccattgcccgagaagagatatttggtcctgttatttgtttaataccttattctgatattgaacaagcaattgagattgcaaatgattcagaatatggcttatcaagcatgatttcatgctctgatgaagtgaaaggtcaagaaatagcgaagaaaataagaacaggacaagttattttaaatagaatctctcgaggagattatccagctccattcggtggatttaaaatgtcaggtaatggccgagaacatgggctttttggtattgatgaatacttagaagtacaagctgttataacttaa

SEQ ID NO: 214211 - DNA, 433 bp, Unknown
  Bacterial polypeptide expressing nucleotide sequence isolated from the Sargasso Sea
tagtgattttagaagagcaagaggtgcagcaatttctatgataccaacatcaactggagctgcaaaagctctaagtttggttctgccaaatatgaaagggaagttagatggaactgctataagagttccaacacctaatgtatcattaattgattttacttttacttcaaagaaaaaaacatcgattgaaaaaatcaatagtcttattattaaagctagcaaaacaaaatctttaaaaaatattttaacaactaataaattaccacttgtatctatagattttaatcataattcaagtagctcgatatttgatttgactcaaactcaagtgattaaagggaagttttgtagaattctctcttggtatgacaatgaatggggtttctcaaatagaatgattgacactttgcttgacttaaaaaaatacttatag

SEQ ID NO: 214212 - DNA, 778 bp, Unknown
  Bacterial polypeptide expressing nucleotide sequence isolated from the Sargasso Sea
ttgttaggcgctagagctgaagttagatatcagcccaaaggagtcgttggggcaataagtccctggaatttcccaatgaatcttgcacttgctccactcgcaggaattattgctgctggtaatcgagttatgcataaaccttcagaattgactcctgctacttcagatcttttaaaattgatggttgaagagtactttgatgaagctgaaatggcagtatttgtaggagatgctgaagtaggagcggcgtttagtggtcttgcttttgatcatttgatctttaccggagggacgtcgatagctaaacatgttatgaaggccgcctctgaaaatttagtacctctaacattagagcttggaggaaagtcaccagtagttgtaggtaaagatgcaaaaattaaagatacagcacaacgagtcatgcaaggtaagacaatgaatgctgggcaaatatgcttagctccagattacgcattggtgccagaaggaaaagtagatgaatttgtcaaagctagtgtagaagtaacttctgagatgttccctgaaatgaaagataatgatgacttcacatctataataaatcaacgtcattacgataggattcaaggatatctagatgatgccaaagagaaaggagcagatattgtcgaaataaatccttccaatgaagatttttctcaacaaccacatcataaaatccctccaactttagttttaaatccctctgaggatatgaaaattatgcaagaagagatatttggtcctgtactgcctataa

SEQ ID NO: 214213 - DNA, 807 bp, Unknown
  Bacterial polypeptide expressing nucleotide sequence isolated from the Sargasso Sea
atcgtattaaaagttattcctgctttagcagctggctgttcgatgatattaaaaccttctgaaatcgctccaatatctggagttttgtttgcagaaatgattgatgaagcaggttttccttcaggggtttttaacttagtaaatggtaatggagaagttgttggaaatcatatctctggtcatcctgatatagatatggtttcatttacaggctcaacaagagctggaaaattaattcaaaaaaatgcagctgatacgataaaaaaagttacccttgaattaggaggtaaaggtggaaatataatttttgcagattcgtatccaaatgcagtaagagatggagtgagaaatataatgagtaattcaggacaatcttgtgacgctccaacaagaatgttggttcaaaaaccaatttatgaaagagctgttaaagaagctgtagatgaagcaaataaaattaaagtagatttagcttcaaaaaaaggtgatcatattggacctctagtttcaaaagttcagtatgacaaagtaataaatcttataaatactggaataaaagaaggtgcaaaattagctgcgggaggaccagatttacctgatggtcttaataaaggatattttgtaaaaccaacaattttcactgatgtaaataatgatatgagaattgcaagagaagaaatatttggacctgtactttctattattccatttgaaactgaagaagaagcaatagcaatagtaaatgatacttcatatggacttggaaattatctacaaactgaagataaagaaaaagctcaaagagtt

SEQ ID NO: 214214 - DNA, 673 bp, Unknown
  Bacterial polypeptide expressing nucleotide sequence isolated from the Sargasso Sea
aatggtagctgctggtgcaaaaagattagaggaaagaaagtctgaaattgaaactttattatcattagatacaggtaatgctttaagaacacaggctataccagaaacggctgcttccattgaacttacaaatatgtttgcaggtttatctggagagctaaaaggagaaaattatcctaccaatattccaaacagtattcattatactactagagatccaataggggttgtttgtgcaatcgtcccttggaatgcaccattatttttaacagttgcaaaaatcgctccagctattgtagcaggaaacagtgttgttttaaaaactgctgaacaagctccattttgcgcacttttattatcagagatatttcaacaagaacttcctccgggtgttttaaatgtaatctcaggttatggagaagagtgtggtgaacctttggtaactcatgaaaaagtcagaaaagtaacgtttacaggatcttttactgttggaaagattatagcacaaaaagctgcccctaaattgtgcccagttactctagaacttggaggaaaaaatccaaatataataatgagtgatgcagatttagatattgcaattcaaggggttattgatggaatgagatatactcgacaaggacaagcatgtactgctggatcaagagtttatatt

SEQ ID NO: 214215 - DNA, 727 bp, Unknown
  Bacterial polypeptide expressing nucleotide sequence isolated from the Sargasso Sea
atgaatctggagactctctacgaaaaaatggaatacggtcctgctcccgaaagtcctaataatgctgaacaatggctgaaagatcaccagcacaaattcagtcttttcattaacggcaaatggactgaatcctccaagaaaaacaatttcgaaagcatcaatcctgcaacgggtaaatcccttgcctcgattagtgaagcatcggaaaaagaagtcgaccaggccgtcaaagcagcaaagaaggcttttgaatcctggagtgggctggattctcatcagcggtcccgttttctttacgcgatggcgagacagatgcagaagcatgcaagactgctggcggttctggaaaccctcgacaacgggaagaccatccgggaaactcgtgatatcgatgttccgcttgcggtgaggcatttctaccatcatgcaggttgggctcaactacttgatcaggaatttaaaaatcatcagcctttgggtgtcgtcggtcagatcatcccatggaattttcctctgctgatgctggcctggaaggtggcaccggctctggctgcaggcaacacagtcgtcttaaaacctgcagagttcaccccattgaccgcactgtggtttgcggaaatgtgtcaacggattggtctccctccgggagttttcaacctgcttaccggttccggtactactggtgcgatgttggcagccccattccgggtgtttcgaaaatcgcatt

SEQ ID NO: 214216 - DNA, 776 bp, Unknown
  Bacterial polypeptide expressing nucleotide sequence isolated from the Sargasso Sea
tcggtgttgggaaatctacccaatgacatttcagccatagaaggcggtatttccatagacggtcagctgctgaaggttctgtccgagcgaaaccctagcgacttaccatgggctgatctggaagttgatgttgttattgagtcgaccgggattttcaccgatagggataaagctgctcaacatctagatgcgggagcacctttggtaattgtctcggctccggccagtggagctgacgcaaccatcgtcgttggggtcaaccacgacgaattcgagaaaggcgtgcaccaggtgatctctaatgccagttgcacaacaaactgctttgtcccgatggtccaagtcctagatgatgccttcggagtagaaaaaggtctgatgacgacagtgcacgcgtacacaggcgatcagtcgcttgtcgatggcccacatagtgacctgagaagggcgagggcatcggctgtaaacatcatccctacttctacaggggctgctcgcgcaacggggctggtactccaagcgatgaacggcaaactcgatggcacctcgttgcgagtgccgattcctgatgggtccatcactgacttcaccgcagttcttgcgtcgagtcccacagtcgaggaaatcaatgccgcgttcgctgaggccgccgctaaagcgccgctcgccgggatcctcgcctacagcgaagacccattagtttcctcagacatcgtaggagatccctctagctgcgtgtttgacgcgggtctcactatgacgatggacaatcttgt

SEQ ID NO: 214217 - DNA, 865 bp, Unknown
  Bacterial polypeptide expressing nucleotide sequence isolated from the Sargasso Sea
attctcatggcagcctggaaattagcaccagctttggcagctggcaatgcggtagtgttaaaacccgctgagcagactccattctcaatctgtgcgcttctcgaattaatcggtgatttaattccagctggggtggtgaatgttgttcaaggttacggtgttgaagcaggaaaacccttggcctcaagcaatagaataaagaagattggttttaccggcgaaacgactacgggaaaactaataatgcagtatgcttctgaaaacttaatacctgtgacccttgagcttggaggcaaaagtcctaacatctatttcaaagatattatgaacggatcagatgactatgtatcacgatgtgttgaaggtttccttcacgcatattttaatcagggcgaagtgtgtacttgcccttcacgtgcaattattcataaggatatttatgaaccattcatggaaatggtcaaagatagggtaaaagccttaaattgcggtaatccatttgatctttccacgcaactcggtgcgcaagcatcaaacgaacaatatgaaaaaataatgtcttatttggatatcggacgccaagaaggtgccaaagttctttttggtggtgaaaaaagagaaatgcaaagtccatattcaggcggttattacgtagaaccgacagcgttcgagggaaacaattctatgcgaatatttcaagaagagatttttggaccagttgtttccgtaaccacttttgaagatgaagcagaagcagtatctattgccaatgacactctttatggtttgggcgcaggagtttggtcgagggatgcaaacacatgttatagaatgggtcgaaatatcgaggcaggacgagtgtggg

SEQ ID NO: 214218 - DNA, 568 bp, Unknown
  Bacterial polypeptide expressing nucleotide sequence isolated from the Sargasso Sea
tttgaaggttaaatttccatttaaagctaaatatggaaactacattaacggtaaatttgtagaacctaaatctggaaagtattttgataatactactcctatcactaatgaagttatctgtaaggtaccacgatcgaacgaaaaagacgttgattttgctctagacgcagcccacgcagcatttcctgcttggggaaaaacatcaattaccgagagatcaaatatactcttaaaaattgctgatgttatagagaaaaaccttaacgttttagctacggcagaatgtttagacaatggtaagccaattagagaatgtatggctgcagacttgcctttggtaattgaccattggagatattttgcaggagtaataagagcagaggaaggttcagttgcagaaattagtaacagtgaatattcttaccacataccagaaccattaggtgtggtaggtcagattataccttggaacttcccattgctaatggctacatggaaactagctccagcattggcggcagaaaattgtgtggtattgaaaccagctggaacaaacaccagcatcaat

SEQ ID NO: 214219 - DNA, 703 bp, Unknown
  Bacterial polypeptide expressing nucleotide sequence isolated from the Sargasso Sea
tagagttcatgtttactaccaacctgttggagtagtagcagcattagtcccatggaattttccactagttttatctgctagaaaaatttctacagcattagcagcaggttgttcagtaattgttaaacctgatgttataactcccggtgttgtgatggagcaagttgaaatttgtagagaatgcggagttcctccaggtgttgtaaatttattatcaggagaccctccaagtatcgctcaacaattaattgcctctgatatagtaaaaaagatttcaattaccggatcttcaagagttggaaagttaattttaaaacaagcagcagacaaagttcaaagagttacaatggaattaagtggtcactctccatttatagtttttgatgatgcagatattaaaaaagcgacagacatggcaatcgctgcaaagtttagaaataatggtcaagtttgcatttcacccaatagattttacatccaagaaaataaaaaagatgaatttgttaacttgtttgtagaaaaaactaagaaattaaaaattggtgacggtatggatccttcagttcaacttggacctttaacaaccaaaaaaagattaaacgaaattgaagaattagttgaaacaacaaaaaaagagggtgcgaaagttttactaggcgggaaaagaccatcaggttttaacaaaggttatttctatgaacct

SEQ ID NO: 214220 - DNA, 763 bp, Unknown
  Bacterial polypeptide expressing nucleotide sequence isolated from the Sargasso Sea
ggaacaggcacttggcaagttctcgggtgagtcgctcatccgcgagacgttcgacaatttcatcggcggcaagtgggtcgcgccggtcagggggcagtatttcgacaacgtgtcgcccgtcaccggacaggtggtgtgccgcgtggcgcgcggtacggcggaggacatcgagctggcgctggacgccgcccatgccgcgaaggacgcatggggcaaggcatcgcccatcgagcgctccaacacgctgctcaagatcgccgaccggctggaggccaacctcgaccggctggccctcgtcgagacgatcgacaacggcaagccgatccgcgagacgaccgccgccgacattccgctggcgatcgaccacttccgctacttcgcgggcgtgctgcgggcgcaggaaggctcgatcgcggagatcgaccatgacaccgtcgcctaccacttccatgagccgctgggcgtcgtcggccagatcatcccgtggaacttcccgatcctgatggccgcgtggaagctggccccggcgctggcggcaggcaactgcgtggtgctcaagcccgccgagcagacgccgatgtcgatcctggtgctggcggagaccatcgccgacctgctgccgccgggcgtgctcaacatcgtcaacggcttcggcatcgaggcgggcaagccgctcgccaccaacaagcgcatcgccaagatcgcgttcaccggcgagacaccaccggccgcctcatcatgcagtacgcctcggaaaacctga

SEQ ID NO: 214221 - DNA, 895 bp, Unknown
  Bacterial polypeptide expressing nucleotide sequence isolated from the Sargasso Sea
ttagtggttgaccactggagatattttgcaggtgtaattagagctgaggaaggttctgttgcagagataagtaatagtgaatattcttatcacataccagaaccattaggagtggttggtcagattattccttggaactttccacttttaatggcaacttggaaacttgctccagcattagctgcaggtaactgtgttgttttaaaaccggctgaacaaactccagcttcaattatgttattaatggaaatgattggtgatttattaccgccaggagttgtaaatgttgttagcggctttggtttggaagcaggtaaaccattagcttcatctaagagaatcaaaaagattgcttttacaggtgaaacaacaactggtcgtttgattatgcaatatgcatctcaaaacttaattccaattactttagaacttggtggaaaatctccaaatatattcttcgaagatgttatggcgcaagatgatgacttctttgataaatgtttagaaggttttgcaatgtttacacttaaccaaggtgaagtttgtacttgtccaagtagagtactagttcaagagtctatctatgataagttcatggaaagagctattgctagaacaaaagctgttaaacaagacaatcctctaaaaatggaaactatgattggtgctcaagcatcagtagaacaaatggaaaaaatcaaatcttacttagatttaggtaagaaagaaggtgccaaagttctatgtggtggaaatgttgctaaagttaatagtggtttagaaaaaggaaactatatcgaaccaactattttcgagggtaataattcgatgagaatcttccaagaagaaatttttggaccagtagtatcagtaactaaatttaaagagaagcaga

SEQ ID NO: 214222 - DNA, 877 bp, Unknown
  Bacterial polypeptide expressing nucleotide sequence isolated from the Sargasso Sea
acaggcaatttttatgttaacagctaagcccgatatcgataatggttttaaattacaaaaagagtcttttttaaatgaagatgcttcatcactaaaagatcgaatcaatgatctaaatataataaagaaagcattactcaaatatcagcatgaactctcttcagcaatgaatgaagattttggaaatagaaatcaaatggaaagcttgtttggtgacattcttccattgattaatacaattaattatcaaattaaaaaacttccgttttggatgagaccatccagaagaaaacctggattactcttatcacccgcaaaagttgaaatccattaccagccactgggtgtaatcggtattattgtaccttggaacttcccagttcaattgtcaattcatcccctgataactgcgctttcctccggaaatagagcaatgatcaagctttctgaatttaccccaaaaacaaatacgatcttacaaaaattaatcgatgaatgttttgataaagaaaaggtcatgcttgttcatggagattctgaaactgcagagtatttcacaacattgccatttgatcacatcttatttacaggctctacatctattggtaaaaaagttatgaaggctgcagctgagaatttaactccagttacgttagagttaggaggtaaatctccggttattatttgtgatgatataaaaattgaaactgctgtcgaaaggctaattcttggaaaatgccttaatgcagggcagatgtgtgtatcaccagactatatattttgcccaaacgatcaagtcgatgattttattacaacttataagaataaattcaaaaaaatgttggagaggtcaataacaataatgactactcaagca

SEQ ID NO: 214223 - DNA, 592 bp, Unknown
  Bacterial polypeptide expressing nucleotide sequence isolated from the Sargasso Sea
aatggcaaaaaagactaacaaaaacacttgggaattggctccagcacctgaaagttcgggacatattgatttgaaaaaacaatatgagctatttattgatggaagatgggttgctccaaaaaagaaaaaatactttgcaactacaaatccagcaaatgagaaaaaaatcgccaatattgcttatgcggatgagtctgatgttgatttagcggttgccgctgccagaaaagcatttgatggtgtttggtccaaaatagcgccatcggaaagagcgaaatatatatatagaattgctcgcataatgcaggaaaggtctagagagcttgctgttatcgaaacaatggatggcggaaaacccattcgtgaatcccgtgatgtagatgtgcctcttgcttccaatcattttttttacaacgcgggttgggcagataagttggaatatgcttttccaaccaagcgagctgagccattgggtgttgcaggtcaaataataccctggaactttccattgctaatggcagcatggaaaattgcaccagctttagcggcaggaaatactgttgtattaaagccagcagaaacgacatcttta

SEQ ID NO: 214224 - DNA, 757 bp, Unknown
  Bacterial polypeptide expressing nucleotide sequence isolated from the Sargasso Sea
aatgaaggtgtcttcagtattagatacatctcacttaaatgttaaatttccatttaaatcaaaatatggaaattacattaatggaaagtttgttgagccattatcaggtaaatactttgataatccaagcccaatttcaaacgagataatctgttctgtagcacgatcgaatgaaaaagatgttgaggcagcattagatgcagcccatgcagcttttaaagaatggggtaaaactgatatcacaacaagatctaatattttaaataaaatagctgacaagattgaggaaaacaaagacatgttagctgtagctgaatgtttagataatggtaagccaataagagaatgtatggctgctgatttggcgcttgtaatagatcattggagatattttgcaggtgtaattagagcagaagagggatcagttgctgagataagcaattctcaatactcatataatattcctgagccattaggtgttgttggtcaaatagttccttggaactttccattactgatggcaacttggaaattagcaccagcacttgcggcaggtaactgttcagttcttaaaccagcagaacaaacaccagcatctatcatggtgatgatggaattaattggtgatttattgcctcctggagttgttaatattgtaagtggttttggattagaagcaggtaaaccattagcttcatcaaaaagagttgctaaagttgcctttactggcgaaacgactactggaagattaatcatg

SEQ ID NO: 214225 - DNA, 736 bp, Unknown
  Bacterial polypeptide expressing nucleotide sequence isolated from the Sargasso Sea
ggatacagggaatgctttaagaacacaagcaaaaccagaaacttctgcctcaattgaattaactaggatgtttgctggtttatctggagagattaaaggtgagaattatcctccaaatattgcaaatactttacactacacaacaagagatccaattggagttgtttgcgctatcgttccttggaatgctcctttatttttaactgttgcaaagatagctccagcaattgtagctggtaatactgttgttttaaaaacagctgaacaagcacctttctgtgctctgttattagcagaaatttttcaaaaagagcttcctccgggagttttaaatgttatttctggatacggagaagaatgtggagagcctttgttatctcatcctgatgtaagaaagattacttttactggatcattcagtgttggaaaaattattgctcaaaaagctgctcctaaactttgtccagttactttggaacttggtggaaaaaatccaaatataattatgagtgatgcagatcttgatattgctatacctggagtaatcgatggtatgcgatatactcgtcagggacaggcatgtactgctggatcaagggtttatatacaggaaaaaatttatgaaaaagttttagaaggagttgttaataaattaaaaaatctgaagatgggaaatgccttagatgaaaattcagatataggagctataatttcaaaagagcaacttaatcgaaca

SEQ ID NO: 214226 - DNA, 910 bp, Unknown
  Bacterial polypeptide expressing nucleotide sequence isolated from the Sargasso Sea
attaagccgtctgagcttacgccagcgtcgggtgagtttatgaaaaaattaattgaaaaaactttttcatcagatgaggttgctgtttttttgggtgaaaaggaggtggctcaaaaactgttagaccttccctttaatcacattatgtttactggcagtcctagggttggtaagcttgttatgaaggctgcctcaaaacacctcgccggtgttactttagaattgggtggcaaatcccccgttattattgataaggatgcaaatataaacgatgctgcgtggaaaatttctttttataagtttgcgaacgcaggtcaaacatgtaccgcacctgattatatcctgtgtcatggatctgtatacgaagacctggtttctgctttacaaaaaaatatggcgcaattcttttctggcggcatagatgtggccacaaaagactattgctcaattgccaaccaacaccactttaacaggcttcaggatgctttgaggggtgctgtgtctgatggcgcagaaatagcctgtgggggagaaaccagtcaaagggggttgtatttttctccggctgttttaaccggagtaaactatgacaactcaattatgcaggaagaaatatttggacccattcttccggttgttaaggtcaaaaaccttgaagagtctattaattatataaacagcaacgaaaagccgttagccctttatctttttagtaacagttcttctgttcataatagggttttagaaaacacttcaagcggtggtatggtaattaacgactgtgttttacatcacatgaatccaaaccttccttttggtggaataaataatagcggggttggtagctatcacgggaagtttggttttgatgctttttctcatcaaaaagctgtcttaaagagtagcgcct

SEQ ID NO: 214227 - DNA, 589 bp, Unknown
  Bacterial polypeptide expressing nucleotide sequence isolated from the Sargasso Sea
atttgttctgcaatgtcgagaatgatagtccataaatctataaaggatgaagtgctcgagaaattatcaaagttagcagcttcaattaaagttggccctggcgatgaggaaggtgtcgatctaacgcctgttatatctgaagaacagttacaaaaagttgaaaattatgcgcgttcaggtttacaagctggcgctaaagcagtctcaggtggcaacagagtagatagaaaaggtttcttctttgaacccacaatttattcagatgttaaaccagatatgacaatagcacaggaggaaatctttggaccattcttatctgttttagattatgaagatcacgaggaggcgatacatattgcaaatgatacagattatggtttagcggctggtgtgtttactaaagatgttgatatggctacaaaaacagcttcacgtttaaatggtggtcaagtttatgtgaacagttggttcacaggaagtatcgcaactccatttggaggttataagcaatcaggttacagtcgcgagaaaggtcaacaagcaattaaaagctacttacagctgaagaacgtaggaatacaactttaag

SEQ ID NO: 214228 - DNA, 877 bp, Unknown
  Bacterial polypeptide expressing nucleotide sequence isolated from the Sargasso Sea
ctcagaattactcttgagacatctgaattgactaaaaaaatgtttcaagagtattttgattctgccgaagctgcagttttcactggcggaccagatgttggagctgcttttagtgctctaccttttgatcatttattatttaccggtagtacaaatactggaaaattagtcatgaagtctgccgcggaaaatttagttcctgttactttagaattaggtggaaagtcaccagtaatagttgatgacgatgccgacatgaaatctgctactacaagaattatgagaggcaaaacaatgaatgctggccaaatttgtttagcacctgattatgtaatggttccaaagggaaaatctgaagagttttatgagaaatctaaagaggctatagaaaagtcttatgaatctttgaaatataatccagattacacttctgtaatcaatgaaaaacactacgacagacttaacgatctaattgaggatgccaaagaaaaaggtgctgaggttaaagtaattaatcctgcaaatgaagatttttctcagcaagaagttcataaaatacctccaaccttaataatgaatccaacggatgatatgcaaataatgaaagaagaaatatttggtccagttcttcctgtgaaagaatatgaaaactttcaggagacaattgattatgtaaattctaaggatcgtccattaggactttattattttggaaaaaataaagaacgagaagataaagttttaaataacaccatttcaggaggagtaactatcaatgacgtgatttggcacattggacaagaagacttgccttttggaggagttggaccaagtggtataggaaattatcatgggtttgatgggtttaaagcattta

SEQ ID NO: 214229 - DNA, 886 bp, Unknown
  Bacterial polypeptide expressing nucleotide sequence isolated from the Sargasso Sea
atggaaataaataagttctacatcgatggaaattttgttgagccagatggttccgagaaaattgatatagtaaatcccgcaactgaagaagttataagtcatgtaatttcaggctcacctaaagatgttgatattgcagtagcggcagccaataaagcatttcctagtgctatggcattaactctagagcagaagaaaaaaatacttgaagaaataattgctggcatggaagaaaggcgtgaagatttcgcacaaattatttctgaggagatggggtcgccaataaaaatggcacgtaaagctcagtatggcgctggcgttattcattttaaaaatacgcttagtgttattgataaattcgatttcaatgaagttcatggcaacattacaataaataaattaccaattggcccagtaggaatgataactccttggaattggccccttaatcaaatgtgtaccaaaattgcttcagccatagctgctggaacatcctttgttttaaaacctagtgaaattactccaggggctgcacatatatttgccgaagttattgataaaacaagcatgcctaaaggtatgtttaatttgatacatggtcttggtgttactgtaggtaaagctatgagtagccattcagatttagaaatgatttcttttactggttctactagagctggaatagatattcaaaaaagtgcagcagataatatcaaaagagtctcattagaattaggaggtaaatctccaaatataattcttgaagatgttgatttagaaaatgctgtaaccatgggcatgaagcaatgttttcttaatacaggccaatcttgttcatctccaacaagaatgttattgcctgaacatatgcttgatgaagcaacta

SEQ ID NO: 214230 - DNA, 735 bp, Unknown
  Bacterial polypeptide expressing nucleotide sequence isolated from the Sargasso Sea
taaatcagcaacttatttcaatactgtgaaccctgccagcggaaaaagactagcaaggattactgaagctggaaaagtagaagtaaattctgctgtaagtgctgcaaagctggcatttccaaagtggaatgctctaacaggacatgaaagagcacgctttctttacgcgattgctcgccaggttcagaaacactctagactatttgctgtacttgaatctatggacaacggtaaaacaataagagaaacgcgagacatagatataccacttgtcatcagacatttctatcaccatgcaggatgggcacagacactggaaagtgaatttcctaaacacgaagcaatcggtcctgtaggtcagataattccatggaacttcccactgatgctactttcttggaaaattgcacctgcactagctgcaggtaacaccgttgtcctaaaacctgctgaatttacaccgctaacagcacttcttttcgccgaaatatgcaatcagtctggtcttcctccaggggttttaaatgtactaactggttcgggcaaaacaggatctatgctagttaaacatccagatttaaaaaaaattgccttcactggttctacagaagtaggcagaattataagagaggaaactgcagattcagacaaaaagctaactctcgaacttggaggcaaatcaccttttattatttttgaaaacgctgaccttgatagcgctatagaaggattggt

SEQ ID NO: 214231 - DNA, 1007 bp, Unknown
  Bacterial polypeptide expressing nucleotide sequence isolated from the Sargasso Sea
ggaaagaaagtctgaaattgaaactttattatcattagatacaggtaatgctttaaaaacacaggccataccagaaacaggcgcttccattgaacttacaaatatgtttgctggtttatctggagagttaaaaggagaaaattatccaaccaatattccaaatagtattcattataccactagagatccaattggagttgtttgtgcaatcgtcccttggaatgcaccattatttttaacagtagcaaaaattgctccagctattgtagcaggaaatagtgttgttttaaaaacagctgaacaagctccattttgtgctcttctactatcggagatatttcaacaagaacttcctccgggtgttttaaatgtaatttcaggctatggagaagagtgtggcgaacctctggtaactcatgaaaaagtaagaaaagtaacgtttactggatcttttactgtaggaaagattatagcacaaaaagcagctcctaaattatgtccagttaccttagagcttggaggaaaaaatccaaatataataatgagtgatgcagatttagatattgcaattcaaggggttattgatggaatgagatatacacgacaaggacaagcatgtactgctggttcaagagtttatattcaggaaaaaatttatgataaagtacttggtggagctgttgaaaaattaagtaaattaaaaatgggtaatgctctagatgaaagttctgatattggagcaattatttccgaagaacaactgaaacgaactttacattatatggatattgccaaaaaaaactctacaaccaatgttgtacatggtggtaatcaactaacaggtggtgattataaaaatggtttcttctatgaacctacattgatgtcaagtgttccagtaagctctccagtttgccaagaagaaatatttggtcctgttgcttgtgcaataccatttaaaacatttgatgaagtaatgaacagtgcgaatgatacaccatttggat

SEQ ID NO: 214232 - DNA, 796 bp, Unknown
  Bacterial polypeptide expressing nucleotide sequence isolated from the Sargasso Sea
tctttcgagacaccagaacattcaaatgatatcattcaccgggtcaacaagagcaggtaaagaagtaaccagagatgctgcagatacaataaagcgagtaactttagagcttggaggaaagtcagcaaatattatttttgaagactgtgatttggaagcgagtattaagcaatctgttagtgaatgcatgtttaatactggtcaatcgtgtgacgctccaaccagaatgcttgttcagagaagtatttacggtgaatcaataggtttgcttaaaaaatatggatctgaaattgaagttggagacccaagtaatgaaggtgaacatataggtccattgtttgataaaattcaatttgatcgtgtgcaaaacatgataaaaactggaatagaagagggggctgaaatattaatcggtgggttgggaaaacctaacggattttcaaaaggttggtatgtaaaacccactatatttaagaatgtttcaaaccaaatgagagttgcgagagaggaaatatttgggccagttttagtggtaatacctttcgatacagaagaagatgctgttgaaattgccaatgatacgccttacggtctggcagcctatttaagttcaggagatactgagcgtgcaacacgggtcgctgcaaagttaaaagctggtgcggtgcacattaatggaggaggctttaattatggatcaccttttggtggctataaacaatctgggaatggaagagaaggtggaatcttaggcctagaggactatttagagactaaaacattgcattggggttaa

SEQ ID NO: 214233 - DNA, 961 bp, Unknown
  Bacterial polypeptide expressing nucleotide sequence isolated from the Sargasso Sea
tggtgaaactgtggctatccataaccctgccaaccaagagttaattggtcatgtgcctgtgatgggcgcagctgaaactcaagccgcaatcactgcagcaaaccaagcattaccagcctggcgagcgctaacagcaaaagagcgcagccaaaagttgcgtcgttggtttgagttaatgcaccagcacgcagatgacttagcgttaatgatgaccaccgagcaaggtaaacctttggcagaagccaaaggcgaggtgacttatgccgcctcatttgttgaatggtttgctgaagaagccaagcgtatttatggcgacacgattcctgggcatcaagccgataaaaggctgacagtgattaaacaacctgttggcgtgacagcagcaataacgccatggaatttccctgcggccatgatcacccgtaaagccgcccccgcacttgcagcaggttgcaccatgattgttaaacctgcgccgcaaacgccttttaccgcactagcattagctgaacttgctcatcgtgcaggtattcctgctggtgtgtttagtgtggtcacaggtgatgctattgccattggcaatacactttgcaaaagcccggtagtgcgtaagttgtcgtttacgggctcaacagctgttggcataacattaatggagcaatgcgcgccaacgcttaaaaaactgtcgcttgagttaggcggcaatgcaccgtttattgtatttgacgatgccgatattgacgccgcagttgaaggcgccatgattgctaaatatcgcaatgctgggcaaacctgtgtatgtgctaaccgtatctatgttcaggcaggcgtgtacgagcagtttacgcaaaaatttgccgccgcagtggctaagctcaatgtgggtataggcacagatgacggggtgaatattggcccgttaattaatcaagccgcagtgcaaaagtacaaagccattaac

SEQ ID NO: 214234 - DNA, 724 bp, Unknown
  Bacterial polypeptide expressing nucleotide sequence isolated from the Sargasso Sea
aagattcagcagatacggttaaaacgtgtgactcttgaactgggtggaaaatcccctaatttagtcttctccgactgcaatttagaggaacgagtaaatgcctcagtaaatgaatgcatgttcaatacagggcagtcttgcgatgctccaacacgtcttttagttgaggagtcctgctatgaagaggtacttaaaattgccaaagaagcctgcgataaagtattagtcgattcaccaaaaaaggaaggtgatcacatcggaccgctgtttgataaaattcaattcgaacgagtgcaaacccttattaattctggtattgatgaaggcgcaacattattatgcggtggccctggtaaaccggaaggttttgaaaatggctggttcgtcaaaccaactatctttatggacgttacaaatgatatgaaaattgctaaagaagaaattttcggacctgtgttggtgattataccttttaaagatgaagacgaagccatagaaatcgctaatgacacgccctatggtcttgctgcttatcttcaaactggatctgatgagagagcgaagagagttgccgcaaaactaagagcaggtgcggttcatatcaatggcggtgaattcaattatggatcacctttcggtggttataagcagtctggcaatggtcgtgaaggtggagtaatgggtcttgaagactacctggaaacaaaaaccctacattattaat

SEQ ID NO: 214235 - DNA, 892 bp, Unknown
  Bacterial polypeptide expressing nucleotide sequence isolated from the Sargasso Sea
tcgatttcatgaagttcatggcaacattacaataaataaattaccaattggcccagtaggaatgataactccttggaattggccccttaatcaaatgtgtaccaaagttgcttcagccatagctgctggaacctcttgtgttctaaaacctagtgaaattactccaggtgctgcacatatatttgccgaagttgttaataaaacaagcatgcctaaaggtatgtttaatttgatacatggtcttggtgtcactgtaggtaaagccatgagtagccattcagatttagaaatgatttcttttactggttctaccagagctggaatagatattcaaaaaagtgcagcagataacatcaaaagagtctcattagaattaggaggtaaatctccaaatataattcttgaagatgtcgatttagaaaatgctgtaaccatgggcatgaagcaatgttttcttaatacaggccaatcttgttcatctccaacaagaatgttattgcctgaacatatgcttgatgaagcaactaaatatgcagtagcagcagcaaatgatatgtctacaggagaccctttagatgaagagatttatttgggcccaatatctaataaaacacaatatgagaaggtgcaagatctaattcaaaaaggcatagatgagggagcaactctagcatgtggaggaacaggcagacctgatggattagagaaaggattttttgttaaaccaacggtcttcactaatgttaataacaatatgaccattgctcgagaagagatatttggccctgttatttgcttaataccttattctgatgttgagcaagcaatcgagattgcaaatgattcagaatatggtctctcaagcatgatttcatgctctgatgaagtaaaa

SEQ ID NO: 214236 - DNA, 576 bp, Unknown
  Bacterial polypeptide expressing nucleotide sequence isolated from the Sargasso Sea
tttggcgccagctccagagaataaagatcatatttctttgaaagataaatatggactttttattaatggaaaatttgttgccccaaaaagtggtaagtattttccgtctattaatccagctaatgagcaaaaattagccatgattgcagaagcgggtgctaaggatgttgatgcagctattaaggcagctaggaacgcatataataatatttggtctaaaatatcaggtaaagaaagaggtaaatatatatatcgaatagcgaggattattcaggaaaaatctagagaactagctgtaattgaatcattggatggcggaaaggcaattagagaatcaagagatgtagatgtgcctatctcagctgctcattttttctattatgctggatgggcagataaattaaattatgcttttcctaatcaaaatccatcgccaattggtgtggctggtcagattataccatggaactttcctttaatgatggctgcttggaaaatagctcctgctttagcgacaggaaacacggtagtgcttaaaccagcagagaccacttcattaacggcattaaaattagc

SEQ ID NO: 214237 - DNA, 728 bp, Unknown
  Bacterial polypeptide expressing nucleotide sequence isolated from the Sargasso Sea
catcgtgccctggaacttccccctggtgatggcctgctggaagctgggcccggcgctcgccaccggcaactcggtgatcctcaaaccctccgagaaatcccccctcaccgccctgcgcatcgcgggtctggcgaaggaggcgggcatccccgacggtgtcttcaacgtgctgccgggctttggtcacaccgtgggcgaggcgctggccatgcacatggacgtcgactgcatcaccttcaccggctccaccaagatcggcaagcatctggtgcagtgctccgggaaatccaatctgaaacgcgcctttatggagtgcggcggcaagagtcccaacatcgtgctggcggatgcaccggatctggacgccgccgccagaagcgccgtcggcgccatcttctacaaccagggggaagtgtgcaccgccgcctcccgcctgctggtgcaaaacagcatcaagccccagttcatggagcggctgctggcccacgcccgcgaatggatctcggccaacccgctcgaccccaccacccgcatcggcgccatggtggaccacatccagatggagcaggtgctcaactacatcgccatcggccagcaggagggcgccaagctgctgctggggggcaagcgcacccagcccgaggagggcggctactacatcgaacccaccatctttgacgacgtgaccccgacgatgcgcatcttccgcgaggagatcttcggccccg

SEQ ID NO: 214238 - DNA, 670 bp, Unknown
  Bacterial polypeptide expressing nucleotide sequence isolated from the Sargasso Sea
ttggatacttctcacttaaaagtcccatttccttacaaagcaaagtatggaaattatataaatgggaaatttgttgaaccaaagtctggaaaatattttgacaatactacaccaattaacaatgaggtaatttgtagtgtagctagatcagatgcaaaagatgtagatgcggctttagatgcagcacatgcagcctttccaacttggggaaaaacatcaataacagaaagatcaaacattctaattaagatagctgatgtaattgagaaaaatttagaaaaattagctaccgctgaatgcttggataatggaaagccgattagagaatgtatggctgcagatttacctttagtggttgatcactggagatattttgcaggtgtaattagagctgaagaaggttctgttgctgagataagtaataatgaatattcttatcacatacctgaaccactaggtgtagttggtcaaattataccatggaacttcccacttcttatggcaacatggaagcttgctccagcattggcagcaggtaactgtgtagttttaaaaccagctgagcaaactccagcatctattatgttgttaatggaattaattggtgatttattacctccaggagttgttaacgttgtgagtggttttggtttagaagcaggaaaacctt

SEQ ID NO: 214239 - DNA, 848 bp, Unknown
  Bacterial polypeptide expressing nucleotide sequence isolated from the Sargasso Sea
tgataaggtgagtggcgatactcttcctatagataagcccgacttattcgtttttactaacagggagccccttggcgttgtggcagcagtcgttccttggaactcacaactctttctagttgctgtaaagataggtcctgctttagctgcgggcaatacagtagttttaaaagcttctgagcatgcctctgcggcaatgttagaatttggaaaatgtatagaagaagccgggattccaccaggagtggttaatattattacgggtcatggggacccgtgtggaaaggttttaacttcccatccaaaggtctcacgaatctctttcaccggtgggcctaattcagcaagacatgtggtaaaaaattctgcagaaaattttgcggaagtatctcttgaattgggtggtaagtctccttttatcgtttttgatgatgcaaatatagaaaatgctgtaaattgttctattgcgggaatttttggagccacgggtcagagttgcgtagctggctcaagggtttatttacaagaaaatattgcagatgaatttttagataaaatcgtcgcccaagctaaagaaatagtaattggagaccctcttcttgatgagactcaaatgggccctctgtgcactgagggtcagctttcaaatattaaaacagagcttaattttgccctatcagagggtggagaaattttatgtggtggtaaatctcctgagggtttaggagaattattctttgagcctactattgttgcctgcccaaaccaaaaaatgagaattgttgataccgagttattcggacctgtgttaacggtaattaaatttaaagatgaagaagaggtgtaag

SEQ ID NO: 214240 - DNA, 844 bp, Unknown
  Bacterial polypeptide expressing nucleotide sequence isolated from the Sargasso Sea
aatgaaatttaattatgtgttaaaaaaaattaaaaaatggtcaaaaaaaagaaaagtgtcttcatctctttttaattttttatcaactgactatatcttgccttgcccatatggtattactttaaatatttccccatggaattacccatttcaattatctatctctccgataataggtgcaatatcagctggcaacactgttgtattaaagccctctgaacattctccaaatacaacaaatatcttaaagcttgtcattgaaaaatcttttgaaagaggtcatgttgatatcgtaacaggaggtccagatactggtcaaaaacttttggaattaaattgggattacatattttttactggaagtacagaaataggaaaaattgtagcaaaagaagcagcaaaaacactcacacctgtgactttggagcttggtggaaataatccgtgtgtaatagataaaaacatatctcttaaaacaacttcaaagagagtcatatgggggaagtttttaaattgtggtcaaacatgtatagcaccaaactttctggcggttgacgtaaaaattaaagattcattattgaatcaacttatctttgatattaaggatacttttggagatgacgtttacaatagtccttattattcaagaattataaataaaaaacatgttgagagattatcaaaattaattaaaggttataaattattacacggcggtaattataatatggaaaaaaacttttttgaaccaactatattggaggtaaaatcaataaaagacaaaatactaaaagatgagatttttggaccaatacttccagttttaacttaccaatctgttgat

SEQ ID NO: 214241 - DNA, 769 bp, Unknown
  Bacterial polypeptide expressing nucleotide sequence isolated from the Sargasso Sea
atgctgcgcagaacataattccataactttggaattaggcggaaaatctccaaatattttctttgaagacattatggaaaaagatgatgatttcttagataaatgtgttgaaggttttgtaatgttcaacttaaaccaaggcgaggtttgtacttgcccaagcagagcattagttcaagagtctatttatgataaattcatggaaagatgtatcaaaagaactaaagcagttgttcaggataatcctttaaaaatggaaactatgattggagcacaagcttctgtagaacaagtggaaaagataaaatcttaccttgatctaggcaaaaaagagggtgctaaagttcttactggtggatctcaggctaaattaaatagtggattggaaaaaggaaactatatccaaccaactatttttgaggctaaaaataatatgagaatttcccaagaagaaatttttggaccagttgtttctgttattaaatttaaagatgaagcagatgcgttaagaatcgcgaatgatactctttacggtttaggcgcaggtgtttggacacgaaatggtaatattgcttatagaatgggaagagcgatacaagcaggtatagtgtggacaaattgttaccacgcttatccagcacattcaccatttggtggttataaacagtctggcgtaggtagagagactcataaaatgatgcttaatcattatagacagaataagaacttacacgtttcttatgctgagaaaaaattgggcttcttttaa

SEQ ID NO: 214242 - DNA, 828 bp, Unknown
  Bacterial polypeptide expressing nucleotide sequence isolated from the Sargasso Sea
ggtgagattattcttggtaattctgaagatgtagatatggctgtgagcgctgcaaaaaatgcatttaatagcttttctaaaacttcaaaaaatgatcgtttagaattattaaataaaattaggcagatttctgaaaaaagatttgaagatcttgctaatgcgatgacatcagaaatgggagctcctcatagaatggctcgagaagcacaggcagatgctgctataggacatttagatggttttattgatgcattaaagaagcatgaagaaaaaattgttctttctaatacagatgtacttttaaaagagccaataggagtttgtggtttaattactccttggaactggcccattaatcaaattacattaaaagttcttccagtgattgctacaggatgtacgtgtattttaaagccatctgagcatacgcctttatcagcgatggtttacgctgaaattctagatgaggctggagttcctgatggtgtatttaatttagtacatggagatggagaaggagtaggtgtgtcgatgtctcggcatccagatatagaaatgatgtcatttactggctcaaaaagaggaggcaagtcagtcactattgaatctgcagaaactgtaaaaaaagtaactttagaattaggtggtaagtcgcctaacattgtctttgcagattgtgacttagatgaaaaagtaaaagattcagtaaatgaatgcatgtttaatacaggacaatcttgtgatgctcctacaaggttactggtagaaaaaaaatgctacgatgaagtaattgatatcgcaaaaaaaactgccgaagaaattaaggta

SEQ ID NO: 214243 - DNA, 928 bp, Unknown
  Bacterial polypeptide expressing nucleotide sequence isolated from the Sargasso Sea
gcagcccccggcgccgctggcgccaagatcacctacaagccccgttacgacaacttcatcggcggcaaattcgtgccgcccgtcaagggccagtactttgatgtcatcacgccggtgagcggcaaggtttacacccaggccgcccgctccacggccgaagacattgaactggcactggacgccgcccacgccgccgccgacagctggggcaagaccgatgccgccacgcgcgccaacatcctgctcaagatcgccaaccgcatcgaagaaaacctggagcgcctggcctacgccgaaaccgtggacaacggcaaggccatccgcgagacgctgaacgccgacattccgctcaccgtggaccacttccgctactttgcgggctgcgtgcgtgcgcaagaaggcgccctctccaacatcgacgagaacacggtggcgtaccacatccaggagccgctgggcgtggtgggccagatcattccgtggaacttccccatcctgatggcggcgtggaagctggcgcccgcgcttggtgctggcaactgcgtggtgctcaagcctgcagagtccacgcccatctccatcctgatcctggtcgagctgattgccgacctgctgccgcccggtgtgctcaacatcgtcaacggctacggccgtgaggcgggcatgccgttggcgcagagcaagcgcatcgccaagattgccttcaccggctccaccagcaccggacgcgtgatcgcccaggccgccgccaacaacctgatccctgccacgctggagctgggcggcaagagccccaacatcttctttgccgacgtgatggacaaggacgatgcgtttctggacaaggcgattgaaggcctggtgctgttcgcgttcaaccagggcgaggtctgcacctgcccgagccgcgcactcattcaggaatcga

SEQ ID NO: 214244 - DNA, 874 bp, Unknown
  Bacterial polypeptide expressing nucleotide sequence isolated from the Sargasso Sea
tacaaaatatgagccatatggtgttatcggaatgattacagcgtggaactctcctttactacttttatcttggaaacttgctccagcattagcagcaggaaatacagcagtaattaagccatctgaatttacttctgcttctactttagaattcatgaaattaatttcagaagccggattccctgacggtgttgttaattgtgttacaggtatgggtattgacgttggacaaccacttgttgagcacaaacatatttccaaaattgcatttactggatctgatgtttcaggtcaaaaaatctatgaaacagctgcaaaaaaaattatgcctgtatctttagaactcggcggtaaatcacctaatattgtttttgaagatgctgattttgaagctgcaataatgggtgtaatatcgggaatatttgcagcaacaggacaaacttgtatagcagggtctcgtttgttagttcaggattctatttatgaaaagtttgtgaaaagacttgttgaagttgcaagtgaagcaaaaataggtgatccaatgtcacttgatacacatgtaggtcctgtaacaacacagccacaatttgacaaaatcatgagttacatagaaattgcaaaatcagaaggtgcaaaatgtgttctaggtggaaaagcttactctggggagaatgttagaggaaatagatttgttgagccaacaatttttaccgatgttaataatgaaatgagaattgctcaagaagaagtatttggtcctgttttatctatcattcgatttaaggatgaagaagaagctataaaagtaggtaatgatgttgtatttggtctagcagctggtgtatggactaacaatattgggaagagcgcttag

SEQ ID NO: 214245 - DNA, 758 bp, Unknown
  Bacterial polypeptide expressing nucleotide sequence isolated from the Sargasso Sea
tgcaacattaagatattatggtgaggccattgacaaagtttatggtgaaattgcccctacagctgaaggaattcttggcttaattaaaaaggagccaatcggagtggttggggctattgttccatggaattttcctttaatgataggtgcttggaaaattgggcctgctttggccgctggaaatagtgttattttaaaacctgcagaaagtgcttctttaagtttacttaggctggcagaattgggtttggaagctggattgccaccaggagttttacaggtagttactgggtatggttctgaagcaggacaagccattgctttatccaaagatgtggatgttttgacctttacaggtgcagggcttaccggacgaaaattaatggaattttctgcccaatccaatctaaagcgagtttatttagaattaggaggtaagtctcctaatatcgtttttagtgatgctccagatttagaattggctgctaaatctgcggtaaatgcgatttttaggaatagcggtcaggtctgtgttgctggatcaaggttgttggttgagcattcaatttaccaaaactttcttgataaagtttgtaactatacagcacaattaaaggttggtgatccccttgatctttctaatgacataggagccgtgcattctgaagcacaacttttgaaaaatttgaggtttttagattcgttaaaaaacagagaaaaaaatatagttttagggggtgatcgtttaatagaggaat

SEQ ID NO: 214246 - DNA, 838 bp, Unknown
  Bacterial polypeptide expressing nucleotide sequence isolated from the Sargasso Sea
acatcaatcactgagagatcaaatatactcttaaagattgctgatgttatagagaaaaatcttaatgttttagctacagcagagtgtttagacaatggtaagccaattagagaatgtatggctgcagatttacctttggtaattgatcattggagatattttgctggagtgattagagcagaggaaggttcagttgctgaaattagtaacagtgaatattcttaccacataccagaaccattaggtgtagttggtcagataataccttggaacttcccattattaatggctacatggaaactagctccagcattggcagcaggaaattgtgtagttttaaaaccagcagaacaaacaccagcatcaattatgcttttaatggaacttatcggagatctgttaccagcaggtgttgttaacgttgttagcggatatggtcttgaagcaggtaaacctttagcttcttcaaaaagaattaagaagattgcttttacaggtgaaactactactggacgtttgataatgcagtacgcatctcaaaacttaataccaataactttggaattaggtggtaaatcgccaaacattttctttgaagatgtaatggctaaagatgatgacttctttgataaatgtttagagggttttgcaatgtttacgcttaatcaaggagaagtttgtacttgtccaagtagagctttaattcagaaatcgatctatgacaaattcatggaaaaagcgattgctagaactaaggctgtgaaacaagataatcctttaaaaatggaaactatgattggagctcaagcttcattagaacaaatggaaaaaattaagt

SEQ ID NO: 214247 - DNA, 850 bp, Unknown
  Bacterial polypeptide expressing nucleotide sequence isolated from the Sargasso Sea
aatggccgacttagtcgcgcagcgcagccacgctaaagctgagggtattgaaagctaccagcaaagacgtgaacacttacttgcgttaaaagccatgattactgagaaccaagcacgtattatcaaggccattaatcaagactatggtaatcgctctcgccatgaaaccttacttgccgaaatcattaatgcctgtgcagatatcaatagcactttaaaacacctaaaaaagtggatgaaagtgcaaaagcgacatgttgatcatcgtatgtatttaggggcaaaaaaccgagttattccccagcctttaggtgttgtagggttaattgtgccatggaatttcccgataaatttagcctttagtcaattagccgcagcatttgcagcaggtaataaggcgatggtaaaaatgtctgaaaactctcggcatttaagtgcgcttttaggcgagctagtgggcaattattttaagcccgaaaagctgcaattttactgtgagacaggtgaagtaggcatcgccttttcaaagctcccctttgatcatctaatgttcacaggctcaggtgaaaccggtaaaaaagtgatggctgccgcagcccaaaccctaacgcctgtaacccttgagttaggtggtaaatctcctgctgtgattgctactgattacccgatgcaaaaagctgttgagcgaatcatgtatgtaaaacaaatgaacgcggggcaaatttgtaccaatgttgattacgtatttgtgcatcagtctcaacttgcgctatttatcgatacagcaactcgctgggcaaaaagcatgtgccagatatccatagccaagattacacagccattattgatg

SEQ ID NO: 214248 - DNA, 850 bp, Unknown
  Bacterial polypeptide expressing nucleotide sequence isolated from the Sargasso Sea
aaatgctgatgcctttgatgttattaatccttttaactctgaaataattgcgtccattgctcaatcatcaaccgaccaggtaaatgaagctgtatcatcagctaaacatgcttttcctaaatggtcgagaacttcccctggggaaagatcaggtttgcttctaaaattagctgatgaaatagaaaaaaatgctgaagaaattgctaaacttgagtcgcttaataccggtaagccatatcatttggctttaaatgacgaaattccaggaacagctgacactttcagatactatggtggtatttgtagaaatttaccaggttacgctgctggagaatatatgactggttttacgagcatgataagaagagatcccattggtgttgtggcttcgattgctccttggaactaccctctaatgatggctgcatggaaaatagctcctgctgtagctgctggtaatacgatggtgcttaaaccttctgagcaaacacctttatctactttatacgttgctgaattaattgcaggtatatttcctgaaggcgtaatcaatatagttcatggtgtgggagaaactgtaggatctagtcttataaatcatcctgatgttaatatgatttctttaacaggtgatattgcgactggaactaaagttttagacgcagcaagtaaaagtatcaaaaaaacacatctagagcttggaggtaaggcccctgtaatcgtctttgatgatgctgatattaacgatgtggtagaaggagtaagagcctttggatattacaatgcgggtcaagattgtactgcagcttgtcgtatttttgctgataaaaaagtttatgaaaaaatagta

SEQ ID NO: 214249 - DNA, 787 bp, Unknown
  Bacterial polypeptide expressing nucleotide sequence isolated from the Sargasso Sea
tttgggcgaaaaatatgtagcacaaaaacttttaaaccttcccttcaaccacataatgtttactggtagcccaaaggttggaaaggttgttatggaggcggcttcgcgaaaccttgcgggcgtaacccttgagctgggtggtaaatctcctgttattgtagacaaacacgcaaacataaaagatgctgcgtggaaaatttctttttataagtttgcaaacgcaggtcaaacatgcactgccccagattatattttgtgcgacgaggctgtacatgaagatctaattactgctttacaaaaaaatatgtctgaattctttcctggcggaatagatgaagccaccaaagactattgttctattgccaacgaacaccactttaacagactaaaaagtgcgcttacagaggctgttgatggtggagcaagggttgcatggggcggtgaaaccagtcaagaaggcttatatttttctccagctgttttaaccagcgttggctatgataacccaattatggaggaagagatttttggaccaattcttccggttgttaaggtcaaaagccttgatgagtcaattaattatgtaaacagcaacgaaaaacctttagccctatatctctttagttccaaatcttcttcccatagcagggttttaaaaaacacctcaagcggtggaatggttataaacgactgtgttttacaccacatgaacccaaaccttccttttggaggaataaacaatagtgggattggtagctatcatgggaaatttggttttgatgcattt

SEQ ID NO: 214250 - DNA, 884 bp, Unknown
  Bacterial polypeptide expressing nucleotide sequence isolated from the Sargasso Sea
gattttattttaagacttaaagactttgaatttgatgaacattttgatcaaaaatctaataaccacatttattatgagccaatcggagtttgtggactaattactccatggaattggccaataaaccaaatagctctcaaagtagttccagcatttgcaacaggatgtacaatgatactcaagccatcagaaatagcaccactttcaggaatgctatttgcagaaatgattgatgaagttggtttaccaaacggagtatttaatctggtaaatggagatggtgcaggagttggaactcaaatatctggtcatcccgatattgatatggtttcttttacaggttcaacacgtgcaggaagattaatttcaaaaaatgcagctgaaactataaaaagagtttgtttagaacttggtggcaaaggtggaaatatagtttttgcagatagttatgaaaatgcagttagagatggcataagaaatgttatgagtaattcgggccaatcatgtgatgcaccaacaagaatgttagttgagaaatctatttatgaaagggcagtcaatgaagcagttgatgaggcaaataaaataaaagtagatcaagcctcaaagaaaggtgatcacataggacctgtaatatctaaaactcaatatgaaaagatcatcaatttaattgaaagcggaatttctgaaggtgcaacgttagcggccggtggtccagagttacctaatggattaaataaaggttattttataaaaccaacaatttttacaaatgttacaaacgacatgaggatagcaaaggaagaaatttttggtcctgtcctttctattattccgtttgaaaccgaagatgaagcagtgaacattgtgaacgatacttcttt

SEQ ID NO: 214251 - DNA, 376 bp, Unknown
  Bacterial polypeptide expressing nucleotide sequence isolated from the Sargasso Sea
aaacatctggacaaaggatataccattgaaccaacggtcttcatggatgtgacgaatgagatggttatcgcccaggaggagatttttggcccggttcttgtggttatagattatgagacagaggatgaggcgattaatattgctaataattctccctacggactttcagctggtgtttggtcaggttcggaggaaaaagcgttggctgttgctcgtagattgaggacgggaacggttacggttaatgggggtaattactatggtgcggatgcgccttttggtggttataagcaaagtggaatcggtcgtgaaatggggcgggaaggcttcgaagaatatcttgaaacaaaaaccattgccataggtgtatcatgaa

SEQ ID NO: 214252 - DNA, 952 bp, Unknown
  Bacterial polypeptide expressing nucleotide sequence isolated from the Sargasso Sea
tcaatggcacgttcagctcaagctgatgcagccattggacatttagattcatttatcgatgcattaaatgaattagaagagagaactacattaaaaaatggcgatattcttttaaaagaacccataggagtatgcgggctgataactccctggaattggcctattaatcaaattgctttgaaggtcatacccgcacttgcaactggatgtacatgtattctaaaaccatctgagcatactccagtatccgcaatgatttatgctgaagtcatagaagaggctgggtatccagctggggttttcaacctcgttaatggtgttggggatgttgtcggaacagcaatgtccaaacataaagatattgatatgatgtccttcactggatcaacgagagcaggaattctggtaactaaagattcagcagaaacaattaagagagttactttagaactaggtggaaaatctcctaatattgtcttctctgatgccaacctagaaagagacatcgaatattcggtgaaagagtgcatgttaaacacaggtcagtcctgtgatgcaccgacgagacttctagttgaaagctcctgctatgaggaagtcttaaaaattgcaaaaaaagtggctgaagaaataacaatcaatgaccctgaaaaagagggagaccatatagggcccttattcgataaaatacaattcgatcgcgttcagaatatgatagacgttgggatcaaagaaggagcttcagtgttaacaggaggattgggaaagcctcagggtttagaagatggttggttcgtaaagcccacaattttttacaatgtaacaaacaatatgagagtggcacaagaagagatttttgggccggtccttgttataataccttttgaaaatgagtctgatgccgtttctatggcaaatgacaccccttatggattagccgcatatttgcaga

SEQ ID NO: 214253 - DNA, 955 bp, Unknown
  Bacterial polypeptide expressing nucleotide sequence isolated from the Sargasso Sea
aaaatacttcaaactatgtctgaagaaatgggggctcctttagattggtgttcgtcagctcaaacttcttctggagcagatcatattaatgatttcattctcagattaaaaaattttcaatttgaaactaactttaataaagattctaataattatattgtctatgagcctattggagtatgtggacttattactccatggaactggcctattaatcaaattactttgaaagtaattccagccttagctactggttgtacaatgattttaaaaccttctgaaattgcaccactatcaggaatgctctttgctgaaattattcatgaagctggatttcccgctggtgttttcaatttaataaatggagatggtgctggtgtaggtacagatttgtctactcatagtgatgttgatatgatttcttttactggatcaacaagagcaggaaaacttatttcaaaaaatgctgcagatactattaaaagagtttgtctagaattaggtggtaaaggaggtaatattgtttttagtgactcacacccaggtgcagtaagagagggtgttaggaacattatgagtaattcaggccaatcttgtgatgcaccaacaagaatgctagttgaaaaatctatctataaaagagcaatagaagaagctgcagatgaagcaaataaaattaaagttgatatagctttaaaaaatggaaatcatattgggccagttatttctcaaacccaatatgataaaattattgatctcataagaagtggaataaatgatggagccacactagttgctggtggtccagaaaaacctaatggactagaaaaaggttattttgtaaagccaacaatatttactgatgtaacaaacaaaatgagaattgcaaaagaagagatttttggtcctgtactatccataataccatttgagaatgaggatgaggctatatcaa

SEQ ID NO: 214254 - DNA, 555 bp, Unknown
  Bacterial polypeptide expressing nucleotide sequence isolated from the Sargasso Sea
atatgcttgatgaagcaactaaatatgcagtagcagcagcaaatgatatgactacaggagatcctttagatgaagagatttatttgggcccaatatctaataaaacacaatatgagaaggtgcaagatctaattcaaaaaggtatagatgagggagcaactctagcatgtggaggaacaggcagacctgatggattagagaaaggattttttgttaaaccaacggtcttcactaatgttaataataatatgaccattgctcgagaagagatatttggccctgttatttgcttaataccttattctgatgttgagcaagcaatcgagattgcaaatgattcagaatatggtctctcaagcatgatttcatgctctgatgaagtaaaaggccaagaaatagcgaagaaaataagaacaggacaagttattttaaatagaatctctcgaggagattatccagctccattcggtgggtttaaaatgtcaggtaatggacgagaacatgggctttttggtattgatgaatacttagaagtgcaagctgttataacttaat

SEQ ID NO: 214255 - DNA, 895 bp, Unknown
  Bacterial polypeptide expressing nucleotide sequence isolated from the Sargasso Sea
tccctcaactgaggaagcttttgcgataatatctttgggctctgcagaagatgctgataaagctataaatgctgccaagatcgcatttgagacttggagagaaactacaaaggaagaaagattagctttacttgagaagtttgatgaaatttataatagaagatgggatgaaatggttgatgcgcaatctaaagaaatgggcgccccattagattttgcttccgaaacacacactaaaatgggtgctgatatttgtagaaataacattgaaattttaaaagattttaattttgaacatcaatttgatcctaaatctaataaccatataagatatgaaccaattggagtttgtggattaattacgccatggaattttcctatgaatcaaatcgtattaaaggttattcctgctttagctgctggttgtacaatgattttaaaaccatccgaaattgctccagtgtcagcagtattgtttgcagaaatgattgatgaagctggttttcctgcaggagtttttaatttagttaatggaaatggagaagttgttggaaatcatatttctggtcatcctgatattgatatggtttcattcacaggatcaacaagagctggaaaattaattcaaaaaaatgcagcagatactataaaaaaagttactcttgaattgggtggaaaaggtggaaatatagtttttgcggactcatatccaaatgctgtaagagatggtgtaagaaatataatgagcaactcaggacaatcatgtgatgctccaacaagaatgttggttgaaaaaccaatttatgaaagagctgttaaagaagctgttgatgaagcaaataaaattaaagttgatctggcttcaaaaaaaggagatcatattggacctttagtt

SEQ ID NO: 214256 - DNA, 844 bp, Unknown
  Bacterial polypeptide expressing nucleotide sequence isolated from the Sargasso Sea
accacaaacatctcaatcatttgcagggttaccgtttgatcatctacttttcactggttcaacgaatgttgcaaaaaaagtagcttcagaggctgcaaccaacttagtgccaatgactttagaattaggtggaaagtcaccagtaatagttggccctaatgctaagatgaaaaagagtgttgacaaaattatgatgggaaagctgcttaactcaggacaaatatgcatttctcctgattatgtgtttgttccagaaggaaaaactgaagaatttgttcagcatgcacaggaacatgttgccgaaaactatcctacgattaaaaataacccagactatacttctattattcatttaaatcactttgagcggttgcgggatttaattagcgatgctaaatcaaagggagctacaattgtcgaacttaatcctgctcaggaagatttttcacagcaagagcatcacaagattgttccaacattaattctaaatccaactgacgacatgaaggttatgaaggaggagatatttggccctctaatgcctattaaaacctataaaaactttgaagatactgtgagcttcataaatcaaaatcctaaagcattggcgctctattattttggtgatgataaagaagaaatgaataatgttttagataatacatcttctggtcaggctgtcatgaacgatgttctgtttcaattttcaatgcatgatttaccgtttggtggggttggacctagcggtatgggagcatatcacggacatgatggatttaaaaattttagtcacaaaagatctgtcttaaaggggcaaaatattttagatgctggtaaaatgatt

SEQ ID NO: 214257 - DNA, 748 bp, Unknown
  Bacterial polypeptide expressing nucleotide sequence isolated from the Sargasso Sea
atcaatcagattgcttgtaaggttgcaccagcattagctgcaggatgtactatggttttaaagccatcagaagtttctccgttaaatgcagtaatatttgctgaagttcttcatgaagcaggagttcctgctggagtatttaaccttgtaaatggtgatggtttaagtgtcggtgaagcaatgtcctctcatcccgatattgatatgatgtcgtttacgggttcaactagagcaggggttgctgtagctaaagcttctgcagacactgtaaaaagagtttctcaagaattaggtggtaaatcagctaacattattcttgatgatgctgatttcaatcaatcagttgccggcggtgttacaggttgctttatgaattctggtcaatcatgtaatgcacctactcgaatgcttgttcctgctgataggcaggatgaggctgttgctattgctaaagcgactgcagaagcaactgtagtaggcgatcccaaagaagttgcagctggaggaattggtccagttgtaagtgaagttcaatttaataaaattcaaggattaattgaaaaaggtattgaggaaggcgctacacttgttgctggtggcccaggaaagcctgaaggttttaatgctggttattatgttaaaccaactattttctcagatgtatcgaatgatatgactattgccagagaagaaatttttggtcctgttttatcagttcttccatacaaagatgaagatgatgctatat

SEQ ID NO: 214258 - DNA, 915 bp, Unknown
  Bacterial polypeptide expressing nucleotide sequence isolated from the Sargasso Sea
ttggaactggcccataaatcaaattacacttaaagttatacccccattagctgttggctgtacatgtatattaaaaccttctgaacatactccattatctgctaaaatattttctgaaattatagaagaggcaggttacccacctggtgtttttaatttaataaatggtgatggtccaacggtaggtacattactttctaaacataaagatgtagatatggtctcatttacaggttcaactcgagcaggggtcttagtttcaaagaacgctgcagattcagtaaaaagagttactttagaattagggggtaaatctccaaaccttgttttttcagattgtaatttagaagaaagagttaatgaatctgttttagaatgtttttctaattcaggtcagtcatgtgatgctcctactagattaattgtagaaagaaaatgttataatgaagttttaaaaatcgcagaaaatgctgcaaaaaatcaaaaagttgatgatccacacaaagatggagatcatataggaccgttatttgatcaaatacaatttgatcgtgtacaaaatatgattcaattaggaatcaatgagggtgcaaaactgctaattgggggattaggtaaaccagatggttttgataaaggatggtatgtaaagccaactattttttatgatgttcataataaaatgcagattgctagagaagaaatatttgggccagttttggtaataattccttttgaggacgaaaaagaggctatagaaattgcaaatgatacaccttatggtctagcttcatatttgcagactggagatactgaaagagcagaaagagttgcatccaaattaagagctggatctgtacatattaatggaggatcccttaattatggttctccatttggtggatacaaacagtc

SEQ ID NO: 214259 - DNA, 946 bp, Unknown
  Bacterial polypeptide expressing nucleotide sequence isolated from the Sargasso Sea
gcagaaatcagtaacagtgaatattcttaccacataccagaacctttaggtgtggttggtcagattataccttggaacttcccattattaatggctacatggaaattagctccggctttagcagcaggaaactgtgtagttttaaaaccagctgaacaaacaccagcatcaatcatgcttttaatggaactaataggagatctgttaccagcgggtgttgttaacgttgtaagtggatatggtcttgaagcaggtaaacctttagcttcttcgaaaagaatcaagaagattgcttttacaggcgaaactactactggacgtttgattatgcagtacgcatctcaaaacttaataccaattactttggaattaggtggtaaatctccaaacattttctttgaagatgtaatggctaaagatgacgacttctttgataaatgtttagaaggttttgcaatgtttacacttaaccaaggagaagtttgtacttgtccgagtagagctttaattcaaaaatctatctatgataaatttatggagaaagcgattgcaagaactaaagctgtgaaacaagacaatcctttaaaaatggaaactatgattggagctcaagcatcattagaacaaatggaaaaaattaagtcttatttagacttaggaaaaaaagaaggtgccaaagttctatgtggtggaagcgaggctaagatcaatagtggtctagaaaaaggaaattatatccaaccgacaattttcgaaggtaaaaacaatatgcgaatattccaagaagagatctttggaccagttgtatcagttacaacgtttaaagatgagaaagaagcattagaaatagctaatgacactctttatggattaggagcgggtgtttggactagagatggaaacattgcgtatagaatgggtagaggtatagaggcaggtagagttt

SEQ ID NO: 214260 - DNA, 714 bp, Unknown
  Bacterial polypeptide expressing nucleotide sequence isolated from the Sargasso Sea
cttataggtgatcttcttcctcctggtgttcttaatatcgtaagtggttttggtcttgaagctggaaagcctttggcatcttcaaagagagttgcaaaaatcgcttttactggtgaaaccacaacgggtcgactcattatgcagtatgcgagtgagaatttgattccagttactctagaacttggtgggaagtctcctaatatcttttttgaagatgtaatggacgctgatgatgccttttttgataagtgtttggaaggcttcactatgtttgctcttaatcaaggtgaagtttgtacttgcccaagtagagcgcttattcaagagtctatttatgataaatttatggcacgtgctcttgatagagttaaaaaagtaacacaagacaaccctcttaaaatggaaacaatgttaggcgcccaagcttctattgagcaaatggaaaaaattacttcttaccttgaccttggtaaaaaggaaggcgcagaagtcttggccggtggttcaaaagcatctcttaatacaggtcttgagaaagggaactatattcaagcgacagtctttaaaggcaacaatgctatgagggttttccaagaagaaatttttgggccagttgtctctgtaactacttttaaagataaagcggaagcaattaaaatagccaatgatactctttacggtttgggagcaggtgtttggaccagaaatggaaac

SEQ ID NO: 214261 - DNA, 797 bp, Unknown
  Bacterial polypeptide expressing nucleotide sequence isolated from the Sargasso Sea
tctggtcggacttgctgaaatcattgaacgggaagccgttcgcctaggagaaatcgaagtccgggacaacggcaaactgattgcggaaatgggagcccagaccaaatatcttgcggaatggtaccgttattacggcgggttggcagacaaaatcgaaggtgcggtcattccgtcggacaaatccgggattttcaatttcacacgatacgaaccgctcggggtggtaggtatgatcaccgcctggaattctccgttgcttctgctcgcatggaaactggctcctgctctggcggcaggaaatacggccgtggtcaaaccttcggaattcacttcagcctcttccctcgaattcatggaactcatccgggaggccggtttccccaaaggggtggtgaactgcatcaccggactaggcttggaagttgggcagccgatggtggatcatcctgagttggacaaggtcgcatttaccggttccgatgtggccgggcagaaaatttatgaaagtgcggcaaagaaaatcattccagtcaccctggaacttggggggaaatcgcccaacattgttttcgaagacgcagattttgaatcggcggtgatgggtgcgatttccgggatttttgcagcaaccggacaaacctgtatcgcaggatcgcgcctgttggttcagcgctccattcatgactcctttgttgaacgcctgatagaggtcgccaaagaagccaagatcggagaccccatgtcctcggaaactcatgtcggtccggttacgactcctccccagtatagaaaaatcc

SEQ ID NO: 214262 - DNA, 1006 bp, Unknown
  Bacterial polypeptide expressing nucleotide sequence isolated from the Sargasso Sea
ataaatgatcgtatcgatagaattaaacgaatacaaactctagttgaagaaaatattgatgatttccataaagcattgagactagactttggaacccgccatgagcaattaagccttatggccgatactatgccagttataaataatgcaaaacacgccttaaaaaatattaaaaaatggataaaaccagaaaaacgaaaacctaattttcctcttggtcttttgggttcaaaagcttatgtacagtttcaaccttatggtgttgttggtatcatttctccatggaactttcctctgacattaagtatcgcgcctcttattgaaattttcgcagcaggaaacaatgctatgatgaaactatcagaatttgtacctgctacttctgatttaactgagaaactaataaacaaatattttaatgaaaatgaggtagtggttattaatggtggaccacaaacttctcaatcatttgcaggactaccttttgatcatctacttttcactggttcaacaaatgttgcgaaaaaagtagcttcagaggccgcaaataacttagtgcctatgactttggaattaggtggaaagtcaccagttatagttggtccaaacgctaagatgaagaagagtgttgacaaaattatgatgggaaagcttcttaactcaggacaaatatgcatttctcctgactacgtgtttgttccagaaggaaaaactgatgagtttgttcagcatgcacaggaacatgttgccgaaaactatcctacgataaaaaataatccagactatacatcgataatacatttaaatcattttgagcggttgcgccacttaattaacgacgctaaatcaaagggagctactattgtcgagcttaatccagctcaggaagatttttcacagcaagaacatcacaagattgttccaacattaattctaaatccaactgatgacatgaaagtaatgaaagaagagatattcggtcctctaatgcccattaaaacataca

SEQ ID NO: 214263 - DNA, 972 bp, Unknown
  Bacterial polypeptide expressing nucleotide sequence isolated from the Sargasso Sea
cctagcactgatctgggcaagccagcggtggaagcctttttcgaaatcgtgggcgttcaaggcgagctcaagctcgccaaaaaacaactcaaacgctggatagccccgcggcgcgtggccttgccagcggtgcagcaaccaggccgcacttgggtgcaagacgaacccctgggcaccgtgttgatcctgggcccctggaattacccattgatgctggtgttgcggcctctggtctcagccctggccgccggcaacacggctgtgttgaaaccctctgagcaggctcccgccgtggcccagctgctggccgagatggtgccgcgccatttcgaggctgatgtggtgcgggtggaactgggaggagcggaaacggcccaggccttgctgaagcagccgtttgatcatgtggtcttcaccggcggcacaacgatcggccgcgaggtgatgaaagccgctgctgagcaattgattccggtgacgcttgagctagggggcaagagcccctgcatcgttctggatgacgcggatctacaggtgagcgcccggcgcattgcctggggccgcttcctcaatgccggccaaagctgcgtggcccccgactacgtcctggtcacaccggcgatgcggcagcccttggaagctgctctgaagcaagccatcaccgagttttatggccccgatccaaagcagtcgccggactttggcaggctggtcagcacccgccaattcgaccgggttgatgcacttttaaaagacgccacggtgttgcacggcggcgagcgcgtgcgcgaggagcgctacatcgccccaacgctggttgagggagatcccaatagctccttgatgcaggaggagatctttgccccggtgctgccgctgattgaagtcagcgatctcgaagcagccctgcgcttcattgcagaacgccccaaaccattggcggcctacctattcagccgcagcaacaccgcc

SEQ ID NO: 214264 - DNA, 733 bp, Unknown
  Bacterial polypeptide expressing nucleotide sequence isolated from the Sargasso Sea
atggtttcatttacaggttcaacaagagctggaaaattaattcaaaaaaatgctgctgatacaataaaaaaagtcactctagaattaggaggtaaaggtgggaatatagtttttgcagattcatatcctaatgctgtaagagatggagtaagaaatataatgagcaattcaggacagtcttgtgatgctccaactagaatgctagttgaaaaatcaatttatgaaagagcggttaaagaagctgttgatgaagccaataaaattaaagtagatgtagcctcaaaaaaaggagatcacattggaccattagtttcaaaagttcaatatgataaagtaataaatcttataaatgttggaataaaagaaggtgctacattagctgcaggtggacctgatttaccaaatggacttaataaaggttatttcgtaaaacctacaatttttacagatgtaaataatgacatgagaattgctaaagaagagatatttggacctgttctttctattattccatttgaaactgaagaagaggcaatagcaattacgaatgatacatcttatggattgggaaattacctacaaactgaagataaagaaaaagcccaaagagttgcaagaaaagttagggccggtacagtttatataaatggtcaaggaactgatacaggagcacctttcggtggatataaacaatctggaaatggtcgagaaggtggtgtctggggctttacag

SEQ ID NO: 214265 - DNA, 590 bp, Unknown
  Bacterial polypeptide expressing nucleotide sequence isolated from the Sargasso Sea
tatgaataaagttattaaaaattttaaaaaaattaaatatggtcctgcacctgaggacagtaaagaagttttatcttggataaaaaaaatatcatcacccaataaaatttttattgggggaaactggattaaatctacgtcaaaaaaaataattccagcaattaatcctgctactaacaagaaactttttaatctttctgtaagttcaaaagttgacgttgataaagctgtcaaagcagcaaaaaaagcttatccctcttggtccaaaaaaacaccctatcaacgatctaaatatttatatgctttagcaagattgattcaaaaacattctcgttttttagcagttttagaatcgatagataatggaaaaccaattcgagaaacaagagatattgatataccattggttgcaagacatttttattatcatgcaggttggacagaaaaagcatcacacaatgatgttgattcaattggtataattggacaaattataccatggaattttcctttattaatgttgtcgtggaaaattgcaccagcagttgcctgtggtaatacagttgtattaaagccagcagaatttactt

SEQ ID NO: 214266 - DNA, 856 bp, Unknown
  Bacterial polypeptide expressing nucleotide sequence isolated from the Sargasso Sea
ctcaatcttctaggcgccgcggagtctctggataatggtaagccaatcagggaggcaattgctgcggatataaccctttctatcgatcatttcagatattttgcgggagtgattagagccgaggaaggtacaatatcagaaattaatgcaaatacctattcctatcattacaaggaaccgattggggttgtaggacaaatcattccttggaattttcctataacaatggctgcttggaagttagcgccggcattagctgcaggtaactgcgtggttatgaaacctgccgaacaaacacctgcatctattatggttttaatggagctaattgctgatttgctacccgaaggtgttgtgaatatagtttcaggatttggacttgaggcgggcaaaccccttgcttcatcaaagaaaataggaaaagttgcatttactggagaaacaaccactggaagacttattatgcagtacgcttcccagaacctaattcctgttacattagaattgggcggtaaatcaccaaatgttttctttgaagatgttatgtctgaagatgacgctttcttcgataaatgcttagagggatttactatgtttgctttaaatcaaggagaagtatgtacttgtccaagcagagctcttattcaagagtcgatctacgatcgtttcatggaaaaagcgttgaagagagtagaagcggtaaagcaaggaaatccattagagatggagactatgatcggagcgcaagcatctacagagcaaatgcaaaaaattgagtcctatcttcagcttggtaaagataaaggtgcagaagttttagccggtggtaacgtagcaaagcttaataatggtctag

SEQ ID NO: 214267 - DNA, 894 bp, Unknown
  Bacterial polypeptide expressing nucleotide sequence isolated from the Sargasso Sea
atgaatcagattactactaaagtatctgcagctattgcttcgggttgcaccatggttctaaagccgagtgaaatctcaccttactgttcaatgttacttgcagaagttatgcatgataccggagtgcctaaaggggtatttaatttagttaatgggtatggtcctgtggtaggggctgcattatcagagcatgaaaaggtagatatgatgtcatttaccggttcaactagagctggaattgcagtagctcaagcatcagccacaactgtaaaaagagttcaacaagaattgggtggaaaatcagcaaatattattttagatgatgttgcagatttagaaaaatctgttaaaggtggtgccgggcattgttttttaaattctggtcagtcatgtaatgcaccaaccagaatgctggtttcatcaaaaaattatgacaaagctgtagaagttgctgtagctactgcaaatagcacaacagttggtgatccaaatggcgaatttagattaggaccaatttctaataaaactcaatatgaaaaaataattaagttaattgagattggtattgaagaaggcgcaaaacttgttgcaggtggcgttgaaaaaccagaaggttgtgaaaaaggttattatgtaaaaccaactgtatttgcagatgtaaccaatgacatgacaattgcaaaagaagaaatttttggtcctgtgctttgtatgatgaaatatgaaactgaggaagaagcaattcaaatagccaatgacactgagtatgggcttgctggttatgtccaaggtgaattatctcatgcaatagaagttggaaatcagatacgtgcagggcaaataactattaatggtggtgctagaggaaatgctgctccatttggtggttataaa

SEQ ID NO: 214268 - DNA, 889 bp, Unknown
  Bacterial polypeptide expressing nucleotide sequence isolated from the Sargasso Sea
atgatatcaccatggaactttccaatgtatttatctcttgctcctttagctggaatatttagtgcgggcaatagtgtgatgcataagcctagtgaatttactcctattacttctgagcttcttaaagaaatttgtgatagtgcttttgatgaaactgaatttgcaacatttctaggcggtcctgatgtaggcgccgcttttactcagcttaagtttgatcatttattatttacaggaagtggtaatatcggaaagcatgtaatgcgtgcggcttcggaaaatctagttccattaacgttggagcttggaggaaaatcaccagttatagtcagcgaatcttcaaatatagatataacagcacgaagagtaatgtttaataagactcttaatgcaggccaaatatgtctagcgcctgattatgtttatgtgcatgaaacagagaaggataattttgtagaagcatgcaaggatcaagttaatgaattttatagcgatcttaaatataaccctgactatacatcagtaataaatcagaaacattatgacagattaaatggtcttctctcagatgctaaagatcatggtgcagagcttgtggaaattaatccagcaaatgaagatttttctcaacaagagtcacataaaatccctccaacacttgttttaaatccaactgatgaaatgcaaataatgaaagaagagatttttggtcccttactcccaataaagacttacaaggatataaatgaaccaattaactatataaacaaaaatgataaaccattgggattatattattttggtaacaataagaatgaagaagcaaaagttgtaaactcaacaacctctggtggagttacagttaatgacatcatgggacatattcaac

SEQ ID NO: 214269 - DNA, 1414 bp, Unknown
  Bacterial polypeptide expressing nucleotide sequence isolated from the Sargasso Sea
catgaaactctctacccaactcttgatcgacggtcagttcgtcaccggtgacggccaggccgagcccatcctcaacccggccaccggggaacttctcgcctcggtgccagaagcctcgttcgagcaggtgaaccgggcggtgaacggtgcccagcgcgccttcgcccagtggagccgcaccaccccggcgagccgcagtaccctgctgctgcgcctggccgatgccatcgagcgccacgccgaggagtttgctgcgctcgaatccctcaactgcggcaagccctatctggcggtgctcaatgacgagctgccggcggtggttgactgcttccgtttcttcgccggcgcggcccgctgcctgcaagggccacttgccggggagtacatcgaggggcacaccagcatgatccgccgcgatcccatcggggtggtcggcagtatcgccccctggaactatccgttgatgatggcggcctggaagatggccccggtgctcgccgccggcaatacggtggtcctcaagccctccgagcagaccccgctcaccgccctgcgcctggcggagctcgccagcgagctcttcccgcgcggcgtcatcaacatcgtctgcggccggggcgagagcgtgggggcgccgctggtggagcacccgctggtgcgcatggtgtcgctcaccggtgacatcgccaccggccagaagatacttcagagcgccgcccgcaccatgaagcgcacccatctggagctggggggcaaggcgccggtcattatcttcgacgatgcggatctggaagccgtggtagccggcattcgcaccttcggcttctacaacgccggccaggattgcaccgccgcctgccgcatctatgcccagggcaagatctacgacaagtttgtcgccgccatgacggatgcggtcgcttccatcaaggtgggcggtccgcgcgaggagggggtggagatggggccgctcatctcggaccggcagcgcaaccgggtggccagcttcgtggagcgggcccagagcagcggtcacgtggaggtgaccgcggggggcaagatccgccccggcaacggcttcttcttcgaaccgaccctgattgcccatgcccgtcaggaggatgaaatcgtgcgccgggaggtgttcggcccggtggtgtcggtgacccgcttcagcgacgccgagcaggtggtgcagtgggccaacgactcggactacggcctcgccagttcggtctggacccgggatctcggccttgccagcaaggtggccagccacctgcaatacggctgtacctggatcaacacccacttcatgctcacctccgagatgccccacggcggcatgaagatgtcaggctacggcaaggatctctccctctacgcgctggaggactacacggtgccgcgccac

SEQ ID NO: 214270 - DNA, 1354 bp, Unknown
  Bacterial polypeptide expressing nucleotide sequence isolated from the Sargasso Sea
atggccccgctgagcgcgatgcagcagctggtgcagcaaggccagaccaggcccctgaactggcgcctccagcagctggggcgcctcgaggccatggtggcggagctgagcgagccactggaagctgccttgtccgccgatctgggcaagcccgccctggaggccttctttgaggtggccggcatcaccggcgagctcaagttggccaagcggcagctacgccactggatggcacccaaaccggtgccgctgcccgctgcccagcgtcccggccgcacctgggtgcagtgcgaaccccttggcgcggtgttgatcctggggccctggaactaccccttcatgctgctgctgcggccactggtcaccgccctggctgcaggcaacaccgccatgctcaaaccgtcagagcatgccccggcggtggcggacctgctggcccaggcggtgcctcggcactttgaaccggaggtggtgcaactgcagcagggaggagccgagaccgcccaggcgctgctgcagcaaccgtttgaccacgtcttcttcaccggggggacggccatcgggcgcaaggtgatgcaagcggcggccgagcagctgatgccggtgacgctggaattgggcggcaaaagcccctgcatcgtcctcgatgacgccgacctgcaggtgagcgcacggcgcatcgcctggggccgctttctcaattccggccagagctgtgtcgccccggattatgtgctggtcacccctgccatgcgccagcccctggaagcggccctggccgaggccatcgatcagttctacggccccgatccgcgtcagtcagaggatttcggccgcctggtgaacacgacccagttcgaccgcctcgatggcctgctgcagaacgccagcgtgctcaaaggcggagagcgtgaccgggagcagcgctacatcgcccccaccctggtggatggggatccagaggggggactgatgcaggaggagatctttgggccagtactaccgctgttgaccgtggagggcctggaggaggccctggcgttcatccgcgccagggccaaaccgctggcgctgtatctcttcagccgtgacaagcaagcgcgccagcgggtgctgcaggccagccagtccgggggggtggtcttcaacgacgtgatcgtccacgccggggtgccggggctgcccttcggtggagtgggtcccagcggcatcggtcgctgccatggagagaccggcttcatcggattgtccaaccagcgggccgtcatggagcgcccctttgccctggacctggcctggcgctatccgccctacggaaacaggttgtcactcctgcgtcgcctgctcagctgaa

SEQ ID NO: 214271 - DNA, 1105 bp, Unknown
  Bacterial polypeptide expressing nucleotide sequence isolated from the Sargasso Sea
atggaattttatgcaggtgcggcggataaactgcatggtgatacaatcccatacctaaaagattatacagtttatactttacgagaacctcatggcgtatgcgcgcatataatcccctggaactacccaatgcaaataattggcagatctgtaggagcagcacttgcaactggaaacacctgtatccttaaaccggctgaagaagcctgcttaactgcattagcatttggcgcattaacaaaaaaagctggctttcccgatggggttttaaatattgtgacaggttcaggaaagacgggggcaagcctgagccaacacagcgatatcgatcatattagcttcactggatctgtatcaactggcatcaaaattcaacaatccgctgcacaaaatgttatccctgttactctagaacttggaggaaaatctccgcaaattgtctttgatgatgcagacctagatgcagcattaccttttttagttaatgcaggagtacaaaacgctgggcaaacctgctcagcttcaagccgcatcctagtccaaaaggaagtttatccaaaagttgtatcaatgatggccaagcagtatgagatgcttttggttggatctgccatggatgatttagacgttggacctctaatatcgaaaaaacaacatgaaatcgtttcaaactacattcaacaaggtaaagatttagagttagtagcaacaggcaaatacaaagaagaaataaataatggtggtttttattgcttacctcatctttttgtagacgttcccgccgaccacagtttggcgcaaaatgaaatattcggaccagttcaaattattatgcctttcgacgacgaagaccacgcggtcgagattgcaaatgggactggttttgggctggtggcttcagtctggacacaagatggatcaaaacaaatgcgaatggctaaacgtctaaaatctggtcaagttttcataaacaactatggagcaggtggtggagttgaacttccattcggtgggcgcggcttatctggccatggacgtgaaaagggttttgaggcaatgtttggttttacaacaatcaaaacggtagctcactaccatggttagg

SEQ ID NO: 214272 - DNA, 838 bp, Unknown
  Bacterial polypeptide expressing nucleotide sequence isolated from the Sargasso Sea
atgacgataagagtggctattaatggttttggacgcataggaagaaacatacttagagcgaaatatgagagtgataattacaacgatatacagattgttgccataaatgatttaggtgatagtcaaattaatgcacatctattagtacatgacactgttcacggaaaatttcaaaagcctgtagatgttgccagtgataaaataataattgataacagcgatgagatactggtcacatctgagagaaatccagaagctttaccttggagtaaacttaatattgatgttgtctttgagtgcacaggaatatttgtctcaaaggatcaggcaggcggacatatcgctgccggagcaaaaaaggtcatcatttctgcaccaggaaaagaggtagataacacagtggtgtatggggtgaatcatgatactttaacgagtgatcatacggtaatttccaatgcttcttgcacgactaattgtctagcaactgtcataaacaatattcacaaaaatcttcagataaccaatggtcttatgacaacagttcatgcttatactaatgatcaggtcttaactgatgtatatcatactgatctgaggagggccagatctgccacacaatcaatgataccaacaaaaactggagctgcagcagctgttggactagtgatgccagagctgaatggtaagcttgacggctttgcaatcagagtgcccaccacaaacgtttcgatagtagatcttgtttttaatacgactaaatctagttctgttgatgacttaaataatcttgttttagaatcgtctgaaaatgaaatgagaggtattgtcggatacaata

SEQ ID NO: 214273 - DNA, 1498 bp, Unknown
  Bacterial polypeptide expressing nucleotide sequence isolated from the Sargasso Sea
catgagtacacctaaaacacggagcgattgggaaaacctcgctgcaagcctagcaatcaatggcaaggcttttattaacggcgagtatcgagatgcgacatcaggcaatacctttgattgcatcagtccaatcgatggccgtttattagcgccagttgccagttgcgatttgctagacgccaatatcgccgtggctaatgctcgtgaggtttttgagtctggggtatggtcaaaggctacgcctgttaaacgtaaacaagtgatgatccgttttgccgagttattggaagaaaatgccaatgaactggctctgttagaaacgttggatatgggtaaaccgatacgtttttcaaaggcggtagatattgccggcgctgcccgtgccatccgttggtcgggggaagccattgataaactctacgatgagctggcgccgacggcgcataatgaaatcggcatgattactcgtgaacctgtaggcgtggtggcagcgattgtgccttggaatttcccgctactaatggcctgttggaagttaggccctgcactcgtgacggggaacagtgttatccttaaaccctctgaaaaatcaccgctcaccgccattcgtattgccgagcttgccgttcaagctgggatccctaaaggtgtactaaacgtgctccccggttatggccataccgtcggcaaagcactggcgctgcatatggacgtggataccttagtctttactggctcaacaaaaatcgctaagcaattaatgatttatgcgggcgagtcgaatatgaagcgggtctggttagaggcgggcggtaaaagcccgaacatcgtatttaacgatgcgcctgatcttaaagcagcggctgtggctgccgctgaagccattgcttttaaccaaggtgaagtttgtaccgcaggctcgcgtttactggtggaagctggtgttaaagatcagctgattgcacttatagcagaagagctagccacgtggcagcctgggcatccactggatcctgctaccgttagcggcgcagtggtcgataagcagcaattagataccatcttaagctatatcaaggcgggccaagatgagggcgcgagcttagtgcatggtggacaacaagtgctggccgaaacgggcggtgtgtatgtgcagccaacggtattttcaaatgtgaaaaaccaaatgaaaattgccagtgaggaaatctttggccctgtattatctgtcattgaattcaatggtatggaggaggcgatagcgatcgctaacgataccatttacggtttagcggcaggtgtttggacagcggatatcagcaaggcgcataaaacggctaaagcattgcgtagtggtatggtgtggattaaccattatgatggcggtgatatgacggcacctttcggtggttataagcaatcgggtaatggccgagataaatctctacactcctttgataaatacactgaaatcaaggcaacgtggatagtgctataa

SEQ ID NO: 214274 - DNA, 1422 bp, Unknown
  Bacterial polypeptide expressing nucleotide sequence isolated from the Sargasso Sea
aaaaattttacattaatggagcgtgggttaagccaaatagttccgaggaaattaaagtaattgatcctgctacagaagaaaattgcgcagtaattactttagggaacaaagctgatgttgatattgctgttaatgcagctaaagatgcttatgaatcttgggccttttcttccaaagaagatagaattgaattattagaaaaactttatgaaaattataagaaaagatgggcagatattgcagaagctataactcttgagatgggtgctccaaaagattttgcaacaaaattacaagcaggtacaggagcaagtcatatcaaatcatttattagatatttaaaaaattttgaatttgaaaaaccgttaggtgatcatgctcctaaccaaagattaatttatgaaccaaaaggtgtttgtgcattaataacaccatggaattggccgatgaaccaagtttgtttaaaagtaatgccagcaatagctgcaggttgcacaatggttttaaagccatcagaattagcaccactttcatcaatgatacttgctgaaattattgatgaagtaaaatttccaaaaggtgtgttcaatttagttaatggtgatggggcaataacaggcgatgctctcacaagtcatccagatattaatatgatttcttttactggatcaacaagagcaggagctttgatttcacaaaatgctgctaaagattttaaaagagtaagcttagaattaggtggtaagggagcaaatataatttttaaagatgctgatccagaagctattgaaagaggtgctttaagatgttttagaaattctggacaatcttgtaatgcaccaacaagaatgttggttgaaaaatcaatgtatgatgaggctattaaaagattaaaaaaatatactgaaaattttgaggttggcgatcctaaaaaagaaggagaacatataggtccagttatttcagaaactcaatacaagaaaatacaaactttaatccaaaaaggaatagatgaaggtgcaaaattaattgctggaggaacaggcaaacctgatggattagataaaggttactttgttaaaccaactgtttttgcagatgtaaataataagatgaatgttgcaagaactgaaatttttggacctgtcttatccgttatcccatttgaatcagaagaagaggcaattaaaattgcaaatgatacttcttatggattaacgaactacatccaaacccaagactctgaaaaagtacaaagagttgcaagaaaactacgatctggaatggtagatgttaatggagctggtattgctgttgatgcacctttcggtggttttaaacattcaggaataggtcgtgaagcaggtgaacacggtttagaagagtttttagaagtaaaagctgtaggtggttggagttaat

SEQ ID NO: 214275 - DNA, 1004 bp, Unknown
  Bacterial polypeptide expressing nucleotide sequence isolated from the Sargasso Sea
atttctgcaaatgatcctgatcaacgaattattatattaaaacaacctgttggtgtagttgcggcaataacaccgtggaattttccagttgctatgataactcgtaaagtagcaccagcactggctgccggttgtacagtagttttaaagccgtcagaagatactcccctttcagcgttatcgctcgcttatttaggtaagaaagcaggatttccaaaaggaatttttaatgttattactactaataatccacaaaatatgggagaaatcttgacaaaatctccaaaaatcaaaaaaatatcttttactggctcctctgaggttggaaaaattttaataaaacaatcttcttcaactgtaaaaaaactttctatggaacttggaggaaatgctccttttataatttttgatgatgcggatattgatttagctattgaaggattgatgctttcaaagtttagaaattctggacaaacttgtatttgtgctaataggatatatgttcaaaaaagagtttacgaatcatttctaaaaaaatttatcattagggttaagaacctgaaagttgggtcgggacaagacccatcggttgaaataggtcctctaataaataaagatgccactaaaaagatatcaaagattttagatgacgctgtaagtaaaggggctaaaattttattaggtggaacaaaacataattatggagataattttgttcaacctacaattgttactaatatttctgatgatatgttgatttgttctacagaaatttttggtcctgtagctgctatatattcttttgatgatgaaaaacaaatcataaaaatagccaataacacaagggctggtcttgctgcatatttttatgggaaaaacaatagcaaaatctggaaaactgcagaagggttagagtatggtatggtttggagtcaatactggacttatatcaactacaattgctccatttgggggagtaaaagaagcggttttggaagagaagg

SEQ ID NO: 214276 - DNA, 1100 bp, Unknown
  Bacterial polypeptide expressing nucleotide sequence isolated from the Sargasso Sea
agaagattttattattagattaaaagattttaaatttgatgaacactttgatgaaaaatcaaataaccatatttattatgaaccaattggggtttgtggattaataaccccttggaattggcctataaatcaaataactcttaaggttgttccagcaattgcaactggatgtacaatgattttaaaaccatcagaaatagctcctatctcgggaatgttatttgctgaaatgattgatgaggttggttttccaaaaggtgtatttaatttagtaaatggggatggtgctggcgttggaacacaaatctcaaatcactctgacattgatatggtttcttttactggttcgacgagagcgggaagattaatttcaaaaaatgcagctgaaacaattaaaagagtttgtctagagcttggaggtaaaggtggaaatattgtttttgctgacagttataaaaatgcagttagagatggaataaggaatgtgatgagtaactctggacaatcttgtgatgcaccaactagaatgttggtagaaaaatctatttatcaaagagcaattgatgaagctatagatgaagcaaacaaaataggtgttgatcaagcttctaaaaaaggagatcacattggacctgttatttcgaaaacccagtacgataaaattataaatttaattaaaagcgggatttcagaaggagcaactttagctgctggaggtccagaattaccggatggatttaataaaggatattttattaaaccaacaatttttacaaacgttacaaacaatatgagaattgcaaaagaagaaatctttggtccagttttatctatcattcctttcgaaactgaagatgaggcggtgaatattgtaaatgatacttcatatggattaggaaattatctacaaactgaaaacaaagaaaaagcccatagggtagcaaaaaagctaagatcaggttgtgtttatattaatggtaatgcagctgatgcaggtactccttttggaggttatagacattcaggaaatggtcgtgaaggtggaatatggggtctggaagaatatctagaggttaaaacagtcacaggttggaaatagt

SEQ ID NO: 214277 - DNA, 1503 bp, Unknown
  Bacterial polypeptide expressing nucleotide sequence isolated from the Sargasso Sea
agacagtagcgaattttatccacggcgaatgtgtcaccggttcaggccagcgcgttcaggcaatcttcaacccggccaccggcgagcagatccgccaggtggtgatgagtacgatacaggaaaccgagcaggccattgcggcagcgcacgacgcattccccgggtgggcgcgccattctccgttaaaacgtgcgcgagtgatgttccgctttaaggcgctgttggaagaaaacatggagaggctggctcgcatcatcagcgaagagcatggcaaggtgttctctgacgcagttggtgagctgacccgcggcctggaagtggtggagtttgcctgcggcatcccacatctgcaaaagggcgaacactcagccaacgtaggcaccggcgtcgatagccattcgctgatgcaacctctcggggtttgcgtcgggatcacgccgtttaactttccggcaatggtaccgatgtggatgttccccatcgcgctggcaaccgggaatacctttgtgctgaaaccctcggaaaaagatccttctctcgccctggctctggcgaaactgctgcaagaggcgggcctgccggacggcgtgttcaacgtcgtacagggagataaagagtccgtcgacgtgctgctgactgacccgcgcgtgcaagccgtgagctttgtcggctctacgccgattgcggaatacatttatcagacagcgtcagcccacggtaagcgttgccaggcgttaggtggtgctaaaaatcactgcattttaatgccggatgccgacatggatatggcgaccaacgccattatgggtgccgcttacggcgcggcgggtgaacgctgcatggcgctttctgtcgtgctggcggtgggtgataaaacggcagatgagctgtgctcgagactggaaaaacagattgcggcgctgcgtgtcgggccggggcttgatcagacaccggaaaacgaaatgggaccgcttatctcctcggtgcatcggaataaagtgctcgggtatatcgacagtggggaatcgcagggggccagcctgcgtgtggatggtcggcattttagcgtcaaaggtcatgagcagggctattttgttgggccgaccctgtttgataacgtcacgccggagatgaccatttataaagaagagatttttggaccggtgctttctgtggtgcgcgtagcagattacagcagcgcggtggaactgattaatcgtcatgaatatggtaacggcacggcaattttcacacgtgatggcggctgtgcgcgtcgtttctgcgaagaggtgcaggcgggcatggtgggcgttaacgtgcctattccggtgccgatggcgttccacagttttggcggctggaagcggtccatttttggtgcgctcaatgttcacggcaatgatggcgtgcgcttctatacccggatgaaaaccgtcaccgcacgctggccggagatgctgcaggacacaggggcagcgttctccatgccaacgctgggctgac

SEQ ID NO: 214278 - DNA, 1435 bp, Unknown
  Bacterial polypeptide expressing nucleotide sequence isolated from the Sargasso Sea
tatgaaactttataaaaattatattgacggtaaatggatcgagagtgaatctagagaaattattcaagttgatgatcctgcaacaggtaaaattataggagaaatttcttgcgcaaaaaagaatgaagtagaccttgcagtatctgcagcaaaagcagcatttaattcaagagtactagttgacatgcctttacttgaaagagcaaaactgatgcaccgcattgcagatgaaacaagaaaaatagctgatgaaggtggaaagatgctttgctatgaaaatggtaaaatgctgggtgcagcaataaaagaatttaatgatgtagctgatatgtttgattattatgctggtctgactgataaacttgaaggtaaaacaattcctgtctcacctactatttttgattatactgttttagaaccatttggagtgtctgcacatattgttccatggaactttccaatatcaatggttggcagatctcttgcatgttcctttgcaacagggaattcaacaattgtaaaaactgctgaactaacacctctttcggcaactttttttgcaaaagcaattgaaaatgcaggtgttccaaacggccttgtaaatataatttgtggatatggaaatgaagctggttcttatttagtatcacatccagatgtaaatcatgttgtatttactggttcggtttctacaggaaaaaaaatattacactcatgtgcagataaaacaattccagcagtaattgagcttggtggaaaatcagcgggcatagtttatgaagatgctgatcttgatcaagttatagacagtgcacgtcatggtatttttggagttgctggtcaaatatgtacagccatgtcacgattggtagttcataaatcagttaaaaatgaattaatcgaaaaacttgtggatttgagtaagtctcttaaagttgggcctgggtacgaaaaagatacaggactaacaccaattatttcagaaaagcaacttgaaaaagttgagggttatgctcgttctggtgttcagcaaggggcagaagctgttcatggtggaaaaagagctgatcgtgaaggatattttatggaagcaacagttttaaataatgtcaaacaagacacatcagtagctagagaagaaatatttggtcctgttttatcagttcttgaatatgaagatcaagatgaggcaattcatattgctaatgatactgattttggattaggtgcgggagttttcactaaagatctaaaaaaagcatcatggactgcaagtaaattagagtcaggacaggtttatgttaataaatggtttgcaggcaatcatgcaactccatttggaggttacaaacaatcaggctatagtagagaaaaaggtgtagatgccctcaaatcatatcttcaagttaaaaacgtgggaattagtttagactaa

SEQ ID NO: 214279 - DNA, 1045 bp, Unknown
  Bacterial polypeptide expressing nucleotide sequence isolated from the Sargasso Sea
cctgagggtgattacactttaataaaggaacctataggggtcatcggaatgattactccatggaattggcctatgaatcaaataacaacaaaagtttctgcagctctggcagctggttgcaccatggttctaaaaccaagtgaaatatctccatactgcgcaatgcttttagcagaagtatttgataaagcaggtgttccagatggagtatttaatgttgttaacggttacggtccaattgttggagctgctttatcagaacatccagatatagccatgatgtcattcacaggctcaactaaggctggcatcgcagttgcgcaagcatctgctgtttcagtaaaacgtgttcatcaagaattgggcggaaaatcttcaaatataattcttgacgatgttgctgatttagagaaatcggtaaaaggtggagctggccattgtttccttaattcaggacaatcctgcaatgcaccaacaaaaatgttagtttctgctaaaaattatgataaagctgttgaagttgcagtgcaaactgcaaacaacacttcagttggagaccctctcggtgagtttagaataggcccaattgcaaataaagcacaatacgaaaagattctaagaatgatagaaattggtatagaagagggtgcaacattagttgctggtggtgttgaaaaacctgatggatgtgagaaaggatattttgtcaaaccaacagtttttgcaaatgtgacaaatgatatgacaattgcaaaagaagaaatctttggcccggtgctatcaataattaaatatgaaaatgaagatgaagctattgagttggcaaatgatacagaatacggtcttgctggatatgttcaaggggaaccagatcacgcaaaggaagttgcaagaaaaataagggcaggacaagtaattattaatggaggtgcaagaggaacaggagcaccttttggtggctataaatcctcaggaaacggaagagagcatggacttcacggccttgaagaatgtcttgaaaccaaggcagtaatcgctccctaat

SEQ ID NO: 214280 - DNA, 1435 bp, Unknown
  Bacterial polypeptide expressing nucleotide sequence isolated from the Sargasso Sea
aatgctaaataaaaagaatttttatattaatggaacatgggtttctccaatagaggcgagaagttacaaagtaattgatccgtcaagcgaagaaccctgtgcagaaatatctcttgggggaaaaaaggatatagataaagcagttagtgctgcaaaaaaagcttttgaaacttgggctttctcaaaaaaagaagaaagattggaattattagaaaaattgtatgttatttataaaaaacgatgggctgaaatggcaaaacttattactctcgagatgggagcacccatgaaattttctacagaaatgcaagccgcaacaggagctagtcacatcaaatcttttaaaaatatattaaaagattttaaattcgaaaaagatttaggagaagaaaaaaataatcagaaattattgtatgagccaaaaggagtatgtgcgttgatcacaccatggaattggccaataaatcaagttaatttaaaagtgatacccgcattagcatcaggctgcactgtggttttaaaaccatcagaaatagcaccgttgtcatcaatgttgcttgcagaaatgattgatgaagtaaaattcccaaggggagcatttaatttaataaatggagatggagctctaacaggagatgctttaacgagtcatcccgatataaatatgatatcatttacaggatctactagagctggtgcattaatatctcaaaatgctgcaaaagatttcaaaagaattagtttagaattaggaggaaaaggtgcaaatataatttttaaagatgctgatgaagaagcagttgctagaggagttcaaagatgttttagaaattcgggacaatcttgtaatgcaccaacaagaatgcttgtagaaaaatcaatttataatgaaactgtagaaaaagttaaggaattagcaatcaatacaaaagtagattctccagaaaaagatggagatcacattggaccagttgtttctgaaatacaatttaataaaattcaaactttaattcaaaaaggaatcgatgaaggagcaaaactggttgcaggaggcacaggaaaaccaaaaggtttagaaaaagggtattatgtaaaacctactgtttttgctgacgtaaataatcaaatggagatagctagaacagaaatttttggtcctgttttatctataattccttttgaaaatgaagaagaagctatttcaatagctaatgataccccttatggtttaacaaattatattcaaacaaaagataaagagaaagtaaaaagagttgcgagaaaacttagatctggaatggtggatgtaaatggagttggtatagctgtaggttcaccatttggaggatataaacattctggtattggtagagaagcaggaacagaaggattaatagaatttttagaagttaaaacagttggtggatggaattag

SEQ ID NO: 214281 - DNA, 1336 bp, Unknown
  Bacterial polypeptide expressing nucleotide sequence isolated from the Sargasso Sea
gatgcaacagctggtccgcgatgggagcacccgttcgcaggcttggcgccagcagcagctcgaagcgctcgaagcgctcttgcaggagctggaaacaccactccaagccgcgttagcagccgatctgggcaagccaacggttgaagccttctttgaattggtgggggtgcaaggagagctccggctggcacaacgccaactcaaacgctggatggccccgcgacgtgtggccttaccagctgtgcaacaaccgggccgcacctgggtgcaagacgagccccttggcactgtgttgattctgggcccctggaattaccccttgatgctggtgttgcggccgttggtctcggccctggccgccggcaacaccgctgtgctgaaaccctcagagcaggcacctgccgtagcccaactgctcgccgaaatggtgccacgccatttcgaggctgaggtggtgcgggtggacctcggcggcccagaaacagcgcaagccttgctgcaacaaccctttgatcatgtggtcttcaccggcggaaccaggattggccgggaagtcatgaaagccgcggctgagcagctgattccggtgacgcttgaactgggagggaagagcccttgcatcgtgctcgatgacgctgatctacaggtcagtgcccgccggattgcctggggccgctttctcaatgcgggccagagctgcgtagcccctgactacgtcctggtcacacccgcgatgcggcagcccctggaagctgctctgaagcaagccatcaccgagttttatggccccgatccaaagcagtcgcctgactttggccggctggtcagcacccgccaatttgatcgcgtggatgcactgcttgagggagccaccgtgctgcacggtggtgagcgcgtgcgtgaagagcgatatatcgcgccaacgctggtccagggagatcccgatagcgccttgatgcaggaggagatcttcgcgcctgttctgcccctcatcgaagtcagcgacctagaagcagcgctgcgcttcattgctgagcggcccaaaccactagcgtcctatctattcagccgagacaaggccgcgcgccggcagctgattgaacgcacccaatccggcagcgtcgcgttcaacgatgtaatcgtgcaagccggcgtaccgggtttgccctttggcggagtggggcccagtggcattggccgctgtcacggtgagacgggcttccgcagcctctcgaatcaaaaatcggtctaccaaaggcccttcgctcttgacctggcttggcgctatcccccctatggaaacaggctgtcactgctaaagcgtctactcggctga

SEQ ID NO: 214282 - DNA, 1388 bp, Unknown
  Bacterial polypeptide expressing nucleotide sequence isolated from the Sargasso Sea
aaaaataaacaaaatatttgaagtcataaatcctgcaacagaaaaagcatgtgcggtaatttctttaggtggaaaagaagatattcatgatgctgttgttgctgcgaaagaagcatttaatagttggggtttttcaactaaggaagagagaattgagctattagaaaaactttatgtattatataaaaaaagatggaacgatatttcggaggcaataactttagaaatgggggcaccgaaagatttttcaacaaaactccaaactggaactggagcaagtcatattaaatcgtttattagatatctaaaagattttgaatttgaaaaaggattaggagatcatgcaaaaaatcagagaattttatatgagccaaaaggtgtttgcgctttaataactccgtggaattggcctataaatcaagtttgtttaaaagttatcccagcacttgcagctggatgcacaatggttttaaagccttcagaacttgcaccactatcagcaattattattgcagaattaattgatgaagcgggatttccaaggggcgtttttaatttggtaaatggagatggagctattactggtgatgctctgactagtcatgctgatgtaaatatgatttcatttactggatcaacaagagcaggagctttaatatctcaaaatgctgcaaaagactttaagcgtgtaagcttagagttaggtggaaaaggggcaaacataatatttaaagatgcagacccagaggctattgaaagaggtgctttaagatgttttagaaattctggtcaatcatgtaacgctccaactagaatgttggtggaaaaatctatgtatgatgaggctgttcaaagattaaaaaaatatgctgatgattttaaggttgatgacccaaataaagaaggagagcacatagggccagtcatttctgaaactcaattcaacaaaattcaaggtctaattcaaaaagggattgatgaaggtgccaaattagtttcaggaggtcctggaaaacctaatggtttaaaagatggttactatgtaaaaccaacagtattcgcagacgttaacaatagtatgaatattgctagaacagaaattttcggccctgttttatcagttataccttttgaaactgaggaagaagcaatagaaatagcaaatgatactgattatggtctaacaaattatatacaaactcaggatgggaaaaaggttcaaagagtagctagaaaattaaggtcaggaatggttgatgttaatggtgcaggaattgctgttgatgcaccattcggtggttataaacattctggaattggaagagaagcagggaaagaaggattaatagaatttctggaagttaaatctgttggtggttggagttaat

SEQ ID NO: 214283 - DNA, 1368 bp, Unknown
  Bacterial polypeptide expressing nucleotide sequence isolated from the Sargasso Sea
tatgaatttaattcaacactttgtaaatggaaaaataattcctggaaaatcagatagaaaaggcaaagtatttaatcctgcaactggagaacaagagtcagaagttaaacttggttcaaaaacagacttagatgaagcagtaaatattgcaaaaaaggtttttgaaacttggtctttaaagccaccaattcaaagagcaagaataatgtttaaatttaaagagttaattgaaaaaaattctgatgaattaactaaaatgatagtttctgaacatggaaaagtatatgaggatgcaaaaggctcacttttaagaggtcttgaagtagtagaatttgcatgtggtattccacaagttttaaaaggagaatttaccgaaaatgttggaactgatattgatagttggtcattaagacaaccgcttggtgtttgtgcgggcataacaccatttaactttccagcaatggttcctatgtggatgttccctatggctattgcttgtggtaatacttttgtattaaaaccatcagaaaaagatccatcctgctccattaaattagccgaactattaaaagaagcaggattaccagatggagttttcaatgtaattaatggcgataaagaagtagtagatgccattttaattaacaaagatattaaagctgtaagttttgttggctcaactccaattgcaaaatacatttatgaaaatgcagcaaaaaatgaaaaaagagttcaagctttgggaggagcaaaaaatcattgcgtagtgatgcctgactgtgatttagatcaagcagttaatggcttaatgggagcagcatatggatcagctggggaaagatgtatggcacaatcagttgcagttgcagttggtaatgttggagatcatttagtaagcaaattaagtaaaaaagttgaatcattaaaaattggacctggtatggacaaaacttcagaaatgggaccattagttacaaaagaacatttagaaaaagtaaaaggttatgtagatcttggtgtaaaagaaggagcaaaattagtagtagatggaagaaatttaaaacttcaaggatatgaaaaaggtttttatataggaggatgtttatttgatcatgttaaaaaaaatatgcgaatttataaagaagagatttttggaccagtgctttcagtggttagagcaaaaaattttgaagaagctactcaactagtgaatgaacacgaatttggtaacggaacaagcatctatactagagacggcgatgttggtagaacttttgctagtaaaattaaagttggaatggttggtataaacataccaatacctgtaccagtagcatttcatagttttggtggttggaaaagatcatt

SEQ ID NO: 214284 - DNA, 1192 bp, Unknown
  Bacterial polypeptide expressing nucleotide sequence isolated from the Sargasso Sea
catgaatttaatacagcattttgttggtggagaacttacttcaggttcatctaagaaaaaaggaaaagtttttaatcctgctacaggagaacaaaaatcagaagttttattagcaaataaatctgaccttaataaagcagtcgatattgcaagaaaagcatttgagacctggtcattaaaaccagcactgcaaagagctagagttatgtttaaatttaaagaattaatagaaaaaaactctgtagagcttactgaactaatagtttcagaacatggaaaagtttatgaggatgcaaaaggatctttaacaagaggattagaagttgtcgaatttgcatgtggtattccacaagttcttaaaggggagttttcagaaaatgttggaacaaatgttgatagttggtcaatgcgtcaaccattaggagttgtagcaggaataactccatttaattttccagcaatggtacctatgtggatgttcccaatcgcaattgcatgtggaaatacctttattttaaaaccatcagaaaaagatccttcttgctcaataaaattagctcaattgttgaaagaagcaggactaccagatggagtattcaatgttgttaatggagataaagaagctgtagatgcaattttagaaaataaagaaattaaagcggtaagttttgttggttcaacgcctattgcaaaatatatttatgaaaattcagcaaagaatgagaaaagagtccaagcattgggtggagcaaagaatcatttagttgttatgcctgactgtgatatcgacggggctgttaatggattaatgggagcagcttatggctcggctggagaaagatgtatggcgcaatcagttgctgttgctgttggcagtataggtgatgagcttgtttctcgtttatcaaaaaaagcagaggcattaaaagtaggccctggtatggataaaaattctgagatgggaccgttggttactaaagaacatttaaaaaaagtaaaaggatatgtagatttaggagtaaaagaaggagccaatttagttgttgatggaagaaatttaaaacttcagggctatgaaaatggtttttttataggtggctgcttatttgataatgttaaaaaagaaatgagaatttataaggaagaaatatttggaccagtattatcagttgtaagagttaaaactttcgaa

SEQ ID NO: 214285 - DNA, 1192 bp, Unknown
  Bacterial polypeptide expressing nucleotide sequence isolated from the Sargasso Sea
atgaaattaatagaacactttatcgagggtaaaaattattctgggaattccaagagaaaaagcaaagtttttaatcctgctacaggcgaacaaagtgcggaagttaaactagcaacaaaagaagatgttaataaagctgtagaaaatgcaaaaaattcatttgaaaaatggtcaaacactcctccccttcaaagagcaagggttatgtttaaatttaaggagttgatagaaaaaaactctgacgagcttactaagattatcgtttcggaacatggaaaagtatatgaagatgccaagggttctttggttagaggactagaagtagttgaatatgcgtgtggaatacctcaaatgcttaaaggagaatttacagaaaatgttggaacaggtgtggatagttggtcgacaaggcaacccttaggagtttgtgctggcattacaccatttaattttcctgcaatggttcccatgtggatgtttccaatggcaatagcatgtggtaatacctttgtgctcaaaccatcagaaaaagatccatcttgctctatgagattagcagagcttttgaaggaagctggattgccagatggagtttttaacgttgttaacggagataaagaagcagttgatgcattaataaataacaaagatgtagttgcaatgagttttgttggatctactccaatagcaaaatacatttatgaaaactgtgcgaaaaatgaaaaaagagttcaggcattgggaggagcaaaaaaccattgtgtggttatgccagactgtgacttagatcaagctgtaaatggattaatgggtgcagcatacggttcagccggagaaaggtgtatggctcaatcagttgctgttgcagtaggcagcattggagacaaactagttagcaatttagcaaaaaaagttgaagcattaaaagttgggccagggatggataagaaatcagaaatgggaccattggttacaaaagaacacttagaaaaagtaaaagggtatgttgatatcggagagaaagaaggagctaaattaattgtagatggaagaaatcttaagctccaaggttatgagaatggctactatattggaggatgtttattcgatcatgtaactaaagatatgagaatttataatgaagaaatatttggaccagttctctcagttgttagagcaaaagattttgacc

SEQ ID NO: 214286 - DNA, 1444 bp, Unknown
  Bacterial polypeptide expressing nucleotide sequence isolated from the Sargasso Sea
atgtacgaaaaatttggacaatttatagatggtaaatgggaggcttcatcagataatcaaacatatgatgtaattaatcctgctacggaagagttgataggtaaagcatccaaagcaacgcccaaagatgttgataatgccttaaattctgcaaagagaggcttagaggtttggaaaaatacagcaccatggcaaagatcttatactcttcgaaaaattgctgataagatgagagagaaacaggacatcctagctaaatggatgacacttgaggttggaaagccttttgcggaggcaaaaggtgaggttggagcatcagctgatatatttgagtggaatgcagaggaaacaaaaagaatatatggccaaactgttgaaagcagatttaaggatacaagagttcacgtatattatcaacctgttggagttgtagctgctctttccccatggaattttcctctagttttgtcctcaagaaaaatttctacagcacttgctgcagggtgctcagttataattaaaccagacgttataacaccagggacagtgatggagttagttgaaatttgcagagaaagtggagtacctaaaggtgtggttaatttgttatcaggcgatccacccagtatcgccacacaattaatcgagtcagatataattaaaaaaatttcaattacaggttcatcaagagttggaaagttaattttaaaacaagctgcagataaagttcaaagagttactatggaattaagtggtcattctccatttatagtttttgatgatgccgatattaaaaaagcagctgatatggcaatagcttcaaagtttagaaataatggccaagtttgtatctcacctaatagattttatatacaagaaaataaaaaagacgaatttataaatttatttatagagagaacaaaaaaactaaagattggaaatggaatggatacagatgtcaacttaggaccaattacaaccaaaaaaagactgaatgagattgagcaattagtagagactactaaaaaagagggtgcaaaagttttgttaggtggaaaaagaccttcaggatttaataagggtttttattatgaaccaactatatttgataatgtaaaagatgattttactattatgaaagtagaaccatttggtccacttgttccgatgctatcttttaaaaattttgatgaagttattgaaagggcaaataacaatgagctcggtctagccagctatgtatgtacaaattcaatggaaaaagctcatagagcatcagaattattagaaactggaactgttgctgtaaatacgcctgttgtagcaattgctgaagcaccatttggaggtataaaacaatctggatatggaagagagggcggctctatggccattaaagattatctaaatgtgaagtatactcacctaggattaaaaggttaaa

SEQ ID NO: 214287 - DNA, 1435 bp, Unknown
  Bacterial polypeptide expressing nucleotide sequence isolated from the Sargasso Sea
aatgcaagataagaaaaagttttatattgatggaaaatgggtttcacctattgaaccaagaaactataaagtaattgatccttctaatgaagaaccttgtgctgagatatcacttggtggaaaaaaggatgtagataaagcagttagtgcagcaaaaaaagcttttgaaacttgggctttctctaaaaaagaagaaagattagacttattagaaaaattatatgtggtttacaaaaaacgatgggctgaaatggcaaaacttatttctcttgaaatgggagctcctatgaaattttcaaccgagatgcaagctgcaacaggagcgagtcatataaaatcttttaaaaatattttaaaagattttcagtttgagaaagatttaggggaagaaaagaataatcaaaaattattatatgagccaaaaggtgtatgtgctttaattaccccttggaattggccaataaatcaagttaatttaaaagtaattcctgcattagcatctgcatgtacagtagttttaaagccgtctgaaatagcacctttatcatcaatgttattagctgaaatgatcgacgaagttaaatttccttcaggagtttttaacttagtcaatggagatggtgaaattactggtaatgctttaaccagtcatcctgatattaatatgatttcctttacaggctcaacacgagcaggtgctttaatttctcaaaatgcagctaaagattttaaaagaattagtttagaactaggaggaaagggagcaaatataatctttaaggatgccgattcagaagctgtatcaaggggggttttaaggtgttttagaaattcaggacaatcatgtaatgccccaacaagaatgcttgttgaaaaatcaatttataatgagactgtagagaaagtaaaagaattagcaaataatacaaaagttgactctccagataaagatggtgatcatattggaccagtagtatcagaagtgcaatttaataaaattcaaactttaattcaaaagggaatagatgaaggtgcaaaattagttgcaggaggaacaggtaaaccaaaaggctttgaaaaaggatattatgtaaaacctacagtttttgcagatgttaataatcaaatggagattgcaaggactgaaatttttggtcctgttttatctataattccttttgaaaatgaggatgaagctatttcaatcgcaaacgatacgccttatggtctaacaaattatattcaaactcaagataaggataaagtaaaaagagttgcaagaaaacttagatcagggatggtggatgttaatggagttggtatagcggcgagctcaccttttggaggatataaacattctgggattgggagagaagctggaacagagggtttgatagaatttttagaagtaaaaactgttggtggttggaattaa

SEQ ID NO: 214288 - DNA, 1015 bp, Unknown
  Bacterial polypeptide expressing nucleotide sequence isolated from the Sargasso Sea
taaaggagtttgtgcactaattaccccttggaattggccaataaatcaagtttgtttaaaagtaataccagcacttgccgcaggatgtacaatgattttaaagccatcagaacttgcaccattatcagcaataattattgctgaattaattcatgaaacaggatttccaaaaggagtatttaatttagtcaatggcgatggagcaattactggagacgctttaactagtcatccagatgtaaatatgatttcatttactggctcaacaagagctggagctttaatatctcaaaatgcagctaaagattttaaacgtgtaagcctagagttaggtggaaaaggagcaaatataatatttaaagatgcagatccggatgcagttgaaagaggtgctttaagatgttttagaaattctggtcaatcttgcaatgctccaacaagaatgctggtagaaaaatcaatgtacaaagaggctgtggataaattaaaaaaatatgctgatgattttaaagttgatgacccaaataaagaaggaggacatataggtcctgttatttcagaaacccaattcaataaaattcaaactttaattcaaaatggaatagatgagggagcaaaattagtttcaggtggtcctggaaaacctgatggtttgaaagctggatattatgttaaacctactgtttttgcagacgtaaataatcaaatgaatatcgcgagaacagaaatatttggtccagttttatcagtaattccatttgagacagaagatgaagcaattgaaattgcaaacgatacagactatggtttaacaaattacattcaaacccaggatagtgaaaaagttcaaagagttgccagaaaattaagatcaggcatggttgatgttaatggtgctggaatagcagtagatgcaccttttggtggttataaacattcaggcattggtagagaagcaggtaaagaaggtttaattgaatttttagaggttaaatctgttggtggttggagttaa

SEQ ID NO: 214289 - DNA, 1435 bp, Unknown
  Bacterial polypeptide expressing nucleotide sequence isolated from the Sargasso Sea
tatgacacaatacaaaaattttatagacggtaagtggatagaaagtgaatcaaaagaaacaatcaaagttgatgatccagctaatggtaagattattggcgaaataagttgtgcaaataaaaatgaagtagatcttgcagttgatgctgcgagaagatcttttgaaagtagagtgcttgttgacatgcctttgttagctagagcaaaactgatgcgaagaattgctgatgaaactagaaagattgctaaagaaggtggtgagcttctttgttatgaaaatggtaaaactttaggtgcagcagtgaaagaatttaatgatgttgcagatatgtttgattattatgctggtctcactgacaagcttgaaggtaaaactattccagtttcaacaaatgtttttgattatacagttttagaaccatttggtgtttcagcgcatattgtgccatggaattatccattatctatgattggacgatcattatcatgctcatttgctactggtaactcgactataataaaaacagcggaattaactcctttatctgccacagtgtttgctcaagcattaataaatgctgaagttcctaatggattaataaatataatatgtggttacggaaacgaagctggatcgtatttagtatctcacgaagatgttaatcatgttgtctttaccggatcagtagcaacaggtaaaaaaattcttcatggatgtgctgacaaagcaattccagctgtagtagaattaggaggcaagtcggcaggaattgtatatccagatgcaaatatcgatgatattctttacagtgctagacacggaatttttggagtagctggtcaaatatgtaccgctatgtctagattagttgttcacaaatctattaaagatgaagtggtagataaattagttgatttaagtaagtcactaaaaattggtcctggtatcgaaaaagacactgatctaacccctgtaatatctgaaaaccaacttcaaaaagttgaaggatatgccagatctggaattcaagagggagcagaagcagctcatggtggaaaaagaattcaacgtgatggttattttatggaaccaacaattttaaataatgtcaaacaagatatgacagtagctagagaagaaatatttggaccagtactatctatacttgaatatgaggatcaagaggaagcaataaaaattgcgaatgatacggattatggtttaggtgcaggagttttcacaaaagatttgaaaaaagcttcgtggacagctagcaagttagaagctggacaggtttatgtcaataaatggtttactggaaatcatgctactccctttggaggctataaacaatctgggtatagtcgtgaaaaaggtattgatggattaaaatcatatcttcaagttaagaatgtaggtattagcttaagctaa

SEQ ID NO: 214290 - DNA, 943 bp, Unknown
  Bacterial polypeptide expressing nucleotide sequence isolated from the Sargasso Sea
gcaactggttgtacaattggttttgaaaccttctgagatagctcctttatcagcaatgctttttgcagaaatgattcatgaagcaaaatttcctgcgggtgtgtttaatttagtaaacggagatgggccaggtgttggtacagatttgtcgggacatcctgatgttgatatggtttcctttactggatcgacaagagctggaaagttaattacaaaaaatgcagctgatacaattaaaagagtttgtttagagcttggaggtaaaggtggaaatattgtatttgctgatgcttatcctgatgcagttagagatggaatacgaaacgtcatgagtaactctggtcaatcatgtgatgcaccaacaagaatgttagtagaaaaatcaatatacaaacgagcagtagaagaagctgccgatgaagctaataaaattaaagtagatcttgcatcaaaagctggcgaacatataggtccagtgatatctaaaacgcaatatgataaaattcaaagtttaattaagagtggaattgaagaaggagcgaccttagtagctggtggacctgaaaaacctgaggatttcaaaaagggatattttataaagccaacagtgtttacagatgtaaataatgatatgagaatcgccaaagaggaaatttttggtccagttttatctataattccttttgagaacgaagaagaggcaataaaaattacaaatgacactgaatatggtcttggaaactatttacagactgaagataaagaaaaagcaaaaagagtctcaaaaaaattaagatctggaattgtatacgtaaatcataaacctgcggactctggcactccatttggtggttatagacaatctggaaatggacgtgaaggaggtacctggggtttacatgaatatttggaagtgaaaactattactgaatggaaaaattaa

SEQ ID NO: 214291 - DNA, 1420 bp, Unknown
  Bacterial polypeptide expressing nucleotide sequence isolated from the Sargasso Sea
catgaaagataaattaaatttttatatagatggctcgtggattaagtcagaatcaaaagaaaaaattgcagtgattaatcctgcaaatgaagagcttataggtcatatttcatccggaacaaaagatgatattaataaagcagtgttggcagcatcaaatgcctttaagacttatcaattaacttcaaaggaagatcgtattgagcttttaaataatattatttctgaatatgaaaatagatatgatgatcttgtgcaaaccattacagaagagatgggtgctccggtttggctttctcaaaaagctcaagcatccacaggaatcaaaaatttacatgagactttagatgctttaaaagattatgaatttgaaaaaaaagaaggagattacacattagtaagagaacctattggagtagtaggaatgattactccgtggaattggcccatgaatcaaattacgaccaaggcctctgctgctcttgcagcaggttgttcaatggtattaaaacccagtgagatttctccatattgcgcattactgcttgcagaaatatttcataaagcaggtgttcctgccggtgtattcaatgtagtaaatggatatggtccgatagtcggtgctgccttatcagatcatcctgatgttgcgatgatgtcttttacaggatcgactgaggctggtatagctgtcgctcaagcctctgcagtatctgttaaaagagtacatcaagagcttggcggtaaatcctcaaatatcattttagatgatgttgcagatctagaaaaatctgtaaaaggaggtgccgggcattgttttttaaattcaggacaatcatgcaatgcaccaacaaaaatgcttgtttctaaaaaaaattacgacaaagctgttgaggttgcaatccagaccgcaaatagtacttctgttggagatcctcaaggagaatttaggattggacctattgctaacaaacctcaatatgaaaagatcttaaaaatgatagaaattgggattaatgagggcgcaactttggttgccggaggtcttgaaaagccagagggatatgacaaaggttattatgttaaaccaacagtgtttgcaaacgtaactaatgacatgactattgctagagaagaaatttttggtcctgtcttatcaattatcaaatatgattcagaggaagaagcaattgaaattgcaaatgacactgaatatggtttggctggatatgttcaaggtgagccagagcatgctaacaaagttgcaagaaaaattagagccggacaagttattattaatgggggcgcacgaggtactggtgcaccttttggtggttataaatcctccggaaacggaagagagcacggcatacatggtttagaggaatgcttagaaactaaagcagttataatgccttaa

SEQ ID NO: 214292 - DNA, 1423 bp, Unknown
  Bacterial polypeptide expressing nucleotide sequence isolated from the Sargasso Sea
tatgaaagaaatgcacaaattttatattaatggcgaatgggtaaattcattgggttctgaaactattgaagtaatcaatccatcagatgaatcgatcattggttcaattgctgctggcactaaagaggatattgatgtcgcagtagctgctgcaaaggatgcatttaaatcttttggtttctcttccaaggaagaaagaattgcattgcttgaaaatataattatagagtatgaaaaaagatctgaagaactagcacaaactatatcttcagaaatgggagcgccattgtggctttctaatgtagcgcaagtcacatcaggcctatctcattttaaagacacattaagtgtattaaagtcgtttgagtttgaaactactgaaaatgaatacattgtaagaaaggagccaataggggtaattggaatgataacaccctggaattggcccatgaatcaaatgtgtacaaaagttgcctcagcaattgcatcaggctgtaccatggttttaaagccaagcgagataactccattttgtgggattatatttgctgaaattttggatgctgcaaaagtacctgccggagtatttaatctagttaatgggatggggccaattgccggcgctgctctttccgaacatcaagacattgatatgatgcatttcactggttcaactagagctggagtagctgtggcaattgcttctgctccaaccgttaaaagagttgcacaggagcttggtgggaaatcagcaaatattatcttagatgatgctgatattgaaaaagcagcggcagctggagcaaatcattgctttatgaatactggtcaatcctgcaatgctccaacgagaatgttagtctcatcaaaaaattatgacaaagcagtagaggctgctgctcaggttgcaaattctactatagtaggtgctcccgaagacgagggagtaaaaataggaccaatttcaaataaagttcagtacgaaaaagttcaaagattgatccagattggaattgatgagggtgcaagacttgttgcaggagggcttgggcgaccagatggaatttcagaaggttattttgttaaacctactgtttttgctgaagttactaatgatatgactattgctagagaggagatatttggtccggttctgagtatcttgaaatatgaaacagaagatgaagcaattgatattgctaatgatacagagtatggattagctggatacgttcaatctggagacgaaaaccatgctaaggacgttgctagaaagattagagcaggtcagattagtataaatagaggaaatacaggtcctgcagctccatttggaggttttaagacttctggaaatggaagagagcacggattaagcggtcttaatgaatgccttgagacaaaagcgatattaggaagttag

SEQ ID NO: 214293 - DNA, 1066 bp, Unknown
  Bacterial polypeptide expressing nucleotide sequence isolated from the Sargasso Sea
tttgaaaaaagaatttgataatgaatcagataattatattgcttatgaaccaattggagtatgcggacttataactccttggaactggcctattaatcaaatagctttaaaagttgttcctgccttagctgctggttgtacaatgattcttaaaccttctgaaatagcacctttatcaggcatgctatttgctgaaatgatagatgaagcaggttttcctcctggagtttttaatttagttaatggtgatggccctggtgttggtacacatttatctggtcatccagatattgatatgatttcttttacaggctcaactcgagcaggaagattaattactaaaaatgctgctgagactgttaaaagagtatgtttagaacttggaggcaaaggtggtaatatagtttttgcggactcatattctgaagcagtcagagatggtgttaggaatgtaatgagtaattcaggacagtcatgtgatgctcctacaagaatgcttgttgaaaaatcaatctatgaaagagctgtaaaggaagctgcagatgaagctaataaaattaaagtagatattgcagaaaaaaaaggtgatcatattggtcctgttgtttcaaaaacacagtatgataaaatattaaatttaataaaaagtggcattgatgaaggtgcaaccttagttgctggtggaccagatagacctgaaggtttggacaaaggttattttattaaacctacaatttttacaaatgtttcaaataatatgagaattgctaaggaggaaatatttggaccagttttatcaataataccatttgaaaatgaagaagaagctatatctattgttaatgatacatcttatggtcttggaaattatgttcaaacaaatgataaagagaaagcaagaagagttgcaagacaatttagatctggaggagtttatatcaatggaaaggtagctgatccaggaactccttttggaggatataggcaatcaggcaatggaagggaaggtggtacttggggcttagaagaatacttagaagtaaaaacaatttgtggatggaaataa

SEQ ID NO: 214294 - DNA, 1453 bp, Unknown
  Bacterial polypeptide expressing nucleotide sequence isolated from the Sargasso Sea
tatggaattaaataacaaatcactctttaaacaaaaatgtttcataaatggggaatgggttgacagttcttcaggtgaaactcttgaggtaaataatccagcctctcttgaaattattggcaatgtcccaaaatgctcagtttcagaaactaaaaaagctatagatgatgctaatactgctttccaaacttggaaagaaactactgcgaaagaaagatcagttattcttaaaaaatggggggagctaattacagaaaatgcagatgatttagctaaaatcatgactattgagcaaggtaaacctctagctgaagcaaagggtgaaatactaatgggtgcttcatatattgaattctatgctgaagaagcaaaaagagtgtatggtgacatagttcctgatccaagacctggaaaaagaattgtaataattaaacaacctgttggtgttgttggagcaataactccatggaattttccaaattcaatgataacaagaaaatgtgcagccgctctagcagttggttgtactactgttgttaaaccagcaagccaaacaccctattcagcattagctgtagcagtacttgctaaagaagctggttttccagatggtgtatttaatgtaataactggatcggcaagtgaaattggtaaagaactaacaagcaaccctattgttagaaaaatttcttttactggatctacggaggttggaaaaatacttttagagcaaagtgcctcaacagtaaaaaaagtttctatggaacttggtggtcacgcaccatttattgtttttgatgatgcagatatggatgaagctgttgcaggagctcttcaaagtaaatttagaaatagtggtcaaacatgtatttgttcaaatagaatatttgtccatgaaaatatttatgatgaattcctagaaaaatttacaaatgaagtcagtaaaataacagtgggtaatggacttgaagatggaattatatctggtcctttaattgatcaatcctctttagaaaaagtaattgatcatgtacaagatgcagtaaatacaggagctaaaatagcaattggtggagatgtgcattcgcttggtggtaatttctatcaaccaactgttctctcaaatgtatctacaaaggcaaaaataacttttgaagaaacatttggacctgttgctcctctttataaattttctagtgatgatgaagtgattaaaatggctaatgatacaccatatggattagcttcatatttctattcaagagacataggaagaatttggagagttgccgaagcacttgaatatggaattgtatctattaacaatggactaccaacaattgcagaagttccttttggaggtgtaaaagaatcaggaatgggaagagaaggttctcgatatggccttgatgactatttaactataaaatatatttcaatgggcggtatttaa

SEQ ID NO: 214295 - DNA, 680 bp, Unknown
  Bacterial polypeptide expressing nucleotide sequence isolated from the Sargasso Sea
ggcaatctccaatataattcttgaagatgttgatttagaaaatgctgtaaccatgggcatgaagcaatgttttcttaatacaggccaatcttgctcatctccaacaagaatgttattgcctgaacatatgcttgatgaagcaactaaatatgcagtagcagcagcaaatgatatgtctacaggagatcctttagatgaagagatttatttgggtccaatatctaataaaacacaatatgagaaggtgcaagatctaattcaaaaaggcatagatgagggagcaactctagcatgtggaggaacaggcagacctgatggattagagaaaggattttttgttaaaccaacggtcttcactaatgttaataacaatatgaccattgctcgagaagagatatttggtcctgttatctgtttaataccttattctgatgttgagcaggcaatcgaaattgcaaatgattcagaatatggcctttcaagcatgatttcatgctctgatgaagtgaaaggccaagaaatagcaaagagaataagaacaggacaagttattttaaatagaatctctcgaggagattatccagctccattcggtggatttaaaatgtcaggtaatgggcgagaacatgggctttttggtattgatgaatacttggaagtccaagctgttataacttaat

SEQ ID NO: 214296 - DNA, 1411 bp, Unknown
  Bacterial polypeptide expressing nucleotide sequence isolated from the Sargasso Sea
atggaagatgttcttaaacttcaaagagagcatttcttgaatgaaggtccgccttcatacgaattaagaatagatagattagacagagttcaagatatggttattcaaaataaagaaagaataactgaagcattaaacactgactttggatcaaggtcacctaatcaatctttaattactgatgtttatgctgttcttcctgcattttctcatgcaaaaaaacatttaaagtcctggatgaaggatgagaagagaaaatctaatttcccattcggatttcttggagctaaatcatatatccatagagagccacttggagttgttggaatgatatctccatggaactttcccatgtatttatctcttgctcctttagctggaatctttagtgctggtaatcaggtgatgcataagcctagtgaatttactcctattacttctgagcttttaaaagaaatatgtgacagtgcttttgatgaaactgaatttgcaacatttctaggtggtcctgatataggcgccgcttttactcagcttaagtttgatcatttgttatttacaggaagtggaaatatcggcaagcatgtaatgcgtgcggcttcagaaaatctagttccattaacgttggagcttggagggaaatctccagttatagtcagcgattcttcaaatatagatataacagcacgaagagtgatgtttaataagactttgaatgcaggccaaatatgtctagcacctgattatgtatatgtgcatgaaacagagaaggataattttgtagaagcatgtaagaatcaagttaatgaattttatagcgatcttaaatataaccctgactacacatcagtaataaatcagaaacattatgatagattaaatggtcttctagcagatgccaaagatcatggtgcagagcttgttgagattaatccagcaaatgaagatttctcccaacaagagtcacataaaattcctccaacacttgttttaaacccaactgatgaaatgcaaattatgaaagaagagatttttggtcccttactcccaataaagacttacaaggacataaatgaaccaattaactatataaacaaaaatgataaaccattgggattatattattttggtaacaataaaaatgaagaagctaaagttgttaactcaacaacttctggtggagttacagttaatgacattatgtggcatattcaacaaaatgaattaggttttggaggagttggtccatccggaatgggtaaatatgatggttttgatggatttatgaacttttcaaacaataagccaatttataagcaaataggatttggtttagataaatttcttgatgctataagacctccatataaaggtagtatagaagacgttctagaaaaactattaaagtaat

SEQ ID NO: 214297 - DNA, 1429 bp, Unknown
  Bacterial polypeptide expressing nucleotide sequence isolated from the Sargasso Sea
tctgttcaagcagcatgcctacataaacggcgaatggctgtccgccctcggtggcgacacgcaatccattttcaatccggccactgggcaactgatcggcacggtgccgatgatgggacgtcaggaggccaggcgagccatagctgccgccaaccaggccctgcctgcctggcgttccctgccggccaaggagcgttcggccaggctgcgggcgtggttcgaactcatgctggagcaccgggaggaactggcgtgtctgatgaccattgagcaaggcaagccggttgccgaggctcgcaatgagatcctgtacgcggcatccttcgtcgaatggtttgccgaggagggaaaacgggtgtatggagacgtgatccccagcccccaggccgacaagcgcttgctggtgatcaagcagccgatcggcgtcaccgcagccatcacgccctggaattttccttcggccatgatcacccgcaaggcggcgccggcgttggccgcaggctgcaccatggtgctcaagccggcgccgcaaacgcctttttccgccctagcgttggcagcactggcgcagcaagcagacatccctgccggcgtattcaatgtcgtgaccggctcggcggaagagatcggaggcgaatttaccagcaacccgactgtgcggaagttgacatttacgggttctacccaaattggccgcttgctaatggctcaatgtgccaacgatgtaaagaagatgtccttggaactgggtggcaacgcgcccttcatcgtctttgaggatgctgatttggacaaggcggccgaaggtgcactgatcgcgaaataccgcaacaatggtcaaacttgcgtatgcactaatcgaatttatgttcatgatagtgtttacgatgattttgttctcagattaaagagtgctgttgatgggcttaaagttggcaatggtttggagagtggtataaccattggcccattaattaatgacgctgcagtcgagaaagtgaaatcccatatctctgatgcattgagtaagggagcgaaaattttgactggcggtaagcctcattctcttggaggatatttttttgagcccactatactgacagatgttacccaagatgccttggttgctaaagaagaaacatttggaccgctagctcccatcttccggtttcatgatgaaagcgaagctgttggatttgcaaatgatacagaatatgggttggcggcatatttctatacaaagaatttaagccgagctttccgtgttgctgaagcgctggaatatggaatggttggaataaactccggggcaatttctaacgaggtagcgccattcgggggcattaaatcctctggattggggcgcgaaggatcaaaatatggaatagaagaatatttggaaattaaatatattaatattgaattgtag

SEQ ID NO: 214298 - DNA, 1495 bp, Unknown
  Bacterial polypeptide expressing nucleotide sequence isolated from the Sargasso Sea
atgaatttaattgaacattttgtaggaggaaaaataattgccggatcctcagaaaagaaaggtaaagtttttaatcctgctactggcgaacaagagaaagaagtcagactagcctctcacaatgatttagatcaggctgtagtaattgcaaaaaaagcttttgaaacttggtcaattaaaccttcacttcaaagagcgagaattatgtttaaatttaaagagttaattgaaaaaaattatgatgagcttactaaattaattgtttctgagcacggcaaagtttatgaagatgcaaaagggtcattaactagaggtttggaagtagtagaatttgcatgtggaattccacacttattaaaaggagaattttcagagaatgtagggacagatgttgatagttggtcaatgcgtcaaccattaggtgttgttgctggaataacaccattcaacttccctgctatggttccgatgtggatgtttccaattgcaattgcttgtggaaatacattcatattaaaaccatcagaaaaagatccttcttgtgcaataagattagcagaattattaaaagaagctggtcttccagatggagtatttaatgtggtgaatggggataaagaagcagtagacgcaatattaaataacatagatataaaagcagttagtttcgttggttcgacccctatagcaaaatatatttatgaaaattcagcaaaaaatgaaaaaagagttcaggcattaggtggtgctaaaaatcatttagtggtaatgccggattgtgatttagatggtgcagtgaatggtttaatgggtgcagcttacggttcagctggagaaaggtgtatggctcagtcggttgctgtagcagtcggtgatattggagacgaactagtatctagattatcaaaaaaagcagaagctttaaaagttggaccaggaatggacaaaaattctgaaatgggtcctctagttactaaagaacatttagaaaaagtaaaaagctatgttgatttgggcgtaaaagaaggtgcgaaattagtagttgatggaagaagtttaaaattacagggatacgaaaatggcttttatatcggtggttgtttatttgataatgtaacaaaagatatgagaatttataaagaggaaatatttggtccagttctatcagttgttagagttaaaacttttgaagaggcttcaaaattaataaatgagcatgagtatggaaatggtgtaagtatttatacaagagatggagatgctggaagaacatttgcaagcaaaatccaagtagggatggttggtattaacgtacccatacctgtgccaatggcttttcatagttttgggggctggaaaagatctttgtttggagatagcgcaatgcatggtatggagggaataaaattttatactaaattaaaaacaataacttcaagatggccctcaggaatcagatctaacgctgaatttgtgatgccaacaatgaaataaa

SEQ ID NO: 214299 - DNA, 977 bp, Unknown
  Bacterial polypeptide expressing nucleotide sequence isolated from the Sargasso Sea
aatgaaccaagtttgcttaaaagttatgcctgcaattgcttctggatgcacaatggttttaaagccatcagaacttgcaccattatcatcaatgatacttgctgagatgatagatgataccaaatttcctgcaggagtgtttaatttagttaatggagatggagccacaacaggtgatacactaacaagccacccagatataaatatgatttcttttacaggatcaactagagcaggagctttaatttctcaaaatgctgccaaagatttcaaaagagtaagtttagaattaggaggtaagggtgctaatattatttttaaggatgctgatcctgaggcaattgaaagaggtgccttaagatgttttaggaactcaggacaatcatgtaatgcccctacaagaatgctagtagagaaatctatgtacaatgatgcaatagaaagattgaaaaaatatactgaaaattttgaagtaggcgaccctaaaaaagaaggagagcatataggcccagtgatttctgaaactcaatataacaaaattcaaactttaattaaaaagggaattgatgaaggtgctaaattggttgcaggtggaccaggtaaaccagcaggattagagaaaggttactttgtaaaacctactgtatttgcagatgtaaataataatatggaagtcgcaagaacagaaatttttggaccagtattatcggtaattccatttgaaactgaagaagaagcaattgaaattgccaatgacacaccttatggtttaacaaattatattcaaactaaagactcggaaaaagtaaaaagagttgcaagaaagcttagatcaggaatggttgatgtaaatggagctggtattgcagttgatgcaccatttggaggttttaaacattcaggaataggtagagaagctggcaaacatggccttgaagaatttttggaagtaaaatctgttggtggctggagttaat

SEQ ID NO: 214300 - DNA, 1135 bp, Unknown
  Bacterial polypeptide expressing nucleotide sequence isolated from the Sargasso Sea
tcttcagtattatagtgagcttgccagagaccaagttggcaggattgtttctcctgtcgaaaaaaaatctatgtctttgattcggtatgagccctatggagttgttggatgtattattccatggaattatccactttcattaatgggctggaagttggctccagcactggcagctggaaatacaattattatgaaacctagtgaaatcacctctctttctttattgcactgggcagaaattataagtgatattatgcctccaggagttttaaatattgtcactggatatggcgcggaagcaggagaggaaatagttaaacacccttcaatcccaataattacttttacagggtcggtcaaaacaggaaaacgaatagcgagacttgctgcggataatttaaaaaaagtttctcttgagctaggcggaaaagatccagtaattatttgtgatgatgctgatataagtgttgcagcaaaaggtacctcctggggtgggtttgtgaattcaggacaggtctgtacatctatagagcgtgtatatgtgtataacagcgttgcggataagtttacagaggcgttggtggaagaagcaaaaaaggtaaagctaggggatcccatggatgagaatacggatgtagggccgatggcatcaaaagcacagctgaaaaacaccatagataaagtcgcgcttgcaaaaaaagaaggggcacgtcttttaacaggtggagaacgtcctttggaacctgctagaggttacttttttacacccacaatttttgatagagtcaagcctgatatggaaattgttactgaagaatcattcagtccagtaatccctattcaaaaaattgattcattagatgaagcagtgagaatggcaaattcaacaaaatatggtttggggtgtaccatctttaccaaagatattgaacgtgctctaacagctgcagataaaattaaatcgggtacagtctgtattaataatccactaatggaaaatatagcagctccttttggaggtatgaagcagtctggaattggtcgagaacatggtgttgaagctttagaagaatttagagaagcaaaacatatttatattgattatgatcattctaaaaaaagttggtggttctaa

SEQ ID NO: 214301 - DNA, 1411 bp, Unknown
  Bacterial polypeptide expressing nucleotide sequence isolated from the Sargasso Sea
gatgaacaatgttctaaaagatcaaaaggagtattttattaaaaatggttctccatccgtagatcttagaattgatagactgcagaggcttaaaagtttgattatggataatagatatgactttgttgatgctttgaatgccgattttggtaacagatctaaaaacgcctctatgttatctgatgtatatggaataatgcctgcaatcaatttagccataaaaaatgtaaaaaagtggaacaagattgaaaagaaatcgtcaaatttcccttttggattattgggtgcaaagtcatatattaaatatgaacctcttggaacagttggcatgatttctccttggaattttccagtgaacctagcttttgttccacttgtttctatttttgcagcaggtaatcaggttatgcataaacctagtgagcatacgcctattacctcatctttgttaaaagatttatgtgataaagcatatgatcagaacgaatttgcaacatttttaggtggacctgatgttggtgaggcattcactaaactgaattttgatcatcttttatatacaggaggtggatcagtagctaagcatgttatgagcgcagcttccgaaaatttagttccatgtacacttgaattaggtggtaagtcacctgttgttgttggtaaatctgctgacttgaaaacaacagctaaaagaataatgtttggtaaaacacttaatgctggtcaaatttgtctagcaccagattatgttgttgttcataaagatcaaaaagatgattttattaatgaaactaaaaatgctgtatctgactattttccagatttaaaagataatgatgattacacttctattataaatcaaaatcattatgacagacttcaggatttacttaacgatgctattgaaaagggtgcaactattgatgaaattaatcctgcaaatgaggattttagtcaacaagaacatttcaaaattccaccaacaattgtttcaaataccactgatgacatgaaaatcatgcaggaggaaatatttggaccacttttaccagtagttgagtatgacgagatagatgaggcaactaagttaattaactctaaagatagaccacttggattatattattttggtaatgatcaatcagagcaagacaacattcttaataaaacttcatctggtggtgtaactgtcaataatgtaataagtcatcttcaacaaaatgatctctcttttggtggtgttggaccatctggtatgggtagatataaatcatttgagggattcaaaaatttctctaatccaagggcttactacaaagatgtaagcttcaagctagataaagtttttgatgctgtaagaccaccttataaagaaaatattgagaaagtattaaaacaattaatgaaatag

SEQ ID NO: 214302 - DNA, 1080 bp, Unknown
  Bacterial polypeptide expressing nucleotide sequence isolated from the Sargasso Sea
tatgtatagtaaatttggacaattcattgacggaaaatggcagcaagctgaaaaaaaagaaacttacgatgttatcaatccagcaacagaagaagtaattggcaaagcttctaaggcttcatcagttgatgttgagaaagcattaaaatccgctgaaaaaggtttaaaggtatggcgtaatactccaccctggcaacgatcatatattataagaaaaatcgccgacttaatgagagaaaaaaaagatattcttgcgaaatggttaactttagaagttggaaagcctttagctgaaggagttggtgaagttggtggatctgcagatatttttgaatggaatgctgaagaaacaaaaagaatttacggacaaacagttgagagtagatttcctgattcaagagttcatgtttattatcagcctgttggtgttgttgctgcattagtaccatggaactttccaatagttttagcatctagaaaaatttctactgctttggctgctggttgttcagttatttgcaaacctgatgtcattactcctggagctgtaatggagttagttgatatatgtagagaagctggagttcctccgggtgtagtaaatcttctgtcaggtgatcctgcgggaatttctgagcaactaatcaaatcagatatagttaaaaaaatttcagttactgggtcaactagagttggaaagttaatattaaaacaagctgctgataaagttcaaagagtaacaatggaattaagtggtcattcaccttttattgtttttgatgatgcagatattaacaaagctacagatatagcagtaacagcaaaatttagaaataatggtcaagtttgtatttcgcctaacagattttatatacaagagaagaaaaaagatgaatttataaattcttttattaacaaagcaaaaaaacttaaaattggaaatggaatggatgaaaatgtccaattaggtccgttatcaactgaaaaaagattaaatgaagttgaacaacttgttgagactacaaaaaaagaaggagcaaaagtattaatgggcggaaaacgtccagcaggatttaataa

SEQ ID NO: 214303 - DNA, 1009 bp, Unknown
  Bacterial polypeptide expressing nucleotide sequence isolated from the Sargasso Sea
tatgacgataagagtggctattaatggctttgggcgcataggaaggaacatactcagagcgaaatatgaaagtgataattataatgatatgcagattgttgcaataaatgatttaggcgatagtcaaatcaatgcacatctattgatacatgatacagttcatgggaagtttcaaaagccagttgatgtcgcgagcgataaaataataatcgataacagtgatgagatactggtgacatctgagagaaatccagaagccttaccgtggaagaaacttaaaattgatgtcgtctttgagtgtacaggaatatttgtctcaaaggatcaagctggcggacatatcaatgccggagcaaaaaaggtgatcatctctgcaccgggaaaagaggtcgacaatactgtggtgtttggagtgaaccatgagactctaactgatgatcatacggtaatttccaatgcttcttgcacaactaattgtctagcaaccgtgataaacaatattcacaaaaatctccagataaccaatggtcttatgacgacagttcatgcttatactaacgatcaggtcttaactgatgtgtatcatactgatttgaggagggctaggtcagctacacaatcaatgatacccacaaaaactggggctgcagctgctgttggactagttatgccagaacttaatggtaagcttgatggctttgcaattagagtgcctaccacaaacgtctcgatagtcgatcttgtttttaacacggataaatctagttccgtagatgaattaaataatctcgttttagaatcatctgaaaatgaaatgaagggtattgttggatacaataatctaccacttgtatcagtagattttaatcactcatcattctcatcagtttatgatgagagtctaacaagggcttcaaaggataaactatataaaatatgtgcttggtatgataatgagtggggtttttcaaaccgtatgctagatgttactaaaaattggatcaagtag

SEQ ID NO: 214304 - DNA, 1432 bp, Unknown
  Bacterial polypeptide expressing nucleotide sequence isolated from the Sargasso Sea
atgaaaacatatgaacaattttatataaatggggaatgggtcgaccctgcagagggcgttaattctttcgatgtactaaacccggcgaatgaagaggtgataggcaaaatttcaatgggtagttctgctgatgttgataaagctgttgaggctgcctcaaaagcttttaattcattcagtcaaactagtgtagaagaaagactagcaattttgggtaagatagttgaagtctatcagtctagatatgacgaaatagctgagactatatccatggaaatgggggctcctttgtcgttgtcaaaagcagctcaagcagctacgggtctgggccactttgctcaagctatagaaatcttacagggttttgaatgggaagaaactaaagggaaaactctattaagaaaagaacctattggagttgttggaatgatcacaccatggaattggccgataaatcaaatttcttgcaaggttgccccagcaatagctgctggatgcaccatggttctaaaacctactgaaatagcaccattaaatgcaatgttatttgcggaagtaatacatgaagctggtgtacctgctggagtttttaatctagttaacggtgatggaccaactgttggagaagccatgtctgctcatccgaaaatagacatgatgtcatttacaggctccacaagagcaggaatagctgttgctaaaggttcagctgatactgttaagagggttgctcaagagttaggaggaaaatcagcaaatattattttagatgatgctgattttgaatcagcaatcacaggtggtgctaaacattgtttcaataacagcggacaatcatgtaatgcacctaccagaatgttggtgcctgaatcaaggcatgaagaagcaaaagaaattgctaaacaagctgctgagtcaactaaagttggagatccttttgctgaagatacaggcattggtccagttgtaagtgaagtgcaatttaataaaattcaaggtcttattgaaaaaggaattgaagaaggtgccgagcttgtttcaggaggaccaggaaaaccagaaggattaaatgcaggttattatgtaagacctactgtttttgctaatgtcaataacgacatgactatagctagagaagaaatatttggtccagttttatccattcttccgtataaggatgaagaagaagctgttgaaatagctaatgatactgaatatggtctttacggatatgtgtcatctggtgacgtagagcatgccaaaaaagtagcaaaccaaatcagagcaggtagtattgctataaatggagcgcaagcagactttaccgctccttttggaggctacaaacagtctggtaatggtaaagaatggggtccttttggatttgaagagttcttagaaactaaagctgttgtcggatactctagctaga

SEQ ID NO: 214305 - DNA, 1474 bp, Unknown
  Bacterial polypeptide expressing nucleotide sequence isolated from the Sargasso Sea
atgtctctctctttgactcgccccgacctgatccacccgcacaacctgatcgacggcaagtgggtcgacgccgccgatcgcgcccgctttcccgtcaccaacccggccaccggcgaattggtcgtcgaagtcgccaacagcagcgccacggacgcgcgcgccgccaccgacgccgccgcccacgccttccccgcgtggcgcgataagctgccgcgcgaacgcgccgagattctgcgccgctggcacgcgctgatcgtcgccaatacggaagacctcgcgaaactgatgtcgaccgaacaaggcaagccgctcgcggaaagccgcggcgaagtcgcctacggtgcgtcgtacgtcgcctggttcgccgacgaagcgacccgcatttacggcgatctgatcccgcagcaacaacgcggcaagcgcatgagcgccgtgaaggaaccggtcggcgtggtcgcggcgatcacgccgtggaatttcccgctggcgatgatcgcgcgcaagatcgcgcccgcgctcgccgccggttgcacggtggtggccaagcccgccgaagacacgccgctcaccgcgctcgcgctggcagcgctcgctcaggaagcgggcttgccggacggtgtgctgaacatgctgtcggcttcgcgcgaacagggtattgcggcggtcgccgattggcttgccgacgcgcgcgtgcgcaagatcacgttcaccggctccacgccggtcggcaaacatctcgcccgcgaatcggccggcacgctgaagaagctgtcgcttgaattgggcggcaatgcgcccttcatcgtcttcgacgacgccgacctcgacgccgcggtcaccggcctgatggccgccaagttccgcaacggcggccagacctgcgtgtgcccgaaccgggtctatgtgcagtccggcgtatatgcacgcttcgccgatctgctcgcgcagcgcgtcggcgcgttgaaagttgcacccgcaaccgatccggacgcgcagatcggcccaatgatcaacgaacgcgccatcgacaagattgcccgccatgtcgaagacgccgtcaaacacggtgcaaaagtgctgaccggcggcaagcgcctggccgaactcggcccgaactactatgcgccgaccgtgctgaccgatgcaaaggacggcatgctggtctgctgcgaagaaacctttggtccggtcgcgccgctgttccgcttcgatgacgaagccgaagcgatccgcctcgcgaacgatacgccgttcggcctcgctgcgtatttctatacgcaggacgtacggcgcatcaatcgcgtggcgagccggctcgaagcgggcgtaatcggtatcaacgaaggcgcggtgtcgagcgaggccgcgccgttcggcggcgtgaaggaatcgggttacggccgcgaaggttcgaagtacgggctcgacgattacatgtcgatcaaatacatgtgtcagggcggcctggattaac

SEQ ID NO: 214306 - DNA, 1462 bp, Unknown
  Bacterial polypeptide expressing nucleotide sequence isolated from the Sargasso Sea
atgaccaagagaacgatcgacctcaagcatccccgagagttctacatcggcgggcaatgggtggcaccgtccaccgccgaaacgttcgatgtgctcgactgcgcgacggaagaagtcgtggcgaccgtggcaaaagccgcgtcggccgacatgcagcgtgcaatcaccgcggcgcgtgacgcattcgacaacggcccgtggccccgcatgacgccgcaggaacgcgcggtctatctcgagaagttcgcggaacggctggaagcgctgaacgacgatttcgcgcgcatctggtcgatcgagaccgggatcgtgtacaagatcgcccagccgcgtatcgggctgttcatcagcggcgcatttcgccagtacgcagcaatggcgtcgaccttcccgttcgtcgaggagcaccggtcggttaccggcaatctcggctatcgcgtctacgagccggtcggcgtcgtcggggaaatcattccgtggaacggtcctgccgggttgatggcgtacaagaccgcgccggcgctactcgcaggttgcacactggtgatcaagtcgtcgcccgaagcgccctgctcggcctacctgttcgccgagatctgcgaagaaatcggtttgccgcccggcgtgatcaatgtcgtgacggccgatcgggacgtatccgaggagctggttcgccatcccggcgtcgacaagatcacgttcacgggatcgacaggcgccggccgccggatcgcttccattgccggcgatcgcgtcgcgcgcgtcacgctcgaactcggcggcaaatcgcccgccgtcatcctcgatgatttcgatgtcgaagctgcggcaaacatcctcgggccgtcctatttcggctacaacaccgggcagatctgccacagcctgacgcgagtgatcgtgcctcgtgcgaagcacgatgcgatggtcgaggcattgtcgaacatcgccaaacagatcgtcgtcggcgatccttttgcgccggagacgacctccggcccgcttgcgagcgcacggcaacgcgaaaccgtcgagcgattcgttgcaaagggtatcgcagaaggtgcaacgttggcagccggcggcaaacggccggctgggctgcagcgcgggttcttcttcgagccgacggtattcggcaacgtggacaaccgttcgacgatcgctcaggacgagatcttcggcccggtattgagcgtcattcccgccgacgacgaagccagcgcgatccggatggcgaacgacaccccgtttggcctgaatgccgcggtgttcacgaacgatagcgcccgtgcgttgcacgtggcacgccagatccgctcggggacggtcggccacaatggcccgcgcaccgatttttcgatcggcttcggcggattcaagcagtccggcatcgggcgtgaaggcggcgtcgaagggctgaccgcgttcatggaatcgaagaccatcgtcatggcttgac

SEQ ID NO: 214307 - DNA, 1435 bp, Unknown
  Bacterial polypeptide expressing nucleotide sequence isolated from the Sargasso Sea
catgttagacaaaaaaaatttttacattaatggagcgtgggttaagccaaacagttctgaggaaattaaagtaattgatcctgccacagaagaaaattgtgcagtaattactttagggaacaaagctgacgttgatattgctgttaatgcagctaaagatgcctacgagtcttgggccttttcttccaaagaagaaagaattgcactattagaaaaactttatgaaaattataagaaaagatgggcagatattgcagaagctataactcttgagatgggtgctccaaaagattttgcaacaaaattacaagcaggcacaggagcaagtcatattaaatcatttattagatacttaaaaaattttgcatttgaaaaaccattaggcgagcatgctcctaatcaaagattaatttatgaaccaaaaggtgtttgtgcattaataacaccatggaattggcccatgaaccaagtttgtttaaaagtaatgccagcaatagctgcaggttgtacaatggttttaaagccatcagaattagcaccactctcttcaatgatacttgctgaaattattgatgatgtaaaatttccaaaaggtgtgttcaatttagttaatggtgatggagcaacaacaggtgatgctcttacaagtcatccagatattaatatgatttcttttacgggatcaacaagagcaggagctttgatttcacaaaatgctgctaaagattttaaaagagtaagcttagaattaggtggtaaaggagcaaatataatttttaaagatgccgatccagaggctattgaaagaggtgctttaagatgttttagaaattctggacaatcttgtaatgcgccaacaagaatgttagttgaaaaatcaatgtatgaagaggctattgagagattaaaaaaatatactgaaagttttgaggttggtgaccctaaaaaagaaggagaacatataggtccagttatttcagaaactcaatacaataaaatacaaactttaattcaaaaaggaatagatgaaggtgcaaaattagttgctggaggaacaggtaaacctgatggattagacaaaggttactttgttaaaccaactgtttttgcggacgtaaataataatatggatgttgcaagaacagaaatttttggaccagttttgtctgttattccatttgaaacagaggaagaagcaataaaaatcgcaaatgatactgcttatggattaacaaactatatccaaacccaagactctgaaaaggtacaaagagttgcaagaaaattaagatctggaatggtagatgttaatggagctggaattgctgttgatgcaccttttggtggttttaaacattccggaataggtcgtgaagcaggcgaacacggtttagaagagtttttagaagtaaaagccgtaggtggttggagttaa

SEQ ID NO: 214308 - DNA, 1432 bp, Unknown
  Bacterial polypeptide expressing nucleotide sequence isolated from the Sargasso Sea
tatgttagataaaagacaattttatataaatggacaatgggtagatcctattgctcctaatgatcttgaagtaattaatccatctaatgaagaagtttgcgctataatttcattaggtagttcagctgataccgatttagcaattgaatctgcaaacaaggcattaccttcatggagcaaaacttcaaaagaagaaagactaaaattaattgaaaagttatatgaaatatacaaagctagatggaatgatatgactgaatcaatttcattggaaatgggcgcaccttacgattgggcaaatgaggaacagagtaaatcaggtgctaatcatattaaaaattttattaaaacattaaaaaaatttgaatttgaatctacttttgatgaagaatcagataatcatattgtttatgagcctataggagtatgtgcattaataactccttggaattggccaattaatcaaattactctaaaagtaattcccgctttagctgctggatgcacaatggtattaaaaccatctgaaattgctcctttatctggaatggtttttgcagaaatggttcatgaagcaggatttcctgcaggtgtatttaatttagttaatggaaatggtgaaggagttggaactcaattatctggtcatccaaaaattgatatggtctcatttactggatcaactagagcaggtaaattaattactaaaaattctgccgatactattaaaagagttactttagaacttggaggcaagggtggcaatatagtttttgcagattctgaccctgatgccattaagcgaggtgtaaagcatgtaatgggaaattcagggcaatcttgtaatcatccaacgcgtatgcttgtagagaaatcaatttatgagagagctgttaaagaagctattgaacaagcacaaaatactaaagttgatgtagcttcaaaaaaaggagatcatataggcccagtagtttcaaaagttcaatatgataaaattcaaaacttaattcatactggaataaaagagggtgcaaatttagttgctggcggtccagatagacctgatgatttagaaaagggatattttgttaaacctacaattttttcagatgttaataatgatatgacaattgctcgtgaagaaatatttggtcctgttttatcaattataccatttgaaactgaagaagaggcaatagctatcactaatgatactgattatgggttaactaactatgttcaaactcaagataaggaaaaagcaaaaagagtagcgcgacaacttaaatctggtggagttgaagtaaatggtaagggtgtatctggtggaactccttttggaggttttcgacaatctggaaatggaagagagggaggaaaatggggcctcgaagagtatcttgaagttaaagctataaccgattggaaataa

SEQ ID NO: 214309 - DNA, 1444 bp, Unknown
  Bacterial polypeptide expressing nucleotide sequence isolated from the Sargasso Sea
atgtacgaaaaatttggacaatttattgatggtaagtggcaacaatcatctgacaaatcaacttacgaagttattaatccagctaatgaagaagttataggtcatgcatcaaaagcaacaccagctgatgttgataaagcattaaagtctgccgccaaaggattagaagtttggaaaaaaacaccaccctggcaaagatcttatattattagaaaaatagcagataagatgagagaaaaacaagatgtcttagctaaatggatgacactagaagtaggcaaaccgtttgcagaggctaaaggtgaagtcggtggggctgcagatatttttgaatggaatgctgaagaaacaaaaagaatttatggacaaacagttgaaagtagatttgctgatacaagagtacatgtttattatcagccaataggagttgttgcagctctaacaccttggaattttccactcgttttgtcttcaagaaaaatttcaacagctttagcagcaggatgttcagtaatagttaagccagatgttataacaccaggtacagtgatggagcttattgatatatgtagagaatgtggagttcctcctggagtagtaaatttattatctggagaccctccaagtattgcacaacaattaatttcatcagatataattaaaaaaatttcagtaaccggatcaacaagggttggaaaattaattcttaagcaagccgctgacaaagtgcaaagagttacaatggaacttagtggtcactctccatttattgtttttgatgatgcagacattcaaaaggctactgatatggcaatttctgcaaagtatagaaataatgggcaagtttgtatctcaccaaatagattttatattcaagaaaagaaaaaagatgaatttgttaatttgtttattgaaaaaacaaaaaaattaaaaataggtgatggtatggatccaagtgttcaacttggtcctttaacaacaaaaaaaagattaaacgaagtagaagaattagttgagacaacaaaaaaagaaggagcaaaagtactattaggtggaaaaagacctgctggatttaacaaaggtttttattatgaaccaacaatttttgataatgtaaaagatgattttacaattatgaaagtggagccatttggtccactagtaccaatgttatcctttaaatcatttgatgaagtaattgaaagagcaaataataatgatttaggtcttagtagttacatatgtacaaactcaatggaacaagcgcatagagcatcagaactaatggaaactggtaccgttgcggttaatactcctctagtggctatagcagaagcaccctttggaggtatcaaacaaaccggatatggaagagaaggtggttcaatggcgattaaggattatttgaatgttaaatacacacaccttggtatcaaaggttagt

SEQ ID NO: 214310 - DNA, 973 bp, Unknown
  Bacterial polypeptide expressing nucleotide sequence isolated from the Sargasso Sea
atgcaaaatctacaaaaattttatattgatggtcaatgggtagcgccacaatctagtaaaaaaatgcctgtcgtaaatccagccacagaggaagttatcggtgaagtcatattaggtaatgaagaagatgtaaatatcgcagtaaaagccgctaaaaatgcatttatgagtttttcaaaaacttctaaagaagagagaatgaatattttgaaaaatatacgaaaaatttcagaagaaagatttgatgacttagctgatgctatgacaatggagatgggtgcaccaagaaaaatgtcacgtgaagcccaagctgatgcagctataggtcatttggatggttttattagtgcattagaaaaacatgaagaaaaaattgagttatccaatacagatattttattaaaagaaccaattggagtatgtggtctaatcactccatggaattggccaataaaccaaatcacattaaaagttttgccagtcattgcaaccggatgtacttgtattttaaaaccatcagaacatacgccattatcagcaatggtttatgccgaaatactagataaagctggtgtccctgcaggtgttttcaatttagttcatggtgatggcgagggtgtgggcatagccatgtcaagacatccagatattgagatgatgtcgtttaccggctctaaaagaggcggaaagtcggttacaatagagtctgctgaaactgtcaaaaaagttacacttgagcttggaggcaagtcaccaaatttagtttttgcagattgtgatcttgaggaaaaagtaaccgcatctgtaaatgaatgtatgtttaacactggacaatcatgtgacgcgcctaccagattactagttgaaaaaaaatgctacgatgaagtcgttacaattgcaaaaaaggcagctgaagaaataaaagttggagacccacaagaggatggagaccatctaggacctttattttgat

SEQ ID NO: 214311 - DNA, 1420 bp, Unknown
  Bacterial polypeptide expressing nucleotide sequence isolated from the Sargasso Sea
catgcacgaacgccggcacctgtacatcaatggaaactggatagaacccagtggagagggttctatcgaggtaatcaatccgaccaatgaggaggtgattggttccgtaccagtctccagcgattcagatgctaatgctgctgtggaggctgctaggtcagcattcacggattggtcgacaaccgaggttagcgagagggtagaattcctaaacaggatttcgggcttaatcaaggatagaagcgaggatctagccgagataattactgcagaggtagggactcctatagagtactccaggatggcgatggtagggactccgagggttgtttctaggtcttatgcgaagatcctggacggatacgtctgggaggaagaggtaaggaactctctcgtaatcaaggagccgataggggtggtagctatgatcaccccgtggaacttccccctgcaccagataatcggaaaggtggcgccagctatcgcagcgggttgcacgatggtgctgaagccatccaaggaggcgcccctgaatgcattccttctagcagatatcctggatgatgtaggccttcctaatggggttttcaatttgatttcaggtcacgggagagatatcggagagaccttgtgtagccatccaatggtggatatggtcagcttcacgggatctacaagtgctgggattagggtctcggaactagcggcaccaagcgtaaagagagtgacactggaactggggggaaagagtgcgaacattatactggatgacgcagacatccaacgagcggcaacttcggcgatttactcatgcttcggcaactctggtcaggagtgctcggcccttacccggcttctggtgccagaggattctagagacgaggttgtggaggttatctcaagcaagatcgggaggtacactgttggagaccctatggatgagtccagcagatgtggcccactggtctccaagaggcagcaggagagtgtttcttcgtacatctctagcggaatcgaacaaggggccactctagttgcaggaggcgaggggatgccagatgggcttgggtctggatttttcgtaaagccgactgtcttcgcagacgttaccccggatatgaccatattcagagaggagattttcggtcctgttctatgcatcacctcatactcctcagaggaggaggcagtagagttagcaaacgactctgaatatgggctatctggaggggtctggtcaggtgatgaggagagagccatgagagtagccaagatgttgaggactggtcaggttagcattaatggtggcgcgttcaacgttactgctcctttcggaggttacaagcaatcgggattggggagagagttaggggtccacggaatggaggagttcctcgagatcaaatcaattcagcgctag

SEQ ID NO: 214312 - DNA, 1435 bp, Unknown
  Bacterial polypeptide expressing nucleotide sequence isolated from the Sargasso Sea
atgctagataaaaaaaaattttatattaatggtaaatgggtagacccaattaagtcaaataattttgaggttataaacccatccactgaagaagtttgtgctataattaatttaggaagctctgaagataccaatttagctgttgaatctgccaaaaaagcttttgatagttggaaagagacatctaaggaaaatagattaaaattattagaaaagctcttagaaatctataaatcaaaatgggatgaaatgaccaacgcaatttctacagaacttggttgtccaaaagattggtgttctgctaatcaaacatcctctggagcaggacatattgaagattttattaaaagactaaaagaatttaattttgaaccagggtttgataaaggttcggtaaatcacatagtatatgaaccaattggtgtttgcggtcttataacaccatggaattggccaataaatcaaattgcattaaaagtaattcctgcttttgcaactggctgcactatggttttaaaaccatctgagatagctccattatctggtatgctttttgcagaaatgatacatgaagctggttttccagcgggcgtatttaatttagtaaatggtgatggtccaggcgttggaacagatttgtccggacaccctgatgtagatatgatttcttttacaggttcaactagagccggtaagttaataacaaaaaatgcagcagatactattaaaagagtttgcttagagctaggtggcaaaggaggaaatatagtttttgcagattcttatccggaagctgtaagggatggaattagaaatgtaatgagtaattctggtcaatcatgtgatgctccaacacgaatgctggttgaaaaatctatatataaaagagcagtggaagaggctgcggatgaagcaaacaaaattaaagtagatttagctagtaaatcaggagatcatattgggccagtaatatcaaaagttcaatttgataaaattcaaagtttaattaaaagcggaatagaagaaggtgctacattagttgccggaggtcctgataaacctgaagatttaaaaaaaggatattttattaaaccaactgtttttactaatgttaataacaatatgaggattgctaaagaagaaatatttggtccagtattatccattattccatttgatagcgaggaagaagcaataaacattaccaatgatacagaatatggtttaggaaattatttacaaacagaagataaagaaaaggcaaaaagagtatcaaaaaaattaagatctgggatagtttatgttaactttaaaggagcagactcaggtactccatttggtggttataggcaatcaggtaatggaagagagggtggaacttggggtttgcatgaatatctagaagtaaaaactataacagagtggaaaaattaaa

SEQ ID NO: 214313 - DNA, 979 bp, Unknown
  Bacterial polypeptide expressing nucleotide sequence isolated from the Sargasso Sea
tatgtatagtaaatttggacaattcatcgacggaaaatggcaacaagctgaaaaaaaagaaacatacgaagtaattaatcctgcaactgaagaagtaatcggtaaagcttctaaagcttcctctgtagatgtagacaaagcattaaaatcagctgaaaaaggtttaaaggtatggcgcaatactgctccttggcaaagatcatatattataagaaaaattgccgacttaatgcgtgaaaaaaaagatgttcttgcgaagtggcttactctagaagttggcaaacctttagctgaaggagttggagaagttggaggcgccgcagatatttttgaatggaacgctgaagaaacaaaaagaatatatggacagacagttgaaagcagatttcctgattcaagagttcatgtttattatcaaccagttggtgttgtagctgcattagtgccatggaactttcctatagttttagcttctagaaaaatttctactgctttagctgcaggttgttcagtcatttgtaaacctgacgtaattactccaggagctgtaatggagttagttgatatttgtagagaagctggagttcctcctggcgtagtaaatcttttatcaggtgatccagcaggaatctcagaacaattaatcaagtcagatatagttaaaaaaatttcagttactggatcaacaagagttggtaaattaatattaaaacaagctgcagataaagttcaaagagtgacaatggaactaagtggtcattcaccttttattgtttttgatgatgctgatattaataaagcaacagatatagctgtaacagcaaaatttagaaacaacgggcaagtttgtatttcaccaaatagattttatatacaagaaaagaaaaaagatgattttataaattcttttattagcaaagcaaaaaaacttaaaattggaaatggaatggatgaaaatgttcaattaggtccgctcaca

SEQ ID NO: 214314 - DNA, 1438 bp, Unknown
  Bacterial polypeptide expressing nucleotide sequence isolated from the Sargasso Sea
atggaaacaagaaactttattaatgggaaatttgtagactccatatctaaagaaaaaatttcaataattaatcccgcaaatcaaaaagtagttgggaaaattgatcaagctttagatgatgaaattaatttagcttttgagtcagctaaaaaagcttttgataaaagaatacttttggatatggatccgaaagaaaaatctaatatgatgagggctattgcaacaaagcttcgtgaatataaaaatgaaggaggaaaacttttaagtcaagaaaacggaaaaacagttacgcagtgtattgatgaatttaaaggagcagctgatacctttgatttttatgctggtatgactgacaagattcaaaataaacttattccatctggaaaagatacatttaattacgtagttttagaaccttttggagtgagtcttcaaattgttccatggaactatccagttgctattttttcaggaatggtcgcacaaaatttaattgttggaaatacaattgtaattaaacctcctgaactatgtcctctttcttcaaacttttatggaaaaatatttgaagaagttggggtgccaaacggaataataaatatagttcatggttttggtgatgttactggaagaaaacttgttaaaaataagggtagtgattatattgtttttactggatctccagaagttgcatcagaaatattaaaagagactgcagatagaattgttccctgtcattttgagttagggggaaaatctgcagcaataatttttcctgatgcggatatagataaagctgttgagagtaccgttaaaggaatttttaaacctaatgcaggtcagatatgtgtggctatgtctagagtaattgttcatccaaaaataaaagatgaatatatgactaaattaatttctaaatcaaaaaaacttaaaattggccccggaatagattctgaaactgaagtaactccacttatatctaaggatcatatgcaaagagtttcaaattatgtaaattcaggcatacagtctggtgccacattggaacttggcggtaaagaagatcaaaacaaagatggaaatttttatcaaccaacaatttttgataatgtttcaacaaaagctactattgctcaagaagaaatattcggtccagttgcttctgtgtttgattttgaaactgaaaatgaagctatagaaatagcaaattcaacaagctatggtttagcatcaggagttttcacttctgatgatcaaaaagcaaaatggactgcagaaagaattaaagctggaataatttggcataatgattggtttgttgatggaataaatttacctggtggtggttataaaaaatctggatatgggagagatggtggtatggatggcatttatagtcatggccaaactaaaagagtaagtaaaagactttattaat

SEQ ID NO: 214315 - DNA, 1435 bp, Unknown
  Bacterial polypeptide expressing nucleotide sequence isolated from the Sargasso Sea
catgattgaaaagagaaatttttatattaatggttcatgggttcccccaaaaaacccaaaagatattgaggtcataaatccagcaacagaaaaaaattgtgcagtaatttctttaggcagtaaggaggatatcaatgatgcagttttagcagctaaagaagcttttaaaacctggggatttacctctaaagaagaaagattgtcattattagaagtattttattcattatataaaaaaagatggaatgatattacagatgcaattattcaagagatgggagcgccaaaagactttgcgtcaaaactacaaacaggaactggtgcgagtcatacaaaatcatttattcgttatctaaaagaatttgaattcgaaaaacctttgggagatcatgcaaaaaatcaaagaataatatacgagcctaaaggtgtgtgtgcattaataacaccgtggaactggccaataaatcaagttactttaaaagtcattcctgcattggcctctggttgtactatgattttaaaaccttcagaactagcacctttatcggcaatgatcatagctgagttaatagatgaagcaaaatttccaaaaggtgtttttaatttagtaaatggagatggggaaataactggagatgcattaacaagtcatccagatgtaaatatgatttcattcaccggctctacaagagcaggggctttaatttctcaaaatgctgcaaaggactttaaaagagtaagtttggagctaggaggaaaaggtgcaaatattatatttgaagatgctgatgctgaagcaattgaaagaggtgcatttagatgttttagaaattcaggacaatcatgtaatgcccctacaagaatgcttgttgaaaaatcaatatataatgaagcgatagaaagactgagaaaatacgcaaatgaatttaaagtagatgatccaaataaaaatggagagcatattggtcctgtaatttctgaaactcaattcaataaaattcaaggtttaattcaaaaaggaatagatgaaggagcaaaattagttgcaggtggagttggaaaaccaaacggattaaatgatggttattatgtaaaaccgacagtttttgcagatgtaaaaaatgaaatggaaattgcaagaacagaaatatttggtcctgttttatctgttattccatttgaaaccgaagaagaggcaattaaaattgcaaatgatactgattatggattaacaaactatattcaaactcaagataaggaaaaggtacaaagagttgccagaaaacttagatctggaatggttgatgtaaatggtgctggtattgcagttgatgcaccttttggaggtttcaaacattctggaattggaagggaagcaggtaaagaaggattgcttgaatttctagaagttaaatctgtaggtggttggaattaa

SEQ ID NO: 214316 - DNA, 1468 bp, Unknown
  Bacterial polypeptide expressing nucleotide sequence isolated from the Sargasso Sea
atggaaaaaaaatcatctctggattttaaaaatcaggcatttattaatggaaactatacaaattcagtaacaggcaaaacgtttgagagcattagccctgttgatggatcagtaataactagtgttgcggagtgtgacattgaagatataaacaaagctgtaaaagctgcgcgtgatgtatttgaaaaaggatcatggtctaggatggctccctcaaaaagaaaaaaaattctctttaatttcgctgacttaatgaaaaaaaatattttagagctaggcttactagaaactttaaatatgggaaagccaataacaagagcaacaggcgatatagctgcatgtattaattgtacaaaatggtatgctgaggcaattgataagctttatgatgatgtagccccaacaagtgataatttgattgccactatcacaaaagaaccactgggtgtagttggagcagtaactccttggaattttcctttattaatggcttgttggaagtttgcgcccgcgttagctaccggaaatagttttattttaaaacctgctgaacaatcgcctttgtctgcactaagagttgccgaactagcaatggaggctgggattccagaaggagtcttcaatgtagtgccaggttatggtcctactgcaggaaaagcattagggactcacatggatgttgataaacttggttttactggatctacagaagttggaagatattttttatcttacgcaggtgagtctaacatgaagagagtttcactcgagtgtggtggaaagtctccaaatataatatttgcagatgcacctgatttagaccatgctgcaaaaatggcagcagatggcatgtttggaaacagtggtcaggtgtgtgatgcgccctcaaggttgctgcttcaaaaatcgattaaagatgaatttttagaaaaagttgtaagctactcacaaccgtggatgccaggtaatccgtttgatccaaacactttaatgggctcaattgtcgataaaacacaaactgaaagaatcatgaattacatagatacaggcaaatctgaaggtgcgaatgttataactggtggtgatcaggtgcttcaagactcaggtggctactatgtaagtcctacagtttttaaagatgttcaaaattcaatgactgttgctaaagaggaaatctttggaccagtattatgtgccatagattttgaaaatgaagatgaagcccttcaaatagcaaatgatactcattatggacttaatgcaatgatatggtctaatgatttaaataaagtacataagcttgcgaaaagaattaaaagtgggaaagttctgataaatagtttgagcgatggagatatgtctttaccacacggtggatacaagcagtcaggttctggaagagataaatcactggaagctcttggccaatatacgcaaacaaaacttacattgatagaagttaagtaat

SEQ ID NO: 214317 - DNA, 1492 bp, Unknown
  Bacterial polypeptide expressing nucleotide sequence isolated from the Sargasso Sea
atgaacaagttgactttggctgactggcaggacaaggcggcgtcgctcgagatcgaagggcgcgcattcatcgacggcgcgttgcgcgacgcgcacggcggcaagacgttcgactgcgtgagcccgatcgacggccgcgtgctcgtgaaggtcgcggattgcggcgaagccgacgtgaacgcggccgttgctgccgcgcgccgtgcgttcgacgcaggcgtgtgggccggactgaacccgcgtgcgcgcaaggccgtgctgctgcgctgggccgcgctgatgcgcgagcatctcgacgagctgtcgctgctcgaaacgctcgacgccggcaagccgatcggcgacacgacgacggtcgacgtgccgggcgccgcgtattgcgtcgaatggttcgcggaagcgatcgacaaggtcggtggcgaggttgcgccggccgatcatcatctcgtcggtctcgtcacgcgcgagccggtcggtgtggtggccgccgtcgtgccgtggaacttcccgatcctgatggccgcgtggaaattcggccccgcgctcgcggcgggcaacagcgtcgtgctgaagccgtcggagaaatcgccgctgaccgcgatccgtgtcgcgcagctcgcggtcgaggccggcatgccggccggcgtgttcaacgtcgtgccgggcgcgggcgagccgggcaagctgcttgcgctgcatcgcgacgtcgactgcatcgcgttcacgggctcgacggcggtcggcaagctgatcatgcagtacgccgcgcagtcgaacctgaagcgcgcgtggctcgaactcggcggcaagtcgccgaacatcgtgctgcccgattgccccgatctcgaccgcgcggcgcaggcggctgccggcgcgatcttctacaacatgggcgagatgtgcacggcgggttcgcggctgctcgtgcatcgtgacatcaaggacgcgttcatcgagaagctcgtcgcggccgcgcgcgcgtacgtgcccggcaatccgctcgacccgtcggtgtcgatgggcgcgatcgtcgacggcatccagctcgagcgggtgctcggctatatcgaagccgggcgcagcgaaggccggctcgtcacgggcggtgcgcgcgtgaaggcggaaacgggcggcttctacgtggagccgacggtgttcgaggtgaagcccgatgcgaagatcgcgcgcgaggagatcttcgggcccgtgctgtcggtgatcgtgttcgacgacgtcgacgaggccgtgcggatcgcgaacgacaccgaatacgggctggccgcagccgtgtggacgtcgaacctgacgaccgcgcacgacgtgtcgcgccggctgcgtgcgggcaccgtctgggtgaactgctacgacgagggcggcgacatgaacttcccgttcggcggctacaagcagtcgggcaacggccgcgacaagtcgctgcatgcgctcgagaaatacaccgagctgaagtcgacgctgatccgattgcgctgac

SEQ ID NO: 214318 - DNA, 1432 bp, Unknown
  Bacterial polypeptide expressing nucleotide sequence isolated from the Sargasso Sea
tatgcttgataaaagaaaattttatataaatggtgaatgggtatctccatcaaaaaactcagattttaatgtaattaatccagctacagaagaaccttatgtaactatatctttaggtaatgaagatgacactaacaaggctgtagtggcggcaaaaaatgcttttacttcatggaaaaatacctctgtagaggaaagaataactttacttgaaaaactcttaaagatttacaagagaagatttaatgagatgacccaagctatttcaactgaacttggtgctcccttagattgggcttcatctgcacaaacagcctctggagagtcacatattgaagatttcatattgagattaaaaaaatttgaatttgaaaaaaaatttgatgaaagttcagataattatatagtttatgaacctattggtgtgtgtggtcttatcacaccatggaattggcctattaaccaaatagctcttaaagtaataccagcttttgccactggctgtaccatgattttaaaaccatctgaaatggcacccttgtctggtttgttatttgctgaaatgatacatgaagcaggttttcctgctggtgtttttaatttagtaaatggagatggagcaggtgttggatctcaaatatcgagtcatcctgatatagacatggtttcatttactggctctactagagctggtaaattaatttcaaaaagtgcagctgacacaattaaaagagtttgtttagagcttggtggtaagggaggtaatattatttttgctgatgcatatcccaatgctgttagagatggtgtaaggaatattatgagtaattctggtcaatcatgtgatgcacctacacgaatgttagttgaaaaatcaatttatgaaaaagctgttgaggaagctgcagatgaagctaaaaagataggcgtagatttaccatctaaatcaggagaccatattggacctgtaattaataaatctcaatttgagaaaatacagtcgttaattcaaagtggtattgacgagggtgcaacacttgtagctggtggagcgggtagaccatcaaatcttgaaaaaggttattatgtaaaaccaactgtatttacaaatgttagtaatgatatgagaatagctaaagaggaaatatttggtccagtgctatctattattccttttgagtctgaagaagaggcaatttcaataactaatgatacaccatatggattaggtaattttttacaaactgagaataaagaaagagccagaagagtttcaaaacaattaagggctggtgtagttcaaatcaatggaattgctcctgacgctggaacaccttttggaggctacaaccaatctggtaatggacgagagggtggaacatggggtctgcatgaatatttggaagttaaagcaattagtggttggaaatag

SEQ ID NO: 214319 - DNA, 1420 bp, Unknown
  Bacterial polypeptide expressing nucleotide sequence isolated from the Sargasso Sea
tatggaaataaataagttctacattgatggaaattttattgagccagatggctcagagaagattgatatagtaaaccctgcaactgaagaagttgtaggtcatgtaatttcaggctcacccaaagatgttgatattgcagtagcggcagccaataaagcatttcccagtgctatggcattaactctagagcagaagaaaaaaatactggaagaaattattgctggcatggaagaaaggcgtgaagatttcgcgcaaattatttctgaggagatggggtcgccaataaaaatggcacgtaaagctcaatatggtgctggcgttattcattttaaaaatacgcttagtgttattgataaattcgatttcaatgaagttcatggcaacattacaataaataaattaccaattggtccagtaggaatgataactccttggaattggcctcttaatcaaatgtgcactaaaattgcttcagccatagctgctggaacctcttgtgttctaaaacctagtgaaattactccaggggctgcacatatatttgccgaagttattcataaaacaagcatacctaaaggtatgttcaatttgatacatggtcttggtgttactgtaggtaaagccatgagtagccattcagatttagaaatgatttcttttactggttctactagagctggaatagatattcaaaaaagtgcagcagataatatcaaaagagtctcattagaattgggaggcaaatctccaaatataattcttgaagatgttgatttagaaaatgctgtaaccatggggataaagcaatgttttcttaatacaggccaatcttgttcatctccaacaagaatgttattgcctgaacatatgcttgatgaagcaactaaatatgcagtagcagcagcaaatgatatgtctacaggagaccctttagatgaagagatttatttgggcccaatatctaataaaacacaatatgagaaggtgcaagatctaattcaaaaaggtatagatgagggagcaatactagcatgtggaggaacaggcagacctgatggattagagaaaggattttttgttaaaccaaccgttttcactaatgttaataataatatgaccattgctcgagaagagatatttggtcctgttatctgtttaataccttattctgatgttgagaaggcgatcgaaattgcaaatgattcagaatatggcctctcaagcatgatttcatgctctgatgaagtgaaaggccaagaaatagcaaagagaataagaacaggacaagttattttaaatagaatctctcgaggagattatccggctccattcggtggatttaaaatgtcaggtaatgggcgagaacatgggctttttggtattgatgaatacttggaagtgcaagctgttataacttaa

SEQ ID NO: 214320 - DNA, 835 bp, Unknown
  Bacterial polypeptide expressing nucleotide sequence isolated from the Sargasso Sea
tctggtaactcatgaaaaagtaagaaaagtaacgtttactggatcttttactgtaggaaagattatagcgcaaaaagcagctcctaaattatgtccagttactttagagcttggaggaaaaaatccaaatataataatgagtgatgcagatttagatattgcaattcaaggggttattgatggaatgagatatactcgacaaggacaagcatgtactgctggttcaagagtttatattcaagaaaaaatttatgatcaagtactgggtggagctgttgaaaaattaagtaaattaaaaatgggtaatgctctagatgaaagttctgatataggagctattatttccgaagaacaactgaaaagaactttatattatatggatattgccaaaaaaaactctacaaccaacgttgtgcatggcggcaatcaactaacaggtggtgattataaaaatggtttcttttatgaacctacattgatgtcaggtgttccagtaagctctccagtttgtcaagaagaaatatttggtcctgttgcttgtgcaataccatttaaaacatttgatgaagtaatgaacagtgcaaatgatacaccatttggattgtcagcggtattgtggacacaaaatttatctagagctttacagtttgttgaagaaattgaagcaggtttcgttcaagtgaatcaatgtgtagcgcctagagctaatgtttcatatggtggattaaaaatgagtggcctaggaaaagagtatgcatttgatagtatggttaatcattttactcaaagtaaaacagttttgattaatagaggaaaatcaaatatagataattaa

SEQ ID NO: 214321 - DNA, 742 bp, Unknown
  Bacterial polypeptide expressing nucleotide sequence isolated from the Sargasso Sea
gatggttggttggcagtactcagaatctacagaatcaccagacatagtgtcaattaaaaaaaagtatacaaattatattggcggtaaatttttagaaccaaagagtaaaaaatatataaataccatttcaccttcaactgaagaattgttatcaaaagtcccattatcaaatgaacaagacattaatagtgctgtaaagtctgcaaaagaaggattggaaatttggtctaaactaacaccaaatcaacgctcacgatatctttttaaaatagctaggttaatacaagaaagatcaagagaatttgcggttttagaatctcttgatggtggaaagcctattaaggagtctagagattttgatttaccacaggttgccgctaattttttttattttgctggatgggctgataaattagatctttcttgggcaacaaaaaccctcaaaccatatggggtagtaggtcaaataataccttggaactttccgctattgatgctttcttggaaaattgcacctgctttagctactggaaatacagttgtattaaagcctgcagaaaccactccactaacagccttacttttcgctgaaatatgtgaacaagcaggtcttcctcctggagttgtcaacatagtaacaggagatgggtcaacaggttcacttatagttaatcacaaagatataaataaaattgctttcacaggatctactcaagttggaaaacttatacagaaatcacta

SEQ ID NO: 214322 - DNA, 772 bp, Unknown
  Bacterial polypeptide expressing nucleotide sequence isolated from the Sargasso Sea
atgatgtcatttactggttcaaaaagaggaggcaagtcagtaaccattgaatctgctgaaactgtaaaaaaagtaactttagaattaggtggtaaatcacctaacattgtctttgcagattgtgacttaaatgaaaaagtaaaagattcagtaaatgaatgcatgtttaatacaggacaatcttgtgatgctcctacaaggttacttgtagaaaaaaaatgctacgatgaagtaattgatattgcaaaaaaaactgccgaagaaattaaggtaggagatccgacactagatggtgaccatctcggaccactctttgataaaattcaatttgatcgggttcaaaatatgattcaagttggtattgatgaaggagcaaaactattagtaggtggccttggaaagcccaatggccatgaaaaaggatggtttgtaaaaccaacaattttttctgacgtaaataacaatatgagagtcgctcaagaggaaatatttggtcctgtgctagttataattccttttgacgatgaggatgaggcgatcagaatagcaaatgatactccttatggtcttgctgcctatttacagacgggagataaagaaagagcagaacgagtctcaaggcaattaagagctggcggtgttcatgttaatggtggtggttataattacggctcaccttttggaggatataaggaatctggcaatggacgagaaggtggagacatggggctagaagattaccttgaaactaaagtacttcacattgcctaag

SEQ ID NO: 214323 - DNA, 1477 bp, Unknown
  Bacterial polypeptide expressing nucleotide sequence isolated from the Sargasso Sea
atgtctgcagaaacactaaaagctttggggatgaaagatctcagtttatttcgtgaacaggcctacatcgcaggaaactggtcagacgctgacagtggtgagaaggatgatgttctgaatccggcaacaggtgaggtcttggggacggttcctcgttgcgggcagcaggaaaccagaaaggctgtcgaagcggcgaatcaggctatgccagcctggaaggcaacccctgccaaggagcgggggaaaattctgcggagatggtatgagttgatgattgagaacaaggaagaccttgccatcctgatgacggcagagcagggcaagcctctggcagaatcacatggggagatcctttatgcctcgtcattttttgaatggttctctgaggaagcaaaacggatgtatggtgagaccattccgactcatatgcctgaccgccggttgctggtcgttaaggagggggtcggggtcacggcagcgatcactccctggaattttcctgcggcgatgatcacccgtaaagcggggcctgcactggcggcaggctgtccgatgattatcaaacctgcaccggatacaccattttctgcattggcactttgtgaattgggagaacgtgccggagttcctaaaggtatcctcagtgtggtttcaggagacgcgattgcggtcggtggagaactgacctcaaacgcaatcgtccgaaagctgagtttcaccggttccaccggagtcgggaaactgctgatgaaacagtgttctgaaacgatgaaaaaactttctctagaacttggcgggaatgcgccatttattgttttcgatgatgcagacttggatgcagcggttcagggggcactggattgtaaattcagaaatgcggggcagacctgtgtttgtgcgaaccggatcattgtacaggataggatttatgatgaattcacccggaaacttgctgaaggggcgtcaaaactcacagtcggtgatggtttttcagatggatgtcagcagggccctttgatcaatcctgccgcacttaccaaagttgaaagtcatattcaggacgcggtcgaaaaaggagcatcggttttgagtggcggagggcgtcacgatcttggcgggaatttcttccaaccgaccgtgctgagcaacatgaaagaggatatgctggttgcccatgatgaaaccttcgggccgctggcaccggtattccgtttcagcaccgaagaagaagcgatcaggatggccaatgacactgaattcgggctcgcgtcttattttttcagcagggatatcggccgaatctggagggtctctgaagcactggaatatggaatggtaggcatcaacaccggtatcatgtcgaccgaagtagcacctttcggcgggatgaaggaatccgggatcggccgtgaaggttccaagtatggactcgatgaataccttgaagtgaaatacctctgcatggccggcatttagg

SEQ ID NO: 214324 - DNA, 1435 bp, Unknown
  Bacterial polypeptide expressing nucleotide sequence isolated from the Sargasso Sea
atgattgaaaagaaaaatttttatattaatggttcgtgggttgcaccaaaaaatccaaaagatattcaagttataaatcctgcaaccgaaaaaagttgtgcagttatttctttaggtggaaaagaagatgttaatgatgcagtgttagctgctaaagaagcttttaaaacttggggattttcttcaaaagaggagcgattaagtctattagaaaacttttacgcactttataaaaaaagatggaacgatattactgatgcaattattcaggaaatgggagcaccaaaagattttgcattaaaacttcaaacaggaactggtgccagtcatacaaaatcattcattcgttatttaaaagaatttgagtttgaaaaaccacttggagaacatgctaaaaatcaaagattgatatatgagccaaaaggtgtttgtgcattaattacaccatggaactggccaattaaccaagttacattgaaagttattccagctttagcatctggatgcacaatggttttaaaaccatcagagttagcacccttatctgctatgattattgcagaattaatagatgaagcaaaatttccaaaaggtgtatttaatttagtaaatggagatggcgcaactacaggtgatgccttaacaagtcatccagatgtaaatatgatttcatttacaggctcaacaagagcaggggccttaatttcacaaaatgcagcaaaagattttaaaagagtaagtttagaattaggtggaaaaggtgcaaacattatatttaaagatgcagatgccgaggctattgaaagaggtgctttaagatgttttagaaactcaggacaatcttgtaatgctccaacaagaatgttggttgaaaaatcaatttacgatgaagctgttgaaagattaagaaagtatgcaagtgaatttaaagtagatgatccaaataaagaaggcgaacacataggtccagttatttcagaaacacaatttaataaaatccaaggactaatccaaaaaggaatagatgaaggagcaaaattagttgctggtggacctggaaaaccagatggattaaatgatggttactatgtaaaacctacagtatttgcagatgttaataatgatatggaaattgcaagaactgaaatttttggtccagttttatctgttattccatttgaaactgaggaagaagctattcagattgcaaatgataccgattatggattaacaaattatattcaaacccaagacaatgataaagttcaaagagttgcaagaaaacttagatcaggaatggtagatgttaacggtgctggtattgcagttgatgctccatttggtggctttaaacattctggtattggtcgagaggctggcaaagagggtttacttgaatttttggaagttaaatcggttggtggttggaactaat

SEQ ID NO: 214325 - DNA, 1495 bp, Unknown
  Bacterial polypeptide expressing nucleotide sequence isolated from the Sargasso Sea
atgaatttaattcaacatttcgtgaatggaaaaataactccaggtaaatcagagagaagaggaaaagtatttaacccagcaattggagaacaggagtcagaagtaatattaggtttaaaatcagatttagatgaagctgtagaaatagcaaaaattgcttttgagacatggtctttaaaaccaccaattcaaagagcaagaataatgtttaaatttaaagaattgatagaaaaaaactcagatgaattaactaaaatgatagtttccgaacatggtaaagtatacgaagatgcaaaaggttcgttaataagaggacttgaagtagtagaatttacttgtggaattccccaagttttaaaaggggaatttacagaaaatgttggaacagatattgatagttggtcaattagacaaccacttggagtttgtgcaggtataactccatttaattttccagctatggttccaatgtggatgtttccaatggctattgcttgtggaaatacttttatattaaaaccttcagaaaaagatccttctatttcaattaaattagctgagctttttaaagaggcaggattaccagatggggtatttaatgtaataaatggtgataaagaagtagttgatgcaattttagtcaacaaagatattaaagctgtaagttttgtaggatcaactccgatagcaaaatacatttatgagaacgcagcaaaaaatgagaaaagagttcaagcattagggggagcaaaaaaccattgtgttgtgatgcctgattgtgatttagatcaggctgttaatggtttgatgggtgcagcttatggatctgctggtgaaagatgtatggcccagtcagtcgcagtcgcagtaggtaacattggagataatttagtaaacgaactatcaaaaaaagttgaagcattaaaagttggtccaggtatggataaaaaatctgaaatgggaccactagttacaaaagagcatttagaaaaagtaaaaggttatgttgatctaggcgttaaagaaggagcaaaattaatagttgatggaagaaatttaaaattacaaggttatgaaaaaggttattacataggcggatgtttgtttgatcatgttaaaaaagatatgagaatttataaggaagagatttttggacctgtactttcagtagttagagcaaaaaattttgaagaagccacacaattaattaatgatcatgagtttggcaatggaacaagtatttataccagagatggagatgtggggagaacatttgcaagtaagattaaaattggaatggttggtataaatatacctatacctgtgccagtggcatttcatagctttggtggttggaaaagatctttatttggagatcaacacatgcatggaatagaaggtgtgagattttatacaaaacttaaaacaataacttcaagatggccatctggcataagatcagatcctgaatttattatgccaactatgaaataaa

SEQ ID NO: 214326 - DNA, 1432 bp, Unknown
  Bacterial polypeptide expressing nucleotide sequence isolated from the Sargasso Sea
aatgaaagaatgtctaaaattttatattaatggggagtgggttgatcctgttaatcctcagcattttgatgttattaatccagcaacagaagagtcaattggtagaattgctcttggaaatgaagaagatttaaataatgctgtagctgcagcaaaaaatgcatttgatagtttttcgcaaacaactaaagaagaaagaattgaattaattggtaagattattgaggtttatcaatcacgttatgatgagattgctgaaactatttcttcagaaatgggtgcgcctttatggttatcaaaagcggctcaagcagcaactggtgcaggtcatttaggtacttttttagaaattctaaaaaattatgaatttgaagaggatagaggaaatactcgaattagaaaagaagccgttggagtttgtggttttattacgccatggaattggcctattaatcagataacttgtaaagtagcaccagcccttgcagcaggctgcactatggttttaaagccatcagaaatagcgcctttaaatgctattttatttgcagaaatccttgatgaagcaggagttccagcaggagtgtttaatttagttaatggtgacggaccaacagttggcgaagcaatgtcttcacataaagatattgatatgatgtctttcactggctctacaagagcaggtattgcagttgctaaagcatcagctgacactgttaaacgcgttgctcaagaattaggtggtaaatcagcaaacattatccttgatgatgctgattttggttctgctatagcaggaggagtgacgagttgctttatgaattctggtcagtcatgtaatgctccaacaagaatgttagtccctgctgatagacaagacgaagcaattgcaattgctaaagagacagcggaaaataccattgttggcgatccggccgaagttgcagctggtggaataggacctgttgttagcgaactacaatatgataaaattcaagctttaattgaaaaaggtattgaggaaggcgctacattagttgctggaggaccaggtaagcctgagggtttgaatgcgggctatttcgttaaacctacagtttttgctgatgttaaaaatgacatgacaatagctcaagaagaaatttttggtcctgttttatcaatacttccatataaagatgatgaagaagccatagcaattgccaatgatactgtatatggactttctggttatgtttcgggcagtcaagagagagcacaaggtgtagctaaaagaattagatctggtaatgttcatgtaaacggatccggccctgatttttctgcgccatttggaggttttaaacaatctggtaatggtagagaatggggtgactttggcttcgaagagtttttggaaataaaagctattcttggctatacagctgcttaa

SEQ ID NO: 214327 - DNA, 1453 bp, Unknown
  Bacterial polypeptide expressing nucleotide sequence isolated from the Sargasso Sea
gatggaaactgaaaccgacctcaggcgccatgatctgctgatcgacggcaagcgtttgccgcccggcacgggcgaatattccatcgatatcaacccggcgaccgaagagccgattgcgctggttgcgcaaggcagtgccgccgatgtcgataccgcggtacacgcggcgcgcgccgcgttgaaggtgtggaacgcgatacgggcagcggaacgaggccgcatcctgatgcgtctcgccggtctgatgcgcgcgaatcaggaagaactcgccgcgctggaaagcctcgacgcgggcaagccgatctcggcagtgatgcgtcaggatattcccgccgcgatcgatacgctcgaatactacgcaggctggtgtgacaagatcaacgggcaggtggtgccggtgcgtcctgacgcgttgacgtacacgctgcgcgagccggtcggtgtggtcgcggcgatcgtgccgtggaatttcccactgatgatcggcatgtggaaaatcgcacccgcgttggcgtgcggttgcacgttgatcgtcaaacccgcggagatgacgccgctgagcgccttgcgcatcggcgagctcgcgctcgaagcaggcgtgccgccgggcgtattgaacatcgtcacgggcaagggacgggtggtcggcgatgcgctggtggcgcatccgggcgtcgacaaagtgactttcacgggctcgccttcagtggggcgcggcattctgcagggcgcggccggcaatttcaagcgtgtcacgctggagctcggcggcaaatcggcgaacctgatctttcctgatgcgaatctcgacaatgcggtgcgcgctgcggcgtccggtattttcttcaacacggggcaggtatgttccgccggctcgcgcattctggcccaccgcgatgtgtatgacgaagttgtcgagcgtcttgcggcgcgtgcgaaggcaatcaaggtcggcgatccggcggcgcgcgaaacgtcgatggggccgctgatctccgctgcgcagatgaagaccgtacttggctatgtcgaggcagggcgtgccgaaggggcgtcgctcgtgacgggcggcgcgcgggtgggcgaacggggctttttcgtcgagccgacggtattcgccaatgtcgaacatgaaatgcgcatttcgcaggaggagatcttcgggccggtggcaagcgtgattcgtttcaacgacgaagccgatgcgttgcggattgccaatggcaccttgtatagcctcgcggccggcgtatggagcgcggatatcggccgggtgcatcgcgtggcgcgcgagctgaaggctggcaccgtgtggatcaatacttacggttataccgacgtgcgtttgccctggggcggttcgggcgattcaggattcggccgcgagcacggcgacgtcgcgatcgaaaacttcaccgaaccgaaggcagtgtggctggcgatcgatcaatag

SEQ ID NO: 214328 - DNA, 979 bp, Unknown
  Bacterial polypeptide expressing nucleotide sequence isolated from the Sargasso Sea
atgaaccagattgtgttaaaagttattcctgctttagcggccggttgtacgatgatattgaaaccttctgaaattgctccaatatcaggagtcttatttgcagaaatgattgatgaggctggttttcctccaggtgtttttaacttagtaaatggaaatggagaagttgtaggaaatcatatctctggtcatcctgatatagatatggtttcattcacaggttcaacaagagctggtaaattaattcaaaaaaatgcagccgaaacaataaagaaagttactttagaattaggtggaaagggtggaaatatagtttttgcagactcatatccaaacgcagtgagagatggagtaagacatataatgagtaattcaggacaatcatgtgatgctccaactagaatgctggttgaaagacctatttatgaaagagccgtaaaggaagcggtagacgaagcaaataaaattaaagtggatgtggcatcaaaaaaaggtgatcatattggtcctttggtttcaaaaatccaatacgataaagttattaatcttattaaagcaggaataaaagaaggagccactttagcagcaggtggacctgaattgccagatgaattaaataaaggatattttgtgaaaccaacaatttttacagatgttaataatgatatgaaaattgcaagagaagaaatttttggaccagtcctttctattattccatttgaaacagaagatgaggcaattgccatagtaaatgatacatcttatggacttggaaattatctacaaaccgaggataaagaaaaagctaaaagagttgctagaaaattaagagcaggaacaatttttattaatggccaaggtgcagatgtaggagcaccatttggaggatataaacaatctggaaatggtcgtgaaggtggaatctggggtttcaatgaatttttagaagtaaaagcaattactggttggaaaaattaaa

SEQ ID NO: 214329 - DNA, 1429 bp, Unknown
  Bacterial polypeptide expressing nucleotide sequence isolated from the Sargasso Sea
atggaaaatcaaagaacaatggaagaagttttgaaacttcaaagagaacattacttaaatgaaggtccgccttcatatgaactaagaatcgatagattagacagagtccaagatatggttattcaaaataaagaaagaataactgaagcattaaacgccgactttggagcaaggtcacctaatcaatctctaatatctgatgtttatggagtgctccctgcattttcacatgcaaaaaaacatttaaagtcctggatgaaggatgagaagagaaaatctaacttcccatttggactaatgggagctaagtcatatattcatagggagccgcttggagttgttggaatgatatcaccatggaactttccaatgtatttatctcttgctcctttagctggaatctttagtgctggaaatcaggtaatgcataagcctagtgaatttactcctattacttctgagcttttaaaagaaatttgtgatggtgcttttgatgaaactgaatttgcaacatttctaggtggtcctgatgtgggtgccgcttttactcagcttaagtttgatcatttgttatttacaggaagtggtaatatcggaaagcatgtaatgcgtgcggcttcggaaaatctagttccattaacgttggagcttggaggaaaatctccagtgatagtcagcgattcttcaaatatagatataacagcaagaagagtaatgtttaataagactcttaatgcaggtcaaatatgtctagcacctgattatgtttatgttcatgaaacagagaaggataattttgttgaagcatgcaaggatcaagttaatgaattttatagcgatcttaaatataaccctgattacacatcagtaataaatcagaaacattatgatagattaaatggtcttctctcagatgctaaagatcatggtgcagagcttgtagaaattaatccagcaaatgaagatttctctcaacaagagtcacataaaatacctccaacgcttgttttaaatccaactgatgaaatgcaaataatgaaagaagagatttttggtcccttacttccaataaagacttacaaggacataaatgagccaattaactatataaataagaatgataaaccattgggattgtattattttggaaacaacaaaaatgaagaaaggaaggttgttaactcaacaacctctggtggagttacagttaatgacattatgggacatattcaacaaaatgaattaggttttggaggagtcggtccatcgggaatgggtaaatatgacggctttgatggatttatgaacttctcaaataataaaccaatttataagcaaataggattcggattagataaattacttgatgctataagacctccgtataagggtagtattgaagatgtcctaaaaaaactattaaagtaat

SEQ ID NO: 214330 - DNA, 1438 bp, Unknown
  Bacterial polypeptide expressing nucleotide sequence isolated from the Sargasso Sea
atgaaaatctacgaccagttctatatcgacggcgcgtggcgcaaaccggccggcaccggcacgatcgacgtgatcgactcgggcaccgaggccgtgatcggccggattccggaaggcgtcgcgtccgacgcgcaggacgcgatccgcgcggcgcgcgcagccttcgacgcgtgggcggccacgccgcccgcgacgcgcgccggctacctgcgcaggatcgtcgagcatctgcaggcgcgcagcgaggagcttgcgcagtcgatcaccggcgaagtcgggatgccgatcaagctgtcgcgcgcgatccaggtcggcggcccgatctacaactggaaggcatacgcgaagctcgccgaatcgttcgaattcgaggcacaggtcggcaactcgctcgtcgtgcgcgagccggtcggtgtcgtcgcggcgatcacgccctggaactatccgctcaaccaggtcacgctgaaagtcgcgccggcgctcgcggccggctgcacggtcgtcctgaagccgtccgaagtcgcgccgctgaacgcgttcatgctcgccgaagcgattcacgaagccgggctgccgcccggcgtgttcaatctcgtgtgcggctatggcccggtcgtcggtgaagtgctggccaccgatccggacgtcgacatggtgtcgttcacgggctcgacgcgtgccggcaagcgcgtggccgagctggcggccgcgagcgtcaagcgcgttgcactcgagctgggcggcaaatcggcgtcggtgatcctcgacgatgccgatttcgcgacggcggtgaagggcacggtcaacgcgtgctacctgaacgcggggcagacctgctcggcgcacacgcgcatgctggtgccggaagcgcgctacgacgaggcgcgcgcgatcgcgaaggcggcggccgaaacctacgtcgccggcgatccgcggcaggacgcgacgcgcctcggtgcgctcgcatcggccgcacagcagcagcgtgtgcaggactacatccagcgcgggatcgacgaaggcgccgaactcgtcacgggtggcacgggcctgccggaagggctcacgaagggcttcttcgtgaagccgaccgtgttcggccgcgtcgatccgaaatcgacgatcgcgcaggaggaaatcttcgggccggtgctgtcgatcatcacgtatcgcgatgaagacgaggccgtgcgaatcgcgaacgattcgccgtacgggctcggcggcgcggtatgggccggcagcgacgaacgcgcgatgggcatcgcgcgccgcatccgcaccgggcaggtcgacatcaacggcggcgcgtggaacatggccgcgccgttcggcggctacaagcagtcggggcacggccgcgagaacggcgtgtacgggctcgaagaatatctcgagtacaagtcgatgcagctcaagcccgcgaagccggcctgag

SEQ ID NO: 214331 - DNA, 1003 bp, Unknown
  Bacterial polypeptide expressing nucleotide sequence isolated from the Sargasso Sea
attgggagttattggaatgattactccttggaattggcccatgaatcaaatcactacaaaagtctctgctgccatcgcaactggttgtaccatggttttaaaaccaagtgaaatttctccatactgttctatgttgcttgcagaagtcatgcatgacgctggggttccaaaaggagtatttaatctagtaaatggctatgggccaatagttggagctgctttatcggaacatgaaaaggtagatatgatgtcattcactggttcaaccagagcaggtattgcagtcgctcaggcttctgcaacaacagtaaaaagagttcagcaagaacttggaggtaaatctgcaaatattattttggatgatgttgctgatcttgagaaatccgtgaaaggtggagctggacattgtttcttaaattctggtcagtcatgtaatgctccaacaagaatgcttgtatcagcaaaaaattatgataaagctgtagaagttgctgttgcaaccgcaaacggcaccacagtcggcgatcccaacggtgagtttagacttggcccaatagcaaacaaggctcagtatgaaaagattattaaaatgattgaaattggcatcgaagagggtgctcgccttgtagctggaggtattgaaaaaccagagggttatgagaaaggatattatgtaaaacccactgtgtttgcagatgtgacaaatgatatgacaatagctaaagaagaaatctttggcccagttttatgtattatgaagtacgaaactgaagaagaggctattgagatagcaaatgatacagaatatggtcttgcaggttatgttcaaggtgaattatcacacgctattgaagtaggaaatcaaataagagcaggccaaattactatcaatgggggtgcaaggggaaatgctgcgccttttggaggttacaaagcttcaggaaatggcagagaacacggactgcatggcattgaggaatgtttagaaactaaagctattatg

SEQ ID NO: 214332 - DNA, 940 bp, Unknown
  Bacterial polypeptide expressing nucleotide sequence isolated from the Sargasso Sea
ttgcactggtattccacaataattaaaactgcagaattaactccgctatctgcaacaatttttgcaaaagctctaattaatgctgaagttccaaatggattgataaatataatttgtggatatggaaatgaaaccggttcttatctggtttctcatgaagatgtgaatcatgttgtttttacaggatcagttgcaacaggtaaaaaaatccttcacgcctgtgctgataaagcaattcctgcagttgttgagcttggtggaaaatctgcgggtatagtctatccagatgctgatctaaatgatgtgctagatagtgcaagaagtggaatctttggagttgcgggacaaatttgtacagcaatgtcacgtcttgtagttcataaatcgataaaagatgaactagtagataaattagttgatttaagtaaatcgctaaaaattggtccaggaattgataaagatagtgatttaactccagttatatctgaaaatcaattacaaaaagttgaaggttacgcaaggtcaggaattcaagagggagcagaagctgctcacggaggaaaaagagttgatagagaaggttactttatggagccaactgttttgaataatgtaaaacaagatatgacagtagcaagagaagaaatatttggtccagtgctttcagttttagaatataatgatgaagaggaggcaataaaaattgccaacgatacagattatggactaggttctggtgtttttactaaagatctaaaaaaagcttcctggactgcaagtaaattagaggctggacaggtctatgttaataaatggtttactggtaatcatgcaactccatttggaggctataaacaatcaggttatagcagagaaaaaggcgttgatggattaaaatcttatctgcaagttaaaaacgtaggtattagtttaagttaat

SEQ ID NO: 214333 - DNA, 1063 bp, Unknown
  Bacterial polypeptide expressing nucleotide sequence isolated from the Sargasso Sea
gatgaacacttttgataataaatcaaataatcatatctattatgagccaattggagtttgtggattaatcacaccgtggaattggccaattaatcaaattgctttaaaagtcgttcctgcattcgcaactggatgtacaatgattttaaaaccatcagaaattgctcctatttctggaatgctatttgcagaaatgattgatgaagcaggttttccaaaaggtgtatttaatttggtaaatggagacggtgcaggagtgggaacccacatttcaagccaccctgatattgatatggtttctttcacaggttcaacaagagcaggaagattaatttcaaaaaatgctgctgaaacaattaaaagagtttgtcttgaattaggtggaaaaggtggaaatattgtttttgctgatagttataaagatgcagtaagagacggtattagaaatgtaatgagcaattctggtcaatcttgtgatgcaccaacaaggatgcttgttgaaaaatcaatttacgaaagagctgttaaagaagctgttgatgaagcaaacaaaattaaagtagatcaagcttcaaaaaagggagatcatataggaccagtaatttctaaaattcaatatgataaaattataaatcttattgaaagtggaatttctgaaggcgcaactcttgcagcaggtggacctgagttaccaaacggtttgaacaaagggtacttcatcaaaccaactatatttacagatgtaactaatgaaatgagaattgctaaagaagaaatttttggacctgtattatctataattccatttgagaccgaagatgaggcagtcaatattgtaaatgatacttcttatggtcttggaaattatttgcaaactgaagaccgagaaaaagcacacagagttgctaaaaaattaagatctggatgtgtttacataaatggaaatggagcagatgccggaactccatttggtggttacagacaatcaggtaatggcagagaaggaggtgtttggggccttgaggaatatcttgaagtaaagaatgttactggttggagttaa

SEQ ID NO: 214334 - DNA, 1225 bp, Unknown
  Bacterial polypeptide expressing nucleotide sequence isolated from the Sargasso Sea
atgagggacattaaaaattatcaaatgctaatcaacggtgattgggtcgatgcatctgacgggggggtgtttgagagtataaacccaagtacacaagcagtctggagccgtgtccctgaagcaactgaagaagatgttacccgagctgtttcggctgcgcactatgcatttagtaaaggtccatggtcaaaactcactccgacagaacgcggaaagtgccttaggaagctgggagacttactagtggaccattctgaaaatttgggtcgcatcgaaacaattgataccggtaaaatgctaaaagaaacacgatggcaagcaaaatatatcgcagaattctttcatttttttgctggttgtgcagataaagtaagcggcgaaactttaccaattgataagcctgacatgtttgttttcacgaagcgagaaccgcttggagttgttgccgccgtagtgccctggaactctcaattatttttagtagcagtcaaaataggccccgctttagccgctggcaacacggtggtgctcaaagcttctgaacatgctagtgctgcgatgttagaatttggtaagttaattgaacaagctggtatccctccaggggtagtaaatattgttacaggccatggagagccttgcggacgagctttaacttcgcatccagacgttgcccgtgtttcttttacaggtggaccaaatgcggcgcgtcacgttttagaaaacgtcaaacgaaattttgcagaagtttcgcttgaattgggtggtaaatctcctttcatagtgtttgatgatgctaatattgagagtgcagtcaatgcctcgatcgctggcatcttcggcgcaactggacaaagctgcgttgctggttctcgtttgtatttgcatgaagatattgctgacgagtttcttgaaaagatgatagccctagctcgtcaaattatcattggtgacccattggaagaagatacccaaatgggcccgctttgcacactgggccagttgaaaaatatccaagcagaagtggaatacgctgaacagaaaggtgctaagatacttaccggcggcaagcaaccggaaggtaaagagggtctattctacgagcccacaattatagagtgtcccaagcaagatttgcgaattgtagatacggagctttttggtcctgttttatgcgttcaacgtttcaaaacagaggaggaagttctttctctagctaatgaca

SEQ ID NO: 214335 - DNA, 1146 bp, Unknown
  Bacterial polypeptide expressing nucleotide sequence isolated from the Sargasso Sea
tcccatttggactaatgggggctaagtcttattttcatagagagccacttggagtcgtcggaatgatatctccatggaactttccaatgtatttatctcttgctcctttagctggaatctttagtgctggcaatcaggttatgcataagcctagtgaatttactcctattacttctgagcttctaaaagaaatttgtgacagtgcttttgatgaaactgaatttgcaacatttcttggtggtcctgacgtaggcgccgcttttactcagcttaagtttgatcatttattatttacaggaagtggtaatatcggaaagcatgtaatgcgtgcggcttcggaaaatcttgttccattaacgttggaacttggaggaaaatctccagttatagtcagcgattcttcaaatatagatataacagcacgaagagtaatgtttaataagactcttaatgcaggtcaaatatgtctagcacctgattatgtttatgtgcatgaaacagagaaggataattttgtagaagcatgtaaggatcaagttaatgaattttatagcgatcttaaatataaccctgattacacatcagtaataaatcaaaaacattatgatagattaaatggtcttctaacagacgccaaagatcatggtgcagagcttgtggaaattaatccagcaaatgaagatttctcccagcaagaatcacataaaattcctccaacacttgttttaaacccaactgatgaaatgcagataatgaaagaagaaatttttggtcccttactcccaataaagacttacaaggacataaatgaaccaattaactatataaacaaaaatgataaaccattgggcttatattattttggcaacaataagaatgaagaagcaaaagttgtaaactccacaacctctggtggagttacagttaatgacattatgggacatattcaacaaaatgaattaggttttggaggagttggtccatctggtatgggtaaatatgacggttttgatggatttatgaacttttcgaacaataaaccaatttataagcaaataggatttggtttagataaattacttgatgctataagacctccatataaaggtagtatagaagacgttctaaaaaaacttttaaagtaat

SEQ ID NO: 214336 - DNA, 1297 bp, Unknown
  Bacterial polypeptide expressing nucleotide sequence isolated from the Sargasso Sea
atgaatttaattcaacattttgtaaatggaaaaatagttcctggaaaatccgatagaaaaggaaaagtattcaatcctgctacaggagaccaagagtccgaagtaatattgggttcaaaattagatttagatcaagctgttgaaatttcaaaaaaagcttttgaaacttggtcattaaaaccaccaattcaaagagctagaataatgtttaaatttaaagagttaatagaaaagaattctgatctacttactaaaatgatagtttcagaacatggaaaagtatatgaagatgcaaaaggttcattaataagaggtctagaagtagttgagtttgcgtgtggtatccctcaagttctaaaaggagaatttacagaaaatgtaggaacagatattgatagttggtcaattagacagccattaggagtttgtgcaggaataactccatttaattttccagccatggttccaatgtggatgtttccaatggctatagcttgtggaaatacttttgtattaaaaccatcagaaaaagacccttcaatatcaataaaattagcagaactttttaaagaagctggattaccagatggtgtatttaatgtcattaacggagataaagaagtagttgatgcaatattaattaacaaagatattaaagctgtaagctttgttggatcaactcctatagctaaatacatttatgaaaacgctgcaaaaaatgaaaaaagagtacaagctctaggtggagcaaaaaatcattgtgttgtaatgccagattgtgatttggatcaagcagtaaatggtttaatgggtgcagcatatggatcagcaggagaaaggtgcatggcacagtcagttgcagttgcagttggaaatatagctgatgaattagtgggtaaattaactaaaaaagttgaggctttaaagattggtccaggcatggataaatcatctgagatgggacccttagtaacaaaagaacatctagaaaaagttaaaggatatgtagatttaggagtcaaagaaggagcaaaattattagttgatggaagaaatttaaaattacaaggttatgaaaatggttactatattggtggttgtttatttgatcatgtaaagaaagatatgagaatctataaagaagagatttttggaccagttctttcagttgtaagagctaaagattttgaagaagcaacccaactaattaacgaacatgaatttggtaatggaactagtatttatacaagggatggtgatgttggtagaacttttgcaagtaaaataaaaatcggaa

SEQ ID NO: 214337 - DNA, 1399 bp, Unknown
  Bacterial polypeptide expressing nucleotide sequence isolated from the Sargasso Sea
tatgatgagagaaactttagaactacaaaagaaagcatttataaaagatgggccgcctacatacaatcaaagagtagatagcctcaagagatgtatggcgcttattgagacgcatgacgaccaaattattgaagctctaaatcaagattataagaacagatcccatcatgaaataagaacatctgaaattgatcagagcattagaaattttgcatttactctaaaaaatttaaaaaaatggatgaaaccatcaaaaagaacaccatcatttggaacaggactcatgggcgcaaaaacaattatgaagcctatgccattaggaagtgttggagttattgcaccatggaacttccctattggtatggttttttatccagctgcttctatccttgctgctggaaataagattatggctaaaccatctgaattcactcctcatacatctcaggtcatgaaagaggcagttgaaaagtattttgataaatcggagttcgcagtttttcttggaggcccagaagttggagcagagtttacctctatgccttttgatcatcttctttataccggaagcaacagagttgctaaaaaggttttagccaatacagctaacaatctagtgccgaccacactggagcttggaggcaagagtccaactattatttcagaagatgctgacctaagtttagtagctaaaagaattatgtttgttaaaacattgaatgctggacagatatgcttatcgccagactatgtctttttgaaaagaggtttcgaagataaatttattaatgaattgaaaaatgtatttgcagatttctatcctgatggaaatgaagatgattacacatcgatggtgaatgatcaccactttaatagaatgagatcctacctagaagacgcaaaattgaagggcgcagaagtgattagtttaggagattttgattccgaacctaaggatacaatgacaaccaaagtcattatgaatgtaaatgactctatgcaagttatgcaagaggagatttttggtcctcttttaccaataatgctatacgatgaattgtcagaggtagtcgaatatattaatgctcatgaccatccactaggcctttacttctttggcaacaaaaaatctgaacaagattttgttatcaacaatacacgttctggaggagtaacaattaatgacactatgttccatttaatgcaatcacaccttccatttggcggtgtagggccatctggatatggttattattttggacatgaaggattccttaatttctcaaatttacgaggcatttattatcaaactaaatctgatgcagtgctgtctgtaatgcgccctccaagaggtaaagcatttggctacttctcgaagataatgaagaagctcagttga

SEQ ID NO: 214338 - DNA, 1411 bp, Unknown
  Bacterial polypeptide expressing nucleotide sequence isolated from the Sargasso Sea
atgaataaagttcttagtgaacaaaaagatttttttattaaaaacggatcaccatctgttgaattgcgtatagatagattgcagagattaaagtccttaataatggataatagatatgattttgtagatgctttaaatactgattttggaaatagatctaataatgcgtcaatgttatcagatgtgtacggaataatgcctgcaataaatttagcaatcaaaaatgtaaaaaaatggagtaaaccagaaaaaaaatcatctaattttccctttggtttgttgggagccaaatcatacgtaaaatacgagccacttgggactgttggtatgatttcaccatggaactttcctgtaaatttaacatttgtaccactggtatcgattttcgctgcgggtaatcaggtaatgcataaacctagcgaacatacgccagttacatcagctcttttgaaagatctatgtgataaaacatatgatcaaaatgaatttgcaactttcttagggggtcctgatgtaggagaggcttttacaaaattaaattttaatcatcttctctatacaggcggaggtgaagtagctaaacatgttatgaacgcagcatctcaaaacttggttccttgtactcttgaacttggcggtaagtctccagttgttattggcaaatcagcagatttaaaaacctccgcaaaaagaattatgtttggtaaaacaatgaatgctggacaaatttgtttagcgcctgattacgttattgttcataaagataaaaaggatgactttataaaagaaacaaaagatgcagttacagagtattttcctgacatcaagaacaacgaagattacacatcaataattaatcaaaagcactacgatagacttaaaaatttgttggatgatgcagttgcaaagggagctaatgtcgatgaaataaatccagcaaatgaagatttctctcagcaagagttttataaaataccgcccacaattgtcactaatacaacagatgatatgaaaataatgcaagaagaaatttttggacctatattacctgtagtcgaatatgaagaaattgatgaagcaacaaaattaataaattccaaagatagacctcttggtctctactactttggaaccgataaaaaagaagaagataatatcttaaataatacatcctctggtggtgtaacagttaataacgttattagtcatcttcagcaaaatgatctatctttcggtggtgtgggaccatctggaatgggaagatataaatcatttgatggttttaagaatttctcaaatccacgtgcatattttaaggacgtaagctttaaattagataaattttttgacgcagtaagaccaccatataaaggaaatattgagaaagttttacaacaactgatgaaataag

SEQ ID NO: 214339 - DNA, 940 bp, Unknown
  Bacterial polypeptide expressing nucleotide sequence isolated from the Sargasso Sea
agagccgcaaaagctgcatttgatagcggggcatgggcggatatgcggccaacgcaaaggggcaagctgttggtgcggcttgctgaaattattgagcgcgaagctgaaagattagcaaatctagaagttcgtgataacggcaagctaattaccgaaatgagcgcacaaacaaaatatttggcagaatggtaccgctattttggaggcctcgctgataaaatagaaggagcagttctaccagctgatcgccctggtatttttaatttcacaagatatgaaccattaggtgtcattggaatgattacagcttggaactctccactcttactattagcttggaagctggcccctgcccttgctgcgggaaatacagccataattaaaccctctgagtttacttctgcttcgtctttggaatttatggaacttgtcaacgaagcgggttttccaaaaggagttgtaaattgtattactggtttcggaattgaaataggcgcacctatggtggagcatccagatgtagctaaaattgcctttacaggatctgattttgcgggccaaaaaatctatgaaacagctgcaaaaaagattatgcccgttactttagaattaggcgggaaatcacccaatattgtctttgaggatgctgattttgaagctgcggtcatgggtgcaatatcaggcatatttgccgcgaccggccaaacctgcatagcaggctcacgattactggtccaaagaactattcatgataagtttgtcaaacgtttagttgaggtagcaagtgaggcaaaaattggagatccaatgtcagtggaaacacatgttggaccagttactaccgagcctcaatacgaaaaaattctacaatatatagaggttgcaaaagaagatggtgcaacgtgtgttctaggaggtaagccttataccggtgacaata

SEQ ID NO: 214340 - DNA, 1078 bp, Unknown
  Bacterial polypeptide expressing nucleotide sequence isolated from the Sargasso Sea
atgattaaaccatggaattttccaataaatttaattatttccccgatagcacaagcatttgctgccggaaatagagtaatgattaaaccctctgaaataactccgaaaacatcagatctaactaaaaagatgtttaatgaattttacgacaaagcagaagttgaagtttttctaggcggtcctgatgtggcagaggcttttggaaatttagactttgatcacttactttttactggatcaactaacaacggtagaaaagttatgcaatccgccgcgggaaacctcgttccagttacactggagttaggcggcaaatctccagtaattatggatgaaactgccgatgtttctttatcggcaacaagattgatgcgtggtaaaacaatgaatgcaggtcaaatctgcattgctcctgattacatgatgatgcctaaaggtaaagttgatgaatttatagatgagagtactaaagctgtttccgaaatgtatccagatatgaaatacaacgaacactacacttcaattgttaatgaaagacattatgaaaggattaatagtctcattgaagatgcaaaagaaaagggcgctgaaattaaaacaattaatcctgcaaatgaagattttgagcaacaagaaggacataagattcctccaacttttgtcctaaatcctactgatgatatgaaaatcatgcaggaagagatctttgggcctgttatgcctattaaagaatatgaggatattgatgaaaccataagctacgttaattcaaaacctaggcctttagctctatattattttggtaaaaataaagatacccaagataaaattcttaatagaaccacatctggaggagcaactattaatgatgttgtgtggcactacggtcaggaagatatgccttttggtggagttggagacagtggtattggttcctatcatggtcatgaaggttttaagagattcagtcatcaaaaatcagttctaactcagtttagttctgacttattgaaaaacatgatgcctccttacaaaggtaaaatgtttgaatcagctaaaaagaacgctcttaaataaa

SEQ ID NO: 214341 - DNA, 1141 bp, Unknown
  Bacterial polypeptide expressing nucleotide sequence isolated from the Sargasso Sea
tttaagaagcagctcttttaaagaaagaagatctaagctaaagcttcttcttaaaaactttttagaaatggaggaggaggttcttgcggcgctttcaaaagacctgggaaagtctaaaaccgaggcgcttttggcagaaatttatggtgttaaagcagaggcaacctttgcaataaaaaatattaaaagctggatgaagacaaaaagggttgcaagtccgcttgcaatatcttttaccaaaagctgggttaagccagaaccaaagggaaacgttttaataatctcaccctggaactatccagttatgctctgccttaatccgctcattgccgcaatagcgtcgggcaacaccgctataatcaaaccctcagagcttactcccgcctctggagagcttgtaaaagccttaatagaaaaaaccttttcatctgatgaggttgctgtttttttgggtgagaaagatgtagcacaaaaacttttaaaccttcccttcaaccatataatgtttactggtagcccaaaggttggaaaggttgttatggaggcggcttcgcgacaccttgcgggcgtaacccttgagttgggtggtaagtctcctgttattgttgacaaacacgcaaacataaaagacgctgcgtggaaaatttctttttttaagtttgcaaacgcgggtcaaacatgcactgccccagattatattttgtgcgacgaggctgtacatgaagatctggttgctgctttacaaaaaaacatgtctgaattctttcctagcgggatagatgaagccgccaaagactattgttctattgccaacgaacatcattttaacagactaaaaggtgcgcttacagaagctgttaacggcggagcaagggttgcttgcggtggtgaaaccagtcaaggcggtttatatttttctccggctgttttaaccgacgttggttatgataacccaattatggaggaagagatttttggaccaattcttccaattgttaaggtcaaaagccttgatgagtcaattagttatgtaaacagcaacgaaaaacctttagccctatatctctttagctccaaatcttcttcccacaatagggttttaaaaaatacttcaagcggtggaatggttataaacgactgt

SEQ ID NO: 214342 - DNA, 1435 bp, Unknown
  Bacterial polypeptide expressing nucleotide sequence isolated from the Sargasso Sea
tatgaaagataaaaaaaaattttatataaatggacaatgggtcaatccaattaaagcaaaagattttaatgtaattaatccctctaccgaagaagtttgcgcaataatttctctaggtagctcagaagatactgatcttgctgtaaaatctgcaaaatcatcttttgaaacttggaaagaaacttcaaagcaagaaagaataaaacttttagaaaaattattagaaatttataaatctagatgggatgaaatgactgatgccatatcaactgagcttggttgtccaaaagattggtgttcagctaatcaaactgcatctggtgcgggtcatattgaagattttataaaaagattaaaagaatttaattttgaacctggttttgataaaggatctgttaatcacattgtatatgaaccaattggtgtatgtggtttaattactccttggaactggccaattaatcaaatagctctaaaagttgtgccagcacttgcaactggttgtacaatggttttaaaaccttctgagatagctcctttatcagcaatgcttttcgcagaaatgattcatgatgcaaaatttcctgcgggtgtatttaatttagtaaatggagatggaccaggcgttggtacagatttgtcgggacatcctgatgttgatatggtttcctttactggatcgacaagagcaggaaagttaattacaaaaaatgcagctgatacaattaaaagagtttgtttagagcttggaggtaaaggtggaaatattgtatttgccgatgcttatcctgatgcggttagagacggaatacgaaatgtcatgagtaactctggtcaatcatgtgatgcaccaacaagaatgttagtagaaaaatcaatatacaaacgagcagtagaagaagctgcagatgaagctaataaaattaaagtagatcttgcatcaaaagctggcgaacatataggtccggttatatctaaaacgcaatacgataaaattcaaagtttaatcaagagtggaattgaagaaggagcgaccttagtagctggtggacctgagaaacctgaagatttcaaaaaaggatattttataaagccaacagtgttcacagatgtaaataatgatatgagaattgctaaagaggaaatttttggtccagttttatctataattccctttgagaatgaagaagaggcaataaaaattacaaatgacactgaatatggtcttggaaactatttgcaaactgaggacaaagaaaaggcaaaaagagtttcaaaaaaattaagatctggaattgtgtacgtaaatcacaaacctgcggactctggcactccatttggtggttatagacagtctggaaatggacgtgaaggaggtacctggggtttacatgaatatttggaagtgaaaactatcactgaatggaaaaattaa

SEQ ID NO: 214343 - DNA, 802 bp, Unknown
  Bacterial polypeptide expressing nucleotide sequence isolated from the Sargasso Sea
tatggataaagttataaaaaattttcaaaatatatcttatgggccagcaccagaagacagcaaagtagttaatagttggataaaaaatttaaaaaatccaaataatcattttattaatggtaaatttgtaaaatcgtctagctcaaaaaaattaaatgtaattaacccttccacaaataaaaaaattgcaacattgtctgttgcttcaaaaaaagatgttaatgctgcagtaagtgctgcaaagaaagctcatattaaatggtctaaattatcatcttttgatcgttcaaaatatttatatgccctagctcgtttaatacaaaaaaattcaagatttatttctgttttagagactattgataatggtaaaccaatacgagaaacaagagatatagatattccacttgttgcaagacatttttattatcatgccgggtgggctgcgaggaatactaataattctgataactctattggtgttgttgggcaaattataccatggaactttcccttattaatgttagcttggaaaattgcccctgcaatcgctattggaaatacagtagttttaaaaccagcagaatatacttctcttagtgcactctatttcgctgaactttgtcagaaagctaaaattccacaaggtgtaattaatattattacaggagatggttctactggtgaacatataacatcgaataaagatattaataaaattgcctttactggatcgactgaagttggaaaaaaaataattcaaacaaacactaatccagataaaaaaatgacaatggagctggag

SEQ ID NO: 214344 - DNA, 1378 bp, Unknown
  Bacterial polypeptide expressing nucleotide sequence isolated from the Sargasso Sea
aatgcgggaagcacaactggcaaatcctatgcccgaattggaaacccgccgggatcgtttacagaggctgatgaagggtctcgaggaacgcgaggaagccttcactcaggcaatttcaacggatttcggacagcgatccgcttttgaaactgccaactacgacatcaccgtcaccctggctgacatcaaatatcaaatccgcaatctggcgcgctggatgaggatccggaagcgttcggtcccgcttcacctgatgcccggacgagccaggatactgcctcaaccgctgggggtagtgggggtgatttctccctggaattttccggtgttccttagcctctctcctgttgcgggagccattgcagcaggcaaccgggtgatgctcaaacccagcgaatggacgccgaaaacctcggcacttctcgcggaattggcatcggaagcttttaaaccggatgaattcgcggtttttgaaggaggaatcgagaccggcagggctttttcgggattaccctttgaccacctgctcttcaccggttccaccagtgttgctaaagaagtttcaaactcggcagcgaaaaacctgacaccgttgaccctggaactcgggggaaagtcccccgccctagtctgccccgatgcgaacctgaaaagggctgcggaacggattgttttcggaaaactggccaacgccggacagatctgtattgctccggattatgtttttgtggaacgggcaaagtttcatgatttcatcgaaatgctccaaacctacatcaaaaaagcttatccccgtttgaacaacaatccggattacacttcgatcatttcggcagatcatttttcacgtttgaaccggatgatcgaggaagccagggaggacggagcggaaatcatcagcatcaacccggatggggaaaccctagaaccctccgcaagaatgattccgccgaccctgatcctgcgtccgaatccgacgcttggcgtgatgcaggaggagattttcggacccattctgcccgtcctgagttatgaaaaaattgaggaagcgatcgagtttatccaaaacagggccagacccctggcgctatatcttttcactgaaaaagccagagaacgggaaaggatcctgcgggaaaccgtttccggcggggttgcggttaatgaggtgctcttccactgtgtctgcgagaccctgcctttcggaggggtgggtgcatcaggcatgggttcttatcatggacaggccggattcgacaccttcagtcacctcaaacccgtcttcatccagccgagattcaatttcaatttctttctggttcctcccattacaccgatgaaaaggctgtttgcaaaaattttcaggaagttagtctga

SEQ ID NO: 214345 - DNA, 1396 bp, Unknown
  Bacterial polypeptide expressing nucleotide sequence isolated from the Sargasso Sea
aatgtcaagtaaaaaatattctcttgtttttgaaagtcaaaaaaaattttttgaatctaaagccaccctcgatatttcctacagaattaattccttgaagaaattaaagaagcaaattcaacttcatgagaatgaaattattaaagccttaaacaaggaccttggaaaaagtttagctgagtcctacatgtctgaaattggtattatttataatgaaattaattatgtgttaaaaaaaattaaaaaatggtcaaaaaaaagaaaagtatcttcctctctttttaattttttatcaactgactatatcctaccttgcccatatggtgttactttaaatatttctccatggaattacccatttcaactatctatctctccgataataggtgcaatatcggctggtaacactgttgtattaaagccctctgaacattctccaaatacaacaaatatcttaaagcttgtcattgaaaaatcttttgaaagaggtcatgttgatatcgtaacaggaggtccagatattggtcaaaaacttttggagttaaattgggattacatattttttactggaagtacagaaataggaaaaattgtagcaaaagaagcggcaaaaacactcacacctgtgactttggagcttggtggaaataatccgtgtgtaatcgataaaaacatatctcttaaaacaacttcaaagagagtcatatgggggaagtttttaaattgtggtcaaacatgtatagcaccaaactttcttgcggttgacgtaaaaattaaagattcattattgaatcaacttatctctgatattaaggatacttttggagatgacgtttacaatagtccttattattcaagaattataaacaaaaaacatgttgagagattgtcaaaattaattaaaggttataaattattacacggtggtaattatagtatggaaaaaaacttttttgaaccaactatactggaggttaaatcaataaaagacaaaatattaaaagatgagatatttggaccaatacttccggttttaacttaccaatctgttaatgatttgaaaaatattcttaatgaatataataatcctttagcattttatgtgttttcaaataatatttcatttgctgaggatttaatttcaaccaattcatttggtggaggtgcaattaatgacacaatcggtcaaattgtaaataagaagcttccttttggtggagttggaaattcaggaattggaaaatatcatggacatgaatcttttaaaacgtttagtcattttaaaccttttataattaagtctaactattttgatctttcctttaaatataagctaagtgaaaattctttattatttagattaactagaagatttttaaaatatttttctgtgtaa

SEQ ID NO: 214346 - DNA, 1289 bp, Unknown
  Bacterial polypeptide expressing nucleotide sequence isolated from the Sargasso Sea
agaaggtttagaggtttggaaaaaaacttctccatggcagagatcttatattattagaaagattgcagacaaaatgagagagaagcaagatgtattagccaaatggatgacacttgaagtaggcaagcctttttcagaagcaaaagcagaagttggaggttcggcagatatttttgaatggaatgctgaggaaacaaaaagaatttatggtcaaactgtagaaagcaggtttgcagacacgagagtacatgtttattatcaacccgttggagtagttgcagctttatctccttggaactttccattagtattatcatctagaaaaatttctactgcacttgctgccggctgttcagtaattattaaacctgatgttattaccccaggaactgttatggagctagttgatttatgtagagaatgtggagtgccacctggtgtagtcaatttactatcaggagatccaccaagtattgcttcacaacttattcaatcggacataatcaaaaaaatttcaattactggttcatcaagagttggtaaattaatattaaaacaagcagcagataaagttcaaagagtaactatggagttaagtggtcattctccttttatagtttttgatgatgcggatattaaaaaagcaacagatatggctattgcagctaagttcagaaatacaggacaagtttgtatttcaccaaatagattttatatacaagaaaataaaaaagaagaatttgttaatttatttgttgaaaaaacaaaaaaattaaaaattggaaatggtatggatccagatgttcagcttggaccaattacaacaaaaaaaagactaaatgaaatagagcaattagttgaaactacaaaaaaagaaggagcaaaagtattattaggcggcaaaagaccttcaggatttaataaaggttatttttacgaaccaactatatttgataatgtaaaagatgattttacaataatgaagatagaaccattcggtccattagttccaatgttatcttttaaaacttttgatgaagttgttgagagagcaaataatcatgagcttggtcttgcgagttatatttgtacaaattcaatggaaaaagcacacagagcatcagaaatgatggaaacaggcactgttgcggttaacacacctgttgttgcaattgctgaggcaccttttggtggaataaaacaggccggatatggaagggagggcggctctatgtctattaaagattacttgaatgtaaagtatactcaccttggaattaaaggataaa

SEQ ID NO: 214347 - DNA, 1432 bp, Unknown
  Bacterial polypeptide expressing nucleotide sequence isolated from the Sargasso Sea
atgttagataaaagaaaattctatattaatggtaaatggatagagccggcaaaaaaaaatgattttgaagtaattaatccatcaaatgaagaaacatttgccgtaatatctttagggtctaaagctgatgttgatttagctgtaaaaatctcaaaagatgcatttgaatcttggaaagaaactactaaggaagaaagaattaaattattagaaaatttattatcagtttataaaaaaagatttagtgaaatgactgaagcaatttctaaagaaatgggagctccgatggattggtcttctaatgttcaaaatgcatctggtcaagcacacttggaagattttattataaggcttaaaaattttaaatttgatgaacaatttgactcaaaatcaaataatcaaatattttatgaaccaatcggagtttgtggattaattactccttggaactggccaataaaccaaattgcacttaaagtaatacctgctttagcaactggctgcacaatgatacttaagccttcagaaatagctcccgtatcagcaatgttatttgctgaaatgattcatgaagctggttttccacctggagtttttaatctagtaaacggagatggagctggagttggaacatatatatctggtcatcctgatattgatatggtttcttttactggatcaacaagagcagggaaactaattacaaaaaatgcggctgaaacaattaagagagtttgtttagaactaggtggtaaaggtggaaatattgtatttgcagactcataccctaatgctgttagagatggaataaaaaatgtaatgagcaattccggacaatcttgtgatgccccaacaagaatgcttgtggaaaaatctatatacgaaagagctgtaagtgaagcagtggatgaagccaataaaattaaagtagatatagcatcaaaaaaaggagatcatataggtccagtagtttcaaaagttcaatacgataaaattattaacttaataaaagatggaattaatgaaggtgcaacattagctgcaggaggtcctgaaatgcctaatggtttaaataaaggatattttattaaaccaaccatatttactgatgttacaaatgatatgcagatagcaaaaaaagaaatttttggaccagttctttctattataccttttgaaacagaagaagaagcaattagtgttaccaatgatacagagtacggccttggaaattaccttcaaactgaagataaagaaaaggcaaaaagagtatctaaaaaacttagatctgggatcgtttatattaatggaaattctccagactctggaactccttttggtggatataaacaatctggaaatggacgcgaaggtggttcttggggactagaagaatatctagaggtaaaaacaattactggctggaaataaa

SEQ ID NO: 214348 - DNA, 1435 bp, Unknown
  Bacterial polypeptide expressing nucleotide sequence isolated from the Sargasso Sea
atgttagataaaaaaaaattttatatcgatggcaaatggatttctccatcagaacctaaaacttacaaggttattgatccatcaaatgaagaaccttgcgcagaaatatctttaggtaacaaaaaagatgttgataaagctgttagtgcagcaaaaaaggcttttgaaacttgggcttttacaaaaaaagaggaaagattagaattattagaaaagttgtatgtaatttataaaaaaagatgggctgaaatggcaaaacttatttctgtagaaatgggagctccgatgaaattttccacagaaatgcaagctgcaacgggagcaagtcatattaaatcttttaaaaatatattaaaagattttaatttcgaaaaagatttaggagatgaaaaaaataaccaaaagttattatatgagccaaaaggtgtttgcgctttaatcactccttggaactggccaataaaccaagttaatttaaaagttattcccgcactagcatcagcatgtacagttgtgttaaaaccatctgagatagcaccattatcatcaatgttgcttgcagaaatgattgatgaggctaaatttccatctggagtttttaatttagtaaatggcgatggcgcggtaactggcgatgcattaacaagtcatcctgatatcgacatgatttcattcacaggatcaacaagagcaggtgcgttaatttctcaaaatgccgcaaaagattttaaaagaataagtttagaattaggtggtaagggagcaaatataatttttaaagatgcagattcagaagcagtatctagaggtgttttaagatgttttagaaattcaggtcaatcctgtaatgctccaacaagaatgcttgttgaaaaatcaatttacaatgaaaccgttgaaaaagtaaaagagttagcgaataatactaaagtagactcacctgacaaggacggtgatcacataggaccagtagtttcggaaacacaatttaataaaattcaaacattaattcaaaaaggaatagatgaaggcgcaaaactagttgctggtggaacaggaaaaccaaaaggcttggaaaaaggatactatgtaaaaccaacagtttttgcagatgttaataatcaaatggaaattgcgagaactgaaatttttgggccagttctttccataattccttttgaaaatgaagatgaagctatttcaatagcaaatgacactccttatggtttaacaaattatattcaaactcaagacaaagagaaagtcaaaagagttgcaagaaagcttagatccgggatggtagatgtaaatggtgttggtatagcagtagcatctccttttggaggatacaaacattccggaattggaagagaagctggcacagagggccttatagaatttttggaacttaaaacagttggtggctggaattaat

SEQ ID NO: 214349 - DNA, 1429 bp, Unknown
  Bacterial polypeptide expressing nucleotide sequence isolated from the Sargasso Sea
atgtcagataaaaaagaattagaaagaatactggaagttcaaaaaaaagcccatttaagagatggccctctttcccttgaacagagaaaagaatggattgatagacttatcaattctattatcgagtaccaagataaaattccagttgcaatatcaaaagactttagccataggagtgaaactagttctttgctaactgatgtagcctcatcgataacatcactcaaaattgctaaaaataatattaaacaatggatgaggccttcaaaaaggagagtgtcaccttcaatcttgggtttactaggagctaaattaagagttgaatatcaaccattaggaacaattggacttataagtccatggaattttcctgttgttttaacttttggccctttgggaagtatttttgctgcgggtaatcgtgtaatgataaaaccatcagaatttactccaagaacatcggaattaatgaaaaatatgttcgaagataatttttctgaggaagaggttgctgtgataactggaggtcctgaagtaggtgcagatttttcatctcttccctttgatcatttgctatttacgggtgcaacatcaataggaaagcatgttatgagagccgcttcagagaatcttgttcctgtaacgctcgagttaggaggaaaatcaccagttataatttcggatacaagtaatgttgagcaatcttcaaaaaggattattgcaggtaaaactatgaatgctggtcaaatttgccttgctcctgattatgtattattaccagaaaataaactcgataaatttataatgcatgcaaaagagactgtttcaactatgtttccttcaataaaagataatgatgattatacctctgtaattaatgaaaggcattattctaggcttaaatcttatattgatgaggcaaaagataatggatgtgaagttatagaaattaatcctgctgaagaagactttgaacaacaggagcattataaaattcccccaactttattaattaatccagacgataatttgaaagtgatgcaggaagaaatatttggaccaattttaccaataaaaacatataaagaatttggtgaaacaattgattatgttaataaaaaagatagaccgcttggtttatattattttggtagtaataataatgaattatcaaccgttttaaataaaacaacatctggcggcgtcacggttaacgatgtaatttttcatgtagcacaagataacgctccttttggcggagttggcccatctggaatgggttcataccatggtgaggaggggtttaagaatttttctcatgctaaaactatctttactcaaacaaaattagataatgttatatctgtatttagaccgccatacggatctaaggcaagaaaagctcttaaatctcaaattaaagcttaaa

SEQ ID NO: 214350 - DNA, 757 bp, Unknown
  Bacterial polypeptide expressing nucleotide sequence isolated from the Sargasso Sea
ttgaaggttaaatttccatttaaagctaaatatggaaactacattaacggaaaatttgtagaacctaaatctggaaagtattttgacaatactactcctatcactaatgaagttatctgtaaggtgccacgatcgaacgagaaagacgttgattttgctctagacgcagctcatgcagcatttcctgcatggggaaaaacatcaattacagagagatcaaatattctcttaaagattgctgatgttatagagaaaaatctaaatgttttagctacagcggaatgtttagacaatggtaagccgattagagaatgtatggctgcagatttacctttggtaatagatcattggagatattttgcaggagtaataagagctgaggaaggttcagttgcagaaatcagtaacagtgaatattcttaccacataccagaaccattaggtgtggttggtcagattattccttggaacttcccattattaatggctacatggaaactagctccagcattggcagcaggaaactgtgtagtattgaaaccagctgaacaaacaccagcatcaatcatgcttttaatggagctgataggagatctgttaccagcaggtgttgttaacgttgtaagcggttatggccttgaggctggaaaacctttagcgtcttcaaaaagaattaagaagattgcttttacaggtgaaacaactactggacgtttgattatgcagtatgcatctcaaaacttaataccaattactt

SEQ ID NO: 214351 - DNA, 1462 bp, Unknown
  Bacterial polypeptide expressing nucleotide sequence isolated from the Sargasso Sea
tccggacgacgtcgcggttcgcagcggacatttcatcggcggcgagtatgtggaaggcggcgagcctcgcatcgaggtgctgcgcccctcggacggcgtggcctacgcttcgctgccgttcgccgacgccgaaatggtggatcgcgcggtgcagaacgcgtggcaggcgttcaggaccagcgcctgggcgcgcatggcgccgcgtgagcgggcgaagatcctgcgccgtttcgccgacctggtcgaagccgatgcgtcgtatctgggccgtctggaggcgctcggttcgacccgcccgatcgctcaggcgattggctgggacgtgccgttcaccgccgaaggcattcgcttctacgccgaattcgccgacaagctgggcggcgacgtggcggcaacggaccatgaccatctcggcatgacgatcgccgagccatacggcgtgatcggcgcgattgcgccgtggaacttcccgctggtgatggcttcgtggaagatcgcgccggctctcgccgcgggcaacgcggtcgtgctgaagccctcggagatgacgccgttctcggtgttgcgcctggccgaactggcggtgcaggcgggggtgccggcgggcatcttcaacgtggtgcaaggcgacggccgcgtcaccggcgacgaactggtgcgccacccgaagatcagtaaggtcacctttaccggctccacgcgcaccggcgccgcgatcatggctgcctgcgcgcaaagcggcaccaagccggtcacgctcgaactcggcggcaagagtccgcagatcgttttcgccgacgccccgcgcctggacgatgtagcacgccggatcgccggctcgatcaccggcaatgccggccaggtgtgcgtggccggctcgcggctgctggtcgagcgcagcctggcggagccgttggccgagcgcatcggcaaggtcttcgccgagttgagacccggcgcgacgtgggccgccggcaccaccttgtcgccgatcatctccgcgccacaggcggcgcgtatcgaagggatcgtcgggcgcacgctggaggcaggcgcgacgctgcgttacggcggcgtgcggagcgacgctggggcgggcgccttctatgcgccgacgttgcttgcggacgtcactgcccattccgaagcggtgcgcgaagaagtcttcggccccgtgctgacgttgcagaccttcgacaccgaagaagaagcgctcgcgctcgcccagcatcccgactacgggcttgccgccggcgtgcataccgccgacctcggccgggcgctgcgcttcgtgcgtggcctcgaggcggggacggtctgggtcaaccgctacggccgcacctccgacttcatgattcccaccggcggctacaagcgctccggcatcggcaaggacctcggccgtcaggcctacgaggcaaacctgcgcttcaagagcgtgctgatcgacctgcggccttaa

SEQ ID NO: 214352 - DNA, 829 bp, Unknown
  Bacterial polypeptide expressing nucleotide sequence isolated from the Sargasso Sea
atgagtaattttgaaaaaaattatgaattagctcttaataatgcaaaaagattatcagataaaattttaatagacggtaaattaatatctgctcaaactaataaaaaaatacctgttttaaatcctagcacaggagagaatattggttcggtaccacaatgtgataagaatgaagttaatattgcagttggctcggcttttaaagcatttcaaaaatggaaaaaaataccagcacgtgaaaggggaaagatggttgctgcaggcgcaaagagattagaggaaagaaaatctgaaattgagacattgctttccttagatactggtaatgctttaagaactcaagctgtgccagaaactgcagcgtcaattgagctaacaaatatgtttgcaggcctatcaggagagttaaagggtgagaattatccaccaaatatcccaaataccattcattatacaacaagagatccaattggtgtagtttgtgcaattgttccatggaacgctcctttatttttaacagttgctaaaattgctccagcgatagttgctggaaatagcgttgtattaaaaacagctgaacaagcacctttttgcgctttactgttatccgaaatattccaacaagaactaccgccaggagttttaaatgttatttcagggtatggagaagagtgcggtgaaccattggtaactcatgaaaaggtaagaaaagtaacttttacgggatctttttctgttggaaaaatcattgctaaaaaaaccgctccgaaattatgtcctgttactttagaacttggtggaaaaaatccaaatataataatgagtgacg

SEQ ID NO: 214353 - DNA, 1399 bp, Unknown
  Bacterial polypeptide expressing nucleotide sequence isolated from the Sargasso Sea
atgcaaactattgatacaacatttaaggcccaacaggctaaaagcatatctttaaggaatagtactgctagagaaagaagagacaagctaaaactgcttcttaaaaatttcttagaaatggagaacgatattcttgctgctctttcttcagatttgggaaaatctaaaaccgaagcgctcttagcagaaatttatggggtgaaggctgaagcagactttgcaattaaaaatcttggaatgtggatgaagacaaaaagggttgcaagcccccttgctatttcttttactaaaagctgggtaaaacctgagccaaaaggaaatatcttgataatttctccttggaattatccaattatgctttgcttgaacccgctgattgctgcgattgcgtccggtaacacagctgtgattaagccgtctgaacttacacctgcatctggagagcttgtaaaaaaactagttgaaaacacattttcatcggatgaggttgctgtttttctgggcgaaaaagatttagcacaaaaacttttggagcttcccttcaaccatataatgtttactggaagcccaagggttgggaagcttgtaatggaagctgcctccaaacaccttgcaggccttacgctcgaacttggtgggaagtcccctgttattgttgataaacatgcaaatgtaaaagacgctgcctggaaaatttctttttataaatttgcaaacgcaggccaaacctgtactgccccggactatatactttgtgatgcgtccgttcacgatgatcttgttttagctttacgcaaaaacatatcacaattttttgcagaaggggtagacgccgctaaaaaagattactgctctattgcaaacgagcaccacttcaataagctaaaatgctctcttgctgatgctctttctgatggagcagagcttgcgtgcggtggagaaacaagcaaagaggggttacactttactccagctgttttaacgggcgtaaactacgacaactcaattatgaaagaagaaatctttggacccatcctgccaattatcaaagttcaaagccttgacgagtctattaattatgtaaatgaaaatgaaaagccattagccttatatctttttagcaataaacctgctgttcacaatgaggtgttaaagggtacctctagcggtggtatggtaataaacgattgcgttctacatcatatgaatccaaaccttccatttggaggtataaataatagtggcgtcggtagctatcatggtaaattcggttttgatgccttctcacaccacaaagctgttttgaaaagtagttcaatttctcctttcaaggtaatgcttccaccatatactaaaaccaaagaaactttagctaatctaataaaaaaatatttttagc

SEQ ID NO: 214354 - DNA, 1492 bp, Unknown
  Bacterial polypeptide expressing nucleotide sequence isolated from the Sargasso Sea
catgactcctttcgatacgagcctcgtgcccgacggcaacatcctgatcggcggcgaatggcggcgcggccgtggcgcgccttacgcgagcatctatccggccgaccagtcgctgaacatggaagtgtcgaccgcgaatgcggaagacgcggccgaagccgtcgtggccgccgatgccgcatggcgccgcgccgactgggccgggctgaagccgcacctgcgcgcgcaggtgctgtaccgcatcgccgatctgatcatgcagcgccacgaagcgcttgcgaacctgcagcgccgcgacaacggcaagccgatcggcgagacgcgcgtgctggtggcgagcgccgcgaacacgttccgctatttcgccgcgtgtctcgaaacgctcgacgaggaactgacgccgtcgcgcggcgactacctgacgatgagcgtgtacgagccgatcggcgtgatcgcggcgatcacgccgtggaattcgccgatcgcgtccgatgcgcagaagctcgcaccggcgctggccggcggcaacgcggtggtgctcaagccggccgaagtcacgccgctcgtgtcgctcgcgctggcacgcatctgcgaggaagccggcgtgccgaagggcgtgctgagcgtgctgcccggcaagggctcggtgatcggcgacgtgctcgtgcgccatccgctggtgaagaaggtgtcgttcaccggcggcaccgaagtgggccgcggcatcgcgcgcatcgcggccgagaagctgatgcccgtgtcgctcgaactcggcggcaagtcgccgacgatcgtatgcgatgacgccgatctcgatcatgcggtcaacggcgtgctgtacggcatcttcagttcgtcgggcgaagcgtgcatcgcgggttcgcggctgttcgtgcagcgcgcggtgtacgacgaattcatgaagcgtttggtggccggcgcacgcaagctgcgcgtgggcgacccgacgcgggcagacacgcagatggggccgctgatcaccgcgaaacatcgcgaatcggtggagcgctacgtggcgctcggcctcgaggaaggcggccgcctgctgtgcggcggcgagcggccgtcgggcgacgggcgcgagaacggcttcttctatcagccgacgatcctcgaaggcttgccgaacagcgcgcgcatctgccaggaagaaatcttcggcccggtgctcgtcgcgatgccgttcgacgacgaagcgtcgctgatcgcgcaggcgaacgacagcgtgttcggcctggcggccggcatctggacgcgcgactacaagcgcgcctggcgtatcgcgcgtgcgctggagacgggcacggtctggatcaacacgtacaagctgttctcgatctccacgccgttctcgggctggaaggagagcgggatggggcgcgagaaagggcgtctcggcatccgcgagtacatgcagcagaagagcctctactggggcttgaacgacgcgccgctgccgtgggcgaactga

SEQ ID NO: 214355 - DNA, 1495 bp, Unknown
  Bacterial polypeptide expressing nucleotide sequence isolated from the Sargasso Sea
catgaatataatcaaacatttcgttggtggaaaagtaatagatggtacttcacaaagaaaaggacaagtttttaaccctgctactggagagcaagaatcagaagttattttagctactaaatcagatttagataaaacagttgaaattgctaagaaagcctttgagacatggtcacttaagcctgcacttcaaagagctaggataatgtttaagtttaaagaacttatagaaaaaaattttgatgaattaacaaagttaattgtctctgaacatggaaaagtttatgaggatgcaaaaggatcattaataagaggattggaagttgtcgagtttgcatgtggaattcctcatgtgcttaaaggtgaattttctgagaatgttgggacaaatgtcgatagttattcgatgcgacagcctttaggtgtagctgctggaataacaccttttaattttcctgcaatggtgccaatgtggatgtttccattagctattgcatgtggaaatacttttattctcaaaccatctgaaaaagatccgtcttgcccaatgagattagcagaattacttcatgaagctggtctacctgatggagtttttaatgtagtcaatggagataaagaagttgtagacgctatactgacaaataatgatattaaagccgtaagtttcgttggatcaacacctatagctaaatatatttatgagaatgctgccaaaaatgaaaaaagagttcaagcgttagggggagctaaaaatcatttagtggtgatgcctgattgcgatttagatggagctgtaaatggtctaatgggtgctgcatatggatctgcaggtgaaagatgtatggcccagtccgttgctgtagtagttggtgatattggtgatgagttagtatctaggttagtaaaaaaagctgaagcattaaaaattggtcctggtatggataaatcctcagagatgggtcctcttgttacaaaacaacatttagaaaaagtaaaaggatatgttgatttaggagttaaagagggagctaaattagctcttgatggtagagatttaaaacttcaagggtatgaaaatggtttttatataggtggatgtttgtttgatcatgtgactactgatatgagaatttataaagaagagatttttggtcctgttctatcagtggtaagagtaaaaacttttgaagaagcaaccaaaatgataaatgagcatgagtatggaaacggtgtaagtatttatactagagatggtgatgcaggaagaacttttgcaagtaaaatccaagttggaatggttggaataaatgttccaataccagttcctatggcatttcatagttttggtggatggaaaagatcattgtttggagatagcggaatgcatggcatggaaggaattaaattttatacaaaattgaaaactattacctctagatggccttcaggcataaggtcaaatcctgaatttattatgccaactatggaataa

SEQ ID NO: 214356 - DNA, 1435 bp, Unknown
  Bacterial polypeptide expressing nucleotide sequence isolated from the Sargasso Sea
catgattgaaaagaaaaaattttatattaatggttcatgggttgcatcaaaaaataaaaaagatatccaagtaattaatcctgcaactgaaaaaagttgtgcagtaatttcattaggaggcaaagaggatattaatgatgcagtattagcagctaaagaggcttttaaaacttggggattttcctcaaaacaagagagagtcgaattattggaagacttttatgtactttataaaaaaagatggagcgatattacagatgcaattattcaagaaatgggcgcaccaaaagattttgcttcaaaacttcaaacaggaactggtgctagtcatacaaaatctttcattcgttatttaaaagagtttgagtttgaaaaaccacttggagaacatgctaaaaatcaaagattaatttatgaaccaaaaggtgtttgcgcattaattactccttggaactggcctataaatcaagttactttaaaagttattcctgctttagcatctgggtgtactatgattttaaaaccttcagagttagcaccattatctgcaatgataattgcggaattaatagatgaagcaaagtttccaaaaggtgtatttaatttagtaaatggagatggtgcaactactggggatgcattaactagtcatcctgatgtaaatatgatttcatttactggctctacaagagcgggagcattaatttcacaaaatgctgctaaagattttaaaagggtgagtttagagttgggaggaaaaggagcaaatatcatatttaaagacgctgatgcagaagctattgagaggggtgctttaagatgttttagaaattctgggcaatcttgtaatgcacctacaagaatgttagttgaaaaaccaatttatgatgatgctattgaaagacttaaaaagtatgcaagtgaatttaaagtagatgacccaaataaagagggtgagcatataggcccagtaatttcagatgtacaatttaataaaattcaaggattaattcaaaaaggaatagatgaaggtgcaaaattagttgctggcggcccaggaaaacctgagggattaaaagatggttattacgtaaaacctacagtatttgcagatgttaataatgacatggaaattgcaagaacagaaatttttggtccagttttatctgtaattccatttgaaactgaggaggaagctattcagattgcaaatgatactgattatggattaacaaattatattcaaacgcaagataacgataaggtacaaagagttgcaagaaaacttagatctggaatggtagatgttaatggggcaggtattgcagttgatgctccctttggaggatttaaacactcaggaattggtagagaagctggaagagaaggtttgcttgaatttttagaagttaaatctgttggtggttggaattaa

SEQ ID NO: 214357 - DNA, 1444 bp, Unknown
  Bacterial polypeptide expressing nucleotide sequence isolated from the Sargasso Sea
atgtatagtaaatttggacaattcataaacggaaaatggcaagaagcagaaaaaaaagaaacatacgaagtaattaatcctgcaactgaagaagtaattggtagagcttcaaaggcatcatctgtagatgtagacagagcattaaaatcagctgaaaaaggtttaaatgtatggcgcaatactgctccttggcaaagatcatatattataagaaaaattgccgacttgatgcgtgagaaaaaagatcttcttgcgaagtggcttaccttggaagttggcaaacctttagctgaaggacttggtgaagttggaggagcagcagatatttttgaatggaacgcagaagaaacaaaaagaatatatggacagactgttgaaagtagatttcctgactcaagagtgcatgtttattatcaacctgttggtgttgttgctgcattagtgccatggaactttcctatagttttagcttctagaaaaatttctactgctttagcagcaggttgttcagttatttgtaaacctgatgtcattacgccaggagctgtaatggagctagttgatatttgtagagaggctggagttcctccgggtgtagtaaatcttttatcaggtgacccagcaggaatctctgaacaattgataaagtcagatattgttaaaaaaatttccgttactggttcaacaagagttggtaaattaatattaaaacaagcagcagataaagttcaaagagtaacaatggagttaagtggtcattcaccttttattgtttttgatgatgctgatattaataaagcaacagatatagctgtaacagcaaaatttagaaacaatggacaagtttgtatttcaccaaatagattttacatacaagaaaagaaaaaagatgattttataaattcttttattagtaaagcaaaaaaacttaaaattggaaatggaatggatgaaaatgttcagttaggtcctctcacaactgaaaaaagattaaacgaaattgaacaattggtagaaactacaaaaaaagaaggagcaaaagttttaatgggtggaagacgtccagctggatttaataaaggatatttttatgaacctactattttcgatgacgtcaaagatgattttacaattatgaaagaagaacctttcggaccattagtgcctatgctttcatttaaaaattttgatgaagtaatagaaagggctaataaaaatgacctaggactttgtagttatatttgcacaaattcaatggatcaagcacatagagcttctgagttaatggaaactggcacagtagctgtaaacacaggtgttgttgctcttgctgaggcaccttttgggggaataaaacaaacaggatatggtcgagaaggcggatctacagcaattaaagactatttaaacataaaatatactcaccttggtttaaaaggttaat

SEQ ID NO: 214358 - DNA, 1432 bp, Unknown
  Bacterial polypeptide expressing nucleotide sequence isolated from the Sargasso Sea
tatgattgaaaaaaaaaatttttatataaacggaaaatgggttgcaccagtcaaacctaatgactttaatgtaattgatccatcaactgaggaggcttttgcagtaatatctttaggatctattgaggatactgataaagctataagtgctgctaaagttgcatttgaaacttggagagaaactacaaaagaagagagagtaaaattattagaaaaatttgataaaatttataatagaagatggaatcaaatggttgaagcacaatcaatggaaatgggtgcaccattagactttgcatcagatattcatactaaaatgggtgcagatatatctagaaatacaatagatattttaaaaaattttaattttgaacatcagtttgatccaaaatcaaacaaccaaattagatatgagccaattggagtttgtggactaataaccccttggaattttccaatgaaccaaatcgtacttaaagttattccagcactagcagctggttgtacaatgattttaaaaccatctgaaattgctccagtatcaggagttttgtttgcagaaatgattgatgaagctggttttcccccaggagtatttaatttagttaatggtaatggagaagtagttggaaaccatatatctggccaccccgatattgatatggtctcatttacaggatctactagagcaggaaaactaatacaaaaaaatgcagctgatacaattaaaaaggtaactcttgagcttggtggtaaaggtggaaatatagtttttgaggattcgtatccagatgcagtgagagatggagtaagaagtataatgagtaacactggacagtcttgtgatgctccaacacgaatgctagttcaaagatcaatttatgatagagcagtaaaagaagctgtagatgaagcaaataaaattaaagtagatgtggcatctaaaaaaggtgatcacattggacctttagtatccaaagttcaatatgataaagttgtaaatctcataaatgagggaattaaagaaggtgcaactttagctgcaggagggcccgatctgccaaatggtcttaataaggggtattttgtcaaacctacaatatttgtagatgttaacaacgatatgaaaatcgctagagaagaaatatttggtccagtgctctcaattattccatttgatacagaagaagaagcaattaaaataacaaacgatacgtcttacggattaggtaactatttacaaactgaggataaagaaaaagcaaaaagagtggcaagaaaagtaagagcagggacagtttatatcaacggtcaaggagccgaaactggagcaccttttggtggatttaagcaatcaggaaatggtcgagagggtggactatggggttttactgaatacctagaggttaaggcaattactggttggaattaa

SEQ ID NO: 214359 - DNA, 775 bp, Unknown
  Bacterial polypeptide expressing nucleotide sequence isolated from the Sargasso Sea
atgaaaaatgtagataaattttatattgatggtgaatggattactcccaaatcatctaatcaaatgcctgtaatcaaccccgctaatgaggaagaaattgcaactgtttatttaggaaatgaagatgatgttaatattgctgttgaagctgcaaaaaatgcgtttgatagcttttctcagtcgtcaaagagcgatagattagatttgttgaaaaaaattcgttctgttactaaagatcgatatgaagaattagcagttgcaatgagtaacgaaatgggtgcgcctatgacgttttcgagagatacgcaagctgactcgggtattggtcacttagatggctttattgaatctctagagaaacttgaggagcaaattacattaagcaatggagatattttgctaaaagaaccaattggagtttgtggcctaattactccgtggaactggcctataaatcaaattactttgaaggttttaccggcgatcgcaactggctgtacaagtgttcttaagccttcagaatttacaccgttatcagctaccgtatatgctgaaatactgcatgaggcaggagtacctaaaggtgtgtttaacttaattcatgggaaaggcgaggaagtcggagtagctttatcaaggcatcccgatattcaaatggtttcatttacaggttctacgagaggaggaatatctgttacaaaagaatcagctccaacagttaaaaaagttacacttgaacttggaggaaagtctccaaacttagtttttgctgatt

SEQ ID NO: 214360 - DNA, 1462 bp, Unknown
  Bacterial polypeptide expressing nucleotide sequence isolated from the Sargasso Sea
ctgttaaggaaagccgacatgcagcttaaagacacccagttgttccgccagcaagcctttatcgatggcgcttgggtcgatgcggacaatggtcaaaccatcaaggtcaacaacccggccacgggcgagattctcggcaccgtgccgaagatgggcgccgcggaaacccgccgcgccatcgaggccgccgacaaggccctgccagcctggcgtgcactcaccgccaaggagcgcgccaacaagctgcgccgctggttcgaactgctgatcgaaaaccaggacgacctcggccgcctgatgaccctcgaacaaggcaagccgctggccgaagccaagggcgaaatcgtctacgccgcctcgtttatcgagtggttcgccgaagaagccaagcgcatctatggcgacgtgatccccggccaccagcccgacaagcgcctgatcgtgatcaagcagcccatcggcgtgaccgcagccatcaccccgtggaacttccctgcggcgatgatcacccgcaaagccggcccggccctggccgccggttgcaccatggtgatcaagccggcctcgcaaaccccgttctcggccctggccctggttgagctggcgcaccgcgccggtatccccaaaggcgtgctcagcgtagtcaccggcagtgctggcgacatcggcggcgagctgaccagcaaccccattgtgcgtaaattgtccttcaccggctcgaccgaaattggtcgccagctgatggccgaatgcgccaaggacatcaagaaagtctccctggagctgggcggtaacgcaccgttcatcgtgttcgacgacgccgacctggataaggccgtcgaaggcgcgatcatctccaagtaccgcaacaacggccagacctgcgtctgcgccaaccgcctgtacattcaggattcggtgtatgacgccttcgctgaaaagctcaaggtggcggtgaccaaattgaagatcggtaacggcctggaggacggcaccaccaccggcccgctgatcgacgaaaaagccgtggccaaggtgcaggaacatatcgctgatgccctgagcaaaggcgccaagttgttggccggtggcaaggtgatggaaggcaactttttcgaaccgaccatcctcgtcgacgtgccgaaaaacgccgccgtggccaaggaagaaaccttcggcccgctggcgccactgttccgcttcaaagacgaagccgaagtgatcgccatgtccaacgacaccgagttcggcctggcctcctacttctatgcccgcgacctgggccgagtgttccgcgtggccgaggccctggaatacggtatggtcggcgtcaacaccgggttgatctccaacgaagtggcgccgttcggcggcatcaaggcctccggcctgggccgtgaaggctccaagtacgggatcgaggactacctggaaatcaaatacctctgcctgggtatctaag

SEQ ID NO: 214361 - DNA, 1432 bp, Unknown
  Bacterial polypeptide expressing nucleotide sequence isolated from the Sargasso Sea
aatgaaagaatgtctaaagttttatattaatggggagtgggttgatcctgtaaatcctcagcattttgatgttattaatccagctacagaagagtcaattggtaaaatcgctcttggtaatgaggaggatttaaataatgctgtttccgcagctaaaaatgcatttgatagtttctctcaaacaagtaaggaagaaagaatagagctaattggtaaaattctagaggtttaccaatcacgctatgatgaaattgctgaaactatttcttctgagatgggggcacctctttggttgtcgaaagctgctcaggcagcaactggcgcaggtcatttaggtacatttcttgagatacttaaaaattatgaatttgaagaagatagagggaacacaagaatcagaaaagaggctgtaggtgtttgcggttttattactccttggaattggccaattaatcaaattacttgtaaggttgcaccagctctagctgctggttgtacaatggttttaaagccatctgaaattgcgccattgaacgcaatactattcgcagaaattttagatgaagcaggcgttccagcaggagtatttaatttagttaatggtgatggaccaactgttggtgaggcaatgtcttctcataaagacattgatatgatgagctttacaggttcgactagagcaggaatcgctgtagcaaaagcatctgctgatactgttaaacgagttgcacaggaattaggcggtaaatcagctaatattattcttgatgatgcagattttggttctgctattgcaggaggtgtcactagctgctttatgaattctggtcaatcatgtaatgctccaactagaatgttagttcctgccgataggcaagatgaagctatagcaattgccaaagaaactgctgaaaatactattgttgggaatccagctgaagttgcagctggaggaatagggcctgtcgtgagtgaattacaatatgataaaatacaagccttaattgaaaaaggtattgaggaaggcgccacattagttgctggaggaccaggtaaacctgagggtctaaatgcgggctatttcgttaaacctactgtttttgctgatgttaaaaatgacatgacaatagctcaggaagaaatatttggtcctgttttatcaatccttccatataaagatgatgaagaagccatagcaattgccaatgatactgtatatggactttctggttatgtttcaggcagtcaagaaagagcacaaggtgtagctaaaagaattagatccggtaatgttcatgtaaacggatctggacctgatttctctgcgccgtttggaggctttaaacaatctggtaatggtcgagaatggggtgactttggtttcgaagagtttttagaaattaaagctattctgggctttactgccgcttaa

SEQ ID NO: 214362 - DNA, 919 bp, Unknown
  Bacterial polypeptide expressing nucleotide sequence isolated from the Sargasso Sea
atggataaagttattaaaaattttcaaaatatatcttatgggccagcaccagaagactgcaaagaggttaatagttggataaaaaatttaaaaaatccaaataatcattttattaatggtaaatttgtaaaatcgtctagctcaaaaaaattaaatataattaacccttctacaaataaaaaaatagcaacattgtctgttggttcaaaaaaagatgtaaatgctgctgttagtgctgccaaaaaagctcatgtcaaatggtcaaaactttcatcgtttgatcgatcaaaatatttatatgccctcgcacgtttcatacaaaaaaattcaaggtttatttctgttttagagactattgataatggtaagcctataagagaaacaagagatatagatattccgcttgttgctagacatttttattatcatgctgggtgggctgctaggaatacaaacaactctgataactctattggtgttgttggacaaattataccgtggaactttccattattaatgttagcctggaaaattgctcctgcaattgctcttggcaatacagtagtcttaaagcctgcagagtatacttctttaacagcgctttattttgctgaactttgtgaaaaagctaaaattccgcaaggtgtaattaatattattacgggagatggttctaccggtgaatatataacattgcataaagatattaaaaaaattgcctttactggatcgactgaagttggaaaaaaaataattcaaacaaatactaatccagataaaaaaatgacaatggaacttggaggcaaatcacctttcattgtttttgaagatgctgatttagatagcgcagtagaaggtgtcgttgatgcgatttggttaatcaagggtcagtatgttgtgcaggatcacagactctagt

SEQ ID NO: 214363 - DNA, 835 bp, Unknown
  Bacterial polypeptide expressing nucleotide sequence isolated from the Sargasso Sea
atggaagaagttttgagacttcaaagagaacattttatgaatgaaggcccaccttcatatgaactaagaatcgatagattagacagagttcaagatatggttattcaaaataaagacagaataactgaagcattagacgctgactttggagcaaggtcacctaatcaatctctaatatcagatgtttatggcgttctccctgcattttctcatgcaaaaaaacatttaaagtcctggatgaaggatgaaaagagaaaatctaacttcccgtttggactaatgggagctaagtcatatattcatagggagccgcttggagttgttggaatgatatcaccatggaactttccaatgtatttatctcttgctcctttagctggtatctttagtgcggggaatcaggtgatgcataagcctagtgaatttactcctattacttctgagcttctaaaagaaatttgtgacagtgcttttgatgaaactgaatttgcaacttttctaggtggtcctgatgtaggcgccgcttttactcagcttaagtttgatcatctgctatttacaggaagtggaaatatcggaaagcatgtaatgcgtgcggcttcggaaaatctagttccattaacattagagcttggaggaaaatctccagttatagtcagtgattcttcaaatatagatataacagcacgaagagtaatgtttaataagactgttaatgcaggtcaaatatgtttagcacctgattatgtttatgtgcatgaaacagagaaggataattttgtagaagcatgtaaggatcaagttaatgaattttatagcgatcttaaatataacc

SEQ ID NO: 214364 - DNA, 589 bp, Unknown
  Bacterial polypeptide expressing nucleotide sequence isolated from the Sargasso Sea
atgctcatcacctacaagaatgcttatacctgaaaatttgatcaaagaggcaacagaatatgcatgcaatgcaacacagaaaatgaaaactggagatcctaataatgaagaaacttttttaggccctatctcaaacaaaacacaatttgagaaggtgcaagcactaattcagaaaggtatagatgaaggagctgaattagccttaggtggagtggacaggccagatggattagacaagggtttctatgttaaacctacaattttcacaaatgttaaaaatgaaatgcaaatagcccaggaagaaatattcggtccagttatttgtttaattccatataaagacatagatgaagcggtcgaaattgccaatgatactccgtatggattgtcgagcatggtttcttgctccgatatagataaaggacatgaaatagctaaaagaattcgagccggacaagtaatagtcaatcggatttcgcgtggggattatcctgcaccttttggaggatttaagatgtccggtaatggaagggagcacggcacttttggactagaggaatatttagaagttcaagctgtaattacttaa

SEQ ID NO: 214365 - DNA, 567 bp, Unknown
  Bacterial polypeptide expressing nucleotide sequence isolated from the Sargasso Sea
cagaggatagtaaagatgtcatgtcttggattaattcactcaataatccaaatcatttatttatcaatggatcatggataaaatcaaaatcatcaaagaaaatccacgttataaatccagctacaaataaaaaattaacctcactgtctatggcaaataaagctgatgtgaatgctgcagtcggtgctggtaagaaagcttatacttcctggtccaaaacatcatcagataccagagcaaaatatctttacgctctggcaagattaattcaaaaacattctcgtttcttatctgttcttgagactattgataacggaaaaccaattagagagacaagagatattgatatcccattagtagcaagacatttttattatcatgctggttgggcaaaaaaaattgatacaaaaaatcataaaccaataggtgttattggtcagattattccttggaattttcccttattaatgatggcatggaaaattgctccagctattgctgcaggtaacactgtggttttaaaacctgctgaattcacttcattaactgctcttatattttgctgaa

SEQ ID NO: 214366 - DNA, 1006 bp, Unknown
  Bacterial polypeptide expressing nucleotide sequence isolated from the Sargasso Sea
ttttacagtagcaaaaatcgctccagctattgtagcaggaaatagtgttgttttaaaaacagctgagcaagctccattttgtgctcttctactatcggagatatttcaacaagaacttcctccgggtgttttaaatgtaatttcaggctatggagaagagtgtggcgaacctctggtaactcatgaaaaagtaagaaaagtaacgtttacaggatcttttacagtaggaaagattatagcgcaaaaagcagctcctaaattatgtccagttactttagagcttggaggaaaaaatccaaatataataatgagtgatgcagatttagatattgcaattcaaggggttattgatggaatgagatatactcgacaaggacaagcatgtactgctggttcaagagtttatattcaggaaaaaatttatgatcaagtactgggtggagctgctgaaaaattaagtaaattaaaaatgggtaatgccctagatgaaagttctgacattggagcaattatttcagaagaacaactgaaacgaactttacattatatggatattgccaaaaaaaactctacaaccaatgttgtacatggtggcaatcaaataacaggtggtgattataaaaatggtttcttctatgaacctacattgatgtcaggtgttccagtaagctctccagtttgtcaagaagaaatatttggtcctgttgcttgtgcaataccatttaaaacatttgatgaagtaatgaacagtgcaaatgatacaccatttggattatcagcggtattgtggacacaaaatttatctagagctttacagtttgttgaagaaatcgaggcaggttttgtccaagtaaatcaatgtgtagcgcctagagcaaatgtttcatatggtggtttaaaaatgagtgggctaggaaaagagtacgcctttgatagtatgataaatcattttactcaaagtaaaacggttttgattaatagaggaaaatcaaatatagatatttaa

SEQ ID NO: 214367 - DNA, 1441 bp, Unknown
  Bacterial polypeptide expressing nucleotide sequence isolated from the Sargasso Sea
gctgcccgcagcgcacatcgccggccagcccgtgcgcacacatgccgatgcgcccggcgcgccgatcttcgacgcgtcgaccggtgccgcgatcggctggcaggaattcgcgacggccgcgcacgtcgatgccgcggtgcgcgccgcgcgcgatgcgttcgccggctggcgcgatacgccgcccgccgaacgcggccgcattctcgcgacgatcgccgcgcgcgtcgaagcctcgcgcgatcgcctggcggcgctgcagatgcaggtgagcggcaagccgccgttcgaggccgacgccgatgtcggcgacgtggccgccacgttcgcgtactacgcgaagctgtgcgaggacccggcgctgttcgccgccgaaccggtcgcactgccgagcgacgccgtcacggccgaacgcttctacgactccgtcggcgtcgcggcgctcgtcatgccgtggaacttcccgatggtcacgaccgcgtggaagctcgcgcccgcgctcgcagcgggctgcgcggtcgtgctgaagccgtccgaactcacgtcgcccaccgagcacgcactgctcgacatcgtcgccgaagccggtgtgccggccggcatcgtcaacgtcgtgaacggcggcgccgaagtcggcgcggcgctgaccgcgcacccgctgatcgacaagatctcgtttaccggcagcaccgcggccggccgcaaggtcatgcaggccgcggccgtcgacatgaagcgcgtgacgctcgaactcggcggcaagtcgtcgctgatcgtgcgcgacgatgccgatctcgacgtcgcggtgtcgctcgccgtcgcgggcgccttcacgaacgcgggccagatgtgctcggccaccgcgcgcatcctcgtgcacgacagcgtgtaccgcagcttcatggccgcgttcgagacggccgtgcgcgcgctcgtcgtcgcgccgccggccgcggaacaggtcgcgatggggccgctgatctccgccgcgcagcgtacgcgcgtcgaagcgatgctccagcaaggcatcgaggcgggcgcacgcgtcgcgttcagcggccgcgtggcggatgccggcggcgacggcttcttcatggcgcccgtcgtgatcgccgagccggccgccgacaacccgctgtggaccgacgaagtgttcggccccgttgcgtgcgtgaaatcgttccgcaccgacgacgaagcgatcgcgctcgcgaacgacacgcgctacgggctcgtcgcgaccgtcgtcacacgcgatgcggtcatcgcgaagcaattccagcagcgcgtgcgcgcagggctcgtgtggatcaacgcgccgcagctcatctacccgcacgtgtgctggggcggcttcgggctcagcgggatcgggcgtgaactcggcgtggcggggctgcgaagctatcaggaactgcgccacgcgatgcgcgcgatcgactga

SEQ ID NO: 214368 - DNA, 1441 bp, Unknown
  Bacterial polypeptide expressing nucleotide sequence isolated from the Sargasso Sea
tctgaggaccggccatttcatcggcggtgaatggcatgaatcgcatggcgcgagcgatgcgacctatccggtgctgaacccggcgaccggcgagacgatcgcgaaggtcgcgaaaggcggcgccgacgacacgcagcgcgcaatcgatgcggccgcacacgcgtttccggcgtggcgcgcactgaccgcaaaggagcgcggcgcccgcgtgaagcgctggggcgaactgatgctcgaaaaccgcgacgcgctcgccgagctgctgacgcgcgagcaaggcaagccgctcgcggaagcgcgtggcgaagtcgcgtacgcggcgagctttctcgaatggttcgcggaagaagcgaagcgcatgtacggcgacgtgatcccgagcccgaagccgaactcgcagatcgtcgtcacgcgcgagccggtcggcgtcgtcgcggcgatcacgccgtggaatttcccgctggcgatgatcacgcgcaaggccggccccgcgctcgcggccggctgcacgatggtgctgaagccgtccgaggaaacgccgctgtcggcgttcgcgctcgctgtgctcgccgagcgcgcgggtgtgccggccggtgtgttcaacgtggtgtcgggcgacgcggtcgcgatcggcgaaacgctgacgagttcgtccgtcgtgcgcaagctgtcgttcacgggctcgacgcgcgtcggcaagctgctcgcgaagcagtcggccgacacgctgaagaagctgtcgctcgaactcggcggcaacgcgccgttcatcgtgttcgacgatgccgatctcgatgcggcggtcgaaggcgcgatcgcgtcgaagttccgcaacacggggcagacctgtgtgtgcgtgaaccgattcctcgtgcaggacggcgtgtacgacgcgttcacgcgcaagcttgcggatgccgtgcgcaagctgcgcgtcggcaacgcgctcgcgggtgaagtcgaccagggcccgctgatcaacgaggcggcgctcggcaaggtcgagcggcacgtggccgacgccaccgcgaagggcgcgcacgcgctcaccggcggcaagcgtcacgcgctcggcggcacgttctacgagccgaccgtgctgaccggcatgacggccgacatgctgatcgccgaagaggaaaccttcggccccgtggccggctgcttccgcttcgcgaccgaggaagaggccgtggccgcggccaacgacacgccgttcgggctgtccgcatacttctacacgcgcgacctcggccgtgcgtggcgcgtgtcgggtgcgctggagagcggcatggtcggcgtcaacgacgggatcatctcgaccgaagtcgcgccgttcggcggcgtcaagcaatcggggctcggccgcgaaggctcgaagtacggcctcgacgaatacgtggaactcaagtacacgctgatggccggcctcggccgctga

SEQ ID NO: 214369 - DNA, 1432 bp, Unknown
  Bacterial polypeptide expressing nucleotide sequence isolated from the Sargasso Sea
aatgattgataaacgcaaattttatataaatggaacttggattaacccaattataaagaatgattttgaggttatcaatccctctaatgaacaaccttacgcttttatctccctaggttctaaaaaagatgtagatctggcggtcaatgcatcaaaaaaagcattcattacatggagtcaggtagataaaaaacataagattagtttactagaaaatttacttaagatttataaaagtagatgggatgaaataacgcaaacaatgtctgaggaaatgggagcaccattagattggtcttcatcagcacaaacttcttcaggagcagaccatataaatgatttcattttgagattaaaaaattttgaatttgaaagaagatttaataaaaattccaataattatattgtttatgaaccgattggagtatgcggtcttataacaccgtggaattggcctatcaatcaaatcacattaaaagtaatacctgccttagcaactggttgcactatgatattaaaaccttcagaaattgcaccgatgtcagggatcatatttacggaaataattcatgaagcaggttttcctccaggtgtttttaatttagtgaatggggatggagatggtgtaggaacagatctatcatctcataaagatattgatatgatatcttttactggatcaacaagagcaggaaaactaatttataaaaacgcagcagatacaattaaaagagtttgtttagaattaggaggtaaggggggtaatattgtttttagtgattcacatccagaagcagtaagagaaggtgttaggaatataatgagtaattctggtcaatcttgtgatgcaccaacaagaatgctagttgaaaaatcaatctataaaagagcagtagaggaggcggctgatgaagcaaataaaattaaagtcgatattgcttctaagaatggaaatcatatcggtccagttatttctaaaacacaatatgataaaattattgatctaattaatagtggtataaatgagggcgctacactcgtggctggaggtcctgaaaaaccaaatggtctagaaaagggttattttgttaagccaacaattttcacagatgtaactaataatatgagaattgcaaaagaagagatttttggaccagtattatctataattccatttgaagatgaagacgaagctatatcagttgttaacgatacatcctatggtctaggaaactacgttcaaactcaagataaagaaaaagcgaaaagagttgcaagaaaatttagatcaggaggtgtttatataaatggaaatatcgctgatccaggaactccctttggtggttatagacaatctggtaatggaagagagggaggtgattggggtctagaagaatatttagaaattaaaactatctgtggatgggaatga

SEQ ID NO: 214370 - DNA, 1402 bp, Unknown
  Bacterial polypeptide expressing nucleotide sequence isolated from the Sargasso Sea
ggccaagagtggtatcacatcaccgattgcaccccagccgaggtcgataaggcggttgctgctgcgcagagtgcgctgaaagcgcctggttggggtgacatcacgcagacccagcgctcggggctgatcttcaacctggccgcgctgatcaaggagcatgcctccgaactggggctgcttgagtgccgagacaacggcaagatcctgagagagaccaccgcccagatctcctacctgcacgactattaccgctactttgccgggatggcggacaagatcgagggcagcacgatcccagtcaacaaaccccaggtgctgaactttacccgtcacgaaccactgggcgtggtggcgatcattacgccctttaattcaccgctcaatatcctgagtgtctctcttgcgccttgtctcgctgtcggcaataccgttgtggttaagccttctgagcacacctcggccagcaccgttgcctttgccgaactgatcaaagaagccggctttcccaatggggtctttaatgtggtgaccggaggcggcgccggggccggccagagcctggtgagtcacaaaggggtagccaaggtcgcgtttaccggcggcagcgatacgggccggcgaattgccgccagtgtgggagacaacctgacccaggccaatctggaacttggcggcaaatctccacacatcatatttgcagacgcagatcttgatcgcgcggtgaacggcgccgtggcgggcatctttgcatcaggcggacagacctgcgttgccggcagccgaatctttgttgaagaaagcatttatgaagaaaccctggcgcaactgacggccagtgcgctggatgttgttgtcggtcacccggaagagccggcaacacaaatgggaccgctcgccaaccttgagcaactcgaaaaagtggaggaacttgtgcgctccgcccaagaggaaggcgcacgcctggtctgtgggggagagcgcctgcaggacagcccctatgacgggggcttttattttgcgccgacgctctttgcgaatgcccgcaacgacatgcgcttttgtcaggaagagatctttggtcccgtcgccggcgtgattccgttttccagcgaggctgatgtcattgcccaggcgaacgacacccgctttgggttaagcgcgggactctggacccgtgatcttgatcgggcgatgcgctgtgtcgatgccatcgattccggaacggtgtgggtcaatactttccgcactgcggccatgatgtctcccatgggtggttttaaggacagcggttacggcaaacacaacggctttgccacgatccgggagttttcaaggctcaagaacgtggtagtggattactcaggccaaaagcaggacgccttcgtcatcaggctgcgctagc

SEQ ID NO: 214371 - DNA, 1435 bp, Unknown
  Bacterial polypeptide expressing nucleotide sequence isolated from the Sargasso Sea
aatgctagaaaaaagaaatttttatataaatggttcgtgggttgctccaaaaaaatctagtgatattgaagtaattaacccagcaacagaaaaagcttgtgcagtaatttcccttggtagtaaagatgatgttaatgatgcagtactgtctgctaaagaagcatttaaaacttggggatattcaactagagaagatagaattgctctgttagaaacattttacactttatataagaaaagatggaatgatataacagatgctattattcaagaaatgggggcacccagagatttcgcatcaaaacttcaaacaggaaccggcgcaagtcatactaaatcttttataagatatctaaaagagttcgaatttgaaaaaccattaggggagcatgcaaaaaatcaaagattgatatatgagccaaaaggagtttgtgctttaattactccttggaactggccaatgaaccaagtcactctaaaggtaatccccgctttagcatctggttgtactatgattttaaaaccatcagaactagcgccgctttcagctatgatactcgcagaactaattgatgaagcaaaatttccaaaaggggtgtttaacttagtaaatggcgatggagctacaactggcgatgctttaacaagtcatccagatgttaatatgatctcatttacaggatctactagagcaggtgcgttgatatctcaaaatgccgctaaagactttaaaagagttagtttagaactagggggcaagggagcaaatattatctttaaagatgcagatcctgaagccattgaaagaggagctttaagatgttttagaaattcaggtcaatcttgtaatgctccaacaagaatgttggttgaaaaatctatgtatggtgaagcaatagaaagactaaaaaaatatacaaatgaatttaaagtggatgatccaaaaaaagaaggcgaacatataggccctgtaatttctgaaactcaatataataaaattcaaacattaattcaaaaaggaatagacgagggtgcaaaactagtcgctggaggccccggaaaaccagaaggtatgaatgatggttattatgtaaaacctactgtatttgcagatgtaaacaaccaaatggaaattgccaggactgaaatatttggtcctgttttatctgtaataccatttgaaactgaggaagaggcaatagaaattgctaatgatactgattatggtttaactaattatattcaaagccaagactctgaaaaaatcagaagacttgctagaaaactaagatctggaatggttgatgtaaatggtgcaggtattgctgttgatgcaccctttggtggctttaaacattctggtattggaagagaagcaggtaaagaaggtttgcttgagttcttagaagtaaaatcagttggtggttggagttaa

SEQ ID NO: 214372 - DNA, 1489 bp, Unknown
  Bacterial polypeptide expressing nucleotide sequence isolated from the Sargasso Sea
tatgagctcaggtaataaatataaatcaatagccaataaacttaaatttgaaggaagagcattcattaatggcaaatatgtaaatgcaatcgatggaaaaaagtttgaaacaatcaacccagcaactggtaaaaagctttgtgctgttgcaaaatgtaatcataaagatgttgatttagcagtaaaagtctcaagaaaagctttcaatagtggagtttggtctaagagttcacctgaacacagaaaagaagttttgttaaaatttgctgaactactcagaaaacatggtgatgaaaattcagttttagaatgtatagatactggtaaacttatcgcagactgcattaatgaagttgcaaatgatgcaccaatgcattttcagtggtatggagaattaattgataaagtatttggaaaagttggtccaactgaaccatccattacaagtttaattgttaaagagccaataggagttgttgctggaattgttccttggaactttcctttaatgatggctgtgtggaagatggcaccagctcttgcagctggttgttcggtaattataaagccagcagaagatacacctcttacagcgattagagttgcccaaattggaaaagaagctggaataccagatggtgttttaaacgtgcttccaggttacggtgatgttggggaagctctgggtcgacataaagatgttgatgcagtatcttttacaggctctaccgaagtaggtggttattttttaaaatactcaagtgaaagcaatttaaaacctgtcgcattagagatgggtggaaaaagtccatttatagttttagaagatgctaaaattaatgatgatttaattgataatgctattaattctgcattttggaatggtggacaaaactgttcagcaaatatgagacagatagttcataaaaaagtaaaagatgaatttttagataaagttattaaaaaagttaaaaaattaaaagtaggagatccattagatttaaaatcaaatatgggatctatgatttcaaaaggacatttacaaactgttgatggatatatccaaaaaggaatagatgaaggagcgaaacttttaacagggggagtttcaagtaaaaagcaaaaaggtttttatgcaaaaccaaccctatttgatggattaaaagaagatatgaccatcgctcaagaggaaatttttggaccagtgcttggtgttttaacggttaaaaacgatgaggaggctttgaaaattgctagtaattcgaagtatggattacatgctagtgtatttacacaggacataaatagagcgtttcatttagctaaaagtttgccttgtggaactgtatcagtaaatacattttcagaaggagatattaaaactccatttggaggctataagcaatcaggttcattaagcagagatcaaggtaccgaagccctaaattcgtttcttcaaacaaaaacaatttggataagtcatagttaa

SEQ ID NO: 214373 - DNA, 1438 bp, Unknown
  Bacterial polypeptide expressing nucleotide sequence isolated from the Sargasso Sea
aatgaaacaatataaacattatatcaatggtgagtgggtagatagttgtaaaaaaaataaaaaaatttcagttttaaatccagctaatgaagaagttattggcgaaattacagctggtatagatgaagatataaatagagcagttgaggcagcaaaaaaggcatacctttcaagagttttggttgacatgaatcctatggagcgtgcaaaactcatgaggcgtatcgcagatgaaattagaaaaattagtaaagaaggcggggcattattatgcgctgaaaacggaaaacttttatcagcatcagaaaatgaatttcatgaggcggcaaattattttgattattacagcggcctgacagacaagattgaaggccaaacaataccagttaacagtcaggtaatggattatactgtttatgagccttatggagtttcaggtcacattgttccttggaactttcccatttcaatgatagctcgttcattagcttgttcttttgctgctggaaactcaactgtaataaagccagcagagctaactcctcttgccacaagctcattttttgcccaagcagttcataatgcaggagttcccaagggtttaataaatatcgtaacaggttatggaaatgaagcaggcgaagctctgattaatcatcaagatgttgcgcaaattactttcacagggtctgtgaaaactggaaaagttatacttcatgctgctgcagaacgtgccgttcctgcggtcgttgaactcggtggaaagtcggctgcagtagtattgccagacgccgatattaacaaagtagtcaatgccacaaaaattggcatctttagccaagctggacaaatttgttcagcaatgtcacgtatgattgtacacaagtcaattaaagatgaagtattggatcaattgtataaattagctggctctctaaaaattggagcgggtaacgaagagggtgtagacttaactcctataatatcagaagatcaattacaaaaagttgaaaactacgcacgctcaggtttacaatctggggcaaatgcagtttttggagggaaaagggttgatcgaaaaggatacttctttgaaccgactatctattctgatgtcaaatctgacatgacaatagctcaagaagagatatttggtccatttttatcagtactagaatatgacgactatgatgaagcagttgaaattgcaaatgatacaaaatatggtcttgctgctggggtattcacaaatgacattgatatggctacaaaaacagcttctgacttaaacggaggacaagtgtatgtaaatagctggtttaccggaagcattgcaacaccattcggaggctacaaacaatcaggctatagtagggaaaaaggtcaacaagcaatcaaaagctatttgcagttaaaaaacgtaggtattcaactgtaa

SEQ ID NO: 214374 - DNA, 1285 bp, Unknown
  Bacterial polypeptide expressing nucleotide sequence isolated from the Sargasso Sea
ggcagccaaaaactcttttttagcttggtggggtacttcaaaagaaaaaaaacttgagctactaaataatttattaaacatttatcaaaaaagatctgcagatatggctcaagcaatttctcttgaaatgggcgctccaaaggattggtctattaatgagcaaagtcaatctggagaggatcatataaaaacttttattaatcaatatcaaaattttgaatttgaaaattatttggatcaggaaaaaggaaattatatttcttatgagcccattggtatttgtgcactaattacgccgtggaattggccaattaaccaaattgcactaaaagtattgcctgcacttgcagctggttgcacaatgattctcaaaccatctgaaatcgcaccgttgtctgcaatgttgtttgctgaaatgattcatgaagcaggttttccgaaaggtgtttttaatttggtcaatggtgatggaccaggtgtaggaacgcaattatcaagccatcctgatattgacatggtttcctttacaggttctacacgcgctggaaaattaataactaaaaatgccgctgatacgattaagagagtatcgttagagctcggaggtaaaggcgcgaatattgttttcgcagacgcagatgaaaaagctgtaagaagaggagtaagaagagtttttaataattctggtcaaagttgcaatgccccaacacgtcttcttgttgaaaagtcaatttatgaaagagcaataaaagaagcaattgaagtcgcagaaaaaacagatgtagatattgctaataaagagggtagacatatcggaccagtagtttcaaaagtacagtatgataaaattcagaatctgattaatgaaggcattaaagaaggagctaaacttgttgcaggtggacctgataggccttctcatttaaaaaagggttatttcgtaaaaccaacagtatttgcagacgtaaataatgaaatgacaatagctaaagaagaaatatttggtccagttgtgtcaataatacctttttcaactgaagaagaagcaataaaaatctctaatgatacagcttatggtttaactaactatattcaaactaatgatactaataaagctcatagagttgcgagacaactgcgctctggaatggttgaaattaatggtgcaggttttgctgatggatcaccatttggtggatacaaacaatctggtaatggccgcgaaggtggtaaatggggaattgaagaatttttagaggtaaaatccattagtggatggaaataa

SEQ ID NO: 214375 - DNA, 1411 bp, Unknown
  Bacterial polypeptide expressing nucleotide sequence isolated from the Sargasso Sea
atgaataaagttctgaatgaacaaaaagatttttttataaaaaacggatcgccctctgttgaattgcgtatagatagattacaaagattaaagaccttaattatggataatagatatgattttgttgatgctttaaatactgattttggaaatagatctaataacgcctcaatgttgtcagatgtttatgggataatgcctgcaataaatttagcaatcaaaaatgtaaaaaaatggagtaaaccagaaaaaaaatcatcaaattttccctttggtttgttaggagccaaatcttacgtaaaatatgagccacttggtactgttggtatgatttcaccatggaactttccagtaaatttaacattcgtaccactggtatcaatttttgctgcgggtaatcaggtaatgcataaacctagcgaacatacgccagttacatcagctcttttgaaagatctatgtgataaaacatatgatcaaaatgaatttgcaactttcttagggggacctgatgtaggtgaagcttttacaaaattaaattttaatcatcttctttatacaggcggaggtgaagtagcaaaacatgttatgaacgcagcatctcaaaacctagttccatgtactcttgaacttggcggcaagtctccagttgttattggtaaatctgctgatttaaaaacctccgcaaaaagaataatgtttggtaaaacaatgaatgctggacagatttgtttagcgcctgattatgtcattgttcataaagataaaaaggatgactttataaaagaaacaaaagatgcagttacagagtactttccagacatcaagaataacgaagattacacttcaataattaatcaaaaacattacgatagacttaaagatttattggatgatgcgattgctaagggagctaatgtcgatgaaataaatccagcaaatgaagatttttctcagcaagagttttataaaataccgcctacaattgtcaccaatacaacagatgatatgaaaataatgcaagaagaaatttttgggcctatattaccagttgttgaatatgaagaaattgatgaagcaacaagattgataaattccaaagatagacctcttggtctctactactttggaactgataaaaaagaggaagataatatcttaaataatacatcctctggtggtgtaacagttaataacgttattagtcatttacaacaaaatgatctatctttcggtggtgtgggaccatctggaatgggaagatataaatcatttgatggttttaagaatttctcgaatccacgtgcatattttaaggacgtaagctttaaattagataaattttttgacgcagtaagaccaccatataaaggaaatattgagaaagttttacaacaactgatgaaataag

SEQ ID NO: 214376 - DNA, 1444 bp, Unknown
  Bacterial polypeptide expressing nucleotide sequence isolated from the Sargasso Sea
atgtatagtaaatttggacaattcatcgatggaaaatggcaacaagctgaaaaaaaagaaacttacgatgtaattaatccggctacggaagaaataattggaaaagcatcaaaagcatctcctgccgatgtagacaaatctcttaaatctgctgaaaaaggtttaaaagtctggagaaatactccgccttggcaaagagcatatataattagaaaaatagctgatttaatgagagaaaaaaaagacgttctagcaaaatggcttacacttgaagttggtaaaccacttgcagaaggaattggagaagttggaggttcagctgatatatttgaatggaatgctgaagagacaaaaagaatttatggacaaacagtagaaagtagatttcctgatacaagggtacacgtttattatcagcccgttggtgttgttgcagctttagttccttggaattttccacttgtcttggcttcaagaaaaatttctactgctttggctgctggatgttctgtgatttgtaaacctgatgttataacgccaggtacagtaatggaattagttgatatttgtagagaggctggcgtgccgccaggggtggtaaacctactatcaggagaccctccagctatagctgaacaattaataaaatcaaatattgtaaaaaaaatatcagttactggatctacaagagttgggaagttaattttaaaacaagctgctgataaagttcaaagggtaacaatggaacttagtggacattcaccttttatagtttttgatgatgctgatataaataaagcaacagatatagccataacatctaaatttagaaataatggacaagtttgtatttctcctaatagattttacattcaagaaaagaaaaaagatgattttataaactcttttatcaataaggcaaaaaaattaaaaattggtaacgggatggacaaagatgttcaactaggtcccttaactactcaaaaaagattaaatgaagttgaacagcttgttgaaactacaaaaaaagaaggtgctaaagttttaatgggaggaaaaaggcctgctggatttaacaaaggttatttttatgaacctacagtttttgataatgtaaaagataattttacaattatgaaagaagaaccatttggacctttggttccaatattgtcctttaaaaattttgacgaagtaatagaaaggtcaaataataatgacttgggactatgtagttatatttgtacaaattctatggagcaagctcatcgagcttctgagttaatggaaactggtgttgttgcagtaaatacacccgttgttgctattgctgaggctccatttggtggaataaaacaaacaggttatggtcgtgaaggtggatctaatgcaattaaagattatttaaatgttaaatatactcaccttggaattaaaggttaat

SEQ ID NO: 214377 - DNA, 1123 bp, Unknown
  Bacterial polypeptide expressing nucleotide sequence isolated from the Sargasso Sea
atgtatagtaaatttggacaattcattgatggaaagtggcaacaagctgaaaaaaaagaaacttatgatgtaattaatcctgctacagaagagctgattggaaaagcctctaaagcaagttcaatcgatgtagaaaaagcattaaagtctgcggaaaaaggtttgaaggtatggcgtaatactgcgccgtggcaaagagcatatattattagaaaaattgcagatttaatgagagaaaagaaagaagttcttgccaaatggttaacacttgaagttggcaaacctatagctgagggaattggtgaagttggtggagccgcagatatttttgaatggaatgcagaagaaacaaaaagaatttatggacaaactgttgaaagtagattcccggatacacgggttcatgtttattatcagccagttggagtagttgcagctttagttccttggaactttccccttgttttagcttcaagaaaaatttcaacagcgttagcagctggatgttctgttatttgtaaaccagatgtaattacccctggctgtgtaatggaattagttgatatttgtaaacaggctggtgtaccagctggagtagtgaatttattatcgggagatcctcctgcaattgctgaacaattaataaaatctgacataattaaaaaaatatctgtaactggttctactagagtcggtaaattaattttaaaacaagctgcagataaagttcaaagagttacaatggaacttagtggtcattcaccttttattgtttttgatgatgcagatataaataaagcaacagatatggccataacatcaaaatttagaaataatggccaagtttgtatttctccaaatagattttatatacaagaaaaaaagaaagatgaatttattaatgcttttataagtaaggcaaaaaaattaaaaattggtaatggaatggataaagacattcaattaggtcctttaactacaaaaaaacgacttgaagaagtagaaaagttagttgaagtaacaaagaaagaaggcgctaaagttttaatgggtggaaagaggccagccggatttaataaaggttttttttatgaacctactgtttttgatggtattgaggata

SEQ ID NO: 214378 - DNA, 1468 bp, Unknown
  Bacterial polypeptide expressing nucleotide sequence isolated from the Sargasso Sea
atggacaatttagataatttaaaaaaattaatatggttcgatcctcaaaaatgttttattgacggtgtctggcaggatcccaattcaaataattacttacctttattaaatccctctagtggtaaagaaatatgtagaatagcaagatgctctgttcaggatgtcaatttagctgtttcagcagcgaggcactcgcttgatggtgagtggggacaatttactgcccttgaaaggggaaggattcttcaaaaaattggtttccttgttagagataaaattgatctcctatcaagaattgagtcaattgatgttggcaagccattatcacaatccaaagcagatgcaatagccttagcaaggtatttagagttttattcaggggctgctgataaaatacatggtgacactattccgtatcagaatggttatacggtatatactcttaaagaacctcatggtgtaactgctcatataattccatggaattatccaatgcaaattattggtcgttcagtaataggtgctttgactatggggaatgctgtagttttaaaaccatctgaggacgcttgcttaacagcgcttgcatttgcagatatatgtagagaggctaaccttccaaaaggtgcattaaatgttgttactggttatggaagtgaaacaggagaaatattaagtaaacattctggaataaatcatatatcttttacaggctcagttccagttggtacacaaattcagaaaaatgccgcagaaaatattgtaccagtaacattagaattgggtggaaaatccccacagatagtcttttcagatgcaaatattagtcaagccataccttttcttatgaaagctgggcttcaaaatgcagggcaaacctgttctgcttcatcgcgaatattaattcaaaaatcaatttataataaagttgaaaaggccttagctgatgaatacaaaaatttgactataggccctgctattcaagactttgatttaggtcctttgatttctaaaaaacaagtaaatatggttcaaaaatatttgaatttaggtttagatttgaaaaaaatagctgaattaaaaataaatgacaaattagaaaatgggtcttttatttctcctactttatttggaatggttgaccccagtcatgcacttgctcaagaagaaatatttggtccagttcaagttttaataccttttgatgacgaggaggaggccattaaaattgcaaacggaaccaaatttggtttagttgcgggtatttggacaaatgatggttcacgtcaattgagaatggcaaaaaaaataaaagcaggtcaagtttttattaataactatggagctggtggaggagtagaactaccttttgggggaacaggtcactcaggttatggaagagaaaagggatttgaagcactgaatagtttttcaacgattaaaacaatagcaatcaatcatgggtaaa

SEQ ID NO: 214379 - DNA, 1444 bp, Unknown
  Bacterial polypeptide expressing nucleotide sequence isolated from the Sargasso Sea
atgtacgaaaaatacggacaattcactgatggtaaatggcataaatcatcaaatggcgaaacttacgaagtaattaacccagcgactgaagaagttttaggccaagtctcaaaagcatcgcccgaagatgtaaacaaagcattattgtctgctcaaaaaggattagaagtttggagaaaaacaccaccatggcaacgtgcttatattttaagaagaattgctgacaagatgagagaaaaacaagacatacttgctaaatggatgacactcgaagttggaaaaccgtttgcagaagcaaaaggcgaagttaacggtgctgcagatatttatgagtggaatgcagaagagacaaaaagaatttatggtcaaacagttgaaagtagatttgaagatacaagagttcatgtttattatcagccagttggcgttgttgcagctttagttccatggaatttccctttagttctctctgctagaaaaatttctacagcccttgcagcaggatgttctgtgattgttaaacctgatgtaataacaccaggtgttgtaatggaacaagttgaaatttgtagagagtgtggagtgcctcctggagttgttaatttattatcaggagacccaccaagtattgcccaacaattaatcgcttcagatattgttaaaaaaatatctataacaggctcatcaagagttggtaaattaattctaaaacaagctgcagataaagttcaaagagtaactatggaactaagcggacattcaccttttatagtttttgatgatgccgatattaaaaaagcagctgatatggcaattgctgcaaaatttagaaataatgggcaagtttgtatttcgccaaacagattttatatacaagaaaagaaaaaagaagaatttgtaaatctttttgtagaaaaaacaaaaaaattaaaaattggtgatggtatggatccatcagttcaacttggtcctttaacaacaaaaaaaagattaaatgaaattgaagatttagtcgaaactacaaaaaaagagggtgcgaaagttttattaggtggcaaaagacctaaaggatttaataaaggattttattacgagccaactatttttgacgatgtaaaagatgattttacaattatgaaggtagagccatttggccctttagtaccaatgctatcatttaaagaatttgatgaagttatagaaagagcaaacaatcacgaacttggattatcaagttatatttgtacgaattcaatggagagagcacaccgtgcatctgaattaatggagacgggaacagttgcagttaatacacctttagtcgcaattgccgaagcaccatttggtggtataaagcaagcaggttatggaagagaaggtggttcaatggctattaaagattatttaaatgttaaatatactcacttaggaattaaaggataaa

SEQ ID NO: 214380 - DNA, 1396 bp, Unknown
  Bacterial polypeptide expressing nucleotide sequence isolated from the Sargasso Sea
tctgataattcaacatacgaagttattaatccggcgaatgaagaagtaataggtcacgcatcaaaagcaacatcagttgatgttgataaagcattaaagtctgctgcgaaaggtttagaagtttggaagcaaacaccaccctggcaaagatcttatattattagaaaaatagcagacaagatgagagaaaaacaagatgttctagcaaaatggatgacgcttgaagtgggtaaaccatttgcagaagcaaaaggtgaagttggtggagcagcagatatttttgagtggaatgctgaagaaacaaaaagaatttatggacaaacagttgagagcagattcgcagatacaagagtgcatgtttattatcaaccaataggagttgttgcagcactaacaccatggaatttccctttagttttgtctgcaagaaaaatttcaacagctttagcagctggatgttcagtaatagttaagccagatgttataactccaggtacagtaatggaacttgttgatatatgtaaagaatgcggagttcctgcgggagtggtaaatttattatccggagaccctcctagtattgcacaacaattaatttcatcagatattattaaaaaaatttcagtaactggttcaacaagggttggaaaattaattcttaaacaagcagcagaaaaagtacaaagagttactatggaacttagtggtcattctccattcattgtttttgatgacgcagatattaaaaaagcaactgatatggcaataactgcaaaatttagaaataatggacaagtatgtatttccccaaatagattttacattcaagaaagcaaaaaagatgaatttgttaaattatttgtcgaaaaaacaaaaaaattaaaaataggtgatggtatggatcctaatgttcaacttggtcctttaacaacaaaaaaaagattaaatgaagtagaggaactagttgaaactacaaaaaaagaaggtgcaaaagtactattaggtggaaaaagacccgctggatttaataaaggttattactatgaaccaacagttttcgacaatgtaaaggacgattttacaattatgagagtagaaccattcggtccattggtgccgatgctatcttttaaatcatttgatgaggtggttgaaagagctaataataatgacttaggtcttagtagctatatatgcacaaattctatggaaaaagcacacagagcttcagagctaatggaaacaggaacagttgcagttaatacacctttggtagcaatagcagaagctccttttggcggtattaaacaaactggatatggaagagaaggtggctccatggctattaaagattatttaaatataaaatatactcacctgggtatcaaaggttagt

SEQ ID NO: 214381 - DNA, 1414 bp, Unknown
  Bacterial polypeptide expressing nucleotide sequence isolated from the Sargasso Sea
tatgcatagagtgttggagcttcaaaagagcttaaatattaaagaaggagcccctagcttagaacttcgtgctgataggcttgatagagtagtttctatggtaatgaaatacgaaaaggaaattatttctgccttacaagaggattttgggaatagggatccagtaatgtcagcagctactgaggttggttcagtagtaggccccatgattcacgctaaaaaaaatctaaaaaaatggatgaaaactgaaaaaagaaaggcagctattgctcccttgggttctgctttatctttacttggtgcaaaagcagaaattagataccaacccaaaggtgttgttggagcaattagtccatggaactttccactaaaccttgctttggctccattagctggaattttgtcatctggtaacagagttatgctaaagccatcagaactaaccccagcatcatctgagctaacaaaatcaatgattgaagaatcttttgatgaatctgaaatagcagtttttactggtgatcctgaagtaggtgcggcatttagtggacttgcgtttgatcatttaatatttacaggcggaacggctattgcaaaacatgtaatgaaagcagcttcagaaaatctagttcccttaactctagaacttggaggcaaatctccagtagttgtcggtaaatcttcaaaaattaaggaaactgctaccagagttatgcaaggcaaaacaatgaatgccggtcaaatttgtttagcacctgattacgctctagttccggaagatagcgtagaagagtttgttcaggcctctgttgatgttacttctgaaatgtatcctgacatgaaagacaatgaggatttcacttctattattaatcaaaaacattatgacaggattcagggctatatttctgatgctaaagacaaaggagctgatgtagttgagataaatcctgcaaatgaagattttagtcagcaacctcatcataaaatacctccaactttgattttaaatcccactgaagatatgcaagtaatgcaagaagagatctttgggccagtattgccagtaaagacttataaagatgtttctgaaacagtagattacatcaatagtaaggatcgacctttgggactttactattttggagaagacacaaaagaaaaggattttgtccttgataatacaacttctgggggcgttactgtaaatgatgtgatttctcatatcacgatggaagatttaccttttgggggagtaggcccaagtggtatgggttcatatcatggatatgatggttttaaagaattcagtcacgctaagtctgtctataagcaatcttggttaaatttaaataaattagctggtttggtgccaccatataaaaagaaagaagataaaataaaatctgcttag

SEQ ID NO: 214382 - DNA, 1273 bp, Unknown
  Bacterial polypeptide expressing nucleotide sequence isolated from the Sargasso Sea
aatgttagataaaagaaaattttacattaatggtcaatgggttgatccaataaaaaaaaatgattttgaagtcattaatccatgcaatgaggacccttttgctattatttctttaggttcaacagaagacacagatttagctgttaaatcagcaaaaaatgcttttgaaagctggaaagaaacaagcaaggaagaaaggctcagtttacttgaaaaattattatcagtttataaaaaaagatttaatgaaatggctgaagctatttctcttgaaatgggtgcaccaatggattgggcaacaggtgttcaaacggcttcaggtagagaccatttagatgattttattttaagattaaaaaattttaaatttgatgaacattttaataataaatcaaataatcatatctattatgagccaattggagtttgtggattaatcacaccatggaattggccaatcaatcagattgctttaaaagttgttcctgcattcgcaactggatgtacaatgattttaaaaccatcagagatagctcctatttcaggaatgttatttgcagaaatgattgatgaagtaggttttccaaaaggagtatttaatttagtaaatggcgatggtgcaggagtagggactgatatttcaggccacccagatattgatatggtttctttcacaggttcaacaagagcaggaaaattaatttcaaaaaacgctgcagaaacaatcaaaagagtttgtcttgaattaggtggtaaaggtggaaacattgtttttgctgatagttataaagatgcagtaagagatggtattagaaatgtaatgagtaattcgggtcaatcttgtgatgcgccaacaagaatgctggttgagaaatcaatttatgaaagagctgttaaagaagcagtagatgaagcaaacaatattaaagtagatcaagcttcaaaaaaaggaaatcatataggaccagtaatttctaaaattcaatatgataaaattataaatcttattgaaagtggaatttctgaaggtgcaactcttgcggcaggtggacctgagttaccaaacggtttaaacaaaggatactttatcaaaccaactatatttacagatgtaactaatgaaatgagaattgctaaagaagaaatttttggacctgtattatctataattccatttgaaactgaggatgaggcagtcaaaattgtaaatgatacttcttacggtcttggaaattatttgcaactgaggatagagaaaaagcacatcgtgttg

SEQ ID NO: 214383 - DNA, 979 bp, Unknown
  Bacterial polypeptide expressing nucleotide sequence isolated from the Sargasso Sea
tctcggattcactcccgcgaccaatagcgtcatcaagcaattgctcgctgaagtgtttgaggaatcccatgttgccgtggtcgaaggggaagccgatgtcgcggcgcagttttccgccctgcccttcgatcatctgctgttcaccggttcaaccacagtcggtcgccatgtgatgcgcgccgccgctaataatctcacgccagtgactctcgagctgggcggtaagtcgccagtgattatcgcccccgatatgccacttgagatagcagtagaacgaatgatttatggtaagtgtttgaatgcaggacaaatctgtgtagcacctgactatgtgctttgccctaaggcgaaagtggcagaatttatccaagcctatcagacgaaattccaagccatgtacggcgccattactcataacaaagactacggcagcattattaacacccgccagtttgagcgtctgctaaccgtgcttgaggatgcaaaggctaaaggggctaaggtgatccccgcctcgaatgacacgattgatagccagcatcgtaaactcgctactcagctcattactgacacaactgaagatatgctattgatgcaagaagaaatcttcggcccactgctgccagtgattggttatgacagcctagatgaagccattagttatgtgaaccatcgcgcccgccccttagccctgtatgtgatgagctttgatgaagcgagccaacaaaaaatcctcaagcaaacccattccggcggtgtgtgcatcaacgaaaccgtgttccatgtggcggccgatgatgctccctttggcggtatcggtccatcggggatggggcattaccacggcaaggaaggattccttacctttagccacgctaaaaccgtactcagtcgaggtcgcttcaacacgggtaagtttgtccatcctccctatggcacttttatccaacgcatgttgatgaagctgtttttacgctaa

SEQ ID NO: 214384 - DNA, 1471 bp, Unknown
  Bacterial polypeptide expressing nucleotide sequence isolated from the Sargasso Sea
tataaagtaatagcaagtaaacttaaatttgaaggaagagcattcattaatggtaaatatgtaaatgctattgatggtaaaaagtttgaaacaatcaatccagcaactggtaaaaatctatgtactgttgcaaaatgcaatcataaagatgttgatttagcagtaaaagtttcaagaaaagcttttaatagcggtgtttggtcaaagagctcacctgaacatagaaaagagattttattaaaatttgctgaattacttagaaaacatggtgatgaaaattcagttttagaatgcatagatacaggtaaacttatcgctgactgtattaatgaagttgcaaatgatgcaccaatgcattttcagtggtatggagaattaattgataaagtattcggaaaagttggtccaactgaaccctctataactagtttaattgttaaagaaccaataggagttgttgctggaattgttccttggaactttcctttaatgatggcagtatggaaaatggcaccggctcttgcagctggatgttcagtaataattaaaccagcagaagatacacctcttacagcaattagagttgctcaaattggaaaagaagctggaataccagatggagttttaaatgtgctccctggttatggtgatgttggcgaagctttaggtcgacacaaagatgttgatgcagtttcttttacaggttcaactgaagttggtggttattttttaaaatactcaagtgagagtaatctaaaacctgtagcattagagatgggaggaaaaagtccatttatagttttagaagatgctaaaattacagatgatttaattgataatgccatgaattctgcattttggaatggtggacaaaactgctcagcaaatatgagacagatagttcataaaaaagttaaagatgaatttttagacaaagttattaaaaaggttaaaaagctaaaagtaggagatccattagatctaaaatcaaacatgggatctatgatttcaaaagtacatttgcaaactgttgatggatatatccaaaaaggtatagatgaaggagcaagacttttatccggaggagtttcaagtaaaaagcaaaaaggtttttatgcgaaaccaacactatttgatggattaaaagaaaatatgactatcgctcgagaggaaatttttggaccagttcttggtgttttaacagttaaaaatgatgaggaggctttgaagattgctagtaattcgaagtatggattacatgcaagtgtttttactcaagacattaatagagcatttcatttagcaaaaagtttgccttgtggaactgtatcagtaaacactttttctgaaggtgatatcaaaactccatttggaggttataagcaatcaggatcactaagtagagatcaaggaactgaggctctaaattcatttcttcaaactaaaacaatttggataagtcataattaat

SEQ ID NO: 214385 - DNA, 994 bp, Unknown
  Bacterial polypeptide expressing nucleotide sequence isolated from the Sargasso Sea
atgctaaagccttctgaacttactccttcgtcatctgatcttacgaaatatatgatagaagagttttttgaggaatcagaaattgcagtatttaccggtgatcctgaagttggagctgcatttagtggacttgcttttgatcatttaatttttactggtggcactgctattgcaaaacatgtaatgaaagcagcttcagagaatttagtgcccctgactctagaacttggaggtaaatctccagttgtagttggtaaatcttctaaaattaaagagacagctaccagagttatgcaagggaaaacaatgaatgcaggtcaaatttgtttagctcctgattatgctctagttcctgaagatagtgtagatgagtttgtacaagctactgttgatgtgacttcagagatgtatcctgatatgaaagataatgaagacttcacgtcgattattaatcaaaagcattatgatcgtattcaaggttacatttctgacgcaaaagaaaaaggagcagatgttgttgagattaacccttctaatgaagattttagtcagcaacctcaccataaaataccccctaccattattttaaatcctactgaagatatgcaagttatgcaggaagagatttttggacctgttttaccggtaaaaacatacaaagatgtttctgagacagtagattatattaatagcaaggatagacctttagggttgtattactttggtgaagactctaaagaaaaggattttgttcttgataatactacttctggtggcgttactgtaaatgatgttatctcccatataacaatggaggatttaccatttggtggagtaggtcctagtggaatgggctcttatcatggacatgatggctttaaagaatttagtcatgctaaatctgtatataagcagtcttggttaaatctaaataaactcgcaggtttagtacctccatataaaaagaaagaagataacgcgaaatcagcctaat

SEQ ID NO: 214386 - DNA, 1219 bp, Unknown
  Bacterial polypeptide expressing nucleotide sequence isolated from the Sargasso Sea
aatcggaaaaatcgaaaccaatgatagcggaaaacttctggcagaaactgctacccagacccaatatgtagctgaatactatcgttattttgccggcttggctgataaaattcagggctcaactctcccaattgataagcctgatatgcatgtctttacctcatgtgagcctattggtgttgttgctgcggttgttccttggaatgcacaaatgtttttaacggcaaccaaactcgcaccggcacttgccgcggggtgtacaataattttaaaagcatcagagattgcaccatgttctctattgtattttgccagattgattaaggaagcaggcattcctgatggagtggtttccatcattacaggagacgagaaaaactgtgcaatcccattgaccacgcatcctgatatagatcgtattgcatttacgggagggccaaaagttgcgaagcaaatagtaattaattcctctgagaacttcgctgtcaccacattagaattgggaggaaaatcccccatagttgtgtttgaagatgctgatattgaaggagcggtaaatggtattattgctggcaattatggtgcatcagggcaatcgtgtgttgctggtacaagagtaatcgttcatgactccataaagaaggtgttagttgaaatgctgtcaaagcgcgccgaatcaatcgttaccggcgatcctaaaaataatgaaacacatgttggacctttgtgcacaaataaacaaataaacctcattgaaaaaacacttaaaaaagcccaatcccaaggagcaaaaattgtatttggcggttctcgtctcaaccaaaagggatactattttgaaccaacactcatagattgcccaaatgaatctattgtatctcttgaaacagagatgtttggtcctgttgcctcactcttgacttttaaggatgaaaagcaagcaataaaaatggcaaacaatactaaatacggactcgggtctggattatttaccaacaacttggcacgagcacatcgcgtatcaaaaaaaattaaagcgggtatatgctggattaacagttatcgtgctatttcaccaatcgcaccatttggtggatataatcaatcgggttatgccagagaagcgggcatggactctataaacgattacatcaggacaaaaacaacctggataaatatttcaaatgaaccaatgaaaaatccgtttgtgatgcgctaa

SEQ ID NO: 214387 - DNA, 1459 bp, Unknown
  Bacterial polypeptide expressing nucleotide sequence isolated from the Sargasso Sea
aatgaattcacccgttgttcacctgatgcaagccggccggctcgatcgcttcttcatcgacggcgactgggtgttgcccgacggcagtgaccggttcgcggtcgtcagcccgtccaccgaagacacgctgggcgagatcccgctcggcagcgcgcgcgacgccgaccgcgcggtgcaggccgcgcgccgcgcgttcgagcgctggtccgcgacgtcaccgcaggaacgcgccgcgctgctcgaccgtgtgcatgcattgatgctcgagcgcgccgagttgttcgcgacggcgctcgcgatggaaatgggcgcgccgatcggctatgcccgcggcgcgcacgtgccgctcgcggccgaacatatccgcgtcgcacgcgacaacctcgcgaactacgcgttcgtcaggcagcgcggcacgaccgcggtcgtgcgcgagccgatcggcgtatgcgcgctgatcacgccgtggaactggccgatctaccagatcaccgcgaaggtcgggcccgcgctcgcggccggctgtacggtcgtgctgaagccgagcgagctgtcgccgctcagcgcgctgctgttcgcggaagtgatcgcggatgcgggcgtgcccgccggcgtattcaacctcgtgagcggcagcggcgacacggtgggcgccgcgctgtcgtcgcacccggaggtcgacatggtgtcgatcaccggatcgacgcgtgccggcgtgctcgtcgcgcaggcggcggcgccgaccgtcaagcgcgtcgcgcaggagctcggcggcaaatcgccgaatatcgtgttgccggatgcggacctgtcgcgtgcgatcccgccgggcgtggccgccgcgttccgcaacatggggcagtcgtgcagcgcgccgacccgcatgatcgtgccgcgcaacgtgctcggtgcggtcgaggagttggctgctgcggcggcgcgcacgctcgtcgtcggcgatccgttcgccgaggccacgacgcacgggccgctcgccaaccgcgcgcagttcgggcgggttgcgcagatgatcgacgcgggcatcgacgaacgcgcgaaactgatcgccggcggccccggccggcccgcggagctcgcgcgcggcttttacgcgcagccgacgattttctccgacgtgcgcaccgacatgacgatcgcgcagcaggagatcttcggcccggtgctcgcgatcctgccgtacgacaccgtcgacgaagcggtcgcgatcgcgaacgacacggtctacgggctcggcgcgcacgtgcagggcaccgacaaggcgcaggcccgcgcggtggccgcccgcatccgggcggggcaggtgcatctgaactacccggcatgggatccccaggcgccgttcggcggctacaagcagtcgggcaacggccgcgagtacgggatcgaagggatggaggagtatatggagatcaagtcgatcgtcggcttttacgactga

SEQ ID NO: 214388 - DNA, 1435 bp, Unknown
  Bacterial polypeptide expressing nucleotide sequence isolated from the Sargasso Sea
atgattgaaaagaaaaatttttatattaatggttcatgggttgcaccaaaaaatccaatagatattaaagttattaatcctgcaactgaaaaagattgtgcagtaatctcattaggaggtaaggaagatattaacgatgctgtattagctgcgaaagaggcattcaaaacttggggtttttcatcaaaagaggagagacttagtttattagaaaatttttacgcactttataaaaaaagatggaatgatattacagacgcaattgttcaagaaatgggtgcgccaaaagattttgcgtcaaaacttcaaacaggaactggtgcaagtcatacaaaatcatttattcgttatttaaaagaatttgagtttgaaaaaccacttggagaacatgctaaaaatcaaagattaatatatgaaccaaaaggtgtttgtgcgttaattacgccatggaactggccaataaaccaagttactttaaaagttattccagctttagcttccggatgtaccatgattttaaaaccttcagagttagcacctttatcggcaattataattgctgaactaattgatgaagcaaaatttccaaaaggagtatttaatttagtaaacggagatggagcaactactggcgatgcattaactagtcatcctgatgtgaatatgatttcattcactggttccacaagagcaggagctttgatttctcaaaatgcagctaaagattttaaaagagtcagtttagaactcggtggaaaaggagcaaatattatatttaaagatgctgatgctgaagcaattgaaagaggtgcttttagatgttttagaaattcagggcaatcttgtaatgctcctacaagaatgctggttgaaagaccaatttatgatgaagctattgagagacttaaaaaatatgcaagtgaatttaaagtagacgatccaagtaaagagggtgagcatataggtcctgtaatttcagatgtacaatttaataaaattcaaggcttaattcaaaagggaatagacgaaggtgcaaaattagtagcaggtggaccaggaaaacctgagggattaaaagatggttattatgtaaaaccaacagtatttgcggatgttaataataatatggagattgcaagaacagagatttttggaccagttttatctgtaattccatttgaaactgaggaggaggctattcagattgcaaatgatactgattatgggttaacaaattatattcaaactcaagatacagaaaaagttcaaagagttgcacgaaaacttagatctggaatggtagacgttaatggagctggtattgcagtagatgctccatttggaggatttaaacattctgggataggtagagaagcaggaaaagaaggattgcttgaatttcttgaagttaaatctgtaggtggctggaattaat

SEQ ID NO: 214389 - DNA, 1489 bp, Unknown
  Bacterial polypeptide expressing nucleotide sequence isolated from the Sargasso Sea
tatgagctcaggtaacaaatataaagtaatagctagtaaaattaaatttgaaggaagagcgtttattaacggaaaatatgtcaatgctattgatggtaaaaaatttgaaactatcaatcctgctactggtaaaaaactttgtaccgttgcaaaatgtaatcataaagatgttgacttagcagttaaagtttcaagaaaagcttttaatagtggagtttggtctaaaagttcacctgagcataggaaagaagttttattaaaatttgctgaattacttagaaaacatggtgatgaaaattcagttttagaatgtattgatacgggtaaactaataacagattgtattaatgaagttgcaaacgatgcgccaatgcattttcaatggtatggagaattaattgataaggtatttggaaaagttggtccaacagaaccctctattactagtttaattgttaaagaaccaattggggttgttgctggaattgttccttggaactttcctttaatgatggctgtatggaaaatggcaccagctcttgccgctggttgttcggtaataattaagccagcagaagatacacctcttacagcaattagagttgcgcaaattggaaaagaagcaggaataccagacggagttttgaacgtgcttccaggttatggtgatgttggtgaagctttgggtcgacacaaagatgttgatgcagtttcttttacaggttcaactgaggttggaggatactttttaaaatattcaagtgaaagtaatttaaaacctgtagcattagagatgggtggaaaaagtccatttatagttttagaagatgctaaaatcactgatgatctgatagataatgctatgaattctgcattttggaatggtggacaaaactgttcagcaaatatgagacagatagttcataaaaaagttaaagatgaatttttagataaagttattaaaaaagttaaaaagttaaaagtaggagatccattagatcttaaatcgaatatgggatctatgatttcaaaaggtcatttgcaaactgttgatggatatattcaaaaaggtatagacgaaggagcaaaacttttatccggaggtgtttcaagcaaaagccaaaaaggtttttatgcaaaaccaaccttatttgatggattaaaagaaaatatgacaattgctcaagaggaaatttttggaccagtgcttggtgttttaactgtaaaaaatgatgaggaagcgttgaaaattgcaagtaattctaaatacggattgcatgcaagtgtgtttactcaagacataaacagagcatttcatttagctaaaagcttaccttgtggaactgtgtcagtgaatactttttctgagggagatattaaaactccttttggaggatataagcaatcaggttctctaagtagagatcaaggtacagaagctttaaattcgtttctccaaacaaaaacaatctggataagtcataattaa

SEQ ID NO: 214390 - DNA, 1435 bp, Unknown
  Bacterial polypeptide expressing nucleotide sequence isolated from the Sargasso Sea
tatggaaaataaaaaaaatttttatatcgatggaaaatgggttgctccgaaaagtaaacaagaaataaaagtaattaatcctgctacagaagaaaattgtgcagttatttctttaggtaataaagaagatattgattatgcagtaagttcagcgaaaaaagcttatagtacttgggcattttctcctaaagaagagagaataaggctattagaaaaattgtacgaaaattacaaaaaaagatgggctgatattgctgcagcaattaccacagaaatgggagctcccaaagactttgcaacaaaactgcaagcaggtacaggtgcagcacatctaaaatcatttattagatatttaaaaaattttgaatttgaaaaacccttgggtgaacatgctcctaatcaaagattaatttatgagccaaaaggtgtgtgtgctttgattacgccatggaattggccaatgaatcaagtttgtcttaaagttgcaccagctttagcttctggttgtactatgattttaaaaccatctgaacttgctcctttatcatcaataattcttgcagagttaattgatgaaacaaaatttcctgcaggagtattcaatttagtaaatggagatggtgaaactactggtaatgcactaacaagtcatcctgacgtcaacatgatttcatttacaggctctactcgagctggagcattaatttcacaaaatgcagctaaagattttaaaagagtaagtttagaattaggaggaaaaggagcaaatataatttttaaagattctgatcctgatgctattgaaagaggagctttaagatgtttcaggaattctggtcagtcgtgtaatgctccaactagaatgcttgttgaaaaatcaatgtataatgaagctgtagaaagattaaaaaaatatactgaaaattttgaagttggtgatccaaagaaggaaggagagcatattggtcctgttatttctgaaacccaatacaacaaaattcaaactttaattaaaaagggtatagatgagggtgcaaaattagttgcaggaggtgctggtaaaccggaaggatttgaaaaaggatactttgtcaaaccaacagtttttgttgatgtaaaaaatgacatggaagttgcaagaacagaaatttttggtccagtgttatcagtaatgccttttgaaaatgaagaagaagcaattaaaattgctaatgatactccttatggattgactaattacattcaaacgcaagataaagaaaaagttaaaagagttgcgagaaagttaagatcaggaatggtagacgtaaatggagctggtattgctgtagatgcaccatttggaggttttaaacattctggaattggtagagaagctggtgaacatggtcttgaagaatttttagaagtgaaagctgttggtggctggaattaa

SEQ ID NO: 214391 - DNA, 1190 bp, Unknown
  Bacterial polypeptide expressing nucleotide sequence isolated from the Sargasso Sea
tatggaaaagttggacttttatattgatggctcttgggtgacgccaagtggtgttaaaacactcgatgttataaatcccgcatctgaagaaaaagtcacgaaaatatctatgggtgatgcaagtcatgtgaatgaggctgttcaagcagcacgaaaagctttcgaaacttactctcaaactcccgttgagcaaagaattgatttgctaacaacaattagagaaatttataaacgtcgtcttgatgacgtagcagatgctattcaaaccgaaatgggtgctcccacctatctggctaagggtgcacaagccatggttggtttaggacacttaaaagcagctattcgctctttaaccaatcataatttcgagtatgagcatggaaactttattattagacatgagccaattggcgtttgtggattaatcacaccatggaactggccagtaaatcaggtcgtttcaaaactggcaccctgtcttgcagcgggatgtaccgccatattaaaaccttccgaaattgctccactctcatcaatggttattgctgagatattagatgaagcaaaagtgccagctggggtttttaatcttataaacggcatgggaccagttgtaggtgaagcgatgtcagcccatcctgatattgatatgatgtcttttactgggtcaaccagggggggcgtcgcagttgcaaaggcgtccgctgatagtgtcaaacgagtaagtcaggaactaggcggaaagtcagctaatattattttagacgacgctaattttgaaaaatcaatccgtgctggagttgattcctgtatgagtaatacaggtcaatcatgcaatgcacctacaagaatgttggttccagccgttcgaaaggatgatgcatactctatcgcaaaagatgcagctgaaaaagtaattgccggcgaccctacaaaggacagcacaacaattggtcctctggttagcaatgttcagtatgaaaaagttcaaaatttaatccaaaaaggtattgatgagggtgctgaactattgattggtggcactggaaaaccagacggattagaaaaaggttattacgctaaacctacggtttttggtgatgttcaaaacgatatggcaatttcaaaagaagaaatttttggtcctgttctttcaatgcttacctacgagaatattgatgatgctgtag

SEQ ID NO: 214392 - DNA, 1347 bp, Unknown
  Bacterial polypeptide expressing nucleotide sequence isolated from the Sargasso Sea
tatgggtttaggtggagtaagtgtagcatcagattatcctgaagtttctagggatgaattagagagaattctcaatagtctcaaaaaaagattccaaaatggtgactatcctaattataaagagagaatagatagaataaacagattaaaacttcttgtagaggaaaactcagaagacttccataaggctttacagaatgattttggaacaaggcatgagcaactaagcttactctcagatactttgcctattattgctagcgcaaaacatatttcgaaaaatttaagtaaatggatgaagcctgaaaaaagaaaacctaatttccctctaggattgctaggtgccaaagcatttattcacaatcagccttacggagtagtagggattatctcaccatggaactttccacttaatttgagtttagggccattagttgaagtatttgctgccggaaataatgcaatgatgaaattatcagagtttgttcctgaaacatctgatttgactgaaaagttagtgaaacaatactttaatgatgatgaagtggttgtaattaatggcgggcctcaaacatctcagtcatttgcaggtcttgcttttgatcatttattatttactgggtcaactcatatagcaaaaaaaattgcctatgaagcatctgaaaatttagttcccctcacactcgagctaggcggaaagtcccccgttatcgttggccctaaagctaaaatgaagaaaagtgttgataaaattatgatgggtaaattgctaaatgctggtcagatatgtatttcgcctgattacgtatttcttcctgaaggaaaagaaaatgagtttgttgagcatgctaagtcatatgtacaagagtcatatgaaactctgaagaataatcctgattacacttcaattattcatttgaatcattatgaaagattgagatcatatatttcggatgcaaaatctaaaggagcagaaattgtagaaatcaatcctgctaatgaagatcttacacaacaagaacatcataaaatccctccaacattaattcttaatccaactgatgatatggaggttatgaaaaatgaaatttttggacctatcttgcctgttatgtcgtataaaaattttgatgaaaccattaaatatgtaaatcataaccctaaagcacttgctctttattattttggcgatgatgcaaatgaagtagacgatcttctaaataaaactacatcaggacaacttgtgaccaacgatgttctttttcaattttcaatgcatgaccttccattcggaggagtgggcccaagtggctcagggtcataccatggccatgatggatatcgcaa

SEQ ID NO: 214393 - DNA, 862 bp, Unknown
  Bacterial polypeptide expressing nucleotide sequence isolated from the Sargasso Sea
ctggattttaaaaaccaggcttttattaatggaaactatataaattcagtaactggcaaaacgtttgagagcattagtcctgttgatggatcaataataactagcgtttcagaatgtgacgttgaagatataaacatagctgtcaaagctgcgcgcgatgtatttgaaaaagggtcatggtctagaatggctccttcaaaaagaaaaaaaattctatttaatttcgctgacttaatgaaaaaaaatattctagagcttggcttgctagaaactttaaacatgggtaaacctataactagagcgacaggcgatatagcggcatgtattaattgcacaaaatggtatgctgaggcaattgataaactttatgatgatgtagctccaacaagtgataatttgattgccactatcacaaaagaacctctgggtgtagttggagcagtaactccttggaattttcctttgttaatggcttgttggaaatttgcacctgcgttagcaactggaaatagttttattttaaagcccgcagaacaatcacctttatctgcattaagagttgccgaactagcaatggaggctggtattcctgaaggagtcttcaatgtagtgccaggttatggtcctactgcaggaaaagcattaggaactcacatggatgttgataaacttggatttactggatctactgaagttggcagatattttttatcttacgcaggtgagtccaacatgaagagggtttcactggagtgtggaggaaagtctccaaacataatatttgcagatgcacctgacttagaccatgctgcaaaaatggcagctgatggcatgtttggaaacagtggtcaggtatgtgatg

SEQ ID NO: 214394 - DNA, 1489 bp, Unknown
  Bacterial polypeptide expressing nucleotide sequence isolated from the Sargasso Sea
tatgagctcaggaaataaatataaagcaatatcaaataaactaaaatttgaagggagagcattcattaatggtaaatatgtaaatgctattgatggtaaaaaatttgaaacaatcaacccagcaacaggtcaaaagctttgtgctgttgcaaaatgtaatcataaagatgttgatttggcagtgaaagtttcaagaaaagcttttaatagtggagtttggtctaaaagttcacctgaacatagaaaagaggttttattaaaatttgctgaattactcagaaaacaaggtgatgaaaattcagttttagaatgcatagatacgggtaaacttatcgccgactgtattaatgaagttgcaaatgatgctccaatgcattttcagtggtatggagaattaattgataaagtatttggaaaagttggcccaactgaaccatccattacaagcttaattgttaaagaaccaataggagttgttgctggaattgttccttggaactttccattaatgatggcagtatggaaaatggcaccagctcttgcagctggttgttcagtaattattaaaccagcagaagatacgcctctaacagctattagagttgctcaaattggaaaagaggctggaataccagatggagttttgaatgttctccctggttatggtgatgttggtgaggctttaggtcgacataaagatgttgatgcagtttcatttacaggttcaactgaagtcggtggttattttttaaaatattcaagtgaaagtaatttaaaacctgttgcattagagatgggaggaaaaagtccgtttatagttttagaagatgctaaaattacagatgatttaattgataatgctatgaattctgcattttggaatggtggacaaaactgctcagcaaatatgagacagatagttcataaaaaagttaaagatgaatttttagacaaagttattaaaaaagttaaaaagctgaaagtaggagatccattagatttaaaatcaaatatgggatctatgatttcaaaaggacatttgcaaactgttgatggatatatccaaaaaggaatagatgagggagcaaaacttttgtctggaggagtttcaagtaaaaagcaaaaagggttttatgcaaaaccaacactatttgatggattaaaagaaaatatgaccatcgctcaagaggaaatttttggaccggtgcttggtgttttaacggttaaaaatgatgaagaggctttaaaaattgcaagtaattcaaaatatggattacacgctagtgtttttactcaagatattaatagagcatttcatttagctaaaagtttgccttgtggaactgtatcagtaaacactttttctgaaggagatatcaaaactccatttggaggttataagcagtcaggatcactaagtagagatcaaggaactgaggctctaaattcatttcttcaaacaaaaacaatttggataagtcataattaa

SEQ ID NO: 214395 - DNA, 975 bp, Unknown
  Bacterial polypeptide expressing nucleotide sequence isolated from the Sargasso Sea
ttaatcaagtatgtttaaaagttattccagcacttgcggcaggctgtacaatggttttaaaaccatcagaacttgcaccactatcagcaattattattgcagaattgattgatgaagcaggatttccaaaaggtgtttttaatttggtaaatggtgatggagcaattacaggtgatgctttgacaagccatccagatgtaaatatgatttcatttactggatcaactagagctggagctttaatttcacaaaatgctgcaaaagattttaaacgagtaagtctagaattaggtggaaaaggtgcaaacataatatttaaagatgcagaccctgaagctattgaaaggggtgctttgagatgttttagaaattcaggtcaatcttgtaatgcaccaacaagaatgttggtagaaaaatctatgtatgatgaagctgttcaaagattaaaaaaatatgctgatgattttaaggttgatgatccaaataaagaaggtgagcacataggaccagttatttctgaaactcaatttaacaaaatacagggactaattcaaaaagggattgatgaaggtgccaaactagtctccggaggccctggaaaacctgatggtttaaaagacggttactatgtaaaacctacagtctttgcagacgtaaataatagtatgaatattgctagaacagaaatttttggtccggttttatcagttataccttttgatacagaggaacaagcaatcgaaatagcaaatgacactgattatggtttaacaaattatatacaaactcaagatggggaaaaagttcaaagagtagctagaaagttaagatcaggaatggttgatgttaatggagcaggtattgctgttgatgcaccatttggtggttataaacattctggaataggaagagaagcaggcaaagaaggtttaatagaatttcttgaagttaaatctgttggcggttggagttaat

SEQ ID NO: 214396 - DNA, 592 bp, Unknown
  Bacterial polypeptide expressing nucleotide sequence isolated from the Sargasso Sea
attttatcaaatgatgataaaataatatctgctgcctcatgcacaactaactgtttagcgccagtggttaatgtccttaataataattttgaaatcgaaaaaggttttatgactaccattcatgcatttactagtgatcaaagaattttagacaattctcataaagatccaagaagagcacgagctgcaagccagtcaatagttccaacatcaactggggcatcaaaatcaataggcgagataattccgagcttaaaagggaaattagaaggggttgcaatgagagtcccaactcctaacgtgtcacttgtcgatttgatattctgttcaaaaaaagaaatagatattaaaaaaattaatgatgcttttgaaacagctgctaaatatgaattgaataaaattttagaggttactcatgagaaactggtttccattgattttaatcatcattctgcatctgcaattgtagatgcatctttgacaaatgtggtaggaactaatatgggtaaaatttctgcttggtatgataatgagtggggtttttccaatagaatgtgcgatatagctgagaatttgaataaaatctcttaat

SEQ ID NO: 214397 - DNA, 1435 bp, Unknown
  Bacterial polypeptide expressing nucleotide sequence isolated from the Sargasso Sea
catggaaaaatataataattttattaatggaaaatggatagatagtgaagcaaaggaaattatcaaggtagaagatcctgccactgctaaagtgattggtgaaatatcatgtgctaaacaatcagaagtcgacctagctgtttcagctgcaaaagaatcttttaataaacgtattttagtcgatatgcctttacttcaaagagcaaaattaatgcatcgaattgctgatgaaactcgaaaagtagctgaagaaggaggaaaattattatgttatgaaaatggtaaaactcttgcagcagctataaaagaattcaatgatgttgctgatatgtttgattattatgcaggattaacagataaacttgaaggaaaaacaattcctgtttctcataatgtgtttgattatacagtattagagccttttggagtttcagctcatattgtaccatggaattaccctctatctatgattggtagatctcttgcatgttcctttgctacaggtaactccactgtaattaaaacagccgaattaactcctctttctgcgacagtttttgctaaagcgttacaaaatgctgaagttccaccaggtttgattaatataatttgtggatatgggaatgaagctggttcttatttagtatctcatccagatgtcaatcatgttgtgtttactggttctgttgctactgggaaaaaaattctacattcttgtgctgataaagcaattcctgctattgttgaacttggtggaaaatctgcaggtattgtttatccagatgcagacttaaatgatgtaattgatagtgcaaaaaatgctatttttggtgttgcaggtcaaatatgtaccgctatgtcgagactagttgttcacaaatctgtcaaagatgagcttattgaaaaattagtagatttgagtaaatctctaaaagtaggtcctggttatgaagaaggttctgaacttactcctgtaatttctagtaatcagttagataaagtagagggatatgctagatccggaattcaacaaggagctgaagctgttcatggtggcaaaagagcagatagagaaggttattttatggaagcaactgttttaaataatgtaactcaagatatgtctgtagcaagagaagaaatttttggtcctgttttgtctgttcttgaatatcaagatactgaagaagccattgcaatagcaaatgacactgaatatggattgggtggtggtgtatttacaaaagatttaaacaaagcttcttggactgctagtaaacttcaagcaggtcaagtttatgtaaataaatggtttactggaagtcatgccactccttttggaggatataaacaatcaggatatagtcgtgaaaaaggtgttgatggacttaaatcctatcttcaagttaaaaatgtgggaataagtttaagttaa

SEQ ID NO: 214398 - DNA, 688 bp, Unknown
  Bacterial polypeptide expressing nucleotide sequence isolated from the Sargasso Sea
gggtggtaaaagtccggttattgtttttgatgatgccgacctagaaaaaacaattcctggagtagctagagcttgcttctttctccaaggtcaaaattgcatggcaggtacgagagtgtttgttcatgaagatattcatgatgaactagttaacggcgtaaaggctatggccgagtcgtttcaaattggtcacggacttattcaaacaaatgattttggaccattgatttcggaagaacagagaaaacgagtcatgaagtatatcaagcagggaatttctgaaggtgccacactgatttgtggaggcaatgaagtcaatgatgaagggtttttcattcagccaacaatttttaccgatgttactggtgaaatgacaatagccagagaagagatttttggccccgttttatgcattgagaaatttggcaatgaatcacttcaagagattgcaaatagagccaatgagacaacatatggtttatccggaagcgtttggaccaaggatatctcgaccggtcataaaatggctgctctaatcgattccggtcaagtcagtatcaattgtcatgctgcagtagattccgcgatcccttttggggggaataaacaatcaggttggggaagagagtttggagaagaaggattggattcctacttgaaaacaaaagccacaacagtcatgtattga

SEQ ID NO: 214399 - DNA, 1495 bp, Unknown
  Bacterial polypeptide expressing nucleotide sequence isolated from the Sargasso Sea
catgaatttaattcaacattttgtaaatggaaaaataatttcaggaaaatcagagagaagaggaaaagtatttaatcctgcaattggtgaacaagagtcagaagtaatattaggtttaaaatcagatttagatgaagctgtagaaatagcaaaaaaagcttttgagacttggtctttaaaaccaccaattcaaagagcaagaattatgtttaaattcaaagaattaatagaaaaaaattctgatgagttaaccaaaatgatagtttctgaacatggcaaagtgtatgaggatgcgaaaggttcattaataagaggactcgaggtagtagagtttacttgtggaattcctcaagttttaaaaggtgaatttacagaaaacgttggaacagatattgatagttggtcaataaggcaaccacttggtgtttgtgcaggtataactccatttaattttccagcaatggttccaatgtggatgtttccaatggctattgcttgtggaaatacttttgtattaaaaccatcagaaaaagatccttccatttcaattaaattagcacagctatttaaagaagctgggctaccagacggagtgtttaatgtcataaatggtgacaaggaagttgttgatgcaattttaactaacaaagatattaaagctgtaagttttgtaggatcaactccaattgcaaaatatatttatgagaatgcagccaaaaatgaaaaaagagtacaagctttaggaggagcaaaaaatcactgtgttgtgatgcctgattgtgatttagatcaggctgttaatggtctaatgggagcagcttatggatctgctggtgaaagatgcatggctcaatcagttgcagttgcagtcggaaatattggagataatttagttaatgaattatcaaaaaaagttgaagcattaaaagttggaccaggtatggacaaaaaatctgaaatgggacccttagttacaaaagagcatttagaaaaagttaagggttacgttgatctaggggttaaagaaggagcaaaattagtagttgatggaagaaacctaaaactacaaggctatgaaaatggttactatataggcggatgtttgtttgaccatgttaaaaaagatatgagaatttataaagaagaaatttttggtcctgttctttctgtggttagggtaaaagattttgatgaagctactcagctaattaatgatcatgagtttggtaatggaacgagtatttatactagagatggagatgttggaagaacgtttgctagcaatattaaaattggaatggttggtataaatataccaatacctgtgccagtggcattccatagttttggtggttggaaacgatctttgtttggagatcaacatatgcatggagtagaaggtgtgagattttatacaaaacttaaaacaataaacttcagatggccatctggattaagatcagatcctgaatttgttatgcctacaatgaagtaa

SEQ ID NO: 214400 - DNA, 1009 bp, Unknown
  Bacterial polypeptide expressing nucleotide sequence isolated from the Sargasso Sea
tatgaagataaaagttggaataaacggaatgggtagaataggaagaatgattgttcgatctattattgaaaataaaattacgaatatagaaataaaacatataaataatagaactaattccgagagttgttcttcacttttaaaacatgactctattcatggaaaatttaaagctgaaataagttttgatgaaaaacaccttattattaacaaaaacaaaattacttttagtcaagaaacagatttaaataatattaaatggaaaaagtatgatgttgattatgtttttgaatgtactggtaaatttaattctaaagataaattgctaccccatcttcaaaatggagtcaaaaaagtcattgtttcagctccatgtaaaaatgctgataaaactatcgtatatggagtaaatgaatctgaattaaaaaaagaagataatattatttctgcagcgtcgtgcacaacaaattgtcttgcacctgtagctcatgttttaaatgaaaattttgagattgaaaaagggtttatgacaacaattcatgcatttacaagtgatcaaagaattttagataattctcataaagatccgagaagagctagatcagcaagtcaatcaattgtacctacctctacaggcgcgtcaaaggcaattggcgagatcatcccttcattaaaaggtaaattagaaggtgtggcgatgagagtaccaaccccaaatgtttcattagttgaattggtattttgtacaaaaaaagatttgagtattgaaaaaattaattcagcatttcaaaatttcagtaaaaaaagtaataataaaatccttgaagtaacgtatgaaaaactagtgtctatagattttaatcatcatcctgcctcatcaattgttgatgcaagtttaacaaatgtagtgggtaagaatatgggtaaaatttctgcttggtacgataatgagtggggtttttcaaatagaatgtgcgatatagcagaatatcttcaaaaaatttcttaa

SEQ ID NO: 214401 - DNA, 1438 bp, Unknown
  Bacterial polypeptide expressing nucleotide sequence isolated from the Sargasso Sea
atgagtgacgaaactatacaagaaatgcaccgagtcttagaaatgcaaaaggctcttaatattagtgaaggtgcgccagatataaaacttagaaaagatcgacttgatagagtgatagccatggttaataaatatcaagatcaaatagtgcagtctgttaatgatgattttggtaatagagatccagtaatgtcagcagttactgaggtagcttcagtaattggacccatggaacatgcaaaaaagaacctcaagaattggatgaaaacggaaaaaagaaaagctgctattgctcctcttggttccgcattgtctctccttggggcaaaagcagaggttaagtatcaacctaagggtgtagtcggtgctataagtccatggaattttcctgtaaatcttgctttggctccattggcagggatcattgcagcaggcaatagagtaatgcataaaccttctgagttaacaccagccacttcagatgccttaaaaacaatgatagaggaatattttgatgaaggtgaaatggcagtttttgtaggtgggccagaagtaggtgctgcttttagcggacttccatttgatcatttgatgtatacgggcagcactgcagtagctaaacatgtcatgaaagctgcgtcagaaaacctagtgcctttaactttagaattgggaggcaagtccccagtcgttgtaggtaagagtgccaagatgcaagatgtggctcaaagagttatgcaaggcaagacgatgaatgccgggcaaatatgtctagcacctgattatgctttagtaccagaagaaaaagtagatgattttgtaaaagctagtgtcgaggttacttctgaaatgtatcctgaaatgaaagacaatgatgacttcacttctattgttaatcaaaaacattacgacaggattcaaggactacttgaggatgctaaagagaagggtgcagatgtagtagagattaatccttctaatgaagatttctctcagcaaccccatcataaaattcctcctactatccttttaaacccttctgaagatatgaagattatgcaagaagaaatatttggaccagttttacctgttaaaacgtataaggacgtctccgaacctgtggaatatattaatagtaaagataggcctctgggtctctattactttggcgaagataatacagaaaaagactatgtcctagacaacacaacttctgggggtgttacggtaaatgatgttatttctcacattcaaatggaggaccttccttttggtggtgttggtccaagcggcatgggttcgtatcacggatatgatggatttaaagaatttagtcatgcaaaggcggtatataagcagactaaatttaacctaatgaaactagcaggactagttcctccgtacaagaaaaaggaagaaaaaactaatactgcataaa

SEQ ID NO: 214402 - DNA, 1507 bp, Unknown
  Bacterial polypeptide expressing nucleotide sequence isolated from the Sargasso Sea
atgagcaataaagacaaacttaagataagcgaagaagccaagaattttttagagtctgagcatctgttattcattgatggtgaatggaagcaatcatcttctggcgaaaagattccagtttttgatcctgcgactgaggaaaaaatagctgaagttcagtctggaacaactaaagatattgatttggcagtcaatgcagcaagagaagcattatctggagaatgggctaagattccttcacatgatagagctcaaatcttacatcgattatctgatgagattgaggctaacttctcagtcctttcggaacttgaagtactggacaatggcatgcctttggagcttgctcaatactcaatcgcaagccatggcgtgactcttttgagatattatgcgagctgggcaccaaaaattcatggaaaaacaattcctgtctcgccaggtggtgcaatgaatggtgaatccttgacttatacaaagagggagcctattggtgttgttggcgcaattattccgtggaattcacctttgatttttgcaattctgaaactggcaccagctcttgctgcaggatgcactgttgtgcttaagcctgcagaactgacccctctaactgcattatattttggtcatttaatagaaaaatctggaataccaaaaggagtcgtgaatattgtcactggccttggtgaaaccgctggagatgcactcgctaaacataatgatgtggataagattacctttactggatcaactgaagttggaaaaaagatcgtttcttcttctataagtaacttgaagaaggttacccttgaattaggtggtaaaagccctgttattgtctttgatgatgccgatcttgagaaaacgatacctggcgtagcaagagcgtgttttttccttcagggacaaaattgtatggctggaacgagagtatttgttcatgaagacatacatgatgaactggttgcaggagttaagagtatggctgaatcattccaaattggtcatggcctaatacaaacaaatgactttggaccattgatatctggagatcaaagaaaaagagtaatgaaatatataaagcaaggactttctgaaggtgcaacattggtctgtggtggtaatgaagtaaatgatagggggtacttcatagagccaacaatttttactgatgttacgggagagatgtcaattgctaaagaagagatttttggccctgttctatgcattgaaaagtttagcaatgaatctcttgaggaaattgcaaagagagcaaataaaacaacatatggtttgtcaggcagcgtatggacaaatgatatatcgaccggtcataaaatggctgcactaatcgattccggtcaagtcagtatcaattgtcacgcagcagttgattctgcaatcccctttggaggcaacaaacaatccggttggggaagagaatttggagaagaaggattggattcttatctcaaaacaaaggccactacagttatgtattgat

SEQ ID NO: 214403 - DNA, 1420 bp, Unknown
  Bacterial polypeptide expressing nucleotide sequence isolated from the Sargasso Sea
atggcaacagacccagcaacaatctcgccgttaaccgagttactccaacgtcagcgtgcaagttacttagccgcgcccaaccctgattacgccatccgcaaagagcgtctaatgcgtctaaaggctgccttactcagttatcagcagccgctagtcgaggcgttatcacaggactatggccatcgttcggtcgacgacagtctgatttccgacattatgcctgtggtcaataacatcaattacagcttgaaaaacctcaaaaaatggctcaagccaagccgccgccatgcgggcatcttactcgcccccgcccaagtcaaagtgcattatcagccactaggcgttattgggataatcgtgccttggaacttccccgtcatgctctccattgggccattagtcacggcgattgctgcgggcaaccatgccatgctcaaactttcggaatttactccagcaaccaacagcgttatcaaacaattgctcgccgaagtatttgatgaatcccatgttgccgttgtagaaggtgaagctgatgtcgcggcgcagttttcagcactgcccttcgatcatctcctatttactggttcaaccacggttggccgccatgtgatgcgcgccgcggccaataatctcacccccgttacccttgaactcggaggtaaatcgccagtaattatcgcccccgatataccacttgagatagcagtagaacgaatgatttatggtaagtgtttgaatgctggacaaatctgtgtagcgcctgattatgtgctttgccctaacgctaaagtgagcgattttattcaagcctatcaagcaaaattccaagccatgtacggcgcaattgcccaaaataaggactacggcagcattattaatgcccgccaatttgatcgtttattggctgtacttgaggatgccaaaaccaaaggtgccaagattatctctgcctcaaatgaagcaatagacagccagaatcgtaaactcgccactcagctgattactaataccactgaagatatgctattgatgcaagaggaaatctttgggccgctattacccgttatcggttacgactctttagatgaagccattagctacgtaaaccgtcgtgccagacccttagcactctatgtgatgagttttgatgaagcgagccaacaaaaaatcctcaagcaaactcactctggcggtgtttgtatcaatgaaacggtattccacgtagcagccgatgatgcgccctttggcggcataggcccatcaggtatggggcattaccatggtaaagaaggattcctcacctttagccacgccaaaaccgtgctgagccgtggtagcttcaacacgggtaagtttgtccatcctccctatggcacttttatccaacgtatgttgatgaagctgtttttacgctaat

SEQ ID NO: 214404 - DNA, 1280 bp, Unknown
  Bacterial polypeptide expressing nucleotide sequence isolated from the Sargasso Sea
gaaggtttggagaaataccactccttggcagagagcaaatattattagaaaaattgcagatctaatgagggagaaaagtgatgtgcttgctaaatggttaacacttgaagttggaaaacctttggctgaaggtgttggtgaggttggtggatctgcagatatatttgaatggaatgcagaagaaacaaaaagaatttatggtcaaactgttgaaagtagatttccagatactagggtgcatgtatattatcaacctgtcggtgttgtggctgcactagtcccttggaattttcctttagtattagcttcaagaaaaatttctactgcattagcagctggatgctcagtaatttgtaaaccagatgtaataactcctggatgtgtgatggaattggttgacatttgtagagaagcaggtgttcctccaggagtagtaaatttactatcaggagatcctcctgctatagcagaacaattaataaaatctgatatagttaaaaaaatttctgtaactggttcaactagagtcggtaaattaattttgaaacaagcagcagaaaaagttcaaagagttactatggaacttagtggtcattcaccttttattgtttttgatgatgcagatattaataaagcaactgatatggcaataatttcaaaatttagaaacaatggtcaagtttgcatatctccaaatagattttatattcaagaaaaaaagaaagaagaatttatcaatacatttataagcaaagcaaagaaattaaaaattggtaatggtatggataaggatgttcaacttggtcctttaactacaaaaaaaaggcttgaagaagtagaaaagctagttgaaacaactaaaaaagaaggtgctaaagttttaatgggaggaaaaagacctccagaatttaataaaggtttttattatgaacctactgttttcgatggtgtagaagataattttacaataatgaaagaagagccttttggacctctggttcctatgttgtcttttaaaagttttgacgaaataatagaaagatcaaacaataatgatttgggattgtgtagttatatttgcactaactccatggaacaagcacatagagcatcagaattaatggaaactggtgttgttgcagtaaatactcctgtggttgccatagccgaagctccatttggaggaattaaacaaactggatatggacgtgaaggtggatcaaatgcaattaaagattatttaaatgttaaatatactcacctaggaattaaaggctaaa

SEQ ID NO: 214405 - DNA, 1213 bp, Unknown
  Bacterial polypeptide expressing nucleotide sequence isolated from the Sargasso Sea
atgcaaaccattgatacaacatttaaggcccaacaagctaaaagcatatctttaaggaatagcaccgctaaagaaagaagaggtaagctaaaactgcttcttaaaaacttcttagaaatggagagcgatgttcttgctgctctttcttcagatttgggaaagtctaaaactgaagcacttttagcagaaatttatggggtcaaggctgaagcagactttgcaattaaaaatcttggaaagtggatgaagacaaaaagggttgcaagccctcttgctatttcttttactaaaagctgggtaaaacctgagccaaaaggaagtatcttaataatttctccttggaattatccaattatgctttgcttgaacccgctgattgctgcgattgcatccggcaatacagctgtgattaagccgtctgagcttacacctgcgtctggagagcttgtaaaaaaactagttgaaaaaacattttcatcagatgaggttgctgtttttcttggcgaaaaagatttagcacaaaaacttttggagcttcccttcaaccatataatgtttactgggagcccaatggtcgggaagcttgtcatggaagctgcctccaaacaccttgcaggccttacgctcgaacttggtgggaagtcgcctgttattattgataaacatgcaaatgtaaaagacgctgcctggaaaatttctttttataagtttgcaaacgcaggccaaacctgtactgctccggactatatactttgtgatgagttggttcacgatgatcttgttttagctttgcagaaaaatatatcacaattttttgctggagggttagacgctgctaaaaaagactactgctctattgcaaacgagcaccatttcaacaggctagaaggtgctcttgctgacgctctttctgatggagcagagcttgcgtgcggtggagaagtaagccaagaggagctacattttactccagctgttttgacggacgtaaattatgacaactcaattatgaaagaagaaatctttggacctatcctgccaattatcaaggttcaaagtcttgacgagtctattaactatgtaaatgaaaatgaaaagccgctagcattatatctatttagcaacaaatctgctgtacacaatgaggtgttaaagagcacctctagcggtggtatggttataaacgattgcgttctacatcatatgaatccaa

SEQ ID NO: 214406 - DNA, 1009 bp, Unknown
  Bacterial polypeptide expressing nucleotide sequence isolated from the Sargasso Sea
atgacaataaaagttgggattaacggtatgggaagaattggcagaatgattgttaggtcaatttatgaaaattacaaaggcaaaataattatcaaacatattaataatagatcgagctctgaaatttgtacaaatttgttaaaatatgattcaattcatggtaattttagttctcaagtaaaatctggaggaaattacataaaaataaataaagaaaaaatatcttacacccaacactctatgattaatgacataaagtggaaacaatatggggttgattatgtttttgagtgcacaggtaagtttaattctaaagatcaattactgccacatataaaaaatggggtaaaaaaagttattgtatcggccccatgtaaaatggctgataaaactatagtttttggtgtaaatcataagaagatcaacaagaacgatagaattatttcagcagcttcttgcacaacaaattgcttagctcctgttgcagacgtaattaataaaaattttataattcttaatggttttatgacaaccatacatgcttttacaagtgatcaaagaatattagataattctcacaaagatccaagaagagcgagatctgcaagtcaatcaattgtacccacatctactggtgcatcaaaagctattggtgagattataccctcattgaaaggcaagctagaggggatagcaatgagagtgccaacaccaaatgtttcattaatagaatttatatttaatgtaaaaaaaaatattacctcaaaaaaattaaataactctttattttcagcttctaaaacgaaacttaaaaatattctaaatgttacagatgagaagctagtctcagttgattttaatcacaatagcgcatctgcaatcatagactcctcacttactaatgtagttggtaataaaatgggtaaaatttcagcctggtatgataatgaatggggtttctcgaatagaatgtgtgatattgctgagtatgtaagtaagatcaaataat

SEQ ID NO: 214407 - DNA, 1495 bp, Unknown
  Bacterial polypeptide expressing nucleotide sequence isolated from the Sargasso Sea
aatgcacagcaggacgaaccaagcgattgacccttcggcgctacgcgcccaacttcgggacggctccttgctggagacgcgtgcctggctggcgtcgggatgggaggagggcgcggatggccgttcgtttcccgtaacgaatccggccacgggtgacatcctggcccgcgtggccagcctcggcgccgcggacgtcgaacaggccattgcgtcgtcggcgctggcacagcaaggctggcagaagcggaccagccacgagcgcgccaagctactgcgcgcctggtacgacctgatcgtggcgaacaccgacgatctcgcactgatcatgacatcggagcagggcaagccgctggcggaggcccgcggcgaaatcatgtatgcggcttccttcgtggaatggttcgccgaagaagcgaagcgtgtctacggcgacgtcattcctcatccgcaaggcgacaagcgcatcctcgtcatccgccagccgatcggcgtgtgtgccgcgatcacgccgtggaatttccctgccgcgatgattacgcgcaaggtcgcgccggccctggccgcaggctgctccatcatcgtgcgccccgcggacctgacgccgctcacggcgcttgcgctcgccgtcctggccgagcgagcgggcattccggcgggcgtcctgcaagtggtgtgcggcccgtcacgcgagatcggcgcggtgctcacggccagcccggtcgtgcgcaagctttcgttcaccggttcgaccgaagtcggccgcgtgctcatgagccagtcgtccgggacgatcaagcgactgtctctcgagctcggcggcaacgcaccgttcatcgtgttcgacgacgcggatctcgacgcggcgattgaaggtgcgatggcgtcgaagtaccgcaatagcggccagacctgcgtgtgcgcgaatcgctttctcgtccaggcaggcattcatgaccgtttcgtcgacacgctcgcccggcgagtccaggcactcaaggtaggaaacggcatcgaggcgggggtgcagcaggggccgctgatccagaagtccgcgtgcgaccacctgaatcagctgatcgacgacgccgtcagcaagggcgcgcgaatcgtcaccggcgggaaaggccacccgctcggcggcacgtttttcgagccgaccgtcattgccgatgcgacgccggcgatgcgtctcgcgcgcgaggagctcttcgggcccgtcggcccggtgttccgcttcgaggatgaagcagaagcgatcgcgatggccaacgacaccgagtacgggctcgctgcctatctctatacacgcgaccacggccgcatctggcgtgtgggcgaggcactcgagtacggcatggtcggcctgaataccggcgtgatttccaacgaggtcgcgccgttcggcggggtcaagcagtcgggcctgggccgtgagggttcccgttacggcatcgaggaatacctggaaatcaagtacatgtgcagccaggtctga

SEQ ID NO: 214408 - DNA, 1408 bp, Unknown
  Bacterial polypeptide expressing nucleotide sequence isolated from the Sargasso Sea
atgcaagcaattctagaaaaacaaaaagctttttttataaaaaatggtccaccttcatatgatttaagaattgatagattaaatcgaatgaaaacactgattatggacaatcgttacaaaattgttgatgccctcaatgaagactttggtgttagatctaaaaatcaatcaatggcgactgatgtatacactattattccaagtattgagtatgctaagaaaaatttaaaaaagtggatggcaggatctaaaagaaaagcaaactttccacttggtctattaggtgcaaaagcttcagttgactatgagccacttggaacagtgggtatgatttctccatggaattttcctatgttcctgactttttctcctgcagcttctatctttgcggctggtaatcaaattatgcataagccaagcgagtatactgagcaatctgccagtttaatgaaagaattatgtgattcagcttttgatgaggaagagttcgcaactatattgggtggtcctgatgttggcgcaacatttacgcaacaaaaatttgaccatcttctatacacaggcagtggtgcagtagcaaaacatatcatgaaagctgcctctgagaatttagttccagtcaccttagagcttggcggtaagtcaccggtaattgtcagtaattctgctgatagtgcaattgcagcaaaaagaattatgttaggcaaaacaatgaatgctggtcaaatttgtttagctcctgactatgtaatggttcattcagataaaaaagatgagcttgtctctggaatgaaagaggctgtagctgatttttatccagatttaaaacataacgatgactacacatctattgttaatcaaaagcattttgatcgtttgcaaggattgttaagtgatgcaaaagaaaaaggtgctgaaattgatgaaattaatcctgctaatgaagatttttctcaacaagaggctttcaaaatacctcctacacttgtcatgaatcctactgacgatatggaaattatgaaagaagaaatttttggtccgctattacctattaaagaatttactgaaatcgatgaaactatttcgtatgtaaacaacaatgataaacctcttggtctgtattatttcggggctaacaagggtgaagaagatcaggtcctaactaggacatcttcaggcggcgttaccgtaaatgatgtattaggtcatatacaacaagaagatttaccttttggtggtgtcgggccttccggtataggtagttatcatggtgaagagggcttcaagacattcagcaatgctaaagcagtttataagcaaattggttcacggtttgataaattactatctgcaattcgtccgccatataagggcgatattgaaaaggttcttaagcaaataacctaag

SEQ ID NO: 214409 - DNA, 1498 bp, Unknown
  Bacterial polypeptide expressing nucleotide sequence isolated from the Sargasso Sea
atgactaattatagttttgaagagtggaagaaaattgcaagcaaaattagttttaggaataaagcatttattaatggaaaatttgtagatgctaaatcaggtaaaactttcgactcaatcaatcctgctacagatgaagttttaacctctgttgcagagtgtggacaagaagatgtagattttgcagttaaaatagctagaaaatcttttcaaaaaggtagttggtctaaaatgcctccagctgagagaaaagctgtattacttaaattagctgatttaatcagagaaaatctagaagagtttgccctgctcgatagtttggatatgggtaaacttataactgatgctgtaaccatagacgctccaggttcagcagcattttttcaatggcatgcagaggctattgataaaatgtatgatgaaattgctccaacaggaccaggtgatttagcaatggtaacaagagaacctcttggagttgtaggagctgtagtgccatggaatttcccccttgatatggcgacatggaaagcatctgctgcgcttgcagctggaaattctttagttttaaaaccagctgaacaatcgcctttatcagctctgcgattagcagaacttgcgattgaagcgggtgttccagaaggagtctttaatgttgttcctggatttggtgaaactgctggtaaagcacttggccttcatcaagatgtagattgcatagcttttacaggatcaacagccgttggaaaattatttcagcagtatgctggtcaatctaacatgaagcaggtttggctagagacaggcggtaaaagccctaaccttatatttgcagattgtaatgatttagagtcagcaataaacatggcagcctttggaatattttttaatcagggagaagtctgctctgctaattcaagattactagttgagagaagtgttcaaaatgaatttgtagagcgcttatcaacaattgcaaaagatactcaaccagggcatcctcttaatcctgactctaaaatgggggctattgttaatgaagaacaaacaaaaagaattgtctcttatattgaaaaaggaaaacaaaaagctgatttattaattggcggtgagcaaattaaagttgatggaaaaggctgttatgtgcaaccaacaatttttaataatgtaaatgctaatgatgtaattgcgaaagaagaaatattcggacctgttttatctgttattccatttgatacagaagaagaagcattatcaatagctaacgatagtgagtatggtttggcggcatcggtttggactgatgacttatcacgtgcgctcagagtttctgatcatctacatgctggaactgtatctgttaatactgttgatgcattaaatactgtaactccatttgggggtgtgaaacaatctggttatggtaaagatttatcactgcattcttttaataaatatacatctttaaaaacaaggtggattaaatataaagcttaat

SEQ ID NO: 214410 - DNA, 930 bp, Unknown
  Bacterial polypeptide expressing nucleotide sequence isolated from the Sargasso Sea
tagtttgtaagccagcaaatgcaacgcctctctctgcgctggctatttgtgagctcgcagcaagagcaggcattccagatggagttattaatattgtggctggaagaactagtgagattggcgaagcattgacaactagtccacttgtaagaaaattaacctttacaggttctactcccatcggaaaaaaattgatggcagattgctctaaaacaatgaaaagaacctccatggaattgggaggtaatgccccattcattgtttttgatgatgctgatttagatgctgctgttactggcgctatgatttgcaagttcagaaatgcaggtcagacttgtgtatgtgcaaacagatttctagtgcaagaaaaaatttatgatgaatttttagaaaaattaagaaaagcaacagaatctcttgttattggcaatggaatgaacgaggaagtaggacttggtccgctaattaaccagaaggcagctaatgatgtaattggatttattgatgacgcagtggataagggtgctaatgttcttactggaggccaaagaaataccattggtgattgttttattaacccaaccatactgactaatgttgataagagcatgagggtatacaaggaggaaatatttggtccggtagctccaatccttaagtttaaaactgaagaagatgctataaatctggcaaatgatactgagttcggacttgcctgttatttttattcgcgtgatgtaggtcgaatatggcgggtgggtgaggcactggagtatgggattgtaggtataaatgagggaattatatctaatgaaatggccccatttggcggtgtaaaagagtcaggtcagggaagagaagggtctaaatatggtttagatgactatctggagatcaaatatatgtgtgtaggcggtatcgataagtaaa

SEQ ID NO: 214411 - DNA, 1495 bp, Unknown
  Bacterial polypeptide expressing nucleotide sequence isolated from the Sargasso Sea
catgaaattaatagagcattttgttgacggtaaaataatatctggatcatctgatagaaaaggtaaagtaacaaatcctgcgacaggcgaacaggagtctgaggtaagattagcatcaaaatctgacttagatcaagcagttgaggttgcaaaaaaagcttttgaaacttggtcacaaaaaccagccttacaaagagcaagaattatttttaaatttaaagagttaattgaaaaaaactcagatgaacttactaaattaattgtatcagaacacggcaaagtttatgaagatgctagaggatctttgataagaggtcttgaagttgttgaatttgcatgtggaattccacaaatgttaaaaggtgaattttctgaaaatgttggaacaagtgttgatagttggtcaatgagacagcctttgggtgttgttgctggtataacaccatttaattttccagcaatggttccaatgtggatgtttcctatagcaattgcttgtggaaatacttttattttaaaaccttcggaaaaagatccatcttgtcctttaagattagctgaattacttaaagatgcaggtctaccagatggagtttttaatgttattaatggagacaaagaagtggttgatgcaattttaactaatcaaaatatcaaggcagtaagtttcgttggatcaacgccaattgcaaaatatatttatgaaaatgcagctaaaaatgaaaaaagagttcaagctttaggaggtgcaaaaaatcacttagtagtaatgccagattgtgatttagacggtgcagtaaatggtttgatgggagccgcttatggttcagctggagaaagatgtatggctcaatcagttgcagtagcagtaggtgacattggagacgagttggtagcacgtttatctaaaaaagctgaagcattaaaagtaggacctggtatggataaaaattctgaaatgggacctcttgtaacaaaagaacatctagaaaaagtaaaaggatatgttgatttaggagttaaagaaggtgctaagctagtagttgatgggagagttttaaaacttcaaggatatgagaacggtttttatattggtggatgtttatttgatcacgtaaataaagatatgagaatttataaagaggaaatattcggtccagtattatcagttgttagagtaaaaacttttgaagaagcagtagaattaattaatgaacatgaatatggaaatggagttagtatttatacaagagatggtgatgcgggcagaacttttgcaaacaaaattcaagttggcatggttggtattaatgtgcctattccagtgccgatggcattccacagctttggtggttggaaaagatccttatttggagacagcggaatgcacggtacggaaggaataaaattttataccaagcttaaaacagtaacatctaggtggccttcaggtatccgatcaaatgtagaatttgttatgccaactatgaaatag

SEQ ID NO: 214412 - DNA, 1507 bp, Unknown
  Bacterial polypeptide expressing nucleotide sequence isolated from the Sargasso Sea
atgagcaataaacaagaatttacgataagtgaagagactagaagctttttaggctcagagcacctcctatttatcaatggtgattgggtcaagtcatcttctggagatttaatccccgttatcgatccagccacagagaagaaaatagcagacgttcaatctggaggaagtgatgatattgattcagcggtcaaggctgcaagagatgctttatctggagaatggtctaaaattccatcgcatgatagagctcaaattctccatcgattatccgatgaaatagaagcaaatttttcagtcctttcagagctggaagtcttagacaacggaatgcccatggagcttgcacaatactccattgctagtcacggagtaacactcttaagatactatgcaagttgggcacctaaaattcatggaaaaacaattccagtctcaccaggtggcgcaatgaatggggactctttgacctatactaaaagagagcccattggggtcgtaggtgcaatcgttccttggaattcgccgctgatttttgcgatcttaaagctcgctcctgcacttgcagctggttgcactcttgtgcttaagccagctgagctgaccccattgacaacgttatatcttggtcatttgattgagaaatcaggcataccaaaaggtgttgtcaatattgtcactggatttggtgaaacggcaggtgatgcgctctcaaaacacaaggatgttgataaaattacctttacaggttcaaccgaagttggaaaaaaaattgtggcatcatccgttggtaatttaaaaaaagtcacgcttgaattgggcggtaaaagtccggttattgtttttgatgatgccgacctagaaaaaacaattcccggagtagctagagcttgcttctttctccaaggtcaaaattgcatggcaggtacgagagtgtttgttcatgaagatattcatgatgaactagttaacggcgtaaaggctatggccgagtcgtttcaaattggtcacggacttattcaaacaaatgatttcggaccattgatttcggaagaacagagaaaacgagtcatgaagtatatcaagcagggaatttctgaaggcgccacactgatttgtggaggcaatgaagtcaatgatgaagggtttttcattcagccaacaatttttaccgatgttactggtgaaatgacaatagccagagaagagatttttggccccgttttatgcattgagaaatttggcaatgaatcacttgaagagattgcaaatagagccaatgagacaacatatggtttatccggaagcgtttggaccaaggatatctcgaccggtcataaaatggctgctctaatcgattccggtcaagtcagtatcaattgtcatgctgcagtagattccgcgatcccttttggggggaataagcaatccggttggggaagagagtttggagaagaaggattggattcctacttgaaaacaaaagccacaacagtcatgtattgat

SEQ ID NO: 214413 - DNA, 1402 bp, Unknown
  Bacterial polypeptide expressing nucleotide sequence isolated from the Sargasso Sea
atgctctcaaaattaaataaattaaaacaaccatttttaaaaaacttcaacccagatttaaatgtacgtattgatcgtataaaaagaatacaaactttagttgaggaaaatatagatgcttttcacgacgcgttaagatctgattttggcacacgacatgaacagttaagcctaatggctgacacaatgcctgtaattaataatgcaaaagacgccttaaaaaatattaaaagatgggttaagcctgataagcgaaaacctaacttcccattaggattacttggcgcaaaagcttatgttcaatttcagccttatggagtagttggggttatttctccttggaacttcccattaactctaagtattgcgcctttaatagaaatatttgcagctggaaacaatgcaatgatgaagctctcagagtttgttccagcaacctctgaattaactgaagaacttattaataaattttttagtgatgaagaagttgttatagtaaatggaggtcctcaaacctcgcaagattttgcaggactaccatttgatcatctgcttttcactggatcaacaaatgtagctaaaaaagttgcatctgaggcagcatcaaatttagtaccgcttactcttgaattaggtggtaagtcaccagtaatagttggtccaaatgccaaaatgaaaaaaagtgttgataagataatgatgggaaagcttttaaatggagggcaaatttgcatatcacctgattatgtaatggttcctgaggggcaaacagatgaatttgttgatcatgcaaaatcccatgttagtgaaaattatccaacgataaaaaataatccagattatacatccataattcatttgaatcactacgagagacttcgtgaattagtaaaagatgctgagtcaaagggagctactattgtagaaataaaccctgcaaacgaagacctttcgcaacaagagcaccataaaatattacctactttagttttaaatccaacggatgatatgaagattatgcaagaagaaatttttggacctttattgccagtaaaaacatacaaaagctttaatgaaacaatagagttcataaataagaaccctaaagcgcttgcaatatattattttggcgatgacaaaaaagaaattgatactgtgttaaacaatacttcatctggtcaagcggttataaacgatgtcttattccaattttctatgcatgatctaccttttggaggggttggtcctagtggaatgggctcttatcatggttacgatggctttaagaactttagtcataagagatcagttctgaagggtcaaaatatcttagatgcgggtaagatgattacagctccatttactgaatctacggaaaaaaatataaaaaggttatcttaga

SEQ ID NO: 214414 - DNA, 1456 bp, Unknown
  Bacterial polypeptide expressing nucleotide sequence isolated from the Sargasso Sea
ctgcttaaagacagcgctttggtgcatcacagcagttatatagccggacaattccaaagtggccgcagtggtcattttgctgtgcataatcctgctgatggcagcttgctggcgttagtggctgaagcaggaagcacagaagctgaacaagcaatcacagcggccgctacggcttttccaggctggtctggtcttactgcggctgaacgtgctgccaaacttatgcgctggagtcagttgatgctggagcatcagcaagacttagcccgtattttaactttggagcaaggtaaacccttagacgaagcagcaggtgaaatagcctacggcgcctcttatgtcagttggtttgctgaagaagccaagcgtatgaatggcgatattattcctgcagctaaagcaaatcagcaaatactggtgctaaaacaagccattggagtagtagccgctattacgccatggaatttcccgaatgcgatgattttacgtaaagccgctgcggctttggccgctggttgtacttttgtggttaaaccttcggagctgacgcctttatcggctttggccttggcagaactcgcgacccgttctggtattccggcaggtgtgtttaatgtagttacaggtacagatgccaaagctataggtcaggtactgaccaaagacagccgtgtagcaaaattcagttttaccggctccacccctgtcggcaaaaccttgttggcgcagtgtgcttctaccgtaaaaaaagtctcaatggaactgggaggaaacgcgccctttattgtgtttgatgatgccgatctgcctgctgctgtgcagggtttactggccgccaaattccgtaatgccggtcaaacttgtgtgtgtgtcaatagggtgtttgtgcagcgccctgtgtacgatgcctttttagcccagttaattaaagccactgcgccactaaagctggcttctggtttggaagcaggttgccagataggcccgctgattaatcaggccgccgtcgataaaattacccgcttgctggatcaagcgctggatcaaggcgctgaactgctgttaggtggcgcgatagatgccgacttagggccgttgtttttccagccaaccatagtcacggacgtcactgccgatatgcaaatcagtcagaccgaaatttttggccctgtgctttgtattagtctgtttgataccgagcaggaagcgatagagctctccaacaatacgccaacaggccttgccagctatttttacagtcgcgatataggccggatttttcgtgtcgccaaagccctggactacggcatggtaggtatcaacgaaggtttaatctctaatgcagccgcaccttttggtggtgtgaaagaatcaggtttgggtcgcgaaggatccagttatggtttggatgattttactgaattaaagtatctgtgtttggggggattgggctgag

SEQ ID NO: 214415 - DNA, 1399 bp, Unknown
  Bacterial polypeptide expressing nucleotide sequence isolated from the Sargasso Sea
atgcaacccattgaggcaatttttaaaacacaacaagcaaagagtctagacctaaggaacagttctgccaaagatagaaagttaaaactgcagcttcttcttaaaaactttttagaaatggaagaagaggtcctttctgccctgtcaagcgaccttggaaaatctaaaactgaagcgctgttagcagaaatttatggagtcaaatcagaggcaaaatttgcaataaaaaacatccacaggtggatgaaaacaaaaagggttgcaagccccttgactatatcctttagtaaaagttgggttaaacccgagcccaaaggaaatattttaataatatctccctggaattatccaattatgctttgtttgaatccgcttattgctgcaatatcatccggaaacacagcaataattaagccgtcagagcttacaccggcctccggtgagtttatgaaaaaattaattgaaaaaaccttttcttcagatgaggttgctgtttttttaggcgaaaaagacgtggctgaaaaactgctagaccttccttttaatcacattatgtttactggtagcccaagggttggcaagcttgttatgaaggccgcttcaaaacacctcgcaggcgttactcttgaactgggcggtaagtctcctgttattgttgacaaaagcacaaatataaatgatgctgcttggaaaatttcttttttcaaatttgcaaatgcgggtcaaacatgtactgctcccgattatattctgtgtgatgaggctgtacacaacgatcttgttgctgctttacaaaaaaatatgtcgcaattttttcctgaaggcgtagatgcggccacaaaagactactgctctattgccaacgaacaccacttcaacaggcttaaggatgctttggagggtgctgtttctggtggagcagagattgtttgtggtggagaaacctctaaaagtggattatatttttcacctgctattttaactggcgtaggttataataacccaattatggaggaagaaatttttggtcctattctgcccattgttaaggttaaaaaccttgatgagtctattagatacgtaaacagcaacgaaaaaccattggctctttatctttttagcaacaagtcttctgtgcacaagaaggttttaaaaaacacctcaagcggcggaatggtgatcaatgactgtgttttgcatcacatgaatcccaatcttccttttggtggaataaacaacagtggggttggtagctatcacggcaagtttggttttgatgctttttcacatcaaaaagctgttttgaagagcagttcgctttctccttttaagataatgctaccaccatacaacaataccaaagaggcgttagctaatctgataaaaaaatatttctagc

SEQ ID NO: 214416 - DNA, 1477 bp, Unknown
  Bacterial polypeptide expressing nucleotide sequence isolated from the Sargasso Sea
atggccgacctgctgatccggcagcgcaacgcattcctccacgacggcccgccggacctggcgttgcgcaaggcccggctcgcccggctacgtgccgccgtgcttgcgcaccgcgaagcaatcaaggatgcggtcagcgccgatttcggcaaccgttcgcgccatgagaccgacatcatggagctgtcctgcgtcatccaggccatcgactatctctccagccacttgcgccgcttcatgaagcgcgagcgccgccacgagcatttcttttaccgcgcggcgcgcgcctacgtcgaataccagccgctgggcatcgtgggcgtgatggcgccgtggaactaccccgtctccctcacgctggtgccgctggcaacggcgttggccgcaggcaaccgcgccatgctcaagccttcggagctgaccccgcgcaccagcgaggcgctccgacatatgctggccggggctttcgcggaagacgaagtggccgtggtgctaggcggcccagaggtcggtgccacctttagtgcactgccatttgaccacctgctgttcacgggcagcacgcaggtcggtcgcaaggtaatgcgcgctgccagcgacaatctggtgcccgtgaccttggagctgggtggcaagagtccggccatcgtggcgcgtggccacgtcaacgaccgcaccgtgcaaagcctggtgtacggcaagctgtctaacgccggccagacctgcgtggcgccggatttcgcctttgtgcacaaggaagacctggaagcttttatcgcccagtacaccgccacggttcatcgcttttacccggatggccccgccagccgcgactacacgaccatcgtcagcgatcgccactacgacaggctgcgcgggctggtcgacgacgcgcgccgcaatggcgcccgcgtggtcgaggtgggagaacgccctgcccacatgcccgggcgcgagcgcaccctggtgccgacgctcgtcgtcaatgcgggtgatgaaacgcccctcatgcaggaggagatcttcggccctatcctgccggtgcgtacctacggcaccatcgacgaggccatcacctatgtgaacgcacggccccgcccactggcgctctactacttcggcgccgaggaccgcgattgcgccaggttactggcgcacaccacatccggcaacgtaggcatcaacaacaccttgattcacgtggcgcaggatgatttgccctttggcggcgtcggtccgagcggaatgggggcctatcacggcatcgagggtttccgtgcgatgagccacgccaagggcgtctttgtgcagggccgctggaacttccccggtctgctgcacgcgccgttcggccggctcgccgacatggccatctcgctcacgttgggaaaagcagccggccaaccccggtctaagccgccccggccccgggcaggccatgacggttcccccgtcagcccgcggtcccacttctgac

SEQ ID NO: 214417 - DNA, 1366 bp, Unknown
  Bacterial polypeptide expressing nucleotide sequence isolated from the Sargasso Sea
ttttgatgtacttaacccagcgaatgaggaagtaatcggtagtattgctatgggtagtgcagctgatgtagataaagctgtcgaagctgcgtctaatgcttttgattcattcagtcaaacaagtgttgaagaaaggttagcgatccttgggaaaatagttgaggtttatcaatctagatatgacgagatagctgaaaccatttctatggaaatgggagctcctttgtctttatctaaagcagctcaagctgctacaggacttggacactttgctcaagcgattgaaatattacagggctttgaatgggaggaaaccaaaggtaaaaccttactaagaaaagagcctataggtgttgtgggcatgattacaccatggaactggccgattaatcagatttcgtgcaaggttgctcctgctatagctgcaggctgtacaatggttctcaaaccaactgaaatagctccattaaatgctatgctttttactgaagtaatacatgaagctggtgttccggctggagtctttaatctagttaacggagatgggccaactgttggagaagctatgtcttgtcatccaggaatagacatgatgtcctttacaggatcaacaagagcaggaattgcggttgcaaaaggttcagccgatactgttaagcgagttgctcaagagctaggtggaaaatcagctaatatcatactagatgatgctgattttgaatcagcgattaccggcggtgctagacattgctttaataatagcgggcagtcatgcaatgcaccgaccagaatgttggtaccagaatcaagacatgacgaagctaaagaaattgctaagcaagctgctgagactactaaggttggtgacccttttgctgaagatacaggtattggtccagttgttagtgaagttcaatttaataagatccaaggtcttatcgaaaaaggaattgaagaaggtgctgaactagtttctggtggaccaggaaaaccagagggtttaaatgcaggttattacgttcgtccaactgtttttgctaatgttaataacgatatgaccatagctagagaagaaatttttggtcctgttttgtctattcttccctataaagacgaggaagaagcagtcaatatagctaatgacactgaatatggtctttacggttatgtgtcttcaggtgatgtcgagcatgccaaaaaggtagcgaacagaatcagagcaggtagcattgcaatcaatggtgctcaagctgattttactgctccttttggaggctacaaacaatcaggtaacggaaaagaatggggtccttttggattcgaagaattcttagaaaccaaggccgttgtaggttactctgactaa

SEQ ID NO: 214418 - DNA, 1056 bp, Unknown
  Bacterial polypeptide expressing nucleotide sequence isolated from the Sargasso Sea
taggtgaacatgcaaaaaatcaaagaataatttacgaacctaaaggagtatgtgctttgattactccttggaactggcctatgaatcaaacttgcttaaaagttatgccagcgatagcatctggctgcacaatggttcttaaaccatcagaggtggcacccttgtcagcaatgatactcgcagaattaatccatgaggctaaatttccaaaaggagtgtttaatttagtcaatggagatggagcacacacaggcgatgcactcacaagtcatccagatataaacatgatttcttttaccggatcaactagggctggtgcattaatttcacaaaatgcagcaaaagattttaaaagggtaagtctagaattaggtggcaagggtgctaacataatatttgaagatgcagatcctaaagcaattgaaagaggagctctcagatgttttagaaattctggccaatcatgtaatgcaccaacaagaatgttagttgaaaaaagtatgtattctcaagcagttgaaagagtaaaacaatttgcaaatgaaatgaaagttggtgatcctaataaagaaggagaacacattggcccagttgtttcagaagttcaatataaaaaaatacaatctttaattcaaaaaggaattgatgaaggcgctacacttgtagctggtggtactggaaaaccagatggtatcgaaaagggatacttcgtaaaacctaccgcttttgctgatgtcaataataatatggaaatagctagaacagaaatctttggacctgttttatcaattatacctttcgaaaacgaagaggaggcaattgaaatagctaatgacactgattatggattaacaaattatattcaaacccaagataaagaaaaagcaaatcgtgtagcgagaaaattaagatctggaatggttgatgttaatggcgctggtatagcagtggatgctccttttggtggatttaaacattcaggaattgggagagaggcaggtaaagaaggtttattagaatttttagaagtcaaatctgttgggggctggaattaat

SEQ ID NO: 214419 - DNA, 1085 bp, Unknown
  Bacterial polypeptide expressing nucleotide sequence isolated from the Sargasso Sea
aagagaatgtatggctgcagatttacctttggtaattgatcattggagatattttgctggagtaataagagcagaggaaggttcagttgctgaaataagtaacagtgaatattcttaccacatacctgagccattaggagtagttggtcagataataccttggaacttcccattgctaatggctacatggaaactagctccagctttggcagcaggaaactgtgtagtactgaaaccagctgaacaaacaccagcatcgataatgcttttaatggaactaataggagatctgttaccagcaggtgttgttaacgttgtaagtggatatggtcttgaagcgggtaaacctttagcttcttcaaaaagaataaagaagattgcttttacaggtgaaactactactggacgtttgattatgcagtatgcatctcaaaacttaataccaattactttggaattaggtggtaaatcgccaaacattttctttgaagatgtaatggctaaagatgacgacttctttgacaaatgtctagaaggttttgctatgtttacgcttaaccagggagaagtttgtacttgtccaagcagagctttaattcaaaaatctatctatgataaattcatggagaaagcgattgcgagaactaaagctgtaaaacaagacaatcctttgaagatggaaactatgattggagctcaagcttcactagaacaaatggaaaaaatcaagtcttatttagacttgggtaaaaaagaaggcgccaaagttctatgcggtggaagcgaagctaagatcaatagtggtctagaaaaaggaaactatattcaaccaacaattttcgaaggtaaaaacaatatgcgaatattccaagaagagatctttggaccagttgtatcagttacaacgtttaaggatgaaaaggaagctttagaaatagctaacgatactctttatggattaggagcaggtgtttggactagagacggaaacattgcatacagaatgggtagaggtattcaagcaggtagagtttggacaaattgttaccatgcatacccagctcatgctgcatttggcggatata

SEQ ID NO: 214420 - DNA, 1468 bp, Unknown
  Bacterial polypeptide expressing nucleotide sequence isolated from the Sargasso Sea
catgcaaacccaactcttcatcgacggccgctttgtcgatgccgtcgacggcggcactatcgacgtactcaatcctcacgatggctcgctcatcacgaagattgcagcggcaaacgcggcagacgtcgacctcgccgtcgaggccgccacccgtgcattcccgaaatggtcggccatggcggcagcggaacgcgggcggctgttgctgcgcctcgccgatgctatcgagtcgaacgcagaggagcttgcgcaactggaatcgctggacacaggtcatccgattcgcgattcgcgggggcttgacgtgccgcgcacggcggcctgctttcgctatttcggcggcatggccgacaagctgcaaggttctgttattcctgtcgagaccggctttctcaactatgtgcagcgcgcgccgatcggcgtcgttggacagattgtgccgtggaattttccgctcatgttcacgagctggaaaatggggcccgccctcgcagcggggaacaccgtggtgcttaagccgtcggaaatcacgccgctctcgactttgcgcatcgtcgagctcatggcggaggtcgggtttcccgcgggcgtggtgaacatcgttcccgggtatggccatacggccggtcagcggcttgcggagcacccgggcgttggcaagatcgcgttcacgggttccactgcgacggggcggcgcattgtcgaagcctcgcagcgcaacctgaaacgtattcagctggagttgggcggcaagggcgccaacatcgtctttgacgatgccgacctggatgccgcaatcaacggcgctgcgtgggcgatctttcataaccaggggcaagcctgcattgccggttcgcggctgattctgcacgaacgcattgcggatgcgtttctcgaacgcttcgtcgcgctggctgcatccatccggattggcaacccgctcgacccggatacggaaatggggccgctcacctcgctgcaacacctcgagcgcgtgcttgccttcgctgacattgcacgcgagcagggcgggcgcgtactgacgggtgcgagcgcaccgcaggacgccgcgctcgcgaacggttactacgtgcggccaacggtcatcgaggcgaagacggccaacgaccgcatcgcgcaggaagaggtattcggtccgttcgttaccgtactgcgattcagtagcgacgaagaggctctctccatcgcgaacggtaccgagtatggactcgggagtgggctatggactcgcgatctgtcgcgtgcgcacaagactgcctcgcaaatccgggcaggcatgtgctggataaactgctacaagcgggtcaatccaggcagcccgttcggtggcgttgggcagtccggatacggtcgggaaatgggtttcgaggcgatgcacgactacaccgaggcacgctcggtatgggtcaacgtcgacggcaacgtgccgccgcatttcaggcgctga

SEQ ID NO: 214421 - DNA, 1522 bp, Unknown
  Bacterial polypeptide expressing nucleotide sequence isolated from the Sargasso Sea
aatggatgcgagaagcgcaaaagcattgtctaaagatgattgggccaagatggcgggcgatgccgatagtatcttcgaaggaagatgtttcattaatggtgaatatgttgatgcagcagatggcggaaagatagaggtcatcaatcctgcaaccaacgaggcatgtgggacatgtgcagcaggaaacgaaaaagacatcgacaaggccgttgccgccgcaaaagaaagctttaaagcaaaaacatggaggaagatggcacccagaaaaagaatgggaatcatgatgaagtttgccgatcttcttcaggcaaatacagctgaactcgccctcatggattccatgaatatgggtaagccgatcagcgattgcttgaatgtcgatgttccagcctccgctgtgaacattcgattcatggcagagtgtatagataagatgtatggaaaagttgccaacacacatgaaaaagcactgaacctttctgttagagaaccgtacggtgtggttggattgatttctccatggaattatccgcttctcatgggtgtttggaaaattgctccagcgttggctgcagggaattcaatcgtacttaaaccagatgagcattcgcctcactcgtgcataaaaatggcagagctttttgtcgaagcaggtgggcctccgggggtattcaatgtggtcacgggacatggtgaagaggccggacaatctttggctctgcatcaagatgtctcgaagatcggattcactggatcaactgaagttggaaaacttcttttgcaatatgctggtcagtccaatatgaaaaaggtcagccttgagactggtggaaaatcacccatgatttacttcgctgatctacctgatatggaacttgctgtctctacagcctatgattcaatctatgcaaatatgggcgaagtctgtaatgcaggatctagaatctatgttgaaagagcaatttatgcagatttcgttgatcaattcattgcagaaggccaaggcgcatatacacctggtgatccattggatccagaaacaaacatgggcccattgatgtcagcacaagctcaaaaaagagtattgggcttcattgaatcaggcaaaaatgaaggtgcgaaactcaaatttggtggaaacattccaacaggacttgagtctggatgtttcgttgaaccaaccatgtttgcagatgtgaacaatgacatgaccattggtcgtgaagagatctttggaccggttgcttctattattccatttgattctgaggaagaagccatcgaaatggccaatgatacaatctatggcctttgtgcatcagtctggacgagcaacgtcagtcgagctcacaacatggcgaaagccattgagtcaggcatggtttatgtcaattgctacgatgttggcgatatgacctttgagtttggtggatacaagcaatctggcaataccaaagattcatgctttgagtcggtgcttggatacacacaaagcaaatcgatttggtataacctcgggtaa

SEQ ID NO: 214422 - DNA, 718 bp, Unknown
  Bacterial polypeptide expressing nucleotide sequence isolated from the Sargasso Sea
gcaaaggactttaaaagagtaagtctggaactaggaggaaaaggtgcaaatattatatttgaagatgctgacgctgaagcaatagaaagaggtgcatttagatgttttagaaattcgggacaatcatgtaatgcccctacaagaatgcttgttgaaaaatcaatttataatgaagcgatagaaagactaagaaaatatgcaaatgaatttaaagtagatgatccaaataaaaatggagagcatattggtcctgtaatttctgaaactcaattcaataaaattcaaggtttaattcaaaaaggaatagatgaaggagcaaaattagttgcaggtggagttggaaaaccaaacggattaaatgatggttattatgtaaaaccgacagtttttgcagatgtaaaaaatgaaatggaaattgcaagaacagaaatatttggtcctgttttatctgttattccatttgaaactgaagaagaggcaattaaaattgcaaatgatactgattatggattaacaaactatattcaaactcaagataaggaaaaggtacaaagagttgccagaaaacttagatctggaatggttgatgtaaatggtgctggtattgcagttgatgcaccttttggaggtttcaaacattctggaattggaagggaagcaggtaaagaaggattgcttgaatttctagaagttaaatctgtaggtggttggaattaat

SEQ ID NO: 214423 - DNA, 1711 bp, Unknown
  Bacterial polypeptide expressing nucleotide sequence isolated from the Sargasso Sea
ctgcccgaacggtgccgcgccgcaccgtcgtctcgttgttcactccccgcgcatttcccgctgccgacgcgacgcgccatgcgtcgcgccggcacgggtattccctatcccgatcgcgccgcaacgattgccgatagcggacaaggcgcgcgttttcatcgacatacagtgaatgcgacgtcgaagcctgacggtggcaggggtagttgccatcgccctcacccgttcggcccgacgattcgcccctgggaaacacggaacaccatgatgaaaattcagaatctgatcgacggcaggcattgcgacgcagcggccggccgtaccttcgaaaaactggcgccggcgaccggcgactacgtggccgccgtgcccgcatcgaccgccgaagacgtcgatcgcgcggtgcgtgccgcgcacgccgcgctgcacggcgacgcgtgggcccgagctggcggcccggcccgcgcccgctggctgcttcggctggcggacctggtagagcgcgaccgtgacgcgctggcggaatgcctggccgtcgaacaagggcgcccgcttgccgagatgcggatgatggacctgccgatgtgcatcgacacgctgcgctacttcgccggctgggccgacaagctcgagggccgcacgattccgaccgacggcttcatgggccgcccgaccctcagctacacgcggcgtgcgccggtgggcgtcgccggtcagatcatcccgtggaacgcgccgttgatgatcgccgtgtggaagctcgcgccggcgctcgcggccggctgcccggtggtcatcaagccgtcggaggacgcgccgctggccgtcgcccggctcggcgagctcgtctgcgaagccggcctgcccgccggggtcgtcaacatcgtccacggcgtgggcgcggaagtcggcgccgcgctggtcgcgcacccgctcgtgaacaagatcagcttcaccggcagcaccgaagtcggccgcgcgatcgcgggcgtggcagcgaagaccttcaagcgcgtcacgctcgaactcggcggcaaggccgcgcagatcgtgttcgcggataccgatctcgaccgggcgattccgtcgttgatggccggcatgttcgcgaaccaggggcagacgtgcgcggccggctcgcgcgtgctcgcgcaccgctcgatcgcgcacgcgctcgaagaacggcttgccgacgcggcccgggcgatgcgcgtcggtccgccgtcggagcccggcgtgcagatgggcgcgctgatcaacccgcgccacctcgcgcgcgtccgcgcgctcgtcgacggcgcgctcgccgaaggcgcggtgatgctcgccggcgacgaacaggtgccgccgcgcggctgcttcatgcgcccgacgattctgggcggggtccatccgggcatgcggatcgcccgcgacgaggtgttcggcccggtcggcatggtgatgccgttcgagaccgaggacgacgccgttcgcgtcgccaacgacacgccgttcggcctgtcggcgtcggtgtggacgcaggacgtcggcaccgcgcaccgcgtcgccgagcggctcgacatcggcgcggtcgcgatcaatgcgtggagcccgatcgacgcacgcctgccgtggggcggcaccaagcaaagcgggatcgggcgcgacctgtcgaaggccgccctcgattcgtacctcgaggaaaagatcatcaccgcagccctgtgat

SEQ ID NO: 214424 - DNA, 1441 bp, Unknown
  Bacterial polypeptide expressing nucleotide sequence isolated from the Sargasso Sea
tatggaaaataaaaaaaatttttatatagatggtaaatgggtaacagcaataagcaaagaagaaattaaagtaatcaaccctgctacagaagaagaatgtgctgtaatatcattaggaaacaaagaagatgttgacctagcagtaaatgctgcaaaaaaagcttatagttcatgggcgttttcaccaaaagaagaaagaataagattattagaaaaactttatgagaattataaaaaaagatgggcagatattgccaatgcaattactgttgaaatgggtgctccaaaagactttgctacaaaacttcaagctggaacaggtgccgctcatttaaagtcttttattagatatttaaaaaatttccaatttgaaaaaccattaggtgaacatgctccaaaccaaagacttatctatgaaccaaaaggagtttgtgcattgataacaccttggaattggccaatgaaccaagtttgcttaaaagttatgcctgcaatagcatctggatgcacaatggttttaaaaccatcagaacttgcaccattatcatcaatgatacttgctgaattgatagatgatactaaatttcctgcaggagtgttcaatctagttaatggagatggagccacaacaggcgatgcactaacaagccacccagatataaatatgatttcttttacaggatcaactagagcaggagctttaatctctcaaaatgctgctaaagattttaaaagagtgagtttagaattaggaggcaaaggtgctaatattatttttaaggatgctgatcctgaagcaattgaaagaggtgcgttaagatgttttagaaattcaggtcaatcatgtaatgctcctacaagaatgctagtagagaaatctatgtatagtgatgcaatagaaagattgaaaaaatatacagaaaattttgaggtaggtgaccctaaaaaagaaggagagcatataggcccagtgatttctgaaactcaatataataaaattcaaactttaattaaaaagggaattgatgaaggtgctaaattagttgcaggtggaccaggtaaaccaccaggactagacaaaggctattttgttaaacccactgtatttgcagatgtaaataataatatggaagtcgcaagaacagaaatttttggaccggtattatcggtaattccatttgaaaccgaagaagaagcaattgaaattgccaatgacacaccttacggattaacaaactatattcaaactaaagactcagaaaaagtaaaaagagttgcgagaaagctgagatcaggaatggttgatgttaatggagctggtattgcagttgatgctccatttggaggttttaaacattcaggaattggtagagaagcgggtgaacatggccttgaggaattttttggaggtaaaatctgtgggtggctggagttaatttag

SEQ ID NO: 214425 - DNA, 1354 bp, Unknown
  Bacterial polypeptide expressing nucleotide sequence isolated from the Sargasso Sea
atgtctttaaggaatagcaccgctaaagaaagaaaggataagttaaaactacttcttaaaaatttcttagaaatggaggacgatgttcttgctgctctttcttcagatttaggaaaatctaaaaccgaagcactcttagcagaaatttatggggtgaaagctgaagcagactttgcaattaaaaatcttggaagatggatgaagacaaaaagggttgcaagtcctcttgctatttcttttactaaaagctgggtaaagcctgaaccaaaaggaagtgtcttgataatttctccttggaattatccaattatgctttgcctaaaccctctgattgccgcaattgcatccggcaatacagctgtaattaagccgtctgagcttacgcctgcttcaggagagctcgtaaaaaaactagttgaaagaacattttcatcagatgaagttgccgtttttctgggtgaaaaagatttagcacaaaaacttttggaacttcccttcaaccatataatgtttactggaagcccaagggtcgggaagcttgtaatggaggctgcctccaaacatcttgcaggcctaacactcgaacttggtgggaagtcccctgttattattgataaacacgcaaatgtaaaagatgctgcctggaaaatttctttttataagtttgcaaacgcgggccaaacctgcactgccccggactatatactttgtgatgagtccgttcacgatgatcttgttctagctttgcagaaaaatatatcacaattttttgttgatggggtggacgccgctaaaaaagactactgctctattgcaaacgagcaccacttcaacaggctaaaagatgctcttgctaatgctctttctgatggagcagcgcttgcgtgcggcggagaaacaagccaagaggggctgcatcttactccagctgttttaactgacgtaaattacaacaactcaattatgaaagaagaaatctttggacctatcctgccaattatcaaagttcaaagcctggacgaatctattaactatgtaaatgaaaatgaaaagccgttagcgttatacctttttagcaacaaacctgctgtacaccgtgaggtgttaaaaagcacctctagcggtggtatggtaataaacgattgcgttctacatcatatgaatccaaacctccctttcggaggaataaataatagtggtgttggaagttaccatggtaaatttggctttgatgccttctcacaccaaaaagctgttttaaaaagtagttcagtttctccctttaaaataatgcttccaccatatactaaaaccaaagaaaccttagctaatctaataaaaaaatatttttagc

SEQ ID NO: 214426 - DNA, 1365 bp, Unknown
  Bacterial polypeptide expressing nucleotide sequence isolated from the Sargasso Sea
aaatttatgagctcaggtaacaaatataaattgatagccagtaaacttaaatttgaaggaagagcattcattaatggcaaatatgtaaatgctattgatggtaaaaagtttgaaacaattaatcctgcaactggaaaaaaactatgtgttgttgcaaaatgtaatcataaagatgttgatttagcagttaaagtttcaaggaaagcttttaatagtggaatttggtctagaagttcacctgaacatagaaaagaagttttattaaaatttgctgaattgcttagaaaacatggtgatgaaaattcagttttagaatgtatagatacaggcaaacttatcacggattgtataaatgaagttgcaaatgatgcaccaatgcattttcagtggtatggagaattaattgataaagtatttggaaaaattggtccaacagaaccatctattacaagtttaattgttaaagaaccaataggagttgttgctggtattgttccttggaactttcctttaatgatggcagtatggaaaatggcaccagctcttgcggctggttgttcagtaataattaagccagcagaagatacgcctcttacagctattagagttgctcaaattggaaaagaggctggaataccagatggagttttgaatgtacttccaggttatggagatgttggtgaggccttaggtcgacacaaagatgttgatgcagtttcttttacaggctcaactgaagtgggtggttattttttaaaatactccagtgaaagtaatttaaaacctgtagcattagagatgggaggaaaaagtccatttatagttttagaggatgctaaaattaatgatgatttaattgataacgctattaattctgcattttggaatggtgggcagaactgttcagcaaatatgagacagatagttcataaaaaggttaaagatgaatttttagacaaagttattaaaaaagttaaaaaattaaaagtaggagatccattagatttaaaatcaaatatgggatctatgatttcaaaaggacatctacaaactgttgatggatatattcaaaaaggaatagatgaaggagcaaaacttttatctggaggagtttcaaataataagcaaaaaggattttatgcgaagccaactttatttgacggattaaaagaaaatatgaccatagctcaagaagaaatatttggaccagtactcggtgttttaacagttaaaaacgatgaagaagctttgaaagttgctagtaattctaaatacggattacatgctagtatatttactcaagacataaacagagcatttcatctagctaaaagcttgccttgtggaactgtatcagtaaacact

SEQ ID NO: 214427 - DNA, 1435 bp, Unknown
  Bacterial polypeptide expressing nucleotide sequence isolated from the Sargasso Sea
atgctagatagaaaaaacttttacattgatggaaagtgggtctcaccagcagaaccaaaaaatttcaaagtaatcgatccatcaaatgaagaaatatgtgctgaaatatctattggaggaaaaaaagatgttgataaagcagttagcgctgcaaagaaagcttttgaaacttgggctttttcaaaaaaagaagaaagattagatttattagaaaaattatatgtagtttataaaaaaagatgggcagaaatggcaaaactcatctctcttgaaatgggtgcgccaatgaaattttcaacagaaatgcaagctgcaacaggagctagtcatataaaatcttttaaaaatatcctaaaagattttaaatttgaaaaagatctaggagaagaaaaaaataatcaaaaattactgtatgagccaaaaggggtttgtgctttgataacaccttggaattggccaataaatcaagttaacttaaaagtaattccagcactagcatcagcatgcactgtagtgttaaagccgtctgaaatagcaccgctatcatctatgttacttgcagagatgatagatgaagtaaaatttccttctggagttttcaacttagttaatggagatggagcaacaactggagatgcgttaacaagccatcctgacgtaaacatgatatcatttactggctcaactagagcaggtgcattaatttctcaaaatgctgcaaaagattttaaaagaattagtttagaacttggtggtaagggtgcaaatataatatttaaagatgctgattctgaagctgtatctagaggagttctaagatgttttagaaactcagggcaatcatgtaatgcaccaacaagaatgcttgttgaaaaatcaatttatgatgaaactgtaaaaaaagtaaaagaattagcaaataatactaaagtagatgcgccacaaaaagaaggtgatcatattggacctgtagtttcagaagtacaatataataaaattcaggatttaattcaaaaaggaatagatgaaggtgcaaagttaattgctggtggaactggaaaaccaaaaggttttgaaaaaggatactacgtaaaaccaacagtgttcgctgacgttaataatcaaatggaaattgcaagaactgagatttttggtccagtattatctataattccttttgaaaatgaagaagaggccatttcaatagctaacgatactccttatggtcttacaaattatattcaaactcaagataaagaaaaagtcaaaagagttgcgagaaaacttagatcaggaatggtagatgtaaatggagttggtatagccgttgcctcaccttttggtggatataaacattctggaattggacgagaagctggtacagaaggattaatagaatttttggaagtaaaaacagtcggtggctggaattaaa

SEQ ID NO: 214428 - DNA, 811 bp, Unknown
  Bacterial polypeptide expressing nucleotide sequence isolated from the Sargasso Sea
tatgattgaaaagaaagatttttatataaatggaaagtgggtttcgcctgctaagccaaatgactttgaagtaataaatccctcaaccgaggaaccttttgcaataatatctttgggctcgacagaagatgctgataaagcaataaacgctgccaagatcgcatttgagacttggagagaaactacaaaggaagaaagattagctttacttgagaagtttgatgaaatttataatagaagatgggatgaaatggttgaggcacaatctaaagaaatgggcgccccattagattttgcttccgaaacacacactaaaatgggtgctgatatttgcagaaataacattgaaattttaaaagattttaattttgagcatcaatttgatcctaaatctaataatcatataagatatgaaccaattggagtttgtggattaattacgccatggaattttcctatgaatcaaatcgtattaaaggttattcctgctttagctgctggttgtacaatgattttaaaaccatccgaaattgctccagtgtcagcagtattgtttgcagaaatgattgatgaagctggttttcctgcaggagtttttaatttagttaatggaaatggagaagttgttggaaatcatatttctggtcatcctgatattgatatggtttcattcacaggatcaacaagagctggaaaattaattcaaaaaaatgcagcagatactataaaaaaagttacccttgaattgggtggaaaaggtggaaatatagtttttgcggactcttatccaaatgccgttagagatggtgta

SEQ ID NO: 214429 - DNA, 1465 bp, Unknown
  Bacterial polypeptide expressing nucleotide sequence isolated from the Sargasso Sea
tatgtcagcatcacaacccgcactctccctgatcaaatcccttgcctatatagatggccgctggtgtgaagccggcggcggacgccggttcgaggtgcacaacccggccaccggtcaggtcattacccaggtgcccgacatggacgagggcgacacccgccgcgccatcgccgccgcccacgcagcccaacccggctgggcggcgctcaccgccaaggagcgcagcaaccggctctacgcctggttcgagctcatcatggccaaccaggaagagctggcccgcatcatgacctgcgagcagggcaagccgctggccgaggccaagggcgaagtggcctatggcgccagcttcatccagtggttcgcggaagagggcaaacgcgcctacggccgcactattccgggtttctccagcgaccgccggctggccaccatcaagcagccggtcggggtggtcgccgccatcaccccctggaacttccccatcgccatgatcacccgcaaagcgggcccggcgctggccgccggttgcaccattgtcatcaagccggccgccgaaaccccgctgtgcgccctggcgctggcggcactggcggagcaggcgggcatcccggccggggtcatcaacatcgtcaccagccatcaggctgcggcggtgggcaacgagctgtgcaacaacaagacggtgcgcaaactctctttcaccggctccacccgcatcggcaagctgttgatgcgccagtgcgccgacaccatgaagaagctgtcgctggagctcggcggcaacgcccccttcatcgtgtttgacgacgccgatctcgatgccgccatcgccggcgcgctcgcctccaaataccgcaacgccggccagacctgcgtctgcgccaaccgcatcctggtgcaagccggcatctacgacgccttcgccgagaagctcaccgccgcagtcaaggccttcaaggtgggcgacggcatgagcgagggcacccagataggcccgctcatcaacccggccgccgccagcaaggtggcagagctggtcaaacaggccaccaccgccggcgccgagctgctgctggggggtgaagcccaccccgccggccagctcttctaccagcccaccattctgggcaaggtggataaaaccaaccccattctgcaggaggagatcttcggcccggtggcgccgctggtgcgcttcgagaccgaggacgaggccatcgccctggccaacgacaccccttatggcctggccgcctacttctatggccgcgacatcgcccgtgtctggcgggtggccgagcagctcgaatacggcatggtcggcatcaacgaggggatcatctcgaccgaattggccccctttggcggcatcaaggagtcgggcctgggtcgtgaaggggcggctgaggggctggaggagtacctcgagaccaaatacctctgcttcggcggcatccgctag

SEQ ID NO: 214430 - DNA, 1019 bp, Unknown
  Bacterial polypeptide expressing nucleotide sequence isolated from the Sargasso Sea
ccaattgggtgtagtaacttcgattacaccttggaattttcctaatgctattattactagaaaattgggacctgctcttgcagcaggttgttcttttgttgccaaaccagctgaagacacacctttatcagccttagctatagctgtaattgcagaaagagctggaataccaaaaggtgttttgtccattattacttctaacaagtcacaaattattggcgaagaattctgttctaattctaaagttcgaaagcttacatttactggatcaacagaagttggaaaaattcttcttaaacagggttcttcacaagtcttgaaaatgtcaatggagttaggtggtaatgctcctttcattgtttttgatgatgccgatttggatgcagccgtagaaggagcaattctttctaaatatagaaataatggccagacttgtgtatgtgcaaatcgattatacgtccaggagaaggtttatgatgaatttgcacaaaagttatctaatgcagtaagtaaatttgaagttggtgatggttttaatgaaaatgtaactttaggccccttaataactgaggatgcagtcttaaaagtagaaaaccatataaatgatgctttatcaaaaggcgcaaagttaattactggaggtagccgtcataaattgggtgggaatttttttgaacctacacttcttacagaagttacaaagaatatggtagtttcttctaatgaaacatttggtcctgttgctcctctatttagatttaaagacgaagatgatgtaataaatcaagctaatgacactattttcggtcttgcagcctacttctattcaaaagacttatctagagtatggaaagtttcagaagcactcgaatatggaatggttggagtaaatgctggagtaatttcaactgagttagctccatttggtggtgttaaacaatcaggtttaggtagagaaggttctaaacacggaatagaggaattcttagaaatgaaatatatttgtatgtctgtttgaa

SEQ ID NO: 214431 - DNA, 1014 bp, Unknown
  Bacterial polypeptide expressing nucleotide sequence isolated from the Sargasso Sea
ttgctggaattgttccttggaactttcctttaatgatggcagtgtggaaaatggcaccagctcttgcagcaggttgttcggtaattatcaaaccagcagaggacacacctcttacagcaattagagttgctcaaattggaaaagaagctggaataccagatggagttttgaacgtgcttccaggttatggtgatgttggtgaggctttgggtcgacataaagatgttgatgcagtttctttcacgggttcaactgaagtaggtggttattttttaaaatactcaagtgaaagtaatttaaaacctgttgcattagagatgggaggaaaaagtccatttatagttttagaggatgctaaaatcactgatgatctgatagataatgctatgaattctgcattttggaatggtggacaaaactgttcagcaaatatgagacagatagttcataaaaaagttaaagatgagtttttagataaaattattaaaaaagttaaaaaattaaaagttggagatccattggatacaaaatcaaacatgggatccatgatttcaaaaggacatttacaaactgttgatggatatatccaaactggaataaatgaaggggcaaaacttttatctggaggtgtttcaagcaaaaaccaaaaaggtttttatgcgaaaccaactttgtttgatggattaaaagaaaatatgaccatcgctcaggaagaaatatttggaccagtgctcggtgttttaacagttaaaaatgatgaggaggcattaaaagttgcaagtaattctaaatacggattgcatgcaagtgtgtttactcaagacataaatagagcatttcacttagctaaaagcttgccttgtggaactgtatcagtgaatactttttctgaaggtgatattaaaactccttttggaggatacaagcaatcaggctctctaagtagagatcaaggtactgaagctttaaattcgtttctccaaacaaaaacaatctggataagtcataattaat

SEQ ID NO: 214432 - DNA, 1432 bp, Unknown
  Bacterial polypeptide expressing nucleotide sequence isolated from the Sargasso Sea
atgaaaacatatgaacaattttatataaacggagaatgggttgaccctgcagaaggtaaaaattcatttgatgtacttaacccagcaaatgaggaagtaattggtactattgcgatgggtagtgcagccgacgtagataaagctgttgaggccgcttctaatgcttttgattcattcagtcaaacaagtgttgaagaaaggctcgcaattctaggcaaaatagttgaagtgtatcaatctagatatgacgaaatagccgagactatatctatggaaatgggagcacctttatccttatctaaggctgctcaagctgcaacaggacttggtcactttgcacaagcaatagaaatattacaaggatttgagtgggaagagacaaaaggtaaaacagtacttagaaaagaacctattggtgttgtgggtatgattactccatggaactggccaataaaccagatttcatgcaaagttgctcctgcacttgctgcaggttgcacaatggttctcaaaccaacagagatagctccattaaacgcaatgctttttgcggaagtaatacatgaagctggagtccccgctggagtctttaacctagttaatggagatggcccaactgttggagaagctatgtctgcccatccacgcatagacatgatgtcattcactggatcgacaagagcaggtattgctgttgccaaaggttcagctgacactgttaaaagagttgcacaggagctaggaggaaagtcagcaaatattattctagatgatgctgattttgaatcagcaattaccggaggagctagacattgctttaataacagcgggcaatcgtgtaatgccccaactagaatgttagtacctgaatcaaggcatgacgaagcaaaagaaattgccaaacaagctgccgaaagcactaaagttggagatcctttcgctgaagatacgggaataggtccagttgttagtgaagttcaattcaataaaattcaaggactcattgaaaaaggaattgaagaaggtgccgaactagtttctggaggacctggaaaacctgagggtttaaatgctggttactacgtacgtccaactgtttttgctaatgttaataacgacatgaccatagctagagaagaaatatttggtcctgtcctttcaattctcccttacaaagacgaggaagaagcggtgaacatagctaacgatactgaatacggtctttatggttatgtctcatcaggagatgtagaacatgccaaaaaggttgcaaacagaattagagcagggagtattgccattaatggtgctcaagcggactttactgctccttttggaggctataaacaatcaggtaatggtaaagaatggggtccttttggatttgaagaattcctagaaaccaaagctgtggttgggtacgccgactaaa

SEQ ID NO: 214433 - DNA, 1444 bp, Unknown
  Bacterial polypeptide expressing nucleotide sequence isolated from the Sargasso Sea
tatgtacgaaaaatttggacaatttattgatggtaagtggcaacagtcatctgacaaatcaacatatgaagttattaatccagctaatgaagaagttataggtcatgcatcaaaagcaacacctggtgatgttgataaagcattaaaatcagctgcaaaaggtttagaagtttggaagcaaacaccaccttggcaaagatcttatatcattagaaaaatagcagataggatgagagaaaaacaagatgtgctagctaaatggatgacactagaagtaggaaaaccatttgcagaagctaaaggtgaagttggtggagctgcagatatatttgaatggaatgctgaagaaacaaaaagaatttatggacaaacagttgaaagtagatttacagatacaagggtacatgtttattaccagccaataggagttgttgcggccctaacaccttggaattttccattagttttgtcttcaagaaaaatttctacagctttagcagcaggatgttcagtaatagtcaagccagatattataacgccaggtacagtgatggagcttattgatatatgcagagaatgtggagttcctcctggagtagtaaatttattatcaggagatcctccaagtattgcacaacaattaatttcatcagatataattaaaaaaatttcagtaactggatcaacaagagttggaaaattaattcttaaacaagcagctgataaagtgcaaagagttacaatggaacttagtggtcattctccatttattgtttttgatgatgcagatattcaaaaagctactgatatggcaatttctgcaaaatatagaaataatggacaagtttgtatttcaccaaatagattttatattcaagaaaagaaaaaagatgaatttgttaatttgtttattgaaaaaacaaaaaaattaaaaataggtgatggtatggatccaagtgttcagcttggtcctttaacaacaaaaaaaagattaaatgaagtagaagaattagtagaaacaacaaaaaaagaaggcgcaaaagtattattaggtggaaaaagacctgctggatttaataaaggtttttattatgaaccaacaattttcgataatgtaaaagatgattatacaattatgaaagtagagccattcggtccattggtaccaatgttatcttttaaatcatttgatgaagtaattgaaagagcaaataataatgatttaggactaagtagttacatatgcacaaattcaatggaacaagctcatagagcatcagaactaatggaaacaggtaccgtagcggttaatactcctctagtagctatagcagaagcaccatttggaggaataaaacaaactggatatggaagagaaggtggctcaatggcgattaaagattatttgaatgttaaatacacacaccttggtatcaaaggttag

SEQ ID NO: 214434 - DNA, 1435 bp, Unknown
  Bacterial polypeptide expressing nucleotide sequence isolated from the Sargasso Sea
atgttagatagaaaaaacttttatatcgatggaaaatgggtctcaccaatagaaccaagaaatcataaagtaattgatccatcaaatgaagaaatttgtgcagaaatatctcttggaggaaaaaaagatgtagataaagcagttagtgctgcaaaaaaggcttttgaaacttgggctttctcaaaaaaagaagaaagattagatttattagaaaaattatatgtagtttataaaaaacgttgggcagaaatggcaaaactcatatcacttgaaatgggagcgcctatgaaattttcaacagaaatgcaagctgcaactggagctagccatataaaatcttttaaaaatattttaaaagattttaaatttgaaaaagatttaggagaagaaaaaaataatcaaaaattactttatgaaccaaaaggagtatgtgctttaattacaccttggaattggccaatcaatcaagttaatttaaaagtaattccagcattagcatctgcttgtactgtagtattaaaaccttctgagattgcaccactgtcatcaatgttacttgcagaaatgatagatgaggtaaaatttcctcctggagtttttaatttagttaatggagatggagaaacaactggagatgcattaacaagccatcctgacgtaaatatgatatcatttactggctctactagggctggtgcactaatttctcaaaatgctgctaaagattttaaaagaattagtttagaacttggaggaaagggtgcaaatataatctttaaagatgctgactctgaagctgtagcaagaggagttttaagatgttttagaaactcgggacaatcatgcaatgcgccgacaagaatgcttgttgaaaaatcaatttataatgaaactgtagaaaaggtaaaagagttagcaaataatactaaagtagatttaccagaaaaggaaggcgaccatataggaccagtagtttcagaagtacaatataataaaattcaaaatttaattcaaaaaggaatagacgaaggagcaaagttaattgctggtggaacaggaaaacctaaaggttttgaaaaaggatattatgtaaaaccaacagtttttgctgacgtgaataatcaaatggaaattgcaagaactgaaatttttggtccagtgttatctataattccttttgaaaatgaagaagaggctatttcaatagctaacgatactccttatggcctaacaaattatattcaaactcaagacaaagaaaaagttaaaagagttgcaagaaaacttagatcaggaatggtagatgtaaatggtgttggtatagcagttgcatctccttttggtggttataaacattctggaattggacgagaagctggaacagaagggctgatagagtttttggaagtaaaaacagttggtggctggaattaaa

SEQ ID NO: 214435 - DNA, 1411 bp, Unknown
  Bacterial polypeptide expressing nucleotide sequence isolated from the Sargasso Sea
atgaatagcgttctaaaaaaacaaaaagaatattttgttaaaaatggagctccatcaatagagttaagaatcgacagacttgaacgtttaaagtccttaattatggataatcgttacgattttgttgaaacattaaattctgactttggaaatagatctaaaaatgcgtcaatgttatcagatgtgtatggaattatgcctgcaataaatcttgccattaaaaatgtaaaaaaatggagcaaggatgaaaagaaatcttcaaattttccattcggcttgcttggtgctaaatcctatattagatacgaacccttaggaacagttggtatgatctctccatggaactttccagttaacctagcctttgtgcctttggtctctatatttgctgcaggaaatcaagttatgcacaaaccaagtgaacatacaccgttaacctctgcattactaaaagatttatgtgataaagcctatgatgaagttgaatttgctacgtttcttggagggccagaggttggagctgcttttactaagctaaattttgatcatcttctttatactggtggaggatctgttgctaagcatgttatgaatgcagcttctgagaatttagttcctcttacccttgaacttggcgggaaatccccagtagtgttaggtaaatctgctgatttaaaaacctccgcaaaaagaattatgtttggtaagacactaaatgcaggtcaaatttgcttagctcctgattatgtagttgttcataaagatcaaaaaaatgattttatcaaggaaactaaagatgctgtttctgagtactttcctaaaattaaagacaatgatgattacacatctattattaatgaaagtcattacaatcgtttaaaagatatgattgatgatgctatagaaaagggagcaacagttgaagaaataaatcctgctaatgaagatttctcacaacaagagttttataaaataccacctacaattgtctccaatacaaccgatgatatgaaaatcatgcaagaggagatatttggtccactattacctgttgttgaatatgatgaaattgatgaagcaacacaattgattaattccaaagatagaccactaggcctttattatttcggcaatgataaaactgaagaggacaatctattgaacaagacctcatcaggcggagtaacagttaataatgtaataagtcatcttcaacaaaatgatttatcttttggaggtgtaggaccttcaggtatgggtagatataaatcttttgaaggttttaaaaacttttcaaaccctcgagcttactataaagatgttagttttaaattagataaattttttgacgctgtaagacccccatataaaggtgatattgaaaaagttttaaaacaattaatgaaatagt

SEQ ID NO: 214436 - DNA, 1495 bp, Unknown
  Bacterial polypeptide expressing nucleotide sequence isolated from the Sargasso Sea
atgaaattaatagaacacttcgtaaacggtaaaataattccgggatcttcagataaaaaaggaaaagtttttaatccagcaactggcgaacaagagtcagaggtaagacttgcttcaaaatctgatttagacagtgctgttgaggtagcaaaaaaagcatttgaaacttggtctttaaaacctgctctacaaagagctagaataatattcaaatttaaagaattaattgaaaaaaattctgatgaattaacaaagttaatagtttcagaacatggaaaagtttatgaagatgcaagaggttctttaaccagaggacttgaggtggtagaatttgcttgtggaataccacatttattaaaaggtgagttttcagaaaatgttggtaccaatgttgatagttggtcaattagacaaccattaggagttgttgcaggtatcacacctttcaattttcctgccatggtaccaatgtggatgtttccaatagcaatagcttgtggaaatacttttattcttaaaccatcagaaaaagatccttcttgtgcaataagactagcagagcttctttctgaggctggtcttccagatggtgtatttaacgtaataaatggagacaaagaagctgttgatgcaattttagaaaacaaagatatcaaagctgttagttttgtaggatctactcctattgcaaaatatatttatgaaaattcagctaaaaacgaaaaaagagttcaagccttaggtggagcaaaaaaccacttagttgttatgccagattgtgatttagatggtgcagtaaatggtctaatgggtgctgcttatggttcagctggagaaagatgtatggctcaatcagttgcggttgcggttggagatattggtgatgaacttgtatcaagattatcaaaaaaagctgaagctttaaaagttggtcctggaatggataaaacatcagaaatgggacctttagttacaaaagaacatttagaaaaagttacaagttatgttgatttaggtgtcgaggaaggtgctaagctagtggttgatggtagaggtttaaaacttcaaggttatgaaaatggtttctatataggtggatgtttatttgatcatgtaaataaagatatgagaatttataaagaagaaatatttggtccagtcttatcagttgttcgagtaaaaacttttgaagaggcagcaaaattaattaacgaccatgagtatggaaatggagttagtatttatacaagagatggtgatgcaggcagaacttttgcaagtaaaattcaagtaggtatggttggtattaacgtgccgatcccagttccaatggcatttcatagttttggtggttggaaaagatcattatttggagatagcggaatgcatggtatggaaggaataaaattttatactaaacttaaaactgtaacatctagatggccttcaggtgtccgatcaaatgcggaatttgttatgccgacaatgaaataaa

SEQ ID NO: 214437 - DNA, 1477 bp, Unknown
  Bacterial polypeptide expressing nucleotide sequence isolated from the Sargasso Sea
tatggaaacttttaatcattatattaatggtacatgggagaaaccaagttcaggcaggtattttaaaacagaaaacccatatacttgtgaagtttgggcaaatgttgcacaaggtaatgaaaaagatgtagataaagctgttacagcagccaaaattgcatttgaaaatgattggtcagaattaacagccaccgatcggggtaagaagttagtttctttggcaagtttaattgaaaaagagtctaaaagattagcagaaattgaggttaaagataatggtaagttaattgctgaaatggaagctcaaacaaaatatttggctgaatggtatcgttattatggtggattagcagataaaatagaaggatcggttttgccatccgataaaccaggaatattcaattatacaaaatatgaaccactaggtgtggtcggaatgataacagcatggaattcacctttattattgttggcctggaagttggcaccagctttggcagcaggtaacacagcagtaataaaaccttcagaatttacttcagcttcaacattagaatttatgaaacttattgaagaggtgggatttcctaaaggtgttgtaaattgtgtaacaggttttggtgtggaggttggccaacctttagtggagcataaagatgttgcaaaaatagcatttaccggttcagatgtttctggtcaaaaaatatatgaaaatgcagccaaaaaaattatccctgtttccttagaattaggtggaaaatctccaaatatcgtttttgaggatgctgattttgatgctgcagtaatgggagttatatcaggaatttttgctgcaacaggtcaaacatgcattgcagggtcaaggctattagttcagaaaaatattcatgataaatttgtagaaaaacttatcaaagtagctggtgacgcaaaaattggagatccaatgtctttcaatactcatgttggaccggtaactacaaagcctcaatttgataagataatgaattatattgaaattgcaaaaacagaaggtgcagaatgtgtccttggtggaaaaccgtacactggtagtggctcaaaaggtagtcgttttatagagcccactatatttaaaaatgtatcaaatgaaatgcgtattgcacaagaagaagtctttggacctgttttatcaataatagcatttgaagatgagaaagaagccattgatattggtaatgatattatttttggattagctgctggggtttggacaaataatataggaagagccctccgcgtttctgataagttaaaggctggaactgtttgggtaaatacttatagagctgtcagttttatgtctccttttggtggttataaaaggtctggaagaggacgtgaaagtggacaagagtctataaaagagtttttacaggtaaaatctgtttggatttctcaaaacacttctgtagctaatccatttataattagataa

SEQ ID NO: 214438 - DNA, 1060 bp, Unknown
  Bacterial polypeptide expressing nucleotide sequence isolated from the Sargasso Sea
atgaacattgacaaattttacataaacggcaaatttatcactccccatggagaagaaaaaattgatattgtaaatcctgcaaccgaagaaataattggttctgttatttctggatctgaagatgatgtgaataatgcagtagattcttcaaatgctgcctttacattagcttcaaacttaaccattcaacaaagaaaaaaaattctcgaagaaattattgagggtatgcaagaaagaagatctgactttggtcaagttatttctgatgaaatgggtgcgcctatgtctttagctctaaaagctcaatttggttcagggacaatacactttaaaaacactctttcagttatcgagcaattctcctttaatgaggtccatgacaatattacaattaacaaattgcctattggtcctgttgggatgatcacaccttggaactggcctcttaatcaaatgtgtacgaaggttgcttcagcaattgccgcaggcacttcgtttgttttaaagccaagtgaaattactccaggagctgcgcaaatcctagctgagataattgataccacatcacttccaaaagggatttttaatttaatccatgggtatggccatacggttggaaaattaatgagtagtcactcgggacttgaaatgatatcttttactggttcaactaaagctggcatagatattcaaaaaaatgcagcagacaacgtaaaacgagtttcactggagctaggaggaaaatcaccaaatattatcttagatgatgttgatctcgagcaagctgtgaatatggggatgaagcaatgcttctttaataccggacaatcttgttcagcgccaacaagaatgttggtgcctcaaaatttaatggagcaagcaacagaaattgctgtggcagcaacaagtgaaatgattactggagatccaaaagaagaggatactttcctgggacctatttctaatgaaaagcaatttaaaaaagttcaagagttaattcagattggtatagatgagggtgcagagttatcatgcggtggagttggaagaccagatggaa

SEQ ID NO: 214439 - DNA, 943 bp, Unknown
  Bacterial polypeptide expressing nucleotide sequence isolated from the Sargasso Sea
gcaatgggcaacacttgcgttttgaagccggccgaagaagcctgtttaacagctttaactttcgccaatcttgcccttgaggcaggcctccctgccggtgtacttaatgtagtacctggacttggagccagcgctggagctgccctttgcgcaaacaaaggtataaaccacgtaagttttactggatcagttgcaacaggccgtttagttcaagcggctgctgcctataatattgttcccgtcactttagagcttggcggaaaatcaccccaattattttttgaagatgcaaatctggaaaatgcacttccttttcttgtaaatgccgggatccagaatggagggcagacttgttctgcgagcagccgtatattggtccatcgttctcgatatgacgaagtggttgatcgtatgtccaaaaagtacaaagaattaatcgtccggccggcaattgaagatgggtctttgggtcctctgatatctgaaaggcaaaaatcgattgtagaggatttcatatccaagggtcaaaacctaaacttagtcgctcaaggcgaaatagatggcaaggctccaaaaaaagggcattatgttgccccacacttatttgctgatgtttctgacgaccatattttggctaaagatgaaatatttggtccagtccaagtaattatacctttcgacacagaggaagaagccatcaacattgcgaatggtacggattatggtttagtggcaagcatttggacgaatgatggtgctcggcaaatgcgtttagccaaaaaactaaaatcaggacaagtttttataaacaattatggagctggtggtggtgtcgaacttccatttgggggacgcgggttctcaggacatgggcgggagaaaggttttgaagctctttttggtttttcaactttgaaaactgttgcaagctatcatcaataaa

SEQ ID NO: 214440 - DNA, 339 bp, Unknown
  Bacterial polypeptide expressing nucleotide sequence isolated from the Sargasso Sea
aaccaacagttttcactaatgttaataacaatatgaccattgctcgagaagagatatttggtcctgttatttgtttaataccttatcctgatattgaacaagcaattgagattgcaaatgattcagaatatggtttatcaagcatgatttcatgctctgatgaagtgaaaggccaagaaatagcgaagaaaataagaacaggacaagttattttaaatagaatctctcgaggagattatccagctccattcggtggatttaaaatgtcaggtaatggccgagaacatgggctttttggtattgatgaatacttagaagtacaagctgttataacttaat

SEQ ID NO: 214441 - DNA, 1420 bp, Unknown
  Bacterial polypeptide expressing nucleotide sequence isolated from the Sargasso Sea
atgagtaatgatttaaaattttatataaatggtgagtgggtaaagtctgaatcaaatgaaacaattgatgttataaatcctgcaaatgaagaaataataggacaagttactgctggcactaaagaagatattgataaagctgttagtgctgcattagatgctttctcatcttatcaaaaaacaacaaaaactcatagaattgaattactcaaaaacgtaattacagaatatgaagctagatatgatgattttgttcaaaccatttctaaagaaatgggatcaccaatctggctgtcagaagcagcgcaagcaaaaacaggaattaaaaatattcaagaaactttggatgcattagagagttatgaatttgagagaccagaaggggattacacactaataaaagaacctattggagtaattggcatgataactccatggaattggccgatgaatcagattacaacaaaagtttctgctgcattggcggcaggttgtactatggtccttaaacctagtgaaatatctccttattgcgcaatgcttctagcagaagtatttgataaggctggtgtccctaatggagtatttaacgtagtcaatggatatggacctactgttggagcagcattatcagagcatccagatgtagctatgatgtcatttactggttcaactagagctggaattgctgtagcacaagcatctgcaagttctgttaaacgtgttcatcaagaacttggcggcaaatcttcaaacataattcttgatgacgtagttgacctagaaaaatctgtaaaaggtggtgcaggacattgttttttaaattcaggacagtcctgtaatgctccaacaaaaatgcttatatcttcaaagaattacgataaagctgtagaaattgctgttgcaactgcaaatagtactactgttggagatccaaatggtgaatttagattgggaccaattgcaaataaagttcaatacgaaaaaatcttaaaattaatagaaataggtattgaagagggcgcaactttagtagctggaggtgttgaaaagccagatggatgtgacaaaggttactatgtaagaccaacagtttttgctgacgtaacaaatgatatgacgatagcaaaagaagaaatatttggccctgtccttgtaatgattaaatataacaatgaagaggaggctataaatattgccaatgatactgaatatggtctagcaggttatgttcaaggtgatccagatcatgccaaagacgttgctcgaaaaataagagctggacaagtaatcattaatgggggtgctcgaggaactggagctccatttggaggttataaagcctctggaaatggaagagagcacgggcttcatggtttagaggaatgccttgaaactaaagcaataattgcttcataga

SEQ ID NO: 214442 - DNA, 1435 bp, Unknown
  Bacterial polypeptide expressing nucleotide sequence isolated from the Sargasso Sea
aatggaaaataaaaaaaatttttatatcaacggcaaatgggtaacaccaaaaagcaaagaagaaatcaaggtaattgatcctgcaacagaagaaaattgtgcagttataacactaggcaacaaagatgatgtaaacgatgccgtgaatgctgccaaaaaagcttacagttcgtgggcgttttcatcaaaagaggagagaataaaattattagaaaaactttacgaaaattataagaaaagatgggctgacatcgcaaatgcgattacgatagagatgggagcaccaaaagattttgcaacaaaacttcaagctggcacaggtgctgcacatttaaaatcatttataagatatttaaaaaattttgaatttgaaaaaccattaggagaacatgcacctaaccaaagacttatttatgaaccaaaaggcgtatgtgcattaatcacaccgtggaattggccaatgaatcaggtttgtttaaaagtaatgcctgcaatagcgtctggctgcactatggttttaaaaccatctgaactagctccgttatcatcaatgatattagctgagcttattgatgagactaaaattccagcaggtgtgtttaatttagttaatggtgatggagcaacaactggcgatgcattaacaagtcatcctgacgttaatatgatttcatttactggatcaactagagcaggagcattaatttcccaaaatgctgcgaaagattttaaaagagtaagtttagaacttggtggcaaaggtgcaaatataatatttaaagatgctgatccagatgcaatagaaagaggtgctttgagatgttttagaaactcaggccagtcatgtaatgcacccacaagaatgctagttgaaaaatcaatgtataatgatgctgtggaaagattaaagaagtatacagaaaattttgaggttggtgatccaaaaaaagagggagagcatataggcccagttatttctgaaactcaatacaacaagatacaaactttaattaagaagggtattgatgagggggctaaattagtagctggaggcccaggcaaaccagatggattagaaaaaggttattttgtaaagcctactgtatttgctgatgttaataacaaaatggaaatagcaagaacagaaatatttggtccggttttatctgtaatgccttttgaaacggaggaagaagctattgaaattgcaaatgatactccctacggattaacaaactacattcaaaccaaagataaagaaaaagtaaagagagttgctagaaaacttagatcgggaatggttgatgttaatggtgctggtattgctgttgatgcgccttttggtggatttaagcattcagggattggtagagaagctggtgaacatggtctagaagagtttctagaggttaaatctgtaggtgggtggagttaa

SEQ ID NO: 214443 - DNA, 822 bp, Unknown
  Bacterial polypeptide expressing nucleotide sequence isolated from the Sargasso Sea
aatgagtaattttaaaaaaaattatgaattagctcttaataatgcaaaaagattatcagataaaattttgatagatggcaaattaatttctgctcaaaccgataaaaaaataccagttttaaatcctagtactggagagaatattggttcagcaccacaatgtgataagaatgatgttaatattgcagtcgaatctgcttttaaggcatttgaaaaatggaaaaaaataccagcacgtgaaaggggaaagatggttgctgcaggtgcaaagagattagaggaaagaaaatctgagattgagactttgctttccttagatactggtaatgctttaagaactcaagctgtgccagaaaccgctgcatctattgagctaacaaatatgtttgcaggactatcaggagagttaaagggtgagaattatccacccaatatcccgaatactattcattatacaacaagagatccaattggtgtggtttgtgcaattgtaccatggaatgctcctttatttttaacagttgctaaaattgctccagcaatagttgctggtaacagcgttgtgttaaaaacagctgaacaagcacctctttgcgctttactcttatctgaaatatttcaacaagaactaccgccaggagttttaaatgttatttcagggtatggagaagagtgcggtgaaccattggtaactcatgaaaaggtaagaaaagtaacttttacgggatctttttctgttggaaaaatcattgctgaaaaagctgctccaaaattatgtcctgttactttagaacttggtgggaaaaatccaaatataataat

SEQ ID NO: 214444 - DNA, 1495 bp, Unknown
  Bacterial polypeptide expressing nucleotide sequence isolated from the Sargasso Sea
catgaaattaattgaacattttgtaggtggaaaaataattcccggaagttcagataaaaaaggaaaagtttttaatcccgctactggtgaacaggaaaaggaagtaagacttgcctcctctagtgacttagaccaagcagtagtaattgcaaaaaaagcttttgagacatggtcattaaaaccttcacttcaaagagcaaggataatgtttaaatttaaagagttaattgaaaaaaattctgatgaattgacacaattaattgtttctgaacacggaaaagtttatgaggatgcaaaaggctcattaacacgaggattagaagttgtagaatttgcttgtggaattccacatttacttaaaggagaattttcagaaaatgtagggacagatgttgacagctggtcaatgcgtcaaccactaggtgttgttgctggaataacaccatttaattttccagctatggttccaatgtggatgtttccaattgctattgcatgtggaaatacatttatattaaagccatcagaaaaagacccctcttgtgcagtaagattagcagaattattgaaagaagctggtcttccagacggtgtatttaatgtgataaatggagacaaagaagcagtagatgcaattttaaataacaaagatattaaagcagttagttttgttggttcaactcctattgctaaatatatttatgaaaattcagcaaaaaatgaaaaaagagttcaggcattaggaggagctaaaaatcatttagtagtaatgccagactgtgatttagatggtgctgtgaatggcttaatgggtgcagcttatggctccgctggagaaagatgtatggctcagtcagtggctgtagcagttggtgatattggagatgaactagtgtctagattatcaaaaaaagcagaggctttaaaagttggaccaggaatggacaaaaactcagaaatgggccctttagtcactaaagaacatttagaaaaagtaaaaagttatgttgatttgggtgtaaaagagggtgcgaaattagttgtcgatggaagaaatttaaagttacaaggatatgaaaatggcttttacattggtggctgtttatttgataacgtgaaaaaagatatgaggatttataaggaggaaatatttggcccagttctatctgtagttagagttaaaacttttgaggaagcttcaaaattaataaatgatcatgaatatggaaatggcgtaagtatttatacaagagatggagacgctggaagaacatttgcaagcaagattcaagttggaatggttggtataaatgtaccaatacctgttccgatggcttttcatagttttggtggttggaagaggtctttgtttggagatagtgcgatgcatgggatggaaggaataaaattttatactaaattaaaaacgataacttcaagatggccctcaggaattagatctaatgctgaatttgtgatgccaacaatgaaataa

SEQ ID NO: 214445 - DNA, 1341 bp, Unknown
  Bacterial polypeptide expressing nucleotide sequence isolated from the Sargasso Sea
atgaagaggttattggtcaagtaacagctggaacaaaagaagatattgatgcagcagttaatgcagcaagtaatgcatttgtttcattctcaaagtcttcacaagaagaaagaatagacctattaaagaaaattattcaagaatatgaaaatagatacaaagattttgtagaagttattacaaaagaaatgggagcacctaattggttgtccgagagagcacaagcaaatacgggtcttataaactttaaagagactcttgaagctttagaggagtatgagtttgaaaaagaagagggcggttacactttaagaagggagcctattggtgttattgggatgattactccctggaactggcctatgaatcagattacaacaaaagtatctgcagctattgcaactggttgtacaatggttcttaaacccagtgaaatatcaccttattgttctatgttgcttgcagaggttatgcataaagctggcgttccaaatggagtatttaatttagttaatgggtatggaccaatagttggagctgctttgtcagaacacgaaaaagtcgacatgatgtcatttactggttcaacaagagctggaatagctgttgctcaagcttctgcaactacagtaaaaagagttcaacaggagcttggaggaaaatctgcgaacattatattagatgatgttgctgatctagaaaaatcagttaagggtggggctggtcactgttttttaaattctggtcaatcttgcaatgctccaacaagaatgttggtttcttcaaaaaattatgacaaagctgttgaagttgcagtagctactgctaatagtactactgttggagaccctaatggcgaatttagattaggacctatttcaaataaaactcaatatgaaaagattatcaagatgatcgaaattggtattgaagaaggagccagattagttgcaggaggtattgaaagacctgaggggtacgacaagggttattatataaaaccaacagtttttgctgatgtaacaaatgatatgactattgcaaaagaagaaatatttggtcctgttttatgcattatgaagtatgaaactgaagaagaagcaattgaaatcgctaatgacactgaatatgggcttgctgggtatgttcaaggcgaactatctcatgcaatagaagttggaaatcagataagagctggacaaataactattaatggtggcgccagaggcaatgcagctccatttggtggctataaagcttctggaaatggaagagagcatggtaaacatggtcttgaagagtgccttgaaactaaagcgataattgctccagccagttagt

SEQ ID NO: 214446 - DNA, 1474 bp, Unknown
  Bacterial polypeptide expressing nucleotide sequence isolated from the Sargasso Sea
atgccgctttcgctgacccgcaccgaactcctgcgctccgccaacctgatcgacggcacgtggcgcgacgcgcacgacggcagccgtttcgccgtgaccgatccggcacggctcgacaccgttgcccatgcacccgacagcggcgccgccgacgcgcgcgcggcaaccgatgcggcggtacgcgcactgcccgcgtggcgcgcgacgcccgctcgcgaccgcgcggcgatcctgcgagcatggcacgcggcgatcgtcgcgaataccgacgatctcgcgaagctgatgtcgcgagaacagggcaagccgctcgcggaagcgcgcggtgaagtcgcgtacggcgcgtcgtacgtactgtggttcgccgaggaagcgacgcgcacgtacggcgacatcattccgcagcagcagcgcggcaagcggctgagtgcggtgaaggagccgatcggcgtcgtcgcggcgatcacgccgtggaacttcccgctcgcgatgatcgcgcgcaagatcgcgccggcgctcgcggccggctgcacggtcgtcgcgaagcccgcggaggatacgccgctcaccgcgctcgcgctcgcgttcctcgcgcaggaagccggcgtgccggcgggcgtgctgaacctgatcacggcgtcgcgcgagcgcggcatcgacgcggccgccgactggcttgccgacagccgcgtgcgcaagatcaccttcaccggctcgacggccgtcggcaagctgctcgcgcgcgattcggccgcgacgctgaagaagctttcgctcgagttgggcggcaatgcgccgttcatcgtgttcgacgatgccgagctcgatgccgcggtcgacgggctgatggccgcgaagttccgcaatggcgggcagacgtgcgtatcgccgaaccgcatctacgtgcaggccggcgtgtacgacgcgttcgccgcgaagctcgcggcgcgcgtcgccgcgctgaaggtcgcgccggcgaccgacccggccgcgcagatcggcccgatgatcaacgcgcgggcggtcgacaagatcgcgcggcacgtcggcgatgccgtcgagcgcggcgcgcgcgtgctgacgggcggcaagcgcctcaccgagctgggcccgaacttctacgcgccgacggtgctcgccgacgcgagcgccgacatgcagctcacgtgcgaggaaacgttcggcccggtggcgccgctgttccggttcgacaccgaggacgacgccgtcgacgccgcgaacgacacgccgttcggcctcgccgcgtatttctacacgcaggacgtgcggcgcatcgcgcgcgtgtcggcgcggctcgaaaccggcatcgtcgggatcaacgaaggcgcgctcgcgagcgaggccgcgccgttcggcggcgtgaaggagtccggctacggccgcgaaggctcgcgctacgggctcgacgattacctgtcgatcaagtatctgtgccagggcgggctggactgac

SEQ ID NO: 214447 - DNA, 1495 bp, Unknown
  Bacterial polypeptide expressing nucleotide sequence isolated from the Sargasso Sea
catgaaaataattgaacattttgtagatgggaaaattattcctggctcatcaaaaaaaaaaggtaaggtttttaatccagctactggtgagcaacaggcagaagtaatgttggcctcatcgtccgatttaaataacgcagtggaaattgcaaaaaaagcttttaatgattggtcaataagacccccactacaaagagccagagtaatgtttaaatttaaagaattaattgaaaaaaattctgatgagttaacaaaaatgatagttgccgaacatggaaaagtttatgaggacgccaaaggatcacttacacgaggattagaagttgtcgagtttgcttgtggaattcctcatttattaaaaggagagttttcggagaatgtaggaactaatgttgatagctggtcaatgcgccaacctctcggagtagttgctggaattacaccatttaacttccctgctatggtgcccatgtggatgtttccaatcgcaatagcttgtggaaatacatttgtacttaaaccttctgaaaaagatccttcttgttcgataaaattagcagaacttttaaaagaagcaggtttgccagatggtgtttttaatgtcattaatggagataaagaggctgtagatgcaattttaaacaataaagatattaaggcagtaagttttgtaggctccactccaattgctaagtatatttatgaaaattctgcaaaaaatgaaaaaagagttcaggcattaggtggtgcgaagaatcatttagtagtcatgccagattgtgatttagatggtgctgttaatggattaatgggagcagcttacggttctgctggagaaagatgtatggcccaatcagttgcagtcgctgttggagatataggtgatgaactagtttcaagactctcaaaaaaagtagaaaatttaaaagtcggaccaggtatggataaagcgtctcagatgggccctttagttactaaagaacatttaaataaagttaaaggttatgtagatttaggagtaaaagaaggtgccaaattagttgttgatggtagagatttaaagctacaaggttacgaaaatggtttttatataggtggatgtttatttgatcatgttaagagagatatgagagtatataaagaggaaatatttggaccagttctatctgtggtaagagtcaagtcttttgaggaagcaacaaaattgattaacgaccacgaatatggaaatggagttagtatatataccagggatggtgacgcaggacggacatttgcaagtaaaattcaagttggaatggttggaataaatgttccaattcctgtgccaatggcttttcatagttttggaggatggaaaagatctctgttcggagatagcgcgatgcacggaatggaaggtataaagttttataccaaactaaaaacaattacatcaaggtggccatctgggataagatcaaacccagagtttgtgatgccaactatgaaataa

SEQ ID NO: 214448 - DNA, 1030 bp, Unknown
  Bacterial polypeptide expressing nucleotide sequence isolated from the Sargasso Sea
gtaattaaacagccaataggggttgtcacctcaattactccttggaattttccaaatgctatgattactagaaaattgggccctgctttagctgcaggttgctcctttgtagctaaaccagctgaagatacacctttatcagctttagctattgcagtaattgcagaaagggccggaataccaaaaggtgttttgtcaatagttacgtctaataagtcacaagttattggcgaagaattctgttctaattccaaagttcgtaagcttacgtttactggatcaacagaagtaggaaaaatacttctaaaacaaggttcttctcaagttttaaagatgtcaatggaattgggtggaaatgcacctttcattgtttttgatgatgcagatttagatgccgctgttgaaggagcaatcttatctaaatatagaaacaatggacaaacatgtgtatgtgcaaacagattatatgtccaagagaaagtttatgataaatttgcacaaaaattgtctaatgctgtaagtaaatttgaggttggtgacggttttaataaaagtgttacattaggaccattaattactgaggatgcagtattaaaagtcgaaagtcacataaatgacgctgtttcaaaaggagcaaaattaatttgtggaggaaaaaggcatgaattaggtggtaacttttttgaacctacactgcttacagaagttaaaaaaaatatgatagtatctacaaatgaaacatttggacctgttgcaccactttacagatttaaagatgaggatgatgtcataaaacaagctaacgacactatttttggtctggcagcatatttctatgcaaaagatttatctagagtttggagggtttcagaggctcttgagtatggaatggttggggttaatgctggcgtcatttctacagagctggctccatttggtggtgttaaacaatcaggtttaggtagggaaggttctaagcatggtattgaggagtttttagaaatgaaatacatttgtatgtcagtataaa

SEQ ID NO: 214449 - DNA, 583 bp, Unknown
  Bacterial polypeptide expressing nucleotide sequence isolated from the Sargasso Sea
actgaaagtgtcatctgttctagatacttctcatttaaaggttaaatttccattcaaggcaaaatatggaaactacatcaacggaaaatttgtagaacctaaatctggcaaatattttgataatttaagcccgatttccaatgagaaaatctgctcagttgcacgatcaaatgaaaaagacgtggaggcggcattagatgcagcacacgctgctttcccagaatggggaaagactgacatcacaacaagatcaaatatcttgtataagattgctgatgtcttagaaaaaaatctaaacttattagctgtcgctgagtgtttagataacggaaaacctatcagagaatgtatggcagcagacttacctttagtgatagatcactggagatattttgctggagtaattagagcagaggaaggatcaattgctgaaattgctaataatcaatattcatacaattttcatgaaccattaggagtagttggtcagatagttccatggaattttccattattaatggcaacttggaaattggcaccagctcttgctgcaggaaactgttcagttcttaaaaccagctga

SEQ ID NO: 214450 - DNA, 802 bp, Unknown
  Bacterial polypeptide expressing nucleotide sequence isolated from the Sargasso Sea
actgcatcaggacgtggactgtctcgccttcaccggctcgaccaacgtaggcaagctgatcatgcagtacgccggccagtcgaatctgaagcgcgtctggctcgaactcggcggcaagtcgccgaacatcgtgatgcccgattgccccgacctcgatcgcgcggcgaatgcggcggccggtgcgatcttctacaacatgggcgaaatgtgcaccgccggttcccgcctgctcgtccatcgcgacatcaaggaggtgttcctcgacaagctgatcgccgccgcgcgtagctatacaccgggcaacccgctcgatccgcaaacctcgatgggcgcgatcgtcgacaacgtgcagctcgaacgcgtgctcggctatatcgaagtgggccgtgccgaagcaaagctgttgctgggtggatcgcgggtcaggcaggagaccggcggtttctatatcgaaccgaccatcttcgagattccggctgccggggccaaagttgcgcgcgaggaaatcttcgggccggtgttgtcggtgatcacgttcgacacggttgaagaggcgatcaggatcgctaacgatagcgagtatggtcttgccgccgcattgtggacctcgaatctcaccaccgcgcatgaagtgtcgcgcaagctgcgtgccggcacggtatgggtcaactgctatgacgaaggtggggatatgaacttcccgttcggcggctacaagcaatcgggcaacggacgcgacaagtcgttgcacgcgctggagaagtacaccgagctgaagtccacgctcgttcggctgcgctaa

SEQ ID NO: 214451 - DNA, 1420 bp, Unknown
  Bacterial polypeptide expressing nucleotide sequence isolated from the Sargasso Sea
tatggcaacagacccagcaaaaatctcgccactcaccgagttactccagcgccaacgtgcaagttacttggcagccccgaatcccgattacgctatccgtaaagaacgcttaacccgccttaaggccgccttgctgaaattccaacagccgctcgtcgaggcgctgtcacaggactatggccacagatcggtcgacgacagcttgatttccgacattatgcccgtggtcaacaacctcaattacagtttgaaaaacctaaagaaatggctcaagccaagccgccgtcatgcaggcatcttactcgcccccgcccaagtgaaagtgcattatcaaccgctcggggtgatagggattattgtgccttggaacttccccgtcatgctctccatcggccccttagtcacggctatcgccgcaggcaaccatgccatgctcaaactctcggaattcacccccgcgactaatagcgtcatcaagcaattactcgccgaagtgtttgaagaatcccatgttgccgtggtcgaaggggaagctgatgtcgcggcgcaattttccgctctgcccttcgatcatctgctgttcaccggttcaaccacagtcggtcgccatgtaatgcgcgccgccgccaataatctcacgcctgtgactctcgagctgggcggtaagtcaccagtgattatcgcccccgatatgccacttgagatagcagtagaacgaatgatttatggtaagtgtttgaatgcaggacaaatctgtgtagcacctgactatgtgctttgccctaaggcgaaagtggcagaattcatccaagcctatcaggcgaaattccaggccatgtacggcgctattactcacaacaaagactacggcagcattattaatgcccgacagtttgagcgtctgctaaccgtgcttgaggatgccaaggctaaaggggctaaggtgatccccgcatcgaatgacgtgattgatagccagcatcgtaaactcgccactcagctcattactgacacaactgaagatatgctattgatgcaagaagaaatctttggcccactgctgccagtgattggttatgacagcctagatgaagccattagttacgtgaaccatcgcgcccgccccttagccctgtatgtgatgagctttgatgaagcgagccaacaaaaaatcctcaagcaaacccattctggcggtgtgtgcatcaacgaaaccgtgttccatgtggcggccgatgatgccccctttggcggtatcggtccatcaggaatggggcattaccacggcaaggaaggattcctcacctttagccacgctaaaaccgtgctcagccgaggtcgcttcaacacgggtaagtttgtccatcctccctatggcacatttatccaacgcatgttgatgaagctgtttttacgctaa

SEQ ID NO: 214452 - DNA, 1414 bp, Unknown
  Bacterial polypeptide expressing nucleotide sequence isolated from the Sargasso Sea
atgcaccgtgttttggagttgcaaaaaagtttaaatatcaaagaaggggcgcctgaaatagacttaagaaaagaccgtcttgatagagtcatcgctatggttaataaatatgataaaaaaatcatagaaactgtaaatcaagatttcggtaatagagattctatgatgtcagctgtaacagaagttgcttccgtcgtaggtcctatggagcatgctaaaaagaacttaaaaaaatggatgcgtacagaaaaaagaaaagctgccattgcccctttggggtctgcattgtctttattaggcgctaaagccgaagttagatatcagcccaaaggagtggttggggctattagtccttggaatttccctatgaatcttgcactagctccacttgcaggaattattgctgctggtaatcgagttatgcataaaccttcagaattaacccctgctacttcagatcttttaaaattgatggttgaagagtactttgatgaagcggaaatggcagtatttgtaggagatgctgaagtaggagcggcgttcagtggtctagcttttgatcatttgatctttactggaggaacgtcgatagcaaaacatgttatgaaggctgcctctgaaaatttagtacctctaacattagagcttggaggaaagtcaccagtagttgtcggtaaagatgcaaaaattaaagatacagcacaaagagtcatgcaaggtaagacaatgaatgcagggcaaatatgcttagctccagattacgcattagtgccagaaggaaaagttgatgaatttgtcaaagctagtgtagaagttacttcggagatgttccctgaaatgaaagataatgatgactttacatctataataaatcaacgtcattacgataggattcaaggatatctagatgatgctaaagaaaaaggagcagatattgtcgaaataaacccttccaatgaagatttttctcaacaaccacatcataaaatccctccaactttagttttgaatccctctgaggatatgaaaattatgcaagaagagatatttggtcctgtactgcctataaaaacttatagtgatgtatcagaacctgtggaatatattaatagtaaagacagaccattaggcttgtactacttcggaaatgataatactgaaaaagattatgttttagataatacgacatctggaggagtaacagttaatgatgttatttctcatattcaaatggaggatcttccatttggtggagttggtcctagtggtatgggttcttatcatggatatgacggttttaaagaatttagtcatgctaaagccgtatataagcaaactaaatttaatttgatgaaattagctggactagttccgccttacaagaagaaggaagaaaaagctaaaacggcataaa

SEQ ID NO: 214453 - DNA, 716 bp, Unknown
  Bacterial polypeptide expressing nucleotide sequence isolated from the Sargasso Sea
aatgagtaagattatacaaaattttaaaaatatttcatatggtccagcaccagaggatagtaaggatgtaatgttatggattaattctcttaatgatccaaatcttttgttcattaatgggaagtgggtaaaatcaaaatcctctaggaagattcaggtaattaatccagcaacaaataaaaaattaactacattatctatttccaataaaaatgatgttaatgcagctgtgggagcagctaaaaaagcatattcttcttggtcaaaaacttcatcagatacacgagccaaatatctttatgctctagcaagattaattcaaaagcactctcgctttctttctgtattggagactattgataatggaaaaccaataagagagacgagagatattgatattcctttggtagcaagacatttttattaccatgctggttgggcgaaaaaaattaatacagatacacataaatcaataggtgttataggtcagattattccttggaatttccctttgcttatgatggcttggaaaattgcgcctgctatcgcagctggaaatactgttgttttaaaaccagctgagtttacttccttaacagctttatactttgctgaactatgtcaaaaggctaaaatacctaaaggagtgattaatattattacaggagatagaagcacaggtgagcttattacatctcatgtagatacaaaaaaaa

SEQ ID NO: 214454 - DNA, 1011 bp, Unknown
  Bacterial polypeptide expressing nucleotide sequence isolated from the Sargasso Sea
tatgtgctttaataacaccttggaactggccaatgaatcaaacctgtttaaaagtgatgcctgctttagcttcaggctgcactatgatactaaaaccatctgaagtagcaccgttatcagcaatgatattaacagaactaattgatgaagcaggttttccttcaggtgttttcaatttagtgaatggagatggcgcaacaacgggagatgctttaacaagccatcaagatataaacatgatctcgttcacaggatcaacaagagctggggctttaatatcgcaaaatgctgctaaagatttcaaaagagtgagccttgaacttggtggaaaaggagcaaatataatttttaaggatgcagaccccgaagctatcgagagaggagctttgagatgttttagaaactcaggacagtcatgtaatgcaccaacaagaatgcttgttgaaaaaagtatgtatgacgaggcggttgaaagagtaaaaaaatttgcaaatagtatgaaagttggagatcctaaaaaagaaggggagcacatcggtccagtagtatctgaagtacagtacgaaaaaatacaatcacttattcaaaaaggtattgatgaaggagctaaacttgttgcagggggagtgggaaaacctgacggaatagataaaggttactttgttaaacctacagcctttgccgacgtaaataatcaaatggaaattgcaagaactgaaatttttggtccagtgctttcaattatacctttcgaaaacgaggaagaggcaataagtattgcaaatgatactgattacggtctaactaattacattcagactaaagataaagaaaaagccaatagagttgcaagaagacttagatctggaatggtagatgttaacggagctggtatagcagttgatgccccatttggagggttcaaacattctggtataggtcgtgaagcaggaaaagaaggcttattggaatttttagaagttaaatcagtaggtggttgggctaattaaa

SEQ ID NO: 214455 - DNA, 1321 bp, Unknown
  Bacterial polypeptide expressing nucleotide sequence isolated from the Sargasso Sea
atgaaaaaatatcaacactacataaatggagagtggattgactccaaaggaaatgaagttattgccgttgtcaatccagcgacagaagaagtaataggagaaatttcagctgctaataaagatgacattgatctagctgttgcagctgcaaaagcagcttatgattcacgagtgcttgtcgatatgaatccaatggagagagcaaagttaatgcgcggcatcgcagatgaattaagaaagatcagcaaagatggtggtgcactactatgtgcagagaatggaaaattgctaggtgcatctgagtatgagtttttggacgccgcaaactattttgactattacagtggattgactgacaaaattgaaggtcaaactataccagtgaacaatcaggtcatggattataccttgtatgaaccttatggtgtttcaggtcatattgtgccttggaactttcctatttcaatgttggcacgttctctagcctgttcatttgccgcgggaaattcaacagttataaaaccagctgagctaactcctctagcaaccacttctttttttgcacaggctattcacaatgcaggcgtaccgaagggacttgttaatatagtaactggatacggcgttgaagctggagctgcattgacatcacatgatgatgttgctcaaatcactttcactggttctgtgaaaacgggaaagacaatacttcatgctgctgcagaaagagctgtgccagcagtagtagagctaggtggtaaatcagctgccgttgttttgccagacgctgatatagataaagttgttaacgcaacaaaagttggaatatttagtcaagccggacaaatatgttcagcaatgtcacgcatgatcgttcataaatctataaaagatgaggtattagataagctatcagaattagccaaatcgataaaagttggaccaggcaatgaggaaggcgttgatctcacacctgtaatatcagaagaacaacttcaaaaagtagaaaactatgcaagatcaggtttacaagctggagcgacagcaatatctggaggtcatcgagttgatcgtaaaggatatttctttgagccaacaatttatgctgatgtgaagcctgatatgaccattgctcaagaagaaatttttggtccattcttatccgtgctggaatacgaagatcacgaagaagcagttcatattgcaaatgatacagactatggtttagcggctggcgtatttactaaagatgttgatatggcaacgaaaacagcagctaagcttaatggcggacaagtttatgtgaacagttggtttacgg

SEQ ID NO: 214456 - DNA, 1435 bp, Unknown
  Bacterial polypeptide expressing nucleotide sequence isolated from the Sargasso Sea
atgaaagaatatcatcagttttatattaatggatcatgggttgatccaataaatggacttaataagcttgatgttttaaatccagctactgaagaacccataggttctattgctttaggatcttctgaggacgtaaatgctgcagtggacgctgccaaaaatgcttttgccagctttagttcttctgaaaaagaggaaagagttggttatttagagaaaataatagaaatttacatgaaaagaagctcggaaatggctgaagctatttcttctgaaatgggtgctccaatgtcattagcttcgaaagcacactcaccctccggtttaggtcattttatgacggctctggagactcttaaaaattacgactttgaacaacaaaaagacgggctgtttattagaaaagaagcaattggcgtagtaggtatgattactccttggaattggccaataaaccaaattgcttgcaaagttgcacctgctttagctgctggctgcacaatgattttaaaaccaagtgaaattgctcctttcaatgcgatgctcatggctgaaataattcatgaagcgggaattcctgatggagtgtttaatcttgtcaacggtgatggacctacggttggtgaggctatgtcctctcatcccgacatagacatgatgtctttcacaggatcaacaagagctggaatccaggttgcaaaaggttctgctgattcagttaaaagagttcatcaagaattaggtggaaaatctccaaatattattttagatgatgcagatttcgaaaatgctgttatcagaggaaccagacatatgtttaataacagtgggcaatcgtgtaacgctccatcgagaatgttagttcctgagtcaaggcaagatgaagcaaaagctgctgctaaaaaagctgcagatgagaccaaagtgggtgatcctaatgctgaagatactgtaattggtcctgtggtaagcgaagttcagttcaataaaattcaaggtctcattgaaaaaggtattgaagaaggagcagaattagtctgcggaggtccaggtaaacctgatggtcttaatcaaggtttctacgttaagccaactgtatttgctaacgtaaacaatgacatgactatagccaaggaagaaatttttgggcctgttctgtgcatcattccttataaagatgaagatgaagctattgaaattgctaacgatactccttacggattagcaggctatgtttcctcagagaacatagatcatgcagtagaagtagctagaaaaattagaagtggaaatgttcacataaataatgctccttcaggcttaacttctcctttcggtggttttaagcaatccggtaacggaagagaatggggagaatttggttttgaagaattcctagagattaaatctgttttaggtgctggagctgcttaag

SEQ ID NO: 214457 - DNA, 1321 bp, Unknown
  Bacterial polypeptide expressing nucleotide sequence isolated from the Sargasso Sea
atgcaaaccattgatacaatatttagagcccaacaagctaaaagcatatctttaaggaatggcactgctaaagaaagaagggacaagctaaaactacttcttaaaaatttcttagaaatggagaacgatgttcttgctgctctttcttcagatttgggaaagtccaaaactgaagcgctcttagcagaaatttatggggtgaaggctgaagcagactttgcaattaaaaatcttggaaggtggatgaaaacaaaaagggttgcaagccctcttgctatttcttttaccaaaagctgggtaaaacctgagccaaaaggaagtatcttgataatttctccttggaattatccaattatgctttgcttgaacccgctgattgctgcgattgcatctggcaatacagctgtagttaagccttctgagcttacaccggcatctggaaagcttgtaaaaaaactagttgaaaaaacattttcatcagatgaggttgctgtttttctgggtgaaaaagatttagcacaaaaacttttggagcttcccttcaatcatataatgtttactgggagtccaagggtcggaaagctagtaatggaagccgcctccaaacaccttgcgggccttacgctcgaacttggtgggaagtcccctgttattgttgataaacatgcaaacataaaagacgctgcctggaaaatttctttttataagtttgcaaacgcaggacaaacctgtactgctccagactatatactttgcgatgagtccattcatgacgatcttgttgtggctttacaggaaaatatatcacgattttttgccgaaggggtagacgctgcaaaaaaagactactgctctattgcaaacgagcatcacttcaataggttaaaaggcgctcttgctgatgctctttccgatggagcagagcttgcgtgcggtggagaagtaagccaagaggggttatattttacccccgctattttgatgggcgtaaattacgataactcaattatgaaagaagaaatctttggacctatcctgccaattataaaggttcaaagtctggatgagtctattaactatgtaaatgaaaatgaaaagcctttagctttatacctttttagcaacaaatccgttgtacacagcaaggtgttaaagagcacctctagcggtggtatggtaataaacgattgcgttctacatcatatgaatccaaacctccctttcggggggataaataatagtggcgtcggcagctatcacggtaaatttggctttgatgccttctcacactacaaagctgttttgaaagtagttctgtttc

SEQ ID NO: 214458 - DNA, 1387 bp, Unknown
  Bacterial polypeptide expressing nucleotide sequence isolated from the Sargasso Sea
attgctaaatgacaatttatggtacccaactgataaaatttttataaatggccaatggaaagattgcaattctaagaaaagacttcctatagaaaatccttcaaatggggaagttattgctgaaatttcagattcttgtgaagttgatattgatgaagctgtaaactcagcatcaaaggctttggataattcttggggggatctaactgcctctgaaagaggcagacttcttttgaaattatctgaattagtaagaaatcgtatagataatctagctataattgaatcatttgatgttggtaaaccactaaagcaagcaaaaagtgatgccttagcattagcccgttattttgaattctatggaggggctagtgataaaataatgggggaaaccattccctatttaaaagattatactgtatatacattgagagaaccacatggagttacgggacatataattccttggaattaccctatgcaaattattggacgcactttaggtgcttctttagcgatgggaaatgcgtgtgttttaaaaccttctgaagaagcgtgtttaactgctctcgctattgggcagctcgccaatgaagctggtttcccaaaaggttcaataaatattgttactgggttaggtgaaaaagcgggatcaagcttaatcaaacatcctgatattaatcatatctcatttacaggttctgttgaagtaggaaaaaaagttcaaactgaagctgccaaaaatttaataccagttacgttggagctaggaggtaaatctcctcaaattgtatttgaagatgctaacctagaaaaagctttaccttttttaattaacgcaggaattcaaaatgcaggtcaaacatgctcagcatcttcaagaattttggtctctaagaaaatctatgcagaactaatagacaaaatgtctaaattatactgtaatcttaaagttgcacaggccatagatgataaggacttaggtccagttatttctagtagacagagagaaattataacaaattatcttaagctatcaaaagaccttgaatgtatttcggaaggcaagtttgaaacgaaccttcccaaaaaaggctattatgttttacctaaactttatggggatgttaaatattctcatagacttgctcaagaagagatttttggtccagtccaggttgttattccttttgaagatgaagaagatgctgtaaagattgcaaatagtacaaaatatggattagttgcttcgatctggaccttggacggagcaagacaaatgagggttgctaaagctataaaatcaggtcaagtctttataaataattatggcgcaggtggtggtgtagaactaccatttggaggaaagggttactctggccatgga

SEQ ID NO: 214459 - DNA, 774 bp, Unknown
  Bacterial polypeptide expressing nucleotide sequence isolated from the Sargasso Sea
aatggaaaacttgagaaaattttatatagacggtcaatgggttgatccaatatcgacccaaacaatgccggtagttaacccggcaactgaggaaaaaattggtgatgttgcgcttggtaatgccgaagatgttgatcgagccgtagcagctgcaagttcagcttttggaaaattctcccagttcagtaagaaagatcgattaaatctcttgaaaaccgtactgatgatcacggatcgccgcttggaagacttagctcaggctatgagcatggaaatgggtgccccgataacaatggcgaggagtgcccaagcagatgctgcgattgggcacctcaaggggtttatcgatgcccttgaagattatgacgagcgcagcaaattaaaaaatggtgatattatagttcgtgagccgattggcgtttgtgggctaattacgccatggaattggccgataaaccaaattaccttgaaagttctacctgcattggcaactgggtgtacttgtattttaaagccgagtgaatataccccgatatccgccatgatttacgcagaaatcttaaatgaggcaggatatccaaaaggggtgtttaatcttgtccatggagagggtccagtggtggggacggcaatgtctcagcacccagatattcagatgatgtcatttactggctcaacgcgagcgggtactgccgtcacgtgtgatgcagcagaaaccgttaagcgtgttacacttgaacttggcggtaaatcgccaaaccttgtttttgctga

SEQ ID NO: 214460 - DNA, 691 bp, Unknown
  Bacterial polypeptide expressing nucleotide sequence isolated from the Sargasso Sea
gctggggggcaaatctgcgaacataatccttgacgatgttccagatttcgcgcgcgccgtctctggtggagttgcgggctgtttcggtaacagcgggcaatcttgtaacgcaccaactcggatgttagtgccgcaatcccgaatggaagaggcaataaatgcggcaaaggcagcagcagctaaatctgttgtcggtgacccctctgctgaaagcacaagaatgggtcctgtcgtaagtgaaatccagttcaacaagattcaaacactgattcaaaaaggcattgatgagggtgcagatttgatcgctggaggcccgacacgccctgaaggaattgaggagggttattttgttagacccacaatatttgcaaatgtatcaaacgatatgactatagctcgcgaagaaatttttggacctgtgctttcaattatcgggtatcaagacgatgatgatgcggtgtctatagctaacgataccgattacgggctttcgggctacgtatcaggtgaaccagagcatgcacaggcgattgcgcgaaaactccgcacaggcaatgttcatatcaacggtgctgggccagatttttcagcaccattcggtggctacaaacagtctggcaatggtcgagagtggggaatcgaaggatttgaagaatttttagaaaccaaagctatgatgggtgcggcatag

SEQ ID NO: 214461 - DNA, 724 bp, Unknown
  Bacterial polypeptide expressing nucleotide sequence isolated from the Sargasso Sea
aatgcagcaaaagattttaaaagagtaagtttagaactaggtggtaaaggtgcaaatatagtgtttaaagatgctgatcctgaagcaattgaaagaggagcactaagatgttttagaaattcaggccaatcttgtaatgcacctactagaatgttggttgaaaaatcactttacagcgaagctattgaaaggttaaaaaaatttgcaaatgaatttaaagttgatgatccaaataaagaaggagatcatataggcccagtaatatctgaaaaccaatttaataaaattcaaagtctaatcaaaaaaggtatcgacgaaggtgcaaatttagttgcaggaggaccgggtaaaccagaaggacttaaagatggatattatgtaaaacctactgtatttgcagatgttaacaacagtatggaaatagcgagaacagaaatttttggcccagttttatcagtaattccatttgaaacagaagaagaggcaataaaaatcgctaatgatactgattatggtctaacgaactatattcaaacccaagataataaaaaagttcaaagagttgcaagaaaattaagatctggaatggttgatgtcaatggagcaggaatagctgttgatgcaccatttggaggttataaacattcaggaattggtagagaagcgggtaaagaaggattgactgaatttttagaagtaaaatcagttggaggatggaattaaa

SEQ ID NO: 214462 - DNA, 820 bp, Unknown
  Bacterial polypeptide expressing nucleotide sequence isolated from the Sargasso Sea
tatgggaccagtcgtaggcgaagcaatgtccgcccatcctgatattgatatgatgtcgtttactggatcgaccagggggggcgttgcagttgcaaaggcgtccgctgatagcgtcaaaagagtaagtcaggaactaggcggaaagtcagctaatatcattttagacgatgctgactttgaaaaatcaatacgcgctggggttgattcttgtatgagtaacacgggtcaatcatgcaatgcgcctacaagaatgttggttccggcggctcgaaaggatgatgcatactctatcgcgaaagatgcggccgcaaaggtaatagccggcgaccccaaaaaagacgatacaaccattggtcctttggtcagcgacgtacaatatgaaaaagttcagactttaattcaaaaaggtatagatgagggtgctgaactactgattggtggtactggaaagccaaacgggttggaaaaaggctactacgctaagcccacggtttttggcgatgtccaaaacgatatggcaatttcaaaggaagaaatttttggccctgttctttcaatgcttacctacgagaatattgatcatgctgtagcgattgcaaatgatactgaatatggccttgcagcttatgtttcaggggaagacaaagaaacactcacttcaattgcaagacgtctgcgcgctggccaaattcatgttaactatggatccggtggggcggacgcaccatttggcggctacaaacagtcgggcaacggtcgtgagaaagcggaatggggcttagaagaatttcttgaagttaaggcaataatgggggcataa

SEQ ID NO: 214463 - DNA, 508 bp, Unknown
  Bacterial polypeptide expressing nucleotide sequence isolated from the Sargasso Sea
aatgacgattaaagtaggtataaatggttatgggcgaatcggacgaaatattttacgcgctctttatgaatcaaagcgtactaacgaaattgaaataattgcgataaatgatttgggtgacacaaatacaaatgcacatctaactcaatatgataccgctcacggcatattcccaggtactgtaactgtagaaaatgacaatatgattattaatggagacaaggttcatgtcttgtcagaacgtgatccttctaaattgccttgggggaaattaggtgttgatgttgttattgaatccactggtttttttactagtaaagcaaaagctcaagcacatattaatggcggtgcaaaaaaggttattatctcagcgccgggaggaagtgatgtagatgcaaccgttgtttacggtgtcaatgatgatgtgcttcgctcaacacacacagttatttctaatgcatcatgcacaacaaactgtctagcacctgtcgtaaaagttctacacgaa

SEQ ID NO: 214464 - DNA, 841 bp, Unknown
  Bacterial polypeptide expressing nucleotide sequence isolated from the Sargasso Sea
atgcgtgaacttgcacattataagatgtttatcaatggtcagtggctagatagtgaaaataataaaagatttgaaagcacaaatccttctacgggagaaccttgggcatcaatacctgaggcttcagcaaatgatgttgataagacagttaaatgtgcttacgaagctttttcttctggtgaatggtctaaaataactccaactcagagaggcaaatatctcagaaaattaggagaacttctttctgagaaatcagaggaattgggtaaaatagaatccattgatactggtaaattacttaaagagacacgttggcaagcaaaatatatagctgaatatttccactattatgctggattggcagataaaattgaaggatcgacattacctattgataagccagatatgtatgcttttaatgttagagaacctcttggagttgttgcagctattgtgccctggaattcacaattatttttagttgcagttaaaattggaccggcgttagctgcaggtaatacagttgttttgaaggcgtcggaacatgcttctgctgccatgcttgaatttggtaaagtggttcaagaagctggttttcctccaggcgtggtaaatattatttctggacatggtgaaccttgtgggaaaacgttaacaacacatcctctagttcatcgaataagctttacaggaggaccttccacagccaggcatgtcatcagaaactctgccgaaaactttgctgaagtttcccttgagttgggaggaaaatccccatttatagtttttgatgatgcaaatatagaaagtgcggtaaacggttctatagccggtattttcg

SEQ ID NO: 214465 - DNA, 1204 bp, Unknown
  Bacterial polypeptide expressing nucleotide sequence isolated from the Sargasso Sea
catggataatagggacgtgctgggaatgatggattgtgttgactcaggaaatgcactctccggtatgaaaggtgatgtaaattgttcttctgattccctgaaattttttgcaaacctaattacagaaatcaaaggacagactcactcagaaaagtcaggtcatttaaattttacaaggagacatccttatggtgtagttgccaagattaatcccttcaatcatcctctgcgtttttgtgcagaaaaatcagctgcagctctagctgcaggaaacactgttgtggttaaggcctcggaacaggctcctttgtcaagtttaagatttgctgaaatctgtgaagaggtccttcccccaggagtagtcaatgtattaactggtgacaaaatttgcggtgatgcaatggtacgtcatcccgatgtaagacgtgttggggtagttggttctgttgctacaggaaaaataattgctaaagctgcggcggaagatctgacccatgtgacacttgaactgggcggaaagaatcctatcatcatatttccagatgcaaatccaaaacaagcagcaagttatgcagtaaaaggtatgaatatgaaccgtcaaggacagtcttgcagttctacttcaagagttcttgtccaccaggatcttcatgatgcggttttagaagaaatggttaaattagtcgaaaaacttccagtaggtttaccatggatcgaagagaatgagctggggcctgttgtttctaaaatacagtataagaaaattttagagtttatttcatctgcacaaaaagaaggcgcacagttgattactggaggaagttcacctaaagatgaagaactaaaaaatggttttttcattcaaccaactatctttgatcaagttacacctgaaatgaggattggcagtgaagaaatttttggacctgtaatgtctgtttttaaatgggatgactatgaaaatatgctatcgattgctaatggaattgaatacggtctcactgcaatgattgttacagataatctgaagcaggccatggaaactgcagagcgaattgaagcaggttatgtttggataaattcaacaggacgctatctgggggcaccctatggaggctggaaggcaagtggaattggtcaagaagaatgctttgaagaacttatgagttatactcaaatcaaaaacgtaaatatgcgatggtag

SEQ ID NO: 214466 - DNA, 1492 bp, Unknown
  Bacterial polypeptide expressing nucleotide sequence isolated from the Sargasso Sea
tatggctctcgctctaaatgatgtaatcgaaaaaaaatcatcgattgattttaaaacacaagcattcatcaatggcaattatactaattctgttacaggtaaaacctttgaaagcataagtccagttgatggctcattaattgcaaatgtctctgagtgtgatgttgaagatatcaataatgctgtaaaggcagcaagagcagtttttgaaaaaggctcatggtcaagaatggctccctctaaaagaaaaaaaatactttttaatttcgctgacctaatgaaaaaaaacattttggaacttggactgttagaaactttaaatatgggcaaaccaataacaagagcgacaggagatatagcagcatgtataaattgtactaagtggtatgctgaggctattgataaattgtacgatgatgttgctcctacaagcgataatattatagcaaccattactaaagaaccgctgggagttgttggcgcggttactccatggaatttcccattacttatggcctgctggaaatttgctccagcacttgcaactggaaatagttttattctaaaaccagctgaacaatcaccactatcagcattaagggttgctgaattagcaatggaagctggaataccagaaggagtatttaatgtcattccaggttttggccctactgctggaaaagctcttggtacgcatatggatgttgacaaattaggttttactggctctacagaagttggcagatattttttatcttatgcaggtgaatcaaacatgaaaagagtttcacttgaatgtggaggaaaatctccaaatattatttttgctgacgcgcctgatctagatcatgctgctaaaatggctgctgacggaatgtttggaaatagtggtcaagtatgtgatgcgccatcaagactgcttgtagagaattctattaaagatgaatttttagaaaaggttgtaaagtactcggagccatggacacccggcgatccctttgatccaagtactctgatgggctctattgttgatcatactcaaactaaaagaattatggattacattgacaccggcaaaaatgaaggggcaaatgttattactggaggtgaacaagttttacaggaaacaggtggttgttatgttaaccctacagtttttaaagatgttaagaattcaatgaaagttgctaaggaagaaatatttggtccagttttgtgtactatagactttgaaaatgaagatgaagctttagaaattgctaatgatacaaactacggactaaatgcaatgatttggtccaatgatcttaataaagttcataagcttgcaaagagaattaagagtggcaaagtattgataaatagtgttagtgatggagatatgtcactacctcacggggggtataaacaatcaggttttggaagagataaatcacttgaagcgttaggccaatatactcaaactaagcttacactgatagaaattaaatag

SEQ ID NO: 214467 - DNA, 1411 bp, Unknown
  Bacterial polypeptide expressing nucleotide sequence isolated from the Sargasso Sea
atgaataaagttctaaatgatcagaaagaatattttataaaaaatggctcaccttcaattgagttaaggattgataggttagaaaggcttagaacattaataatggataatcggaatgattttgtcgaagctctaaatacagattttggcgtcagatcaaaaaatgcttcaatgttatctgatgtttatggaatatttccagctattactcatgctgtaaagaatgtaaaaaaatggaataaaattgaaaaaaaatcatcaaatttcccgtttggtcttataggcgcaaagtcttatattaagtacgaacctttaggaacagtaggtatgatttcaccgtggaatttcccagtcaatcttgcctttatgccgcttgtatgtatttttgctgctggaaaccaagttatgcacaaaccaagtgaacacacacctttaacagcatcattattaaaagatttatgtgataaagcatatgatcaaaatgaatttgcaacattcctaggtgggcctgaagttggtgcagcttttacacaattacaatttgatcatcttatatatactggtggaaatgcagttgcaaaacacgtctataactctgcttcaaaaaatctagttccatgtacacttgaactaggtggtaaatcaccagttattataagtaaaacagcagatatgaagactactgctaaaaggattatgtttggaaaaacattgaatgctggtcaaatatgtctagctccagattatgttgttgttcataaagataaaaaagatgaatttataaaagaaacaaaagaagctgtttctgagtattatcctgatattaaaaataatgatgattacacctcaataatcaatcaagctcattatgataggttaaatgatttattagatgacgctattcaaaaaggagcaaatgtagagcccataaacccatcaggtgaagattttagccaacaagaattctataaaatcccaccaacaatagttacaaatacaactgatgatatgaaaattatgcaagaagaaatttttgggcctttactaccagtgttagagtatgaagaaattgatgaagctactgacttaataaactccaaagataaaccattaggtttatattattttggtcaaaataaatcggaagaagataatttattaaataaaacctcatccggaggtgttactgtcaataatgttattagtcatcttcaacaaagtgaattatcttttggtggagtaggcgcttctggtattggaagatataagtcttttgaaggttttaagaatttttcaaaccctagagcatattacaaagaagttagttctagattcgataaattatttgatggagtaaggcctccatataaaggaaatattgaaaaaatattaaaacaactaatgaaataag

SEQ ID NO: 214468 - DNA, 733 bp, Unknown
  Bacterial polypeptide expressing nucleotide sequence isolated from the Sargasso Sea
tatgtcagttaactacaaatctattgctcaaaaattaaaatttgaaggccgtgcctttataaatgggaagtatgttaacgcgatagatggcaaaaaatttgaaaccataaatcctgcgactggagaaaaactttgtacagtagcaaaatgtaacaaaaaagatgttgatttagccgtaaaagtttctaggaaagcatttaatagtggtgtctggtcaagaagctcacctgaacatcgaaaagaaatattattaaaatttgccgaattactcagaaagcacggcaatgaaaattcagtcttagaatgtgttgatactggtaaattaatattggactgtataaatgaagttgctaatgatgctccaatgcattttcagtggtatggagaattaattgataaggtttttggaaaagttggtcctaccgaaccatctattacaagtttaatagtaaaagaacctattggagttgttgcaggtatagtaccatggaatttccctttaatgatggcagtttggaaaatggcacctgctcttgctgctggatgctctgttattattaaaccagcagaagatacacctctaacagctattagagttgcaaaaattgctcaagaagcgggaattcctgacggagttttgaatgttcttcctggttatggtgatgtaggtgaagcacttggtaggcataaagatgttgatgcagtttcttttacaggatctacagaggtaggc

SEQ ID NO: 214469 - DNA, 1444 bp, Unknown
  Bacterial polypeptide expressing nucleotide sequence isolated from the Sargasso Sea
tatgtacgaaaagtttggacaatttattgatggtaaatggctagagtcatcagataaaggaacttacgaagtaattaatcctgctacagaagaagttataggaaacgcatcaaaagcaacaccgaaagatgtagagagagcattaaaatctgctgaaaaaggtttattagtttggaaaaagacagcgccatggcaaagatcatatattttaagaaaaatagctgacaaaatgagagaaaaacaagatgtgttggcaaaatggatgacattagaagttggcaaacctttagcagaagccaaaggtgaagttggaggagcagcagatatttttgaatggaatgctgaagaaacaaaaagaatttatggtcaaacggtagaaagtagatttgaagatacaagagtacatgtttattaccaaccagttggcgttgtagcagcattaactccttggaattttccagctgtattatcagctagaaaaatttcaaccgcattagccgctggttgttctgttattattaaaccagatgtaattactccaggaatagtaatgcaaatggttgatatttgtagagaatgtggagtaccaccaggtgtagttaatcttttatcaggtgatccaccaagtatagcacaacaattgattgcttcagatataataaaaaaaatttcaattactggatcctcaagagttggaaaattaattttaaagcaagctgctgataaggttcaaagagttactatggagcttagtggtcattcaccttttattgttttcgatgatgcagatataaaaaaagctgctgatatggcaattgcatcaaagtttagaaataatggacaagtatgtatatctcctaatagattttatattcatgaaagtaaaaaagacgagtttgttaatttatttgtagataaaacgaaaaaattaaagattggcgatggtatggatcctagtactcaattaggtccattaacaacaaaaaaaagattaaatgaaattgaagaattagttgaaaaaactaaacaagagggcgccaaagttttactaggaggcaaaagaccagctggatttaataaaggatttttttatgagccaacagtttttgataatgtaaaagatgatttcacaattatgaagcaagaaccttttggaccattagttccaatgttatcatttaaatcatttgatgaagtgattgaaagagctaataaccacgaattaggtttagcaagttacatatgcacaaattcaatggaaaaagcacataaagcttctgaattaatggaaactggcactgtagcagtaaatactccagtagttgcaatagcagaagcaccttttggtggcattaagcaagcaggctatggaagagaaggtggttcaatggcaattaaagattatttaaatgtaaaatatactcatttaggcattaaaggttag

SEQ ID NO: 214470 - DNA, 868 bp, Unknown
  Bacterial polypeptide expressing nucleotide sequence isolated from the Sargasso Sea
aattacaggatttgctgaaaattgtagcaaaatactaacatctcatccaaaagttgacagaattgctttcactggtggtgttcaaacagctaaacacattgttaaaaactctgcagaaaacttatcacaggtaactttagagctagggggtaaaagtccagtagttatctttaaagatgctagaaaaaataatgctatcaatggagtcttagctagtatctttggagcaagtggtcaaagttgtatagctggttcaagattatatttgcaagaagagatttatgatgactatttaaatgaaataaaaaatagagcacttaaaatttctataggagatcctatggaacaacacacacaaataggaccactcgctactttacagcaactaagaaatattgaaaacaagataactgaaactattaaacaaggcggcaaattaatagttggtggaaacaaacccaaagatattaaaacaggttatttttttgaacctacaataattgaatgtgataatcataatctccctgttgcagaaaatgaattgtttggacctgttctgtctattatgaaatttactgatgaagatcatgctattaaattaatgaatgataataaatttggattagcagctggcatatttacagaaaacaatggtgtagcaatgcgtgtttcaaaagcagttagagcaggaatagtttttgtaaatacttaccgtcttatctcgccaattgctccatttggtggttttaaaaatagtggttttggaagagaatcaggaatggaggtaataaaagattattctaatataaaaacaacttggattaatacctcaacaaaagaaattgatgatccttttataattagataa

SEQ ID NO: 214471 - DNA, 1426 bp, Unknown
  Bacterial polypeptide expressing nucleotide sequence isolated from the Sargasso Sea
aatggaaaagttaaaaaaattttttattaatgggacgtgggtaaacccaagatcagacgaaacaatggctgtgataagcccatcggatttaagaaaaatcgggactgtgtcactaggaaatgaacaggatgtcaatgatgcagttcagtcggcgaaaaaagcatttacaagcttttccaaaacaaaaaagaaagaaagaatagatctcttgaagggtctcaagagaataactgagagaaggttcgaagatttagcccaggccatgcgcgaagagatgggtgcacctatatcaatggcacgatctgcccaagcggatgcagccctagggcacttggaatcatttattggtgcgctggcagagcttaaggaaagaacagttttggatagtggggatattcttttaaaagaaccggtagggatttgcggactgataacaccttggaactggcctgtaaatcaaatcgcactgaaggttataccagctttagcaactggctgtacctgtatcttgaaaccgtcagagtacacacccttatctgcgatggtttataccgaaatcattgaggaggccggctacccagccggtgtttttaatttggttaacggtgtcggagatacggtgggaagggtaatgtcaaagcatccagaaatagatatgatgtctttcactggatcgacaagagctggaatcatggtaaccaaagattcttctgagaccattaaaagagttactttggaacttggtggaaaatcacctaacattgtattttcggatgcaaatctagaaagggatataaaatattcgatcaatgagtgcatgttcaatacgggtcaatcttgtgatgcaccgacgaggctactagttgaacactcttgttacgaagaggttttaaaaatagcaaagaagtcagcagaagaaattttaatcggagatccaactaaagagggagatcacatagggcccttatttgataaaatacaattcgatcgagttcaaaatatgattgatttgggaataaaagaaggagcctccgtcttaacgggaggtttaggtaagcctcacggtttagaaaagggttggtttgttaaaccaacaattttttataatgttagaaatactatgaggatcgctagagaagaaattttcggaccagttttagttataatgccattcaagaatgagcaggaagcgatatctatagcaaatgactcgccctatggcttagcggcctatgtgcaaacgtctgacattaaaaaggcagagcgcgtgagttcacaattgagagtcggggcagttcacataaatggaggtggatacaattatggaacaccttttggtggatacaaacaatctggcaatggcagagagggtggtttaatgggtttggaggattatttggaaattaaatcgttacatgggctttga

SEQ ID NO: 214472 - DNA, 712 bp, Unknown
  Bacterial polypeptide expressing nucleotide sequence isolated from the Sargasso Sea
ggttacgcaagagcttggtggaaagtcagccaatataattcttgaagatgcagattttaataaagctgtatcacgtggagcaatgagctgttttagtaatagcggtcaatcttgcaatgcccctacccgaatgcttgttccgcaagaaaaacttgatgaggcagccgaaatcgcatctaaagtagctgaaagcacaatagcggataatccagagaaagaatcgacaaaaattgggccggttgtgtctcaagctcagtgggataagatacaaaaacttattcaagcaggaattgatgagggtgctgttctagctgccggaggaaccggtaaaccaaaccctgaaagcaagggctactatgttaaaccaaccgttttcacaaatgtaaagaatgatatgacaatcgcaagggaagagatatttggccccgtcttatcaatcattccatacaaagatgaagatgatgcgattgctattgcaaatgatacactatatggtttagccggttatgtcagctctgagaatatcgagcatgctcgttcagtagcctcaaagatgagaactggtatggttcatatcaatggggccccacttgatgcaatggcgccattcggtggttacaagcaatctggaaatggcagagagtggggggaatatggcatggaagaatttttagaaattaaatccgtatacggttataactccaataagtaa

SEQ ID NO: 214473 - DNA, 1067 bp, Unknown
  Bacterial polypeptide expressing nucleotide sequence isolated from the Sargasso Sea
acatgaaaaagcgctgaacctttctgttagagagccatatggtgtggttggattgatttctccatggaattacccgcttctaatgggtgtttggaaaattgctccagctttggctgcagggaattcaattgtacttaaaccagatgagcattcgcctcactcgtgtataaaaatggcagagctttttgtcgaagcaggtggacctccaggggtattcaatgtggtcacggggcatggtgaagaggctggacaatctttggctctgcatcaagatgtctccaagattggattcactggatcaaccgaagttggaaagctacttttgcaatatgccggtcagtccaatatgaaaaaagtcagtcttgagactggtggaaaatcacccatgatttactttgctgatttacctgatatggaactcgctgtctctacagcctatgattcaatctatgcaaatatgggcgaagtctgtaatgcaggatctaggatctatgttgaaagagcaatttatgctgatttcgttgatcaattcattgcagaaggccaaggtgcatacacgcctggtgatccactggatccagaaacaaacatgggtccattgatgtcagcacaagctcaaaaaagagtattgggcttcattgaatcaggaaaaaatgaaggcgcgaaactcaaatttggtggaaacattccaactggacttgagtctggatgtttcgttgaaccaaccatgtttgcagatgtgaacaatgacatgaccattggtcgtgaagagatctttggaccggtcgcttctattattccgtttgattctgaggaagaagccatcgaaatggccaatgacacaatctatggcctttgtgcatcagtctggacgagcaacgtcagtcgagcccacaacatggcgaaagcaattgagtcaggaatggtctatgtcaactgttacgatgttggcgatatgacctttgagtttggtggatacaagcaatcaggcaataccaaagattcttgctttgagtcagtgcttggatacacacaaagcaaatcgatttggtataacctcgggtaaa

SEQ ID NO: 214474 - DNA, 1432 bp, Unknown
  Bacterial polypeptide expressing nucleotide sequence isolated from the Sargasso Sea
tatgattgaaaagaaaaatttttatataaatggaaagtgggtttcacctactacgccaaatgattttgaggtaattaatccctcaactgaagaagcttttgcaataatatctttaggctctgcagaagacacagataaagcaataaaagcagcgaatattgcatttgagacctggagagaaaccacaaaagaggaaagattagctttacttgaaaagtttgaagaaatttataaaagaagatgggacgaaatggttggggctcagtctaaagaaatgggagcaccactagattttgcatcagaaactcatactaaaatgggagctgatatttgtagaaataacattgagattttaaaagattttaattttgaacatcaatttgatcctaaatctaataaccacattagatatgaaccaattggagtttgtggattaattacaccttggaattatccaatgaaccaaattattttaaaagttattccagctttagctgctggatgtacaatgattttaaaaccgtctgaaattgctccggtatcagcagtattgtttgctgaaatgattgatgaagctggctttcctgctggagtttttaatttagtgaatggaaatggagaagttgttggaaatcatatgtctggtcatcctgacattgatatgatctcattcacaggatcaacaagagctggaaaactaattcagaaaaatgcagctgatactataaaaaaagtgactcttgaattgggtggtaaaggtggaaatatagtttttgcagattcataccctaatgctgttagagatggtgtaagaaatataatgagtaactctggacagtcatgtgatgctccaacaagaatgttagtagaaaaaccaatttatgaaagagctgttaaagaagctgttgatgaggcaaacaaaattaaagttgatcttgcatctaaaaaaggtgatcacattggaccagtagtttcaaaagtgcaatacgataaagttgttaatcttattaatgaaggaattaaagaaggtgcaacgttagctgcgggtggaccagatttgccaaatggacttaacaaaggttattttgttaaaccaacaattttttcagatgtaaataatgatatgaaaattgcaagaactgaaatttttggacctgtgctttcaattataccatttgaaactgaggaagaagcaatagcaattacaaatgatacatcttatggacttggtaattacttacagactgaagataaagaaaaagctaaaagagttgctagaaaagttagagctgggacagtttatataaatggtcaagccactgatactggaatgccttttggtggttataaacaatctggtaatggtcgtgaaggtggtgtctggggtttcactgaatttttagaagttaaagcaattaccggttggaattaa

SEQ ID NO: 214475 - DNA, 1432 bp, Unknown
  Bacterial polypeptide expressing nucleotide sequence isolated from the Sargasso Sea
atgattgataaaagaaaattttatataaatggtgattgggtggatcctgtaaataaaaatgattgtaatgtaattgatccatctacagaagaaccatacgttactatttcactaggaagtgcagatgataccaataaagctgttgaagctgctaaaaaatctttttttacatggaaaaatacctcgaaagaagagcgtattgagcttttagaaaaacttttaaaaatttatagaaatcgctctgaagaaatgacaaatgcaatatcaaaagaacttggtgcacctttagactgggcatcgtccgcacagatgggttctggtgagtctcatatagaggactttattaaaagattaaaagaatttgaatttgagtcaaattttgatgagaactctgacaattatattgtctatgaaccaataggagtttgcggtttaataactccttggaattggccaattaatcaaattgctctaaaagttatacctgcctttgctactgggtgtacgatgatcttaaaaccatctgagatggcacctttgtcaggtttattatttgctgaaatgatacatgaagccggttttcctgctggtgttttcaatttagtaaatggagacggtgctggtgttggatcacaaatctcaggtcacccagatatagacatggtttcttttactggctcaactcgtgctggaaaactgatttctaagaatgctgccgatacaattaaaagagtttgtttagaacttggtggaaagggcggtaatataatttttgcagatgcatacccaaatgctgttagagatggtgtaagaaatattatgagcaatgctggtcaatcgtgcgatgccccaactcgtatgttagttgaaaaatctatttatgaaaaagctgttcaagaagctgcagacgaagctaataagattggtgtagatttaccctctaaaccaggtgaccacattggccctgtgattaataaatcacaatttgataaaatacagtcattaattcaaagtggtattgatgagggggcaactcttgtagctggtggagctggtagaccatctaattttgaaaaaggctactatgttaaaccaacagtatttacgaatgttaaaaatgaaatgagaatagctaaagaagaaatttttggtccagttctgtctattattccatttgactctgaagaagaagcaatctcaatcactaatgatacctcttatggtcttggtaattttttgcaaacagaagataaagaaagagctagaagagtatcgaaacaacttagagctggtgtagttcaaattaatggaaatgctccagactcaggaacaccttttggtggatacaatcaatctggaaatggtcgagagggcggaacatggggcctacatgaatatttggaagttaaagcgataagtgggtggaagtaaa

SEQ ID NO: 214476 - DNA, 1420 bp, Unknown
  Bacterial polypeptide expressing nucleotide sequence isolated from the Sargasso Sea
tatggaaataaataaattttatatcgatggaaagtttgttgatccagacggatcagagaagattgatatagtaaatcccgcaactgaagaagtagtgggatatgtaatttctggctcaaataaagatgttgattttgcagtagaggcagctaataaagcctttcctgaagttatggcattaacacttgatcaaaggaaaaaaattcttgaagaagtacttgagggcatggaagaaagacgtgaagattttgcgcaaattatttctgaggagatgggttcgccaattacgatggcacgtcgagctcaatatggcagcggcacaatacattttaaaaatacacttagtatcattgatagattcgatttccaagaagttcatggcaacatcacaataaataaattaccaataggtccagtaggaatgataactccttggaattggcctctaaatcaaatgtgcaccaaagttgcttcagcgatagctgcagggactacatttgttataaaacctagtgaaattactccaggagctgcacatattcttgccgaagttatcgataaaacaagcatgcctaagggtatgtttaatttgatccatggtcatggcatcactgtaggtaaagctatgagcagtcatccagatttagaaatgatttctttcactggttctactagagccggaatagatatccaaaaaaatgcggcagataatatcaaaagagtctcattagaattagggggtaaatctccaaatataattcttgaagatgtagatttagaaaatgctgtaactatgggcatgaagcaatgttttctcaatacaggtcaatcatgttcatctccaactcgaatgttattgcctgaacatatgcttgatgaggcaactaaatatgcaattgcagcagcaaatgatatgtctacaggagaccctttagatgaagagatttacttgggcccaatatctaataaaacacaatatgagaaggtgcaagatttaattcagagaggtatagatgagggagctactttagcatgcggaggcacgggtagacctgatggcttagagaaaggtttttttgttaagccaacagtatttactaatgtggataataaaatgaccattgcacaagaagaaatatttggacctgttatttgtttaataccttattctgatgttgaacaagcaattgagattgcaaatgactcagcttatggtctttcaagtatgatttcatgctctgatgaagtgaaaggccaagaaatagcgaagaaaataagagcaggacaagttattttaaatagaatctctcgaggagattatcctgctccatttggaggtttcaaaatgtcaggtaatgggcgagagcacgggctttttggtattgatgaatacttagaagtgcaagctgttataacttaa

SEQ ID NO: 214477 - DNA, 1411 bp, Unknown
  Bacterial polypeptide expressing nucleotide sequence isolated from the Sargasso Sea
atgaatcaaatcttaaaacaacagaaggaattttttattaaaaatggtgctccatcagtagatttaagaatcgatagacttcaaaggttaaaaacattgatcatggataatagatatgactttattgatgctttaaattctgattttggaaatagatcaaaaaatgcatctatgttatctgatatatatggcattatgccggctattaatcttgcaattaaaaatgtaaaaaaatggagtaaacctgaaaaaaaatcctcgaattttccatttggacttttaggtgcaaaatcatatattaaatatgagcctcttggcacagttggaatgatatcgccgtggaattttcctgttaatttagcatttgttcctctagtttcaatatttgctgcaggtaatcaagtcatgcataaaccaagtgagcatacacctataacatctcagcttttaaaagatttatgtgataaagcttatgatgagaatgagtttgcaacttttctaggtgggcctgaagtaggcgagtcattcacaaaactaacatttgaccatcttctttatacaggtggtggatcagttgctaagcatgtaatgaatgccgcatcacaaaatttagttccttgcacattagaacttggaggaaaatctccagttgttatagggaaatcagctgatctaaaaacatctgcaaaaagaataatgtttggtaaaacacttaatgctggacaaatttgcttagctccagattatgttgtgattcataaagatcaaaaagaagattttgttaatgaaagtaaaattgcagtatctgagtattttccttcacttaaagacaacgatgactacacatctataattaatgaaaaacactatgacagattaaaagacctactagatgacgcaattgaaaagggagcacatgttgatgaaattaatccctcaaatgaagatttttctcaacaggaattctataaaatcccaccaaccattgttaccaacacaactgatgatatgaagataatgcaagaagaaatttttggaccacttttaccagttgttgaatatgatgatattgatgaggctactgctttaattaattctaaagatagacctttaggattgtattattttggagataataaatctgaagaagatgagcttctaaataaaacatcatctggtggagtaacagtaaataatgtaataagtcatcttcagcaaaatgatttatcttttggaggtgttgggccttcaggaatgggtagatataaatcttttgatggttttaaaaacttttctaacccaagagcttattataaagatataggtccaaagcttgataaagtctttgatgctgttagacctccttataagggtgatattgaaaaagttttaaaaaaattaatgaaatagt

SEQ ID NO: 214478 - DNA, 1489 bp, Unknown
  Bacterial polypeptide expressing nucleotide sequence isolated from the Sargasso Sea
catgacagcgatttcaattctgccggaagtcacggcctttcttgcccgccgtcacgggcactacatccacggccgtgccgtcgaaggtcgaggtgaccgcatcgcggtcgtgaacccctcggacgaacaggaaatcgccgatattgccgacgcgacgcgcgacgacgtcgatgcagcggtggcgtcgagccgggctgcgttcgaaggcgcctggggacggactacaccggccgagcgggcgaatgtcctgctgcggctggcggatctgttcgagaagcatcgcgaggaactcgcgcaaatcgaaaccctgcagtcggggaagatcatccagatttcgcgcgcgttcgaagtcgaccaggccatcggttttctcaagcactatgccggcgccgccacgcgcatccacggcgaaaccatcacgccctcgctgccgtcgttcaacggcgagcgatacagtgcattcacccggcgcgagccggttggcgtggtcgtcggcatcgtgccgtggaacttctcgatccttatcgcagtctggaaattcgcgtctgcgctcgcgaccggctgcaccgtcatcatcaagccgagccagttcacgcctttgaccctgctgcgcatcgccgaactggctaccgaagccggtgcgccggccggcgcgcttaacgtcgtcagcggcggcggcaatcccgggcgctggctgatcgaacacgaagggacggccaaggtcagctttaccggctcggtgccgaccggcattgcagtcggtcgcaatgcgatggacgccaagctcacgcgggcgacgctcgaactcggcggcaagaatgccgttggatttctaaaggacgtcgacgccgacaaggccgtggccggcatcctcgaatccggcttcgttcaccaggggcaggtatgtgccgccggcgagcgcttcttcctgcatcgctcgcgtctcgacgaggtgctcgaaaagctcaagcacgcgctggcgggcctgcaaatcggcgacccgatggacgaacgcacccagttcggtccgctctcgaaccgcgcccatttcgacaagatcgtcgacttcttcgatctggcacgcagcgaaggcagcacgatcgcgttcggcggccaaccgctcgaccgcaccggctacttcgtgacaccgaccgcaatcctcgtcgacgatcgccgcgcgaagatgctcagcgaggaaaccttcggccccatcgcgacgttcctggcctatgacgatgaggcagaactcgtggacctgttcaacgacacgccgtacgggttggcggcgagcctgtggaccaacgacctgggcaaggcgatgaacctgattcctcgaatcgaagcaggcaccgtgtgggtcaacatgcacacgttcctcgatcctgcgctgcccttcggcggcgtcaaggcatcgggtatcggccgcgagttcggctcggccttcatcgacgactacacggaactgaagtcggtcatgatccggcactga

SEQ ID NO: 214479 - DNA, 985 bp, Unknown
  Bacterial polypeptide expressing nucleotide sequence isolated from the Sargasso Sea
atgaataatcttcaaaaattttatattaacggtaaatgggtaatacccaattcaactaaaaaaatggcggtactcaaccctgcaactgaagatttgataggtgagataatacttggtaattctaaagatgtagatatggccgtgagtgctgcaaaaaatgcatttaatagcttttctaaaacttcaaagaatgatcgtttagaattacttaataaaattaggcagatttctgaaaaaaggtttgaagatcttgcagatgcaatgacatctgaaatgggagctcctcatagaatggctagagatgcacaggcagatgcagcaataggacatttagatggttttattgatgcattaaagaagcatgaagaaaaaattgttctttctaatacagatgtacttttaaaagagccaataggagtttgtggtttaattactccctggaactggcccattaatcaaattacattgaaagtacttcctgtgattgctacaggatgtacatgtattttaaagccatctgagcatacgcctttatcagcgatgatttatgctgaaattcttgatgaggcaggagttcctgatggcgtatttaatttagtacatggagatggagaaggggtaggcgtatcgatgtctcggcatccagatatagaaatgatgtcatttactggttcaaaaagaggaggtaagtcagttactattgaatctgctgagactgtaaaaaaagtaacattagaattaggcggcaaatcaccaaacattgtatttgcggattgtgacttagaggaaaaagtaaaagcttcagtaaatgaatgcatgtttaatactggacaatcttgcgatgctcctacaaggttactggtagaaaaaaaatgctacaatgaggtaattgatattgcaaaaaaaactgctgaagaaattaaggtaggtgatccaacactagatggtgaccatctcggaccactcttgataaaatacaattgat

SEQ ID NO: 214480 - DNA, 1435 bp, Unknown
  Bacterial polypeptide expressing nucleotide sequence isolated from the Sargasso Sea
aatgctcgataaaaaaaaattttatatcaatggcaaatgggttgagccagtaaacaagaatgaatgtgaagttattaatccatcaacagaagaagtttgtgcaattataagtcttggaagttctgatgatacaaatgctgcagtcaaagcagcaaaatctgcatttgagacttggaaagaaacttcaaaagaagaaaggttaaatttattagaaaaattattaaaaatttataattctagatgggatgatatgactgatgctattactacagagcttggttgtcctaaagattggtgttcagctaatcaaacatcttctggcgcaggtcatatcgaagactttataaaaagattaaaagaattcgaattcgaaccaggttttgataaaggatctactaatcatattgtatatgagccaattggagtttgcggattaattacaccttggaattggcctataaatcaaattgctttaaaagtaattccagcttttgctactgggtgtacaatggtacttaaaccatctgaaattgcaccattgtcaggaatgctatttgcagagatgatagatgaggctggatttccagctggagtatttaatttggtaaatggtgatgggcctggtgttggaactgacctgtcaggacatcctgatgttgatatggtctcatttacaggatctactagagctggaaaattaattacaaagaatgctgctgaaactataaaaagagtttgtcttgaacttggtggtaaaggtggaaatattgtttttgctgatgcatatcctgatgcagtcagagatggtattagaaacgtaatgagtaattcaggtcaatcctgtgatgccccaactagaatgcttgttgaaaaatcaatttataaaagagctgttgaagaagctgcagatgaagcaaataaaattaaagttgatcttgcttcaaaagctggtgaccatattgggcctgtaatttcaaaaactcaatttgataaaattcaaagtttaataaatagtggaattgaagaaggtgctactttagtagcaggtggtcctgacaaacctgaagatctaaagaaaggttattttattaaaccaacagtattcactgatgttaataataatatgagaattgctaaagaggaaatatttggaccagtattgtcgattattccttttgaaaatgaagaggaagctatccaaattacaaatgatacagaatatggattaggaaactatttacaaacagaggataatgaaaaggcaaaaagagtctcaaaaaaattaaggtccggaattgtgtatgtaaatcataaagcagctgactctgggactccttttggtgggtatagacaatctggaaatggacgtgaaggtggaacctggggattgcatgaatatctagaggtaaaaactattactgaatggaaaaattaa

SEQ ID NO: 214481 - DNA, 1138 bp, Unknown
  Bacterial polypeptide expressing nucleotide sequence isolated from the Sargasso Sea
cgccccattagattttgcttccgaaacacacactaaaatgggtgctgatatttgtagaaataacattgaaattttaaaagattttaattttgaacatcaatttgatcctaaatctaataatcatataagatatgaaccaattggagtttgtggattaattacgccatggaattttcctatgaatcaaatcgtattaaaggttattcctgctttagctgctggttgtacaatgatattaaaaccatccgaaattgctccagtgtcagcagtattgtttgcagaaatgattgatgaggctggttttcctgcaggagtttttaatttagttaatggaaatggagaagttgttggaaatcatatttctggtcatcctgatattgatatggtttcattcacaggatcaacaagagctggaaaattaattcaaaaaaatgcagctgatactataaaaaaagttacacttgaattaggtggaaaaggtggaaatatagtttttgcggattcataccctaatgctgttagagatggtgtaagaaatataatgagcaactctggacaatcatgtgatgctccaacaagaatgttggttgaaaaaccaatttatgaaagagctgttaaagaagctgttgatgaagcaaataaaattaaagttgatctggcatctaaaaaaggagatcatattggacctttagtttcaaaagtacaatatgataaagttgtaaatcttatcaatgagggaataaaagaaggcgcaacactagctgcaggtggaccagatttgccaaatggacttaacaaaggttattttgttaaaccaacaattttttcagacgtaaataataacatgaaaattgcaagaactgaaatttttggacctgtgctttcaattataccatttgaaactgaagaagaagcaatagcaattacaaatgatacatcttatggactaggtaattatctacaaactgaagataaagaaaaagccaaaagagttgctagaaaagttagagctggaacggtttatatcaatggtcaagctacagatactggaatgccgtttggtggctataaacaatctggtaatggtcgtgaaggtggtgtctggggtttcactgaatttttagaagtaaaagcaatt

SEQ ID NO: 214482 - DNA, 1504 bp, Unknown
  Bacterial polypeptide expressing nucleotide sequence isolated from the Sargasso Sea
aatgagcgaagaagtcaaagtggttgattggcatgccaaggcaaaaagcctcgatgtccagacgaaactgttcatcgacggccagttcgtcgatgcagtcgatggcggccggtttaccacggtcaatccggcaacgggccttgaccagcacacgatggtccgcggcaacgagaaggacatcgatctcgcggtggccgcggctcgccgtaccttcaaggaaggggtttggtcgaggatggcgccgcgcgaccgaatggatgtgctgttccgcctggctcaactcatcaacgaacataccgaagaattcgcgttgctggactgcctcgacatgggcaagcccatcagcgatcttttgaacggcgacgtaccgttctcggcccacacgttccagtactttgccgaagcaatcgacaagatcgaaggggttgtcacaaacaccgcgtcgagcgctttccacttcatctcccgtgagcccatcggtgtcgtcggtgcggtgacgccgtggaattatccgctgatgatggcagcgtggaaggtcgcgccggcgctggctgcgggtaactcggtcgtcctcaagccggctgagcaatcgccgacgagcgcgctcctgctcgcgcgtctgttcgtggaagcgggcggtccggcaggcgtgttcaacgtggtgaacggattcggcgaagacgcgggtaaagcgctcgcgttgcacaaggatgtcgacaagatttccttcacggggtcgacggaagtcggcaagctgatgatgatctacgccggccagtccaacatgaagcgggtgacgacggagtgtggcggcaagagcccgcagatcgtgtttgacgacgtagcggacatcgacacagccgtccgatacgccgcgagcggcatctatggcaaccagggcgaggtttgcagcgccggctcgcgcatcctggtgcagcgcggcatctacgagcagttcgtgaagaagttcgtcgaactggcgccgacgatgttcaagccgggcgacccgctcgatcccggcacgaccatgggcccgttggtgacgaaagaacagcacaagcgcgtgtcgtcatacatcgacatcgggcagagcgaagggggtgttctcgcgctggcgggtcagattccggcggagcttcgcgctggcaacttcgtggcgccgacgctcttcaccgatgtgaatcgcaatatgcgcattgcgaacgaggaaatcttcggacccgttgcagccatcatgccgttcgacagcgaggaggaagcggtcgatatcgcaaactcgtccatttatgggctggctgccggtatctggacatcgaatgtcacccgcgcccaccgcgtggcgcgcaacgtcgaatcgggaatcgtctgggtgaattgttatgaccacggcgacatgacgcagccttggggtggcttcaagcagtcggggcaggggcgcgacaagtgcttcgaaaccattcttgctcacacacagagcaagtccgtttggctcaatttggagtga

SEQ ID NO: 214483 - DNA, 1468 bp, Unknown
  Bacterial polypeptide expressing nucleotide sequence isolated from the Sargasso Sea
atgcaaacccaactgttcatcgacggacgcttcgtcgacgctgtcgaccgcggcacgatcgacgtgctgaacccgcacgacggctccgtcatcacgaagatcgcagcagccaccgcggcggacgtcgacctggcggtcgaagccgcgacgcgcgcgttccccaaatggtcggcgctgccggctgccgaacgcggccggttgctgctgcgtctggccgacgcgatcgaggccaacgcggaggagctggcgcaactcgaatcgctggacaccggccacccgatccgcgattcgcgcgcgctcgacgtgccgcgcacggctgcgtgcttccgctacttcggcggcatggccgacaagctgcagggctcggtgattcctgtcgagaccggcttcctgaactacgtgcagcgcgcgccgatcggtgtcgtcggccagatcgtgccgtggaattttccgctgatgttcacgagctggaagatgggcccggcgctcgccgccggcaacacggtcgtgctcaagccgtctgaaatcacgccgctgtcgacgctgcgcatcgtcgagctgatggccgaggtcgggttccccgcaggtgtggtcaacatcgtccccggctacgggcataccgccggccagcggctcgccgaacatccgggcgtcggcaagatcgcgttcacgggatcgacggccaccggccggcggatcgtcgaagcgtcgcagggcaacctgaagcgcgtgcagctcgaactgggcggcaagggcgccaacatcgtgttcgacgatgccgatctcgacgcggccatcaacggcgccgcgtgggcaatcttccacaaccaggggcaggcgtgcatcgccggctcgcgtctcgtgctgcatgagcgcatcgcggatgcgttcctcgaacgcttcgtggcgctcgcgtcgtcgatccgcctcggcaacccgctcgacgcgaacaccgagatggggccgctcacgtcgaagcagcacctcgagcgtgtgctgtcgttcgtcgacgtcgcgcgcgagcagggcggccgcgtgctcaccggcggcaccgcgccgcaggatccggcgcttgccgacggctactacgtgcgcccgacggtcatcgaagccaggagcgcaaccgaccgcgtcgcgcaggaggaagtgttcggcccgttcgtcacggtgctgcgcttcggcagcgacgacgaagcgctggccattgcgaacgcaaccgaatacgggctgggcagcggcctctggacgaaggatctttcccgcgcacacaagatggcgtcgcagatcaacgcggggatgtgctggatcaactgctacaagcgcgtcaatccgggcagcccgttcggcggtgtcggcaagtcgggctacggccgcgagatgggcttcgaggcgatgcacgactacaccgaggcacggtcggtgtgggtcaacgtcgacggcaacgtgccgccgcatttcaagcgctgag

SEQ ID NO: 214484 - DNA, 1471 bp, Unknown
  Bacterial polypeptide expressing nucleotide sequence isolated from the Sargasso Sea
atgaagcatctgctcaaggacacgtcattgtggcgcgagggcgcctatgttggcggtgaatggctcaacgagacgccccatggccgctatccgctgcgtaatccggcgaatggcgatgtgctggtggaacttccgcgctgtcagcaggcggaagccgttcatgccatcgaggtggcgcaccgtacgcacctggactggcgcaagaccacggcgaagcatcgctccgaggtgctgcgccggtggtacgagctgattgtccagaaccgcgaggacctggccacgctgatcacgcttgaggaggggaagcccctttcagaagcgcgtggcgaaatggattatgcggcatcgttcatccagtggttctccgaagaagccaagcgcgtacgcggcgacgtcattcccgcgcccaaggacacccagcgcatcgtcgtgctcaagcagcccattggcgtgtgcgctgcgatcacgccctggaacttcccggctgcgatgatcacccgaaaggcggggccggcgctggcggcaggctgttccatggtcgtgaagccggccagccagacaccgctgacggccctcgcgttggccgagctggcgctgcgagccggcgtgcctgccggcctgttcagcgtcctgacgggtaacgatacccgtatcctcggcaatgaactgaccacccatccgctggttcgcaagatcaccttcaccggatcgaccgaagtcggtcgggtattgctgcagcaggcggcgagcaccgtgaagaaatgctcgatggagctgggcggcaacgcccccgtcctggtgttcgacgacgcggatctcgacacggcagtggagggtgtcatcgcttccaagtttcgcaataccggacaggcctgcatcagcgccaatcgtatctatgtccaggacgggatctacgacgccttcgcgcaacgcatggcggaacgcgtcgcgcaactcaaggtgggcaatggcctggcggacggcgttcagcagggtccgctgattgatgatggcgcggtgactaaagtagaggagcacatcgccgacgcggttgctggcggcgcgcgtgtcaagcttggcggcaagcgccatgctttgggcggctgcttcttcgagccgacgatattggtcgatgtccagccctcgatgatggtcgcgcgcgaggaaacctttggtccggtggcgccattgttccgcttccacaccgaggacgaggcgctgcggctcgccaacgatacggaattcggcctggctgcttacctgtatagccgtgacgcctcgcgtatctggcgtgtgtcggcggggatcgaatccggtatggtcggcatcaactgtggcctgatttcgaatgaggtggcgccgtttggcggcgtcaagcagagcggcctcgggcgcgaagggtctcagtacggcatcgaagagttccttgagctcaagtacctttgctgggacggcctggacgccgtttgac

SEQ ID NO: 214485 - DNA, 1498 bp, Unknown
  Bacterial polypeptide expressing nucleotide sequence isolated from the Sargasso Sea
catgagtacacctaaaaaacggagtgattgggaaagcctcgctgctagcctagcaatcaatggcaaggcttatatcaatggcgaataccgcgatgcggcagcgggcagcacctttgactgtgtcagcccgatcgacggacgcgtattagccaaggtcgccagttgcgatcaaatggacgccaatattgccgtcgctaatgcccgtgaggtgtttgaatcaggcgtgtggtcaaagactgcccccgttaaacgtaagcaagtgatgatccgttttgccgagttattggaggaaaatgccaatgaactcgccctgttagaaaccttggacatgggtaagcctatccgtttttcaaaggcggtagatattgccggcgccgcccgtgctatccgttggtcgggtgaggccgttgataaactctatgatgagctggcgcctacggcacataatgaaatcggtatgatcacccgcgaacctgtgggcgtggtggcggcgattgtgccttggaacttccccttattgatggcctgttggaagctggggcctgcgctggcgacgggtaacagtgttattctaaaaccctctgagaaatcccccttaacggccattcgtatcgctgaacttgcggtacaggcagggatccctaagggcgtgctaaacgtactgccaggttatgggcatacggtcggtaaggcactggcgctgcatatggatgtggataccttagtctttactggttcaacaaaaatcgctaagcaattaatgatttatgcgggcgaatcgaatatgaaacgagtgtggctcgaggctggtggtaagagcccgaacattgtatttaacgatgcgcccgatcttaaagcggctgcggtggcggctgccgaagccattgcctttaaccaaggtgaagtctgtaccgcaggctcgcgtttgctggtggagtctggggttaaagatcaactgattgagcttatcgccgaagaactggcctcatggcagcccgggcatccgctggatcccgctactgttagcggcgcagtggtcgataagcagcaattagatatcatcttaagctatatcaaggcgggccaagatgagggcgcgaacttagtgcatggtggacaacaagtgctggccaaaacgggcggcgtgtatgtgcagcccactatctttagccaagtacacaacaagatgaaaatcgccagtgaggaaatctttggccctgtgttatctgtcattgaattcaatggcatggaagaggcgattgcgatagccaatgataccatttacggcttagcggcaggggtgtggacggcggatatcagcaaggcgcacaaaaccgccaaggcactgcgatcgggtatggtgtggattaaccattatgatggaggcgatatgacggcgccttttggtggttataaacagtctggcaatggccgcgataaatccatgcactccttcgacaagtacactgaaattaaggcgacttggatagccctctaa

SEQ ID NO: 214486 - DNA, 1474 bp, Unknown
  Bacterial polypeptide expressing nucleotide sequence isolated from the Sargasso Sea
atgatatttaagaattttattgataatcaatggtttgatgcacggtctggaaaaacattcgaggtcttaaatcctttcacagaagaagtgatcgcaaatgttcctgcaagtgatgaacaagatataaataatgctgtgaaagtagcaaagaactcatttcatgaatggagcgagttaactgcaggtgagcgtcgtgatcatttacgagctttagcaaataattcaagagaacatgccgaatcgatcgcggagacgatctcatcagaaatggggaaaccatataaagatgcattaacagaactagatgatctagctgagtatcttgaatattatagtgaacttgctcgtgaccaagttggaaggatcgttgcgcctgtagaccagagatcaatgtccttggttcgatatgagccttacggtgtggtaggatgtatcattccatggaactatcctttatcactgatgggttggaaacttgcaccagcattagcggcagggaatactattataatgaaacctagtgaggtcacttctctttctattctacattgggcagaacttgcagggggagcgatgccatctggtgtaatgaatgtggttacaggccttggagcggaagctggcgaggctcttgtaaaacaccccgaagtacccattattacatttactggatcagtacgtactgggaaaaggatagccaaacttgccgctcaaaacctgaaaaaggtatcccttgagcttgggggtaaagatcccgtgatcatttgcgatgatgctgacattgaggttgcagctaaaggcacttcttggggtggttttgtaaatacagggcaggtatgtacctctgttgagcgtgtatatgtatacgattcagttgtaaaaagatttactgaagcattggtggaagaagcaaaaaaagtaaagcttggagatccaatggatgaagatacagacatcggtcctatggcatctcaagatcaattcaataatacgatcagtaaggtagacctagccaaaaaacaaggaggacgagtacttacaggaggtaaaagatccgacaaatttgataaaggctatttctatgagcctacagtatttgataacataacttcggatatggatattgttacggaggaatcctttagtcctgtaatacctattcaaaagatcagctcaatggatgaggccattgaaatggcaaattcaacaaaatatggtttaggatgtacgatctttacaaaagatatagaacgtgcattaactgcagcagataagatcaaatcaggaactgtttgtatcaataaccctcttatggagaatattgctgcaccgtttgggggcatgaaacaatcaggtatcggtcgagaacatggagttgaggcattagaagagtttagagaggctaagcatatatttattgattatgatcataataataaagattggtggttcggtgaaaaggatgataaatgaa

SEQ ID NO: 214487 - DNA, 1507 bp, Unknown
  Bacterial polypeptide expressing nucleotide sequence isolated from the Sargasso Sea
gatggagacgaacgaacatttcccgctgctcgacgccacgcgcgcgtttctcgcgaagcctaaacagatgctgatcggcgccgagtggtgcgatgcggcgtcgtgccgccggctcgacgtcgtgaacccggccgacggcagcgtgctcgcgcatgtgcccgaagcggacgagcacgacgtgcagcaggccatcgccgccgcgcggcgcgcgttcgacgcggggccgtggcgctccgcgaagaccaccgaccgcgagcgcctgctgctggcgctggccgacctgatcgacgcgaatgcgcgcgaactggccgagatcgagtcgctcgacaacggcaagccggtgacggtggcgcaggggctcgatgtcgcgatggccgcgcagtgcttccgctacatggccggctgggcgacgaagatcgaaggcagcgtgattgacgcgggcatgccgtatatgccggacagtgaaatcttcacctatacgcgcaaggaacccgtcggcgtggtcggcgcgatcattccgtggaatttcccgctgctgatggccgcgtggaagctcgccccggcactggccacgggctgcaccgtcgtgttgaaacccgcggaagacacgccgctcagcgcgttgcggcttggcgagctgatccaggcggccggctttcccgacggcgtcgtcaacatcgtcaccggttacggtcacacggccggcgccgcgctgtcgcgcgatccgcgcatcgacaagatcgcgttcacgggctcgacgcagacgggcaagacgatcggccacgcggcgctcgacaacatgacgcgaatgtcgctcgaactgggcggcaagtcgccggtgatcgtgttgcccgacgtcgatcccgacaaggccgcactcggcgtggcgaacgcgatcttcttcaaccaggggcaggtatgcacggccgggtcgcgcgcgtacatccatgcgaaggtgttcgacgacgtgatcgagcgcgtcgcgaagatcgccgcgagcctgaagatcggcccggggatggacccgtcgacgcagatcggcccgctcgtctcggcaaagcagcgccagcgcgtgtgcggctatatcgactcgggcttcggcgagggcgcccgcgccgccgtgggcggccgtgcgatcgacggccccggcttcttcgtcgaacccaccgtgctggtcgacacgacgcaggcgatgcgcgtcgtgcgcgaggagatcttcgggccggtgctcgtcgcgatgccgttcgacgacgtcgatacggccgtgcaactcgccaacgacacgccctacggcctcggcgcgagcatctggtcgaacgatctttccgcgatccacaagctgatcccgcgcatcgcggccggcacggtgtgggtcaactgccactcgctgctcgacaacgcgatgccgttcggcggaatgaagcagtcgggtttcggtcgcgaactcggccgtgccgtgatcgaccagtacacggaaagcaagtcggtgatgatgaactacgcatga

SEQ ID NO: 214488 - DNA, 862 bp, Unknown
  Bacterial polypeptide expressing nucleotide sequence isolated from the Sargasso Sea
gatggagtgttttcagtacttccaggagatgggcctattacaggcaaatcattatgtcttcataatgatattgattgtgtagcttttactggatcgggcgaagttggtaaactagtacttcagtattctggtcaatctaatatgaaaagagtgcaactagagtgtggtggaaaatcaccaaatattatttttgcagattgtgatgatcttgatagagctgcagaagcagctgcttatgctatctttggaaatcaaggtgaggtttgttcagcaggatctagacttataatccaaaaagatattgaaaaagacttcatcaataaagttgttcaattaagtaaaaaaatgcaaccttcagatccgctaaatccagattcatttgctggagcaatagtaaatactgaacagttagaaaaaataaataaatatgtaaatataggtaaaaaagagggggctgatattgaagttggtggaaatataacaatgaaagaaacaggtggttgttattttgagcctactatttttaaaaatgttaagaacaatatgaagattgctcaagaagaaatttttggacccgtgttaacaactttagctttttctaattttgatgaggctgtttcaattgccaatgactctgaatatggactagcagctggtgtgtggacgaatgatattaacaaagcaataagggcctcaagagaaattcgtgcaggaacagtttatataaataactatgaggaaggtgttgactcaacaatacctcttggtggatataaacaatctggaattggaagagataacggtgtacaagctctagaaaattatcttcaagtaaaatcaacttgggtcaaaataacttaaa

SEQ ID NO: 214489 - DNA, 568 bp, Unknown
  Bacterial polypeptide expressing nucleotide sequence isolated from the Sargasso Sea
aacgcctcgtgcacgaccaacggtctcgcgccgttcgtcaaggtgctcgacgacaagttcggcatcgtcaagggtttgatgaccaccacccactcctacaccggtgaccagcgcatcttggatgcctctcaccgtgacttgcgtcgcgcccgtgccgccgccttgaacattgtgccgacctccaccggcgccgccaaggctgtcgcgctcgtcttgccgcaactcaagggtaagctcaacggcatcgcgctccgcgtcccgacgccgaacgtctccgtcgtcgatctcgtcatccaaacctccaagaaggtcaccgccgatgaagtcaaccagaccttccgcgaagccgccgatggcaagctcaagggcatcctcgccgtcgccgacgaaccgctcgtgtcttgcgatttccgatgctccgacgtctccaccaccgttgacgccgcgctcaccatggtcatgggcgatgacatgttgaaggttgtcgcgtggtacgacaacgagtggggctatagccaacgcgtagtggacttagcggagctctgcgcggcgaactggggaagataag

SEQ ID NO: 214490 - DNA, 1327 bp, Unknown
  Bacterial polypeptide expressing nucleotide sequence isolated from the Sargasso Sea
gatgttgataaggcggtaaatgcagcaaggaaatcatttgagaaaggcgattggtcaacaatgccacctacagagagaaagggtattttattaaaattagctgatctaataagagcaaatttaaatgagtttgcactattagatagcttggatatgggtaaacttgttaatgatgctgtaacaattgatgctccgggttcagcaatgtttttccaatggcatgctgaagccatagacaaaatgtatgatgaaatagccccaactggtcctggcgatttagctatggttgcaagaaagcctcttggtgtaatcggtgcagtagtgccatggaattttcccttagatatggctacatggaaagcatccgcagctttagcagcaggtaattctttagttttaaaacctgctgaacagtcacctctttcagctctcagattagctgaacttgccattgaagcaggaattccagaaggtgtttttaatgtagtacctggttatggagaaatagcaggtaaagctcttggtcttcatcaggatgttgattgtattgcgtttactggatcaacccctgttggtaaattgtttcaacaatatgctggtcaatctaatatgaaacaagtttggttagagacaggaggaaaaagtccaaatttaatttttcaagattgtaaggatttagatgctgctttaaacatggctgcattcggtatattttttaatcaaggagaagtgtgttcggccaactctagattacttgttgaaagaagtattcaagaagaatttgtaaaacgtttatcttctctagcaaaagacacacaaccaggcaatcctcttaatcccgattcaaaaatgggagctattgttaatgaagaacaaacaaataaaattatgtcttatattgaaaaaggcaaacataaagctgaattagttattggaggagagcaaatcaagatagatggaaaaggattttatgttcagcctacaatatttaataatgtagattcaaatgaggaaattgctaaagaagaaatatttggaccagttctttcaattattccttttgatacagaagaagaggcaatcagtatggcgaatgaaagtgagtatggtttagcagcatcagtttggacagatgatttagccagagcactaagagtttcagacaaactgcatgcaggtactgtttcagtaaatactgttgatgctttaaatactataactccttttggaggagttaaacaatcaggttatggaaaagatttatcattacattcgtttaacaaatacacatatttaaaaacaagatggataaaatataaaccttaaa

SEQ ID NO: 214491 - DNA, 1201 bp, Unknown
  Bacterial polypeptide expressing nucleotide sequence isolated from the Sargasso Sea
tgagtatgccaagaaaaacttaaaaaaatggatggcaggatcaaaaagaaaagcaaattttccacttggttttcttggagctaaagcttctgtagattatgagccacttggcactgtaggaatgatctcgccatggaatttccctgtatttttaaccttttcaccagctgcatcaatttttgctgctggaaatcaaattatgcataagccaagtgagtatacagaacaaacatctgcactattaaaagaattatgtgatgctgcatttgacgaagaagaatttgcaacaattcttggtggcccagatgttggcgcatcctttactcaacagaaatttgatcaccttttgtatacaggaagtggcgcagttgcaaaacacatcatgaaagctgcgtctgagaatctagttcccgttacccttgaacttggtggaaaatcgccagttatagttagtaattctgctgatagtgctatagctgcaaaaagaatcatgcttggcaaaacaatgaatgctggtcagatttgtcttgcccctgactatgttatggtgcattcagataaaaaagacgagctagtatcgggtatgaaagaggctgttgctgaattttatcctgatctcaaacataatgatgattacacatcgattatcaatcaaaaacattatgatcgcttgcaaggtctgttagctgatgcaaaagataaaggagcagaaattgatgagataaatcctgcaaatgaagatttttctcaacaagaagcattcaagatacctccaactcttgttatgaacccaacggatgacatggagattatgaaagaagagatatttggtccattgcttcccataaaagaattttctgaggtcgatgagacaatttcttatgtcaactccaatgataaacctttaggtttgtattatttcggttctagtaaaaatgaagaagaacaagtgttatctagaacttcgtcaggaggggtaaccattaatgatgtactaggccatattcagcaagaagatcttccatttggaggtgtcggaccctcagggattggaagttatcatggtgaagaggggtttaagactttcagcaatgctaaagccgtttataaacaaattggttcgagatttgataagcttttatctgcaattcgtcctccgtataaagatgatattgagaaggtattaaaacaaataacctag

SEQ ID NO: 214492 - DNA, 1444 bp, Unknown
  Bacterial polypeptide expressing nucleotide sequence isolated from the Sargasso Sea
atcgaaaacccgtgcgttcgtacacggtgagtaccgcgccgccgagtctggcgctaccttcgaatgcatcagcccggtcgacggccgcctgcttggcatggtggccagctgtgaccaggctgacgctgacgtggcggtcaaggatgcccgcgccaccttcgaatccggtgtgtggtcgcgcatggccccggccaagcgcaagaaggtgatgatccgcttcgccgagctgatcgaagagcatggtcaggagttggccctgttggaaaccctcgacatgggcaagccgatcagcgactcgctgagcatcgacgtcggcagcgccgccaacgctatccgctggagcggcgaggccatcgataagatctacgatgaagtcgccgccaccgcccatgacgagctgggcctggtcacccgcgagccggtcggagtggtcgccgccatcgtgccgtggaacttcccgctgctgatgacctgctggaagcttggcccggcgctgtccactggtaactcgatcatcctcaaaccgtccgagaagtcgccgctgaccggtatccgcatcgcccagctggccatcgaagccggcattccggcgggcgtgttcaacgtgctgccaggcttcggccacaccgtcggcaaggcccttgctctgcacatggacgtcgacaccctggtgttcaccggttcgaccaagatcgccaagcagctgatgatctacgctggcgagtcgaacatgaagcgcgtctggctggaagcaggcggcaagagcccgaacatcgtcttcgctgacgcgccggacctgcaggccgctgccgaagcggctgccagcgccattgccttcaaccagggcgaagtctgcaccgccggttcgcgcctgctggtggagaacgccatcaaggacaccttcgtgcccatggtggtcgaggcgatcaaggcctggaagccgggcaacccgctggacccggcgaccaacgtcggcgcgctggtcgacaccacgcagatgaacaacgtgctgagctacatccaggccggccatgacgacggcgccaagctggtggccggcggcaagcgggtgatggaagagaccggcggtacctacgtcgagccgaccatcttcgatggcgtgaacaacgccatgcgcatcgccaaggaagaaatcttcggcccggtgctgtcggtgatcggtttcgacgatcaggacgaagccatcgccattgccaatgacactgtctacggcctggccgcagcggtatggaccagcaacctgtcgcgcgcccacctggtgggcaaggcgctgcgtgccggcagcgtgtggatcaaccagtacgatggcggtgacatgaccgcgccgttcggtggcttcaagcagtccggcaacggccgcgacaagtcgctgcacgcgttcgacaagtacacagagctgaagtccacctggatcaaactgtag

SEQ ID NO: 214493 - DNA, 988 bp, Unknown
  Bacterial polypeptide expressing nucleotide sequence isolated from the Sargasso Sea
atggaattttccattatcaatgattggaagatcactgtcatgttcttttgctacaggaaattcaacaattataaaaactgcagaattaacccccctgtcagcaacagtttttgctaaagcaatacaaaatgccggagtgcctgaaggattaataaacataatttgtggatatggaaatgaggcaggatcttatcttgtatctcatgaagatgtaaatcatgtagtatttacaggttcagtcgcaactggaaaaaagatacttcatgcttgtgcagacaaagctattcctgctgttgttgaactaggtggtaagtcagctggtattgtttaccctgacgctgatttaaatgaagttctagaaagtgcacgttcaggaatatttagcgttgcaggacagatttgtacagcaatgtctagattagtagttcacaaatcaattaaagatgaattggtagataaactagttgatatgagtaaatctttaaaaattggacccggcatagaaaaagatacagatctaactccagttatatcagaaaatcagcttcaaaaagttgaaggttatgcaagatcaggaatccaagaaggagcagaagcagcatatggtggaaaaagattagatcgtgaaggatattttatggaaccaacagttctaaacaatgttaaacaaagtatgactgtagccagagaagaaatttttggtccagtactctcagttcttgaatatgaagatcaagaggaagcaattgatattgcgaatgatactgagtatggtttaggtgctggggtttttacaaaagatctaaaaaaagcatcttggactgcaagcaaattagaagctggtcaagtatatgtaaataaatggttcactggaaatcatgcaacaccttttggaggttataaacaatcaggatatagccgtgaaaaaggagtagatggacttaaatcttatctgcaagtcaaaaatgttggaattagtttaggttaa

SEQ ID NO: 214494 - DNA, 1106 bp, Unknown
  Bacterial polypeptide expressing nucleotide sequence isolated from the Sargasso Sea
ttttgattattacagtggtcttactgataaaattgaaggacgaacaattcctgtaaatagtaatgttatggactatacgatatatgaaccatttggagtttccgcacatattgttccttggaactatccaatttcaatgcttgcaaggtcattgtcttgttctttcgcagcaggcaattcaactgttgtaaaaactgctgaactaactcctttagctacagcttctatttttgccaaagcaatagataatgcaggagttcctcctggtttaatcaatataatatgcggatatggaaatggtgctggtaatgatttaacatcgcataaggacgtatcacaaattgcgtttactggttcagtcaaaactggaaaagtgattcttcatgcagctgctgagcgagctatacctgctgtcgttgaattgggaggaaagtctgcagccgttgtaatgccagatgcagatttagataaagttgtaaactctgcaaagggagcaatttttggtcaagctggacagatctgttcagcgatgtctagagttattgctcataaatcagttaaaaatcagcttgttgataaactctctaatcttgcaaattcattaaaagttggacatggctctgaagatggtacagatctcactccagtaatttcagaagaacagttacaaaagatagaaaattattcaagatcaggtcaacaagcgggtgctaatgctgtagctgggggtaaaagagttgaccgtaaaggttatttctttgaagcaacagtctttgacaatgtgcagccagaaatgacaattgcccaagaagaaatatttggaccagtcttatcagttattgagtatagtgacgaggaagaagctgtaagcatagcaaacaatacagagtttggtttagctgctggtgtttttactaatgatgtaaataaagctacatcaatggcttcacaactaaacggcggacaggtttatgtaaatagttggtttacaggaagtgttgccacaccgtttggaggatataaacagtccggttatagtcgagaaaaaggtcaggaagcaattaagagctaccttcaattaaagaatattggaattcaactataac

SEQ ID NO: 214495 - DNA, 738 bp, Unknown
  Bacterial polypeptide expressing nucleotide sequence isolated from the Sargasso Sea
agtcggttacaatagagtctgctgaaactgtcaaaaaagttacacttgagcttggaggcaagtcaccaaatttagtttttgcagattgtgatcttgaggaaaaagtaatcgcatctgtaaatgaatgtatgtttaacaccggacaatcatgtgacgctcctaccagattactggttgaaaaaaaatgctacgatgaagtcgttacaattgcaaaaaaggcggctgaagaaataaaagttggagacccacaagaggatggagatcatctaggacctttatttgataaaatccaatttgatagagtccaaaacatgattcaggtaggaatagatgaaggtgccgagctgcttgttggtggactgggtaaacctgaggggttagaaaaaggttggtttactaaaccaactatattcataaatgttaataacagcatgcgagtagctcaagaagagatttttggccccgtacttgtaataattccatttgaagatgaaaaagaagctattgaaatagctaatgacacaccttacggacttgccgcatatttacaaacaggcgacaccgaaagggcagaaagagtttcaagacaacttagagctggcggtgtacatgtaaacggaggcggttataactatggctctccttttggcggttataaagagtctggaaacggccgcgaaggcggtgatatggggcttgaagattatcttgaaacaaaagcattacatattgcttaaa

SEQ ID NO: 214496 - DNA, 1159 bp, Unknown
  Bacterial polypeptide expressing nucleotide sequence isolated from the Sargasso Sea
agaaaagtttcgccaccaatattaggtttattaggcgctaaattaagagttgaatatcaaccactaggaacaatcggtcttattagcccttggaattttccagttgtactaacttttggtcctttaggaagtatttttgcagcaggaaatcgtgttatgataaaaccatctgaatttacacctaggacttcagatctaatgaagcaaatgtttgaagataattttactgaagaagaggttgctgttgtgaccggaggtccagaagttggtgctgatttttcatccctaccttttgatcatttattatttacaggagcaacttcagttggaaagcatgttatgagggcagcctcagaaaatcttgttcctgttacacttgagttaggtggaaaatcacctgtaatagtatctgatacaagcgatgttagaacttcgtcaaaaagaatcatcgcaggtaaaactatgaacgcaggtcaaatttgtcttgctccagattatgttttgataccagaaaataaacttgatcaattcatatcgcatgtaaaagaaacagttacagatttatttcctacgattaaagataacgatgattatacatctgttattaatgaaaggcattattcaagacttacatcttatattgatgaagctaaggaaaaaggatgtgaaataatagaaattaatcctgccaacgaagattttgagcagcaagaacattataaaataccaccaacgctcttaataaacccagatgataatttaaaagttatgcaggaagaaatttttggaccaattttaccagttaaaacttatgaaaaattcgaagaaacaattgattatgttaataaaaaagacagacctcttggtttatactattttggtagcaacaatgatgaattgaatactgttatagaaaaaacaacatctggtggagttacggttaatgatgtaatttttcatgtagctcaagataatgctccctttggcggcgtcggtccatctggtatgggttcttatcatggagaggaaggttttaaaaatttctctcatgcaaaaactgtttttacccaaacaaaattagatagcgtcatatctgtatttagacctccatacggatctaaagcaaaaaaagctctaaaagctcaaatcaaaccataaa

SEQ ID NO: 214497 - DNA, 1180 bp, Unknown
  Bacterial polypeptide expressing nucleotide sequence isolated from the Sargasso Sea
tgatgctattactacagagcttggttgtcctaaagattggtgttcagctaatcaaacatcttctggcgcaggacacatagaagactttataaaaagattaaaagatttcgaattcgagccaggttttgataaaggatctactaatcatattgtatatgagccaattggagtttgcggattaattactccttggaattggcctataaatcaaattgctttaaaagtaattccagcttttgctactggatgtacaatggtacttaagccatctgaaattgcaccattgtcaggaatgttatttgcagagatgatagatgaggctggatttccagctggagtgtttaatctagtgaatggtgatgggcctggtgttggaactgacctgtcaggacatcctgatgttgatatggtctcatttacaggatctactagagctggaaaattaattacaaagaatgctgcagaaactataaaaagagtttgtcttgaacttggtggcaaaggtggaaatattgtttttgctgatgcatatcctgatgcagttagagatggcattagaaacgtaatgagtaattcaggtcaatcatgtgatgctccaactagaatgcttgttgaaaaatcaatttataaaagagctgttgaagaagctgcagacgaagctaataaaattaaagttgatcttgcttcaaaagctggtgatcacataggacctgtaatttcaaaaactcaatttgataaaattcagagtttaataaatagtggaattgaagaaggtgctactttagtagcaggtggtcctgataaacctgaagacttaaagaaaggttattttattaagccgacggtattcactgatgttaataataatatgagaattgctaaagaggaaatatttggaccagtattgtcaatcattccttttgaaaatgaagaggaagctatccaaattacaaatgacacagaatatggattaggaaactatttacaaactgaggataaagaaaaagcaaaaagagtctcaaaaaaattaagatctggaattgtgtatgtaaatcataaagcagctgactctgggactccttttggtgggtatagacaatctggaaatggacgtgaaggtggaacctggggattgcatgaatatctagaggtaaaaactattactgaatggaaaaattaa

SEQ ID NO: 214498 - DNA, 784 bp, Unknown
  Bacterial polypeptide expressing nucleotide sequence isolated from the Sargasso Sea
cgacaagatcgccttcaccggatccacccacgtcgggcagaagatcatcgaggcgtcggccggcaacatcaagcgtctatcgctcgaattgggtggtaaatcgcctcacatcattttcgccgacgccgatctcgacgccgcggtgccggctgccgcgatggcggtattcgccaactccgggcagatctgcagcgccggtacgcggctgttcgtgcaggaggcggtgtacgacgagttcgtcgaaaaggtcgcggcgttcggcaatgcattgcgcgttggcgatcccgccgaccccggcacgcagctcgggccgctcgtgtccgagcaacaattggcgcgcgtcgccggctatttgcgcgctggtcaggatgaaggcgcgacgctgctcggcggcggcctgccggctggccagtccgaattgagcaacggattcttcgtgcgccccacggtgttcgccaacgtgcgcgacgagatgcgcatcgcgaaagaggaaatcttcggtccggtgatttccacgctgcgtttcagcgacacggccgatgtgatcgcgcgtgccaacacctcggacttcggcctcggcggcggtgtgtggacccgcagcctcgccacggcgcagcaggtcacacgtggcctgcgcacgggttccgtgtgggtcaattgctatcaggcgatggatccagcggtgccgttcggcggttacaagatgagcggttacggccgcgagtctggacgcgaacacgtcgaggagttcctcaataccaaggcggtgtggatcaatgcataa

SEQ ID NO: 214499 - DNA, 1252 bp, Unknown
  Bacterial polypeptide expressing nucleotide sequence isolated from the Sargasso Sea
aactactaaggaagaaagaattaaattattagaaaatttattatcagtttataaaaaaagattcaatgaaatgactgaagcaatttctaaagaaatgggagctccgatggattggtcttctaatgttcaaaatgcatccggtcaatcacacttggaagattttattataaggcttaaaaattttaaatttgataaacaatttgactcaaaatcaaataatcaaatattttatgaacctattggagtttgtggattaattactccttggaactggccaataaaccaaattgcgcttaaagtaatacctgctttagcaactggctgtacaatgatacttaagccttcagaaatagctcctgtatcagcaatgttatttgctgaaatgattcatgaagctggttttccacctggagtttttaatctagtaaatggagatggagaaggagctggaacatttatatctggtcatcctgatattgatatggtgtcttttactggatcaacaagagcagggaaactaattacaaaaaatgcagctgatacaattaaaagagtttgtttagaactgggtggaaaaggtggaaatatagtatttgcagattcttaccctaatgctgttagagatggaataagaaatgtaatgagtaattctggacagtcttgtgacgctccaacaagaatgcttgttgaaaaatctatttataaaagagctgttgaggaagcagtagatgaggcaaacaaaattaaagtagatgttgcatcaaaaaaaggagatcatattggaccggtagtttcaaaagttcaatacgataaaatcattaacttaataaaagatggaattaatgaaggtgcaacattagctgcaggaggccctgaaatgcctaatggtttaaataaaggatattttattaaaccaactatatttactgatgttacaaatgatatgcagattgcaaaaaaagaaatttttggaccagttctttctattataccttttgaaacagaagaagaagcaattagtgttaccaatgatacagagtatggccttggaaattacttacaaactgaagataaagaaaaggcaaaaagagtatctaaaaaacttagatcagggattgtttatattaatggaaattctccagactctggaactccttttggtggatacaaacaatctggaaatggacgcgaaggtggttcttggggattggaagaatatctagaggtaaaaacaattaccggctggaaataa

SEQ ID NO: 214500 - DNA, 928 bp, Unknown
  Bacterial polypeptide expressing nucleotide sequence isolated from the Sargasso Sea
atgatacataaaccatcagaaattgctccactttctgcaatgttgtttgccgaaatgattgatgaagcgggatttcctcctggagtgtttaatttggtcaatggcgatggtgttggggtaggaacagacatttccagtcatcctgatattaacttagtttcatttactggatcaacacgagctggaaaattaattttaaaaaatggagctaaaacgattaaaagagtatgtctagaacttggaggtaaaggaggaaatatagtttttgctgactcctatcctaatgcagtgcgagatggaataagaaatgtaatgagcaattcaggtcaatcatgtgatgctccaactagaatgcttgttgaaaaatcaatttatgacagagcggtaaaagaggcagttgatgaagcaaatttaattaaagtagatcatgcttctaaaaaaggagatcatattggtccagtggtttctaaagttcagtatgataaaattattaatttaattcaaagtggtatagacgaaggtgcaactttagctgcgggaggtcctgaattgcctggtggattaaacaaaggttattttattaaaccaacaatttttacagatgttaccaatgatatgagaattgcaaaagaagaaatttttggtcctgttttatcaattattccatttgagacggaagatgaagctgtaaatatagtaaatgaaactgagtatggtttaggaaattatttacaaaccgaagataaagaaaaagcaaaaagagtagcaagaagattaaatgctggaacaatatacattaacggtaatggagcagacagtggaactccttttggcggtttcaaacagtctggaaatggacgtgagggtggagtttggggtttagaagaatatttagaagttaaaactgtaacaggatggccaagctaag

SEQ ID NO: 214501 - DNA, 625 bp, Unknown
  Bacterial polypeptide expressing nucleotide sequence isolated from the Sargasso Sea
aatgagtacacaacaagcaacaagctcgaaagtgtcttcatctttggatacctctcatttgaaggttaaatttccatttaaaaataaatatggaaactacattaacggaaaatttgtagaacctaaatctggaaagtattttgacaatactactcctatcactaatgaagttatctgtaaggtgccacgatcgaatgaaaaagacgttgattttgctcttgacgcagcccacgcagcatttcctgcttggggaaaaacatcaatcactgagagatcaaatattctcttaaaaattgctgatgttatagagaaaaatctaaacgtgttagcgacagcagagtgtttagacaatgggaagccaatcagagaatgtatggcagcagatttacctttggtaatcgatcattggagatattttgctggagtaataagagcagaggaaggttcagttgctgaaatcagtaacagtgaatattcttaccacataccggagccattaggtgtagttggtcagattataccatggaacttcccgttattaatggctacatggaaattagcgccagcattagcagcaggaaactgtgtagttttaaaaccagctgaacaaacaccagcatcaata

SEQ ID NO: 214502 - DNA, 1462 bp, Unknown
  Bacterial polypeptide expressing nucleotide sequence isolated from the Sargasso Sea
catggctattaaaagaaaaaagatagcaaaatcaaagaccaataaaaaaaggattaaattggtcaaagcttctagaaaaaaaataagaacaaaaaaaaaagttgtgacaaaaaagtctgcgactaagaagcgttctaaaaaatctagaaaaaataataagctaaaaaaaaccaacaaaagaggaaaaataagaaaaatgagtacagaaacaatgaaaagtgcttcgtccccattattggatacgtctcacttaaaagtcccttttccttacaaggcaaagtacgggaattatataaatgggaaatttgttgaaccaaagtctggaaaatattttgataatactacaccaattaacaatgaagttatttgtagtgtggctagatcagatgcaaaagatgttgaagcagctttagacgctgcgcacgcagcttttccaacttggggaaaaacatcaataacagaaagatcaaacatactgattaagatagctgatgtgattgaaaagaatctagaaaaattagctaccgctgaatgtttagataacggaaaaccaattagagaatgtatggctgcagatttacctttagtggttgatcactggagatattttgcaggagtaattagagctgaggaaggttctgttgctgagataagtaacaatgagtattcttatcacatacctgagccactaggtgtagttggtcaaattataccatggaactttccacttctaatggcgacatggaaacttgctccagcattggcagcaggaaactgtgtggttctaaaaccagctgaacaaactccagcttctattatgttattaatggaactgattggtgatttattgcctgcaggagttgttaacgttgtaagtggatttggtttagaggcaggaaaacctttagcttcatcaaaaagaatcaaaaaaattgcttttactggtgaaacaacaacaggtcgtttgattatgcaatacgcatctcaaaacttaattccaattactttagaacttggaggaaaatctccaaacattttctttgaagacgtcatggacaaagacgatgacttctttgataagtgtatggaaggttttgctatgtttacgctaaaccaaggagaggtttgtacttgtccaagcagagtactagttcaagagtctatctatgataaatttatggagaaggctattgctagaacgaaagctgtaaaacaaggtaatccacttcaaatggaaactatgattggtgctcaagcatcagtagaacaaatggaaaaaatcaaatcttacttagatttaggtaagaaagaaggtgccaaagttctatgtggtggaaatgttgctaaagtaaatagtggtttagagaaaggaaactttattgaaccgactatttttgaaggtaataattcaatgcgtatcttccaagaagaaatttttggacccagtagtatctgttactaa

SEQ ID NO: 214503 - DNA, 1109 bp, Unknown
  Bacterial polypeptide expressing nucleotide sequence isolated from the Sargasso Sea
tatggctactaaaagaaagaaaagagctaagccaaaaaccaataaaaaaaaaactaaattggttaaatcctctagaaaaaaaataagaacgaaaaaaaaagttaggacaaaaaagtctgcgactaagaagcgttctaaaaaatctagaaaaaataataagcttaaatcaataaaaaaaacaggaggagtaaaaaaaatgagtgcagaagcaatgaaagtgtcatctgtattagatacttctcatttgaaagtaaaattcccgttcaaagcaaaatacgggaactacattaacggtaagtttgtagagccaaaatctggaaagtattttgataatacatctccgatttcaaatgaagtaatctgttcagttgcgcgatcaaatgaaaaagacgtagatgcagcattagatgcagctcacgcggctttcccaacttggggtaaaacttcaattacggaaagatcaaacattcttcttaaaattgcagatgtcattgagaaaaatcttaatgtattagcaacagctgaatgtttagataatggtaagcctattagagaatgtatggctgctgatttaccactagtaatagatcattggagatattttgccggagtaatcagagcagaggaaggttcagttgctgaaatcagtaacagtgaatattcttatcacattccagaacccctaggtgtagttggacaaattataccatggaactttccattactaatggcaacttggaaacttgctccagctttagcagcaggaaactgtgtagtgctaaaaccagctgagcaaacaccagcatcaatcatgttacttatggaactaattggagatttattacctccaggagtagttaacgtagtaagtggctttggtttagaggctggaaaaccactagcatcatcaaaaagaatcaaaaagattgctttcactggtgaaacaacaactggtagattgattatgcaatatgcatcacaaaacttgataccaattacgttggagttaggtggaaaatctcctaacattttctttgaagacgtcatggcaaaagatgatgacttctttgataagtgtttagagggttttgcaatgttcacattaaacc

SEQ ID NO: 214504 - DNA, 568 bp, Unknown
  Bacterial polypeptide expressing nucleotide sequence isolated from the Sargasso Sea
gttgcatcaacttatcaatctgtatcaggagcaggtaaggcaggaatggatgaacttatatcccaaactaaagaagtcttggaaaataaagatgttgagtcaaaaaattttactaagcaaattgcttttaatgctataccccatatcgatagttttcttgaaaatggaagcacaaaagaagagcaaaaaaatcatgatgaggtaaaaaaaatattagatagtaaaattaatataacatctacttgtgtaagaatccctgttcttgtttctcactccataagtgtaaatgttgaatttaacaaaaaacatgacttagaagaaataagaaatgtcttgtcatcatcaccaggatgcaaggtagttgatgagcataaagatggaggatacattacgcctgttgaagctgaagacaaatttgaaacattcatatcaagaattcgtgaggactcttctcaaccaaactcaattaatttgtgggttgtgtctgataacttattaaaaggtgctgcactaaatgcagttgaaattgctgaggctttagtagaaaaagatttttatggaaaataaa

SEQ ID NO: 214505 - DNA, 392 bp, Unknown
  Bacterial polypeptide expressing nucleotide sequence isolated from the Sargasso Sea
aaaagaagaattaaaaatgagacaagaaactcataaaattttaagtagtgagatcagctttagcgctacatgtgttcgcgttcctgtatttattggtcactctgaagctgtaaatattgagtttgaaaacaaaatttcagtagaagaagcacgtgaagctattaaaaatgctcctgggtgcacactacttgatgaaagagctgatggaggttatgtaactccaaaagagtgtgcaggaaatgatgacacgtatgtatcgcgaattcgagaggatacgtctacaaaaaatggattatctatttgggtagtttctgataatttaaggaaaggtgctgctttaaatacaatccaaatcgctgaaatgctaattgaggaacatttatctaaatgag

SEQ ID NO: 214506 - DNA, 391 bp, Unknown
  Bacterial polypeptide expressing nucleotide sequence isolated from the Sargasso Sea
tattcacttgaagaaatgaaaatggtttgggaaacttataagattttcgaagacaaaagcattgaagtgaatccaaccgcagtaagagtccctgtgagatttggtcactctgaggcaataggcgttgtaacagaaaatcatctcagtattgggcaaatcagaggattgctttcagaatcaagtggaatccaactaatggacgatgatgaatcttaccccatgcctgcaagagaaggggaaggcactgatgctgtctacatcggtaggattcgagcagacttgaatcattcgaatggagtaaatctttgggttgttgcagacaacataagaaaaggcgcagcactgaattcaattcaaattgctgagaccatcattgaatcaaattattaaa

SEQ ID NO: 214507 - DNA, 506 bp, Unknown
  Bacterial polypeptide expressing nucleotide sequence isolated from the Sargasso Sea
tagtcaaactaaagattatttagataataaaaatataaaatcaaagaattttacaaaacagatggcatttaatttgattcctcatattgatgcatttgttgatgatggatatacaaaggaagaatggaaaatggagaatgaaacaaaaaaaattttagataataatataggattaagcgcaacttgtgtaagagttccagtaaaaacttctcattctgaagcggttaatattgagtttgaaaatgaatatgacctagaaactgtaaaaaaattattaattagtgctccaggatgtaaagtagtagacgaaccaaaagatggaggatatataactcctttggaggcagaaggtgattacttaacatttatttctagaataagaaaagatcattctaataaaaaagcaataaatatatggattgtatcagacaatttactaaaaggagcagcacttaactctattcaaatagccgaatgtttgattaagaatttaaaaaactcatgat

SEQ ID NO: 214508 - DNA, 615 bp, Unknown
  Bacterial polypeptide expressing nucleotide sequence isolated from the Sargasso Sea
tagttatggtaatagatgctataaattctatttctaaggttggtaaagtaattgtatctacatatcaagctgtaagtggtacaggtaaagaagcagttaatgaactaattaatcagcaatcaggtgatcaatcaactaatgtttatgattttcctatagctaataatatatttccacatgttgatgattttatgccagatggatttactaaagaagagcataaaatgattaacgaatcaaagaaaattcttcatgataatgaaatagaaatcattccaacatgtgtaagagttccggtaaaaataggacactcagagtcattgactatttcattaaaaaatgaaatttctcttgaagacataaaaaaagtagttagagaatattctggaataacacttcttgatcaatcagatgaaataccttatcctatgcctctttttgctgaaggtaaaaaagatgtatttgtaggaagaattaggaaaagtctaaataattcaaaagaattaaatttatggttaagttgtgataatttgattaaaggagccgcttacaacgctctacaaatcttagaatcaatgataaaaaaagacttaattaagttgggcaaaggataaa

SEQ ID NO: 214509 - DNA, 717 bp, Unknown
  Bacterial polypeptide expressing nucleotide sequence isolated from the Sargasso Sea
atcccgatgttcctttgattgtcccacaggttaatgccaatcatttgaataatattaataagaatattatagcaaatccaaattgttcaactgcacaattggtgattgcactaaaacctttgcatgacttatttacaattaaaagaatagttgtttcaacttatcaatcagtttctggaggtggtaaagcacctatggatgaattaattgaacaaaccaaattagttttagaaggcaaaaaagttaaatctaaaaattttacaaaacaaatcgcttttaatgctattccacatatcgatgtattttcagaggatggttatacaaaagaagaattaaaaatgaataatgaaactaaaaaaattttagatgttaaaattgatttaacggcaacgtgtgtgagattaccaatatccatctctcattctgagtcagttaatgttcaatttgaaaaatctttttctcttgaggaagtaaaaaaggctttggataattttgaaggatgtaaagtaattgatgagagaactgatggaggatattcgactccattagaagctgagggaagagatgaaacatttatatctagaataagagaggataaaacaattaaaaatggattaaatttgtggattgtctcagataatcttttaaggggcgcggctttgaatgcagtcgaaatagctgaaacattgattaaaaatgatttctatgaaaaataag

SEQ ID NO: 214510 - DNA, 817 bp, Unknown
  Bacterial polypeptide expressing nucleotide sequence isolated from the Sargasso Sea
aatgaacatagctatagtaggtgcaacaggaaatgttgggaggaaaactcttgaagtatttgataaaaaaaacttcaagtttaataatctatatttagttgcctcagaaaaaagtgcaggaaaaaaaatctcttttagagataaagagtatgttattgaaaatttagagacatatgatttttcaaaagcagatataactttttttgcagcaggaggaaaaattgctgaaaaatttgcagaaaaggctgccaagcatacaattgtaatagataattcaagtttttttaggatggatcctgatgttccattgatcgttccacaagtgaatgcagcggaaattaaaaatatgaaaaaaaatattattgccaatccaaattgttctacagcacaacttgttatagctcttaaaccactacataatttatttaaaattaaaagagttgtagtttcaacttaccaatctgtttcaggtggtggcaaaagtccaatggacgaattaattgatcaaactaaacaatatttagatggaaaaaaaatagagtcaaaaaattttactaaacaaatcgcttttaatgttattccacatatcgatgtttttgctgatgatggatatacaaaagaagaattaaaaatgacaaatgaaacaaaaaaaatcttagatgagtcaattgaacttacagctacatgtgtaagaattcctgttttagtatctcattcggagtctgtaaatatagaatttgaaaaaccatatactttagaaaaagtgagagatgttttaagtaaagcagatggttgtgaggttattgataaaagagaa

SEQ ID NO: 214511 - DNA, 625 bp, Unknown
  Bacterial polypeptide expressing nucleotide sequence isolated from the Sargasso Sea
atgaaagttgcagttgttggtgttacaggaatggtgggaagtgttatgttaaatgttttaaaggaatttaacttccctgttagtaaattaattcctgttgcttctattaaatctgctggtagtagtatttcttttaatggaaaaaactatactgttgttacactggaggatgctattgatatggatatagatctggcattgttctctgctggaggatctgtttctgaagaatgggcaccaaaatttgcacaaaagggaatttatgttgttgacaactcttccttttggagaatggatccaaacaaaaagctaattgttcctgaaatcaatggttcttcacttacaaaggaagattatataatagccaatccaaattgtagtaccattcaattggttttggttttgtttgcattgcacaaaaggtttaaggttaaaagagttattgtttctacttatcagtctatttctggcactggagttaaggcagttaaacaaatgaataatgaacgtcaaggtattaaatctgaaatggcttatgcttatccaattgatcaaaactgcattcctcaatgtgatgattttttagaaaatgattatacaaaggaagaaatgaaattgaccaatg

SEQ ID NO: 214512 - DNA, 790 bp, Unknown
  Bacterial polypeptide expressing nucleotide sequence isolated from the Sargasso Sea
ttaacatatatgaatatagcaattgttggagcgacaggaaatgtcggtagaaaacttttagaagttattgaaaagctaaattttgactttagcgaattgcaccttattgcttcagataaaagtattggaaaaaaaataacttttaaaaacaaaacttattccatagttggtttaaaagattttgatttttcaaaagtaaaaatagcttttttttctgcaggaagtgtcatagcagaaaaatgggctcctattgctgcaaaaaaaacaattgtaattgataattcaaaatattttagaatggataaagatattcctttagtagttccggaagtaaactctgctacattaaaaaactataaaaacaaaaatattattgctaatgctaattgctcaactattcagctagtattagcattaaaacctttgcacgataaatttaaaattaaaagagttattgtttcaacttatcagtcagtatcaggagcaggaaatgctcaaatgaatgaactagaggaacaaagtaaaaaagttttagataaacaaaaagtaaagtcaaaaaattttacgaagcaaatagcatttaacgttattccacatatcgattcttttatggaagaccgatatacaaaagaagaatggaaaatgaccgtagaaacaaaaaaaattttagatccaaatatatctttaagtgcaacatgtgtaagagttccagtctttatagggcatgctgaatcattaaatgttgaatttaattcagaagttgacgctaaaaaaattagggactgttgaa

SEQ ID NO: 214513 - DNA, 904 bp, Unknown
  Bacterial polypeptide expressing nucleotide sequence isolated from the Sargasso Sea
tatgaagaaattaaaggacctcgcaattattggggctacaggtcttgtgggtcatacctttattagtttgtttgaggaaggtttttttcctaatgcgaagatacacctggtagcaagtgagaggtctaaaggaaaagaaatagaaataagagggattaagcatgaggttaaatctcttaaagaatttgatttctcttctgttcagcttgctttattttctgctggtgcttcgaccgctaaggaatatgctccaaaagcccttaaacaaaattgtatagttatagataactcttcttgttttagatatgaggatgatgttcctttaatagtccctgaagttaactcttacattctagatagctcaatatttaagggactagtagcaaacccaaattgctctaccattcagatgctagcagccattaaaccaattcatgatgaatttgagattaaaaaaataaatgtaacaacttttcaagctgtttccggtacaggaaaggaagcacaagaagagttagtatctcaatcaagttcaaaattaaataatccagaacttgatttaacaacagaggtttatgaaaagcctatagcatttaatgccatacctcattgtgatgattttcaagaaaatagatatacgaaagaagagatgaagatggtttgggagacaaataaaattttagatgctgctatagaagtaaatccaacatgtgtaagggtacctgttttgaatggtcactctgaatctgttcatttaactacaaagaaaaaaattaatttggataaagttataaatctcttgagagcaacaaagggcgttaaagttttttatggagaaggtccagaagattatcctactgccttaatagatgctgatggtaataatgatgtgatggttggaaga

SEQ ID NO: 214514 - DNA, 616 bp, Unknown
  Bacterial polypeptide expressing nucleotide sequence isolated from the Sargasso Sea
caacttgttatggcattatctcccttgcatagagagtttaatattaaaagagtagtggtttctacctaccaagctgtttcaggagctggtaaagaggcaatggatgagttgtttaatcaaacaaaaaaagtctatgtaaatgaccctcttgagaaaaatgtttttaccaaagaaatctcttttaatgtaattcctcatattgatgtatttttagaagatgggttcactaaagaagaagttaagatgagagatgaaacaaaaaagattctagatgaaagcattgatgtagttgcgcactgtgtaagagttccagtttttgttgggcatagcgaagcagttttcattgaatgtgaaaatcctatggatgaagagcttgcaagagatgttttaagtgatacagaaggggtgattatcatagatcatagagttgatgagggatacattactcctaaagaagccgcaggtgaggatggtgtttatctttctagaataagagttgataattctgtgcctagtggcttagtattctggtgcgtatcagacaacttgagaaaaggtgctgctctgaacgcagttcagatagcagaattagctgttagccaaggtttaaaataaa

SEQ ID NO: 214515 - DNA, 721 bp, Unknown
  Bacterial polypeptide expressing nucleotide sequence isolated from the Sargasso Sea
ggaaattattgtagaagacctatcagaatttgatttttcaaaagcacacataagcttattttctcctggaggtaaaatttctgcagaatatgcacctaaggcagctaaagcaggaagtattgtaatagataatacctctcattttcggatgcaacaaaatatccccttaatagtccctgaagtaaatgcagacgtacttgatgaattttttgataatgaaaatagaactaatataatttcaaaccctaattgctcaactatacaaatggttgttgcactaaaaccacttcacgaaaaagcgataataaacagagtagttgtttcaacataccaagcagtatctggagcgggtaaaaccggtatggatgaattatttaaacaaacacaaaatgtttatgcaaatcaagagttaaaaaaagataagtttactaagcaaattgcttttaatgctattccacatattggtgcttttttagaaaatggtaacactgaagaagaacaaaaaatgattgatgaaacaaaaaaaattctagacaaaggaattaatgtttcagcaacgtgtgttagaacagctgttttcatcggacattcagaagctatcaatatagaatttgactctccaatagatgaaaaagaagctaaagaaatattatctaagtctgaaggtatttcagtaattgatcatagaaaagatgaaggctatattactcctgtagaaata

SEQ ID NO: 214516 - DNA, 694 bp, Unknown
  Bacterial polypeptide expressing nucleotide sequence isolated from the Sargasso Sea
actcttgatgaattttttcaagatgaagagagaacaaacatcatttcaaatcctaattgctcaacaattcaaatggtggttgctttaaaaccacttcatgaaaaatcaatcataaatagagttgtagtttcaacatatcaagctgtgtcaggagcaggcaaaactggaatggatgaattatttaatcaaactcaaagtgtttatgcaaaccaagaactaaaaaaagaaaaatttactaagcaaatagctttcaatgcaattcctcatataggtgcctttttagaaaatggtaatacagaagaagaacaaaaaatgattgatgaaacaaaaaaaattttagatgaaggaattaaagtttcagcaacatgtgttagaacggctgtgtttattggtcattcggaggctataaatattgaatttgattctccattggatgctaaagaagcccatgatattctatctaagtctgatggtgtttccgttattgatcatagaaaagatgaaggatatgtaactcctgtcgaaatagctggtgaagataaagtttatataagcagaattagaaatgatgactcaattgataatggtttaagtttgtgggttgtatcagataatcttcgtaagggagctgccttaaatgctgttcagatagctgaaactataataaaagattatgatcagtatattcaataaa

SEQ ID NO: 214517 - DNA, 654 bp, Unknown
  Bacterial polypeptide expressing nucleotide sequence isolated from the Sargasso Sea
atattatagcaaatgctaattgttcagtaattccaatagttgtagctctcaaaccattacatgatttgtataatgtaaaaagaatagttgcatcaacttatcaatcagtgtctggtgcaggtaaagctggaatggatgaacttatatcccaaactaaagaagtcttggaaaataaagatgttgaatcaaaaaattttactaagcagatagcctttaatgctataccacatattgatagctttcttgaaaatggaagtacaaaagaagagcaaaaaaatcatgatgaggtaaaaaaaattttagatagtaaaattaatataacatctacttgtgtaagaatccctgttcttgtttctcactccataagtgtgaatgttgaatttaacaaaaaacatgacttggaagaaataagaaatgtcttatcatcatcaccaggatgtaaggtagttgatcagcaaaaagatggaggatacattacgcctgttgaagctgaagacaaatttgaaactttcatatcaagaattcgtgaggattcatctcaaccaaattcaattaatttgtgggttgtttctgataacttattaaaaggtgctgcacttaatgcagttgaaattgctgaggctttagtagaaaaagatttttatggaaaataaa

SEQ ID NO: 214518 - DNA, 556 bp, Unknown
  Bacterial polypeptide expressing nucleotide sequence isolated from the Sargasso Sea
tatcaggcagtatcgggagcaggtcggccagctatggatgaattattcaatcagacaaagagcatctatgtaaatgatgcggtacagccggagatttttaccaagcagattgcgtttaatgcgatccctcatattgatgtcttctgtgacgacggctttaccaaggaagaatggaaaatgaccgctgagaccaagaaaatcttggatccaaccatcgagcttgttgcgcattgtgtacgcattcctgtttttgttggtcatagcgaggccgtctttattgagacgcaacatccaatgaccgaaaaagctgtacgaggtctgctgggtgacgcgcccggggttattgtaattgatcaccgagcgaatgaaggttatgtgactccgcatgaagctgcgggtgaggatgctgtttatattagccgtattcgccaagatcccaccgtgaggaatggcatggttttctggtgtgtgtctgataatctaagaaaaggcgctgcattgaattctgttcaaattgcggaattgattgctgcacaagatattcgcgggcgctagc

SEQ ID NO: 214519 - DNA, 663 bp, Unknown
  Bacterial polypeptide expressing nucleotide sequence isolated from the Sargasso Sea
tatgagcttaaatatcgcaatagttggagcaactgggaatgtcggtcgagagatgcttaatatactttcagatagaaaatacaattcatctaaaatttttcctgttgcttcaagtaaaagcgagggaacaaaagttgaatttggagataaggagctcacagttgaagccattgataaatttgatccagcaaaagttgacttagcactattttcagcaggagcaagcgtatcaaaagaatgggcacccaagtttactgaaaaaaattgcattgttattgataattcaagtcaattcagaatggataaagatgtccccttaattgttcctgaagtaaatcccgatgctataaaaaattataaaataaaaaatattattgctaatcctaattgttcaacaattcagctggtcgtagcattaaaaccattgcatgaaatttctaacataaaaaaagtgattgtttcaacatatcaatcagtttcaggcgcaggtaaagctggtatggatgaattatttgaccaaacaaaaaacatgttttcagatgaaataaaagacaacgttaagtttacaaaaccaattgcatttaatgttatacctcatattgataaatttatggatgatgggtatacaaaagaagagcttaagatgaatcaagaaacaaaaaa

SEQ ID NO: 214520 - DNA, 487 bp, Unknown
  Bacterial polypeptide expressing nucleotide sequence isolated from the Sargasso Sea
ttgaagaatgttgtaattgccggagcaaccggtgctgtaggtaatgaatttctaaaactgttagaagcacgggaattccctgtaaaaaacttaagattgctcgcttccgcacgatcaataggaaagaaactggaatttctaggtgaaaaaattccggtagagcaattaacatctaaatccttcagtggggttgacttagcatttttttctgcaggtcgtgaaagtagcaaagtatatatccctcatgctgtggaatcaggaactgttgtaattgacaacagcagcgctttcagaatggatccagatgtacctttagttgttccggaaataaatcctgaaagtgcatttaaacataaaggtataatcgctaatccaaactgctcaacgatccagatggtggttgcattgaatccgcttcacaaggcagcattagttaatcgtgttgtagtttccacttatcaatccacagcaggagccggagcaaaag

SEQ ID NO: 214521 - DNA, 403 bp, Unknown
  Bacterial polypeptide expressing nucleotide sequence isolated from the Sargasso Sea
ttgtttcgatggttatacaaaagaggaatggaaaatggaaaacgaaacaaaaaaaattttagataaaaaaattaatttaacagccacatgtgtcagggtgccaataaaaacttctcactctgagtcaataaatgttgagttcaaaaaaaaatacaatttcaaaagattaaaagaaatattaaaaaaaactcctggctgcaaggttgttgatgaaagaaaaaatggtggttatataactccgctagaagctgagggtaattataaaacttttatatccaggatcagaaaggatagttcaaaaaaaaatgctattaatctttgggtagtgtcagacaatttgttgaaaggagcagcattaaatacagttcaaatagccgaaaaattggttaataaggatttctaa

SEQ ID NO: 214522 - DNA, 589 bp, Unknown
  Bacterial polypeptide expressing nucleotide sequence isolated from the Sargasso Sea
tctttatggcattaaaagaatcgttatttctacttatcaatctgtttcaggtgctggaaaagctgcaatggatgaacttttgtcacaaacaagagatttcttagacaaaaaaaaattggcaccgaaaaactttacaaaacaaatagcattcaatgctatacctcatattgatagttttttagaagatggatcaactaaagaggagcaaaaaaatcacgatgaggtaaaaaaaattttagataaaaaaataaaaataacatcaacgtgtgttagaattccagtacttgtgtcacattctataagcacaaatgtagaatttcataaaaaatatgatttaaatgaaattaaaaaagttttatcttcttcacctggttgcaaagtggtggatgaacataaagatgggggatacataactcctgttgaagctgaaaataaatatgaaactttcatttcaagaataagagaagatttttcaaatgaaaattcgattaatctctggatcgtatcagataatcttttaaaaggtgcagcattaaatgcagttgagatagctgaaagtttaattaaaaatgatttttatggaagataa

SEQ ID NO: 214523 - DNA, 658 bp, Unknown
  Bacterial polypeptide expressing nucleotide sequence isolated from the Sargasso Sea
tatgggatacagagtggctgtagtgggcgcgactggtgcagttggtcgtgaaatgttgcaaactttggctgaacggcggtttccagcaaataaaatttatgcgttggcctcggcaaaatcagctggccgcgaggtgtcttatggtgaagatcaaacgctgattgtcgaatcactcgaaaaatttgactttggtacggccgatatcgcgctgttttctgctggcggtgacacggcaaaagcctttgcacctaaagctggcgcggccggttgtattgtgatcgacaattcatccgcctttcgcatggatgatgatgtgccattgattgtgccggaagtgaatgctgataccgtcgagaaatgcctgatcaaaaataaagggcgcaatatcattgccaatccaaattgttcaaccgcccagcttgtggtggcgttgaagccgcttcatgacgccttttgtgtgcgccgggtggtggtttctacctatcaggcggtgtctggtgctggtaagccagcgatggatgaattattcaatcaaacccgcgcaatttacgtcaatgatacggttcaaccagaaatttttaccaagcaaattgcctttaatgccattccgcatattgatgtgttccttgatgatggatttaccaaggaagaatggaaa

SEQ ID NO: 214524 - DNA, 676 bp, Unknown
  Bacterial polypeptide expressing nucleotide sequence isolated from the Sargasso Sea
ctggcccatgttaaaaataaaaatataattgcaaatgcaaattgttcggtgataccacttgttgttgcactaaaacctttgcatgatttgtataaagttaagagaattgttgtatcaacttatcaatctgtttctggagcaggtaaagctccaatggatgagcttttgtctcaaactcaagattattttaataataaaaatttacagtctgagcattttacaaaacaaatagcttttaatattattccacatattgatagctttttagaaaatggttataccaaagaagaacaaaaaacttccgatgaaattaaaaaaattttagataaaaaaattcaaattacttcaacttgtgtaagaatacctgttcttgtttcacattctataagtgccaatgtagagtttgataaaaaatgtaatttagaagaaataaaaaatgttttatcctcatctccaggatgtaaggttgttgatgaacataaagatggaggatatattacgcctgtcgaggcagaaaacaaatatgaaacatttatttcaagaattagaaaagatgattctcaatctaatactataaacttgtggattgtttctgataatttacttaaaggtgccgcattaaatgcagttgaaattgctgaaagcttaattaaaaaaaatttacatgaaagataaa

SEQ ID NO: 214525 - DNA, 505 bp, Unknown
  Bacterial polypeptide expressing nucleotide sequence isolated from the Sargasso Sea
tgctcagtcaagagattttttaaataaaaaaaaaattttgtctaaaaactttacgaaacaaatagcttttaatttaataccccatatagataaattcatggatcaaggttatacaaaagaagaattaaaaatggttaatgaaaccaaaaaaattctcgactcaaaaattaaaataacagcaacctgtgttcgcgttcctgtaatgacctctcattcagaatctattaatgtagagtttgaaaaatcatttgatattgaaaaaatcaaagatattttaaataattcagaagggtgcaaggttttagatgagcgtaaagatggaggatatataacccctatcgaggctgaaaataattatttgacttttatttctagaattcgaaaagataactctaatgataaagcacttaatatgtgggtcgtttctgacaatttactgaaaggtgcagcattgaatacagtacagattgctgaaaaattaataaaagattattatggaaaataa

SEQ ID NO: 214526 - DNA, 634 bp, Unknown
  Bacterial polypeptide expressing nucleotide sequence isolated from the Sargasso Sea
ttgttctgtaattcctcttgttgttgttcttaagcctttacatgatttatataatgtaaaaagaattgttgtatcaacctatcaatcagtttcaggtgcaggaaaagatccaatggatgaacttttaagtcaaacccaagaatttttgcaaaataaaaaaatagaatcgaaacattttacaaaacaaatagcttttaatgcaatacctcatattgatagttttttagaagatggttatacaaaagaagaacaaaaaactaatgatgaagtaaaaaaaatattggataataaaattaaaattacgtctacctgtgttagaatacctgtattagtatcacattctttaagtgtaaatgtagaatttaataaaaaatataaattagatgaaattaaaaatgttctctcaacctctccaggttgccaattagtagatgagcataaggatggtggctacataacaccagtagaagctgaaaataaatttgaaacatttatttcaaggattagagaagataagtctcaacccaactctataaatctttggattgtatcagataatttactcaaaggcgcagctttaaatgctgtagaaattgcagagtcgttagttgaaaaggatttttatggaaaataa

SEQ ID NO: 214527 - DNA, 661 bp, Unknown
  Bacterial polypeptide expressing nucleotide sequence isolated from the Sargasso Sea
aacaaaaatattatagctaatgcaaattgttcagttataccgattgtggtagcattgaaaccacttcatgatctttatagtataaaaagaattgttatttcaacttatcaatctgtttcaggtgctggaaaagcagcaatggatgaacttttgatacaaacaaaagatttcctagataaaaaaaaattagcacccataaactttacaaaacaaatagcattcaatgccataccacatattgatagctttttagcagatggatcaaccaaagaagagcaaaaaaatcacgatgaagtaaaaaaaattttagataaaagaattaaaataacatcaacgtgtgttagaattccagtactagtatcacattctataagtacaaatgtggaatttcacaaaaaatatgatttaaatgaaattaaaaaagttttatcttcttcacctggttgcaaagtggtggatgaacataaagatggaggttatataactcctgttgaagctgaaaataaatatgaaactttcatttcaagaataagagaagatttttcaaatgataattccatcaatctctggattgtatctgataatcttttaaaaggtgcagcattaaatgcagttgagatagctgaaagtttaattaaaaatgatttttatggaaaataaa

SEQ ID NO: 214528 - DNA, 871 bp, Unknown
  Bacterial polypeptide expressing nucleotide sequence isolated from the Sargasso Sea
aagatctctctgaatttgattttcaaaagctcatataggtttttttctccagtgtataaaatttcagctgaatatgctcctaaagctgctaatgctggttgtatagttatgaccaacacttctcattttagaatgcaaaaaaatattcctctaatagttcctgaagttaatgcaaatactctagaagaattttttcaaaatgaagagagaacaaatatcatttcaaacccaaattgctcaacaattcaaatggtggttgctttaaaaccacttcatgaaaaatcaatcataaatagagttgtagtttcaacatatcaagctgtatcaggggcaggcaaaacaggaatggatgagttatttaatcaaactcaaaatgtgtatgcaaatcaagaattaaaaaaagaaaagtttaccaaacaaatagctttcaatgcaattcctcatataggtgcttttttagaaaacggtaatactgaagaggaacaaaaaatgattgatgaaacaaaaaaaattttagatgaaggaattaaagtttcagcaacatgtgttagaacagcagtgtttattggtcattcagaggctataaatattgaatttgattccccaatggattctaaagaggctcatgatattctatctaattctgatggtatttcagttattgatcatagaaaagatgagggatatataactcctgttgaaatagctggtgaagataaagtttatataagcagaattagaaatgatgattcaatcgataatggtttaagtttgtgggttgtatcagataatcttcgtaagggagctgccttaaatgctgttcagatagctgaaactattataaaagattatgatcagtatattcaataaa

SEQ ID NO: 214529 - DNA, 580 bp, Unknown
  Bacterial polypeptide expressing nucleotide sequence isolated from the Sargasso Sea
gtatttaaaattaaaagaataattgtttcaacttatcaatcagtgtctggtgcaggcaaagattcaatggacgaacttattgatcaaacaaagcttgctcttgataaaaaaaaaattaaatcaataaactttactaagcaaattgcttttaatgcaattccacatatcgatgtttttttggataatggttatacaaatgaagaaatgaaaatgataaatgaaactaaaaaaatcttagataaagatattaatgtaactgcaacctgtgttagggtaccagtattggtttcacatgcagagtcagttaatatagaatttgaaaaaaaatttactttggaaaaagtaataaagttgttgaatactgcagagggatgcaaagtaattaatgatccacgagatggtggatatataacacagcttgaagcagagggaaaagatgaaacttttatctcaagagtcagaaaagataatacaaatgaaaaagcaataaatctttggatagtatctgataatttactaagaggtgcggctctaaacgccgtagaaatagcagaggcatatattaaaacaaagaaatgaa

SEQ ID NO: 214530 - DNA, 295 bp, Unknown
  Bacterial polypeptide expressing nucleotide sequence isolated from the Sargasso Sea
cataaaaaatttaatataaaaagagttgtggtttcaacatatcaagctgtatccggagcaggtaaagctgcaagggatgaactaatgagtcagacaaaagattttttagaaaaaaaaaaaattaaatcaacaaactttactaaacaaatagcttttaatttaatccctcatatagatgtatttgtagaagacggatacaccaaagaagagtggaaaatggaaaatgaaacaaaaaaaatattaagcgaaaagataaaagtttctgcgacttgcgtaagagtcccagttattacaa

SEQ ID NO: 214531 - DNA, 704 bp, Unknown
  Bacterial polypeptide expressing nucleotide sequence isolated from the Sargasso Sea
tgcggtaggaacagaaatagttcaaattttagagcaaaggaattttccaatagacaatttatatttacttgcatcatcaaaatcaaaaggcaaaaaagtagagtttaaagataaagaaattgttgtagaagacttatcagaatttgatttttcaaaagctcacattggtttattttcaccgggcggtaaaatttctgcagaatatgcaccaaaagcagctaaatcaggatgtattgttatagacaatacttctcattttcgaatgcaacaaaatattcctttaatcgtgcctgaagtaaacgctaatgcacttgatgaattttttgatgatgaaaacagaactaatattatttcaaaccctaattgttcaacaatacaaatggttgttgcattaaaaccacttcatgaaaaagcaattattaacagagttgttgtatcaacataccaagctgtatctggagcaggtaaaacaggtatggatgaattgtttaatcagactcaaaatgtttatgcaaaccaagagttaaaaaaagaaaagtttacaaaacaaattgcttttaatgccattccacacattggagcttttttagaaaatggtaatacagaagaagagcaaaaaatgattgatgaaacaaaaaaaattctagatgaaggaattaatgtttcagcaacttgtgttagaacggctgtgtttattggtcatt

SEQ ID NO: 214532 - DNA, 829 bp, Unknown
  Bacterial polypeptide expressing nucleotide sequence isolated from the Sargasso Sea
atgggctataatttagctatagtaggagccacaggtgccgttggcagagaaatgcttcagacattgtcagaacggaactttcctgtaaataatatttatgctctagcttcaaagtcttctgtaggaaaagaagtttcttatggagagacaaaagttttaaaagttcttaatcttgaagagtttgatttttcaaaagttcacattgctctattctcagcagggtctgaaatagcaaaaaaattcgcacctattgcaggtaatcagggatgtatttcaattgataactcttcttgttttagaatggcacaagacattccattaattgtaccagaagttaatccagagcatgtttttgattttagcaagagaaatataattgcaaatcctaactgctcaaccattcaaatggttgtagctttagcccctttgcataaaaaatataaaattaaaaaggtttttgtatcaacatatcaagcagtttctggtgccggaaaattagcaatggacgagttgtttaatcaaacaaaaggggtatatgttaatgacacttctacaccagaacaatttactaaaaaaatagcttttaatgtaataccgcatatagattcttttttagaggatggttttacaaaagaagaatggaaaatgaatgtagagacaaaaaaaattttggaccccaatatagaagttactgcacattgtgtaagagtaccagtttttataggtcattctgaatcagtatttgttgagtgtgaaaataatgtagatgagaatgaagccagaaatttgttaaaacaatcaaaaggaattaccgttattgatcatcgag

SEQ ID NO: 214533 - DNA, 736 bp, Unknown
  Bacterial polypeptide expressing nucleotide sequence isolated from the Sargasso Sea
aatgacaaaagaatataatgtagcagtcgctggtgcaacaggagcagttggaagtgaaataattcaaattttagaacaaagaaattttccaattgataatttgtatttactcgcatcatcaaaatctaaagggaaaaaattagaatttaaagaaaaaaatattattgttgaggatcttgctgaatttgatttttcaaaagttcatataggcctgttttcaccaggtggtaaaatttcagctgaatatgcgcctaaagctgctaaagctggttgtatagttattgacaacacttctcattttagaatgcaaaaaaatattccactaatagtacctgaagtcaattctaatactcttgaagaattttttcaagatgaagaaagaacaaatatcatttcaaatcccaattgttcaacaatccaaatggtggttgctttaaaacctcttcatgaaaaatcaatcataaatagagtggtagtttcaacatatcaagctgtatcaggtgcaggtaaaacaggaatggatgagttatttaatcaaactcaaaatgtttatgcaaatcatgaactaaaaaaagaaaagtttactaaacaaatagctttcaatgctattcctcatataggtgcttttttagaaaacggtaatacagaggaagagcaaaaaatgattgatgaaacaaaaaaaattttagatgaaggaattaaggtctcagcaacatgtgttagaactgcggtgttt

SEQ ID NO: 214534 - DNA, 722 bp, Unknown
  Bacterial polypeptide expressing nucleotide sequence isolated from the Sargasso Sea
aatgcaaaaaaatattcccctaatagttcctgaagttaatgcaaatactctagaagaattttttcaagatgaagaaagaataaatatcatttcaaacccgaattgctcaacaattcaaatggtggttgctttaaaaccacttcatgaaaaatcaatcataaatagagttgtagtttcaacatatcaagctgtatcaggggcaggtaaaacaggaatggatgagttatttaatcaaactcaaaatgtctatgcaaatcaagaattaaaaaaagaaaagtttaccaaacaaatagctttcaatgcaattcctcatataggtgcttttttagaaaacggtaatactgaagaagagcaaaaaatgattgatgaaacaaaaaaaattttagatgaaggaattaaagtctcagcaacatgtgttagaacagcagtgtttattggtcattcagaggctataaatattgaatttgattccccaatagattctaaagaggctcatgatattctatctaattctgatggtatttcagttattgatcatagaaaagatgagggatacgtaactcctgttgaaatagctggtgaagataaagtttatataagtagaattagaaatgatgattcaattgataatggtttaagtttgtgggttgtatcagataatcttcgtaagggagctgccttaaatgctgttcagatagctgaaactataataaaagattata

SEQ ID NO: 214535 - DNA, 709 bp, Unknown
  Bacterial polypeptide expressing nucleotide sequence isolated from the Sargasso Sea
atgagttataatgtcgctgttgttggagctacaggtgctgttggcagagaaatgctgcaaacattatcagaaagaaattttcctataaacaatatttatgctttagcttctaagtcttcagtaggaaaagaaatttcctatggggaaagtaaagttttaaaaattattaatcttgaagactttgatttttcaaaagttagtatggctttgttttcagcaggttcagatacggcaaaaaaatatgcaccaatagcagcgaaaaaaggatgtgtttcaattgataactcgtcttgttttagaatggaaaaagatatacctttggttgttccagaggttaatccagaacatattcttgattttagtaaaagaaatattattgcaaatcctaattgttctacaattcagatggtggttgctttagcacctttgcacaaaaagtataaaattaagaaggtttttgtttctacttatcaagcagtttctggtgcaggtaaattggctatggatgaattgtttaatcaaacaaaagggatatatgttaatgatactgctataccagaacaatttaccaaaaaaatagcatttaatgtaataccccatatagactcttttgtagaagatggttttacaaaagaagagtggaagatgaatgtagagacaaaaaaaattttggatgccagtatagaagttactgccccattgtgtgagg

SEQ ID NO: 214536 - DNA, 715 bp, Unknown
  Bacterial polypeptide expressing nucleotide sequence isolated from the Sargasso Sea
atagataattcaaaattttttagaaaagatcctcaaattcctcttgtggtaccagaagtgaactcaaaagaattagctcatgtaaaacataaaaacattattgctaatgctaattgctcagttatcccaattgttgtagcattaaagcctctacatgatttatatagtgtaaaaagaattgttgcctctacttatcaatctgtatcaggcgcaggaaaagaagctatggatgaattaatttcacaaacaaaagattatttaaaagataaagagataaattcaaaaaactttacaaagcaaatagcttttaatgctataccacatatagatgcttttttagaaaatggttcaactaaagaggaacaaaagaatcatgatgaaataaaaaagatattagataaaaaaattaatgttacttctacttgtgtgagaattccagttttagtttctcattcaataagcatcaatgtagaatttaataaaaaatataacttagatgaaataagaaatgtactatcatcttcaccaggatgtaaagttatagataaaaaaatcgatggaggatatattacacctgttgaagctgaaaataaatatgaaacatttatttcaagaatacgagaggataattctcaaccaaacacaattaatatgtggatagtatcagacaatcttctcaaaggtgctgcaaaaaatgcagtagagatagctgaaa

SEQ ID NO: 214537 - DNA, 515 bp, Unknown
  Bacterial polypeptide expressing nucleotide sequence isolated from the Sargasso Sea
tgaacttattactcaatcaaaagattttctttcgggaaaaaaaatcagttcacaaaactttactaaacaaattgcatttaatttaattccacatatagatgaatttgttgaagaaggttacacaaaagaagaatggaaaatgataaatgaaacaagaaaaattcttgatccaacaattaaattaacagctacatgtgttagagtgcctgtaatggtttctcattccgagtcaatcaatgttgagtttgaaaaagctttcgatattgagagtgtaaaaagaattttgaacaaatctaccggttgtaaagttttggatgaaagaaaaaacggaggatacattacacctttagaagcggaagatagccatatgacttttatttcaaggcttcgcaaagatagttctaatgaaaaagctctaaatatgtgggtcgtttctgacaatttacttaaaggtgcagcattgaatacagtgcaaatagctgagaaattaataaaagattattatgcaaaataaa

SEQ ID NO: 214538 - DNA, 942 bp, Unknown
  Bacterial polypeptide expressing nucleotide sequence isolated from the Sargasso Sea
tttagcggatacactatctgcctgcggcttagaaaaaaatcaatatcaaattaagttaagtaatagaaaattaattcaaggacttattgaaaatttaaaaatttcagaagatagacaacaacttactgttttaagggccattgataaacttgatagagttggaactgatggtgtgaaacaattgttaacaacaggacgtgaagacaaatctggtgataaaactattggagcaaaactttcagataatcaagctgaggaaatactcagttttattaatatgaagtcattagataaaattaaatcaactataccaaataaattagttgaagatggtgttgatgaattaaacgaagtactagatggattaaattattcatctaatttcaatcaaataattttctctcctgaagttattagaggactcgaatattatgatggtccaatatttgaggcaaatttaacatttaaagtcaaaaatcaaaaaaaccaagaggtggagtttggctcagttggtggaggtggaagatataattctttagtttcaagatttaaaaaagtagacttatctgcaacaggtgtttccataggccttgatcgtttgctatacgcattagttcagttaaacaaaatagaggtaaaaaataattcgccaataataatatgtgttttagataaaaaatatctctctaattattataaattgttatcacaacttagaaatcaaaatatcaaatccgaagtttatctaggagattcaggtttgaaatctcaattaaaatacgcagataaaaggagttcaccagctgtaattctttgtggggacaatgaattcaaagatgataaaattactataaaaaagttaaactcaaacttagacgaaacatcaaaaaatttatcaagagaagagtggaaaaatctgaaaatactcaaattacattcgat

SEQ ID NO: 214539 - DNA, 869 bp, Unknown
  Bacterial polypeptide expressing nucleotide sequence isolated from the Sargasso Sea
tcttgaagtatttgataaaaaaaacttcaagtttgataatctatatttagttgcctcagaaaaaagtgcaggaaaaaaaatcccttttagagacaaagagtatgttattgaaaatttagagacatatgatttttcaaaagcagatataactttttttgcagcaggaggaaaaattgctgaaaaatttgcagaaaaggctgccaagcatacaattgtaatagataattcgagtttttttaggatggatcctgatgttccattgatcgttccacaagtgaatgcagccgaaattaaaaatatgaaaaaaaatattattgccaatccaaattgttctacagtacaacttgttatagcacttaaaccactacataatttattcaaaattaaaagagttgtagtttcaacttaccaatctgtttcaggtggtggcaaaagtccaatggacgaattaattgatcaaactaaacaatatttagatggaaaaaaaatagagtcaagaaattttactaaacaaatcgcttttaatgttattccgcatatcgatgtttttgctgatgatggatatacaaaagaagaattaaaaatgacaaatgaaacaaaaaaaatcttagatgagtcaattgaacttacagctacatgtgtaagaattcctgttttagtatctcattcggagtctgtaaatatagaatttgaaaaaccatatactttagaaaaagtgagagatcttttaagtaaagcagatggttgcgaggtcattgatagaagagaaaatggaggctatagcacaccatttgaagcagctggaagtgatgagacatttatatctagaattagggaagacaaaactaaaaaaaattcattaaatttgt

SEQ ID NO: 214540 - DNA, 676 bp, Unknown
  Bacterial polypeptide expressing nucleotide sequence isolated from the Sargasso Sea
atgaatttagctataattggtgccaccggcaacgttggaagaaaaactattgaaattttagagaaatccaaaattaaaatttcagaactatttcttgttgcttcagaaaaaagtgaaggaaaaaaaattaaatttaaaggaaaagaaattaaaattcaaaaccttaaaaattttgatttttccagtgcaactattactttttttgccgctggaggtaaaatagctgaaaaatgggttcctaaagcaagtaaaaaaacaattgtaatagataattcaagtttttttagaatggacaaagatgttcctctaatagttccagaagtaaatttagagaaattatctacctataaaaataaaaatataattgctaatcctaattgttcaactattcaaatggttgttgcgctaaaaccactacatgatcattttagtattaaaagagttatagtctcaacttatcaatctgtttcaggggctgggaaagcaccgatggatgaacttgtaaaccaaacaaaagaatttttagatggtaaaaaaattaattcgaaaaattttacaaaacagatagcttttaatttaattcctcatatagatgaattcgtcaaagaaggatatacaaaagaagaatggaaaatggtaaatgagacaaaaaaaattttagatccaaaaaattaaa

SEQ ID NO: 214541 - DNA, 419 bp, Unknown
  Bacterial polypeptide expressing nucleotide sequence isolated from the Sargasso Sea
gatagacatatttactgataataaatttactaaagaagaaatgaaaatggtaaatgaaactaataaaatattagataaaaatattaatgttaacgctacatgcgtgagagtaccatcatatatgggacatgcagaatcgatttacattgaattagaaaaggatatcagtattgaagatcttgaaagggctttaaaaaatgcagaaggaataaagtattctaattctgattatcatacccccatagatagtgaaggagaagattgggtatatgtatctaggttaagaaaagatatttataaaaataatatatttaatttatgggtagttgctgataacctacttaaaggtgctgcattaaattcagtacaaataggagaatctttaattaaaaaaaaaataatgagtaacaatgaataat

SEQ ID NO: 214542 - DNA, 471 bp, Unknown
  Bacterial polypeptide expressing nucleotide sequence isolated from the Sargasso Sea
aaaaagtgaaatcaaaaaattttacaaaaagaatagcttttaatattatacctcatattgatcagtttgtagacgacggatatacaaaagaagaattaaaaatggagatggagacgaaaaagattctagataataatattaaagtttcggctacttgtgtaagggttcctgtctttaattctcattcagagtcggttaatgttgagttcaaaaaaaaacataatttagatatagttaaaaaaattttgagaaaaactcccggatgtaaattgattgataaccgtaaagacgggggttacataacccctgctgaagccagtggtaattataaaacatttatttcaagagttcgaaaagatagatcgagaaaaaatgctataaacttatggatagtatcagacaatttattaaaaggagccgctttaaatagtgttcaaattgctgaagctattacgaaaattaaaaaataaa

SEQ ID NO: 214543 - DNA, 640 bp, Unknown
  Bacterial polypeptide expressing nucleotide sequence isolated from the Sargasso Sea
gcaaattgttcagtaatacctcttgttgttgctctaaaacctttgcatgatctatatattgtaaagagaatagttgcatcaacctatcagtctgtttctggtgctggtaaggctcctatggatgaattgttatcacagacaaaagagcattttgataataaaaatttacagtcgaaatatttcacaaaacaaattgcatttaatgcaattccacatattgataactttttggaaagcggctatacgaaagaagaacaaaaaactacagatgaggtaaaaaaaattttagataaaaaaattaaaattacatctacatgtgttagaattcctgttcttgtttcacattgcataagcgctaatgttgaatttgataaaaagtataatctagtagaaataaaaaatgttttgtccacatccccaggatgtaaggtagttgatgaacatagagatggtggttatattacaccagctgaagccgaaaataaatttgaaacatttatatcaagaattagaaaagatgactctcaacctaatactataaatttgtggattgtttctgacaatttgcttaaaggcgcagcattaaatgctgttgaaattgctgaatgtttaattcaaaataatttatatggaaaataaa

SEQ ID NO: 214544 - DNA, 502 bp, Unknown
  Bacterial polypeptide expressing nucleotide sequence isolated from the Sargasso Sea
ctaattaatcaaacacgtgcctgggcaaatggagataccttggaaatttcatcattcccgtcacaaattttatttaatctattcccgcacgtagacatttttatggaaaacggctacacaaaggaagagatgaaaatggttaatgaaacaaaaaagattatgaatgctcctaatatggggatttctgcaacttgtgtgagagtccctgtattgaggtcccattcagaagcagtatggatagaaactgaaaaaaaaattactccggaagaagcaaggaaaattctaaaaaaggctccaggattaattgtacgtgatgaacctgaaaacggtggatatcccatgccttgggatgttgacaaaacagtcgaaacttttgtgggaagaatcagagaagatttttctcatccaaaaggtcttactttctgggttgttgcagataaccttaataaaggagccgcccttaactcaatacaaattgcggaagtattggaagctggttagt

SEQ ID NO: 214545 - DNA, 646 bp, Unknown
  Bacterial polypeptide expressing nucleotide sequence isolated from the Sargasso Sea
cattgtctagttattgataattcaagtttttatagaatggatccggatgtacctttaattgttccacaagttaactcaagtcatctaaatcaaataaaaaaaaatattattgctaatccaaattgttcaacagcacagttagtaatagctttaaaacctttacatgacctctttgtaattaaaagaattgtagtctctacttaccagtcagtttcaggtggcggtaaagccccaatggatgaattaattgaacaaactaaattagttttgaatggtgaagaagtaaaatctaaaaattttacaaaacagatagcttttaatgctattcctcacattgatgtattttcagaggatggttacacaaaagaagaattaaaaatgaccaatgaaacaaaaaaaattttagataacaaaattgatttaacagcaacatgtgtaaggttacctatttctgtttcacattcagagtcagtaaatttacaatttgaaaaacctttttctcttgaaaaagtaagagaagcacttaataattttgaaggctgtaaagtattagataagagagttgatggtggatattcaactccattagaggctgaaggtaaggatgaaacatttatatcgagaattcgagaagataaaacaatta

SEQ ID NO: 214546 - DNA, 745 bp, Unknown
  Bacterial polypeptide expressing nucleotide sequence isolated from the Sargasso Sea
gaacttcttgagaaaagaagtttatctattgatcacttatatttggttgcttcctcaaaaagttctggaaaaaaaataagttttaaaggaaaagaccatgaagtttttgacctagaaacctttgacttttctaaagtaaaaatatctttttttgctgcaggaggaattatctcagaaaaatttgcagaaaaagcagcaaaacattgtttagttattgataattcaagttattatagaatggatccagatgtgcctttagttgttccacaagtaaattctaatgatttaaaaaacataaaaaaaaatatcatagcaaatccaaactgctcgacagctcagttagtaattgctttaaaaccactacatgatttgtttgtaataaaaagagttgttgtttctacatatcaatcagtatcaggtggtggcaaagcacctatggatgaattaattgaacaaacaaaattagttttgagtaaaaaaaaggttaaatccaaaaattttactaaacaaatagcatttaatgcaattcctcacattgatgtattttcgaatgatggttatacaaaagaggaattaaaaatgagtaacgagacaaaaaaaattttggatgataaaattaatttgacagcaacatgcgtgagattaccaatatctgtatctcattctgagtcagttaatttacaatttgaaaagccattttctttagaaaaagtaaaggaggcactaaatgactttgagggttgta

SEQ ID NO: 214547 - DNA, 391 bp, Unknown
  Bacterial polypeptide expressing nucleotide sequence isolated from the Sargasso Sea
gatgacggtcgagaccaagaagatcctcgacccgaagatcaaggtcacggctacctgcgtgcgcgtgccggtgttcatcggccatgccgaggcggtgaacctccagttttcgaaggaggtctcggccaaggatgcgcgcgaggtgctgggcgatgcgccgggtgtcgtgatcgttgatcaccgcgccaacgaaggctacgtcacgccggaagaggtggcgggcgaggatgcggtctatgtcagccgcatccgcgaggacgcgaccatcgagaacggtctcaacctgtgggtggtgtcggacaatctgcgcaagggtgcggcgctcaacgcgatccagatcgccgagttgctcgatcgcgaccatctgaagaaagccatcgcggcggagtag

SEQ ID NO: 214548 - DNA, 389 bp, Unknown
  Bacterial polypeptide expressing nucleotide sequence isolated from the Sargasso Sea
agaagaattaaaaatgagacaagaaactcataaaattttaaacaatgagattagctttagcgctacatgtgttcgcgttcctgtatttattggtcactctgaagctgtaaatattgagtttgaaaacaaaatttcagtagaagaagcacgtgaagctattaaaaatgcccctgggtgcacacttcttgatgaaagagctgatggaggttatgtaactccaaaagagtgtgctggaaatgatgacacatatgtatctcgaattcgagaggatacgtctacaaaaaatggattatctatctgggtagtttctgataatttaaggaaaggtgccgctttaaatacaatccaaatcgctgaaatgttaattgaggaacatttatctaaatgag

SEQ ID NO: 214549 - DNA, 510 bp, Unknown
  Bacterial polypeptide expressing nucleotide sequence isolated from the Sargasso Sea
catgaatatagcaatagtaggtgcaacaggaaatgttgggagaaagactttagaagttcttgaaaaaaaggaaatttctatcgataatctttatttggttgcatcaccgaaaagtgcaggaaaaaaaattaaatttcatggaaaggaaattgaggtcaataatcttgaaaattttgatttttcaaaagtgaagatcgctttttttgcggctggaggaaaaatttcggaaagttttgcagagaaagcagcaaagtattgtttggtaattgataactcaagcttttttagaatggacccagatgttcctttagtagttcctcaagtaaattcaagcgatttaaataatattaaaaaaaatattattgcaaatccaaactgttcaacagcacagttagttattgctttaaaaccattacatgatctatttgtaattaaaagaatagttgtctctacatatcaatcggtttcaggagctggtaaagcgtcaatggatgaactatttgagcaaac

SEQ ID NO: 214550 - DNA, 598 bp, Unknown
  Bacterial polypeptide expressing nucleotide sequence isolated from the Sargasso Sea
agcccaattcataaagaatttgttatagattttttgaatgtcgcaacatatcaagcagtatcaggaactggcaaacaggcggtacaagagttacaaaatcaaataaaagataaaacaagtagacaagaggtttatccaaaacaaatagcattcaatgtaataccacagtgcgatatatttttagataatgactttacaaaagaagaaatgaagctcgtctgggagacaaagaaaattcttgattccagtattgaagttcaggcaacatgcgtaagagttccagtattaaatggtcactctgaagcagtattttttagaacaaaaaaagaatcttctcgaaatcagataattgaattacttagtaatgagcctggaattgacgtcatagacaatccaaaatctcttgagtacccaactcctcttgagaatgcaaatgatactgaggatgtttatgttggaagaattagatctcaaagcataaatcacgaaaactggatttcaatgtggatagttgctgataacgtttatggtaagggagctgcattaaatactgttcaaattcttgaaagtttagttgagaagaataagttgtgttgag

SEQ ID NO: 214551 - DNA, 856 bp, Unknown
  Bacterial polypeptide expressing nucleotide sequence isolated from the Sargasso Sea
aatgatttgtgaaaaatttgatttttcaaaagtaaaaattgctttttttgcagcgggaagtgccatagcagaaaaatgggctaatatagtagcagaaaaaactatagttatagataattcaaaatttttcagaaaggatcccgatattccactagttgttcctgaagtaaattcaaaagaattggttcaagttaaaaataaaaatataattgcaaatgcaaactgttcagtgatacctcttgttgttgctttaaaacctttacatgacctatacaatgttaaaagagtagttgtatcaacttatcaatctgtttctggagcgggtaaggcccctatggatgaattactgtctcaaactaaagagtactttaataataaaaatttagagtcaaaattttttacaaaacaaattgcatttaatattattccacatattgatagttttttggaaaatggctacacaaaagaggaacaaaaaactacagatgaggtaaaaaaaatattagataaaaaaattaaaatctcatcaacatgcgttagaatacctgttctggtatctcattccataagtgctaatgttgaatttgaaagacagtgcaatttagaagaaataaagagtgttctttcttcatctccaggatgtaaagtagttgatgagcaaaaagatggtggatacataacacctgtagaggcggaaaataaatatgagacatttatttcaagaattagaaaagatgactctctgcaaaatactataaacttatggattgtttccgataatttactaaaaggtgcagcattgaatgcagtagaaatagcagaaagtttagttgaaaaaaatttacatgaaagataa

SEQ ID NO: 214552 - DNA, 616 bp, Unknown
  Bacterial polypeptide expressing nucleotide sequence isolated from the Sargasso Sea
ttcaactatccaaatgcttgttgctttaaaacctctcctttatgagtttgtaattgaaagaatagatgtaactaccttccaggcagtttcaggcacaggaaaattagcaactgaagagttgattaatcagatagatgcctataaaggcagtatgaagccgaatagctttatttacgctaagcctattgctaataatgtattacctcactgtgacgaatttgaagagaataggtatacaaaagaagaaaataaattagtaaaagaaacaaaaaaaattcttgatccagatataaaagttgcggctacttgcgtaagagttcctgtactaaacggtcattcagaatcagtacatatacaaactaaaaagcctattgcagaggaccttgcactaaagcttttaaaagaagcgcctggtttatccataagatacggagaatccgaagatgattacccaactgcatttacagatggtgctggaaatggcttggtccatgttggcagaataagaaaagatctttgggaagaaaatagacttaatttatgggttgtagcagataatttattgaaaggcgcagctctaaatagtattcaaattgcaacattattgtttgattaa

SEQ ID NO: 214553 - DNA, 508 bp, Unknown
  Bacterial polypeptide expressing nucleotide sequence isolated from the Sargasso Sea
gctgcaaacaaaaggaatatatgtgccaggtcaagaagttgcgccaaaaaattttacgaaacaaatagcatttaatgttattcctcatattgataattttctaccagatggtcaaacaaaagaagaatggaagatggcggcagaaacaaaaaaaatattagatagcaaaataaaagtgactgctacttgtgtaagagttccagtatttgtaggacatgctgagtctataaacattgaatttgaaaaacctatggaagaatctgaagcaagagaaatattaagacattctgaaggtattttagttgttgataaaaaagaagatggaggttatatctctcccatagaatgtgttggcgattataacacctttgtaagtagaataagacaagattctactattgaaaatggtctgaatatttggtgtgtttcagataatttaagaaagggtgccgcactaaatgcagttcaaatagcagaactttatatcaacaagtttaaattaaattag

SEQ ID NO: 214554 - DNA, 271 bp, Unknown
  Bacterial polypeptide expressing nucleotide sequence isolated from the Sargasso Sea
tccacttatagttcctgaggtaaaccctctagacattgataattacaaaaataaaaatattattgctaatcccaattgttcaacagcccaaatggtagtagccttaaaaccattacatgatagagcaataataaaaagagttgttgtttcaacttatcaatctgtttctggtgctggaaaaggtgctatgagacgagttatgagctgcaaacaaaaggaatatatgtgccaggtcaagaagttgcgccaaaaaattttacgaaacaaatag

SEQ ID NO: 214555 - DNA, 488 bp, Unknown
  Bacterial polypeptide expressing nucleotide sequence isolated from the Sargasso Sea
cctaactgttccactattcaaatgatggtagcgttgaagtctatccaagaagcagtgggcatatcacgcattaacgtatgtacgtatcaatcggtatctggcgcaggtaaagacgctatggaagagctagcaaagcaaactgctggtctgctgaatgcccgtgaagtaaaacccgatgcctttagtcgtcaaatagcgtttaacgcaattcctcaaattgatgcatttcaagataacgattacaccaaagaagaaatgaaaatggtgtgggaaactcagaaaataatgggcgacaatagcattttggtgaacgccacagcagtgcgcgtgcctgtgttttatggtcacgctgaagctattcacttagagacgcattcccccattgatgcagagcaagttaagcagttgcttgcggatgcaccaggcgtaaccctgtatgaaagtgcagagcagtttccaactcaggtaagcagtgccagcgggaatga

SEQ ID NO: 214556 - DNA, 835 bp, Unknown
  Bacterial polypeptide expressing nucleotide sequence isolated from the Sargasso Sea
ttttcaaaagtaaaaattgctttttttgctgcaggaagtgctgtagcagaaaaatgggctaataaagcagcagaaaaaacaatagtaatcgacaattcaaaattttttcgaaaagatcccgatattcctttaatagtaccagaagtaaattcaaaagaattagtttatgttaaaaataaaaatataatagcaaatgcaaattgctcagtgataccacttgttgtagcactaaaaccattacatgatttatatatagttaggagaattgttgcatcaacttatcaatcagtttccggggcaggtaaagcttcaatggatgagctcttatcccagacacaggattattttaataataaaaatttacaatctgaaaattttacaaaacaaatagcctttaatgttattccacatatcgatagttttttagaaaatggctacaccaaagaagaacaaaaaacttcagatgaagttaaaaaaatcttagataaaaaaattaaaattacttctacttgtgtaagaatacctgttctagtatctcattctataagtgcaaatgttgaatttgaaaaaaaaattaatttagatgaaataagaaatgttttatctacttctccaggatgtaaggttgtcgatgaacaaagggatggtggatatattactcctgttgaagcagaaaataaatatgagacatttatttcaagaattaggcgagacgattcccaatctaatactgtaaatttatggattgtttctgataatttacttaaaggtgctgcattaaatgcagttgaaattgctgaaagtttagttaaaaaaaatttgcatgacagataaa

SEQ ID NO: 214557 - DNA, 338 bp, Unknown
  Bacterial polypeptide expressing nucleotide sequence isolated from the Sargasso Sea
tgatccagatataaaagttgcggctacttgcgtaagagttcctgtactaaacggtcattcagaatcagtacatatacaaactaaaaagcctattgcagaggaccttgcactaaagcttttaaaagaagcgcctggtttatccataagatacggagaatccgaagatgattacccaactgcatttacagatggtgctggaaatggcttggtccatgttggcagaataagaaaagatctttgggaagaaaatagacttaatttatgggttgtagcagataatttattgaaaggcgcagctctaaatagtattcaaattgcaacattattgtttgattaaa

SEQ ID NO: 214558 - DNA, 880 bp, Unknown
  Bacterial polypeptide expressing nucleotide sequence isolated from the Sargasso Sea
tttttccggaaaagaacacaccattattgatcttgaaaaatttgacttttcaaaagttaaagtagcattttttgcagcaggtagtgcaatagcggagaagtgggcacatgttgcagcagaaaaaacaattgtaatagataattcaaagttttttagaaaagatccagatatacctctgatagtacctgaagttaattctaaagaattaatacatgtcaaaaataaaaatataattgcaaatgcaaattgttctgtaattcctcttgttgttgctcttaaacctttacacgatttatataatgtaaaaaggattgttgtatcaacatatcaatcggtatcaggcgcaggaaaagacccaatggatgagttgttaagtcaaacgcaagaattttttcaaaataaaaaattagaatcaaaatattttacaaaacaaattgcttttaatgcaatacctcacattgatagttttttagaagatggatacacaaaagaagaacaaaaaactaatgatgaagtaaaaaaaatattggataataaaattaaaattacttctacttgtgttcgaataccagtattagtatcacattctttaagtgtaaatgtagaatttaacaaaaaatataatttggatgaaattaaaaatgttctttcaacttctccaggttgtaaattaatagatgagcataaggatggtggctacataacaccagtagaagctgaaaataaatttgaaacatttatttcaaggattagagaagataagtctcaacccaactctataaatctttggattgtatcagataatttactcaaaggcgcagctttaaatgctgtagaaattgcagaggcattaattgaaaaggatttttatggaaaataa

SEQ ID NO: 214559 - DNA, 660 bp, Unknown
  Bacterial polypeptide expressing nucleotide sequence isolated from the Sargasso Sea
aatgacacaagaatataatgtagcagtcgctggtgcaacaggagcagttggaagtgaaataattcaaattttagaacaaagaaattttccaattgataatctgtatttacttgcatcatcaaaatctaaaggaaaaaaaatagaatttaaagacaaggagattatcgttgaggatctcgctgaatttgatttctcaaaagctcatataggtttgttttcaccaggtggtaaaatttcagctgaatatgcacctaaggctgctaacgctggttgtatagtgatcgacaatacctctcattttagaatgcaaaaaaatattcctctgatagtacctgaagttaatgcaaatactcttgaagcattttttcaagatgaagaaagaacaaatattatttcaaatcctaattgttcaacgattcaaatggtggttgctttaaaaccacttcatgaaaaatcaattataaatagagtggtagtttcaacatatcaagctgtatcgggtgcaggtaaaacaggaatggatgagttatttaatcaaactcaaaatgtatatgcaaatcaagaactaaaaaaagaaaagtttaccaaacaaatagctttcaatgcaattcctcacataggtgcttttttaaaaacggaaataccgaagaagaacaaaaa

SEQ ID NO: 214560 - DNA, 610 bp, Unknown
  Bacterial polypeptide expressing nucleotide sequence isolated from the Sargasso Sea
atggtaattgctttaaaaccattgcatgaagtatttaaaattaaaagaatagttgtttcaacctatcaatcagtttctggggctgggaaaggtccaatggatgaattaatagatcaaacaaaacttgccctggacaataaaaaaattaattctaaaaattttacaaaacaaattgcatttaatgcaatcccacatatcgacgttttttcaaatgatggttatacaaaagaagaaatgaaaatgattaatgagacaaaaaaaatattggataataatattaatgtaaccgcaacttgcgttagagtaccagtattagtttctcatgcagagtctgtaaatattgaatttgaaaaagaatttactttggaaaaagtaataaatttgttggataatgctgatggttgcaaagttgtaaatgatcagagagatggtggatatatgactcagcttgaagcagcaggcaaagatgaaacttttatttctagggtaagaatagataatacaaatgaaaaagctataaatctttggatagtttctgacaacttacttagaggtgcggctctaaacgctgtagaaatagcagaggcatacattaaaacaaaacaatgaa

SEQ ID NO: 214561 - DNA, 710 bp, Unknown
  Bacterial polypeptide expressing nucleotide sequence isolated from the Sargasso Sea
tatgaacatagctatagtaggtgcaacaggaaatgttgggagaaaaactcttgaagtatttgataaaaaaaactttaagtttgataatctatatttagttgcctcagaaaaaagtgtaggaaaaaaaatctcttttagagataaagagtatgttattgaaaatttagagacatatgatttttcaaaagcagatataactttttttgcagcaggaggaaaaattgcagaaaaatttgctgaaaaggctgccaagcacacaattgtaatagataattcaagtttttttaggatggatcctgatgttccattgatcgttccacaagtgaatgcagccgaaattaaaaatatgaaaaaaaatattattgccaacccaaattgttctacagcacaacttgttatagcacttaaaccgctacatgatttattcaaaattaaaagagttgtagtttcaacttaccaatctgtttcaggtggtggcaaaattccaatggatgaattaattgatcaaactaaacaatatttagatggaaaaaaaatagagtcaaaaaattttactaaacaaatcgcttttaatgttattccacatatagatgtttttgctgatgatggatatacaaaagaagaattaaaaatgacaaatgaaacaaaaaaaatcttagatgattccattgaacttacagctacatgtgtaagaattcctgttttagtat

SEQ ID NO: 214562 - DNA, 724 bp, Unknown
  Bacterial polypeptide expressing nucleotide sequence isolated from the Sargasso Sea
agaatggatccagatgttcctttaattgttccacaagttaactcaaatcatttagatcaaataaaaaaaaatattattgctaatccaaattgttcaacagcacaattggtgattgctttaaaacctttgcatgatctttttgtaattaaaagaatagtcgtttccacataccaatcagtttcaggtggtggtaaagcaccaatggatgaattgatcgaacaaactaaattagttttagatggcaaagatgtaaaatctaaaaattttacaaaacaaatagcttttaatgctattccacatatagatgtattttcagatgatggttatacaaaagaagaattaaaaatgactaatgaaacaaaaaaaattttagatagtaaaattgatctaacagcaacatgtgtaaggttacctatttctgtttcacattcagaatcggtaaatttacaatttgaaaaacctttttctcttgaaaagatcaaagaggcattaaataattttgagggttgtaaagtagttgatgagagagctgacggtggatattcaactcccttagaagcagaaggtaaagatgaaacatttatatcaagaattcgagaggataagacaatcgagaatggattaaatttgtggattgtttctgataatcttttaagaggcgcggctttgaatgctgtagaaattgctgaaacattaattaaaaatgatttttatggaaaataaa

SEQ ID NO: 214563 - DNA, 522 bp, Unknown
  Bacterial polypeptide expressing nucleotide sequence isolated from the Sargasso Sea
catgaatatagctatcgttggagcaacaggaaatgttggaagaaaaatgcttgaagtattggagcagaaaaagcttcctattgacgaattatatttggttgcttcttcaaaaagtgctggaaaaaaaataaattttaatggcaaaaattatgaagtttataatcttgaaacttttgatttttctaaagctcaaattagtttttttgcagctggaagtgcaatatcagaagaatatgcattaaaagctgcaaaagattcaacagtgattgataactcaagtttttttagaatggatccagatgttcctcttattgtgccacaagtaaattctggagatgctaaaaatttaaaaaaaaatataattgcaaatccaaattgttcaacagcacaacttgttattgctttaaagccattacacaacttatttaatatagagagagttgtaatatctacttaccaatctgtgtctggagcaggtaaagcttctatggatgaattaatcaaacaaacaaaacaattttt

SEQ ID NO: 214564 - DNA, 505 bp, Unknown
  Bacterial polypeptide expressing nucleotide sequence isolated from the Sargasso Sea
attctaaataatgaaaatatttctaagtctgtatatccacatcaaattgctttttctttgattcctcaagttgatgatttcttagaagatggctataccaaggaagagcataaaatggttaatgagacaaggaagattatgcatgataacaacttaaatatatctgtaacatgcgttagagttcctattttttattgccattcagaatcagtttcagttgactttgaggatgatattgatattcaagaaattgtgaatttattttctaatgcggatggaattaaattaataaatgatggcaaaaatgaaaattatcctacgcctagtatggttgaaggaaaggatgatatttttattggaaggattagaaaagatcttagtagcagtagaggagtaaatttttggcttgtatcggataatctaagaaaaggagcagctttaaatgcggtgcaaattatggaatctgctattaaactaggcaaaattcctaattttgttggataac

SEQ ID NO: 214565 - DNA, 535 bp, Unknown
  Bacterial polypeptide expressing nucleotide sequence isolated from the Sargasso Sea
ttgaagaatgttgtaattgccggggcaaccggtgcggtaggtaatgaatttctaaaactgttagaagcacgtgaattccctgtaaaaaacttaagattgcttgcttccgcacgatcaattggaaagaagctagaatttctaggagagaaaattccggtagagcaattaacatcaaaatctttcagtggggttgacttagcatttttttctgcaggtcgtgaaagtagcaaggtgtatatcccacatgctgttgaatcagggactgttgtaattgacaacagcagcgctttcagaatggatcctgatgtgcctttagttgttccggaaataaatcctgaaagtgcatttaaacacaaaggaataatcgctaatccaaactgctcaacgatccagatggtggttgcattgaatccgttgcacaaggcagcagtagttaatcgtgttgtagtttccacttatcaatccacagcaggagctggcgcaaaaggaatgaacgaactaattaatcaaacacgtgcctgggcaaatggagata

SEQ ID NO: 214566 - DNA, 580 bp, Unknown
  Bacterial polypeptide expressing nucleotide sequence isolated from the Sargasso Sea
aagagttatagtttcaacttatcaatctacttctggtgcaggtagagaacaaatggatgaattatttgagcaaacaaaggatattttcgcaaataatcaaattaagaaaaaattttttactaaacaaatagcttttaatgtgatcccacatatagataaattcttagatgatggacaaacaaaagaggaatggaaaatggaagttgaaacgcaaaaaattttagataaaagtataaaagtttctgcaacttgtgttagagtaccagtgtttattgggcatggagagtctgtaaatattgaattcgaaaaagaaatttcggaagataaattaagagaaactctaaaaaaaacccccggtgtttcagtaatagattttagacaagatgaaggatatgtaacaccagaagaatgcgcaggtgaagacaaagtttatgttagtagaataagaaaagataaaacaataaaaaatggtatatctttatggattgtggcagataatttgaggaagggtgcagctttaaatgcaatacaaattggtgaagaattattaaaaatgaaagtattaaaaaatgaaaaataa

SEQ ID NO: 214567 - DNA, 395 bp, Unknown
  Bacterial polypeptide expressing nucleotide sequence isolated from the Sargasso Sea
agatggatatacaaaagaggaattaaaaatgactaatgaaacaaaaaagatcttagataatgaaattgatgtttccgcaacatgcgttagagttcctattagaactggtcattcagaatctattaatattgagtttgataatctttatgattttgagaatataattaaaattttaaaaaatgccccaggttgtaaagttattgatgagcgtagtgatggaggatatatgacacctctagaagctgaaggaagttatacaacctatatatcaagaattagaaaagataattctaatataaaagctattaatttatgggtagtatcagacaatttattaaaaggagcggcattaaatactgtacaaatcgctgagtgtttaatgaaaaaattataac

SEQ ID NO: 214568 - DNA, 394 bp, Unknown
  Bacterial polypeptide expressing nucleotide sequence isolated from the Sargasso Sea
atggatgtaggtttaattggttggaggggaatggttggaactgttttacttcaaagaatgcgtgaagaagatgattttaaacatttgaatgcccacttttattctacatctaacccgggtggagaagcacctaaagaggattcagacaacggtcttttaaaagatgctttcgatattgaaactttgaaaaaaatggacatgatccttacttgccagggtggagactatactcaaaaagtttatccagaacttcgaaaagctgggtggaaaggttattggattgatgctgctagcactttaaggggagaggagtcttccgttttagttcttgatcctattaacagcaatcaaattgaaaaaggcttgagtgaagggaaaaaggacttgtcggagc

SEQ ID NO: 214569 - DNA, 772 bp, Unknown
  Bacterial polypeptide expressing nucleotide sequence isolated from the Sargasso Sea
agagaaagctgcaaagcactgcatagttatagataattcaagtttttatagaatggatccagatgttcctttaattgttccacaggtaaattcagatgatttaaaagataccaaaaaaaatattattgccaatccaaattgttcaacagcgcaattggtaattgttttaaaacctttacatgatttatttacaattaaaagagtagttgtctcaacatatcaatcggtttcaggtggaggtaaagcacctatggatgaattaattgaacaaacaaaattagttttagatggtaaaaaagtaaaatctaaaaattttactaagcaaatagcttttaacgctattcctcacattgatgtattttcaaatgatggttatacaaaagaggaattaaaaatgactaatgaaacaaaaaaaatcttagatgacaaaattgatttaacagctacatgtgtaagattaccaatttctgtttctcattcagagtcagtaaacttacaatttgaaaaacctttttctcttgaaaaagtcagagaagcattaaataattttgaaggttgtaaagtaattgatgagagagttgatggcggatattcaactccattagaagcagagggaaaagatgatacatttatatcaagaattcgagaagataagacgattgaaaatggattaaatttgtggattgtttctgataatcttttaagaggcgcggctttgaatgctgtagaaattgctgaaacattaattaaaaataatttctatggaaaataa

SEQ ID NO: 214570 - DNA, 898 bp, Unknown
  Bacterial polypeptide expressing nucleotide sequence isolated from the Sargasso Sea
ggagctactggagctgttggcacagaattcttgaatatactcaaggatcattatactggtttgccacaattaactttactcgcatctgcccgttctgcgggaaatacgatagaagttaatggggaagcagtggtaatacaagaagccactcccgaatcctttgaaggggtggacatagcatttatatcggttagttcggaaataagccttgatttggcgcctcatgcagtcaaagcaggagccatagttatagatgatagctcagcttttagaatggacgacactgtgccattagtggtgcctgaagtaaatggagatgactgtaaatggcatgaagggattatatctattcctaattgttctactactccattagttatggtattgcaggctcttagagagttaagcgagataactagagtaacagcttcaacttaccaatctgtatccggggctggttcagcagcaatgaccgcactaacatctgaaagcacagatcttatgaatgataaagatgttaatcccgataaggatcagattgggtttaacgtaataccacggatagatgagtttttggaaaatggctacaccaaagaggaacagaaaatgattgatgaaagcaaaaagatattgcatttacctaatctttctgtttctgcaacatgtgctagggtccctgtatacatatcacactctgaggcagtacatatagaatttaaaaattcagtaaatctagaagatgtgcgtaatcaattgaataactttgcagggataacggtcatggatgatccaaaaaaagacatatatcctatgccatacgatattgaagggaaagatgatgtctatgtcgggagaatacggaaagatacttctgtagataacggtatagtactctgga

SEQ ID NO: 214571 - DNA, 891 bp, Unknown
  Bacterial polypeptide expressing nucleotide sequence isolated from the Sargasso Sea
aaaaaaaattagctttagggataaagagtatgaggtttttgattttagaaaattttgatttttctaaagtaaaaattgctttttttgctgctggaggaaagatatcagaaaaatttgcagagaaagccgcaaagcattgtgtagttattgataactcaagtttctatagaatggatccagatgttcctttgattgtgccgcaggtaaattctgatgatttaaaaaataataaaaaaaatattattgctaatccaaattgctcaacagcacaattggtgattgctttaaaacctttacatgacctttttgtaattaaaagaatagtagtttctacataccaatcagtttcaggaggcggtaaagcaccaatggatgaattaattgaacaaactaaattagttttagatggaaaagagataaaatctaaaaattttacaaaacagatagcttttaatgctatccctcatatagatgtattttcagatgatggttatacaaaagaagaattaaaaatgacaaatgaaacaaaaaaaattttaaatagtcaaattgatttaacagcaacatgtgtaagattacctatttcagtttcacactctgaagcagtgaatttacaatttgaaaagccattttctcttgaaaaagttagagaagcactaaataattttgatggctgtaaagtaattgatgaaagagttgacggtggatacataacaccgttagaagctgaaggaaaagatgaaacattcatttcaagaataagagaagataaaacaatcaaaaatggattaaatttgtggattgtttcagataatcttttaagaggcgcggccttgaatgcagtagaaattgccgagacattgattaataataatttctatggaaaataaa

SEQ ID NO: 214572 - DNA, 614 bp, Unknown
  Bacterial polypeptide expressing nucleotide sequence isolated from the Sargasso Sea
agttgctttaaaacctcttcatgatttatacaatataaaaagaattgtagcatccacttatcaatccgtttcaggtgctggaaaggaagcaatggatgagctgctttcacaaaccaaagactattttgataataaagaaatgaactcaaaaaattttacaaagcaaatagcttttaatgcaattccacatatagatagttttttagataacggcacaaccaaagaggagcaaaaaaatcatgatgaagtaaaaaaaattttagataaaaaaattaatattacctctacatgtgtaagaatccccgttttagtatctcattcgataagtataaatgttgagtttaataaaaaacataatttagaggaaatcagaaatgtactttcatcatccccaggatgtaaagttgtagacgaaaaaaaagatggaggctatataactccagttgaggcagaaaataaatacgaaacttttatatcaagaataagagaagataattcacaaccaaatactataaatatgtggatagtatcagacaatttacttaaaggtgcagcattgaatgcagtagagatagctgaaagtttaatcaaagaaaacttttatgaaaaataac

SEQ ID NO: 214573 - DNA, 553 bp, Unknown
  Bacterial polypeptide expressing nucleotide sequence isolated from the Sargasso Sea
atgaaaataggtattattggtgctacaggagcagttggaaaagtttttttaggtttactacctgactcgaatttagaaatttcagatctgaaattgacagcttcaaatagatcaattgggaaaaaaataaagtacgaaaataaagaatatacaatacaggaacataatgatgatttttataatgaccttgattatgttttcagctcagcttcttcagaagtaagtaaaatagcagcccaaaaatcaaaagaacacaatgtgataatgatagatgacagctctgaattcagattagatgaagacgtaccacttgttgttccagaaataaattcacaggaattaaataaccataatggaattgtagctataccaaactgcacaacaacacctcttgcaatgattttagatgcagtcagatcagattataaaattaaaagagtaatagtcgatacttatcaggctgtatcaggtacaggtaatctcgctatagaagaattactaaatcaaacaaagcattatctagaaaacggaacaaattcaaataaaaaagaag

SEQ ID NO: 214574 - DNA, 637 bp, Unknown
  Bacterial polypeptide expressing nucleotide sequence isolated from the Sargasso Sea
gatgacacaaaaatataatatagcagttgctggagcaacaggagcagttggcagtgaaataattcaaattttagaacaaagaaattttccaattgataatctttatttacttgcatcatcaaaatctaaaggtaaaaaattagaatttaaagacaaggagattattgttgaagatttgtctgaatttgatttttcaaaggctcatataggtttgttttctccaggtggtaaaatttcagctgaatatgctcctaaagctgctaatgctggatgtatagttattgacaacacttctcattttagaatgcaaaaaaatattcccctaatagttcctgaagttaatgcaaatactctagaagaattttttcaagatgaagaaagaataaatatcatttcaaacccgaattgctcaacaattcaaatggtggttgctttaaaaccacttcatgaaaaatcaatcataaatagagttgtagtttcaacatatcaagctgtatcaggggcaggtaaaacaggaatggatgagttatttaatcaaactcaaaatgtctatgcaaatcaagaattaaaaaaagaaaagtttaccaaacaaatagctttcaatgcaattcctcatataggtgcttttttagaaaac

SEQ ID NO: 214575 - DNA, 802 bp, Unknown
  Bacterial polypeptide expressing nucleotide sequence isolated from the Sargasso Sea
aatgtcaggaagaaaaactattgagattttagaaaaatctaaaattgaaataactaatttattcttagtagcatctgcaaaaagtgcaggaaaaaaaattaaattcaaaggaaaagagatagagattcaagatcttgaaaaatatgatttttcaaatgctaaaataactttttttgcagctggaagtaaaatagcagagcaatgggctacaaaagctagcaaaaaaactatagtaattgataattctaaattttttagaatggataatgatgttccattaatagtaccagaagttaatctagatcaactacagaattacaaaaaaaagaacattattgctaatgcaaactgctctactatacaaatggttgttgctttaaaacctttgcatgatcattttaaaattaaaagagttatagtttccacttatcaatcagtatctggtgcaggtaaagctccaatggatgaattaataactcaatcaaaggattttctagaaggaaaaaaaatttcttcaaaaaattttacaaagcaaatcgcatttaatttaattcctcatatcgatgaatttgttgatgaaggctatacaaaagaagagtggaaaatgattaatgagacaaaaaaaattcttgacccaaatatcaaaatatctgcaacctgtgttagggttcctgtgatggtttctcattcagagtctataaatgtagaatttgaaaaaccatttgacattaagagtattaaaaatattttaaataaatctagtggttgtaaagttatagacgaaagaaaagatggaggctat

SEQ ID NO: 214576 - DNA, 496 bp, Unknown
  Bacterial polypeptide expressing nucleotide sequence isolated from the Sargasso Sea
taatgagtatgaccgtcaagttgtggattcgaattatcctgacaaagaagagaacctttttgcacacaatgtcatacctcagattggttcatttgaaaacaacggttattcacttgaagaaatgaaaatggtttgggaaacgcataagattttcgaagacaaaagcattgaagtgaatccaaccgcagtaagagtccctgtgagatttggtcactctgaggcaataggcgttgtaacagaaaatcatctcagtattgggcaaatcagaggattgctttcagaatcaagtggaatccaactaatggacgacgatgaatcttaccccatgcctctaagagaaggggaaggcactgatgctgtctacatcggtaggattcgagcggacttgaatcattcaaatggagtaaatctttgggttgttgcagacaacataagaaaaggcgcagcactgaattcaattcaaattgctgagaccattattgaatcaaattattaa

SEQ ID NO: 214577 - DNA, 601 bp, Unknown
  Bacterial polypeptide expressing nucleotide sequence isolated from the Sargasso Sea
aatgacacaagaatacaatatagcaatcgctggtgcaacaggagctgttggaagtgaaataattcaaattttagaacaaagagattttccaattgataatctgtatttactagcatcatcaaaatccaaaggaaaaaaattaaaatttaaagacaaggagattattgttgaggatctggctgaatttgatttttcaaaagctcatataggcttattttcaccaggtggtaaaatttcagctgagtatgcgcctaaagctgccaaagctggttgtatagttatcgacaatacctcacattttcgaatgcaaaataatattccactaatagttcctgaagttaattctaatactcttgaagagttttttcaagatgaagaaagaacaaatatcatttcaaatcctaattgctcaacaattcaaatggtggtcgctttaaaaccacttcatgaaaaatctatcataaatagggtggtagtttcaacataccaagctgtatcaggagcgggtaaaactggaatggatgagttatttaatcaaactcaaaatgtttatgcaaataaagaattaaaaaaagaaaagtttactaaacagatagcctta

SEQ ID NO: 214578 - DNA, 841 bp, Unknown
  Bacterial polypeptide expressing nucleotide sequence isolated from the Sargasso Sea
ggtaggaacagaaatagttcaaatattagagcaaagagatttccccatagacaatttatatttgcttgcttcatcaaaatcgaaaggcaaaaaagtagagtttaaagataaagaaattatagtagaagacttatcagaatttgatttttcaaaagctcatattggtttattttcaccgggaggtaaaatttctgctgaatatgcgccaaaagcagctaaagcaggatgtattgttatagacaacacctctcattttcgaatgcaacaaaatattcctttaattgttcctgaggtaaacgataatgcacttgatgaatttttcgatgatgaaaataggactaatattatttcaaaccctaattgctcaacaatacaaatggtcgttgctctaaagccacttcatgaaaaagcgattataaacagagttgttgtatcaacataccaagctgtatctggagctggtaaaactggtatggatgaattatttaatcagacccaaaatgtttatgcaaaccaagaattaaaaaaagagaagtttactaagcaaattgcctttaatgcgattccacatattggtgcatttttagaaaatggtaacactgaagaggagcaaaaaatgattgatgaaacaaaaaaaatcttagacgagggaattaacgtttcagcaacatgtgttagaacagcagttttcataggacattcagaatctataaatatagaatttgactctccaatagatgaaaaagaagctaacgaaatattatctaactctgagggagtttcagttattgatcatagaaaagatgaaggctatgtcactcctgttgaaatagctggagaa

SEQ ID NO: 214579 - DNA, 838 bp, Unknown
  Bacterial polypeptide expressing nucleotide sequence isolated from the Sargasso Sea
aattttagaacaaagaaattttccaattgataatctttatttactcgcatcatcaaaatctaaagggaaaaaattagaattcaaagaaaaaaatattattgttgaggatctcgctgaatttgatttttcaaaagcccatataggtttgttttcaccaggtggtaaaatttcagctgaatatgcacctaaagctgctaaagctggctgtatagttatcgacaatacttctcattttagaatgcaaaaaaacattccactaatagttcctgaagtaaattccaatactcttgaagaattttttcaagatgaagaaagaacaaatatcatttcaaatcctaattgttcaacaatccaaatggttgttgctttaaagccacttcatgaaaaatctatcataaatagagtggtagtttcaacctaccaagctgtatcaggtgcaggtaaaacaggaatggatgagttatttaatcaaactcaaaatgtttatgcaaataaagaactaaaaaaagaaaagtttactaaacaaatagctttcaacgcaattcctcacataggagcctttttagaaaatggcaatacagaagaagaacaaaaaatgattgatgaaacaaaaaaaattttagatgaaggaattaaggtctcagcaacatgtgttagaacagcagtttttattggtcattcagaggctataaatattgaatttgattctccattaaatgctaaagaagcttatgacattctatctaagtcggaaggtatttcagttattgatcatagaaaagatgagggatacgtgactcctgtcgaaatagctggtgaagataaagtttatataagc

SEQ ID NO: 214580 - DNA, 828 bp, Unknown
  Bacterial polypeptide expressing nucleotide sequence isolated from the Sargasso Sea
ggaaaaaaattagaatttaaagaaaaggagattatagttgaggatctcgctgaatttgatttttcaaaagcccatataggcttgttttctccaggtggtaaaatttcagctgaatatgcacctaaggctgctaacgctggttgtatagttattgacaacacttctcattttagaatgcaaaaaaatattccattaatagttcctgaagttaattctaatactcttgaagatttttttcaaaatgaaaagagaacaaatatcatttccaatcctaattgctcaacaattcaaatggtggttgctttaaaaccacttcacgaaaaatcaataataaatagagttgtagtttcaacatatcaagctgtatcaggtgcaggcaaaaccggaatggatgagttatttaatcaaactcaaagtgtttatgcaaatcaagaattaaagaaagaaaagtttactaaacaaatagctttcaatgcaattcctcacataggtgcctttttagaaaacggtaatacagaagaagaacaaaaaatgattgatgaaacaaaaaaaattttggatgaaggaattaaagtctcagcaacatgtgttagaacagcagtatttattggtcattcagaggccataaatattgaatttgattctccattggatgctaaagaagctcatgatattctatctaattctgatggtatttcagttattgatcatagaaaggatgagggatacgtaacacctgtcgaaatagctggtgaagataaagtttatataagcagaattagaaatgatgactcaattgataatggcataagtctatgggttgtatca

SEQ ID NO: 214581 - DNA, 604 bp, Unknown
  Bacterial polypeptide expressing nucleotide sequence isolated from the Sargasso Sea
aaaccaattcatgaattatttaaaataaaaagagttgttgtagctacttatcaatctgtatctggtggaggtaaagcaccaatggacgaattagttgaacagacaaaacttgcattagaaaacaaaaaaattgagtcaaaaaattttacaaaacaaatttcatttaacttaattccacatatcgatgtttttgctgatgatggatatacaaaagaggaattaaaaatgactaatgagactaaaaaaattttagatcaaaatattgaactatcagcaacttgtgtaagagtacctgttttagtttctcattctgaagctgtaaatttagaattagaaaaagaatttacaattgatcaaattaaagaatgtcttgaaaaaatggaaggctgcaaagtaattgatgagagaaaagatggaggatattcaactccacttgaagcgacaggaaaagatgagacatttatttctagaattagagaggataagactaaaaagaattgtttaaatatgtggattgtatcagataacttacttagaggtgcagccttaaatgcagttgaaattgcggagacattaataaaaaataatttttatggaaagtaaa

SEQ ID NO: 214582 - DNA, 190 bp, Unknown
  Bacterial polypeptide expressing nucleotide sequence isolated from the Sargasso Sea
cgcgacgctaccatgcgtgaacttactcctgcgaaagtaaccggtacactttctattccagtaggtcgtattcgcaagcttaatatgggccctgaatatatttctgcattcactgttggcgatcaactattatggggcgctgcagagccgctccgcagaatgttgcgcattgtgcttgagcaaaactaac

SEQ ID NO: 214583 - DNA, 547 bp, Unknown
  Bacterial polypeptide expressing nucleotide sequence isolated from the Sargasso Sea
taattttagtgaactatttcttattgcttctgataaaagtgctggaaaaaaaataacttttaaaggcaaaaattattctgttcttggacttagtgactttgatttttcaaaagtcaaaatagcttttttttcagcaggaagtgtaatagcagaaaaatgggctcctttcgctgcaaaaaaaactattgttatcgataattcaaaacactttagaatggataaagatgttcctttagtagtcccagaggttaatgccgatagtctaaaaaattataaaaacaaaaattttattgctaatgctaattgttcaactttccaattagttttagctttaaaaccattacacgatcaatttaaaataaaaagagtgattgtttcaacttatcaatcagtatcaggtgcaggaaatattcacataaaggaattagaagaacaaagcaaaaaagttttaaataaagaaaaagttatttcaaaaaattttacaaaacaaatagcttttaatgttattccacatatagacacttttatggaagaccgttatacaaaa

SEQ ID NO: 214584 - DNA, 460 bp, Unknown
  Bacterial polypeptide expressing nucleotide sequence isolated from the Sargasso Sea
aacttcactaagcaaatcgcttttaatttgatacttcatatagatgaatttgttgatgaaggatatacaaaagaagagcagaaaatgataaaagaaacacaaaaaattttagataataaaattaaaataacagctacttgtgttagagtacctgttttagtatctcattccgagtcaattaatgttgaatttgaaaaatctttcgacatcaaagatgtaaaggatattttaattaaatctgatggatgcaaagttttagatgaaagaaaagatggaggttatataacccctctggaagcagaaaatagctatttaacttttatttctagaattcgacaagatagctctaatgataaagcacttaatatgtgggtcgtttctgataatttacttaaaggggccgcattgaatacagtacaaattgcagaagaattaataaaaaaatattatggaaaataaa

SEQ ID NO: 214585 - DNA, 417 bp, Unknown
  Bacterial polypeptide expressing nucleotide sequence isolated from the Sargasso Sea
gatattttcaagaaaataaatacaccaaagaagaaatgaaaatggtctgggagactcaaaaaatattagaagatagcagcataatggtaaatccgacagcagtacgtatacctgttttctatggacattctgaagctgttcatatggagacaaagtcgaagatttcatgtaatgaagttattgatttaatgaatcaaactgacggtgttgaagtgattgatggcgtcgagcttggcgcatacccaaccgcagtatctgatgcctcaggtgctgatccagtctatgtgggtaggataagggaggatatcagtcatcctaatggcatcaatctctggattgtagctgataatatccgaaaaggagctgctcttaatactgtccaaattgctgagatattgttaagagactacctataaa

SEQ ID NO: 214586 - DNA, 627 bp, Unknown
  Bacterial polypeptide expressing nucleotide sequence isolated from the Sargasso Sea
aatgggttaccgagtggctgtggtgggcgcgacaggaaacgtagggcgtgagatcctgaacgttctatctgagagagaatttccagttgatgaagtatttgctgttgcttcctcgagctcagttgggaaggaggtctcctttggtgatactgaaattctgaaggtgcagccgctagattcctttgatttttctagctctgacattggccttttttcgcctggtagcgcagtctcagcggaacatgcccctagggcggccgcatcaggttgcattgtggtcgataatacctcgcattttcgcatggaacccgacattcctttggtggttccggaggtgaacagggaagccctggatggttataggaaacataatattgttgctaatccaaattgttccaccattcaaatggttgtggctctgaaaccattgcatgatttggctcctattcgacgggtggtagtttcgacatatcagtcggtttcaggagctggtcggcaggcgatggatgaattgtttgatcagactcgcaaggtattttttaatgagaggctaagtccttcaaatttcactagagaaatagcatttaacgtaataccacacatagatatgttccaagccgatggctc

SEQ ID NO: 214587 - DNA, 619 bp, Unknown
  Bacterial polypeptide expressing nucleotide sequence isolated from the Sargasso Sea
atgggatacagagtggctgtagtgggcgcgactggtgcagttggccgggaaatgctgcaaactttggctgaacggcggtttccagcagataaaatttatgcgttggcctcagcaaaatcagctggccgcgaggtgtcttatggtgaagatcaaacgctgattgtcgaatcactagaaaaatttgactttagcacggctgatatcgcgctgttttctgctggcgctgacacggcaaaagcctttgcaccaaaagctggcgcggccggttgtattgggatcgacaattcatctgcctttcgcatggatgatgacgtgccattgattgtgccggaagtgaatgctgatatcgttgagaaatgcctgatcaaaaataaagggcgtaatatcattgccaatccaaattgttcaaccgcccagcttgtggtggcgttgaagccgcttcatgacgccttttgtgtgcgccgggtggtggtgtctacctatcaggcggtatctggtgctggtaagccagctatggatgaattattcaatcaaacccgcgcaatttacgtcaatgatacggttcaaccggaaatttttaccaagcagattgcctttaatgccattccgcaatattgat

SEQ ID NO: 214588 - DNA, 508 bp, Unknown
  Bacterial polypeptide expressing nucleotide sequence isolated from the Sargasso Sea
atggataaagcaatagatttagcattggttggggtttctggggttgtaggaaataaaattatttccttgctagaaaagaaaaatattaatatacaaaatttttatccccttggctctgcatccgtaggccaagaagtaactttaaataacacaaattatcagattgaagatttatcttcatttgattgttcaaaagttaatttggcaatattttctgctggatcaaaggttgccaaagaatatgctgaaagctttgtcaatcagggtgtttacgtaattgatctatcttctgaatttagatatgaagaaaatattccacttattattccagaaataaacggcagtcttcttgaagatattaaaaaaccatcacttatagctaatcctaactgctcagtatctcaattgttaatggttttagatcctattcataaagaatatagtatcgactttttaaatatagctacttatcaggcagtatcaggaacaggaaaagacgctatagatg

SEQ ID NO: 214589 - DNA, 352 bp, Unknown
  Bacterial polypeptide expressing nucleotide sequence isolated from the Sargasso Sea
aaaaaaaatcttagataataaaattgaggtgacagcaacttgtgtaagagtacctataaaaacaggtcactcggagtcgatcaatattgaatttgataatccttatgactttgaaaatataattaaaattctaaaaacagctcctggatgcaaagtaatggatgagagaaaagacggtggttacattactccgatagaagttgagggtgattacacaacatacatttctaggatcagaaaagataattcaaatactaaagctataaatttgtgggtagtttctgataatttgttgaaaggcgcggctttaaacactgtacaaatagctgagtgtttgatgaaaaaaatttaa

SEQ ID NO: 214590 - DNA, 717 bp, Unknown
  Bacterial polypeptide expressing nucleotide sequence isolated from the Sargasso Sea
tattgccttattctctgcaggaggtaaaatttcaggagaatttgcaccaaaagctgctgaaaaaaattgtatagttattgataattcttcgagatttcgaatggaccctgatgtaccactgattgtaccagaggttaataaagaagatttagataattatgagaagacaaaaataatagcaaatcctaattgttctactatacaaatggttgtggcgttgaaacctcttcatgatttaggaaagataaaaagagtgattgtttcttcctatcaatccacttcaggtgctgggaaagcagcaatggatgaattatttgagcaaactaagggaatttattcaaataattcaatagagccagagatattccagacacaaatttcttttaatgtgataccacaaatcggccctttcgtttcctcaggatatacggaagaggaagaaaagatgattaatgaaacaaagaaaatattaagtaaagatattgaggtttctgctacatgtgtaagagtgccgacttttattggccacgcagagtcagtgaatatagaatttgagaattatgtatctgcaaatgaggcttcaaatattttatcagaggcaccaggatgtctagtcgatttagataatcctgaaacctttacaacaccaattgattgtgcgggtaatgatcatacctatatttcaagaattagaaacgacaattcaatagaaaatgg

SEQ ID NO: 214591 - DNA, 830 bp, Unknown
  Bacterial polypeptide expressing nucleotide sequence isolated from the Sargasso Sea
ttctaaagtaaaaattgcattttttgctgcaggaggaaaaatttcagaaaaatttgcagagaaagctgcaaaaaattgttttgtcattgataattcaagttattatagaatggattcagatgttcctctaatagtaccccaagttaattctgatgatttaaaaaatataaaaaaaaatattattgctaatccaaattgttcaacttcccagttggtaattgtcttaaaacctttgcatgatttatttacaataaaaagaatagtagtatcgacatatcaatcagtttcaggtggtggtaaagcacctatggatgaattaatagagcaaacaaaattagttttagataataaaaaagttaaatcaaaaaattttacaaagcagatagcttttaatattattccacacatcgatgtattttcagatgatggctatacaaaagaagaaattaaaatgactaatgaaactaaaaaaattctagatgataaaatagatttaactgctacctgtgtaagactgcctgtattagtttctcattcagagtcagttaatattgaatttgaaaaacctttttcacttgcgcaagtaacagaggctttaaataattttgaaggttgtaaggtaattgatgagagagttgatggaagttattcaactcctttggaagcagagggaaaatatgaaacttttatatcaagaattagagaagataaaacaattaaaaatggattaaatttatggattgtttctgataatcttttaagaggtgcagctttgaatgcggttgaaattgctgaaacattgataaaaaataatttttatggaaagtaag

SEQ ID NO: 214592 - DNA, 572 bp, Unknown
  Bacterial polypeptide expressing nucleotide sequence isolated from the Sargasso Sea
aatagttgcatccacttaccaatcagtttcaggcgctggaaaagcagctatggatgaattattgttacaaactaaagagtactttgataataaaaaactaaaatcacaaaatttcactaaacaaatagcatttaatgcgatacctcatatagatagttttctagaaaatggctcaacaaaagaggaacaaaaaaatcatgatgaagttaaaaaaattctggataaaagaattaaaattacatcgacatgtgttcgaatacctgttttagtttctcattcaataagtttaaatgttgagtttgaaaaaaaatttaatttagaagaaataagaaaagttttatctacatctccaggatgtaaagttgtagatgaacaaaaagatggtggttatataacgcctgtcgaagcagaaaataaatatgaaacatttatttcaagaattagaaaagatgaatctcaagcaaatacaataaatttgtggatagtttcagataatttacttaaaggtgcagcattaaatgcagttgaaattgccgaaagtttgatagaaaaagatttgtatggaagataaa

SEQ ID NO: 214593 - DNA, 333 bp, Unknown
  Bacterial polypeptide expressing nucleotide sequence isolated from the Sargasso Sea
aaatagctgtgacggcaacttgtgttagggtccctgtaaaaactggtcattcagaatcaattaatatcgaattcaacaatttatatgatcttaataatataaagagaattttaagaaaagccccaggatgtaaagtaattgacgatcataaagatggcggttatgtaactcctttagatgttgagggcgatcatacaacatatatttcaagagtaagaaaagataatacaaatgtgaaagcaattaatttatgggttgtttccgataatttgttaaaaggggcggctttaaatactgtacaaatagcagagtgtttgatgaaaaaaatgtaac

SEQ ID NO: 214594 - DNA, 502 bp, Unknown
  Bacterial polypeptide expressing nucleotide sequence isolated from the Sargasso Sea
atgacacaaaaatataatatagcagttgcgggagcaacaggagcagtagggactgagataattcaaatattagaacaaaggaattttccaattgataacttatttctactagcatcatcaaaatcaaaaggaaaaaaattagaatttaaagacaaagaaattgttgtagaagatttatctgagtttgacttttcaaaagctcatataggtcttttctcacctggaggaaaaatttctgctgaatatgcacctaaagcagctaaagccggatgcatagtaatagataatacttctcattttagaatgaaaaaaaatattcctttaatagtacctgaggttaacgcaactgtacttgatgaattttttgatgatgagaatagaactaatataatctccaaccctaattgctcaacaatacaaatggttgttgcactaaaacctcttcatgaaaaagcaataataaatagagtagttgtttctacatatcaagcagtatccggtg

SEQ ID NO: 214595 - DNA, 373 bp, Unknown
  Bacterial polypeptide expressing nucleotide sequence isolated from the Sargasso Sea
agactagaaactcataaaattttaggtaatgagatcagctttagtgctacttgtgttcgcgttcctgtatttattggtcattctgaagctgtaaatattgagtttgaaaataaaatttcagtagaggaagcacgtgaagctattaaaaatgctcctgggtgcacacttcttgatgaaagagctgatggaggttatgtaactccaaaagagtgtgctggaaatgatgacacatatgtatcgcgaattcgagaggatacgtctacaaaaaatggattatctatttgggtagtttctgataatttaaggaaaggagctgctttaaatacaatccaaattgctgaaatgctaattgaggaacatttatctaaatgag

SEQ ID NO: 214596 - DNA, 815 bp, Unknown
  Bacterial polypeptide expressing nucleotide sequence isolated from the Sargasso Sea
aacttatatgaatatagccattgttggtgcgacaggaaatgtcggcagaaaacttttagaagttatagaaaagctaaattttaaatttagtgaattgtatcttattgcctcagacaaaagtattggaaaaaaaataagttttaaaggaaaaacttactccttagttggtttgaatgattttgatttttcaaaagtaaaaatagcttttttttctgctggaagttctatagcagaaaaatgggcaccagttgctgcaaaaaaaacaattgtaattgataactcaaaacattttagaatggataaggatattcctttagttgttccggaagttaatgcttactctttaaaaaattataaaaataaaaatattgttgccaatgctaattgttcaaccattcaattagtcttagctctaaaacctttgcatgataaatttaaaattaaaagagtggttgtctcaacttatcaatcagtatcaggagcaggcaatgcgcacattaatgagttagaagaacaaagcaaaaaagttttaaataaacaaaaagtaagttcaaaaaattttacaaaacaaatagcttttaatgttattccacacatagattcttttatggaagatcgttatacaaaagaagaatggaaaatgatggtagaaacaaaaaaaattttggacccaaatataacattaagtgcaacatgtgttagagttccagtttttgttggacactctgaatcagtgaacgtcgagtttaaatcagaggtaaacgcaaaaaaaataagagagtgtaaaaacaggcacccgggtgtaaagttataga

SEQ ID NO: 214597 - DNA, 574 bp, Unknown
  Bacterial polypeptide expressing nucleotide sequence isolated from the Sargasso Sea
aatgagtcaaaaatataatatagcggtagcaggagctacaggagcagtaggaactgagattgttcaaattttagaacaaagagattttccaattgacaatttattcttgttagcatcatcaaaatcaaaaggaaaaaaggtagagtttagagataaggaaatttttgtagaagatttatcagagtttgatttttcaaaagcacatattggtttgttttcacctggaggaaaaatttctgcaaagtacgctccaaaagcagccaaagcaggatgtttagtaatagacaacacatcacattttcgaatgcaacaaaatattcccttaatagtacctgaagtaaatgcaaatactcttgatgaattttttgatgatgataacagagctaacataatttctaatccgaattgttcaacaatacaaatggttgttgctttaaaaccacttcatgaaaaagcaataataaacagagttgtcgtttcaacatatcaagcagtatctggtgcaggcaaaacaggtatggatgaactatttaatcaaacacaaaacgtctacgcaaatcaagaattaaaaaaa

SEQ ID NO: 214598 - DNA, 745 bp, Unknown
  Bacterial polypeptide expressing nucleotide sequence isolated from the Sargasso Sea
atgaatatagcaattgtaggagcaacaggaaatgttggtagaaaaactttagaggttcttgaaaaaaaagatctatctatagataacctttatttggttgcatcatcaaaaagtgttggtaaaaaaattatttttaaaaagaaggaatatgaagttcttgatttacaaaactttgatttctcaaaagtaaaaattgctttttttgcagcgggaggaaaaatttctgaaaaatttgcagaaaaagttgctaaaagctgtatagttatagataattctagctattatagaatggatccagatgttccattggtagtgcctcaagtaaaccccgaagctttaaataatataaaaaaaaatattatagcaaacccaaactgttcaactgctcaattggttatagctcttaaacctttgcatgatttgtttattgttaaaagaatagttgtctcaacgtatcaatcagtttctgggggtggaaaagcacctatggatgagttaattgaacaaactaaaatggtattggaaggaaaaaaagttaagtctaaaaactttacaaaacaaatagcttttaatgccattccacatatagatatattttctgatagtggctacacaaaagaagaaattaaaatggctaatgaaacaaaaaaaattttggataatgaaatagatttaacagctacttgtgtaagattaccaataacagtttcacactctgagtcagtaaatattcagttcgttaaac

SEQ ID NO: 214599 - DNA, 865 bp, Unknown
  Bacterial polypeptide expressing nucleotide sequence isolated from the Sargasso Sea
tatgaatatagcaattgttggagcgacagggaatgtcggcagaaaacttttagaagttatagaaaaactaaatttcgaatttagtgagttatatcttatagcttccaataaaagcattggaaaaaaaataacttttaaaggaaaaacttattctattgtaggacttagtgattttgatttttcaaaagtaaaaatagcttttttttctgctgggagtgctatagcagaaaaatgggtacctattgccgcaaaaaaaacgattgtaattgataattcaaaacatttcagaatggataaagaaatacccttagtagttcctgaagttaatgccgataccttaaaaaattataaaaacaagaacattattgccaatgctaattgctcaactattcaattggtactagctttaaaacctttacacgatcaatttaaaattaaaagagtaattgtttcgacttaccaatcagtgtcaggtgcaggaaatgctcatatgaatgaattagaagagcaaagtaaaaaagttttagataaacagaaagttagttcaaaaaattttacaaaacaaatagcttttaatgttattccccacatagatacttttatggaagatcgttacacaaaagaagaatggaaaatgactgtagaaacgaaaaaaattttagatcctaaaatatctttaagcgcaacatgtgtaagagttccagtctttgttggacactctgaatcaataaatattgagttcaattcggaagcgaacgctgaaaaaattagaaaatgtttagaaaaagcaccaggatgcaaagttgtagatgaaactaaagatggaggttatataactccggttgaatcaagcggtgactttata

SEQ ID NO: 214600 - DNA, 545 bp, Unknown
  Bacterial polypeptide expressing nucleotide sequence isolated from the Sargasso Sea
tatgaatttcgcaataatcggtgccacgggcaacgtaggcagaaaaacaattgaagtcctagaaaagtcaagattagaaatcgacaacctgtttctagttgcttcagaaaaaagtgctgggcaaaaattaatttttaagaaaaaagaaatcattgttgagcaattagaaaaatatgatttttcaaaggcagagattactatctttgctgctgggagcgaaatagcaaaaaattgggcacctaaagcttcaaaaaaaactattgttatagacaattcaaaatattttagaatggacaaagatgttcctttggtagtagcagaagttaatcctagtgctctaaggagtcataaaaacattattgccaatccaaattgttcgactatacaactaatgctgcctttaaaacctctacatgaaaaatacaaaattaaaagagtagttgtttccacttatcaagctgtttcaggagcgggcaaagcatcagtagatgaattatttgatcaaaccaaaaactacttagaaggtaaaaaaattgaatctaaaa

SEQ ID NO: 214601 - DNA, 665 bp, Unknown
  Bacterial polypeptide expressing nucleotide sequence isolated from the Sargasso Sea
tatgcaaaagtatgacattgctgtaattggtgcaaccgggctcgtaggcgaagccatgttgagggtattggagtcatcacaatttcctgttgcaaacttgtatccactcgcgagtgatcagtcttctggaagtagtttgatgttcaatggaaactcacattacattgagaaggccagtgattttgatttcaatcgtgttcaattggttttttcggctgttagtgatcgattggctaagtatttaatcccaatggcactggatgcgggttgtttggtgattgacaacagcggcgcttaccgcatggatcctgatgtaccgttggtgattcctgagatcaacggtgattgtctgcagaaattttcagacggcggcgtgattgcaaacccaaactgttctgtgattcagctgttgatgtccattcagccatttatccgtaagtgtcaaatcgagcgagtcattgcctctacttatcaatctgtatcagggattggtcgatctggggttaacgatttgattgaacagtcacacagtgtattggatgacagcgccctgggaggtagctcatttgcacgcaaaatggcattcaatgtctgcccacaaattggcagttttcatgacaatggctattgccaagaggagatgaagatctaccaagaggctcaaa

SEQ ID NO: 214602 - DNA, 892 bp, Unknown
  Bacterial polypeptide expressing nucleotide sequence isolated from the Sargasso Sea
atcatgaatattgcaattgtaggagcaacaggaaatgttggaagaaaaactttagaagttcttgaaaaaaaagaactatctattgataatctatatttagttgcctcatctaagagtgctggtaaaaaaattatttttaagggtaaagaacatgaggtttttgatttagaaaattttaatttttccaaagtaaaaatagccttttttgcagctggaggaaaaatttcagaaaaatttgcagaaaaagccgcaaagcattgtctagtcattgataattcaagcttctatagaatggatccagatgttcctttaatcgttccacaagttaactcaaatcatttagatcaaataaaaaaaaatattattgccaatccaaattgttcaactgcacaattggtgattgctttaaaacctttgcatgacctttttgtaattaaaagaatagtcgtttccacataccaatcagtttcaggtggtggtaaagcaccaatggatgaattgatcgaacaaactaaattagttttagatggcaaagatattaaatctaaaaattttacaaaacaaatagcttttaatgctattccacatatagatgtattttcagatgatggttatacaaaagaagaattaaaaatgactaatgaaacaaaaaaaattttagatagtaaaattgatctaacagcaacatgtgtaaggttgcctatttctgtttcacattcagaatcggtaaatttacaatttgaaaaatcattttctcttgaaaaagttagagaggcactagataattttgatggttgtaaggtaattgatgaaagagttgatggtggttatacaactccattagaggctgagggaaaagatgaaacattcatctcaagaataagagaggata

SEQ ID NO: 214603 - DNA, 820 bp, Unknown
  Bacterial polypeptide expressing nucleotide sequence isolated from the Sargasso Sea
tgcatagtaggagcaactggaaatgttggaagaaaaactttagaagttcttgaaaaaaaagaactatctattgataatctgtatttagttgcttcatctaaaagcgctggtaaaaaaattagttttaaggctaaagaacatgagatttttgacttagaaaattttgatttttccaaagtaaaaattgctttttttgcagcgggaggaaaaatttcagaaaaatttgcagagaaagctgcaaagcattgtttagttattgataattctagtttttatagaatggatccagatgtacctttaatagtcccacaggttaattcaaatcatctagatgggataaaaaagaatattattgctaacccaaattgctcaactgcacaattagtgattgctttaaaacccttgcatgacctttttgtaattaaaaggatagtagtttccacatatcaatcagtttcaggtggtggtaaagcaccaatggatgaattgattgaacaaacaaaattagttttagatggcaaagtagcaacatctaaaaattttacaaaacaaatagcttttaatgctattcctcacatagatgtattttcagatgacggttacacaaaagaggaattaaaaatgacaaatgaaacaaaaaaaattttagataataaaattgatttaactgcaacatgtgtaagattacctatttctgtttcacattcagagtcggtaaatttacaatttgaaaagtcattttcaattaaaaaagtcagagaagcactaaataattttgatggttgtaaggtaattgatgaaagggttgatggtggatatg

SEQ ID NO: 214604 - DNA, 498 bp, Unknown
  Bacterial polypeptide expressing nucleotide sequence isolated from the Sargasso Sea
aatgaatttagctataattggtgccaccggcaacgttggacgaaaaacaattgaaattttagaaaaatctaaaataaaaattagaaaattattcctggtagcttctgaaagaagcaaaggaaagaaaattaaatttaaaggtaaagaaatacaaattcaaagtcttgagaaatatgatttttcaagtgcacaaattactttttttgcagccggaagtaaaatagctcaacaatgggttccaaaagcatgcaaaaaaacaactgtaatagataattcaaaatgctttagaatggacaaagacgttccactagtggttcccgaggtaaatccaagccatttagcaatgtataaaaaaagaaatttaattgctaacgcaaactgctcaactattcaaatggttgtagccttaaaacctttacatgataattttaaaattaaaagagttgtagtttccacataccaatctgtttctggagccgggaaagcttccatggatga

SEQ ID NO: 214605 - DNA, 484 bp, Unknown
  Bacterial polypeptide expressing nucleotide sequence isolated from the Sargasso Sea
tttgatcaaagatcaattgataagaaagtttaccctaaacaaatcgcctttatctcaataccatttgtagattgttttctagagaacaactacacaagagaagaaatgaagatggtatgggagacacataaaattcttgatgagaatataagtgttaatcctaccgcagtaagagtgcctgtgttggttggacatgcagagagcatatatattgaaacagagaaggaaatagatattgaattagcaaaaaactgcttaaatgagtttgcaggaatatcagtcatagataatgtccaagaagtcgattttccaacttcttttgagcatggtcatggaactgataatgtctatgttggcaggattagaaagggacttagtaaaaataattctttaaatttatgggtagttgctgataatgtaagaaaaggtgctgcattaaacagtatccaaatcgctgaaaatttggtcgggagtaaaatgtgag

SEQ ID NO: 214606 - DNA, 769 bp, Unknown
  Bacterial polypeptide expressing nucleotide sequence isolated from the Sargasso Sea
atgaacatagctatagtaggtgcaacaggaaatgttggtagaaaaactcttgaagtatttgataaaaaaaacttcaagtttgataatctatatctagttgcttcagaaaaaagtgcaggaaataaaatctcttttagagataaagagtatgttattgaaaatttagagacatatgatttttcaaaagcagatataactttttttgcagctggaggaaaaattgctgaaaaatatgcaataaaagctgccgagcacacaattgtaattgataattcaagtttttttaggatggatcctgatgttccattgatcgtcccacaagtgaatgcatctgaaattaaaaatatgaaaaaaaatataattgcaaatccaaactgctctacagctcaattagttattgcacttaaacctctgcatgatttatttaaaataaaaagagtagtggtatcaacttaccaatcagtttcaggagcaggaaaagttgctgttgatgattgtgtttcagaaactttatttacattaggagcaaaagataatcattcaatcggaaatactttcccagcacccattgcttttaatgcaatacctcaaatagatatatttgctgatgatggatatacaaaagaagaattaaaaatgacaaatgaaacaaaaaaaatcttagatgagtcaattgaacttacagctacatgtgtaagaattcctgttttagtatctcattcggagtctgtaaatatggaatttgaaaaaccatatactttagaaaaag

SEQ ID NO: 214607 - DNA, 808 bp, Unknown
  Bacterial polypeptide expressing nucleotide sequence isolated from the Sargasso Sea
actgggagtgttggaagggaaattgttcaaatattagagcaaagagaatttcctgttcaaaatatatatcttttagcatcttcaaaatcacaaggattaaaaattaactttaataataaagaaattattgttgaagatttatctaattttgatttttctaaagttcatattagccttttttcacctggaagtagtgtttcatctgaatatgcaccaaaagctgcaaataaaggaagtatagtaatagataatacttcttatttcagaatgcagaaaaatataccattaataattcctgaagttaatggaagtgttctagatgattttttcaaccaagaaaatagagataatattatatctaatcctaattgctcaactatacaaatgttggttgctctaaaaccattacacgatgctgctattataaataggcttgtagtatcaacatatcaatctgtatctggtgctgggaaaacaggaatggatgaactatttaatcaaactcaaaatatttattctaataaagcaatagaaaaacaaaaatttactaaacaaattgcatttaatcttattccccatattgactcttttattgataatggaaatactaaagaagaagaaaaaatgattaatgaaacaaaaaaaattttagatccacaaatagaagtttcggccacttgtgtaagagtgcctatatttgtaggacattctgaatctataaacattgaatttgattcaccaataactgatactgaagctaaagaaatattaaaaaaaactaatggcatttcagttgtgattatcgtca

SEQ ID NO: 214608 - DNA, 841 bp, Unknown
  Bacterial polypeptide expressing nucleotide sequence isolated from the Sargasso Sea
agtaggagcaactggaaatgttggaagaaaaactttagaagttcttgaaaaaaaggaacttactatcgataatatttatttagttgcttcatcaaaaagtgcaggtaagaaaattagctttaaaggtaaagatcttgaagtttttgatttggaaaattttgatttttcaagagtaaaaatttctttttttgctgcagggggaaaaatttcagaaaaatttgctgagaaagctgctaagcactgtttggtgatagacaactcaagtttttataggatggacccaaatgtaccgttaatcgttccacaggtaaattcgaatcatttgaataatataaaaaaaaatattattgcaaacccaaattgttcaacggcccaattagtaattgcattgaaacctttgcatgatgaatttgtaataaaaagaatagttgtttctacatatcaatcagtttcaggtggtggtaaagctccaatggatgaactgattgagcagacgaaatcagttttagatggaaaaaaggtaaagtctaaaaattttacaaaacaaattgcctttaatgctattcctcatattgatgtattttcggataatggttatacaaaagaagaattaaaaatgactaatgaaacaaaaaaaattcttgatgaaaaaattgatttaacagcaacatgtgtgagactgcctatatctgtttcacattcagagtcagtaaatatacaatttgaaaaatcatttactcttgaaaaagttagagatctattgaatagttttaatggttgtaaagtaattgatgatagaattgatggtggatattcaactcctatagatgctgaaggtaaa

SEQ ID NO: 214609 - DNA, 560 bp, Unknown
  Bacterial polypeptide expressing nucleotide sequence isolated from the Sargasso Sea
ttatcaatcagtgtctggttcaggaaaagaggccatggacgaattatggtcacagacaaaaggaatgtacgttcctggtcaagaggtggagccaaaagtttacccaaagcaaatagcctttaacgttattcctcatatagacgtttttatggatgatggccaaaccaaagaggaatggaaaatggttgccgaaactaagaaaatcttagataaaaaaattaaattaactgctacgtgtgtaagagttcctgtttttgtggggcattctgaggcagttaatattgaatttgaagagtttcttgatgaggaagaggcaagagcaatattgagagagtcgcctggaattatgatagtagataaaagggaaaatggagggtatatgacaccttctgagtgtgcaggagattatgctacatttataagcagactcaggcaagactctaccattgaaaatggtctaaacctctggtgtgtttccgataacctaagaaagggcgcagctcttaatgcagtccagatagctgagcttcttgggacaaaaattttaaaaaaagcataac

SEQ ID NO: 214610 - DNA, 803 bp, Unknown
  Bacterial polypeptide expressing nucleotide sequence isolated from the Sargasso Sea
aatgattaaaaaatataatatagcagtagccggtgccacaggagcagttggaagtgaaataattcagatattagaagaaagagattttccaattgataatttatatttacttgcctcatcaaaatctaaagggaaaaaactagaatttaatcaaaaagaaattatagttgaagaactttctgaatttgatttttctaaagctcaaattggtttattttctccaggtggaaaaatttcagcagaatatgctccaaaagctgcaaaagcaggttgtgttgttattgataatacctcgcattttagaatgcaaaaaaacattcctctaatagtgccagaggtaaatgctagtgtacttgaggaattttttcttgatgaaaaaagaacaaatataatttcaaatccaaattgctcaacaatacaaatgttagttgctttaaagccacttcatgaaaaatcaataattaacagagttatagtatcaacttatcaagctgtatctggtgcaggcaaaacagctatggatgaattgtttaatcaaactcaaaatgtctatgcaaatcaagaattgaaaaaagaaaaatttacaaaacaaatagcatttaatgcaattccacatattggcgcttttttaaaaaatggcaatacagaagaagaacaaaaaatgattgatgaaacaaaaaaaattttagatgaaggtattaagatttcagctacatgtgttagaactgcagtattcattggccattcagagtcaataaatattgagtttgattctcctttagatgaaaaagaagctcgtgaaa

SEQ ID NO: 214611 - DNA, 1018 bp, Unknown
  Bacterial polypeptide expressing nucleotide sequence isolated from the Sargasso Sea
atgaatagtttaataaatttagcattaattggggcgtcaggcgtcgttggtaaaaaaattatttctttactggaaaataaaaatattgaaataaataatttatatccacttggatctacttccgtaggcgatgaaatagtatttaataacaatgaatataaaattgatgatttatctaattttgattattcaaaggtaaatttggctatcttttctgctgggtcaaaggttgcagaagaacatgcaaaagattttgttaatgcaggagtttatgtgatagatttatcttctaaatttagatatgaaaaggatataccacttataattcctgagataaatggaaatgagattaatcttttagaagcaccatccttaatatctaatcctaattgctctacatctcaacttttaatggcaattaatcctattcataaaaaatatgaaatagatattttaaatattgctacatatcaagcagtatccggaactggaaaacaagcagttcaagaattaaaaaatcagattaaagatgagtctgctaataaagaaatctatccaaaaaagatagcatataatgtaatccctcaatgtgatatctttttagaaaatgattttactaaagaagaaatgaaacttgtctgggaaacaaaaaaaatacttgataaaaacattgaagttcaagcgacatgtgtgagagttccggttattaatggtcactctgaggcagtctttttaagaacaaagaaagaaacttctcgtgagcaaataattgacttattaaataattctagcggaataaaggtaatagataatcctgagtcccaagagtatccaacccctcttgagaatgcaaatgatactgaagaagtatttgtcgggaggattagatcacaaacgataaataatgaaaactggatttcaatgtggatagttgctgacaatgtgtatggaaaaggggctgcattaaatactgttcaaattcttgaaactttattagagaataataaattatgttgag

SEQ ID NO: 214612 - DNA, 997 bp, Unknown
  Bacterial polypeptide expressing nucleotide sequence isolated from the Sargasso Sea
tatgaaagtagctgttattggtgcaactggggttgttggaactgttatactcaatctgttagataaaagaaaattccctgttactgaaattataccagttgcctcggaaagatctgttgggaataagattaaatttcaaggtaaagaatatagtatagtctcattaactgaagctgtagcaatgaagcccgacattgcacttttttcagctggaggttcaacctcacaggaatgggctcctaaatttgcagagaacggaacacgagttgtagataactcttctgcttggagaatggattcaacaaaaaagctaatagttagtgaagtaaattcagcgactttaactaaagatgactatataatagccaatcccaattgctctacaatgcagatgcttgttgttctagctcctattcacaaaaagttcaagattaaacgtcttgtaatatctacatatcagtctgtgtctggtacaggtaaaaatgcaatagaccagttatatggcgagagaaatggctctaactctgaaaaagtttacccttattccattgatcaaaatcttttaccacattgcgacgtgtttgaagaggggggttacactaaagaagagaataaactaatcaatgagactagaaaaatattaaatgataatagtattcagattacatctactgcagtcagagtgcctatagaactgtgtcacggtgagtctgttaatattgaatttgtagatgaatttaaccttgaagaagtattgagtgttttaagaagttctcccggattaattgttgaggatgagccagaaaaaaacatatatccaatgccaattaacgcttcaaataaagatgaagtttttgtaggaagaattagaagagattttagtataaaaagtggattaaacctttggattgtttcagataatcttagaaaaggtgctgctacaaatactattcaaatagctgaaaaattaattgagatgggtatagtaaagtcctag

SEQ ID NO: 214613 - DNA, 640 bp, Unknown
  Bacterial polypeptide expressing nucleotide sequence isolated from the Sargasso Sea
aattgcaaatgcaaattgctcaactattcaaatggtaattgctttaaaaccgttacatgaaatatttaagataaaaagaatagttgtttcaacatatcaatcagtttctggagctggcaaagatccaatggatgagttaatagatcaaacaaaatttgctctggaaaataaaaaaattaattctaaaaatttcacaaaacaaattgcatttaatgcaattccacatattgatgatttttcaaatgatggttatacaaaagaagaaatgaaaatgattaatgagacaaagaagatattagataaaagtattgatgtaacggcaacttgtgtaagagttccagtgctggtttctcatgcagaatctttaaatattgaatttgaaaaagagtttactttagaaaaaataataaatttattggaaaatgcagatggctgtaaagttgtaaatgatcaaagagatggtggatatatgacacaactcgaagcagcaggtaaggatgaaacgtttatttctagaataagaaaagacaatacaaatgaaaaggccataaatctttggatagtttctgataatttactaagaggtgcggctctaaacgctgtagaaatagcagaggcatatattaaaacaaagcaatga

SEQ ID NO: 214614 - DNA, 742 bp, Unknown
  Bacterial polypeptide expressing nucleotide sequence isolated from the Sargasso Sea
catgaatattgcaattgtaggagcaacaggaaatgttggaagaaaaactttagaagttcttgaaaaaaaggagctatctattgataatctgtatttagttgcctcgtctaagagtgccggtaaaaagattagttttaagtataaagaacatgaggtttttgatttagaaaattttgatttttctaaagtaaaaatagctttttttgcagctggtggaaaaatctcagaaaaatttgcagagaaagctgcaaagcattgtctagtgattgataattcaagcttttatagaatggatccagatgttcctttaattgttccacaagttaacccaaatcatttagatcaaataaaaaaaaatattatagccaatccaaattgttcaacagcacaattagtgattgctttaaaacctttgcacgacctttttgtaattaaaagaatagtagtttccacataccaatcagtatcaggaggtggtaaagcacccatggatgaattgatcgaacaaactaaattagttttagatggtaaagatgtaaaatctaaaaattttacaaaacagatagcttttaatgctattccgcatatagatgtattttcagatgatggttatacaaaagaagaattaaaaatgactaatgaaacaaaaaaaattttagatagtaaaattgatctaacagcaacgtgcgtaaggctacctatttctgtttcacattcagagtcggtaaatttacaattttga

SEQ ID NO: 214615 - DNA, 679 bp, Unknown
  Bacterial polypeptide expressing nucleotide sequence isolated from the Sargasso Sea
atgaatatagcaattgtaggagcaacaggaaatgttggtagaaaaactttagaggttcttgaaaaaaaaggactaaaaattgacaatctatatctagtcgcatcatcaaaaagtgcggggataaagattaaatttaaagggaaagaatatgaagtttgtgatttagaaaattttgatttttcgaaagcgaaaattattttctttgcagcaggtggaaaaatttcagaaaagtttgcagagaaagcctctaaaagttcatttgtcattgataattcaagtttctttagaatgaatcaagatgttccattaattgttcctcaagtaaatcctgaggatttaaaaaatattaaaaaaaatattatagcaaatcctaactgttctactgcacaattggtaattgcacttaaacctttacatgatttatttgaaatcaaaagagtagttgtctccacttatcaatcagtttcaggaggtggtaaagcacccatggatgaattaattgaacaaactaaaatggcattaggtggaaaaaatattgaatccaaaaattttacaaaacaaatagcatttaatgctattcctcatatagacacattttcagactctggttatacaaaagaagaacttaaaatgacaaatgaaacaaaaaaaattcttggtgataaaatagatttaacag

SEQ ID NO: 214616 - DNA, 1012 bp, Unknown
  Bacterial polypeptide expressing nucleotide sequence isolated from the Sargasso Sea
atgaatatagcaatagttggagcaactggaaacgtaggtcgtaaattaatagaggttttggaaaaaaaaaattttccaataacggaagcttatttgcttgcatcctcaaatagtgctggaaaaaaaataaattttttaggcaaagaacatacagttataaacttagaggagtttgatttttcaaaagttaaaatagcattttttgctgctggatctgcaatagcagaaaaatgggcaccaatagctgctgaaaaaacaattgttatagataattcaaaattttttagaaaagattctgagatacctttaattgtacctgaagtaaattcaaaagaattaccaaaatttaaaaataaaaatattatagctaatgctaactgttctgtaattccaatagttgtggctctaaaacctttacatgatttatataatgttaaaaggatagttgcatcaacctaccaatcagtatcaggtgcaggaaaggctggcatggatgaacttatatcacaaactaaagaagtattggaaaataaaaatgtacagtccaaaaattttactaaacagattgcttttaacgcaataccacatatcgatagctttcttgaaaatggaagtacaaaagaggagcaaaaaaatcacgatgaagttaaaaaaattttagataataaaattagtattacatctacttgtgtaagaattcctgttctcgtatctcactcaataagtgtgaatgtagaatttaataagaaacataacttagaagaggtaaaaactgttttatcatcatctccaggatgtaaagtggttgatgaacataaagatggtggatacattactccagttgaagcagaggataaatttgaaacattcatatcaagaatcagagatgactcatcacaagctaattcaattaatttatggatagtgtcagataatttattaaaaggtgctgcactcaatgctgttgaaattgctgaagctttagtagaaaaagatttttatggaagataaa

SEQ ID NO: 214617 - DNA, 466 bp, Unknown
  Bacterial polypeptide expressing nucleotide sequence isolated from the Sargasso Sea
ttggcttcttcaaaaaaacctaaaattgctgttgtcggagcgactggaaatgttggaagagaggtcttagatataatcgatgaaaaagaaattcaatactctgatttaatcgctttagcttcatcccgctctaaaggaagtacaattgattatggagaaaacaagtcggtagtagttgctgacttagctgaatatgatttttcagatactgacatagctattttttctcctggagcaaaagtatctagcgagtttgctcctaaggcagctaaacaaggatgtatagtcatagataatacctcacactttcgaacagacccagatgtccccttagtagttgctgaagtcaatccagaggccttaaaagattttagaaaaaaaaatattattgctaatccaaactgctcaaccatggggatgctagttgcaattaaacctttacacgatcaatttaatgtaaaaagaa

SEQ ID NO: 214618 - DNA, 1012 bp, Unknown
  Bacterial polypeptide expressing nucleotide sequence isolated from the Sargasso Sea
atgaatatagcaatagtaggagcaacaggaaatgttggtagaaaaataatagaaatattggaaaaaaagaattttccagtttctgaattatttttgatagcatctgccaaaagtgctggaaaaaaaattaattttaaaggcgaagatcatacagtaattgatcttgaaaaatttgatttttcaaaagtaaaaattgctttttttgctgctgggagtgctattgcagaaaaatgggcaacagaagctgcaaaaaaaacaatagtaattgataattcaaaattttttagaaaagacccagatatacctttagtagttcctgaggttaattcaaaagaattggctcatgtaaaaaataaaaatataattgcaaatgcaaattgctcagttataccacttgttgttgctctaaaaccattgcacgatctttataatattaagagaataattgtttcaacatatcaatcagtttctggagctggaaaagctcctatggatgaattattatctcagactcaggatttttttaataataaaaatttggagtctaaatattttacgaaacaaattgcatttaatgcaattccacatatcgatagtttcttggaaagtggttatacaaaagaagagcaaaagactactgatgaagttaaaaaaattttagataaaaaaattaaaattacatctacttgtgtaaggatacctgttcttgtgtcacattctatcagcgccaatgtagagtttagtaaaaaatataatataaaagaaattagaaatgttttgtccacatctccaggatgtaaagttattgatgagctaaaagatggtggatatataacaccagcagaagctgaaaataaatttgatacgtttatttctagaattagacaagatgaatctcaggcaaatacagttaatatgtggattgtatctgataatttgcttaaaggtgcagcattaaacgcagttgaaattgccgaaagtttagttgaaaaagatttgtatggaaaataat

SEQ ID NO: 214619 - DNA, 1012 bp, Unknown
  Bacterial polypeptide expressing nucleotide sequence isolated from the Sargasso Sea
catgaatatagcaatagtaggagcgacaggaaacgtaggtcgaaaattaatagaagttttggaaaaaaaaaactttccaataacagaggcttacttagttgcgtcttcaaatagcgaaggaaaaaaaattaactttttaggaaaagagcatactgttagtaatttagaacaatttgatttctcaaaagtaaaaattgctttttttgcagctggttcctcaattgctgaaaaatgggcaccgatcgcagcagaaaaaacaattgtaatagataattcaaaattctttagaaaagatccagaaattcctttaattgttccagaggtaaattccaaagaattacctaaatttaaaaataagaatattatagcaaatgctaattgttcagtaataccaatagttgtagctctcaaaccattacatgatttgtataatgtaaaaagaatagttgcatcaacttatcaatcagtgtctggtgcaggcaaagctggaatggatgaacttatatcccaaactaaagaagtcttggaaaataaagatgttgaatcaaaaaattttactaagcagatagcctttaatgctataccacatattgatagttttcttgaaaatggaagcacaaaagaagagcaaaaaaatcatgatgaggtaaaaaaaattttagatagtaaaattaatataacatctacttgtgtaagaatccctgttcttgtttctcactccataagtgtgaatgttgaatttaacaaaaaacatgacttagaagaaataagaaatgtcttatcatcatcaccaggttgcaaggtagttgatgagcaaaaagatggaggatacattacccctgttgaagctgaagataaatttgaaacatttatatcaagaattcgtgaggattcttctcaaccaaattcaattaatttgtgggttgtgtctgataacttattaaaaggtgctgcacttaatgcagttgaaattgctgaggctttagtagaaaaagatttttatggaaaataa

SEQ ID NO: 214620 - DNA, 1012 bp, Unknown
  Bacterial polypeptide expressing nucleotide sequence isolated from the Sargasso Sea
atgaatatagcaatagtaggagcaacaggaaacgtaggtagaaaattaatagaggttttggaaaagaaaaattttccaattacggaggcctatttggttgcatcttcaaatagtgctggaaaaaaaattaattttttaggtaaagaacatagtgtaatcgatttagagcaatttgatttttcaaaagttaaaattgctttttttgcagcaggttctgcaatagctgaaaaatggacaccaatagcagctcaaaaaacaatcgtgattgataattcaaaattctttagaaaagaccctgaaatacctttaattgtacctgaggtaaattctaaagaattatctaaatttaaaaataaaaatatcatagccaatgcaaattgttctgtcattccaatagtggtagctcttaaacctttgcatgatttatataacgtgaaaagaatagtagcatcaacttatcaatcagtttcaggtgcaggcaaagcaggtatggatgagcttatatttcaaacaagagaagtcttggaaaacaaaaacgttgaatccagacattttactaaacagattgcttttaatgtaatcccacatatcgatagtttccttgaaaatggaagtactaaagaagagcaaaaaaatcatgatgagattaaaaaaattttagataacaaaattaatataacctcaacatgtgttagaattccagtgcttgtttctcattctataagtacaaacgtagaatttcataaaaaatatgatttggatgaaataaggtcagttttatctacgtcaccaggatgcaaggtagtagatgaacaaaaagacggtggatatgttactccagtagaggcagaaaataggttcgaaacatttatttctagaattcggagtgatgcatctcaacctaatactattaatttatggatagtatctgataatttattgaaaggtgctgcattaaatgcagttgaaattgctgaagctttaatagaaaaagatttttatggaaaataaa

SEQ ID NO: 214621 - DNA, 997 bp, Unknown
  Bacterial polypeptide expressing nucleotide sequence isolated from the Sargasso Sea
atgaaagtagctgttgttggtgtaactggtgttgttggaactgttatgctcaatctattagataaacgaaaatttccaattactcaaataatacctgttgcctcagaaaaatctgtaggtaaaaagattggatttaagggcaaagattataatatagtctcattaactgatgcattaactgtaaaacctgatattgcacttttttcagctggaggtacaacctcaaaggaatgggcacctaaatttgcagatataggtactagagtggttgataattcatctgcatggaggatggactcaacaaaaaaactaatagttagcgaagtaaattcagatactttaacaaagaatgattatataattgcgaatcctaattgctctactatgcaaatgcttgtcgtattagctcctcttcacaaaaagtttaaaattaaacgtttagtgatttctacatatcaatctgtatctggaactggtaagaatgcaatagatcaattatacagtgaaagaaatggctctaactcagaaaaaatttacccatattctatagatcaaaatcttttgccacactgtgatgtatttgaagatggtggttacactaaggaggagaataaactaattaatgagactagaaaaatcttaaatgattatagtattcaaattacatcaacagcagttagagttccaatagaggtttgtcacggtgagacagttaatattgaatttaaaaataaatttcaacttaaagaagtatatagtattttaagaaatactcctggattaatagttgaagatgagccacaagacaacttgtatccaatgcctctcaatgctgcaaataaagatgaggtttttgttggtagagtaaggagagattttagtatagagaatggattaaatctatggattgttgccgacaatttgagaaaaggtgctgctacaaatactattcaaattgcggaaaaattaattgaaatgggattagtaagattctaga

SEQ ID NO: 214622 - DNA, 393 bp, Unknown
  Bacterial polypeptide expressing nucleotide sequence isolated from the Sargasso Sea
atggatatacgaaagaagaattaaaaatgactaatgaaacgaaaaagatcttggataatgaaatcgatgtttctgcaacatgcgttagagttcctgttagaactggtcattcagagtctattaatattgagtttaataatctttatgatttcgagaacataattaaaattttaaaaaatgctccaggttgtaaagttattgatgagcgtactgatggaggatatatgactcctctagaagctgaaggaagttatacaacctatatatcaagaattagaaaagataattctaatattaaagcgattaatttatgggtagtgtcagacaatttattaaaaggagcggcattaaatactgtgcaaatcgctgagtgtttaatgaaaaaattataac

SEQ ID NO: 214623 - DNA, 997 bp, Unknown
  Bacterial polypeptide expressing nucleotide sequence isolated from the Sargasso Sea
atgaaaattgctattgttggtgccactggaaatgttggacgtaagataatcgaagttttagaacagaaaaaacttttagtagaggatttatgtttattagcttcgaaaaaaagcgcgggtacagagttattgtttaatgggaaaaaaataaaagttcaaagtttagaagattttgacttttccaaagttgatattacttttttttcagcgggtaaaaaaatttcagaagcctatgccgttaaagctgcgaaatgttctgtcgttgtagataattcaagttattttagaatggatccagatgtaccattaattgtgccgcaggtaaacaaacatcatttatctaatttaaaaaaaaatattatagctaatcctaattgttcaacagctcaaatggtaattgtacttaaacctttacatgatctatttgatatcaaaagagtagtagtttctacttatcaatcggtatctggagcagggaaagcatcgatggatgagttaattgaacaaacaagagatatcttagcagaaaaaaaagtttcatcaaaaaattttacaaaacaaatcgctttcaatgccataccacatatagatgattttctagatgatggttacacgaaagaagagattaaaatgataaatgaaactaaaaaaatattagatcacaaaatagaattaacagcaacatgtgtaagaattccagtgatggtctcacactcggagtctttaaatattgaatttaataaaactgcctcactctcagaggtaagaaaagttttagcaaaagccccagggtgtaaaataattgatgatcctttaaataatatgtatgcgacacctattgatagcgcaggtaaaaatgaaacatttatttcaagaataagacaagataactcaaataaaaattctataaacctttggattgtttcggacaatctattgagaggtgctgcactaaatgctgttgaaattgcagaaacctactataataaattataat

SEQ ID NO: 214624 - DNA, 991 bp, Unknown
  Bacterial polypeptide expressing nucleotide sequence isolated from the Sargasso Sea
catgaaaatagctgtggttggtgctacgggattggttggtagggtaatgctaaagctgctagaggatagaaagtttcctttagatgatttaattccagttgcctcaaagagttcaataggacaatctattagttttaaagataaaagttatcctgtggtttccatggaagaagcaataaaattaaagcctgcaattgcccttttttcagctggcggatcaacatcattagaatgggccccaaaatttgcagaaaatggaacaaaagttatagataactcctctgcatggagaatggattcaagcaagaagttaattgtacctgaaataaatgcagatgccttggaaaaggatgatatgatcatagccaacccaaactgctcaactatacaaatggttgttgctcttggccctttacataataaatataatataaaaaggttagttatttctacataccaatctgtttcaggaacagggaaagatgctttagatcaacttaacaaagagactagtggggattttactgagaaggtttatccataccaaatataccaaaatcttttacctcattgtgatgtttttgatgaggacggatatacaaaagaagaaattaaattaatgaaggagaccagaaaaatattagatgatgattctattaagataacttcaactgcagttagagttcctattgaaaaatgtcatggagagtctataaacctagaattctataatgaatttgacctagaagatattatcgaaactttaggatgctcccctggagttaaagttatggatgatataaataataatttatatccaatgccaatagaagcggcaaataatgatgaggtatatgtgggtcgaataaggagagatcatagtgttgaaaatggcctaaacctgtggattgtatctgataatcttcgtaaaggagcagcaacaaacactatccaaattgccgaaactcttattgaaaaaggcctattatag

SEQ ID NO: 214625 - DNA, 1012 bp, Unknown
  Bacterial polypeptide expressing nucleotide sequence isolated from the Sargasso Sea
catgaatatagcaatagtaggagcgacaggaaacgtaggtcgaaaattaatagaagttttggaaaaaaaaaactttccaataactgaggcttacttagttgcgtcttcaaatagtgaaggaaaaaaaattaattttttaggaaaagagcatactgttagtaatttagaacaatttgatttctcaaaagtaaaaattgctttttttgcagctggttcttcaattgctgaaaaatgggcaccgatcgcagcagaaaaaacaattgtaattgataattcaaaattctttagaaaagatccagaaattcctttaattgttccagaggtaaattctaaagaattacctaaatttaaaaataagaatattatagcaaatgctaattgttcagtaataccaatagttgtagctctcaaaccattacatgatttgtataatgtaaaaagaatagttgcatcaacttatcaatctgtatcaggagcaggtaaggcaggaatggatgaacttatatcccaaactaaagaagtcttggaaaataaagatgttgagtcaaaaaattttactaagcaaattgcttttaatgctataccccatattgatagttttcttgaaaatggaagcacaaaagaagagcaaaaaaatcatgatgaggtaaaaaaaattttagatagtaaaattaatataacatctacttgtgtaagaatccctgttcttgtttctcactctataagtgtgaatgttgaatttaataaaaaacatgacttagaagaaattagaaatgtcttatcatcatcaccaggatgcaaggtagttgatgagcaaaaagatggaggatacattacgcctgttgaagctgaagacaaatttgaaacattcatatcaagaattcgtgaagatttttctcaaccaaattcaattaatttgtgggttgtttctgataacctattaaaaggtgccgcacttaatgcagttgaaattgctgaggctttagtagaaaaagatttttatggaaaataa

SEQ ID NO: 214626 - DNA, 901 bp, Unknown
  Bacterial polypeptide expressing nucleotide sequence isolated from the Sargasso Sea
atgaatatttgtattgtaggggcaacaggaaacgttggtagaaaaattttagatgttttagataaaaaaaatttttctattaatcaactctatttagttgcatcggaaaaaagtgaaggaaaaaaaattctttttaaaaaaaaagaatacatagtacataatttagaaaattttgatttttctaaatgcgatattgcttttttttcagcaggtggaaaaatagcagaaaaatttgcagaaaaagccgcaagacattcaattgtaattgataactcaagtttttttagaatggatccagatgttccattaatcgtaccacaagtaaattctgaagaccttaaaaatatcaaaaagaatataattgcaaacgcaaattgttcaacaatacaaatggtaattgctttaaaaccgttacataaaaaatttaaaattaaaagaatagttgtttcaacttatcaatcagtttccggggccggcaaaggtccaatggatgaattaattgatcaaactaaacttgctcttgacaataaaaaaattaattcaaaaaattttacaaaacaaattgcatttaatgcaatcccacatattgataattttgcaaatgatggctatacaaaagaggaaatgaaaatgattaatgagacaaaaaaaatattagataaaaatattaatgtgaccgcgacttgtgttagagttccagtattggtttctcatgcagagtcagttaatatagaatttgaaaaagagtttactttagaaaaagttattaatttgctagataatgcagagggttgcaaagtcgtaaatgaccaaattgatggtggctacatgactcagcttgaagcagctggtaaggatgaaactttttattccagagtagggaaagataatacaaatcaaa

SEQ ID NO: 214627 - DNA, 760 bp, Unknown
  Bacterial polypeptide expressing nucleotide sequence isolated from the Sargasso Sea
tatgaacatagctatagtaggtgcaacaggtaatgtaggtagaaagactcttgaagtttttgataaaaaaaacttcaagtttgataatctatatttagttgcctcagaaaaaagtgcaggaaaaaaaatattatttagagataaagaatatgaaattgagaatttagaaaactatgatttttctaaagctgatattactttttttgcagcaggaggaaaaattgcagaaaaatatgcagaaaatgcagccaaacatactgtggtaattgataattcaagtttttttaggatggatccagatgtacctctgattgttccacaagtaaactcttctgaaataaaaaaaatgaataaaaatattattgcaaacccaaactgttcaacagcacaacttgttattgctcttaaaccacttcatgatttatataaaattaaaagagttgtagtttcaacttatcaatctgtttcaggtggtggaaaaagtccaatggatgaattaattgagcaaactaaaaaatatttagatggaaaaaaaatagagtccaaaaactttaccaaacaaattgcttttaatgttattccacatatcgatgttttctctgatgatggatatacaaaagaagaattaaaaatgacaaatgaaacaaaaaaaatattagatgaaacaattgaacttacagcaacatgtgttagaattcctgtgctagtatcacactctgagtctgttaatatagagtttgagaaaccttttaatttagat

SEQ ID NO: 214628 - DNA, 1045 bp, Unknown
  Bacterial polypeptide expressing nucleotide sequence isolated from the Sargasso Sea
aatgactcaaaaatacaatatagcgcttgctggtgctactggggcagttggaaatgagataattcaaattttagaacaaagagactttccaattgataatttatatttactagcatcatcaaaatcaaaaggaaaaaaaatagaatttaaagaaaaagaaattatagttgaagatcttgcagaatttgatttttctaaagctcacttaggtttgttttctcctggtggtaaagtgtcagcagaatttgcgcctaaagctgctaagactggttgtatagttatagacaacacatcatattttagaatgcaaaaaaagatacctctaatagttcccgaagttaacgcaagtgtacttgaagaattttttcaagacgaaactagaacaaatattatatcaaatccaaattgctcaacaattcaaatggtagttgctttaaaaccacttcacgataaatctattataaatagagttgtagtatcaacttatcaggctgtatcgggtgcgggaaaaactggtatggatgaactctttaatcaaactcaaaatgtttatgcaaatcaagaattaaaaaaagaaaagtttacaaagcaaatagcttttaatgcaattccccatattggtgcctttttagaaaatggtaacacagaagaagaacaaaaaatgattgatgaaacaaaaaaaattttagatgaaggaatcaaagtttcagcaacttgtgtcagaactgcagttttcattggtcattcggagtcaataaatattgaatttgattctcctttaggtgctaaagaagcatatgagatcctatctaagtctgatggtatttcagttattgatcatagaaaagatgagggatatataactccagttgaaattgcgggagaagacaaagtgtatattagtagaattcgggacgacgaatcattagacaatggtttaagtttgtgggttgtatcagataatcttcgtaaaggcgcagctttaaatgctgttcaaattgcagaagtaattatttcacaatattctaattatataaaaatttga

SEQ ID NO: 214629 - DNA, 1000 bp, Unknown
  Bacterial polypeptide expressing nucleotide sequence isolated from the Sargasso Sea
atgtctaagttagctatagttggagcatcaggattagttggaagaaatttactagaacaactacaaaaaagagaattcaaaatagatgagattttcttattaggcaaaaaatcagctggctcttcaataaattttttagataaagattgcattattgaggacattgataaatttgattttaataagcctgactatgcaatattgtctgctggttctgatgtagcaagagattatgcgaataagtttattgaagccgactgtaaggttttagatatgtcttccttctttagatatgaagatgatgtacctcttataattccagaaattaatgggaatataattagtaagaaaaccaatctaattgcaaacccaaactgctcaacagctcaactcttgatggtcctcgatcatattcataaagagtttagtatcgaaagtgtaatgataactacctttcaagcggtatcaggtgcaggtgagcagggtataaaagagcttgaaaatcaatctcagtcaatctctactacatccaatatattttctaagactatagcaggaaatgttatacctcagtgtgataaatttttagagaatggttttacgaaagaagaaatgaagctcgactgggaaacaaaaaaaatattagatgaaaaaattcatgtaacttccacttgtgtaagagtgccggtaaaaaatggacactctgaatcagtttttataaaagtaagaaatgaggcctcaagatcaagcataataagattgcttgaaggtaaagagggtgtaaaagtaattgatgatccttcaaaagaagcttttccaactgctcttgaaaatgcaaataaaacaagtgatgtttatgttggaagaattcgctcaagtaaaattaataatgaagattggatatcctgctggattgtagctgataatgtatttggaaaaggtgctgccttaaatgcagtccaaatcttagaattaatgaaagaaactgatgaaaattaaa

SEQ ID NO: 214630 - DNA, 1012 bp, Unknown
  Bacterial polypeptide expressing nucleotide sequence isolated from the Sargasso Sea
atgaatatagcaattgtaggtgcgactggaaacgtaggacgaaaactaattgaagttttggaaaaaaagaattttgaaatttctgaattgtttttagttgcctcatcaaaaagtgaaggaaaaaaaattaactttaatggtaaagaacatacagttattgatcttgaaaaatttgatttttcaaaagtaaaaattgctttttttgctgcaggaagcacaattgcagaaaaatgggctaatattgcagcagagaaaactatagtgattgataattcaaaattttttagaaaagatcctgacattcctttggtagtgccagaagttaattcaaaagaattggtccaagtaaaaaataaaaatataattgcaaatgcaaattgttcggtaataccagtcgtagtcgctttaaagcctttgcatgacttatataatgtcagaagggtagttatttcaacttatcagtctgtatctggcgcaggaaaagagcctatggatgaattactatctcaaactaaagagcattttgataataaaaaattagagtcaaaatattttacaaagcaaatagcatttaatgctattcctcatatcgatagttttttagaaaatggctatactaaagaggaacaaaaaactacagacgaaataaaaaaaatattagataaaaaaattaatgttacttcaacttgtgtaagaatacctgtgcttgtatcacattctataagtgcaaatgtagaatttaataaaaaatgtaatttagaagaaatcagaaatgttttatctacttctcctggttgcaaggttgttgatgaacataaagatggaggatatataactcctgtcgaagctgaaaataaatttgaaacttttatttcgagaattagattagatgagtctcaacttaacacagtaaacttgtggattgtttctgacaatctgcttaaaggagcagctctaaatgctgttgaaatagcagaaagtttaatagataaagatttctatggacaataag

SEQ ID NO: 214631 - DNA, 505 bp, Unknown
  Bacterial polypeptide expressing nucleotide sequence isolated from the Sargasso Sea
tatgaaaataaatgattttccttcaatatctgttgtaggtgcgactggagcggttggaaaaatatgtttggatattttaaatgaaagaaactatccaattgaaaaaattaatttatttgcctctagtagatctgctggcaagaaaataatttatgacaacaatgaattaattgtgaaagaagcaactaagaattcatttgatgaatctgatgttgtatttatctccgcagatagcaatgttagtttggagcttgccccatctgctgtaaactcaggtgcattagtaattgatgatggctctgcatttaggatgaaagaggatgtcccattagttgtcccagaagtaaatgaaaatgatataaatacccataatggaataatttcaattccaaattgcacaaccacaccattagttatggcagtacataatttgagaaaattatcaaaaataaacagaattcaagctgccacatatcaagctgtttcaggtagtggatcaatggca

SEQ ID NO: 214632 - DNA, 970 bp, Unknown
  Bacterial polypeptide expressing nucleotide sequence isolated from the Sargasso Sea
aaaaattatagaggttttggaaaataaaaactttccaatttctgaattatatttaatcgcttcttctaaaagttcagggcaaaaaatcaattttaagggaaaagagcataccgttatagatttagagaaatttgatttttcaaaagtaaaaattactttttttgctgccggaagtgctgtagctgaaaaatgggctcataaagtagcagagaaaacaatagtaatagataattcaaaatatttcagaaaagattcggagattcctttaatagttcctgaagtaaattcaaaagaattagttcatgtcaaaaataaaaatataatagcaaatgcaaattgttcagttattcctcttgttgttgctttaaagcctttgcatgatttgtttaccgtaaagagaattgttgcatcaacttatcaatctgtttctggagcaggaaaagcacctatggatgaacttttatctcaaactcaagattattttaataataaaaatttgcaatctaaacattttacaaaacaaatagcttttaatgcaattccacatatcgatagttttttagaaaatggttataccaaagaagaacaaaaaacttccgatgaagttaaaaaaattttagataaaaaaattaaaattacatctacttgtgtaagaataccagttcttgtatctcattctataagtgcaaatgttgagtttgaaaaaaaatttaatttagatgaaataagaaacgttttatctacctcaccaggatgtagggttatagatgaacaaaaagatggtggatatatcactccagttgaagctcaaaataagtatgagacatttatttcaagaatcaggcaagatgattctcaatctaatactataaatttatggatagtttctgataatttacttaaaggtgctgcattaaatgcagttgaaattgcagaaagtttgattaaaaaaaatttacatgacagataa

SEQ ID NO: 214633 - DNA, 883 bp, Unknown
  Bacterial polypeptide expressing nucleotide sequence isolated from the Sargasso Sea
gatgagtaaaggtattaatttagcattagttggagcttcaggagttgttggcagcaaaatagtttctattttggaaaaaaaacaggtgcaggttaaaaatttttacccccttgggtcttcttcagtgggaaatgccataagttttaacaataaagaatatgtaattgaagatctttcaaaatttaactgtgatttagccgatgtagtaattttttcagcagggtctgcagttgcaaaaaaatatgccgaaagctatgtcagtaaaggagcatatgtaattgatctttcatctgagtttagatatgaagatcatgtaccacttgtgattcccgaggttaatggagaaattttaaacgcattaaaagaacccactctaatagctaatcccaactgctcagtttctcagcttttggttgcacttaatccaattcataagatattcgaagtagacatattaaatatagctacttatcaagcagtttccggaactggtaaagaagctattgaagaacttcaaaatcaaattaaagatgaatcatatgatgcgaacgtttatccaaaaaaaattgcttttaatgtaattccacaatgtgatgtatttcttgaaaatgactttactaaagaagagatgaaggtaacttgggaaacaaaaaaaatacttgatccttcaatagaagttcaagcaacatgcgcaagggtaccagtaattaatggccattctgaagctgttttttttagaactaaacaaaaggcctcaaaaaaagagatacttgatattttaagagcaacttctggtgtaaaagttatggataatcctgcgaaattggaatacccaacaccattagaaaatgcaaatgatactgaggatgtatttgttggaagg

SEQ ID NO: 214634 - DNA, 1012 bp, Unknown
  Bacterial polypeptide expressing nucleotide sequence isolated from the Sargasso Sea
atgaatatagcaatagtcggagcaactggaaacgtaggtagaaaattaattgaagttttggaaaaaaaaaactttccaataaatgaagcttatttagttgcttctccaaatagtgctggaaaaaaaataaattttttaggtaaagagcatacagtaataaacttagaggagtttgatttttcaaaagtaaaaatagcattttttgctgctggatctgcaatagctgaaaaatgggcaccaatagctgctgaaaaaacaatagttatagacaattcaaagttttttagaaaagatcctgaaatacctttaattgtacccgaggtaaattcaaaagaattaccaaaatttaaaaacaaaaatattattgccaatgctaattgttctgtaattccaatagttgtagcgcttaaacctctgcacgatttatataatgtcaaaagaatagtcgcatcaacttaccaatcagtatcaggtgcaggaaaggctggaatggatgaacttatatctcaaacaaaagaagtattagaaaacaaaaatgttcagtctaaaaactttactaagcagatagctttcaatgcaataccacatatcgatagctttcttgaaaatggaagtacaaaagaagagcaaaaaaatcatgatgaagttaaaaaaattttagataataaaattagtattacatctacttgtgtaagaattcctgttcttgtatctcactcaataagtgtgaatgtagaatttaataagaaacataacttagaagaagtaaaaactgttttatcatcatctccgggatgtaaagtagttgatgaacaaaaagatggtggatacatcaccccagttgaagctgaagataaatttgaaacatttgtatcaagaatcagagatgactcatctcaacttaattcaattaatttatggatagtatcagataatttattaaaaggtgctgctcttaatgctgttgaaattgctgaagctttagtagaaaaagatttttatggaagataaa

SEQ ID NO: 214635 - DNA, 982 bp, Unknown
  Bacterial polypeptide expressing nucleotide sequence isolated from the Sargasso Sea
aacgttggaagaaaactaatagaggtacttgaaaaaaaaaatttttctgttactgaggctttcttagtagcttcatcaaaaagctcaggaaaaaaaataaattttttaggtaaagaacatacagtcgaagatttggaaaaatttgatttttcaaaagtaaagatagctttttttgcagctggaagtactgttgcagagaaatgggctccaatagcagcaaataaaacaattgtgatagataactcaaaattctttagaaaagattcagatattcctttaattgtgccagaggttaattcaaaagagctttcaaaatttaaaaataaaaacattattgctaacgcaaattgctcagttatacctattgttgtagcactaaaacctttacatgatttgtacaatgtaaaaagaatagttgcatcgacctaccaatctgtttctggagtaggaaaagctggaatggatgagcttttatctcaaactaaagaaatcttagaaaataaaaatgttcaatcaaaaaatttcacaaaacaaattgcattcaatgcaattccacacatcgatagctttctagaaaatggtagtactaaagaggagcaaaaaaatcatgatgagataaaaaaaattttagataaaaaaattaatgtcacctctacatgtgtaagaattcctgttttagtatcacattctataagcataaatatagaatttcataaaaaacctaaaattgaagagattaaaaaagttttatcatcatcaccaggatgtatagtcgtcgatgagcacaaagatggaggatatataactcctgttgaagctgaaaataaatttgagacttttatatctagaatacgtcaggacttttctcaagagaactctataaatatgtggatagtatcagataatttattaaaaggtgctgccttaaatgctgttgaaatagcagaaactttaatagaaaataatttttatggaaaataaa

SEQ ID NO: 214636 - DNA, 1012 bp, Unknown
  Bacterial polypeptide expressing nucleotide sequence isolated from the Sargasso Sea
catgaatatcgcaatagtaggtgcaacgggaaatgttggaagaaaaataatagaagttttggaaaataaaaactttccaattactgaattatacttaattgcttcatcaaaaagctcaggacaaaaaattaattttaagggtaaagaacataccattatagatttagaaaaatttgaattttcaaaagtaaaaattgctttttttgctgcaggaagcgttgtggcagaaaaatgggctcataaagcagctgaaaaaacaatagtaattgataactcaaaattttttagaaaagatcccgatattcctttaatagtacctgaagtgaattcaaaagagctaactcatgttaaaaataaaaatataattgcaaatgcaaattgttcggtgataccacttgttgttgctctaaaacctttgcatgatttatatacagtaaaaagaattgttgtatcaacttatcaatctgtttccggagcaggtaaagcgccaatggatgagcttttgtctcagactcaagattattttagtaataaaaatttacaatctaaacatttcacaaaacaaatagcttttaatattattccacatattgatagctttttagagaatggttacaccaaagaagaacaaaaaacttctgatgaagttaaaaaaattctagataaaaaaattaaaattacttcaacttgtgtaagaatacctgttcttgtttcacactctataagtgtcaatgttgagtttgataaaaaatgtaatttagaagaaataaaaaatgttttatcctcatctcctggatgcaaagttgttgatgaacctaaagatggaggatatatgacacctgttgaggcagcaaacaaatatgaaacatttatttcaagaattagaaaagatgattctcaatctaatactataaatttgtggattgtatctgataatttactgaagggtgccgcattaaatgcagttgaaattgctgaaagcttaattaaaaaaaatttacatgaaagataa

SEQ ID NO: 214637 - DNA, 1012 bp, Unknown
  Bacterial polypeptide expressing nucleotide sequence isolated from the Sargasso Sea
atgaatatagcaattgttggatcgactggaaacgttggcagaaaattaattgaggtattagaaaaaaaaaattttcccgtaactaaggcttttttggttgcatcttcaaaaagttctggaaaaaaaataaattttttaggaaaagaacatactgttgaaaatttagaaaaatttgatttttctaaagtaaaaatcgctttttttgcaactggtagttctgttgcggaaagatgggcacctattgcagctaaaaaaacaattgttattgataattcaaagttttttaggaaagatcctgatattcctttaattgttcctgaggttaactcagaaaaattatctaatttcaaaaataaaaatattatagctaatgcaaattgctctgttatcccgatagttgttgctcttaaacctttgcacgatttatacgacataaaaagaatagtagcttccacatatcaatccgtatctggagctggtaaggcaggaatggatgaattgatatctcaaaccaaagagattttagaaaataaaaaagttgtttcaaaaaattttactaaacaaatcgcatttaatgcaattcctcatattgatagttttcttgagaacggaagcacaaaagaagagcaaaaaaatcatgatgaaataaaaaaaattatggatagcaaaattaaagttacctctacttgtgtaagaatacctgtgcttgtgtcgcattctatcagcgtgaatgttgagtttaataagcaatataatttagatgaaattaaaaaagtgctgtcgtccgctcctggatgtaaggtgattgatgaacaaaaagatggaggatatataacccctgttgatgcagaaaataaatttgaaacttttatatctagaatacgccaagacacatcgcaagataatactataaatatgtggatagtttcagataatttattaaaaggtgctgctttaaacgcagttgaaatcgcagagactttaattaaaaatgatttttatggaaaataaa

SEQ ID NO: 214638 - DNA, 502 bp, Unknown
  Bacterial polypeptide expressing nucleotide sequence isolated from the Sargasso Sea
actcttagaacagacccatagctatcttaatcagcgtgaaatttctaaatcagtatacccttctcaaatagcatttaatgttattccgtttgttgatagttttctagataatggttatacaaaagaggagatgaaaatggtatgggaaacacaaaaaattttggataaggatatcagagttgatgctactgcggttagagtgcctgtgcttattggacattctgaatctatatctatcgaaaccgaaagagtaattgatattgatatggtcgttaatgattataaaacaagtgataagattgaacttatagatgactcagctaattttgaatttccaacagcggtagaacatggtaatggtactgataaagttttcgtaggaaggataaggaaatcacaaatcaatgataaaattttgaatatttgggtagttgctgataatgttagaaaaggagcagctttgaatagtgttcaaattgctgaacatctaattaaggggtag

SEQ ID NO: 214639 - DNA, 499 bp, Unknown
  Bacterial polypeptide expressing nucleotide sequence isolated from the Sargasso Sea
atgtctaatattaagttagcaatagtaggtgccacgggcgcggttggaagagaatttttgagaatccttgcagaacagcagtttcccgccgaaaatctttttttggttgcttcatctaaatctgcaggcaaagcaattaaatattttgaaaaaattatagaaattgaagatcttcaacttttcgattttagtaaagctagcgttgcatttttttcagccggatcatcagttgctgaatctcacgcatcccaagctatcgagaaaggttgcactgtcatagataattcatctttttttagaaacagagacgatcttgaacttattgttcctgaagtaaatggatctagattagaggatcttaatttgcctgcaataattgctaatccaaattgttccactgcccaaatggtggttgctctaaagccttttcacgatctatttaagataagaagagtagacgttgctacttatcaatcagtatcaggaacgggacaatcag

SEQ ID NO: 214640 - DNA, 1018 bp, Unknown
  Bacterial polypeptide expressing nucleotide sequence isolated from the Sargasso Sea
aatgaatagtttaataaatttagcattaataggagcatcaggagttgttggtaaaaaaattatttctttacttgaaaataaaaatattgaaataaataatttttatccacttggatctacttccgtaggtgatgaaatagtgttcaataataatcaatataaaattgaagatttgaccaattttgattattcaaaggtaaatttggctatcttttcagctgggtctaaggttgcagaagaacatgcaaaagattttgttaatgcaggagtttatgtaatagatttgtcttctaaatttagatacgaaaagcatatacctcttataattcctgagataaacggaaatgagatcaatctcctagatacaccatccttaatatctaatcctaattgctcaacatctcagcttttaatggcaattgctcctatccataaagaatatgaaatagatgttttaaatattgctacatatcaagcagtatccggaactggaaaacaagcagttcaagaattaaaaaatcagattacagatgagtctattaatcaagaagtctatccaaaaaaaatagcatttaacgtaatccctcaatgcgatatttttttagagaatgattttactaaagaagaaatgaaacttgtctgggagacaaaaaaaatacttgataacaacattgaagtgcaagcaacgtgcgtaagagttcctgttattaatggtcattctgaggcagtctttttaagaacaaagaaagaaacttctcgagagcaaataattgagttattaaacaattctagtggaattaaggtaatagataatccaaagtcccaagagtatccaactccacttgagaacgcaaatgatactgaagaggtatttgtaggaaggataaggtctcaaactattaacaatgaaaactggatctcaatgtggatagtagctgacaatgtttatggaaagggagctgcgttaaataccgttcaaattcttgaaagtttagtagagaacaaaaagttgtgttga

SEQ ID NO: 214641 - DNA, 681 bp, Unknown
  Bacterial polypeptide expressing nucleotide sequence isolated from the Sargasso Sea
aatgtttaaaactaaaaataaatataatatagctattgttggagcaacaggaatagtcggtgaatctcttttagatatattgtattctagaaaattccctgccgagaaaattgtaccattagctagcaaaaaatctgcaggtacagagataaaatttggtgataaattaatagaagttattgcattagatgattacgatttcagagatattgatattgcttttttttctgcgggtagtaatatttctaaaatccatgctcccatagccgcaaagtcaggcgctatagttattgataacacatcagaatttcgttatgtagataatattccattagtaataccagaggttaactctagtgaaattgagaattataagaaatgcaatataattgctaacccaaattgctcaactattcaaatgctggttgcgcttaaaccagtacatgatagatataaaattttaaatattaatgtgtcaacatatcaagcagtttctggctctggtaaatcaggtgtagatgagcttttacaacaatcgcataactatctcaatcagcaacaaattaaaccatcagtctatccaaaacaaattgggttcaacgcgataccttttgttgatagcttttgtgaaaacggaatatacaaaagaggaaatgaagatggtgtgggaaactcaaaaaa

SEQ ID NO: 214642 - DNA, 547 bp, Unknown
  Bacterial polypeptide expressing nucleotide sequence isolated from the Sargasso Sea
tatgagcttaaatatcgcaatagttggagcaactggaaatgtcggtcgagagatgctcaatatactttcagataaaaagtatgattcatctaacatttttcctattgcttcaagtaaaagtgagggaacgaaagttgaatttggagataaggagctcacagttgaagccattgacaaatttgatccagcaaaagttgatctggcactattttcagctggagcaagcgtatcaaaagaatgggcacccatgtttgctgaaaaaaattgcattgttattgataattcaagtcaattcagaatggataaagatgtccccttaattgttcctgaagtaaatcccgatgctataaaaaattataaaataaaaaatattattgctaatcctaattgttcaacaatacaactagtcgtagcattaaaaccattgcatgaaatttctaaaataaaaaaagtgattgtttcaacgtatcaatctgtttcaggtgcaggtaaagctggtatggatgaattatttgaccaaacaaaacacatgttctcagagaaataa

SEQ ID NO: 214643 - DNA, 928 bp, Unknown
  Bacterial polypeptide expressing nucleotide sequence isolated from the Sargasso Sea
atgtcgcaagcgtttgacgtagcggtacttggcgccacaggtctagtgggccaaaccatgattgaactattagaagagcgagactttccggtaaaccgtttgtatccgcttgccagtaaacgttcagcaggtagtaccgtgtcgtttaaaggcgaagacattgaagtattagatgctgatgatttcgactggtcattagtgcaatttggctttttctcagctggaggcagcatttctgcaaaatttgctccgatagcggcagaggaaggctgtattgttatcgacaatacttcagagtttcgttacgagccagatatcccacttgtggtgccagaagttaacgcccatgcactggcagaatttcgcaatagaaacattattgcgaacccaaattgctcaaccattcaaatgttggttgcacttaaacctattcaagacgctgttggtattgaccgtattaacgtgtgcacataccagtcagtttctggtgcaggtaaagaagccatggaagagctggctaaacaaaccgcaggtttgctaaacgcacgtgaagtaaagccagaatcgtttagtcgccaaattgcctttaacgttatccctcaaatcgacgtattccaagacaacgactacaccaaagaagaaatgaaaatgctgtgggaaacccaaaaaatcatgggcgatcaaagtattttggtaaacgcgacagctgtgcgcgtgccggttttctatggccatgctgaggccattcaccttgaaacgcgttcgccaatagacgcgcagcatgttaaagagcttttagccgatgcgccaggcgtaacagtttacgacggcaatgagcaattcccaacgcaagtaagcagtgctagcggcaacgacattgtgcatgtagggcgtatcaggaatgatattactcacccttgtggtttaa

SEQ ID NO: 214644 - DNA, 853 bp, Unknown
  Bacterial polypeptide expressing nucleotide sequence isolated from the Sargasso Sea
gagcatgttattgaaaatttagagacatatgatttttcaaaagcagatataactttttttgcagctggaggaaaaattgctgaaaaatacgcagaaaaagctgccaagcacacaattgtaattgataattcaagtttttttaggatggatccagatgttccattgatcgtcccacaagtgaatgcaactgaaattaaaaatatgaaaaaaaatattattgccaatccaaattgttctacagcacaacttgttatagcacttaaaccactacataatttattcaaaatcaaaagagttgtagtttcgacttaccaatctgtttcaggtggtggcaaaagtccaatggacgaattaattgatcaaactaaacaatatttagatggaaaaaaaatagagtcaaaaaattttactaaacaaatcgcttttaatgttattccacatatcgatgtttttgccgatgatggatatacaaaagaagaattaaaaatgacaaatgaaacaaaaaaaatattagatgattcaatagaacttacagctacatgtgtaagaattcctgttttggtatctcattcggagtctgtaaatatagaatttgaaaaaccatatactttagaaaaagtgagagatgttctgagtaaagcagatggttgtgaggttattgataaaagagaaaatggaggttatagcacaccatttgaagcagctgggagtgatgagacatatatatctagaattagagaagacaaaactaaaaaaaattcattaaatttgtggattgtatcagataacctacttagaggtgcagcacttaattctgttgaaattgctgaaacaattattaactcaaaataaa

SEQ ID NO: 214645 - DNA, 328 bp, Unknown
  Bacterial polypeptide expressing nucleotide sequence isolated from the Sargasso Sea
atctgctacttgcgttagagttccagtaatggtctcccattcagaatctattaatgtagaattcgaaaagccatttgatattaaaaatattaaagaaattttaaataaatcaaatggttgtaaagttattgatgaaagaaaagatggaggttacattactcccttagaagctgaaaacagttatttaacttttatttctagaatacgtaaagatagttctaacaataaagccataaacatgtgggtcgtttctgacaatttactaaaaggggctgctttgaatactgtacaaatagccgaacaattaataaaaaaatatgtcaaataa

SEQ ID NO: 214646 - DNA, 665 bp, Unknown
  Bacterial polypeptide expressing nucleotide sequence isolated from the Sargasso Sea
aatgcgatataatgttgctattgttggagctactggtgctgttggaagagagatgctccaaacattgtcagaacgaaatttcccggtagaaaatgtttatgctctagcttcaaagtcttctgttggaaaagaggtttcctttggagaaaataaagttttaaaaattttaaacctcgaagaatttgatttttcgaaagctaatatagctcttttttctgctggttctgatactgcaaaaaaatatgctcctattgctagtaaaaaaggttgtatatcgattgataattcttcatgttacagaatggatgaacaggtacctttaattgtacctgaagtaaatccagaacatatttataattttaaaaagaaaaatataatagctaatccaaattgttccactatacaaatggtggttgctttagcaccgttacacaaaaaatataagataaaaaaagtttatgtttcaacttatcaagctgtttcaggtgcagggaaattagctatggatgagttatttaatcaaacaaaaggcgtttatgttaacgattctgctttacctgaacaatttacaaaaaaaattgcattcaatgtaataccacacatagacaattttttagatgatggatttaccaaagaagaatggaaaatgaatgtggaaacaaaaa

SEQ ID NO: 214647 - DNA, 613 bp, Unknown
  Bacterial polypeptide expressing nucleotide sequence isolated from the Sargasso Sea
ttattgatggcattaaatcctattcataaagaactaaaagtagacattttaaatgtttcgacctatcaagcagtttctggaacaggaaaacaagcagtacaagaattaaaaaatcaaattaaagatagttctataaaccaagacgtttatccaaaaaagatagcatttaatgtaattcctcaatgtgacatcttcctagaaaataattttacaaaggaagaaatgaaacttgtctgggaaacacaaaaaatacttgataaaaatattgaagttcaggcaacttgcgtaagagttcctgtaattaatggtcattctgaagctgtatttttaagaacaatcaaagaaactactcgagaaaaggtaattgaattattaaataattcaagtggaattaaagtaatagataatcctgagtcattaaaatatccaactccgcttgagaatgcaaacgataccgaagatgtttttgttgggaggataagatcacaaattataaatagtgaaaactggacttcaatgtggatagttgctgacaatgtttatggaaaaggtgctgcattaaatactgttcaaatccttgaaggtctagtagagaataataagttatgttgag

SEQ ID NO: 214648 - DNA, 790 bp, Unknown
  Bacterial polypeptide expressing nucleotide sequence isolated from the Sargasso Sea
tatgggtattaaagttgcagttgtgggcgcaacaggcgctgtgggaagggaaatgctacaaacgctcgaggaacgtagttttccttctgacgaaattatagcattggcctcgagcaaatctatcggcaaggaagtctcttatggggaggatagaagtcttaaagtacaaggtctgaactcttatgatttttctggtgtggatatcgctttattttctgcaggcggcgccatttcaggtgaatttggtcccaaagttgcctctaaaggcgcagttgtgatcgataatagctcaaaatggagaatggagcctgacataccgcttattgttcccgaagtgaacggctcggatatagctgcttatgaaaaacgaaacattatagcaaatccaaattgctctaccgcccagttggtaatggccttaaagccccttcatgacctttacaaaattaaacgagttgttgtctctacttatcaatctgtttctggagcgggaaattcggggatggatgagctgtttaaccagactagagctgtttacgtaaacgatcctgtagaaaatcaagaattcagtaaacagatagcgtttaactgtattcctcacattgatatttttatggacgatggctttactaaagaagaatggaaaatggtcgccgaaacaaaaaaaattcttgatccaaatatagaagttgttgcgcactgtgtaagggtgcctgtttttattgggcatgcagaggctgtattcatagaaactacaaggcaaatagatgaagccgaagcgcgcgaagct

SEQ ID NO: 214649 - DNA, 1012 bp, Unknown
  Bacterial polypeptide expressing nucleotide sequence isolated from the Sargasso Sea
catgaatatagcaattgttggggcaacaggaaatgttggaaggaaaattattgaagttttggaaaaaaagaactttccaatttctgaaatatatttaattgcttcgtcaaaaagttcaggaaaaaaaattagttttagaggaaaagaacttatagttattgatttagaaaaatttgatttttcaaaagtaaaaattgctttctttgctgcgggaagcagtattgctgaaaaatgggcttataaagcagcagaaaaaacaatagtaattgataattcaaaattttttagaaaagatcctgatattccattggtggttccggaagtcaattcaaaagaattagttcatgtaaaaaataaaaatataatagcaaatgcaaattgttcagtcataccgcttgtagttgctttaaaacctttacatgatttatacattgttaaaagaattgttgtatcaacttaccaatctgtttctggagcaggcaaagctcctatggatgaactattaacccagacaaaggaatattttgataaaaaaaatttacagtctaaacattttacaaaacaaatagctttcaatgttattcctcatatcgatagttttttagaaaatggtaacactaaagaggaacaaaaaacaattgatgaagttaaaaaaattttagataaaaaaattaaaattacatctacatgtgttagaattcctgttcttgtatcacactgtataagtgccaatgttgaatttgataaaaaatataatttagaagagataaaaaatgttttaagtacatcacctggttgcaaggttgttgatgaacataaagatggaggatatataacacctgtagaagcagaaaataaatatgaaacgtttatttcaagaattagaaaagacgattctcaatctaattctataaatttatgggtagcttctgacaatttactgaaaggagcagcattaaatgcagttgaaattgctgaaagtttaataaaaaaaaatttacatgaaagataa

SEQ ID NO: 214650 - DNA, 775 bp, Unknown
  Bacterial polypeptide expressing nucleotide sequence isolated from the Sargasso Sea
gctgaaaaagcagccaagcattgtttagtaattgataattctagtttttttagaatggatccggacgttcctttgatagtcccacaagtaaattcagatgctttgaacaatattaaaaaaaatattattgcaaatcctaattgttcaacagcgcaattagtaatcgcattaaaaccattacatgatttatttgtaattaaaagaatagttgtttcaacataccaatctgtttctggtgctggtaaagcatcaatggatgaattgattaaacaaactaaattagctttaggtggtaaagatattaaatctgaaaattttacaaaaccaattgcttttaacgcaattccacatattgatgttttttcagaagatggctacacgaaagaagaattaaaaatgagaaacgagactaaaaaaatcttagatgacaaaatcgatctaacagcaacatgtgttaggttaccaatatctgtttctcactcagagtcggtaaatattcaatttgagaaaactttttcattagaacaaataaaaaaagcattgaacagttttgatggttgcaaagtaattgatgaaagaattgatggaggttactcgacaccattagaggcagaaggaaaagatgaaacttttatttcaaggattagagaggataaaacaattaaaaatggattaaatttgtggattgtgtctgacaatcttttaagaggcgctgctttgaatgcagttgaaatagctgaaacattaattaaaaataatttttatggaaaataaa

SEQ ID NO: 214651 - DNA, 754 bp, Unknown
  Bacterial polypeptide expressing nucleotide sequence isolated from the Sargasso Sea
ttgtttagtaattgataattctagttttttcagaatggatcctgatgttcctttaatagtcccgcaggtaaattcagatgctttaaacaatgttaaaaaaaatattattgcaaatcctaattgttcaacagcacaattagtaatcgcattaaagccgttacatgatttatttgtaattaaaagaatagttgtttcaacataccaatctgtttctggtgctggtaaagcatctatggatgaactgatcaaacaaactaaattagctttagatggtaaagatattaaatctgaaaattttacaaaaccaattgcttttaatgctattccacatatcgatgttttttcagaagatggctacacgaaagaagagttaaaaatgagaaacgagactaaaaaaatcttagatgacaaaatcgatctaacagcaacatgtgttagattaccaatatctgtttctcactcagaatcggtaaatattcaatttgagaaaagtttttcgttagaacaaataaaaaaagcattgaatagttttgacggttgcaaagtaattgatgaaagaattgatggaggttactcgacaccattagaggcagaaggaaaagatgaaacttttatttcaaggattagagaagataaaacaataaaaaatggattaaatttgtggattgtatctgataatcttttaagaggcgctgcattgaatgcagttgaaatagctgaaacattaattaaaaataatttttatggaaaataa

SEQ ID NO: 214652 - DNA, 997 bp, Unknown
  Bacterial polypeptide expressing nucleotide sequence isolated from the Sargasso Sea
atgaacatagctatagtaggtgcaacaggaaatgttgggagaaaaactcttgaggtatttgataaaaaaaacttcaagtttgataatctatatttagttgcctcagaaaaaagtgcaggaaaaaaaatctcttttagagataaagagtatgttattgaaaatttagagacatatgatttttcaaaagcagatataactttttttgcagcaggaggaaaaattgctgaaaaatttgcagaaaaggctgccaagcacacaattgtaatagataattcaagtttttttaggatggatcctgatgttccattgatcgttccacaagtgaatgcagctgaaattaaaaatatgaaaaaaaatattattgcaaatccaaactgctctacagcacaacttgttattgcacttaaacctctacatgatttatttaaaattaaaagagttgtagtatcaacttaccaatcagtttcaggtggtggtaaagatccaatggatgaattagttgaacaaactaaaaaatatttagaaggtaaaaaaattgagtcaaaaaattttactaaacaaatagcatttaatataattccgcacattgatgtatttgctgatgatggatacaccaaagaagaattaaaaatgacaaatgaaactaaaaagattttagatgaaaaaattgaacttacagcaacatgtgtaagaattcctgtattagtttctcactctgaggctgtaaatatagaatttgaaaagccatttaatttagaaaaagttagggaagctctaagtaatgctgaaggatgtgaagttatagataaaagagaaaatggaggttatagcacgccactagaagccacaggaaaagacgagacttatatttcaagaattagagaagataaaacaaaagagaattctattaatttatggatagtatcagacaatttattaagaggtgcagctctaaattcagttgaaattgctgaaacaattattaattcaaaataaa

SEQ ID NO: 214653 - DNA, 1012 bp, Unknown
  Bacterial polypeptide expressing nucleotide sequence isolated from the Sargasso Sea
atgaatattgcaattgtaggagccacaggaaacgtaggcaggaaacttttagaggtattaaacaaaaaaaaatttccaattacagaaatatttttagttgcatctccaaaaagtgtgggtaaaaaaataaattttagagataaagaattaattgttgaagatttaaataattttgatttttcaaaagtgaaaattgcattttttgctgcaggtagtgccattgcagaaaaatgggctccaattgcagcagaaaaaactattgtaattgataattcaaaattttttagaaaagatccagaaatacctttaattgttcctgaagttaattcaaaagaattaattcacgtaaaaaataaaaatattatctcaaatgcaaattgttcagttattccaattgtagttgctttaaaacctcttcatgatttatataatataaaaagaattgttgcatcaacttatcaatctgtttctggcgctggaaaagaagcaatggatgagctgctctcacaaaccaaagactattttgataataaagaaatgatctcaaaaaattttacaaagcaaatagcttttaatgcaattccacatatagatagttttttagataacggcacgactaaagaggagcaaaaaaatcatgatgaagtaaaaaaaattttagataaaaaaattaatattacctctacttgtgtaagaatcccagttttagtatctcattcgataagtataaatgtcgagtttaataaaaaatataatttagatgaaatcagaaatgtactttcatcatccccaggatgtaaagttgtagatgaaaaaaaagatggtggttatataactccagttgaggctgagaataaatatgaaacttttatatcaagaataagagaagataactcacaatcaaatacaataaatatgtggatagtatcagacaatttactcaaaggtgcagcattgaatgcagtagagatagctgaaagtttaatcaaagaaaacctttatgaaaaatagc

SEQ ID NO: 214654 - DNA, 991 bp, Unknown
  Bacterial polypeptide expressing nucleotide sequence isolated from the Sargasso Sea
atgaaagtagctgtaataggatcaactggggttgttggaaatgtcatgctaagtcttcttgaaagcagaaatttcccattaagtgatttaatccctgtcgcttctgaaaagtcaatcggaaaaaaaattctctttaacaacgaacacttcgatatagtttccattgaagatgctgtaaaaatgaaaccagatattgcattattttctgctggtggatcaacatctttagaatgggctccaaaatttgctgaagttggaacaagagttattgataattcttctgcctggaggatggattcatctaaaaaattagttgttagtgaagtaaattctgaagttctaacaaaggatgattacattattgctaatccaaattgttcaacaatgcagttaatggtagttttagctcctttacataaagtatataaaatcaaaaggttggttatatcaacatatcaatcagtatctggaacaggaaaaaatgctattgatcagctaaatggagaaagaagagattcagatccagaaatgatatatccttataatattgatcaaaaccttcttccacattgtgatgtttttgaggaaggtggttatacaaaagaagaaaacaaattgataaatgagactagaaaaattttaaatgatgattcaattcaaattacttcaactgctgttagagttcctattgaaatttgtcatggtgaatctgtaaatattgaatttgaaaatcaatttgaattggatcaagtatttgaaattttaaaaaagtctcctggtcttattgtagaggatgatcctgcaaacaatatatatcctatgccaataaactctgcaaataaggacgaggtttttgttggtagaattagaagagactttagtattgaaagcggcttaaatatctgggtcgttgcagataaccttagaaaaggggctgctacaaatacaattcaaatagctgagaaattaattgaaatgaagattatatagc

SEQ ID NO: 214655 - DNA, 1012 bp, Unknown
  Bacterial polypeptide expressing nucleotide sequence isolated from the Sargasso Sea
atgaatattgctattgtaggagctacgggaaacgttggaagaaaattaattgaggtattggaaaaaaaaaattttccaatatctgagctttttttagtcgcatcatctaaaagcgaaggaaaaaaaattaattattctggaaaggaacatacagttattgctcttgaaaaatttgacttctcaaaagttaagattgctttttttgcagcaggaagtttaatagcagaaaaatgggcacatatcgccgctgaaaaaactatagtaattgataattctaagttttttagaaaagatccggaaatacctttgatcgtaccagaggtaaactctaaagaattagttcacgttaaaaataaaaatataattgcaaatgctaattgttctgtaattcctttggttgttgttctcaaacctttacatgatttatataatgtaaaaagaatagtggtatcaacttatcagtcagtatctggcgcgggtaaagatgccatggatgaattagcaagtcaaactcaagaattttttcaaaataaagaattaaagtcaaaatattttacaaaacaaattgcatttaatgcaattccacacattgatagttttttagaagatggctacacaaaagaagagcaaaaaactaatgatgaggtaaagaaaattttagataataaaataaaaattacttctacatgtgttagaataccagtaatggtatcacattcattaagtgtaaatgttgaatttaataaaaaatataatttaaatgaaatcaaaaatgttttatcaacttctccaggttgcaaacttgtagatgaacataaagatggtggctatataactcctgtagatgctgaaaataaatttgaaacatttatttcgagaattagagaagataaatcccaacccaatacaataaatctttgggttgtttctgataacttactaaaaggtgcggccttgaatgctgtagaaattgcagagtcattgcttaaaaatgatttttatggaaaataaa

SEQ ID NO: 214656 - DNA, 611 bp, Unknown
  Bacterial polypeptide expressing nucleotide sequence isolated from the Sargasso Sea
aatggtaatgcctttaaaacctttacatgaaatatttaaaattaaaagaatagttgtttcaacttatcaatcggtttctggtgctggcaaaggacccatggatgaattgatagatcaaacaagactttttttggataataaaaaaattaattcaaaaaattttacaaaacaaatcgcgtttaatgcaatcccacatatcgatcttttctcaaatgatggctatacaaaagaagaaatgaaaatgattaatgagacaaaaaaaatattagataaaaatattaatgtaacagctacctgtgttagagttccagtaatggtctcacatgcagagtcagtaaacgtagagtttgaaaaagaatttactttggagaaagtaattaacttgttgattaatgcagagggttgtaaagttataaatgaacaagtagacgggggatatgcaactcagattgaagccgaaggtaaaaatgaaacatttatttctagaataagacaagataatacaaataaaaaagctgtaaatctttggatagtttcagataatttacttagaggtgcggcccttaatgccgtagaaatagcagaggcatatattaaaacaaagcaatgaa

SEQ ID NO: 214657 - DNA, 523 bp, Unknown
  Bacterial polypeptide expressing nucleotide sequence isolated from the Sargasso Sea
catgaatattgcaattgtaggagcaacaggaaatgttggtaggaaaacattggaaattttggacagaaaagaattttctatagataatttatatttagttgcgtcctcaaaaagtgttggaaaaaaaattagttttagaggtaaggaaattgatgtccttgatttagaaaattttgatttctcaaaagttaatattgctttttttgcagctggtggaaaaatttctgaaaaatttgctgaaagagcagccaaaaattgcttggtaattgataactctagtttttttagaatggatccagaagtacctttgatagttccacaagtaaattcagatgatctaaaaaaaattaaaaaaaatattattgcaaatccgaattgctcaacagctcaattggtaattgctcttaaacctttgcacgatctatttataattaaaagaattgttgtctctacttatcaatcagtttctggaggtggaaaagctcccatggatgagctcattgagcaaactaaactagtttta

SEQ ID NO: 214658 - DNA, 811 bp, Unknown
  Bacterial polypeptide expressing nucleotide sequence isolated from the Sargasso Sea
atgaatatagcgatcgttggtgccactggtaatgtgggtagaaaaatacttgaagttcttgaaaagaaagagctttcaattgataatttatacttgttagcatcttctagaagtgcgggttcaaagataaattttcttggtgatgaacatgaagttttaaatcttgaaacttttgatttttctagagcaaaaataactttttttgcggcgggaggaaaaatttcagaaaaatttgctgaaaaagctgccaaacattctttagtaatagataattccagtttttatagaatggatccagatgttcctttaattgtacctcaagttaattcggatcatttaaataatataaaaaaaaatattattgcaaacccaaactgttcgactgcacaattagtaattgcgcttaaaccgttacatgacttatttacaattaaaaggatagttgtgtcgacttatcaatcagtttcaggtggtggtaaagcacaaatggatgaacttattgaccagacaaaattaattttagaaaaaaaaaaagttgagtctaaaaactttacaaagcaaatcgcatttaatgcaattccccaaattgatgtttttgcagacgatggttatacaaaagaagagcttaaaatgactaatgagataaaaaaaattttaggcagcaaaatagagttaacagctacctgcgttagacttcctgttttagtttctcattcagagtcagttaatattgaatttgaaaagctttttactttagaaaaagtgagagaggctcttgataactttgaagggttgcagagtagtagatgaa

SEQ ID NO: 214659 - DNA, 1045 bp, Unknown
  Bacterial polypeptide expressing nucleotide sequence isolated from the Sargasso Sea
aatgaatcaaaaatataatatagcagtagcaggagctacaggagcggtaggaactgaaataattcagattttagaacaaagagattttccaattgataatttatatttacttgcatcatcaaaatctaaaggaaaaaaaattgaatttaaagagaaggaaattttagttgaagatcttgcagattttgattttacaaaagcacacataggtttattttccccaggtgggaaaatttctgcagaatatgcacctaaagctgctaaggcaggttgcatagttatagataatacatcgtattttcgaatgcaaaaaaatgtacctctaatagttcctgaagtaaacgctaatgcgcttgatgaattttttcaagatgaaaatagaacaaatattatttcaaatcctaattgctcaacaatacaaatggtggctgccttaaaaccacttcatgaaaaatcaatcatcaacagagttgttgtttcaacttatcaagcagtttcaggtgctggtaaaactgggatggatgaattgtttaaccaaactcaaaatgtttatgcaaatcaagaattaaaaaaagaaaaatttactaaacaaatagcttttaatgcaatccctcacatcggtgcttttttagaaaatggaaatacagaagaagaacaaaaaatgattgatgagacaaaaaaaatcttagacgaaggtattaatgtttctgctacatgtgttagaactgcagtcttcataggtcactctgaatcagtaaatattgaatttgattctccattagatgaaaaggaagcacgcgaaattttatcaaactctgatggtatttctgtcattgatcatagaaaagatgaggggtatgtaactccagttgaaattgctggtgaagataaagtttatgtaagccgaataaggaatgatgactcagttgataacggattaaatctatgggttgtctcagataatcttcgtaagggcgcagctctaaatgcagttcaaattgctgagctagtaatctccaagcatacagaacatatctcaatttaa

SEQ ID NO: 214660 - DNA, 964 bp, Unknown
  Bacterial polypeptide expressing nucleotide sequence isolated from the Sargasso Sea
actttagaagttcttgaaaagaagaaaatttctatcgaaaatctttatttggttgcatcaccaaaaagtgcaggaaaaaaaattaaatttcaaggaaaagaaattgaggtttacaatttagaaaattttgatttttcaaaagtgaagatcgctttttttgcagctggaggaaaaatttctgaaaaatttgcagaaaaagcggcaaagtactgtttggtaattgataactcgagcttttttagaatggacccagatgttcctttggtggtccctcaagttaattcagatgatttaaataatattaaaaaaaatataattgcaaatccaaattgctcaacagcacagttagttattgctttaaaaccactacatgatctttttgtaattaaaagaatagtggtttctacatatcaatcggtttcaggagctggtaaagccccaatggatgaattatttgaacaaactcaactagttttagacggtaaaaatattaaatcccaaaattttacaaagcaaatagctttcaatgctatccctcatattgatgttttttcagaggatggttacacaaaagaggaattgaagatgaggaatgaaactaaaaaaattttaagtgatggaattgaccttacagcaacatgtgtaagattaccaatatctgtttcccactcagaggcagtcaatctacaatttgaaaaatcattttccttagaaaaagtaagggaggctctaaataattttgagggttgtaaagttatcgatgaaagagttgatggtggatacataactccacttgaagcagaaggaagaaatgaaacatttatatcaagaattagaaaagacaaaaccatagagaatggattaaatttatgggttgtttcagataaccttttaagaggtgcagctttgaatgcagttgaaatagctgaaacattaattaacaataatttttatggaaaataaa

SEQ ID NO: 214661 - DNA, 847 bp, Unknown
  Bacterial polypeptide expressing nucleotide sequence isolated from the Sargasso Sea
atgaatgaaaaatatgatattgctgtagttggtgcaacaggaagtgttggaagagaaatcgttcaaattttagaacaaagagaatttccggttaataatatttattttttggcatcatctaaatctgagggctctaaaattcaatttgattctaaagaaattgtagttgaagatttgtcaaaatttgatttttctaaagtacaattaggcctattttccccaggtagtattgtttctgctgaatatgctccaaaggctgcagctaaaggatgtttagtaatagacaacacttcgtatttcagaatgcaaaaaaatattccattaattattcctgaagttaatccagaagtattagaagatttttttattaatgataatagaattaatattatatcaaatccaaattgttcaactattcaaatgctagttgctttgaaacctttgtacgataaagcaataattaatagaatagttgtatcaacttaccaatcagtatctggtgctggtaaaaatggaatggatgaattatttaatcaaacccaaaatatttatgcaaataaatctatagaaaagaaagaatttacaaagcaaattgctttcaatgcaataccacatattgattcttttgttgagaatggaaacacaaaagaagaagaaaaaatgattaatgaaacaaaaaaaatcttagatagcggtattgaagtttctgcaacgtgtgtacgtgtaccaatttttgttgggcatgccgaatcaataaatatcgaattcgattccccactttctgataaagaagctacagaaacattgaaaaactctaatgcaataaaagttatagattatcgaaaag

SEQ ID NO: 214662 - DNA, 703 bp, Unknown
  Bacterial polypeptide expressing nucleotide sequence isolated from the Sargasso Sea
tatgaccaataataataaatttccttcaatagcaattgttggggcaactggcgcagttggcaaagtttgtttaaatattctagcagaaagaaattatcccgcagagaaaattaaattatttgcatcagaaagatctgctggtaaaagaatctcttacaataaaaatgatcttatagttaatgaagcagataagaattcatttaagggttccaatgtagtatttatatcagctgacagtgaggttagtttatcccttgcgccagcagcagttaacagcggagctatggttatagatgatggctctgcatttaggatgaaaaagaatgtgcctttagttgttccagaggttaatgaagatgatattaattttcatgaaggaattatttctattcctaattgtactactactcctttagtgatggcgcttgataaattaagaaaattatcaaagattaaaagggtgcatgcctctacataccaggcagtttccggtagtggatctcttgccgtttctgaactaagaaatcaaactgaaaatattcttaataacgaagagatttctaaatctgtatatccacatcaaattgctttttctttaattcctcaagttgatgattttttggaagatgggtatacgaaagaagaacataaaatgattaaagaaacaaagaagattctccatgattatgatttaagtatatct

SEQ ID NO: 214663 - DNA, 835 bp, Unknown
  Bacterial polypeptide expressing nucleotide sequence isolated from the Sargasso Sea
catgaatatagcaatagttggagcaacaggaaatgttggtagaaaaactttagaagttcttgaaaaaaaagaactttctatagataatatgtttttagttgcttcatccagaagtaccggaaaaaagattaattttaatggaaaagaacatgaagttcatgatttagaaaattttgatttttcaaaagtaaaaattgctttttttgctgctggaggagaaatttcaaaaaaatttgcagagaaagcagcaaaaaattgtttagttattgataattcaagtcattacagaatggatcccgatgttcctttaatagttccccaagttaactctaaggatttaaagaatataaaaaaaaatattattgccaatccaaattgttcaactgctcagttggtaattgtactaaaacctttacatgatctatttaatatcaaaagaatagttgtttctacatatcaatctgtttcaggtgctggtaaagcacctatggatgaattaattgaacaaactaaattagctttagatagtaaaaaaattaaatcaaaaaactttacaaagcaaatagcttttaatgttattcctcacatcgattcattttcagattatggctatacaaaagaagaacttaaaatgactaatgaaactaaaaaaattctagatgataaaatagacttaacagcaacatgtgtaagattacctgtattaatttctcattcggaatcagtaaatattgaatttgaaaaatcttattctcttgaaaaagtaaaagaggttttagataattttgagggttgtaaggtaattgatgagagagctgatggtggttatgtaact

SEQ ID NO: 214664 - DNA, 1009 bp, Unknown
  Bacterial polypeptide expressing nucleotide sequence isolated from the Sargasso Sea
catgaatatagcaattgtaggagcaactgggaatgttggtagaaaaatattagaagttcttgaaaaaaagggactatctattgataatctttatttgatagcatcaactaaaagtagtggaaaaaaaatttcttttaaaggtaaagaatatcaagtttctgatctagagagttttgatttttcaaaagtaaaaattgcttttttttctgctggaggaaaaatatctgaaaaatttgctgaaaaggctgctaaaaattgttttgttatagacaattcaagtcattacagaatggatcctgaagttcctctcatagtacctcaagtaaattctgaagatctgaataatataaaaaaaaatattatagctaatccaaattgttctacagctcagttggttatagctttaaaaccattgcatgatttgtttacaatcaaaagagtagtagtttcgacttatcaatctgtttcagggggtggtaaagcaccaatggatgaattgattgatcaaactaaaatggttttaaataaccaaaaagtagaacctagaaattttactaaacaaatcgctttcaatatcatccctcacatagatatattttctgaaaatggttatacaaaagaggaacttaagatggtcaatgaaactaaaaaaattttagatgataaaattaatttgactgcaacgtgtgtaagaatacctgttttagtttctcacgcagagtcggtaaacattgaatttgaaaaaacttttactttagaagaggttagaaaagcccttgataaatttgaaggttgcaaagtaatagatgaaagagctgatggaggatattcaactcctcttgaggcagaaggtaaagatgaaacttttatttcgagaattagagaggataaaactcttaaaaatggaatgaatttatggattgtttcagataatcttttaagaggagcggctttaaatgcagtagagattgccgaaactttaattaaaaataacttctatggaaaataa

SEQ ID NO: 214665 - DNA, 498 bp, Unknown
  Bacterial polypeptide expressing nucleotide sequence isolated from the Sargasso Sea
aatgagtatttcagttgctgttgtaggcgctactggtaatgttggtagagaaatacttaacatactttcagatagaaaattcccaatttcaagaattgcagcacttgcaagcagaaaatcagttggatctgaagtaagttttggggatcaatctttaaaagttaaagatttagaaagttttgattttaaaaattgggatttagcactttttgctattggatctgaacctacaaaaaaatattcagctattgctactaaaagtggttgtaccgtaatcgataattcatcattgtttaggtatgattttaaggttccattaatagttcctgaagtaaatcctcaagatatttataattacaaaaataagaatattattgccaatccaaattgttctacagctcaaatggtagtagcattaaaacctttacatgatgtagctaaaattaaaagagttgtagtttcaacgtatcaatctgtatctggtgcgggtaaagcagc

SEQ ID NO: 214666 - DNA, 997 bp, Unknown
  Bacterial polypeptide expressing nucleotide sequence isolated from the Sargasso Sea
atgaaagtagctgtagtaggtgtaacaggtgttgttggaaccgttatgctgagtctattagataaacgaaaatttccaattactcagataatacctgttgcctcagaaaagtctgtagggaatcagatcagatttcaaggtaaaaattatactatagtctccttaaatgatgcagtagctatgaaacctgatattgcacttttctcagccggaggttcaatctcaatggaatgggcacctaaatttgcagacatagggactcgagtagttgaatattcctctgcatggaggatggactcaacaaaaaaactaatagttagcgaggtaaattcagagactttaacagacgatgattatataattgctaatcctaattgctctactatgcaaatgctagttgtcttggctcctcttcacaaaaggttcaatattaaacgtcttgtgatttctacatatcaatctgtttctggtactggtaaaaacgcaattgatcaattatatagtgaaaggaatggctctgactctgaaaaagtttacccatattctatagatcaaaatcttttaccacactgtgatgtatttgaagaaggcggttacactaaagaagaaaataaacttattaacgaaacaaaaaaaatactaaatgataatagtattcaaattacatctactgcagtcagagtaccaatagaaatttgtcatggtgagtctgtaaatattgaatttgaagatgattttaaacttgaggaggtgtttagtgttttaaaaaattctcctggattaattgttcaagatgaaccagaaaaaaacttatatccaatgcctatcaacgcttcaaataaggatgaggttttcgtagggagaataagaagagactttagcataaaaagtgggctaaacctctggattattgctgacaatctgagaaaaggtgctgctacaaatactattcaaatagctgaaaaattaattgagatgggtattgtaaagtcctaaa

SEQ ID NO: 214667 - DNA, 1009 bp, Unknown
  Bacterial polypeptide expressing nucleotide sequence isolated from the Sargasso Sea
atgaatattgcaatagtaggtgcaactggaaatgttggtagaaaaactttagaagttcttgaaaaaaaagaactaccaattgacaatctatatttattagcatcttccaaaagtgttggaacaaaaatttcatttaaaggtgaagatcataaagtttctgatttgaaaaactttgatttttcaaaagtaaaaattacattttttgcagcaggtggaaaaatttcagaggaatttgggggaaaagcagctaaacatagtatagtcatagataattcaagttactatagaatggatcctgatgttcctttgattgtcccacaggttaacgctgatcatttgaataatattaataagaatattatagcaaatccaaattgttcaactgcacaattggtgattgtactaaaacctttgcatgatttattttcaattaaaagaatagttgtttcaacttaccaatcagtttctggaggaggtaaagcacctatggatgaattaattgaacaaaccaaatcagttttagaaggcaaaaaagttaaatctaaaaattttacaaaacaaatagcttttaatgctattcctcatattgatgtattttctgaagatggttatacaaaagaagaaattaaaatgaataatgaaactaaaaaaattttagatgttaaaattgatttaacggcaacttgtgttagattaccaatatccatctctcattctgagtcagttaatgttcaatttgaaaaacctttttctctggataaagttaaagaggctttggataactttgaaggatgtaaagtaattgatgagagaattgatggaggatattcgacaccattagaagctgagggaagagatgaaacatttatatctagaataagagaggataaaacaattaaaaatggattaaatttgtggattgtctcagataatcttttaaggggcgcggccttaaatgctgtcgaaatagctgaaacattgattaaaaatgatttctatgaaaaataag

SEQ ID NO: 214668 - DNA, 1018 bp, Unknown
  Bacterial polypeptide expressing nucleotide sequence isolated from the Sargasso Sea
atgaatagtttaataaatttagcattaataggagcatcaggagttgttggtaaaaaaattatttctttacttgaaaataaaaatattgaaataaataatttttatccacttggatctacttccgtaggtgatgaaatagtgttcaataataatcaatataaaattgaagatttgaccaattttgattattcaaaggtaaatttggctatcttttcagctgggtctaaggttgcagaagaacatgcaaaagattttgttaatgcaggagtttatgtaatagatttgtcttctaaatttagatacgaaaagcatatacctcttataattcctgagataaacggaaatgagatcaatctcctagatacaccatccttaatatctaatcctaattgctcaacatctcagcttttaatggcaattgctcctatccataaagaatatgaaatagatgttttaaatattgctacatatcaagcagtatccggaactggaaaacaagcagttcaagaattaaaaaatcagattacagatgagtctattaatcaagaagtctatccaaaaaaaatagcatttaacgtaatccctcaatgcgatatttttttagagaatgattttactaaagaagaaatgaaacttgtctgggagacaaaaaaaatacttgataacaacattgaagtgcaagcaacgtgcgtaagagttcctgttattaatggtcattctgaggcagtctttttaagaacaaagaaagaaacttctcgagagcaaataattgagttattaaacaattctagtggaattaaggtaatagataatccaaagtcccaagagtatccaactccacttgagaacgcaaatgatactgaagaggtatttgtaggaaggataaggtctcaaactattaacaatgaaaactggatctcaatgtggatagtagctgacaatgtttatggaaagggagctgcgttaaataccgttcaaattcttgaaagtttagtagagaacaaaaagttgtgttgag

SEQ ID NO: 214669 - DNA, 787 bp, Unknown
  Bacterial polypeptide expressing nucleotide sequence isolated from the Sargasso Sea
gaggaaaaaattgctgaaaaatttgcagaaaaggctgccaagcatacaattgtaatagataattcaagtttttttaggatggatcctgatgttccattgatcgttccacaagtgaatgcagcggaaattaaaaatatgaaaaaaaatattattgccaatccaaattgttctacagcacaacttgttatagcgcttaaaccactacataatttatttaaaattaaaagagttgtagtttcaacttaccaatctgtttcaggtggcggcaaaagtccaatggacgaattagttgatcaaactaaacaatatttagatggaaaaaaaatagaatcaaaaaattttactaaacaaatcgcttttaatgttattccacatatcgatgtttttgctgatgatggatatacaaaagaagaactaaaaatgacaaatgaaacaaaaaaaatcttagatgagtcaattgaacttacagctacatgtgtaagaattcctgttttagtatctcattcggagtctgtaaatatagaatttgaaaaaccatatactttagaaaaagtgagagatgttttaagtaaagcagatggttgtgaggttattgataaaagagaaaatggaggttatagcacgccactagaagccacaggaaaagacgagacttatatttcaagaattagagaagacaaaacaaaaaaaaattcattaaatttgtggattgtatcagacaacctattgagaggtgctgcacttaattctgttgaaattgctgaaacagttattaattcaaaataaa

SEQ ID NO: 214670 - DNA, 709 bp, Unknown
  Bacterial polypeptide expressing nucleotide sequence isolated from the Sargasso Sea
ccccgatgttccactaatcgtacccgaggttaatagagaagctattactaattatgaaaaaacaaaaataatagctaatcctaattgttcaactatccaaatggttgttgctttaaaaccccttcatgatttgggtaccataaaaagagtagtggtttcttcatatcaatcaacttctggtgcaggtaaggctgcaatggatgaattgtttgagcaaacaaaaggcatctattctaataattcgatagaaccagaaattttccagacacaaatttcttttaatgtaataccacaaataggtccttttgtttcttcaggttatactgaagaagaagaaaagatgattaatgaaactaagaaaatattggataatgatattaaagtttctgccacatgtgtaagagttcctacttttataggccatgcagaatctgtgaatatagaatttgagaattatatatcatcagaagaggcatcgaaagttttagctgaagcacctggttgtttagtagatttagatgataaagagagttacacaactccaatagattgtgcaggtaatgatcacacctacatttcaaggattagaaatgatgactctgtcgaaaatggtcttaacttatgggttgtttctgataatttaagaaaaggcgctgctttaaataccattcaaatagcagaaatattagaaaaagattatcttaattaa

SEQ ID NO: 214671 - DNA, 646 bp, Unknown
  Bacterial polypeptide expressing nucleotide sequence isolated from the Sargasso Sea
aaaataattgctaatcctaattgcactacaattatttctctaatggccataaaaccattacatgaactatcttccattaagagaattgttgctacaagttttcaatctgtttcaggagcaggaaatgtaggaattaaagagttactttcagaaaccaaaagatttttaaatggaaaaggaaaagctaaaaatagtatttttgaaagaagaattgcttttaatgctatccctaagataggcggcataactagaaatttatactcggaagaggaaatgaaattacataatgaatctagaaaaattctatctgacaataaaattcttattactgcgacaacagtaagagttcctattattagatcgcatagtattagtttaaatgtagaattcaacaaagatgtacctttagcaaaagctagaaaagctttaaatcgctttcctgggataaaaaatataaatattaatgattcaatggaatatcctactcccttagattcgtcaaataaagataattgtttagtaggaagattaagaaaagattactcagttaaacacggattatcattatgggtagttggtgatcaaataaggaaaggggcagcattaaatgctgtgcaaatcgcagaatgtttacagaaaaagtaat

SEQ ID NO: 214672 - DNA, 700 bp, Unknown
  Bacterial polypeptide expressing nucleotide sequence isolated from the Sargasso Sea
ggataataacgttcctttaattgttccagaagtaaatccagaagctttaaaatctcatgaaaatataatttcaaatcccaactgctccacaatacagttagttttagttttaaaacctttacatgaactttataaaattaaaagagttgttgtttcaacgtatcaagcagtgtctggagcaggaaaagattctatggacgaactatttaatcaaactagggagtatttagataataaaaaaattaagtctaaaaactttacaaaacaaattgcttttaatctaattccacatatcgatacgtttgttgaagacggatatactaaagaggaatggaaaatggaaaatgaaacaaaaaaaatattggataaaggaattgatttaacagctacttgtgtaagagtgccagtaaaaacttctcattcagaatcggtaaatatcgagtttgagaaagactacgatttaaaaaaaattaaagagacactatctaaatcaccaggatgcaaagtaatagatgagcataaagacgctggatacataactccttttgaagcagagggagataattttacttacatttcaagaattagaaaggataattcaaataaaaaagctataaatttatgggtagtttctgataatctacttaaaggagcggctttaaatacagttcaaattttagaaacattgattaaaaagtaa

SEQ ID NO: 214673 - DNA, 583 bp, Unknown
  Bacterial polypeptide expressing nucleotide sequence isolated from the Sargasso Sea
tcatgataagtataaaattagaagggtagttgtctccacttatcaagcagtttcaggagcgggaaaagcttctgtagatgaattattcagtcagacaaaagactacttagataataaaaaaattaaatctgaaaattttacaaaacaaatagcatttaatttgatccctcatatagattcttttgttgaagatggttatacaaaagaggaatggaaaatggagaatgaaactaaaaaaattttagataaaaaaataggtattacagcaacttgtgtaagggttccaataaaaacttctcattctgagtcagtaaatattgagtttgaaaatgaatatgatttagaagcagttagaaaaatattaacaaatgccccaggatgtaaagttattgatgagcataaagatggcggatacgtcaccccagtagaagctgagggagattatatgacctttgtatctagaattagaaaagatcattctaataaaaaagctttaaatatttgggtggtttcagacaatttattaaaaggagcggctttaaacactgttcagatagctgagtgtttaatgaagaaaaagtaa

SEQ ID NO: 214674 - DNA, 856 bp, Unknown
  Bacterial polypeptide expressing nucleotide sequence isolated from the Sargasso Sea
aaatccaaaattaaaataaataatctttatttagtagcctcaaaaaaaagcgcagggcaaaaattaagatttaataaaaacgagataatagttgaacaattagaaaaatatgatttttcaaaagcagatatcacaattttcgcagctggaagtgaaattgcaaaaaattgggtgccaatagctgcaaaaaatactattgtaatagataactccaaatacttcagaatgcatgatgatgtcccattagttgtcgctgaagtcaatccagatgagttaaaaaaacacaaaaatataatagcaaacccaaattgctctacaattcaacttatgcttccactcaaacctctacatgataaatacaaaatcaaaagagttattgtctcaacatatcaagctgtttcaggtgctgggaaagcctcagtagatgaattatttagtcagactaaagattttttggacgaaaaaaaaataaactcaaaaaattttaccaaacagatggcatttaatcttatacctcatatagatgattttgttgaagatgggtataccaaagaagagtggaagatggagaatgaaaccaaaaaaattttagataataaaataggattgaatgctacctgtgtaagagtacctgtgaaaacatctcactccgagtcagtaaatattgagttcgagcatgaatatgaatttgatacagttagaaatatacttaaaaatgctcctggatgtaaagtagtagatgatcataaagacggtggatacattacgcctttagaagctgagggtgattatttaacttttatctcaagaaatagaaaagatcattcgaacaataaagcattaaatatatgggtag

SEQ ID NO: 214675 - DNA, 643 bp, Unknown
  Bacterial polypeptide expressing nucleotide sequence isolated from the Sargasso Sea
atgggttacaaaattgtagttgtaggagcgacgggaaatgtaggccgcgaaatgttgaccattttatcagagcggcaatttccagttgatgaaatagcagctttggcaagcaggcgatcgctgggtacagaggtaagctttggcgatcaaacgatcatcatcaaggatctagaaacatttgatttcgagggttgggatattgctctctttgctataggctctgacgccacaaaaacttttgctccaaaagctgcagcaaaaggatgtattgttatagataatagctccctctacaggtacgacccaaatgtcccactgattgtgccggaggtgaatgctgaggcactaaacgagtattcaaaaaagaatattattgccaacccaaactgctccacggcacagatggttgtggcattaaagccactccacgatcgagcccggattaaacgtgttgtggtcagcacttatcaatctgtttccggtgctggaaaggaaggtatggacgaactctgggatcaaacaaaatccatctacaaccctgtaaccgatgtacctcctaccaaatttacaaagcaaatcgcatttaaaattatccctcatatcgacaaattcttggatgatggcagtacaaaagaagaatgaa

SEQ ID NO: 214676 - DNA, 807 bp, Unknown
  Bacterial polypeptide expressing nucleotide sequence isolated from the Sargasso Sea
attgagattttagaaaagtctaaaattaaaatttcaaaactatttcttattgcttctcctagaagcgaaggaaaaaaaatgaaattcaaagatagtgaaataacaatccaaagtattgaaaaatatgatttttcaaatgctccaattactttttttgctgcagggagtaaaatagctgaacaatgggtacctaaagcaagtaaaaaaacagttgtaatagataattcaaaattttttagaatggacaatgatgttcctttaatagtccccgaagttaacccggatcaattggagatgtataaaaagaaaaatataatcgccaatcctaattgttctactatacagatggttgtagctttaaaaccattacacgatcgttttaatattaaaagagtcgtggtctcaacttatcaatctgtatcaggggcaggcaaagctccgatggatgaattattaagtcaatcaaaggattatttagaaggaaaaaaaataaactctaaaaattttacaaaaccaatagcttttaatttgataccacatattgatgaatttgttgacgaaggttatacaaaagaagagtggaaaatgataaatgaaactcaaaagattttagatccaaaaattaaaataacagctacctgcgttagagtacctgtacttgtctcccattcagagtcaatcaatattgaatttgaaaaaccatttgatgttaaagaagttcaaaatattttagaaaaggctaacgggtgtaaggttttagatgaaagaaaagacggaggatatataacacctttagaagcagaaaat

SEQ ID NO: 214677 - DNA, 610 bp, Unknown
  Bacterial polypeptide expressing nucleotide sequence isolated from the Sargasso Sea
gcaaatggttcttcctttaaaccattgcatgatgagtataagatcaaaagagttattgtctcgacttaccaagcagtttctggtgccggtaaagatcctatggatgagctttttgatcaatcaagagattatttagatggaaaaaaaattaagttaataaattttactaaacaaattgcttttaacttaattccacatatcgattcctttagtcaagatggatatactaaagaagaattaaaaatgactaatgaaacaaaaaaaatcttggataatgagatcgatgtttctgcgacatgtgtaagagttccagttagaactggtcattcagagtccataaatatagagttcgataatctttatgatttcgagaatataataaaaattttaaaaaacgccccaggctgtaaagttattgatgagcgtagtgatggagggtatattactcccctagaggctgaggggagttacacgacctatatttcaagaattagaaaagataattcaaatattaaagcgattaatttatgggtagtatcagataacttattaaaaggagcggcgttaaatactgtgcaaattgctgagtgtttaatgaaaaaattataac

SEQ ID NO: 214678 - DNA, 808 bp, Unknown
  Bacterial polypeptide expressing nucleotide sequence isolated from the Sargasso Sea
tatgaattttgcaattattggtgcctcaggaaatgttggaagaaaaacaatagaaattttagagaaatctaaaataactattgataatctttttttagttgcatcttcaaaaagcgcaggaaaaaagattaattttaaaaataaagaaattgaaatcgaagatttaggaaattataatttttcaaaagctcagattactttttttgctgcaggaagtaaggtagctaaagaatgggtccctaaagcagcaaaagacactattgttatagataactcaagttattttcggatgcaaaaagatgttcctcttgttgtgccagaagtaaattcagaagcacttaataagcataagaacataatagcaaatccgaattgttcaactatgcaaatggttcttcctttaaagccattgcatgatgagtataaaatcaaacgagttatagtttcaacttatcaagcagtttctggcgccggtaaagatcctatggatgaactttttgatcaatcaagagattatttagatggaaaaaaaattaacccaataaattttactaaacaaatcgcttttaacttaattccgcacatcgattcttttgatcaagatggatataccaaagaagaattaaaaatgactaatgaaacgaaaaagatcttagataatgaaatcgatgtttccgcaacatgcgttagagttcctgttagaactggtcattcagagtctattaatattgagtttgataatctttatgatttcgagaatataattaaaattttaaaaaatgcccctggttgtaaagttattgatgag

SEQ ID NO: 214679 - DNA, 685 bp, Unknown
  Bacterial polypeptide expressing nucleotide sequence isolated from the Sargasso Sea
gatggggtttaattacgcagttgtgggggccacgggaaacgttggccgggaaatattacaaattcttgcagaaagaagcgtgccttcgagtgaggtaatagctattgcctcttccgcctctaaaggaatagaggtgccttacggcgatgatgcggtcttgaaagttgatagccttgagaattttgattttagtaatgtagatattgttctatcaagtcctggagctaatatttcaagagaatttgctccaaaagcagccgcagctggcgccatagtaattgataatacttcagagtttaggatggacccagaggtaccgttggtagtccctgaggtgaatgcagaagctttggcaaactataaagctaaaaacattattgcaaacccgaactgttctacaattcaaatggttgtagcccttaagccccttcatgatgaggtagggataaatagagttgttgtttcaacctatcagtctgtttcaggagccggtaaatctgctatggatgagctatttaatcaaacccgagggatttatgctaatgagcccgagcaaaagttcatggaaaattttacaaaatctatagcttttaatgtgataccccatatagatgtttttatggaagacgggtccacaaaggaagagtggaaaatgtctgtggagacaaaaaagattattgatcct

SEQ ID NO: 214680 - DNA, 325 bp, Unknown
  Bacterial polypeptide expressing nucleotide sequence isolated from the Sargasso Sea
atctctgctacatgtgttcgagttccagtactaagagcacactctgaatcgatcaatatgaaatttgccggagtagttgagcctaaagatgctctggaagaattaaaaaaatcttctggaattgaaattattgaggattacaaaaataatagatttcctatgccaaatgacgttatgggaagggataatgttgctgttggcaggctaagaactgatataagtcagcctaatggattagaattatggttatgtggagatcaaataagaaaaggcgcagctcttaatgctgttcaaatagctgagttattaatcccaaaaaaatgat

SEQ ID NO: 214681 - DNA, 559 bp, Unknown
  Bacterial polypeptide expressing nucleotide sequence isolated from the Sargasso Sea
tgtttcgacctatcaatcagtatcgggcgcaggcaatgctcacataaatgaattagaagagcaaagtaaaaaagttttagataaacaaaaagtaagatcaaaaaattttacaaaacaaatagcatttaatgttattccacatatagatacttttatggaggatcgttatacaaaagaagagtggaaaatgactgtagagactaaaaaaattttagacccaaacatatccctaagtgcaacatgcgtaagagttccagtttttgttggacattctgaatcggtaaatgttgaatttaattcagaggtcgatgctgaaaaaattaaaaaatgcttagaaaaggcacctggatgtaaagttgtagatgaagtaaaagatggtggttatataaccccagttgaatcaagtggtgattcaacaacatatatttcaagaataagaaacgacaatacacaaaaaaattctataaatatgtgggtagtatctgataatttacttaaaggagctgcgctcaacgcagttcaaattgcaaatgttttaattaaaaaatatattaattaa

SEQ ID NO: 214682 - DNA, 670 bp, Unknown
  Bacterial polypeptide expressing nucleotide sequence isolated from the Sargasso Sea
tagtcatattttgaatgattttaatactcctggaattattgccaaccccaattgttcaactatccaaatgcttgttgctttaaaacctctccacgatgagtttgtaattgaaagaatagatgtaactaccttccaggcagtttcaggcacaggaaaattagcaactgaagagttgattaatcagatagatgcctataaaggcagtatgaagctgaatagctttatttacgctaagcctattgctaataatgtattacctcactgtgatgaatttgaagagaataggtatacaaaagaagaaaataaattagtaaaagaaacaaaaaaaattcttgatccagatataaaagttgcagctacttgcgtaagagttcctgtactaaacggtcattcagaatcagtgcatatacaaactaaaaagcctattgcagaggaccttgcactaaagcttttaaaagaatcgcctggtttatccataagatacggagaatcagaagatgattacccaactgcatttacagatggtgctggaaatggcttggtccatgttggcagaataagaaaagatctttgggaagaaaatagacttaatttatgggttgtagcagataatttattgaaaggcgcagctctaaatagtattcaaatagcaacattattgtttgattaa

SEQ ID NO: 214683 - DNA, 928 bp, Unknown
  Bacterial polypeptide expressing nucleotide sequence isolated from the Sargasso Sea
aatgacaaataaatataatatagctgttgttggagcgacaggaaatgttggaagagaaatgttacaaatactccaagaaagaaattttccattagaaaacttacattgtgttgcatcatctcgatctaagggtaaaaaaattaattttggagataaagaaattgtggtcgaagatctttctgaatttgatttttcaaaagttcatataagtttattttctccaggaagttcagtatcggctaagtttgcgcctatagcagctaaaaataattgtttggttattgataatacttcttattttcgtttaaaagatgacgtacctttagttgtacctgaagtaaatatagaagttttacaagatttttttaataacgaaagcagatctaacattattgctaatcctaactgctcgacaatacaaatggtagcagctttgaaacctattcatgatgcagcaataatcaatagaatagttgtttcaacttaccagtcagtttctggagcgggcaaagaggctatggacgaactttttgaacaaacaaaaaatatttattctaataaaaatattgaaagaaaaaaatttactaagcagatagcatttaatgttattccacatattgattcttttttagataatggaaacaccaaagaagaacaaaaaatgattgatgaaacaaaaaaaatattagattctaatatcaaagtttcagcaacatgtgctcgtgttccggtttttattagtcattctgaatcaataaatttggaattagattcacctttatctgatttagaagcaagaaaaattcttgataatagtcattatatttctgttgtggattatagaaaagacgaaggctatgtaacacctgtagaagcagcaggtgaagacaaagtttatgttagtagaataagagagataatacaatag

SEQ ID NO: 214684 - DNA, 452 bp, Unknown
  Bacterial polypeptide expressing nucleotide sequence isolated from the Sargasso Sea
gctgatcccgtggatcgacaaggatctcggcaacgggatgtcgaaggaagagtggaagggcggcgcggaaaccaacaagatcctcggcaagccggccatgggcgagccgggttcgatcccggtcgacggcctgtgcgtgcggatcggcgcaatgcgctgccactcgcaggcgctgacgatcaagctgaacaaggacgtgccgctcgacgagatcaacggcatcctcgcatcggcgaacgactgggtgaaggtcgtaccgaacgagcgtgaagcgtcgatgcgcgacctgtcgccggcgaacgtcacgggcacgctgacggtgccggtcggccgcctgcgcaagctcgcgatgggcggtgaatacctgtcggcattcacggtcggcgaccagctgctgtggggcgcggccgagccgctgcgccgcatgttgcgcatcctgctcgacaagtaag

SEQ ID NO: 214685 - DNA, 760 bp, Unknown
  Bacterial polypeptide expressing nucleotide sequence isolated from the Sargasso Sea
atgcagtcaaatctggaagcaatagttatagatgatagttcagcttttagaatgaatgacactgtgccattagtggtgcctgaagtaaatggagatgactgtaaatggcacgaaggaattatatctattcctaattgctctactactccattagttatggtattgcaggctcttagagagttaagtgagataactagagtgacagcttcaacttaccaatctgtatccggggctggttcagcagcaatgaccgcactaacatctgaaagcacagatcttatgaatgataaagatgtttatccccataaggatcagattgggtttaacgtaataccacggatagatgagtttttggataatggctacaccaaagaggaacagaaaatgattgatgaaagcaaaaagatattgcatttacctaatctttctgtttctgcaacatgtgctagagttcctgtatacatatcacactctgaggcagtacatatagaatttaaaaactctgtacatctagaagatgtacgtaatcaattgaatgactttccaggtataaccgtcatggatgatccaaaaagagacatatatcctatgccatacgatattgaagggaaagatgatgtctatgtcgggagaatacggaaagacacttctgtagataacggtatagtactatggatcgtttcagataatttaaggaaaggtgctgctttaaattccttgcaaatagctgagactttagtgaagttggagttagtataag

SEQ ID NO: 214686 - DNA, 724 bp, Unknown
  Bacterial polypeptide expressing nucleotide sequence isolated from the Sargasso Sea
atgaattttgcaataattggtgccaccggcaacgttggacgaaaaacaatagaaattttagaaaaatctaaaattaaaattacaaatttattcttagtcgcatcagaaaaaagcgagggaaaaaaaattaaatttaaaggaaaagaaatacagatccagagccttgaaaactacgatttttcaagtgcacaaattactttttttgcagcaggaagcaaaatagcagaacattgggttccaaaagcaagtaaaaaaacaactataattgataattcaaaatgttttagaatggatgaagacgttcctttagttgttcctgaggtaaatcctgaaaaattagcaatgtataaaaagaaaaatataatagctaatgcaaactgttcaacaatacaaatggttgtagttttaaaacctttgcatgataattttggtattaaaagagttatagtttcaacttatcagtctgtttctggggccgggaaagcaccaatggatgaacttgcaagccaatcaaaagatttccttgcgggaaaaaaaattaactctcaaaattttactaaacaaattgcttttaatttaattcctcatatagatgagtttgttgaagaaggttatacaaaagaagaatggaaaatggtaaatgaaaccaaaaaaattctagatccaaaaattaaattaacagcaacatgtgtaagagtgcctgtgatggtttctctatgctgaa

SEQ ID NO: 214687 - DNA, 925 bp, Unknown
  Bacterial polypeptide expressing nucleotide sequence isolated from the Sargasso Sea
tatgaaagaaaatttcctattgaaaaaatttatccgctagcttccgaaaaatcagctggtaaagaagtaatgtttggcgataagaaaatttctgttcaaaaacttgaacaatttgattttaatcttgtagattttgtattgctttcagcaggaagtgacgtttcaaaaaaaatagctccgctagcttcaaataaaaattgttttgttattgataattcatccgcttggagaatgaaccctgaggttccattagtagttccagaagttaacgcttcagttttagattcattaaatggaaaaaaaataatagctaatcctaattgttcaacttctcaattagtagttgcgttaagtcctctgcatgaagaagctgaaataaaaagagttgttgtgtcaacctaccaatcaacttcgggagctggtcaaaaagctatggatgaactatttaatcagactaaatcaatttttgttaacgacccaattaaaattgaaaattttactaaacaaatcgcctttaatgttatcccacacatagatatttttcttgatgacaaatcaacaaaagaagaatggaaaatggttgtagaaacaaaaaaaatacttgaccctaaaataaagcttactgctacatgtgtaagagtgccaacttttgttgggcatgccgaagctattaatattgaatttaataaacctatctctgctgatagagctaaggaaatacttcgtgaatcccctggtttaatggtggtagacaaaaatgaagatggtggatatacaaccccaatagattgtgtgggtgattatgcaacttttgtatcaagaattcgagaagaccctactgttgagaacggcctaagtatatgggttgtttcagataatttgaggaaaggcgctgccttaaacgcagtacaaattgctgaatcat

SEQ ID NO: 214688 - DNA, 724 bp, Unknown
  Bacterial polypeptide expressing nucleotide sequence isolated from the Sargasso Sea
taaactaaaatttggaagtctctttttagtagcttcatcaaaaagtgctggtaaaacaattaaattcagaaataaagaaattgaaattgagaatttagaagattatgatttctccaaagctcaaattactttttttgcagcagggagtcaaattgctaaagagtgggctccaaaagcagctaaaaaaacaattgtaattgataattcaagttattttagaatgcaaaaagatgtcccacttgttgtttctgaagtaaatccagaagcactcgataaacataacaatataatttcaaatcctaattgttctacaatgcaaatggttttgccattaaaacctttacatgatgaatacaaaataaaaagagtagtagtttcaacttatcaagcggtatctggtgcaggcaaagcaccaatggacgaacttttcaatcaaacaaaaaaatatttagaaggaaaaaaatttacatctcaaaactttaccaaacaaatagcttttaatttaatacctcatattgatgcatttgaaaaagatggatatacaaaagaagaattgaaaatgactaatgagacaaaaaaaatcttagacaatgaaattgaagtcactgcgacttgtgtaagagtgcctgtgagaacagggcattctgagtcaattaatattgaatttgataatctttatgattttgagaatataaatcatattttaaaaaatgctccaggttgt

SEQ ID NO: 214689 - DNA, 788 bp, Unknown
  Bacterial polypeptide expressing nucleotide sequence isolated from the Sargasso Sea
ttcagaagcttacgcctctaaagcagcaaatcacagcattgtaatagacaattctagtttttatagaatggatcctgatgttcctttaattgtacctcaagtaaatgctgatgacttaaaaaatataaaaaaaaatattattgctaaccctaactgctcaactgcacaattagttttaccactaaaaccaattcatgatttatttaaaataaaaagagttgttgtagctacttatcaatctgtatctggtggaggtaaagcaccaatggatgaattagttgaacagacaaaactagcattagaaaacaaaaaaattgagtcaaaaaattttacaaaacaaattacatttaatttaattccacatatcgatgtttttgctgatgatgggtatacgaaagaggaattaaaaatgactaatgagactaaaaaaattctagatcaaaatattgaactatcagcaacttgtgtaagagtacctgttttagtttctcattctgaggctgtaaatttagaattagaaaaagaatttacaattgatcaaattaaagaatgtcttgaaaaaatggaaggctgcaaagttattgacgagagaaaagatggaggatattcaaccccccttgaagcgacaggaaaagatgagacatttatctcgagaattagagaggataagactaaaaagaattgcttaaatatgtggattgtatcagataatttacttagaggtgcagccttaaatgcagttgaaattgtggaaacattaataaaaaataatttttatggaaagtaaa

SEQ ID NO: 214690 - DNA, 532 bp, Unknown
  Bacterial polypeptide expressing nucleotide sequence isolated from the Sargasso Sea
atgaagccagtcaatgtggcagtggtgggcgcaaccggtgcggtcggcgaggtaatgatagagatcctcgagtcgcgcgggttcccggtcgataccctgtatccactggcctccagccgatcagccggcaagtctgtgcagtttcgcggcaagcatcacacggtgcaggacttgagtacatttgatttttctcagacgccgattggattgttctcggctggaggcgatatcagcgccgagtatgcgccgattgcggcctcagcaggatgcgttgtgatcgacaacacttctcattttcgccgcgatgaagatgtccctctcgtgattcctgaagtgaatccagaggccattgcggactttgggtcgagaggcatcatcgccaatccgaattgctcaactattggcatgttggtggcgctaaagccactttatgacgcggtcggcattgagagaattaacgtagcgacttatcaggcggtcagcggcaccgggaaggcggcgattcaggagttggcggggcagaccgcgcgac

SEQ ID NO: 214691 - DNA, 769 bp, Unknown
  Bacterial polypeptide expressing nucleotide sequence isolated from the Sargasso Sea
aatgagcataaaatataatattgctattgctggcgcaaccggcaatgttggtagagagattattcaaattttagaagacaaagattttcctattgataaattgtattttcttgcatcctctcgatcaaaaggacaaactattgaatttagaggtgaggagataatagtagaagatcttgctgaatttgatttttcaaaagtacaaattggattattttctcctggaggaaaagtatctgctgaatttgctcctaaagcagcaaaggctggatgtttagttatagataatagttcacattttagaatgaaagaagatattcctttgatagttccagaagttaacgaatctattttagaagattttttcaataatgaaaatcgaagaaacattattgcaaatccaaattgttcaacaattcaaatggttgtagctctcaaacctcttcatgataaagcaattataaacagagttatagtttcaacttatcagtcagtctctggcgctggtaaagaggctatggatgaattatttaatcaaacacaaaatatttatactaataaaaatattgaaaaaaataaatttactaaacaaatggcgttcaatgttattcctcatattgatatatttcttgataatggatctactaaagaagaacaaaaaatggttgatgaaacaaaaaaaattttagatgagggaattaaagtatctgctacttgtgtaagagttccagtttttataagtcatgctgagtctattaatattgagttt

SEQ ID NO: 214692 - DNA, 862 bp, Unknown
  Bacterial polypeptide expressing nucleotide sequence isolated from the Sargasso Sea
atgaattttaatattgctatagtgggtgccacaggaaatgtcggaagagaaatgttaaatattctctctgaaaaaaaatatggggcatcgaaaatatttcctgtagcttctagtagaagtgaaggcatggaaattgaatttggggaggataaactaattgtagaatctattgaaaagtttgatccttcaaaagtagaattggcactcttctctgctggagccagtacctcaaaggaatgggcaccaaagtttgcagaaaaaaactgtattgttattgataactctagtcattttagaatggaagaagatattcctctgatcgtacccgaggttaacccaagtgatctaaataattataaaaaaagaaatataattgctaatccaaactgctcaacaattcaattggtggttgccttgaaaccattgcacgaaatttcaaaaataaaaaaagttattgtatcaacttatcaatctgtttcaggcgcaggtaaggctggtatggacgagttgtttgagcaaacaaaaaatatgttctctgatgatattaaagataatgttaagtttaccaaaccaattgcctttaatgttatacctcatattgataaattcatggatgatggatacacaaaagaagaattaaaaatgagacaagaaactcataaaattttaagtaatgagatcagctttagcgctacatgtgttcgcgttcctgtatttattggtcactctgaagctgtaaatattgagtttgaaaataaagtttcagtagaagaagcacgtgaagctattaaaaatgctcctgggtgcacactacttgatgaaagagctgatggaggttatgtaactccaaaagagtgtgctg

SEQ ID NO: 214693 - DNA, 811 bp, Unknown
  Bacterial polypeptide expressing nucleotide sequence isolated from the Sargasso Sea
ttgaagaatgttgtaattgctggggcaaccggtgcagtaggtaatgaatttctaaaacttttagaagctcgtgaattccctgtaaaaaatttaagactacttgcttccgcacgttcaattggcaagaagctggagttcagaggtgagaaaattcctgtagagcaattgacatcaaaatcattcagtggtgttgacttagcatttttttctgcaggtcgcgaaagtagtaaagtttatattcctcatgctgtggaatcaggaactgttgtaattgacaacagcagcgcgttcagaatggatcccgatgtgcctttagtggttccggaaataaacccagaaagtgtatttaaacataagggtataatcgctaatccaaactgctcaaccattcaaatggtagttgcattgaatccgctgcacaaggcggcaaaaattaaacgcgttgtagtttcaacatatcagtctactgctggcgccggtgctaaaggaatgaacgaacttcttaatcaggctcgtgcctgggcaagtggtgaagaattagagatttcatcattcccttcacaaattttatttaatctcttcccacacgtagatatttttatggaaaacggatatacaaaagaggagatgaaaatggttaatgaaacaaaaaagattatgaatactcctgacatgggaatttccgcaacctgtgtccgagttcctgttttgagatctcattcagaagcagtatggatagaaactgaaaagaaaattactcctgaagaagctaaggaaattcttacaaaatctcccagggttaattgtacgt

SEQ ID NO: 214694 - DNA, 814 bp, Unknown
  Bacterial polypeptide expressing nucleotide sequence isolated from the Sargasso Sea
gggccgcgaaatgctaaccattttatcggaacgtcaatttccagtggatgaaataacggctctagcaagtagacgatctctgggtactgaagtaagttttggagatcaaacaattattaccaaagacctagaaacatttgatttcgaaggttgggacatagctctctttgccataggttctgatgcgacaaaagcatttgctccgaaagctgcagctaaaggatgtattgttatagataacagctccctatacaggtacgatccaaatgtgccgttgattgtaccggaggtaaatgccgaagcaataaccgagtattcgaaaaagaatattattgccaacccaaattgctccacagcacaaatggttgtcgcattaaagccccttcacgatcgtgcccgcattaagcgtgttgttgtcagtacttatcaatctgtttccggtgctggaaaagaaggtatggacgaactctgggatcaaacaaagtctatatacaatcctgtaaccgatgtacctcccaccaaatttacgaagcaaattgcattcaatgttatcccacatatcgataaattcttggatgacggcagcacaaaagaagaatggaaaatggtcgctgaaacaaaaaaaataatagatacttccatcaaagtcacagcaacatgtgtaagggttccagtctttgttggccattctgaagcaataaatattgaatttgaagattttttagatgaggacgaagcgcgcgacattcttcgcgaggctcctggcgtcatggtgatcgataagcgtgatgatgggggatacgtgacgcctatc

SEQ ID NO: 214695 - DNA, 873 bp, Unknown
  Bacterial polypeptide expressing nucleotide sequence isolated from the Sargasso Sea
gaaggaaaaaaaattaaatttaagggcaatgaaatacaaattcaaagtcttgagaaatatgatttttctagtgcacaaattactttttttgctgccggaagtaaactagctgaaaaatgggttcctaatgcaagcaaaaaaacaattgtaatagacaattcaaaattttttagaatggacaaagatgttcccttggtagttcctgaggtaaatccagaacaattagccatgtataaaaagaaaaatataattgctaacgctaactgttcaaccattcaaatggttcttgttctaaagccgctgcatgaccattttaatatcaaaagagttgtggtttctacctaccagtctgtttctggtggagggaaagcttctatggatgaattaattagtcagtcaaaggattatttatcaggaaaaaaaattgaatctaaaaattttacaaaacaaatcgcctttaatttaatacctcacatagatgaatttgtagatgaaggttacacaaaagaagaatggaaaatggaaaatgagactaaaaaaattcttgatccaaaaataaaaatgacagcaacctgtgtcagagttcctgtgatggtatctcattctgaatcaattaatgttgagtttgaaaaaaattttgatattaaaaaagtgaaagagattttaagttctgcggcaggctgtaaggttgtagatgaaaggaaaaatggtggatacacaactcctgtagaggcagaaaatagttatttgacttttatatctagaattcgaaaagacaattcgaatgataaagctctaaacatgtgggttgtttctgacaatttacttaaaggggccgcattaaatactgttcaaattgctgagagattaata

SEQ ID NO: 214696 - DNA, 817 bp, Unknown
  Bacterial polypeptide expressing nucleotide sequence isolated from the Sargasso Sea
atgagcgcaaaatttaatattgctatcgctggcgcgacaggcaacgttggaagagaaattattcaaatattagaagataaagaattccctgttgatcaattgtatttgttagcctcttctcgatcaaaaggacaagcaattgagtttaggggtgaagaattaatagttgaagatcttgcagaatttgatttttctaaagttcagattggtcttttctcaccggggggtaaagtgtctgcagaatttgctcccaaagcagcaaaagctggttgtcttgtaattgataacacatcatactttagaatgcatgataatgtacctctaatagttcctgaggtaaatgcttctgctttagaagatttttttaataatgattatcgcagtaacattattgctaatccaaattgttcaactattcaaatggttgttgctcttaaacctctgcacgataaagcaataataaatagggtggtagtttcgacgtatcagtcagtctctggcgctggtaaagaagcaatggatgaattatttaatcaaacacaacatatatatacaaataaaaatattgaaaaaaataagtttactaaacaaatggcatttaatgttattcctcacattgatacttttcttgaaaatggctcgacaaaagaagaacaaaaaatggttaatgaaacaaaaaaaatattagatgagggaataaaagtgtcagctacatgtgttcgagtacctgtttttattagtcatgctgagtctgttaatattgaatttgactcccctttaagtgatgttgaggcaactaaattattaaaaaatttga

SEQ ID NO: 214697 - DNA, 661 bp, Unknown
  Bacterial polypeptide expressing nucleotide sequence isolated from the Sargasso Sea
tatgtcgcaaaaatataacgttgctgtacttggtgctactggtttagtaggacgtcaaattatcgaaactttagcagatcgtaaatttccggttgatcagctatttttgcttgcgagcagccgcagtgcaggtgaagacattaagtttcgtggtgagacaattgaagtacaagacgttgagggctttgattttagccaagcgcatattggattgttttctgccggtgggagcgtctcagaaaaatatgccccaattgcagccgatgcaggttgtatagttattgataatacctcgcattttagaaatgattttgaaataccccttgtcgtacctgaagtaaacgcctcaagtcttgccgactttagaaatcgtaatattattgcaaacccaaattgttcgactattcaaatgatgttggcactaaagccaatttacgacgcgtatggtattgatcgaataaatgtatcaacttaccaagcggtatcaggggctgggaaagaagctgttgatgagttagcaaagcaaacagctaacttgatgaatgcacgcccaatggataatgaaatatttcctaagcaaatagcctttaatgttattccgcaaatagatagctttgaagaaaacggctatacccgcgaagaaatgaaaatggtaaacgaa

SEQ ID NO: 214698 - DNA, 700 bp, Unknown
  Bacterial polypeptide expressing nucleotide sequence isolated from the Sargasso Sea
tccggatgttcctttagtggttccggaaataaatcccgaaagtgcacttaagcataagggcataatcgccaatccaaactgctcaaccatccagatggtggttgccttgaacccgcttcacaaggtagcagaggttaaacgtgttgtagtttcgacatatcaatccactgcaggtgccggcgcaaaaggaatgaacgaacttcttaatcagacacgtgcctgggcaaatggggaagccttggaggtttcatcattcccgtcacaaattttatttaatctcttcccacatgtagacatttttttggaaaacgggtacacaaaggaggagatgaaaatgattaacgaaacaaaaaagattatgaatgctcctaatatggggatttccgcaacttgtgtgagagttcctgtattgaggtcacattcagaagcagtatggatagaaactgaaaaaaaaattactccggaagaagcaaggcaaattcttaaaaagtctccaggattaattgtacgtgatgaacctgcaaacggtggatatcccatgccatgggatgttgacaaaacaatcgaaacttttgtgggacgaatcagagaggatttttctcatccaaaaggtcttactttctgggttgttgcagataaccttaataaaggggccgcccttaactcaatacagattgcggaagtattggaagctggttag

SEQ ID NO: 214699 - DNA, 853 bp, Unknown
  Bacterial polypeptide expressing nucleotide sequence isolated from the Sargasso Sea
aatgaaaatagccattattggggcaacgggattagttggtcgtaaaattataaatctatcagaagagtattttccgaaagatacttcttacactttttttgcatcaagtaaatcaaaaggcactgaattagtaataaataaaaataagttaattgttcaagaattaattgatgaaaatatatccaaatttgatattgcccttttttcagctggaggtgatagatctagagaatttgctaagaagtttatagaacatggagcttatgtcattgataactcatcggctttcagacatgatgacgaagtcccattagtagtttatggaattaatgaagagactataaatatcaacacaaaattgattgctaatcctaactgtacaactatgggtttagttatggctttgaaacctctccatgataaatttaaccttaaatcaattacaccagttgcatatcaagcagtatccggatcaggaacacaagcggtggactctcttagtagagaaattgaaatgggagatgatttgaaagaagattatgcagatggtttttattcaagaccgattgcaaaaaatgttattccagttgctggaaatttattagagaacggatactctgacgaagaaatgaagtttgtaaatgaatcaagaaagatactttctatagacgacttaattgtagagccttcaaacgctagggttggagtaaaaacagggcatggaacattctgttcagcagtttttgaaaatgaagtttcaagagagtctgcaattgatgaaatcaacaattttgatggtatcgaatattgggatgatccattacctactccacttgatgctgagggaagagat

SEQ ID NO: 214700 - DNA, 841 bp, Unknown
  Bacterial polypeptide expressing nucleotide sequence isolated from the Sargasso Sea
ttgattgtcgaagacttggcagaatttgatttttcaaaagctcatttaggattattttcaccaggtggaaaaatatctgcagagtatgcgcctaaagcagcaaaagctggctgtttagttattgataatacctcatatttcagaatgaaaaatgatgtccctttgattgtgcctgaggttaatgcttcagacctagaggatttttttaacaatgaagaacgaagtaatattatagcaaatccaaattgttcaactattcagatggtagtagctctaaaacctcttcatgatcaagcaattattaacagagttatagtatcaacttatcaatcagtatctggcgcaggtaaagatgcaatggatgaattgtttaatcaaacacaaaatatatacgcaaataaaaatattgaaaaaaataaatttacaaaacaaatagcttttaatgttattcctcatatcgatacttttgttgataatgggaatacaaaagaagaagaaaaaatgattaatgaaacaaaaaaaatactagatgaaggaattaaagtgtctgcaacatgtgtaagagttcctgtttttattagccatgcagagtcaataaatgttgagttcgactcaccattaagtgatcaagaagcttcaaaacttctaaaagagttcgatggagtatctgtaatagattttagaaaagatgaaggttatgttacccctattgaagctgctggtgaagataaagtgtacgttagcagaattagaaatgatacttccgtagacaatggtttaaatatctgggttgtagccgataatttaagaaaaggcgcggctttaaatgctgttcaaatag

SEQ ID NO: 214701 - DNA, 653 bp, Unknown
  Bacterial polypeptide expressing nucleotide sequence isolated from the Sargasso Sea
tccaaactgtacgactatggcggccatgccagtcttggctccattgcacgccgaggctggcctgcggacgttgacggtttctacctatcaggcggtctctggtgccggcctggctggcgtcgacgagttggcttcccaggtcgaggcggtggccgacggagcagcgggcctggcccatgatgggcgggctgtcgagttccctcagccgtcttcgttcgctaggaccattgcctttaacgtgttggctcacgccggttcgttcgtggacgacgggcggggtgaaaccgacgaggagcagaagctccgcaacgagagtcgcaagatcttgggtattcccgacctcatggtgtccgggacgtgcgtgagggtgccggtgttcaccgggcactcgatgtccgttcacgccgagtttgaccgccccatctcgccagaacgggcaaccgaactgctggctgacgcgcccggcgtggtgctggctgacgtgcccactccgctggatgctgccggcgtggatccaaccatcgtgggtcgcattcggattgatgagactcggtccaacggtctggcgttgttcttggcgggtgacaacctgcgcaagggcgctgcgttgaacacgatccagatcgctgaggaactcctgaagcgagggtgac

SEQ ID NO: 214702 - DNA, 864 bp, Unknown
  Bacterial polypeptide expressing nucleotide sequence isolated from the Sargasso Sea
catgtccatttccccgtccaacccgccccacgtgggtatcgtcggcgccaccggcctggtcggcgagatgatgcgcggcctgttggccgagcgtaacttcccgctggcttcgctacgcctgttcgcctcggcccggtcggcgggcaagaccatccgcttcggccaggccgacatcgtggtcgaggatgcggcgagcgccgactacgccggtctggacatcgtcttcttctcggccggcggcgagacgtccaaggccctggcgccccaggtggccgcggccggcgctttagtgatcgacaactcctcggcctggcggtctgacccgcaggtgccgctggtggtcgccgaggtgaacccccacgccctggccgacctgcctaaggggatcatcgccaaccccaactgcaccaccatggccgctatgccggtgctgaagcccctgcacgacgcggccggcctgaagcgtctgacggtctccacctatcaagccgtctcgggcggcgggatcgagggcatccgcgtgctggaggaccagtcgcgcgcgaccgtggggcagggcgcggctctggcccgcgacggcggggccgtggacttcggcgcgccggaaaagtgggtcgtgccgatcgccgccaatgtcgtggccctgaactacacgctgggcgaggacggctataccgacgaggagctgaagctgcgcgacgagagccgcaagattctcgaaatccccggcctgcccgtctcgggcacctgcgtgcgggtgccggtcttcaccggccattctctgtcgatcaacgtcgagttcgagcgcccgctgtcggcggctcacgcgctggacctcctggcccaggcgcccggcgtgggtgg

SEQ ID NO: 214703 - DNA, 907 bp, Unknown
  Bacterial polypeptide expressing nucleotide sequence isolated from the Sargasso Sea
aagaaagaaaattttccaattgatgaaataaggctatgtgcttctgaacgatctgtaagtaaaaaactaacccttagaggcgaacaaatagaagtcgaattgtgtacccctgaattattaaaagaagttgatttttcatttatatcagcaagtggtgatataagtagagaaatagctcctttatcagctgctaatggagctatagcaattgatgacagttctgctttcaggatggatcctaacgtccctttagtcgtgccagaagtaaatgcagatgatttaaataatcattcaggaattgtgtctatacccaattgttcaacaactccattagtaatggttatgcaggctctatctaagaacgcaaaaatccatagagttgtagtagatacattccaagctgtatccggaacaggagccgctgctgtcagagaaatgaccactcaaagtggaaatttattaaatgataaagaaatagaaatacaagaatatcctcatcaaatcgcttttaacgttttaccacatattgaaccttttcaagaaaatggatatacaagagaagaaatgaagatggtaaatgaaactcgcaaaatattgcacgatcctaatgtaatggtatctgcaacatgtgttagggttcctgttaccataagccacagtgaagctatgcacatagagttcgacaggccaatttccacagacgaagcccgtgagcttataaataatagttcagggatgaaagttatggatgatcctagtaatgacatatatcctatgcctataaattctactggaatagatgatgttctcgtaggcagaataagacaggatgtttcaaatcccaatggtatcgccttgtgggctgtatgtgataatctacgcaagggagccgcattaaatgcaatcc

SEQ ID NO: 214704 - DNA, 861 bp, Unknown
  Bacterial polypeptide expressing nucleotide sequence isolated from the Sargasso Sea
taatgaatttctaaaacttttagaagcacgtgaattccccgtaaaaaactttagactgcttgcttccgcacgttcaattggaaagaagctggaattccgaggtgagaaaattccggtagagcaattgacatcaaaatctttcagtggggttgacttagcatttttttccgcaggtcgcgaaagtagcaaagtgtatattccacatgccgtggaatctggaactgttgttattgacaacagcagcgcattcagaatggatccggatgtacctttagttgttccggaaataaatcccaaaagtgcatttaaacataagggcataatcgccaatccaaactgctcaaccatccagatggtggtagccttgaacccccttcataaagcggcagaagttaaacgtgttgtggtttccacatatcaatccactgcaggcgccggtgcaaaaggaatgaacgaacttcttaatcaaacacgtgcctgggcaaatggggaagccttggaagtttcatcattcccatcacaaatattgtttaatctcttcccacacgtagacatttttatggaaaacgggtacaccaaggaagagatgaaaatgattaacgaaacaaaaaagattatgaatgcccctaatatgggaatttccgcaacttgcgtgagagttcctgtattgaggtcacattcagaagcagtctggatagaaactgaacaaaaaattactccggaagaggcaagggaaattcttaaaaagtctccaggattaattgtacgtgatgaacctgcaaacggtggataccccatgccatgggatgtcgacgaaacagtcgaaacttttgtgggacgaatcagagaggatttttctca

SEQ ID NO: 214705 - DNA, 570 bp, Unknown
  Bacterial polypeptide expressing nucleotide sequence isolated from the Sargasso Sea
aatgaatattgcaattgtaggagctaccggtcttgttgggcgtaaaataatcaaactttgtgaagagttttttgataattctgttgagtttcaattatttgcttcgaaaacatctgaaggaaaaatactttcagttaatgatatagatgttgaaataaaagaattaaataataaaaatattaaaccctgtgacatcgctttattttctgctgggggagtcaggtcaaaagaatacgcaaatgaatttgttgacagaggcgcttttgtgattgataactcttcaacatttagaatgaatgatgaaataccacttgttgtctatggaataaatgaaaatacaattaatgaaaagacaaaaatcattgcaaatccaaactgtacaacaatggctttagtaatggctttgaaacctttacatgatattttcaaacttgttggaattgttcctgtttcttatcaagcagtttcaggttcaggaaaagatgctgttgaatcgcttaataacgagttattaaaccttcaaaattctggatctgcaccagatgaaaaatattataaaactcaaatagc

SEQ ID NO: 214706 - DNA, 740 bp, Unknown
  Bacterial polypeptide expressing nucleotide sequence isolated from the Sargasso Sea
cgtaattgataatacatctttttatagaatgaagaaagatgttccattaatagtccccgaagtaaatccaaaggctatagaaaaaataaaaaaaggtataattgcaaatcctaattgctcaacaatccaaatggttgtagcgttgaaaccaatacatgatttatttaaaattaaaaaaattgttgtttcaacttatcaatccacctctggtgctggaaaatcagcaatggatgaattatttcaccaaacacttgatgtttacaaaaacaaacctttgataccaaagcagtttacaaaaagaatagcatttaacttaattccgcatattgacgattttttagaaaatggttttacgaaagaagaaaataaaatgattgaagagactcaaaaaataatggattctaaaattgaaattttttcaacatgcgtaagagttccggtatttgttggtcatggtgaatcagtttttgttgaaacggaaaaagagattgatttaaaaaaacttattacaaagattaaaaaatttcctggactttctttagttgataaaaaaattgatggaggatatgttacccctgacgaatctgctggcgaagatgatgtttttgttagcagaatgaggttaggtctcagtaagaaaacactaggactttggattgttgctgataatttaagaaaaggagcagcattaaattcaattcaaatagcagagttaattttaaaaaaaaaaataaaatgac

SEQ ID NO: 214707 - DNA, 895 bp, Unknown
  Bacterial polypeptide expressing nucleotide sequence isolated from the Sargasso Sea
attgagcaactaaatttggttgcctcaaagaatagttctgggaaaaaaataaaatttaaaggcaaagacctgactgtagttgctttagataattacgattttgaaaatgcggatataactttttttgccgcaggaagttctattgcagaaaaatatgcaaagaatgcttctaaaaaaactattgtgattgataattcaaaatattttaggatggataaaaatgttcctcttattgtaccagaggttaatccagaggacattaaaaggcataaaaacattatcgcgaatccaaattgttctactattcaaatggttttagcattaaaaccattgcatgaaaaatttaatatcaaaagagtagtagtttcgacatatcaagctgtttccggagctggaaaagctgcaatggatgaactagtaagtcaaactcaagattttctagataagaaaaaaattaaatcaaaaaattttaccaaacaaatagcttttaatttaattcctcatatcgacgtatttgtcgaagatggatatacaaaagaagaatggaagatggagaatgaaacaaaaaaaatattagatgacaacataaaagtttctgcaacttgtgtaagagtaccagttattacatctcattctgagtctgtgaatatagagttcgacaagaattacaatatcaatgaagtaaaaaaattattaagtaagactccaggttgcaaactcgtagatgagcatattgatggtggatatataactccacttgaggctcaagatgactctaaaacttacatttcaagagtaagaaaagacagatctagtgaaaaagctataaatatgtggatagtttcagataatcttttaaaaggagcggcacttaattcagtgcaaatgcagaaac

SEQ ID NO: 214708 - DNA, 814 bp, Unknown
  Bacterial polypeptide expressing nucleotide sequence isolated from the Sargasso Sea
cattggcgcaaccggtgcggttggcgtcgagctgatcaatgtaatgtttgatcgcaagttccctgtgggtgaactcaccctgttcgcgtcagagcgttcagcgggcaagaccgtggagactaaattcggcactaagaccgtcgcgctgttttctgttgaagaagccaagcagtgcgacattgtcttccttgctgtttccggtgatttcgccaaggaatatgcgcccaagattgccgaaggcgcgctggtgattgataattcctcggcgttccgtctgaatgatgatgttccgctgatcgtgccggaaatcaatggtcaccttgccaaaacggcgaaactgatcgccaacccgaactgcaccacggcgattgccgcagttgccctgtggccgctgcatcaggcctttggcctgaagaaagtgatcgtttcgacctatcaggccgcatcgggtgctggtcagccgggcatgaacgaactgcgcgaaggtctggcggctggtcttgctggtaagccggtcccggcggaggtgttctcgtcgccgctggcgtttaacgtgatcccgcatattgatagcttccaggacaacggctatacccgtgaagaaatgaaagtgacctgggaaacgcgcaaaatctttggcgcgccggaccttccggtatcgtgcacggcggttcgtattccgaccgagcgtacccattccgaggccatcgtggttgaaaccgaaaaggttgttaccccggatgcggcccgtgaagtgctggcaaaggccaagggtgtaaaacttgtcgatgatccggcaaacaacaaatacccg

SEQ ID NO: 214709 - DNA, 807 bp, Unknown
  Bacterial polypeptide expressing nucleotide sequence isolated from the Sargasso Sea
ttgctgccggaagtaaaatagctgaaaagtgggttcctaaagcaagtaaaaaaacaattgtaatagacaattcaaaattttttagaatggatagagatgtccctttggtagttcctgaggtaaatccagaacaattagctatgtacaaaaagaaaaatataattgctaacgctaattgttcaactatccaaatggttttagttttaaaaccgttacatgatcattttggtattaaaagagttgtagtttccacttatcagtcagtttctggggcaggtaaagcgcctatggatgagcttgttagtcaatcaaaagattttctagcaggaaaaaaaattaatccacaaaattttactaaacagatagcttttaatttaattccacacatagacgaatttgtcgatgaaggttatacaaaagaagaatggaaaatgataaatgagaccaaaaaaattttagatccaaaaataaaattaacagcgacatgtgttagagtacctgtcatggtttctcattcagaatctattaatgtagagtttgaaaaacccttcgatattaaaaaagtaaaagatattttgagtaaaacagaaggttgtaaagtcctggatgaaagaaaaaatggagggtatataactcctctcgaagccgaaaacagctatatgacttttgtttcaagaattcgaaaagatgattcaaataataatgctcttaatatatgggttgtttctgataatttactgaaaggggcagcattgaatacagtgcagatagctgaaaaattaataaaaaattattatggaaaataaa

SEQ ID NO: 214710 - DNA, 727 bp, Unknown
  Bacterial polypeptide expressing nucleotide sequence isolated from the Sargasso Sea
atgagtaaaaaatataatgtcgctgttgttggagctactggggctgttggcaaaatgatgattcaaattttgttggaaagaaattttccaataaaaaaactatatttacttgcaagtaaaaaatccgagggtaaaaaacttaagataaacggagaggaatatttaataacatccttagaagattttgatttcaaagatactgatattgcattattttctgctggtggtgaaatatcaaagaaatatgcaagtgttgctacaaaaaataatactattgttattgataatacttctttctttagatatgagaaaaatatcccattaattattcccgaagttaatggcgatgaaatatctaaatataatgaaacaggtattatagctaatcctaattgctcaactattcaaatgttggtggcaataaaaccaatacacgacgtatgtaaaataaaaagaattaatgtatgcacttatcaagcagtttcaggatcaggtagtcttgctatagaagaactaaaagatcaagttcatgcatatacaaataataaggatattaaaagtaatgtttatccgaaacaaattgcttttaatgttatacctcagatagataaatttatggataatggatatacaaaagaagaaatgaaaatggtgtgggaaacaaaaaaaatacttgataactcgattgaagttaaccctacaactgttagagtgcctgttttttatg

SEQ ID NO: 214711 - DNA, 583 bp, Unknown
  Bacterial polypeptide expressing nucleotide sequence isolated from the Sargasso Sea
gtacaaataaagagaattgtagtctcaacttatcaagcagtctcaggtgcaggaaaggcacaaactgatgaattgtttagccaaacagagagttttcttaaaggagaaactgtaaaatctaaaaattttacaaaacaaatcgcatttaatttaatacctcacatagatacatttgttgaagatggatacaccaaagaggagtggaaaatggaaaacgaaacaaaaaaaatattagataaaaagattgagctaactgctacatgtgtaagagtgcctgttaaaacatcccattcagagtctgttaatattgaatttgaaaatgaatatgatttagaaaaagtgaaaaaaatattaacaaaagcgccgggctgcaaagtcgttgatgaacgagaggatggaggttatattacacctgctgaggcagaaggagataatttaacttttatatctagagttagaaaagataattccaataaaaaagcattaaatatgtggatagtctcagataatttattaaaaggagcagctttaaactctgtacagatcgctgaaattttggtgaaaaaattaaatgaaaaataaa

SEQ ID NO: 214712 - DNA, 652 bp, Unknown
  Bacterial polypeptide expressing nucleotide sequence isolated from the Sargasso Sea
agcactttgagttggggaaaccaagaaataattgttgaagactcagcgaaagccgattggtcaaatgttgatattgctttactaagtgcgggtaaaactgcatcgctggaaatctcacctgtaatagcagcttcaggagcgacagtcgttgacaattcatcaggatggagaatggatccagaagttccacttgtagttagtgaagtaaatcctgaagctcttgatgaaataacaaaaggtattgttgcaaatcctaactgtacaacaatggttgctatgccagttttatctccgttgcataaacgcgcaggacttttatcacttagaatttcaacctatcaagcagtttccggcgcaggtttagctggtgtagaggaactagaaggtcagattaattcagctacaggtaaagccactcaacttgcttacgatggtaaagctcatgaatttcctgagccgagttcttttccgcagtcaattgcttttaatgttttaccgcatgcaggttcttttgttgatgacggtcggggagaaaccgatgaagagcaaaagttgcggaacgaaacccgcaaaatcttaaatattcctaatttattagtttcacctgtatgtgttagagtccctgtgtttactcggtcactactttggctaa

SEQ ID NO: 214713 - DNA, 943 bp, Unknown
  Bacterial polypeptide expressing nucleotide sequence isolated from the Sargasso Sea
atgaaaaaaattttccaatttgataatatagttccgttagcaagtcatagatctgttggaagcaatattaaatttggtaaagaattgattgctgtgaaagatttagctacttatgattttaaagatatagatattgcttttttttctgcaggagcagaagtatcacagcaatatgtacctattgctactaaggctggtgcagtagtaattgataatacttcagaatttagatatcaagaagatattcctttagttgttcctgaagtcaataaagaagcaatagacagtcataccaagcactctattatcgctaatccaaactgttctacaatacagatgttagttgcacttaaacctatccacgagagatttaacataaaaaacattaatgtttctacttatcaagctgtttcagggtccggtaaaaaaggaattaaagaacttttagaacagacccatagctatcttaatcagcgtgaaatttctaaatcagtatacccctcgcaaatagcctttaatgttattccctttgttgatagttttctagataatggctatacaaaagaggagatgaaaatggtgtgggaaacacaaaaaattttggataaaaatatcagtgttgatgctacggcagttagagtgcctgtgctcattgggcattctgaatctatatctattgaaactgagaaagtgattgatattgatcaggttgtaaatgattataaaacaaatgataagatcgaacttatagatgacccagctaattttgaatttccaacagctgtagagcatggcaatggtacggataaagtttttgtaggaaggataagaaaatcacaaataaacgataaaattttgaatatttgggtagttgctgataatgttagaaaaggagcagctttgaatagtgtccaaattgctgaacatctaattaaggggtagc

SEQ ID NO: 214714 - DNA, 808 bp, Unknown
  Bacterial polypeptide expressing nucleotide sequence isolated from the Sargasso Sea
tggagaatacacatttcgctattttcagctggtggcaaaaggtccaaagattacgcacacaattttatagacaatggttcgtttgtagtagacaactcatctgtttttcgaatgaatgatgaagttcctcttgttgtgtatggaatcaatgaaaacataattacagaagaatcaaaactgatatctaatccaaactgtacaacaatgggattagtaatggctttaaaacccctacatgataactacactttatcctccatgaccccggttgcttatcaagcagtgtctggatcaggatctgaagccataaaatcattagaaaaagagactttattaggcaataaattagatgcaaactatcaacaagcttattattcaaatccaatagcccagaatgtcattcctcttgcaggaagcttaactgataacggatactctgatgaagaaatgaaatttgtccatgaatcaagaaaaatactttcaattccagatttagttgttgaaccatctaatgccagagttggagtaagaacaggtcacggaactttttgctctgcagtgtttgaaaatgaagttaatttggaggaatgtactgatttacttaacaattttgaaggtgtagaagtctggaatgattcattaccaacaccaatagatgtagaaggcaaagatgaggtcttagtttcaagactaagacaaggtctttcatcaaaaaatattttaaacttttgggtagtctctgacaaccttttaaaaggtgctgctttaaatgcagtgcaaatagctaagtttgtggaaaaattatgat

SEQ ID NO: 214715 - DNA, 741 bp, Unknown
  Bacterial polypeptide expressing nucleotide sequence isolated from the Sargasso Sea
gaacgtcggacgagaagttttagatattattgatgaaaaagaaattcagtattctgatttagtggcattagcttcctctcgatcaaaaggaagcacaattgattttggtgaaaataaatccatcactgttggagatttagctgaatatgatttttcggatactgatattgcaatcttctcaccaggtgcaaaaatttcaagcgagtttgctccaaaggctgcaaaaaaagggtgtattgttattgataacacatcacattttagaacagacccagatgtacctttagttattgcagaggtaaatcctgaagctcttaaaaattttagaaataaaaatattatttccaatcctaattgctcaacaatgggaatgttggttgctgtcaagccactccatgaacagttcaaagttaaaagaattgtagtatcaacttatcagtctgtttcaggagctggtaaggaagctgctgatgaattatttaatcaaactaaatcaatttatgccaatgaggctgttgtaaaagaaaagtttaccaaacaaatcgcttttaatgtaattccccacattgatgtttttctggaagatggacaaacaaaagaagaatggaagatgtataacgaaacaaaaaaaatactcgatgaaagcatcgagctaactgctacttgtgtgcgtgttccagtatttgtagctcactctttggcagtaaatcttgaatttgagaagccctttgaagaagatca

SEQ ID NO: 214716 - DNA, 694 bp, Unknown
  Bacterial polypeptide expressing nucleotide sequence isolated from the Sargasso Sea
cctcaagtaaatgctgataacttaaaaaatataaaaaaaaatattattgccaaccctaactgctcaactgcacaattggttttaccattaaaaccaattcatgatttatttaaaataaaaagagttgttgtagctacttatcaatctgtatctggtggaggtaaagcaccaatggacgaattaattgaacagacaaaactagcattagaaaataaaaaaattgaatcaaaaaatttcacaaaacaaatttcatttaatttaattccacatatcgatgtttttgctgatgatgggtatacgaaagaggaattaaaaatgactaatgagactaaaaaaattctagatcaaaatattgaactatcagcaacttgtgtaagagtacctgttttagtttctcattctgaagctgtaaatttagaattagaaaaagaatttacaattgatcaaattaaagaatgtcttgaaaaaatgaaaggatgtaaagttatcgacgaaagaaaagatggaggatattcaactcctcttgaagcgacaggaaaagatgagacatttatctcgagaattagagaggataagactaaaaagaattgcttaaatatgtggattgtatcagataacttacttagaggtgcagccttaaatgcagttgaaattgcggagacattaataaaaaataatttttatggaaagtaaa

SEQ ID NO: 214717 - DNA, 918 bp, Unknown
  Bacterial polypeptide expressing nucleotide sequence isolated from the Sargasso Sea
aagtaggcgatctcttgggtactgaagtaagttttgagatcaaacaaattattaccaaggatctggaaacattaaatttcgaaggtggggacattgctctctttgccataggttctgatgcgacaaaaacatttgctccgaaagctgcagctaaaggatgtattgttatagataacagctccctatacaggtacgacccgaaagtgcctttgattgtaccggaggtaaatgccgaagcaataactgagtattcaaaaaagaatattattgccaaccctaactgttccacagcacaaatggttgtcgcattaaagccccttcacgatcgtgcccgcattaagcgtgttgttgttagtacttatcagtctgtttccggtgctgggaaagaaggaatggacgagctctgggatcaaacaaagtccatttataaccctgtaaccgatgtccctcccaccaaatttaccaagcaaatcgcattcaatgttatcccgcatatcgataaattcttggatgacggaagcacaaaagaagaatggaaaatggtggctgaaacaaaaaaaataattgatacctccatcaaagtcacggcaacatgtgtgagggttccagtatttgttggccattctgaggctataaatattgaatttgaagattttctagatgaggacgaagcgcgtgatattcttcgcgaggctcccggcgtcatggtgattgataagcgtgatgatgggggatacgtgacgcctatcgaatgtgctggagactacgcaacttttattagtcgattacgtcaagatagtaccattgagaatggtttaaacctatggtgtgtgtcggataatctgcgtaaaggcgctgcacttaatgctgtccagatagctgaaacacttggtcaaagagtgctaaaaaagggttaat

SEQ ID NO: 214718 - DNA, 739 bp, Unknown
  Bacterial polypeptide expressing nucleotide sequence isolated from the Sargasso Sea
tttgtcctcaaattttcgatacgaagatgatgtccctttaattattccagaaattaatggagagattgttagtagactttcaaagccatctcttatagcaaacccaaattgttctacagcccaactactcctagctttaaaacctattcatgatcaagttgaaatcaagtttttgaatatagcaacatatcaggcagtctcaggaactggaaaagctgccttagaggagctgcataatcaaacatattttactgattcagaaatcgaatctcctgtgtatcccaagcaaattgcttttaatgttattccacagtgcgatatttttttagaaaataattctactaaagaggaaatgaagttaacttgggaaactcataaaattcttgatccaaatattttagttcaggcaacctgcgttagagtcccagtatttaatgggcattctgaggcagtgttctttaaggtatccaaagcaatatcgcgagaagaaattattgaaaccttagaaagttctcctggtataaaagtacttgatgatcctaaagatgaggtgtatccaacgcctgttgaatgtgcatctgatacagaggaagtttatgttgggcgaattcgctcacaagagcttgatggtgatacgtggatttctatgtggatagttgctgataatgtttatggcaaaggtgctgccttaaacgctgttcagatatgtgaaagacttcttgttgttaattccttgcaa

SEQ ID NO: 214719 - DNA, 735 bp, Unknown
  Bacterial polypeptide expressing nucleotide sequence isolated from the Sargasso Sea
ataactcttcattttttagatacaaagaagatgtccctttaattgttccagaagtaaacgcaagtgatttaaagaaaaacagctctggtggtctaatagctaatccgaattgttcaacaattcagatgcttactgctataaaacctattcatgatgaatttattattgagagaattgatataactacttttcaagcagtttcaggcactggtaaagaagctgaaaaagaacttatttctcagtcaagctctaaatttactgatgtaaatcttaaattaaatgtaaatgtttataaaaaaccaatagcatttaatgtaatacctgaatgtggtgagttccaagagaataggtatacagaggaagaaatgaagttagtttgggaaactaaaaaaattatggattcttcgattcaagttaatgcaacttgtgtcagagtaccagtcattaatgggcactcagagtcaattcacttaaagacaaaaaaagatattaatttagataaagttttagaaatacttaagaataaagaaggactaagtgttttctatggaaaagggcctgatgattatccaacacccttaaccgattctaacggaaaaaataatgtatttgtagggcgtctaagaaaagatttatgggatgaaaatagattaaatctatgggtagtagctgataacttaagaaaaggagctgctctaaatagcttccaaattgcaaaattactttttcattaaa

SEQ ID NO: 214720 - DNA, 793 bp, Unknown
  Bacterial polypeptide expressing nucleotide sequence isolated from the Sargasso Sea
ttcttctctgcaggcgcaaacgtatcaagagtctttgcacccaaagcagcaaatgctggaaccatcgttattgataacacctctgaattcagatatgacgatcacattccgctcatcgtacccgaggttaatgctcatgctttaaaggatttcagaaaaagcaatattattgccaatccaaattgttcaaccatacaaatgcttgtagcactcaaccccatacatcaggctgcaagaatcaaatccatcaatgtatctacctatcagtcaatatctggggctgggcgatcaatgctcaatgaatacgatcgccaggttctcgattcaaactaccctcaacatgaggaaagcttattcgcacacaatgtcatacctcagattggttcatttgaaaataatggatatacattggaagaaatgaagatggtttgggaaacacataagatttttgaagataaaagtattgaggtaaacccaactgctgtgagggtgccagtgagatatggtcactctgaatcaataggtattatcactgagagttatctcagtattggtgaagtcagagagttgctctcagggtctcttggcatccaattgatgcaagatgatgaatcataccccatgccattaaaggagggcgaagggacagacgatgtctatattggaaggatacgagcagacttgaatcattcgaatggaatcaatttgtgggttgttgcagacaatataagaaaaggcgcagcactgaattcaattcagattgctgagaccatcattgaatcagattattaat

SEQ ID NO: 214721 - DNA, 794 bp, Unknown
  Bacterial polypeptide expressing nucleotide sequence isolated from the Sargasso Sea
agtgaaggaaaaaaaataaaatttaaagataatgaaataaaaattcaaagccttgaaaaatatgatttttctaatgctcaaataactttttttgctgctgggagtaaaatagccgaaaaatgggttccaaaagcaagtaaaaaaacagtcgtaattgataattctaaattttttagaatggataaagatgttccactggtagttccagaagtaaatccagaacaattatctatgtataaaaagaaaaatattattgctaatgctaactgttcaacaatccaaatggttttggcattaaaacctttgcatgataattttattattaaaagagttatagtttcaacatatcaatctgtttcaggcgctggtaaagcacctatggatgaacttatttctcaatcacaagattatctagcaggtaaaaaaattagttctaaaaattttacaaagcagattgcttttaatttaatcccccatatcgatgaatttgttgatgaaggttatacaaaagaagaatggaaaatggtgaacgaaactaaaaaaatactagatccaaaaattaaattaacagcgacatgtgtcagagtcccggttatggtttctcatgctgagtcaattaatgtcgaatttgaaaaatcatttgatattgaaaaagttaaaaatattttaaataaagcagatggttgtagagttttagatgaaagaaaaaatggaggttatgtaacacctttggaagctgaaaatagttatataacatttatctcaagaattcgtaaagatggttctaatgacaa

SEQ ID NO: 214722 - DNA, 823 bp, Unknown
  Bacterial polypeptide expressing nucleotide sequence isolated from the Sargasso Sea
aaaaaaattaaatttaaaggcaatgagataaaaattcaaagtctagaaaaatatgatttttctagtgcgcaaattactttttttgctgctggaagcaaaatagctgaaaaatgggttcctaaagcaagtaaaaaaacaattataatagataattcaaaattttttagaatggacaaagatgttcccttagtagttcctgaggtaaatccagaacaattagctatgtataaaaagaaaaatataattgctaatgctaactgttcaactattcaaatggttcttgttttaaaacctctgcatgatcattttaatattaaaagagttgtagtttcaacttatcaatctgtgtctggtggagggaaagcacctatggatgaattaattagtcagtcgaaagattatttatcaggaaaaaaaattgaatctaaaaactttacaaaacaaatcgcttttaatttaatacctcatatagatgaatttgtagatgaaggttacacaaaagaagaatggaaaatggaaaatgagaccaagaaaattcttgatccaaaaataaaaatgacagcaacctgtgtcagagttcctgtgatggtatctcattctgaatcaattaatgttgagtttgaaaaaaattttgatattaaaaaagtgaaggagatcttaagttctgcgacagggtgcaaggttatagatgaaagaaaaaatggcggatacataacgcctgtagaggcagcaaatagttatttgacttttatatctagaattcgaaaagacaattcgaatgataaagctttaaacatgtgggttgtttctgataatttactta

SEQ ID NO: 214723 - DNA, 808 bp, Unknown
  Bacterial polypeptide expressing nucleotide sequence isolated from the Sargasso Sea
ttttgctgccggaagtaaaatagcagaagagtgggttcctaaagcaagcaaaaaaactattgttatagataattcaaagttttttagaatggataaaaatgttcctctcgtagttccagaggttaacccagaacaattatctatgtacaaaaaaaaaaatataatcgctaatgctaattgttcaactatacaaatggtgcttgttctaaaaccattgcatgacaattttaaaataaagagagttgtggtctccacttatcaatcagtatctggaggtggaaaagctcctatggatgaattgattagtcaatctaaagaatatttatcaggtaaaaaaatagagtctaaaaattttacaaaacaaatcgccttcaatttaataccacacattgatgaatttgttgataatggatatactaaagaagaatggaaaatggagaacgagacaaaaaaaatccttgattcaaaaataagattaacggcaacttgtgttagagtccctgttatgatttctcattgtgagtcaattaatgtagaatttgaaaaagattttgatattaaaaaagttagagaaattttagcttccactgctggatgccaagttttagacgaaagaaaaaatggaggttatataacgcctgttgaagcagagaacagtcctttaacttttatttccaggatcagaaaagatagttctaatgaaaaagcattaaatatgtgggtggtttctgacaacttattaaaaggtgctgcattaaatacagtgcaaattgctgaaaaattaatcgaagaacattatggaaaataa

SEQ ID NO: 214724 - DNA, 784 bp, Unknown
  Bacterial polypeptide expressing nucleotide sequence isolated from the Sargasso Sea
tgctccgaaagctgcggctaaaggatgtattgttatagataacagctccctgtacaggtacgacccaaaagtgccgttgatcgtaccggaggtcaatgccgaagcgataaccgggtattcaaaaaagaatattattgccaacccaaactgctctacagcacaaatggttgtagcactaaagccacttcacgaccgtgcccgcattaagcgtgttgtagtaagcacttatcaatcggtttccggtgctggaaaagaaggaatggacgaactctgggatcaaacaaagtccatttataaccctgtaaccgacgtccctcccaccaaattcacaaagcaaattgcattcaatgttatcccgcatatcgataagttcttagatgacggaagcacaaaagaagaatggaaaatggtggctgaaacgaaaaaaataattgatacatctatcaaagtgacagcgacttgtgtgagagttccagtatttgttggccattctgaagcgataaatattgaatttgaagatttcttagatgaggacgaagcgcgcgacattctccgcgaggctcctggcgtcatggtgattgataagcgagatgatgggggatacgtgacgcctgttgagtgtgctggagactatgcaacctttatcagtcggctacgtcaagatagtactattgaaaatggtttgaacctgtggtgtgtgtcagataatctgcgtaaaggcgccgcacttaatgctgtccagatagctgaaacacttggtcaaagagtcctcaaaaagggttaa

SEQ ID NO: 214725 - DNA, 778 bp, Unknown
  Bacterial polypeptide expressing nucleotide sequence isolated from the Sargasso Sea
ggcaatgttgcagctgaaaaaacaattgtaattgataattcaaaatttttcagaaaagatccagaagttccattagtagttcccgaagttaatgcaaaagatttggttaacttcaaaaataaaaatataattgccaatgcaaattgttcagtgatccctttagttgttgctttaaaacctcttcatgatttatatagtattaaaagaatagttgtttcaacctatcagtctgtatccggagcaggtaaagaacctatggatgaattattatctcaaactaatgaatattttgaaaataaaaaattagaatcaaaattttttacaaagcaaattgcatttaatgcaatcccacatatcgatagttttttagaaagtgggtatactaaggaagaacaaaaaactacagacgaagttaaaaaaattttagataataaaattaaagttacatcaacctgtgtaagaatacctgttcttgtatcacattctttaagtacaaatgttgagtttaataaaaaatacaatctagatgaaatcagaaatgttttgtcaacttctccaggttgtaaagttattgatgaacttaaagatggtggatatattaccccggttgaagctgaagataaatttgagacatttatatcaagaatcagacaagatgaatcgcaacccaatacaataaatttatggattgtatctgacaacttacttaaaggggcagcattaaatgcagttgaaattgctgaaactttaattgaaaaagatttctatggaaaataac

SEQ ID NO: 214726 - DNA, 490 bp, Unknown
  Bacterial polypeptide expressing nucleotide sequence isolated from the Sargasso Sea
ttgtcttcgacccttcccaatcgccctctcaacgttgcagttctcggtgccagcggtgctgttggccaggaactgctgctgctgcttgaagagcgccgtttccccgttggcgagttaaagctgctggcgtccgcccgttcggccggccagacccaaagctggaatggccgcaccctcacggtggaagaggtttcggcccaatccttcgaaggggtcgacttggtgctggcgtcagccggtggttctgtttccaagcagtggcgcgaggcgatcaccgctgccggtgcggtgatggtggataactccagtgccttccggatggaggagggtgtgccgctggtggtgcccgaggtcaatcccgatgcggccttcgcccacaagggcgtgatcgccaatccgaattgcaccacgatcctgctcaccctcgctttggctcctttggcggccaagcgggcgatgcgccgagtggtggtgagcacctaccaatccg

SEQ ID NO: 214727 - DNA, 900 bp, Unknown
  Bacterial polypeptide expressing nucleotide sequence isolated from the Sargasso Sea
gctataattggagcctcaggaaacgtaggaagaaaaacaatagaaattttagaaaaatctaatctacctatggatgatctttttttaatagcatcttcaaaaagtgctggaaaaaaaataaaatttaaaaataaagaaatcaaaattgagaatttagaagattataatttttcaaaagctcaaatcaccttttttgctgctggaagccagatagctaaagattgggtgcctaaagcagcaaaaaaaacaatcgtaattgataattcaagttattttagaatgcaaaaagatgttccacttgtggtgccagaggtaaacccggatgcattgaatcaccataagaatattatttcaaatcctaactgttctactatgcaaatggttcttcctttaaaaccattacatgatgaatacaaaattaaaagagtaattgtttcgacataccaagcagtttcaggtgcaggcaaagcaccgatggatgaactttttaatcaatctaaagattatttaaatggaaaagaaattaagtcaataaattttacaaaacaaattgcttttaatttaattcctcatattgatagttttgaaaaagatggatacaccaaagaagagttaaaaatgactaacgagacaaaaaaaattcttgataaagaaattgaagtttctgcgacatgtgtgagagttccagtaaaaactggtcactctgaatcaataaacattgaatttgataatttatatgattttgagaacatcagaaaaatattaaaaagtgctcctggttgtaaagtcatcgatgaacacaaagatggaggatatattactcctcttgaggctgaaggtgagcacacaacttatatttctagaattaggaaagatcattccaatataaaagcaataaat

SEQ ID NO: 214728 - DNA, 616 bp, Unknown
  Bacterial polypeptide expressing nucleotide sequence isolated from the Sargasso Sea
aatggtggttgctcttaagcctattcatgatatcgcggagatttcccgagtaaacgtagcgacctatcaagcagtgtcaggtagcggaaaatcaggtattacagagttggccaatcaaacaagtgacctattaaatgctcgtgcaatccaatcaaatgtttatcccgcccagattgcttttaactgtttgccacatattgatgagtttcaagataacggctataccaaagaggaaatgaagatggtttgggagacaaaaaaaataatggaatgtccgtccatcgaggtaaatccaacggctgtgagggttcccgtattttttggacattcagaagctgttcacttcgagactaatagaaaagtaagtcgtgaacaggtgacccttgcgttgcaaaaggcgccgggggtaactgtaattgatgatcgaaacgatgggggataccccaccccaatagagcatgcggtagaaaatgatgatgtatttgttggaagaattcgagaagacatatctcatcctagaggaataagtatgtgggtggtctccgataatattagaaaaggtgccgctctcaatagtgttcagatagctgaaatactggtgcaaagtcatttatga

SEQ ID NO: 214729 - DNA, 658 bp, Unknown
  Bacterial polypeptide expressing nucleotide sequence isolated from the Sargasso Sea
caaaaaaaaaaatattattgctaacgccaactgctcaactattcagttggtgcttgcattaaaacctttgcatgaccagtttaaaattaaaagagttgttgtttcaacctatcaatctgtatcaggggcaggaaatgctcatatgaacgaattagaagaacaaagtaaaaaagttttagacaaacaaaaagtagtttcaaaaaattttacaaaacaaatagcctttaatgttattccacacatagattcttttatggaagatggttatacaaaagaagaatggaaaatgattgtggaaacaaaaaaaattttggattcaaacgtatctctaagcgctacatgtgtcagagtcccagtttttgttggacattctgaatcagtaaatattgagtttaattcagcagttaatgctaataaaattagagagtgtttaaaaaaagcaccaggatgcaaagttgtggatgaaataaaagatggcggttatataactccagttgaatctagtggtgactttacaacatacatctcaagaataagggacgacaaaacacaaaaaaattctataaatatgtgggtagtatctgacaatttgcttaaaggggcagctcttaatgcagttcaaattgcaaatgttttgattaaaaaatatattaattaa

SEQ ID NO: 214730 - DNA, 739 bp, Unknown
  Bacterial polypeptide expressing nucleotide sequence isolated from the Sargasso Sea
tgctttaggatggatgataaagttcctttaattgttcctgaagttaatcctgaagcgattaatggttataaaaataaaaatataattgcaaatcctaattgttcaactatccagttagttgttgctttaaagccaatacacaaaaaatatgaaatatcaagagttgttgtctcaacatatcaagcagtttcaggagctgggaaaccagctatggacgaactttttagtcaaacaaagggtgtttttgttcacgatcaagctaaaccagaacaatttacaaaaaaaatagcatttaatgtaatccctcatattgatatttttatggatgatgggtttacgaaagaagagtggaaaatgagggttgagacaaaaaaaatattagatcctaatattgatttggttgctcattgcgtaagggttccagtgtttattggtcatagtgaagcggtttttatagaatgcaaaaaagacatcgatgaaaaaaatgttagaagtttattaagagatgctaatggtgtaacagtggtagatcaccgagcagatgaaggatacgtaactcccgaagaagtggctggtgaagatgatgtttatattagcagaatcagaaaagatccttcagtaaaaaatggtattgttttttggtgtgttggagataatttaagaaaaggtgcggcattaaataccgtccagatagctgaattgttggcaagcaaaaaaattaaaggagtccctctttaat

SEQ ID NO: 214731 - DNA, 661 bp, Unknown
  Bacterial polypeptide expressing nucleotide sequence isolated from the Sargasso Sea
tttagacgattatacacttccaggaattattgctaatcccaattgttcaactatacaaatgcttgttgctttaaaaccgttacatgatgaatttattattgagagaatagatgtaactacctttcaggctgtatcagggacaggaaagaaagctactgaagaattaatgaatcaaatagatgcttatgaaggaaacacagaacttaaaagctcggtttatgccaagccgattgctaacaatgtccttcctcattgtgatgagtttgaagagaatagatatactaaagaagaaaataaactggtaagagaaactcataagattcttgatccgaacatacatgttgccgcaacgtgtgtaagagttcctgtactaaatggacattctgaatcagttcatataaaaactaaaagacctgtatctgaagagttagctctaaagcttttacaagaagcacctggcctatctgttaaatacggaaaatcggaagaagattatcctactgcatttactgacggagatggaagttactttgttcaagtaggtagagtgagaaaagatctttgggatgaaaacagacttaatttatgggttgttgctgataacttgttaaaaggagctgctttgaatagcatccaaatagcttcactattatttgattaa

SEQ ID NO: 214732 - DNA, 883 bp, Unknown
  Bacterial polypeptide expressing nucleotide sequence isolated from the Sargasso Sea
ggtccgatctctatcagattttgattttgaaggcacagatatagcattgttttcgccaggcgctaaggtttctgctattcatgccactcgagcagcgtccaaggggtgtgttgttattgacaatacatctcaatttcggatggaatcagatgttcctcttgttgtcccagaggttaacccggaagctattagcggttattctaataggaatattatttcaaatccaaattgttctacaatccaaatggttgttgctttaaagcctttgcatgatgcttttgacataaagcgtgttgttgtttctacctaccagtcaacttctggagctggaaaagaggctatggatgaattgtttaatcaaacgcgggcaatctttgtaaatgatcgacttgataaaaaagagtttacaaagcagatcgcatttaatgttatcccccagatagatatctttatggaagatggctctacaaaagaagaatggaaaatggttgttgaaaccaaaaaaattcttgacgcaaagatagatataacagccacatgcgttcgtgtgccagtgtttatcggtcatgccgaatcaataaatattgaatgcaaaaaagaaattactactgattctgcgcgcaagttgttaagggaatcagagggagtgtctcttatagatcatcgtgcggacgaaggttatgttactcctgttgaagccgccggagacgacctagtttttgtaagtcgagtaagagatgattccacaatagctaatggacttaatttatgggtggtgtccgataatttacgtaagggggcagctttaacacagtgcaaattgctgagctgttggatcgtaaacaccttaataatctgtgtgctaattagtaactttgattga

SEQ ID NO: 214733 - DNA, 513 bp, Unknown
  Bacterial polypeptide expressing nucleotide sequence isolated from the Sargasso Sea
catggctcagcaatacgacgtcgctgtgttaggtgctacaggtttagtaggccagcatttaattgaaattttagaacagcgcgattttccggtaaataaactttatcctttagccagcagccgctctgccggtggttttatcacctttaagggtaaacaaatcgaagtactggatgctgagacttttgactggactaaggtgcagatcggtttgttctctgcgggtggcagtgtttctgcaacttatgcacctcgtgctgccgatgctggttgtgtggtgatcgacaacacctcacatttccgctacgaagccgatattccactggtggtgccagaagtgaatgcgcacgctattgctgagttccgtaaccgcaatatcatcgccaacccaaactgctccaccattcaaatgctggtggccttaaagcctattcatgatgccgtaggtatcagccgtattaatgtggccacttatcagtcggttgctggtgctggtcaacagggcgttgaggc

SEQ ID NO: 214734 - DNA, 931 bp, Unknown
  Bacterial polypeptide expressing nucleotide sequence isolated from the Sargasso Sea
tttgcaataatcggtgccaccggtaacgtaggcagaaaaacaatcgaagttttagaaaaatcaaaaataggagtagataatctttttttaattgcatctaaaaaaagtgctggacaaaaattattttttaaaaaaaaagaaattattgtagagcaattggaaaattacgatttttcaaaagccgaaattacaattttcgcagctggtagtgaaatagcaaaaaaatgggcgcctaaagcatcaaaaaaaacaatcgtcattgacaattcaaaacattttagaatggacaaagatgttcctttagtagttgctgaagttaatcctaaggatttaaatactcataataatattatagcaaatcctaattgctctacgatacaattaatgcttccgctaaaacctcttcacgtaaagtacaagattaaaagagtgatagtttcaacttatcaggcagtttctggagccggaaaagcttcagtagatgagttatttagtcaaacaaaagaatatttaaataaaagagaaattaaatctaaaaattttacaaagcaaatagcatttaatttaattccacacatagactcttttgttaaggatggttatacaaaagaggaatggaagatggaaaatgaaactaaaaaaattttagatcaaagtataggtcttactgcaacctgtgtgagagttcctgtgaagacttctcattcagaatctgtaaatgttgaatttgaaaatgaatttgatttagaaacagttagaaaaatattaaaatctgctccaggatgcaaagtagttgatgaacaagtagacggaggatatattactcctctagaagcagaagatgatcatttaacttttatttctagaattagaaaagataattctaacaataaagcattaaatatgtgggtagtatctgataatttataaa

SEQ ID NO: 214735 - DNA, 568 bp, Unknown
  Bacterial polypeptide expressing nucleotide sequence isolated from the Sargasso Sea
ttgaaaaaatatcgtattggaatcgtaggggcaacgggcgccgttggccaagaaattattcgcctgctcgaaaagagagaatttcccgttgccgaagctcgccttctcgcatctgcaagatctgcaggccgagagattcaagcttgcggcaacctcgagaccgttcgggagacctccgccgaagcattcaatggtctggacatggcgatctttagctccggatcgcaaagttcgcaggaatttgcagaaattgccagaaggcagggctgcgtggtcatagacaacagttcagcctttcggatggatgccgacgtccccttagtcgtacccgaaatcaacggtgatgccctggagactcaccgaggcctaatcgcaaacccaaattgctccaccgccgtcgcgctcatggggctttatcccctacacaagcgctttgggcttaaaaggttcattgcatcgacctaccaggccgtttccggagcaggtgctgcaggagtagcggaattgaacgatcaaacaaagaaggttctggccgaggaaccacatgagcccaaccccgattcgattt

SEQ ID NO: 214736 - DNA, 673 bp, Unknown
  Bacterial polypeptide expressing nucleotide sequence isolated from the Sargasso Sea
atggggtttaattacgcagttgtgggggccacgggaaatgttggccgggaaatactacaaattcttgcagaaagaagtgtgccttcgagtgaggtaatagctattgcctctgctgcctctaaaggaatagaggtgccttacggagatgacgcggtcttgcaagttgatagccttgagacttttgattttggtaatgtagatattgttctttcaagtcctggagctaatgtttcaagagaatttgctccaaaagcagccgcagctggcgccatagtaattgataatacttcagagtttaggatggacccagaggtgccgttggtagttcctgaggtgaatgcagaagctttagtaaactataaagcaaaaaatattattgcaaacccgaactgctctacaattcaaatggttgtagccctaaagccccttcatgatgaggtgggaattaatagagttgttgtttcaacctatcagtctgtttcaggtgccggcaaatccgctatggatgagctatttaatcaaacccgagggatttatgctaatgagcccgagcaaaagtttatggaaaattttacaaaatcgatagcttttaatgtgatacctcatatagatgtttttatggaagatgggtccacaaaggaagagtggaaaatgtctgtagagacaaaaaaga

SEQ ID NO: 214737 - DNA, 601 bp, Unknown
  Bacterial polypeptide expressing nucleotide sequence isolated from the Sargasso Sea
ccacttaaaccacttcacgataggtataaaattaaaagagtaatagtatctacatatcaagccgtatcaggtgcaggtaaagcctctgtggatgaattattcagtcaaacaaaagaatatttaagtggaaaaaaaattaaatcaaaaaattttacaaaacaaattgcatttaatttaattccacacatagatgtatttgttgatgatggttacacaaaagaagagtggaaaatggaaaatgagacaaaaaaaatactagataataaaataggtttgaccgctacttgtgtaagagttccaataaaaacttctcattcggagtcggtaaatattgaattcgagaatgactatgaattagacgcagtaaaaaaactcttaagaaatgctcctggatgtaaagtaatagatgaacataaagatggaggatatattactccagtagaggctgaaggagattatcttacttttatatcgagaataagaaaagatcattcaaatagtaaagcattaaatatttgggtagtttcagataaccttttgaaaggtgctgctttaaatactgttcagattgtggaacacttaattaaaaacaattcttaga

SEQ ID NO: 214738 - DNA, 547 bp, Unknown
  Bacterial polypeptide expressing nucleotide sequence isolated from the Sargasso Sea
atgtcacagcatgttgccattgccggagcgaccggtgcagttggaacagaattcttaaaacttttggaagcacgagattttccgatgaaaagtcttcggttgcttgcttcttcacgatctgcgggatccaaactgaagttccggggtgagaacttggaagttgaggaactgaccccgaaatcctttgcagggattgatatcgcattcttctctgcaggaggctcaaggagcaaggaattcgcaccccatgcagtggattccggtgcggtggtgatcgataacagcagtgctttcaggatggatgaaaaggtcccccttgtggttccagagattaatcctaagcaagcatttgagcatcagggactgattgccaatcccaactgttcgaccatccagatggtggtagctcttaacccgatccatcgtgcagccaacatccagcgtgttgtagtttccacctatcaggccgtttccggcgcaggcgccagtgcgatggaggaactcaaacaacaactgcgggcctgggcaaatgagaaccgagaagcag

SEQ ID NO: 214739 - DNA, 656 bp, Unknown
  Bacterial polypeptide expressing nucleotide sequence isolated from the Sargasso Sea
catgaaggtaggtctcgtcggttggcgcggcatggtcggcagcgtgctgatgcagcgcatgcaggaagaaaaggatttcgacctgatcgacaccgtgtttttcagtaccagcaatgctggcggtaaggcaccggcattcgccaagacggatgcgcctctggccgacgccaatgacatcgaagcactgaaggcatgcgacacgatcatcacgtgccagggcggtgactacacgaccgaagtcttcccgaagctgcgcgctgccggctggaacggctactggatcgacgccgcctcgacgctgcgcatggaagacgatgccgtgatcgtgctggacccggtcaacctgtcgctcatcaagaacgcggtggcggctggcaccaagaacttcatcggcggcaactgcaccaactccatcctgctgatgggcgtgggtggcctgttccgcgaaggtctggtcgaatgggtcagctcgatgacttaccaggcagcttcgggcggtggtgcgaaccacatgcgtgaactgctcaagggcatgggcgtaattcacggcgccgtggctgacgagctggccaacccggcgtccgccatcctggacatcgatcgcaaggttgccaagaccatccgcgaagatgtgcctaccgaattcttcccggcgc

SEQ ID NO: 214740 - DNA, 418 bp, Unknown
  Bacterial polypeptide expressing nucleotide sequence isolated from the Sargasso Sea
tatgccaagtggacaatcaaaggaagaatggaaagcacaagttgaagctaacaaaattttaggctctactcagcagcctgtacctattgatggtttatgtgttcgtattggcgcaatgcgttgtcatagccaagcaatgactattaaattacgcgaagacataagcgtagagaaaatagaagaaatattagcttcgcacaacgagtgggttaaggttatcccaaatgagcgtgatattacatccaccgatttaacgccggttaaagtaacaggcacgctaagtatcccagtgggacgtattcgtaagcttgctatgggacctaaatatattagcgcattcacagtgggcgatcagcttttatggggtgcagcagagccacttcgtcgtatgcttcgcattattgtagacgctgagtaa

SEQ ID NO: 214741 - DNA, 1018 bp, Unknown
  Bacterial polypeptide expressing nucleotide sequence isolated from the Sargasso Sea
aatgagtaaccgtataaacatagcattaataggcgcatccggcgttgttggaagaaagattatttctttattagaaaagaaaaatattgatgtaaataatttttatccgcttggctcatcttctgtaggagaagaaatatcatttaatcaaaaaatatttaagatagataaattgtctaattttaattgctcaaagatagacttagctattttttctgctggttcttctgtagcaagagactatgcacaagattttgtaaaacaaggagtttatgtaatcgatttatcctcagaatttaggtacgaagaaaatattcctttaatcattcctgaaattaatccaagtgcgcttatagaagcaactaacccaatattaattgcaaatccaaactgttcagtctcacaactcttaatggcgattgaaccaattcataagaaatataaaatcgatatattaaatattgcaacatatcaggcagtatctggtacaggtcgaaaggcagttgaagaacttgaaaatcaaattaaagatgcatctattaaaccaagcgtatatccaaaaaaaatagcatttaatgtaattcctcaatgtgatgtttttcttgaaaatgattttaccaaggaagaaatgaaggtagcatgggaaacaaaaaagattcttgatcctaatattgaagttcaggcaacatgtgtgagagttccggttgtcaacggccactcagaagcagttttttttagaaccgcacaagaagtttcaaaagatgaaattatagaattactatcttcttcaagaggaataactgtaattgataatccacaaaatcatgattatccaactccattagaacatgctgatgataccgaagaggtatatgttggaagaataagatcagaatcaataaagaatgaaaactgggtttcaatgtggattgttgctgataatgtttatggtaaaggcgcggctctaaatgctgtccaaataatagaaactttaatagagaacaataaattatgttga

SEQ ID NO: 214742 - DNA, 1006 bp, Unknown
  Bacterial polypeptide expressing nucleotide sequence isolated from the Sargasso Sea
tatgaatatagcaatcgttggggcgacaggtaatgtcggtagaaaaattttagaagttatagaaaaactaaatttgaaatttagtgaattgtatcttattgcctctgataaaagtatcggaaaaaaaataaattttaaaggtaaaaattattctattgtaggtcttaatgattttgatttttcaaaagtaaaaatagcatttttttctgctggaagcgctattgcggaaaaatgggctcctgttgctgcaaagaaaacaattgttattgataattctaagcattttagaatggaaaaagatattcctttgatagtacctgaggttaatgctgatgctttaaaaagttacaaaaataaaaatattattgctaacgctaattgttcaacgattcaattggtcttagctttaaaacctttgcatgatcaatttaaaattaaaagagtaattgtttcaacctaccaatcagtatcgggagcaggaaatgtccatatgaatgaattagaagaacaaagtaaaaaagttttaaataaacaaaaggtaaactcaaaaaattttacgaagcaaatagcctttaatgttattcctcacatagatacttttatggaagatcgttatacaaaagaagaatggaaaatgactgttgagacaaaaaaaattctagactcaaatatatctttaagcgcgacatgtgttagagtcccagtctttgtaggacattcagaatcagtaaatattgaatttaattcagaagttaacgctgaaaaaattagacaatgtttgcaaaaagcacctggatgcaaggttgtagatgaaaccaaagatgggggctatattactccagttgaatcgagcggagattttatgacttacatttcaagaatacgggatgatcaaacacaaaaaaattctataaatatgtgggtagtatccgataatttgctcaaaggtgcggctctaaatgcggttcaaattgcaaatatattgattaaaaaatatattaaataa

SEQ ID NO: 214743 - DNA, 1006 bp, Unknown
  Bacterial polypeptide expressing nucleotide sequence isolated from the Sargasso Sea
tatgaatatagcaattgttggagcgacaggaaatgttggaaggaagcttttagaagttatagataaactagactttaaatttagtgagctttaccttattgcttccgataaaagcattggaaaaaaaataacttttaaaaacaaaacttattctattattggtctaagtgattttgatttttcaaaagtcaaaatagcatttttttctgctggtagtgtcatagcagaaaaatgggcaccgattgctgcaaaaaaaacaatcgttatagataattctaaatattttaggatggataaagatattcctttagtagttccagaggtaaatgctgatactttaaaaaattataaaaataaaaatattattgcaaatgccaactgctcaacaatccaattagttttggctttaaaaccgctgcatgacaaatttaaaattaaaagggtaattgtttcaacttatcaatcggtatcaggcgcgggcaatgctcatataaaagagttagaggaacagagcaaacaagttttaaacaaacaaaaggtaagttcaaaaaattttacaaaacagattgcctttaatgtaattccacacatagatgcttttatggaagatcgttacacaaaagaagagtggaaaatgactgttgaaacaaaaaaaattctagatcaagacttatctgtcagcgcaacatgcgttagggttccagtatttgttggtcattccgagtctgtaaatattgagtttaataaagaagttaattctaaaaaagtaagagagtgtttggaaaaagcttctggctgcaaagtagtagatgaaaccaaggatggtggttatatcactccagttgaatcaagtggtgattttataacttatatttcaagaatacgcgacgaccagacacaaaaaaattctgtaaatatgtgggtagtatctgacaatttattaaaaggtgccgctcttaatgcagttcaaattgcaaatgttcttattaaaaaatatattaaataa

SEQ ID NO: 214744 - DNA, 1003 bp, Unknown
  Bacterial polypeptide expressing nucleotide sequence isolated from the Sargasso Sea
aatgaaaatctcaatagttggagctactggtcttgtagggcgaaatataattgagctctgtgaagaatattttgacaattctgttgaataccatctttatgcatccaaagagtctgaaggcaaaacactgcaagttaatggaaaagaagttcccattagagagttaagttcaaagaatattgagtcatgcgatattgctttgttttcagctggaggagaaagatcaagagaatttgcaaatcaatttgtagacaaaggcgctttcgtaatcgataattcatcatctttcagaatggaaaaaacagttcctcttgttgtttacggtattaatgaagacataataaaaaacgattcgaaaattatagccaatccaaactgtacaactatggcccttgttatggctttaaaaccattacacgatatttttaatttattaagtattgttccagtttcatatcaagctgtttcaggttcaggcaagagtgcaattgaatcgttagaaaatgaacttgctaacctttcaacaccaggatcagcgcctgatgaaaaatattatcaatcccagatagcgaagaatgtaattccaattgctggaaatattacagaaaatggatactcagatgaagaaatgaagttttctaatgagtcaaaaaagattttggacataccggacttaaatgttgagccatctaatgcaagggtaggtgttgaaactggacatggtatattttgtactgcaacatttgaaaaagatgttgatgttgaatctgctattgaatcattggaagcatttgaaggtgtagaatactggaaagaaacttatccgacacctcttgatgctcaaggaaataaaaacatcttagtctctagaatgagatccggtcttacaagcaataaaatactaaacttctgggcagttggtgacaatctcttaaaaggagcagcattgaatgctgttcaaattgctaaccacctatacaaaaatgatttctataccaaataa

SEQ ID NO: 214745 - DNA, 1009 bp, Unknown
  Bacterial polypeptide expressing nucleotide sequence isolated from the Sargasso Sea
catgaatattgtaatagttggagctacaggaaatgtaggaagaaaaacattggaagttcttgaaaagaaagaactgccaattgacgaattatacttggttgcttcatcaaaaagcactggaaaaaagattaattttaagggcaaggagttagaagtatcagatcttgaaaattttgatttttcaaaagttaagatagctttttttgcagctggtggaaaaatttcaaaaaaatttgctgtaaaagcagcagaagattgtattgtaattgacaattctagttattttagaatggatcctgaagtgcctttaatagttccgcaagtgaactctaatcatttaaataatataaaaaaaaatattatcgccaatccaaattgttcaactgcacaactagtaatggctctaaaaccattacatgatttgtttattatcaaaagagtagtagtatccacataccaatctgtttcaggcgcgggaaaagcatcaatggatgaattaatagaacaaactaaattagctttggaaggtaaaaaaattgaatctaaaaactttacaaaaacaatagctttcaatgctattcctcatatagatgttttttctgacaatggttatacgaaagaggaattaaaaatgagcaatgaaactaaaaaaattttagatgaaaagattgatttaacagcaacgtgtgtgcgactaccgatatctgtatctcactcagagtcagtaaatttacaatttgaaaaaaattattctcttgaaagagtaagagaagctttagataattttaaaggctgcaaggtgattgatgaaagagttgatggtggttatacaacacccttggatgctgaaggaaaagatgatacatttatctcaaggatcagagaagatagaacagtaaaaaatggattaaacttgtggattgtttcagataatcttttaaaaggtgcagctttgaatgctgtggaaatagcagaaacgttaattaaaaataatttttatggaaaataa

SEQ ID NO: 214746 - DNA, 994 bp, Unknown
  Bacterial polypeptide expressing nucleotide sequence isolated from the Sargasso Sea
tatgaattttgcaattattggtgcctcaggtaacgttggaagaaaaacaattgaaattttagagaaatctaaaattaaattcgacaacctttttttagtagcttcttcaaaaagcgcaggaaaaaaaattaaatttagaaataaagaaattgagattgaggttttagaaaattatgatttttctaaagcacaaattactttttttgcagcaggaagtgagatcgcgaaagaatgggctccaaaagcatcaaaaaaaactataataattgacaactcaagttattttagaatgcaaaaagatgttccacttgtagtttcagaagttaatcctgaagctcttgataaacacaacaatataatttcaaacccaaactgctcgacaatgcaaatggttttagcattaaaacccttacatgatgaatacaaaattaaaagagtggtagtctcgacttaccaagctgtatctggtgcaggtaaagcatcaatggacgagctgttcgatcaatcaaaaaaatatttagagggaaaaaaagttaattctcaaaactttacgaaacaaatagcgtttaatttaatacctcacatcgacgtttttgaaaaagatgggtatacaaaagaagaattgaaaatgactcatgagacaaaaaaaattttagataatgctatcgaagttacagcaacttgcgtaagggttcctgtgagaacagggcattcggagtcaataaatattgaatttgaaaacctttacgattttgaaaatataattaagatccttcaaacagcacctggatgtaaagttgttgatgaaagaaaagatggtggttatataactcccttagaagccgaaggtgactatacgactttcatttctaggataagaaaggacaattccaatattaaagctatcaatttgtgggtagtttctgataatttattaaaaggagcggctttaaatacagttcaaatagcagagagtttgatgaaaaaaatataa

SEQ ID NO: 214747 - DNA, 1021 bp, Unknown
  Bacterial polypeptide expressing nucleotide sequence isolated from the Sargasso Sea
aatgaaaaattatagtgttgcaatagttggcgctacaggagcagttggcagaatgatgttgaaagttctagaggagcaaaattttccaatatctgagctttatttactcgcaagtaaaagatcaaaaaataaaacaattcaatacaacgatcatgatttagtggttcaagatattaatgattttgatttctctaatgcagatatttctctattctcagcgggctcagaagtatcaaaaaaatttgcacctacagcagctgaaaaaggctctatagttatagataatacatcgtattttagatatgaagatgaaataccactaattgttcctgaagtaaacccagaggaaatagaaaattttaaaaataaaaatattatagctaatccaaattgctctaccatccaaatggtagtggcattaaaacctattcacgatctttactctattcaaaaaattaatgtttcaacttaccaagctgtttcaggaactggagtaaatgcaattaatgaattaatatctcaaattaaagagttttcagaaaacaagaaattaacagcagaagtatatcccaaaagaattctcttcaatgcacttcctcacatagacagttttatggaaaatagatatacaaaagaggaaatgaaaatggtttgggagacgcaaaaaatattagataaaaatattctggtaaatgctacagcagtcagaattccagttattacaggacactcagaatctattcatgtagagtgcgaaaaagaaatagtattaaaaaaagtttttgatgaacttaacaaatacaaagatataataaaagttatagatgacattgaagaccctagttaccccacaacagtggaatctgaagattctaaccatgtttttgttggccgactaaggaatgatataaaccacaaaaatagtttaaatctatgggttgtaagtaataatttaaggaaaggtgcagcatataatagcgttcaaatagctgaattattagtaaagaaaaaattaatttaa

SEQ ID NO: 214748 - DNA, 1045 bp, Unknown
  Bacterial polypeptide expressing nucleotide sequence isolated from the Sargasso Sea
aatgactcaaaaatacaacatagcagtagcaggagcaacaggtgcggtaggaacagaaatagttcaaatattagagcaaagggattttccaatagacaatttatatttacttgcatcatcaaaatcaaaaggcaaaaaagtagagtttaaagataaagaaattgttgtagaagacttatcagaatttgatttttcaaaagctcacattggtttattttcacctggcggtaaaatttctgcagaatatgcaccaaaagcagctaaaaaaggatgtattgttatagacaatacctctcattttcgaatgcaacaaaatattcctttaatcgttcctgaagtaaacgctaatgcacttgatgaattttttgatgatgaaaacagaactaatattatttcaaatcctaactgttcaactatacaaatggttgttgcattaaaaccacttcatgaaaaagcaattataaacagagttgttgtatcaacatatcaagctgtttctggagcaggtaaaacaggtatggatgaattatttaatcagactcaaaatgtttatgcaaaccaagaattaaaaaaagaaaagttcacaaaacaaattgcttttaatgccattccacacattggagcttttttagaaaatggtaatactgaagaagagcaaaaaatgattgatgaaacaaaaaaaattctagacgagggaattaatgtttcagcaacttgtgttagaacagctgtatttattggccattcagaagctgtaaatatagagtttgattcaccattagatgaaaaagaagctaacgaaatattatctaattctgaaggtatttcagtaattgattatcgaaaagatgaaggttatgtgactcctgttgaaattgcaggagaggataaagtttatattagtagaattagaaatgatcaatcaatagacaatggtttgaatttatgggtggtctcggataatttgcgcaaaggagcagcgcttaatgctgttcaaattgctgagttaataatttcaaagtattcagaaaaaataaatatttaa

SEQ ID NO: 214749 - DNA, 967 bp, Unknown
  Bacterial polypeptide expressing nucleotide sequence isolated from the Sargasso Sea
atgcttaatattctctctgataaaaactatgatgctaagaatatatttgccgttgcatcagagcgaagtgcgggttcaacagtagaatatgggaatacagagctcactgttgaagcaatagataattttgacatttcaaaagtacaaatagcattattttctgcaggttccgacgtctcaaaagaatgggcgccaaaattcggtgaaaagaattgtgttgttattgataactcaagccaatttcgaatggatgatgatattccattaatagtgccagaggttaacccagaagctattcaaaatttcaagaataaaaatataatagcaaatccaaactgctcaacaattcaacttgtggtagcgcttaaaccattgcatgaaatatcaaaaataaaaaaagtgattgtatcgacatatcagtctgtatctggtgcaggcaaggctgcaatggatgagttatttgatcaaactaagaatatgttttcagatgaaataaaggaaaatataaattttacgaaaccaattgcatttaatgttattcctcatattggtgattttgtagatgatggttatacaaaagaagaaattaaaatgagagaggaaactaataaaatattagataaagatattcaatttagtgcaacttgtgtaagggttcctgttttcataggccatgcagaagcggtcaatgttgaatttgagaataaagtaagtgtcgatgaagcacgcaatgctattaaaaatgcatctggctgcagtttacttgatgagcgcaaagatgggggttatgtcacgcccaaagaatgtgcgggcaatgacgatacttatgtttcaaggataagagaagattctgcaatttctaatgcattatcattatgggtagtttctgataatttaagaaaaggggctgcacttaatactattcaaatagcagaaatattaatggagaaacacttaaatcaatgag

SEQ ID NO: 214750 - DNA, 1030 bp, Unknown
  Bacterial polypeptide expressing nucleotide sequence isolated from the Sargasso Sea
aatggcttataatgttgctgtagttggtgcaactggcgccgttggaagagaaatgcttcaaactttgtttgaaagaaagtttccggtaaaaaatatttatgcgttagcctctaaatcatccattggaaaagaagtctcttatggagatgacaaagttttaaaagttaagtctgttgatgattttaattttgaaaatgtggatatagctcttttttcagcaggttccaaaattgctaaaaaatttggtccagttgcaggaaacaaaggttgcatagttattgataattcttcttgcttcagaatggatgatgaggttcccttaatagttcctgaggttaatcccgaggctattaataattataataaaaaaaatatcatagctaatcctaactgttctaccattcaattagttgtagcgttaaagccaattcataaaaaatttgaaatatcaagagtggttgtttcgacctatcaggctgtttctggtgctggaaaaccagctatggatgaattatttaatcagacaaaaggtgtatttgtgcatgatcaggcaacacctgaacaattcacaaaaaaaatagctttcaacgttataccacatattgatatttttatggataatggatttacaaaagaagaatggaaaatcaatgttgaaactaaaaaaatactggaccccagtataaatttagttgctcattgtgttagagttcctgtctttataggtcatagcgaagctgtttttgtcgaatgtaaaaaagatattgatgaaagacaagttagaaacttattacgggatgctaatggaattacagttgttgaccatagggctgatgagggttatgtgacacctgtagaggttgctggtgaggacgatgtttatataagtcgtataagaaaagatccatcagttaaaaatggaatagctttttggtgcgtaggagataatttaagaaaaggtgcagcgttaaacacagttcagattgctgaattattggtcagtaaaaatcttaagggaatttcactctaa

SEQ ID NO: 214751 - DNA, 967 bp, Unknown
  Bacterial polypeptide expressing nucleotide sequence isolated from the Sargasso Sea
aatgttaaatattctctctgaaaaaaaatatgatgcgtcaaaaatatttcctgtagcttctagtagaagtgaaggcatggaaattgaatttggggaggataaactaattgtagaatctattgaaaagtttgatccttcaaaagtagaattggcactcttctctgcaggagctagtacctcaaaggaatgggcaccaaagtttgcagaaaaaaactgtattgttatagataactctagtcattttagaatggaagaagatattcctctggtcgtacctgaggttaacccaagtgatctaaataattataaaaaaagaaatataattgctaatccaaactgctcaacaattcaattggtggttgccttaaaaccattgcacgaaatttcaaaaataaaaaaagttattgtatcaacttatcaatctgtttcgggtgcaggtaaggctggtatggacgagttgtttgagcaaacaaaaaatatgttctctgatgatattaaagataatgttaagtttaccaaaccaattgcctttaatgtcatacctcatattgataaattcatggatgatggatacacaaaagaagaattaaaaatgagacaagaaactcataaaattttaagtagtgagatcagctttagcgctacatgtgttcgcgttcctgtatttattggtcactctgaagctgtaaatattgagtttgaaaacaaaatttcagtagaagaagcacgtgaagctattaaaaatgctcctgggtgcacactacttgatgaaagagctgatggaggttatgtaactccaaaagagtgtgctggaaatgatgacacgtatgtatcgcgaattcgagaggatacgtctacaaaaaatggattatctatttgggtagtttctgataatttaaggaaaggtgctgctttaaatacaatccaaatcgctgaaatgctaattgaggaacatttatctaaatga

SEQ ID NO: 214752 - DNA, 1000 bp, Unknown
  Bacterial polypeptide expressing nucleotide sequence isolated from the Sargasso Sea
atgaaatttgcaattattggcgctacggggaacgtaggaagaaaaacgattgatattttagaaaagtctaaattagacattgaacaattacatttggttgcctcaaaaaatagtttaggaaaaaaaataaaatttaaaggtgataacctgaccgtagtcgctttagaaaattttgattttgaaaaagcagatattactttttttgctgcaggaagttctattgcagaaaagtatgcaaaaaaagcttctaaaaaaactgtcgtaattgataattcaaaatttttcaggatggataaagatgttcctcttattgtgcctgaagttaactctgaggatataaaaaagcataaaaatattatagcaaatccaaattgctctactattcaaatggttttggcacttaaaccactgcataaaaaatttaacattaaaagagtagtagtttcaacatatcaggctgtttctggagctggaaaagctgccatggatgaactaataagtcagacaaaagattttttagaaaataaaaaaattaagtcaaaaaattttactaaacaaatagcttttaatttaattcctcatatagacgtgtttgtagatgatggatacaccaaagaagagtggaagatggaaaatgaaacaaaaaaaatattaagtggtagcataaaagtctctgcgacttgtgtaagagttccagttattacatcgcactctgagtcagtaaatgtagaatttaaaaaaaattataatattgatgaagttaaaaaattattaagcgagacccctggttgcaaacttattgatgaacattcagatggaggatatatgactccacttgaagcccaggatgatttcaaaacttatatatctagggtgagaaaagatagatctaatgaaaaagcaattaatatgtggatagtttcagacaatcttttgaaaggagcggcacttaattcagtgcaaattgcagaaacattagtaaagtacggcttaaaataaa

SEQ ID NO: 214753 - DNA, 1015 bp, Unknown
  Bacterial polypeptide expressing nucleotide sequence isolated from the Sargasso Sea
tatgagcttaaatatcgcaatagttggagcaactgggaatgttggtagagagatgcttaacatactttcagatagaaagtacgactcatctagcatttttcctgttgcctcgagtaaaagtgagggagcaaaagttgaatttggagacaaggagctcacagttgaagctattgataaatttgatcctgcaaaagtcgatctagcactattttccgcaggagctagcgtatcaaaagaatgggcacacaagtttgctgaaaaaaattgcattgttatcgataattcaagtcaatttagaatggataaagatattcctctaattgttcctgaagtaaaccctgaagcgataagagattacaaaataaaaaatattattgctaaccctaattgttcaacaatacaactagtcgtagcattaaaaccattgcacgaaatttcaaaaataaaaaaggtgattgtatcaacctatcaatctgtttcaggcgcaggcaaggctggtatggatgagttattcgaccagacaaaaaatatgttttctgacgaaataaaagacaacataaagtttacaaaaccaattgcatttaatgttattccacatattgataaatttatggatgatggttatacaaaagaagaacttaagatggatcaagaaacaaaaaagattttatctaatgaaataagttttagtgcgacttgtgtgagagtaccggtctttattggtcattcagaggcagtgaatatagaatttcacgaaaaagtttctgtagaacaagcaagagatgcaattaaaaacgcaccaggttgtaaattattagatgaacgtgaagatggtgggtatgtaacaccaaaggaatgtgctggcaatgatgatacttatgtctcaagaattagagaggatacttcaactaaaaatggtttatcaatttgggtagtatctgataatttgaggaaaggcgcagccttaaacacaattcaaattgctgaaatgcttatagaggatcatttaaaataa

SEQ ID NO: 214754 - DNA, 1000 bp, Unknown
  Bacterial polypeptide expressing nucleotide sequence isolated from the Sargasso Sea
aatgaagatagcaattgttggtgcaacaggccttgttggcacaaatattataaatttatgtgaacagtatttcgatgtagatgttgaatactcgctctttgcttcaaaatcctcagaaggaaaaaagattaaagttaatgacaaagatataaccgttaaagaacttaataaagaaaatattggagaatacaacatttcactattttcagccggtggtgaaaggtctaaagattacgcacctaatttcatagataatggttcgtttgtaatagacaactcttctgtttttcgaatgaacgatgaaattcctcttgttgtgtatggaattaatgaaaacataatcacaaaaaaatcaaagctgatatctaatccaaactgtacaacaatgggattagtgatggctttaaagcccctacatgataagtacactttatcttccatgacccctgttgcttatcaggcagtgtctggatcaggatctgaagctataaaatcattagaaaaagaaactttattaggtgataagttagatgcaaattatcaacaggcttattattcaaatccaatagctcggaacgttattcctcttgcaggaagcttaactgataacggatactctgatgaagaaatgaaatttgtccatgaatcaagaaaaatactatcgattccagatttagttgttgaaccatctaatgcaagggttggagtaagaacaggccatggaactttttgctctgcagtgtttgaaaatgaagtcgacctagaggaatgcacagatttactaaacaattttgaaggtgtagaagtctggaatgattcattaccaacaccaatagatgtagaaggcaaagacgaggtcttagtttcaagacttagacaaggtctttcatcaaaaaatattttaaacttttgggtagtctctgacaaccttttaaaaggtgctgctttaaatgcagtgcagatagctaagtttgtggaaaattatgatttctacgaatga

SEQ ID NO: 214755 - DNA, 1039 bp, Unknown
  Bacterial polypeptide expressing nucleotide sequence isolated from the Sargasso Sea
gagaactattatgactataatattgcattagtgggctccacaggagccgttggcagagaaatgctacaaacactgtacgaaagagactttcctgttgataatgtatatgcattagcttcatcgaaatctcccggaagacaggttagttttggagatgaaaggacgattgatgtccagcccatcgaagattttgatttttcaaaggttgactttgctttttttagtgctgggggagatgtctcagagaagtatgctcctttagcaggtaaaaatggtgcacttgtaattgataactcctcagcttttagaatgacacaaaatgttccactgatagtacctgaagtaaatcactatgatttaaagggttgtctaagtgaaaatggaggcatgaatataattgctaaccctaattgctcaactgcacaacttgtaatggctttatgcccattacacagagagtttattattaaaagagtagttgtagcaacctatcaagcagtttcaggtgctgggaaagaagctatggatgaacttttcaatcaaacaaaaaaaatctatgtaaatgaccctttagaaaaaaatgttttcactaaagagatatcttttaaccttatacctcatatcgatgtttttttagatgatggctttaccaaagaagaagttaagatgagagatgaaacaaaaaaaattctggatgaaaatattgatgttgttgctcattgtgtaagagttccagtatttgtaggtcatagtgaagctgttttcatagaatgtgaaaatcctatggatgaagaagtcgcacgtgaagttcttactgaaatggaaggagtaatagtaattgaccatagagcagatgaaggttacatcacccctaaagaagctgccggtgaagacggggtttatatttcaagaataagacgagatgaatctgtaccaagtggtttagttttttggtgtgtatctgacaaccttcgtaaaggtgctgcattgaatgctgttcaaatagcagagttggcaatcagccaagggataaagtaaa

SEQ ID NO: 214756 - DNA, 877 bp, Unknown
  Bacterial polypeptide expressing nucleotide sequence isolated from the Sargasso Sea
atgacagaaaaaaaatacaatattgctattgctggtgcaacaggtttagttggcgagactatgttatcgatactagagcagataaattttcctttcaaaaaagtctatgttttagcgagcagtcgctcatcaggaaagactatatcatttaagggtgatgatttgattgttcaagaattagaaacttttaattttgacaaagttgatataggccttttttcccctggagcttcagtttctgcagtgcatgctccaagagcagttgatgcggggtgtattgtaatagataacacatctcaattccgttatgacgatgatgtaccgttggtagttactgaagttaatccacatgttattagcgggtataagaaaaaaggaattattgctaatccaaattgttcaactatacagatgttggttgcacttaaacccatttacgatgcagttggaatagagaggattaatgtctgtacttatcaagccgtatctggcactggaaaagaagcaattgacgaacttgcaaatcaatcaataaatattatgaatgctaaagatattgaaagctctgtttattcaaaacagattgctttcaatgttattcctcatattgacgaatttcagagtaataaatatacaaaagaagaaatgaaaatggtttgggaaacgaaaaagatttttgaagatgattcaattctggttaatccaactgctgttagagttcccgtattttatggacattcggaagctatacatatagaaacaaaggaaaagataggagctgaatctgcaaaagaattattaaaaaaaatgcccggagtgactgttattgacgaacaaaaagatgggggctacccaactgctgtaacagaagctgcag

SEQ ID NO: 214757 - DNA, 1003 bp, Unknown
  Bacterial polypeptide expressing nucleotide sequence isolated from the Sargasso Sea
atgaatattgcaatcgtaggagctacaggtcttgtcggccgtaaaataatcaaactttgtgaagaattttttgacactagtgttgaatttcaattatttgcttcaaaaacgtctgaaggaaaaatactttcagtaaatgataaagatcttccaataaaagaattaaatattagaaatattgaaccatgtgatattgctttattttctgccggaggggttagatcaaaagaatatgcaaatgaatttgttgacagaggtgcttttgtgattgacaattcttcaacatttagaatgaatgatgatattccactagttgtttatggaataaacgaaaatacgattaatgaaaaaacaaaaattattgcaaacccaaactgcacaacaatggctttagtaatggctttgaaacctttacatgatatttttaaacttgttggaattgttcctgtttcttatcaagcagtttcaggttcaggaaaagatgctgttgaatctcttaataacgagttattaaaccttcaaaattctggatctgcaccagatgaaaaatattataaaactcaaatagctaaaaatgtaataccagtcgcaggaaatatgactgaaaatggatacaccgatgaagaaatgaagttttctaatgaatcaaaaaaaatactaaatatcccaaatttaattgttgagccttcaaatgctcgtgtcggggttgaaacaggacatggtattttttgtagtgctacatttgaggaagatgtagatgtagataaagctattgagtcaattaatttattcgagggtgttgaatattgggcaaatgactttccaacccctgttgacgcagaaggaaacagaaatatctttgtttctagaatgagatcaggtttatcaagtaacaaaattctcaatttttgggctgttggagataatcttttaaaaggagctgctctaaacgcagtccaaatagctagctatattcaaaaaaatgatatctattccagataag

SEQ ID NO: 214758 - DNA, 859 bp, Unknown
  Bacterial polypeptide expressing nucleotide sequence isolated from the Sargasso Sea
catgggatataaagttgctgttgtaggtgcgaccggtgcggttggccgtgaaattttgcaaactttggctgagcggaatttcgcagcagacaaaatctatgcattggcatcatcaaagtctatcggtcaagaagtatcatatggtgatgatgaaatcgtgactgttgaagcgcttgataagttcgactttgcggcagctgaaattgcactgttttcagctggcggtgatacggctaaaacctatgcgccaatcgcaggtcaggctggctgtcttgtgattgataattcgtcagctttccgtatggatgatgatgtgccattggtggttccagaggttaaccctcttactcttgcgtcttgcttgatcgagaacggtgggcgtaacatcatcgctaatccaaattgctccacggcccagctggtggtagctctgaaaccgcttcacgacgcttttgtagtcaggcgcgttgttgtttcaacttatcaggcggtatcgggagcaggccgtccagctatggatgaattattcaatcaaacaaagggcatctatgtaaatgatgcggtacaaccggaaatttttaccaagcagattgcgtttaatgcgatcccccatattgatgttttccttgacgacggctttaccaaggaagaatggaaaatgaccgccgagacaaagaaaatcctagatccaaccatcgagcttgttgcgcattgtgtgcgaattcctgtttttgttggtcatagcgaggcggtctttattgagacggaacagccgatgaccgaaaaagctgtacgaggtttgttgggtgacgcgccaggggtgtggtggtggatcaccgagcaaatgaaggttatgtga

SEQ ID NO: 214759 - DNA, 970 bp, Unknown
  Bacterial polypeptide expressing nucleotide sequence isolated from the Sargasso Sea
gatgttacaaacgcttgaagagcgtgatttcccttctgatgaagttgttgcactagcctcgagtaaatctatcggcaaggaggtctcctatggcgatgatagaagcctaaaagtgcaggggcttgatgcttacgatttttcgggtatagacatagccttattttccgcgggaggatccatttcaagtgaatttggtccaaaggttgcttcccagggggcagtagttatagataatagctcaaaatggagaatggaacctgacataccgctcatagttcctgaggttaatagctcggatattgcttcgtttaaaaaaagaaacattatagcaaatccgaattgctctaccgctcagctggtgatggcattgaagccgcttcatgacctttacaaaataaaacgagttgtcgtttctacttatcaatcggtttctggtgcgggaaactcagggatggacgaactgtttaatcagaccagagcggtttatgttaacgaccctgtggaaaacaaggagtttagtaaacaaatagcttttaactgtattcctcatatagatatttttatggatgatggatttacaaaagaagagtggaaaatggttgctgagaccaaaaaaattcttgatccaaatatagaggtggttgctcactgtgtccgggtgccagtttttattggacatgctgaggccgtattcatagaaactacaaagcaaatcgatgaaggtgaagcgcgtgaaagtctgaacaatttccccggtgtcgtggtggtagatcatcgggaaagtggaggatacgtaacgcagcaagagtgcgctggtgaagatgctgtttacgttagcagactaagaaaagaccctacggtaaagaatggcctagttttttggtgcgtttcggataacttaagaaagggtgcagctctaaacgcggttcagattgcggagacagttgttaagcgtcacctcttgaattag

SEQ ID NO: 214760 - DNA, 812 bp, Unknown
  Bacterial polypeptide expressing nucleotide sequence isolated from the Sargasso Sea
agcttttttttctgcaggaagttctatagcggaaaaatgggctcctattgctgcaaaaaaaacaattgtaattgataattcaaaacattttaggatgcaaaaggatattcctttagttgttcctgaagtgaatccagaatcattaaaactttataaaaatgcgaacattatttctaatgcgaattgctctaccatccaattggttttagctttaaaaccattgcacgaccaatttaaaattaaaagaatcatcgtttcaacttatcaatcagtatcaggagcaggaaatgctcatatgaatgaattagaggaacaaagtaaaaaagttttaaataaacaaaaagtagattcaaaaaattttacaaaacaaatggcttttaatgttattccgcatatagattcttttatggaagatcgttacacaaaagaagaatggaaaatgaccgtagaaactaaaaaaattttagacccaaatatatctttgagtgcaacgtgtgtgagagttccagtttttattggacatgctgaatcagtaaatgtcgaatttaattcaaaagttaatgctacacaaattagagaatgtcttaaaaaagcagcaggatgtaaagttgtagatgaaactaaagatggtggttatataactccagttgaatcaagcggcgactttgtaacttacatttcgagaatacgagacgatcagacacaaaaaaattccataaatatgtggatagtatcagataatttacttaaaggagccgctcttaatgcagttcaaattgcaaatgttttgattaaaaaatatattaactaaa

SEQ ID NO: 214761 - DNA, 1012 bp, Unknown
  Bacterial polypeptide expressing nucleotide sequence isolated from the Sargasso Sea
atgaaaaaagcaaaaagaatagccgtagcaggtgcaacagggatggtaggtcaagctttccagaatttacttgaaaataattttttccccgaggctgaaatagatctgctagcaagtcaaaaatcaaaaggaagatcagttacttttcgaggaaaagaacatattataaaagatcttgctgaatatgattttagctacactgacttggctctcttttcggctggtgcttctgtctctgctgaatatgcacctaaagctgtatctcaaggttgcgtggttgtagataattcctcttgttttaggtacgacgatgaaatagcccttattgttcctgaggttaatggagatgagctatcaaattatgatttaccttcaatcatagcaaatccaaattgctcaactatccagatgttagttgcccttaagcctattcacgaagaatttaagattaaacggatagatatcacaaccctgcaggctgtttcaggcaccggtaaggaagctactgaagaattactggatcaattaagtgcttaccaaggagataatgaacttgaaaataatatttatcctaagcaaattgccaataatgcattacctcactgtgatgtaatggaggagaatagatacactaaagaagagaataaacttttgaaggaaacacacaaaattcttgattcaaatatacatgtcgctgcaacttgtgtaagagttccagttcttaatggtcactcagaatctattcatatacttacagaaaagcccttaacagaagatgtggttgtgaaattgctaagtaattctccaggattaaaattacattatgatcttggtgctaatgactatcccacagcagctacagacgcggacggagattaccttgttcacgtagggaggctaaggaaagatctttgggatgattgtagaatgaatatgtgggtggttgcagataaccttcttaagggagctgctttaaacagtattcagatcgccaatctgatatttgactaat

SEQ ID NO: 214762 - DNA, 991 bp, Unknown
  Bacterial polypeptide expressing nucleotide sequence isolated from the Sargasso Sea
aatgaatatcgcaattgttggtgcaacaggattagtcggcagagagattatcaatctttgtgaagaatttcttccaaaagatacaatttatacattatttgcctcaagcaaatcagcaggtaaaaaactaaaggtcaatggtaaagactatgaagttaaagagcttgctgaggataatatagagtcatatcatatatctttattttcagcaggaggtgaaagatcaaaaaattttgctgaaatttttacttccaaaggctcttacgttattgacaactcttcagcttttagaatggagaaagaagttccactagttgtttttggaataaatgaaaatacaatatctcaagaaacaaaattaatatcaaatcctaattgcacgactatgggattagtaatggcattaaaacctctacatgataaatataatttgttaaacattgttccagtagcttatcaagctgtttcggggtcaggaagtgaagccgtcagttcacttattgaagaggagagtttaggagaaaaactagattcagattatgaaaaaggattttacgacaggcctatagcaagaaacgtaatacctttagctggtaatttaactgaaaatggttattcagatgaagagatgaagtttgtaaatgaatcaagaaaaatattaaatatacctcaactgattgtagaaccttcaaatgcaagagtaggagttaaaactggccatggaatattttgttcagctacttttgaagaagaagcagatgttcaagaagcaataggattaattgatagttttgatggtgttgaatactggaaagataagttaccaacacctttagacgctgagggaaataagaaagttttagttgggcgaatgagaaatggattatctgacaatagaattcttaatttttgggctgtttcagacaatcttttaaagggtgctgctttaaatgctgttcagattgctaggtatatagtagataatgattga

SEQ ID NO: 214763 - DNA, 787 bp, Unknown
  Bacterial polypeptide expressing nucleotide sequence isolated from the Sargasso Sea
aatttcaggagaatttgcaccaaaagctgctaaaaaaaattgtatagttattgataactcttcgagatttagaatggaccctgatgtaccactaattgtaccagaggttaataaagaagatttagataattatgagaagacaaaaataatagcaaatcctaattgttctactatacaaatggttgtggcgttgaaacctcttcatgatttaggaaagataaaaagagtgattgtttcttcctatcaatccacttcaggtgctgggaaagcagcaatggatgaattatttgagcaaactaagggaatttattcaaataattcaatagagccagagatattccagacacaaatttcttttaacgtgataccacaaattggtcctttcgtttcttcaggatatacggaagaggaagaaaagatgattaatgaaacaaagaaaatattaagtaaagatattgaggtttctgctacatgtgtaagagtgccgacttttattggccacgcagagtcagtgaatatagaatttgagaattatgtatctgcaaatgaggcttcaaatattttatcagaggcaccaggatgtctagtcgatttagataatcctgaaacctttacaacaccaattgattgtgcgggtaatgatcatacctatatttcaagaattagaaacgacaattcaatagaaaatggtttaaatctatgggttgtttctgataatttgagaaaaggcgctgctcttaatactattcaaatagctgaaatacttgagaaagattatctaagttaa

SEQ ID NO: 214764 - DNA, 879 bp, Unknown
  Bacterial polypeptide expressing nucleotide sequence isolated from the Sargasso Sea
aaattaaatttaaaggaaaaaaaatagagatccaagatcttgtgaaatatgacttttcaagtgctaaaataactttttttgcagctggaagtaaaatagctgaacaatgggttccaaaagctagtaaaaaaactattgtaatagataattctaaattttttagaatggacaataatattcctttaatagtaccagaagtaaatttggaccaattagaaaattataaaaaaaaaaacatcattgctaacgcaaactgttccacaatacaaatggttgttgccttgaaacctttgcatgatcatttcaatataaaaagagttatagtttcaacatatcagtcggtatctggtgcaggaaaagctccaatggacgagttagtaagtcaatcaaaagactttttagcaggaaaaaaaatttcttcaaaaaacttcacaaaacaaattgcatttaatttgataccacatattgatgaatttgttgaaggaggccatacaaaagaagaatggaaaatgattaatgagacaaaaaaaattcttgatccaaaaattgaaatttcagcaacctgtgtaagagttcctgtaatggtttctcattcagagtccatcaatatagaattcgaaaaatcatttgatataaataaaataaaagaaattttaagtaaatctaatggctgtaaagttattgatgaaagaaaagatggtggttatataactccattagaagcagaaaatagttatttaacttttatttcaagaatacgtaaagatagttcaaataataaagcaattaacatgtgggtcgtttctgacaatttacttaaaggggccgcattgaatacagtacaaatagcagagcaactaataaaaaaatatgtctgat

SEQ ID NO: 214765 - DNA, 1045 bp, Unknown
  Bacterial polypeptide expressing nucleotide sequence isolated from the Sargasso Sea
aatgactcaaaaatacaatatagcagtagcaggagcaacaggtgcggtaggaacagaaatagttcaaatattagagcaaagggattttccaatagacaatttatatttactcgcatcatcaaaatcaaaaggcaaaaaagtagagtttaaagataaagaaattgttgtagaagacttatcagaatttgatttttcaaaagctcacattggtttattttcacctggtggtaaaatttctgcagaatatgcaccaaaagcagctaaaacaggatgtattgttatagacaatacctctcattttcgaatgcaacaaaatattcctttaatcgtgcctgaagtaaacgctaatgcacttgatgaattttttgatgatgaaaacagaactaatattatttcaaatcctaactgttcaactatacaaatggttgttgcattaaaaccacttcatgaaaaagcaattataaacagagttgttgtatcaacataccaagctgtttctggagcaggtaaaacaggtatggatgaattatttaatcagactcaaaatgtttatgcaaaccaagaattaaaaaaagaaaagtttacaaaacaaattgcttttaatgccattccacacattggagcttttttagaaaatggtaatacagaagaagagcaaaaaatgattgatgaaacaaaaaaaattctagacgagggaattaatatttcagcaacttgtgttagaacagctgtattcattggccattcagaagctgtaaatatagaatttgactctccattagatgaaaaagaagctaacaaaatattatctaactctgaaggtatttctgtaattgatcatcgaaaagatgaaggttatgtgactcctgttgaaattgcaggagaggataaagtttatattagtagaattagaaatgatcaatcaatagataatggtttgaatttatgggtagtctcagataatttacgcaaaggagcagcgcttaatgctgttcaaattgctgagttaataatttcaaagtattcagaaaaaataactatttaa

SEQ ID NO: 214766 - DNA, 1030 bp, Unknown
  Bacterial polypeptide expressing nucleotide sequence isolated from the Sargasso Sea
aatgtcttataatgttgctgttgttggtgctacaggtgccgttggtagagaaatgcttcaaactttgtttgaaagaaactttccagtaaaaaacatttatgctctagcttcaaagtcctctataggtaaagaagtttcttttggtgacgacaaaatactaaaagttagttctgttgatgattttcactttgaaaaagcagatatagctcttttttcagcaggttcagagatagcaaaaaaatttggtccaaaggcaggagttaaaggctgtatagttattgataattcttcttgttttagaatggatgacaaagtacctctaattgtccctgaagttaatcctgaagcaattaatggttataaaaacaaaaatataatcgccaatcctaattgttcaactattcagctagttgttgctttaaagccaattcataaaaaatatgaaatatcaagagttgttgtttcaacataccaagctgtttcaggagctggaaaaccagctatggatgaactatttaaccaaacaaagggtatatttgttaatgatcatgctaaaccagaacaatttaccaaaaaaatagcatttaatgtcatccctcatattgatgtttttatggatgatggatttacaaaagaagaatggaaaatgagagttgagacaaaaaaaatattagatcctaatattaatttagttgctcattgtgtaagggttcctgtatttattggtcacagcgaagcagtttttattgaatgcaaaaaaaatattgatgaaaaaaatgttagaagcttgttaagagatgctaatggagtaacggttgtagatcatagagtggacgaaggatatgtaacccctgaagaggtggctggtgaagacgatgtttacattagcagaattagaaaagatccatcagtaaaaaatggtattgctttttggtgtgtaggagataatttaagaaaaggtgcagcattaaatactgttcagatagctgaattgttagcaagcaaaaaaattaaaggagttgcgctttaa

SEQ ID NO: 214767 - DNA, 1003 bp, Unknown
  Bacterial polypeptide expressing nucleotide sequence isolated from the Sargasso Sea
aatgaacttagctataatcggtgccaccggcaatgtcggaagaaaaactattgagattttagaaaaatctaaaattgaaatatctaatttattcttagtggcgtctgcaaaaagtgcaggaaaaaaaattaaattcaaaggaaaagagatagagattcaagatcttgaaaaatatgatttttcaaatgctaaaataactttttttgcagctggaagtaaaatagcagagcaatgggctacaaaagctagcaaaaaaaccatagtaattgataattctaaattttttagaatggataatgatgttccattaatagtaccagaagttaatctagatcaactacagaattacaaaaaaaagaacattattgctaatgcaaactgctctactatacaaatggttgttgctttaaaacctttgcatgatcattttaacattaaaagagttatagtttccacttatcaatcagtatctggtgcagggaaagctccaatggatgaattaataactcaatcaaaggattttctagacggaaaaaaaatttcttcaaaaaattttacaaagcaaattgcatttaatttaattcctcatatcgatgaatttgttgatgaaggctatacaaaagaagagtggaaaatgattaatgagacaaaaaaaattcttgacccaaaaatcaaaatatccgcaacttgtgttagggttcctgtgatggtttctcattcagagtctatcaacgtggaatttgaaaagacatttgatattaaaagtattaaaaatattttaagtcaatctaatggttgtaaagttatagacgaaagaaaagatggaggttacataaccccacttgaagctgaaaacagttatttaacttttatttctaggatacgaaaagatagttcaaatgataaagcaattaatatgtgggtcgtttctgacaatttacttaaaggggcggcattgaatacagtgcagattgcagagcaattaattaaaaaatatgtctaa

SEQ ID NO: 214768 - DNA, 1018 bp, Unknown
  Bacterial polypeptide expressing nucleotide sequence isolated from the Sargasso Sea
atggataaagcaatagatttagcattagttggggcttctggggttgtaggaaataaaattatttccttgttagaaaagaaaaatattaatatagaaaatttttatccccttggctctgcatctgtaggccaagaagtaactttaaataacacaaattatcagattgaagatttatcttcattcgattgttcaaaagttaatctggcaatattttctgctggctcaaaggttgccaaagaatatgctaaaagctttgtcaatcagggtgtttacgtaattgatctatcttctgaatttagatatgaagaaaatattccacttattattccagaaataaatggcagaattcttgaagatattaaaaaaccatcacttatagctaatcctaactgctcagtatctcaattgttaatggttttagatcctattcataaagaatatagtgtagattttataaatatagctacttatcaggcagtatcaggaacaggaaaagacgctatagatgagctttacaaccaaaccaaagaccaatctatggagccaaatatatatcctaaaaatattgcatttaatgtaataccacaatgcgatattttcttagataatgattttacgaaagaagaaatgaaggttgcctgggaaacaaagaaaattcttgaccaaaatattgaagtgcaagcaacctgcgtccgggtcccggttgtaaatggacactctgaggcagttttcttaagaacaaaaaataaaactgcaaaagataacataattcaactcttagcaacttcagagggtttaacagtaatagataatccaaaaaaattggaatatccaacacctcttgaaaatgctaatgatactgaagaggtttatgttgggagaataaggtctcaaattataaataatgaaaattggatatccttatggatagtagctgataatgtttacggaaaaggggcagcgcttaatgctgttcaaatccttgaaaagcttataaaaaataataaattgtgttgag

SEQ ID NO: 214769 - DNA, 736 bp, Unknown
  Bacterial polypeptide expressing nucleotide sequence isolated from the Sargasso Sea
tatgaattttaatattgctatagtaggtgcaacaggaaatgtcggaagagaaatgttaaatattctctcagaaaaaaaatatgatgcgtcgaaaatatttcctgtagcttctagtagaagtgaagggatggaaattgaatttggggaggataaactaattgtagaatctattgaaaagtttgatccttcaaaagtagaattggcactcttctctgctggagccagtacctcaaaggaatgggcaccaaagtttgcagaaaaaaactgtattgttattgataactctagtcattttagaatggaagaagatattcctctgatcgtacccgaggttaacccaagtgatctaaataattataaaaaaagaaatataattgctaatccaaactgctcaacaattcaattggtggttgccttgaaaccattgcacgaaatttcaaaaataaaaaaagttattgtatcaacttatcaatctgtttcaggcgcaggtaaggctggtatggacgagttgtttgagcaaacaaaaaatatgttctctgatgatattaaagataatgttaagtttaccaaaccaattgcctttaatgttatacctcatattgataaattcatggatgatggatacacaaaagaagaattaaaaatgagacaagaaactcataaaattttaagtaatgagatcagctttagcgctacatgtgttcgcgttcctgtatttattggtcactctgaagct

SEQ ID NO: 214770 - DNA, 939 bp, Unknown
  Bacterial polypeptide expressing nucleotide sequence isolated from the Sargasso Sea
attgactaagttaagcgatataaatataggtattattggagctactggagctgtaggggtagaggctctgaaacttttagaaaaaattaatcatcctaagaataaaatatcactttttgcatctgaaagatctacaggtaaattagttgaatataataaggataaaattcaaattctagaagtcaatgaagataatctaaaaaaaattgatgttggattaatatctgtcagtagtgaagttagcgaaaatcttgcaccaataatagttaataatggtggaatagtaatagatgatggatcagcatttcgaatgaaagaagaggttcctcttgttgtgccagaaattaatgagaaagatttagattttcacaaaggaattatttctattccaaactgtacaactacacctatggtaatggctattgatgcattgaataaaatatgtaaagtaaataaagttatagtttcaacctatcaagcagtatcagggacaggtaaagaagctgtcaatgaactaaaaaatcagttgtcaggggattcaaaaataaatgtctatgactacaaaattgctaataatgtttttcctcatgttgatgattttttagaagatggttttactaaagaagaacataagatgattaatgaatcaaaaaaaatattgcatgacccatctcttgaaataatccccacatgtgtaagggtgccagtcaaaattggacattctgaatctctatgtatttctactgatagagatttaagtattgaggatataaattcttctttaagtaattattctggtattaaaatattggataatagtactgacttaccttaccctatgccactttactccgaaggtaaagatgaagtttttgtaggaagaattagaaaaagtcctaataatgatagagaaattaatttatggttaagttgcgataa

SEQ ID NO: 214771 - DNA, 880 bp, Unknown
  Bacterial polypeptide expressing nucleotide sequence isolated from the Sargasso Sea
aaaaaaataaaatttaaaggcaatgaattaaatgtagttgctttagaaaattttgattttgaaaaagcagatataactttttttgctgcaggaagttctattgcagaaaaatatgcaaaaaaagcctctcaaaaaactattgtaatcgataattcaaaattttttagaatggataaagatgttccccttattgtacccgaggtaaactcagaggatatcaaaaagcataaaaatattatagcaaatccaaattgctctactattcaaatggttttagcgcttcatccactgcaccaaaaatttaatattaaaagagtagtagtttcaacatatcaagctgtttctggagctggtaaagctgccatggatgaactaatgagtcagacaaaagattttttagagaaaaaaaaaattaaatcaacaaactttactaaacaaatagcttttaacttaatccctcacatagatgtatttgtggaagacgggtacaccaaagaagagtggaaaatggaaaatgaaacaaaaaaaatattaagtgaaaagataaaagtttccgcaacttgtgtaagagttccagttattacatcacactccgagtcagtaaatgtagaatttgaaaaaaattataatattggtgaagttaaaaaattattaagtgagacctcaggttgtaaactcgtcgatgaacatgttgatggaggttatataactccactcgaagctcaggatgattttaaaacttatatttctagagtgagaaaagacaggtctaatgaaaaagcaattaatatgtggatagtttcagataatcttttgaaaggagcggcacttaattcagtgcaaattgcagaaacattagtaaagtacggaattaaataaa

SEQ ID NO: 214772 - DNA, 1009 bp, Unknown
  Bacterial polypeptide expressing nucleotide sequence isolated from the Sargasso Sea
atgaattttgcgataattggtgccaccggcaacgtcgggagaaaaactattgaaattttagagaaatctaatattcaaatttcaaacctttttttagttgcttcggaaaaaagtgaaggaaaaaaaattaaatttaaaggtaaagaaatacaaatagaaagtctcaaaacatatgatttttcaaaggcacaaataactttttttgctgctggaggaaaaatagcagaggaatgggttccaaaagctagtaaaaaaactgttgttatagataattctaaagtatttagaatggacaaagatgttccattaatcgtacctgaggtcaatccagacaaattatcaatgtttaaaaataaaaatattattgctaatccaaattgttcaacgatacaaatggtagttgccctgaagccactacatgaaaactttaatataaaaagagttatagtctccacttatcaatctgtatctggtgcagggaaagcccctatggatgaacttattagtcaaacaaaagaatatttagaagaaaaaaaaattaattctaaaaattttacaaaacaaatagcttttaacttaataccccatatcgatgaatttaaggaggagggatatacccgtgaagaatggaagatgatttctgaaactaaaaaaattcttgatccaaaaataaatttaacagcaacctgcgtaagagttcctgttatggtatctcacgcagagtcacttaatgtcgaatttgaaaagtcttttgacattaaaaaggttagagatattttagacaaagcagatggatgcaaagttgttgatgaaaggaaaaacggtggatatacaacaccagtagaggcagaaaataaaaatttcacctttatttctagaataagaaaagataattcgaaagataacgctctaaatatgtgggtcgtttctgacaatttacttaaaggtgctgcattgaatacagtacaaattgctcaaagattaattaaagatttttatggaaaataat

SEQ ID NO: 214773 - DNA, 1012 bp, Unknown
  Bacterial polypeptide expressing nucleotide sequence isolated from the Sargasso Sea
aatgggtttaagggttgcaatagttggggctactggaaatgtcggaagagaaatgctcggcattcttgatgaaagaaaatttcctgttgatgaagtttttgctttagcttcaagtcgtagtagaggaaatgctgttcagtttggtaataaagaattaacagtagaagacctaagtgagtttgatttttcaaaagcagatattgccttattctctgcaggaggcaaaatttcaggagaatttgcaccaaaagctgctgaaaaaaattgtatagtcattgataactcttcgaaatttcgaatggaccctgatgtaccactgattgtaccagaggttaataaagaagatttagataattatgagaagacaaaaataatagcaaatccaaattgctctactatacaaatggttgtggcgttgaaacctcttcatgatttaggaaagataaaaagagtgattgtttcttcctatcaatccacttcaggtgctgggaaagcagcaatggatgaattgtttgagcaaactaaggggatttattcaaataattcaatagagccagagatatttcagacacaaatttcttttaatgtgataccacaaatcggccctttcgtttcttcaggatatacggaagaagaagaaaagatgattaatgaaacaaagaaaatattaagtaaagatattgaggtttctgctacatgtgtaagagtgccgacttttattggtcacgcagagtcagtgaatatagagtttgagaattatgtatccgcaaatgatgcttcaaatattttatcagaggcaccaggatgtctagtcgatttagataatcctgaatcctttacaacaccaattgattgtgcgggtaatgatcatacctatatttcaagaattagaaacgacaattcaatagaaaatggtttaaatctatgggttgtttcagataatttgagaaaaggcgctgctcttaatactattcaaatagctgaaatacttgagaaagattatctaagttaa

SEQ ID NO: 214774 - DNA, 714 bp, Unknown
  Bacterial polypeptide expressing nucleotide sequence isolated from the Sargasso Sea
acgatcaagttcctttaattattcctgaaattaatggaggtctaatacgagatattgaaaaaccttcattgattgcaaatccaaattgctctgtctcacaaatgttaatggctatagagccaatacataaaaaattccaagttgatttattaaatgttgcaacctatcaagcagtatcaggaacaggcaaagatgctgtcaaagaactaaattctcaaatagaagactttaatgttgaaccaatagtttacccaaagaagatagcttttaatgtgattccacaatgcgatatctttcttgataacgatttcacaaaagaagaaatgaaagttacttgggaaacaaaaaagattcttgatcctaatattgaagtcacagcaacctgtgttcgagttccagttataaatggccattctgaggctgttttctttagaacaaaagaacttgtaagtaaaaatgatattgttgacttattatctgattcacctggaatcaaggtaatagacaatcctgcagatcaaaaatatcccactcccttagaaaatgctaatgatacagaggatgtttatgtcggcagaattagaactcaaactattaatggagaaagctgggtatctatgtggatagttgcagataatgtttatggtaagggagcagctcttaatgctgtgcaaataattgaaatgctcatcaaagaaaataaattgtgctgag

SEQ ID NO: 214775 - DNA, 1018 bp, Unknown
  Bacterial polypeptide expressing nucleotide sequence isolated from the Sargasso Sea
aatgaatagtcaaattaacttagcactgattggagcatctggggttgttggtgagaaaattatgactcttttagagaatagagcaacaaaaataaataatttttacccgcttggtgattcctccgttggtaaagagctagtatttaatgacagtgcttatgtaattcaagatcttaaagattttgatcattcaaaaattaatatagcaattttttctgcaggctctaaagttgccaaagagcatgcaagaaattttgtggataatggaatatatgtaattgatttatcttctgaatttagatacgaagacgatgttccgcttattattcctgaaataaatggcgaagaaattaataaacttagaggaccatctctaattgctaatccaaattgttcaacatctcaattattaatggcattaaatcctattcataaagaacttaaagtagacattttaaatgtttcgacctatcaagcagtttctggaacaggaaaacaagcagtacaagaattaaaaaatcaaattaaagatagttctataaaccaagatgtttatcccaaaaagatagcttttaatgtaatccctcaatgtgatatcttcctagaaaataattttacaaaggaagaaatgaaacttgtctgggaaacacaaaaaatacttgataaaaatattgaagttcaggcaacttgtgtaagagttcctgtaattaatggtcattctgaagctgtatttttaagaacaataaaagaaactactcgagaagaagtaattgacttactaaataattcaagtggaattaaagtaattgataatcctgagtctctcaaatatccaactccgcttgagaatgcaaatgatactgaagatgtttttgttggaaggataagatcacagactataaatagcgaaaattggacttcgatgtggatagttgctgacaatgtttatggaaaaggcgctgcgttaaatactgttcaaatccttgaaggtctagttgagaataataaattatgttga

SEQ ID NO: 214776 - DNA, 533 bp, Unknown
  Bacterial polypeptide expressing nucleotide sequence isolated from the Sargasso Sea
tatgaatcttgcaattattggtgcctcaggaaacgtgggaagaaagacaatcgaaattttagagaaatctaaattggctattgataacctttttttagtagcatcttcaaaaagtgtcggaaaaaaaatcaaatttaagaataaagaaattttgattgaaaatttggaaaattataacttttctaaagctcaaattactttttttgcagcaggaagcgaggtagccaaggaatgggttcctatagcatcaaaagaaacaattgttatagataattctagttattttagaatgcaaaaagatgttcctctcgttgtaccagaggtcaattcagaagagctaaataaacacaaaaatattattgcaaatccgaattgttccacaatgcaaatggtcctacctttaaaaccactgcacgatgagtataaaataaaaagagtaattgtctcaacttatcaagcggtatcaggtgctggtaaagcttccatggacgaactttttgaacaatcaaaaaattatatagctggaaaaaaaa

SEQ ID NO: 214777 - DNA, 971 bp, Unknown
  Bacterial polypeptide expressing nucleotide sequence isolated from the Sargasso Sea
atcaacaggattagtcggcagagagattatcaatctttgtgaagagttccttccaaaagatacaaattatacattgtttgcctcaagcaaatcagcaggtaaaaaattaaaggtcaatggtaaagactatgaagtcaaagagcttagtgagaacaatatagaatcctatgacatatctttattttcagcaggaggtgaaagatcaaaaaattttgctgaaatttttacctccaaaggttcttacgtcattgacaactcttcagcttttagaatggagaaagaagttccattagttgtttttggaataaatgaaaatacaatatctcaagaaacaaaattaatatcaaatcctaattgcacgactatgggattagtaatggcattgaaaccgctacatgataaatataatttattaaatattgttccagtagcttatcaagctgtttcgggatcaggaagtgaagccgtcaattcacttattcaagaggagagcttaggagaaaaattagattcagattacgaaaaaggattttatgataggcctatagcaagaaacgtaatacctttagctggtaatttaaccgaaaatggttattcagatgaagagatgaagtttgtaaatgaatcaagaaaaatattaaatatacctcaactgattgtagagccttcaaatgcaagagtaggtgttaaaactggccatggaatattttgctcagctacttttgagaaagaaacagatgttaaggaagcaataggattaattgatagttttgatggggttgaatactggaaagataagctaccaacacctttagacgctgagggaagcaagcaagttttagttgggcgaatgagaaaaggattatcagacaatagaattcttaatttttgggctgtttcagacaatcttttaaagggtgctgctttaaatgctgttcagattgctaggtatatagtagataatgattgat

SEQ ID NO: 214778 - DNA, 1012 bp, Unknown
  Bacterial polypeptide expressing nucleotide sequence isolated from the Sargasso Sea
gatgaataaagcaagaaaaatagcaatagttggagctacaggaatggtgggtcagagttttttaaaacttctggaaaacgattattttctaggctctgaagtatctttattggcgagtagcaattcagcaggaaaagatataaattttaggggcgttgatcataaagtgcaggatttatcgcagtatgatttttttgatacagattttgctcttttttctgcaggatctactgttgcctctacttatgcccctattgctgttaatcaaggttgtttagttatagataactcctcttgtttcaggtatgaagaagatattcctctggttgttccagaagtaaatagtcatattttgaatgattttaatactcctggaattattgccaaccccaattgttcaactatccaaatgcttgttgctttaaaacctctccacgatgagtttgtaattgaaagaatagatgtaactaccttccaggcagtttcaggcacaggaaaattagcaactgaagagttgattaatcagatagatgcctataaaggcagtatgaagctgaatagctttatttacgctaagcctattgctaataatgtattacctcactgtgatgaatttgaagagaataggtatacaaaagaagaaaataaattagtaaaagaaacaaaaaaaattcttgatccagatataaaagttgcagctacttgcgtaagagttcctgtactaaacggtcattcagaatcagtgcatatacaaactaaaaagcctattgcagaggaccttgcactaaagcttttaaaagaatcgcctggtttatccataagatacggagaatcagaagatgattacccaactgcatttacagatggtgctggaaatggcttggtccatgttggcagaataagaaaagatctttgggaagaaaatagacttaatttatgggttgtagcagataatttattgaaaggcgcagctctaaatagtattcaaatagcaacattattgtttgattaa

SEQ ID NO: 214779 - DNA, 665 bp, Unknown
  Bacterial polypeptide expressing nucleotide sequence isolated from the Sargasso Sea
taatgctcatgctttaaaggatttcagaaaaagcaatattattgccaatccaaattgttcaaccatacaaatgcttttagcacttaaccccatacatcaggctgcaagaatcaaatccatcaatgtgtctacctatcaatcaatatctggggctgggcgatcaatgctcaatgaatacgatcgccaggttctcgattcaagctaccctcaacatgagggaagcttattcgcacacaacgtcatacctcagattggttcattcgaaaacaatggatatacattggaagaaatgaagatggtttgggaaacacataagatttttgaagataaaagtattgaggtaaacccaactgctgtgagggtgccagtgagatatggtcactctgaatcaataggtattatcactgagagttatctcagtattggtgaagtcagagagttgctctcagggtctcttggcatccaattgatgcaagatgatgaatcataccccatgccattaaaggagggtgaagggacagatgatgtctatattggaaggatacgagcagacttgaatcattcgaatggaatcaatttgtgggttgttgcagacaatataagaaaaggcgcagcactgaattcaattcagattgctgagaccatcattgaatcagattattaat

SEQ ID NO: 214780 - DNA, 1012 bp, Unknown
  Bacterial polypeptide expressing nucleotide sequence isolated from the Sargasso Sea
aatgaataaggcaagaaagatagctatagcaggcgcaacagggatggttggtcagagttttttaaagcttctagaacaagatttttttcaagattctgaaatctttttactagctagcattaattcagctggtaaagaaataaatttcaggggtaagaatcataaggtcgaagatttatcaaaatttaatttttctgacatagaattagcgctattttctgcgggatcttctgtagcttccacttacgctcctatcgcagtttcacaaggctgtgtggtagtagataattcttcgtgtttccgttatgaagatgacatacctctaattgttccagaagttaatagtaaagtattagatgattatgaacttcctggaattattgccaaccctaattgttcaactatccaaatgcttgttgctttaaaaccgttacatgatgaatttgttattgagagaatagatgtgactacctttcaagctgtatcagggacaggaaagaaagccgctgaagaattaatcgatcaaatagatgtttatgaaggaaaagcaaaaattaaaagttctatttaccccaagccgattgctaacaatgtccttccgcattgcgatgattttgaagagaatagatatactaaagaagaaaataaactggtaagagaaactcataagattcttgatccaaacatacaggttgctgcaacgtgtgtaagagttccggtactaaatggacattctgaatcagtccatataaaaactaaaagacctgtatctgaagatttagctcttaagcttttacaagaagcacctggcctatctgttaaatacggaaaatcagaagaagattatcctactgcatttactgacggagatggaagttacttagttcaagtagggagagtgagaaaagatctttgggatgagaacagacttaatttatgggttgttgccgataacttgttaaaaggagctgctttaaatagcatccaaatagcttcactattatttgattaa

SEQ ID NO: 214781 - DNA, 1012 bp, Unknown
  Bacterial polypeptide expressing nucleotide sequence isolated from the Sargasso Sea
aatggctttaaaagttgcaatagtcggtgccactggaaatgttggaagagaaatgctcgatattcttgttgaaagagattttcccattgatgaagtttttgctttagcctctagtcgaagtaaaggagatgcagttcagtttggtaataaggaacttatagttgaggacttaagtgaatttgatttttcaaatgcagatatagctctattttctgctggtggaaaaatctcaggagaatttgctcccttagctgcggaaaagaattgtgttgttatagataattcctcaagatttcgaatggaccccgatgttccactaatcgtacctgaggttaatagagaagctattgctaattatgaaaaaacaaaaataatagctaatcctaattgctcaactatccaaatggttgttgctttaaagccccttcatgatttgggtactataaaaagagtagtggtttcttcataccaatcaacttctggtgcaggtaaggctgcaatggatgaattgtttgagcaaacaaaaggcatctattctaataattcggtagaaccagaaattttccagacacagatttcttttaatgtgataccacaaataggtccttttgtttcttcaggttacactgaagaagaagaaaagatgattaatgaaactaagaaaatattggataatgatattaaagtttctgccacatgtgtaagagtccctacttttataggccatgcagaatctgtgaatatagaatttgaaaactatatatcatcagaagaggcatctaaagttttagctgaagcacctggttgtttagtagatttagatgataaagaaagttacgcaactccaatagattgtgcaggtaatgatcatacctacatctcaaggattagaaatgatgactctgtcgaaaatggtcttaacttatgggttgtttctgataatttaagaaaaggcgctgctttaaataccattcaaatagcagaaatattagaaaaagattatcttaattaa

SEQ ID NO: 214782 - DNA, 1018 bp, Unknown
  Bacterial polypeptide expressing nucleotide sequence isolated from the Sargasso Sea
aatggataaagcaatagatttagcattagttggggcttctggggttgtaggaaataaaattatttccttgctagaaaagaaaaatattaatatagaaaatttttatccccttggctctgcatccgtaggccaagaactaactttaaataacacaaattatcagattgaagatttatcttcattcgattgttcaaaagttaatctggcaatattttctgctggctcaaaggtcgccaaagaatatgctaaaagctttgttaatcagggtgtttacgtaattgatttatcttctgaattcagatatgaagaaaatattccacttattattccagaaataaatggcagtcttcttgaagatattaaaaaaccatcacttatagcgaatcctaactgctcagtatctcaattgttgatggtattagatcctattcataaagaatatagtatcgactttttaaatatagctacttatcaggcagtatcaggaacaggaaaagacgctatagatgagctttataatcaaaccaaagaccaatctatggagccaaatatatatcctaaaaatattgcatttaatgtaataccacaatgcgatattttcttagataatgatttcacaaaagaagaaatgaaggtagcctgggaaacaaagaaaattcttgaccaaaatattgaagtgcaagcaacctgcgtccgggtcccagttgtaaatggacactctgaggcagtcttcttaagaacaaaaaataaagctacaaaggatgacatacttcaactttttgcaacctcggagggtttaacagtaatagataatccaaaaaaattggaatatccaacaccttttgaaaatgctaatgatactgaagaagtttatgtagggagaataagatctcaaattataaataatgaaaattggatttctttatggatagtagctgataatgtttatggaaaaggggcagcgcttaatgctgttcaaatccttgaaaagcttataaaaaataataaattgtgttga

SEQ ID NO: 214783 - DNA, 1024 bp, Unknown
  Bacterial polypeptide expressing nucleotide sequence isolated from the Sargasso Sea
atggggtacaaagttgtagttgttggagcgaccggaaatgtaggccgggaaatgcttaccattttatcggaacgtcaatttccagtggatgaaatagcggctctagcaagtaggcgatctctgggtacggaagtaagttttggagatcaaacaattattactagggatctagaaacatttgatttcgaaggttgggacattgctctctttgccataggttctgatgcgacaaaaacatttgctccgaaagctgcagctaaaggttgtattgttatagataacagctccctatacaggtacgatccaaaagtgccgttgatcgtaccggaggtcaatgccaaagcaataaccgggtattctgaaaagaatattattgccaacccaaactgctccacagcacaaatggttgtcgcattaaagccccttcacgaccgtgcccgcattaagcgtgttgtagtaagcacttatcaatcggtttccggtgctggaaaggaaggaatggacgaactctgggatcaaacaaagtccatttataaccctgtaaccgacgtccctcccaccaaattcacaaagcaaattgcattcaatgttatcccgcatatcgataagttcttagatgacggaagcacaaaagaagaatggaaaatggtggctgaaacgaaaaaaataattgatacatctatcaaagtgacagcgacttgtgtgagagttccagtatttgttggccattctgaagcgataaatattgaatttgaagatttcttagatgaggacgaagcgcgcgacattctccgcgaggctcctggcgtcatggtgattgataagcgagatgatgggggatacgtgacgcctgttgagtgtgctggagactatgcaacctttatcagtcggctacgtcaagatagtactattgaaaatggtttgaacctgtggtgtgtgtcagataatctgcgtaaaggcgccgcacttaatgctgtccagatagctgaaacacttggtcaaagagtcctcaaaaagggttaat

SEQ ID NO: 214784 - DNA, 724 bp, Unknown
  Bacterial polypeptide expressing nucleotide sequence isolated from the Sargasso Sea
tcgaacagatccagatgtcccattagtagtcgctgaggttaatcctgaggcgctaaaagattttagaaaaaaaaatatcatttctaatcctaattgttcaactatggggatgctagttgcggttaaacccttgcatgatcatttcaaagttaaaagaattgttgtttcaacttatcaatcagtatctggtgcaggtaaagaagctgcagatgaattatttaatcaaactaaatcaatctatgcaaatgaagcagtagtgaaggaaaaatttactaaacaaattgcttttaatgttatcccgcatatagatgttttcttagaggacggtcaaaccaaagaagagtggaaaatgtacaatgaaacaaaaaaaattcttgatcaaaacatagaactaaccgcaacttgtgttcgagtaccagtatttatatctcattcactagctgtaaacatcgagtttgaaaagccttatgacgaggaccaaataagagaaatttttaagaaatcccctggtctaaaaatgattgattaccgtgctgatgaggggtatgtaactccgattgaatctgcaggtttagaccctgtctacgttagcagaattagaagagaccctactattccaaatggtcttaatttctggtgcgtgtctgacaatttaagaaagggagctgctttaaacactgtacaaatagcagaaatcttgatcaaagattatttaagctcttag

SEQ ID NO: 214785 - DNA, 811 bp, Unknown
  Bacterial polypeptide expressing nucleotide sequence isolated from the Sargasso Sea
tttttctctgcaggtggcagtgtgtctgcaacttacgccccccgtgctgcggatgccggttgcgtagtgatcgacaacacctcgcatttccgctacgaagccgatattccactagtggtgccggaagtgaatgcgcatgctatcgctgagttccgtaaccgcaatatcattgccaacccgaactgttccaccattcaaatgctggtggcgttaaaacctattcatgatgctgtaggtatcagccgtattaatgtcgctacttatcaatcggttgctggtgcaggtcaacaaggtgtggaagctttagccacagaaacagcgcagttactcaatgggcgtcctttagaagaaggggggaagtttgcccgtcagatagcgttcaactgtattccacaaattgacgtgtttttggataatggttacaccaaagaagaaatgaaaatgcactgggaaacccaaaaaattatgggggatgccagtatatccgtcaatgctactgcggtgcgtgtgcctgtgttttatggtcatgctgaagctgtgcatttggaaacccgcatgccaatcagtgtggaacaggtcaaagctctgttagccaatgcaccaggcgtgactctgatggaagagaatgctgattacccgactcaggtaggcaatgccgccggtcaggatgatgtgtttgttggccgtattcgtcaggatttcactcatgaaaacggtattaacttatgggttgttgcggacaatatccgtaaaggtgcggcgaccaacagcattcagatcgcagaacatctaattcgtgattatctttgaa

SEQ ID NO: 214786 - DNA, 817 bp, Unknown
  Bacterial polypeptide expressing nucleotide sequence isolated from the Sargasso Sea
gctgaaatcactttttttgccgctggttcagcaattgcagagaaatgggctccagttgcagcaaaaaattctatagtaattgataactcaaaaaattttaggatggacccggatgttcctttagtagtgccagaggtaaattcacaacacttaaaactttatagaaataaaaatattatagcaaacgcaaattgctcagtaatacctttagttgttgcacttaaaccattacatgatttatatgatattaaaagaatagtagcttcaacttatcaatctgtttctggtgcaggcaagtcagcaatggacgagctattatcacaaacaaaagagttttatgaaaataaagaactaaaatcaaaatattttactaaacagattgcatttaatgcaatacctcacatagataagtttttagataatggttataccaaagaagaacaaaaaatgcatgatgaggttaaaaaaatattagataccaaaataaaagtaacatctacctcagtaagaattccagttttagtttctcatgctgtaagtgtaaatgttgagtttaatagaaactataaattggatgaaataagaaatgttcttggtagttcacctggctgcaaacttgttgataaaatggaagatggtggttatgtaactccagttgaagctgaaaacgaatatgaaacatttatttctcgaattagaaaagatgattcccaagaaaatacaataaatttatggattgtttcagataatttgttaaaaggagcggcacttaatgcagttgaaattgcagaaactttaattaaaaattttagatgaa

SEQ ID NO: 214787 - DNA, 724 bp, Unknown
  Bacterial polypeptide expressing nucleotide sequence isolated from the Sargasso Sea
tttagatatgaggatgatgttcctttaatagtccctgaagttaactctcatattcttgatagctcaatgtttaaaggactagtagcaaacccaaattgctctaccattcaaatgttagcagccattaaaccaattcatgatgaatttgagattagaaagataaatgtaacaacttttcaagctgtttctggtacaggaaaggaagcacaagaagagttagtatctcaatcaagttcaaagttaaataatccggaaattgatttatcaacagaggtttatgaaaagcctatagcatttaacgctatacctcattgtgatgattttcaagaaaatagatatacgaaagaagagatgaagatggtttgggagacaaataaaattttagatcctgctatagaagtaaatccaacatgcgtaagagtacctgttttgaatggtcactctgaatctgttcatttaactacaaagaaaaaaatcgatttggataaagttataaatcttttaagagcgacaaaaggcgttaaagttttctatggagaaggtccagaagattatcctactgccttaatagatgctgatggtaataatgacgtgatggttggaagaattagaaaagatctttcgaaagataatggcatgaatttatggatagtggcagataatctaaggaaaggagctgccttaaatagcatacaaatagccgaaaagatttttgagaattgat

SEQ ID NO: 214788 - DNA, 982 bp, Unknown
  Bacterial polypeptide expressing nucleotide sequence isolated from the Sargasso Sea
tggccgagaaatactacaaattcttgcagaaagaagtgtgccttcgagtgaggtaatagctattgcctctgccgcctctaaaggactagaggtgccttacggcgatgacgcggtcttgaaagttgatagccttgagacttttgattttagtaatgtagatattgttctttcaagtccgggagctaatgtttcaagagaatttgctccaaaagcagccgcggctggcgccatagtaattgataatacttcagagtttaggatggacccagaggtgccgttggtagttcctgaggtgaatgcagaagctttagcaaactataaagcaaaaaatattattgcaaacccgaactgctctacaattcaaatggttgtagccctaaagccccttcatgatgaggtgggaattaatagagttgttgtttcaacctatcagtctgtttcaggtgctggcaaatctgctatggatgagctatttaatcaaacccgagggatttatgctaatgagcccgagcaaaagtttatggaaaattttacaaaatcgatagcttttaatgtgatacctcatatagatgtttttatggaagatgggtccacaaaggaagagtggaaaatgtctgtagagacaaaaaagattatagatccttctattgaagtgcatgctaattgcgtgagagtgccggtatttattggtcacgccgaatgggtaaatgttgaattaaattctcctttatcttatgagaatgcaagggaattgcttggtgcggcaccaggtctagtagtggtagatcaccgtcaagatgagggttacgtaacacctgttgagtgtgctggcgaagacgcggtctatgtaagcaggattagagaagatctgaccatagaaaatggtttaagtttttggggtgtatcagataatattaggaaaggggcggcattaaatactgtccaaatatctgaagttcttataaatgactatctaagctag

SEQ ID NO: 214789 - DNA, 994 bp, Unknown
  Bacterial polypeptide expressing nucleotide sequence isolated from the Sargasso Sea
ttgagccggcagtctgctgtcccgttcaccccccgcttgtcctcatcttttccagcccgtcccctcaacgttgctgttctcggcgccagtggtgcggtcggtcaggagttgcttcttctcatcaaggaacgcaactttccggtagctgaactgaagctgctggcttcggcacgctccgccggcagcacgcagcagtggaacggccgcacgatcaccctcgaggaggtaagcgctgaagcgtttgagggtgtggatctggtgctggcctccgctggcgggtcggtgtcgcggcagtggcgcgacgcgatcaccgccgctggtgcagtgatggttgacaactccagtgctttccggatggaggagggagttcctctggtggtgccggaggtcaatcccgatgcagcgttggcccacaacggggtgatcgccaaccccaactgcaccacgatcctgctcaccctggccctggcgcccctggccgccaaacgcccaatgcgacgggttgtggtgagcacgtatcagtccgccagcggtgccggcgcccgggcaatggaggaactcaaaattttgtcgcagaccgtgctcgatggcggcaccccccaaggtgaggtgctgccctactcattggccttcaatcttttcctgcataactctccgctgcaggccaacagctactgcgaggaggagatgaagatggtcaacgagacccgcaagatcatggatctgccggatctccgcttcacggccacctgcgtgcgtgtgccggtgctgcgggcccactccgaggccgtcaacatcgaatttgagcagccgttcccggtggaggaggcgcgtgctctgttgagcgcggcccctggcgttgagttgatcgaggatccggccaccaaccgcttccccatgcccaccgatgtcacgggccgtgatccggttgctgtggggcgcatccgtcaggacatcagcgatccgaacgccctggagctgtggctctgcggtg

SEQ ID NO: 214790 - DNA, 913 bp, Unknown
  Bacterial polypeptide expressing nucleotide sequence isolated from the Sargasso Sea
ggtgctgttggatctgaattactcaaaattcttgaacaacgtcatttcccaatatcagaattggtcttgctttcatcagagcgttcagaaggaaaaaaaattatttggaaaggtgaagaattagttacaaaaaaaacaactaaggaagaatttctgaatcttgatttagttttagcttcagcaggtggaagtatttcaaaaaaatggttatctacaattatggaacaaaatgctttattaatagataattcaagtgctttcagactagataataatgtacctcttatagttcctgaagttaatggtagtgacgtaattaatcatgatggggtaatagcgaatccaaactgcactaccattttgctgacattagttttagctcccttaaataaactttcgactattcaaagagttgttgtatcaacatatcaatctgtaagtggtgcaggccaattggcgatggaggaactaaaacttttaactgaaaaatatcttcggggtaatcctcaaaaaagtgaagttttgccatactcgctggcttttaatttgtttttacataattcacccatgcttgcgaataattactgcgaagaagagatgaaaatggttaatgagactaggaaaatattaaatattgctgatttaaggctctctgctacatgtgttcgagtcccagtactaagagcacactctgaatcgatcaatattgaatttgctagtgtagttgagcctaaagatgctcttgaagaattaaaaaaatctcccggacttgaaattattgaggatttcaaaaataatagatttccaatgccaaatgacgttatgggaagggataatgttgctgttggcaggctaagaactgatataagtcagcctaatggattagaattatggttatgggagatcaaataag

SEQ ID NO: 214791 - DNA, 570 bp, Unknown
  Bacterial polypeptide expressing nucleotide sequence isolated from the Sargasso Sea
gatgacgccatcattattcttgacccggtgaaccaggcggtgattaccgacggcctgaacaaaggcatcaaaaccttcgtgggcggcaactgtactgtcagcctgatgctgatgtcactgggcggtctgttcgccaacgatctggtggaatgggtttctgtggcgacttatcaggctgcttccggcggcggtgcgcgtcatatgcgtgaattgctagcgcaaatggggcaactgcatggtcacgtggcggctgagctggcagacccggcttctgccatcctcgatatcgaacgtaaagttacccagctctctcgcagcggcgaactgcccgtcgataacttcggcgtgccgctggctggtagcctgatcccctggatcgacaaacagctggataacggtcaaagccgtgaagagtggaaaggccaggctgaaaccaacaaaattctcgcgacaaccaccacaattccggttgatggcttgtgtgttcgcgtcggtgcgctgcgctgccacagccaggcatttaccattaaattgaaaaaaaatgtgtctattccgaccatcgaagagctg

SEQ ID NO: 214792 - DNA, 694 bp, Unknown
  Bacterial polypeptide expressing nucleotide sequence isolated from the Sargasso Sea
tttggttgtttctgaagtgaatcctgacgatgcaagaaagcacaatggattaattgcgaatcccaattgcacaactattttattggcgttggttctatccccattgactaggcatattcctattaagagagttgttgtctcaacttatcaatccgccagtggtgcaggtgctttggcaatggaagaattacaaaaattaagtcaagaagttttagatggagtaactccaaaaagtaaagttcttccttattcattggcatttaacctctttttgcataattcccctttgcaacctaataattattgcgaggaggaaatgaaaatggttaatgagactagaaaaattcttggagatcctcagctttctttgactgcaacatgtgtaagagttccagttttaagagcccattctgaatcggtaaacattgaattcaccaagcctttcccagtaaaagaagcgtatgagattttggaatctgcgcaaggagttgagatacttgaagatttgggcagcaatcgttttcctatgccacaagatgtaaatggtagagatccaatatctgttggtcgtataaggcaggacataagtaatccaaatgctttggaactatggttatgtggagatcaaatccggaaaggagccgcacttaatgcagtgcaaattgctgaacttctattggcaaaaaaatcatga

SEQ ID NO: 214793 - DNA, 805 bp, Unknown
  Bacterial polypeptide expressing nucleotide sequence isolated from the Sargasso Sea
atgcgaaaaattggctttgtaggttggcgcgggatggtcggttcggtccttagaaaaagaatgctggaggagaaagacttcgagctgatcgaaccgttcttttttacttcatctcaagcgggacagacttcaccggaagtggctggtgaggtctacactttgctagatgcatatgatctgaaagccctgacagctatggatgttatcatcacctgtcaaggtagcgagtataccaatgatattcattccaaacttcgtaattttggttggaaagggtattggattgatgcggcatctgctttgcgaatgaacgatcattcggcaatagtccttgatccagttaacttaagtctaatcaaagagcgtctcgcaactggaattagagatttcattggtggaaattgcaccgtaagtcttatgctgatgggcttagggggattgtttaaagcaaatttggttgaatgggcaactgcgatgacatatcaagctgcttcgggcgctggggcaaaaaatatgctcgaattgatccatcagatgggtgctataacttcctcagtcggcacgcaacttgatagtccagaatttggcattctagatattgatgaaacggttacgcaatgcctgcgttctgcggagttcccagttgacagttggggatttccgttggctgggagtattctgccgtggattggtgatgcaaaagagaatggtcaaagcggagaagagtggaaaaatgaagcagaaacaaacaagatactcggtaataccgatagtgccgtcagtttggacggcttatgcgtacgga

SEQ ID NO: 214794 - DNA, 827 bp, Unknown
  Bacterial polypeptide expressing nucleotide sequence isolated from the Sargasso Sea
tgccgcctccagcctgcgcatggacgacagcgcggtgatcgtgctcgacccggtcaaccgcaaggtgatcgaccaggcgctggatgccggcagcaagaactacatcggcggcaactgcacagtcagcctgatgctgatggcgctcggtggcctgtatgaagccggcctggtcgagtggatgagcgccatgacctatcaggccgcctccggtgccggtgcgcagaacatgcgtgagctgatcaagcagatgggtgcgatcaacggcgctgtcgcggacgacctggccgacccggccagcgccatcctcgacatcgaccgcaaggtcgccgaggccatgcgtggcgaagacttcccggtcgacaacttcggcatgccgctggccggcagcctgatcccctacatcgacaaggaactgcctaacggccagagccgtgaagagtggaaggcgcaggcggagaccaacaagattctcggtcgcttcaagagtccgatcccggtcgacggcatctgcgtgcgcatcggcgccatgcgttgccacagccaggcgctgaccatcaagctgaacaaggatgtgccgatggccgacattgaaggtctgatcagtcagcacaacccctgggtcaagctggtgccgaaccatcgcgaagactccatccgcgacctcggcccgactgccgtgaccggtaccctgagcgtaccggtcggccgcctgcgcaagctcaacatgggctcgcagtacctgggcgccttcaccgtgggtgaccagctgctgtggggcgcggccgagccgctgcggcgcatgctgcgaatcctgctggagcgctgag

SEQ ID NO: 214795 - DNA, 880 bp, Unknown
  Bacterial polypeptide expressing nucleotide sequence isolated from the Sargasso Sea
ggaatcgttggtgctacaggacaagttggtggtgtaatgcgcagcgttctcatcgagcggcttttcccgttagatgaaatacgttttttcgcgtcagctcgttctgcggggacaaccattgactgggatggggctgacatcgttgtcgaagacgcgagcacagcagattacagcgacatagatattgcgttgttctccgcaggcggagcaacgtcgctcgaaatagctgaaaaagttgcctctcagggagctttagtcatcgacaattcgtccgcatggaggatggacccggacgttccccttgtcgtcccagaagtgaatgccaacgcagtcaccaagaccccgaaggggattattgccaatccaaactgcacaactatggcggcgatgccggttctcgccccgttgcacgaagaggcacaactgcagggcatgattgcctcgacgtatcaagcggtctcgggagcaggcctggcaggagtcgcggaattaggcgagcaacttcgtgcaacgatcagcgacgctgagggattgacctatgacggcgaagccgtcaaccacaccgagccccactcgttcccacaaccaatcgcacacaatgtcttagctcacgccggcaactttgtttctgacggcagtggtgaaactgacgaagaacagaaactccgtaatgaaagtcgcaagattctcgacatccctgatttagaagtttccggtacctgcgtcagagttccggttttcaccggacactccttggcattgaatttgcgattcggttcggaaataagtcccgaacgtgcgacagagatcttgagcaccgccgcgggagtagtagtcgcggacgtcccgacgccgttaacagctgctggtcaggaccctt

SEQ ID NO: 214796 - DNA, 583 bp, Unknown
  Bacterial polypeptide expressing nucleotide sequence isolated from the Sargasso Sea
aatgggcgctattcattcaagtgttgctcagcaactcgataacccaagttcagctattttagaaattgataaaatagtcagtgaaaaaatggcttcaagtgacttaccacaagatcaatttggtgtgccattagccggtagcttgatcccatggattgatgttccaatgccaagtggtcagtctaaagaagagtggaaggcacaagtagaagctaataaaattttaggctctacccatcagcctgtccctattgatggtttatgtgttcgcattggtgctatgcgttgtcatagccaagcaatgactattaaattacgcgaagacataagcgtcgaaaaaatagaagaaatattagcttcgcataacgaatgggttaaggttatcccaaatgagcgtgatattacatccaccgatttaacgccggttaaagtaacaggcacattaagtatcccagtgggacgtattcgtaagcttgccatgggacctaaatatattagcgctttcacagtgggcgatcagcttttatggggtgcagcagagccacttcgtcgtatgcttcgcattattgtagacgctgagtaa

SEQ ID NO: 214797 - DNA, 526 bp, Unknown
  Bacterial polypeptide expressing nucleotide sequence isolated from the Sargasso Sea
tcctctgctattctcgacattgaacgtaaagtgacgaccctgtcccgtagcggtgaactgccggttgataactttggcgtaccgctggccggtagcctgattccgtggatcgacaaacagctcgataacggtcagagccgtgaagagtggaagggacaggcggaaaccaacaaaattctcaacacgtcttccgtgatcccggttgatggtctgtgcgtgcgcgtcggcgcgctgcgctgccacagccaggcgttcaccatcaaactgaaaaaagatgtgtctattccgaccgtggaagaactgctggcggcgcacaacccgtgggcgaaagtagtaccaaacgatcgtgaaatcaccatgcgtgagttaaccccggcggccgttaccggcacgttgaccacgccagtaggtcgtctgcgtaagctgaatatgggaccggagttcctgtcagcctttaccgtaggtgaccagctgctttggggtgctgcggagccattgcgccgcatgttacgtcaactggcgtaat

SEQ ID NO: 214798 - DNA, 772 bp, Unknown
  Bacterial polypeptide expressing nucleotide sequence isolated from the Sargasso Sea
gccggagcgaccggtgcggttggaacagaatttttaaaacttttggaagcacgggattttccgatgaaaagccttcggttgcttgcttcttcacgatctgcgggatctaaactgaagttccggggtgagaacttggaagttgaggaactgactccgaaatcctttaaagggattgatatcgcattcttctctgctggaggctcaaggagcaaggaattcgcaccccatgcagtggattccggtgcggtggtaatcgataacagcagtgctttcaggatggatgaaaaggtccctttggtggttccagaaattaatcctaaacaagcatttgagcatcagggactgattgccaatcccaactgttcgaccattcagatggtggtggctctgaacccgatccatcgtgcagccaacatccagcgtgttgtggtttccacctatcaggccgtttccggcgcaggcgccagtgcgatggaggaactcaaacaacaactgcgggcatgggcaaatgatgaaccgatgaagcaggaagtgtttcccacccaaatcgcgttcaatctgttcccccacatcgatgtattccaggataacgggtacaccaaagaagagatgaagatggtccatgaaacccggaaaatcatgaatgctccgaacatgcagatctcagccacctgtgtcagagtacccgtacttagagcgcattcagaagcagtctgggtagagacggagaaacccctcagcgaatccgaggctcgtgaactttcgaaaagga

SEQ ID NO: 214799 - DNA, 868 bp, Unknown
  Bacterial polypeptide expressing nucleotide sequence isolated from the Sargasso Sea
ttgtgcacaggatatttccagtttcgatttctctacagtccagatcgggtttttttcagctggagctgacgtttcggctgagtatgcgccaaaggcagctgctgcaggctgcatcgttatcgataatacctcccagtttcgttttgaagatgaagtgccgttagttgtccctgaagttaatggaaataagattgcggattaccgtgcaaagggaataatagcgaatccgaattgttccactattcagatggttgttgcacttaagccgatacatgatgcagtcgggataactagaataaacgttgcaacttatcaggcagtatctggagcgggaaaaaatgccatgcaagagctggcgagacactcggccgctatgctcagcggaaaatccaccggaattcgaggcgatgaaggctataagaaaatcgcatttaatgcggtgccccatatcgatgaatttcaggacaataggtacaccaaagaagaaatgaagatggtttgggagacccaaaagattatggatgatgaaagtatcaacgtgaatcctacagcagtccgtattccagcgttctttggtcattctgaggcaattcatatcgaaacccgcgataagatctctgctgcacaagtttgcaagttgatgagagaagcacccggagtagtgttgattgatggaactgaagctggtcaatatccgacggcgcgaacggatgcatcgggaaccgacccagtttatgtgggcagggtacgagaagatataagtcatccgaaaggaattaatctttgggttgtatccgataatattcgaaagggagcagcactaaatagtattcaaatagctgaaattttggtgaaaaactatttatga

SEQ ID NO: 214800 - DNA, 856 bp, Unknown
  Bacterial polypeptide expressing nucleotide sequence isolated from the Sargasso Sea
aaagtgatgctcggcagtaaggcgatcactgtaactgatttggcaaatttcgattttaagcttgcggatattgctctgttctcagccggaggagcgatttccgcagaatttgcaccaaaggcaggtgattctggttgtgtggttatcgataatacctcacacttcagatatgatgatgatattccactaatagttcctgaagtaaactcttgtaaaataggggaatataagaataggaatattattgctaatccaaattgttcgacaattcagatgcttgttgcactaaagccaatatatgactcggtgggtatagagagaatcactgtttcaacctaccaggccgtttctgggtcaggtacaaacgcggtaaatgaactagccaagcagacggcggaattgctcaatggaagggatgctgagtgtgatgtttaccccaagcagatagcattcaatgtgctaccacatatagatatctttatggacaatggctataccaaggaagagatgaagatgtgctgggagacacaaaagatttttggagacgaaaatattaatgtttcagcaacttgcgttagagttccagtatttttcggtcactcagaggctattcagattgaaacttcggactatatagacgaaaagcaggcacgaagccttctagaaaaggcggagggtgttacagttatcgacgagcgccgggatggaggttatcctaccgcagtccatgagtcagctggtagcgactctgtatttgtcgggagaatacggaaagacatatctttgaagaatggattaaatctatgggtagtgtctgataacgtccggaaaggagctgccctgaattctatacaaa

SEQ ID NO: 214801 - DNA, 778 bp, Unknown
  Bacterial polypeptide expressing nucleotide sequence isolated from the Sargasso Sea
tcaaaaaaatggttatcaacagttaaggaccaaaatgcaatattaattgataattcaagtgcatttagattagaaaaagatatcccccttgttgttcctgaagtcaatgcttgtgatgctttaaagcacaatggcgttattgctaatccaaactgtacaactatattactgactttggttttagctcctctgaataatatttctcccattaaaagagtaatcgtttcaacttatcaatcggtcagtggagcaggacaattagcaatggaagaattaaagttcttaaccgagaaatatttacagggagatgcaaaagaaagtgaagttttaccatattcattagcatttaatttgtttctacataattcaccaatgcttgcaaataattattgcgaggaagagatgaaaatgacaaatgaaactcgtaaaatactgaatatttctgatttaaaactttcttcaacatgcgtccgagtaccagttcttagagcgcattctgaatcagttaacattgaatttgagaatattatcaaaccttcatatgctattgatcaattaaaaaatgctgatggtatagaaataatagaagactatgaaaaaaatagatttcctatgccaaatgatgtgatgggaagagataatattgctgtgggcagggtaagaactgatataagtaatcccaatggattagaattgtggttatgtggagatcaaataaggaaaggagccgcacttaatgctgttcaaatagctgaattattaattgaaaaaaaatgac

SEQ ID NO: 214802 - DNA, 813 bp, Unknown
  Bacterial polypeptide expressing nucleotide sequence isolated from the Sargasso Sea
gatgcgaagcatcctccacgagcgctcatttccagtagacgaaatgcgtttatttgcctcggcacgttcggcaggcaccagcattcaatggaacggtgaagaaattgtcgtggaagatgcgagcacggctgatttcaacggggtcgatatagccctcttttcggctggaaagacgacctctcttgaattagctgaaaaagttgcttcccaaggtgctttagtaatcgacaattcctccgcctggcgtatggatcccgaagtgccgctcgtggtgccggaagtcaacgccgaccaagtgttgaatactcctaagggcattattgcgaaccccaactgcacgactatggccgcgatgcccgtgctcgctcccttgcataacgaagctcaactagttggcatagtggcctctacttatcaagccgtgtcaggcgccggtctcgccggagttgcagaattgggagaacagatccgagcgacagtagacaatgcggaaggattgacctacagcggatctgcagttgagcacaccgcaccctcatcgtttgctcaacctattgcccacaatgttctcgctcacgcgggtgccttcgtttctgacggaagcggcgaaactgacgaggagcaaaagctgcggaacgaaagccgaaaaattcttgacataccggatcttgacgtctcaggcacctgcgttcgagttcccgtgttcacaggacactcacttgccctcaatctgcgctttaggtcagaaatcacaccggaacgagctacagaactcctagataaggcagaaggtgttgtcctttctgacgtccc

SEQ ID NO: 214803 - DNA, 874 bp, Unknown
  Bacterial polypeptide expressing nucleotide sequence isolated from the Sargasso Sea
aattatttggaaaggtgaagaattagttacaaaaaaaacaactaaggaagaatttctgaatcttgatttagttttagcttcagcaggtggaagtatttcaaaaaaatggttatctacaattatggaacaaaatgctttattgatagataattcaagtgctttcagattagataataatgtacctcttatagttcctgaagttaatggtagtgacgcaattaatcatgatggggtaatagcgaatccaaactgcactaccattttgctgacattggttttagctccgttaaataaactttcgactattcaaagagttgttgtctcaacatatcaatccgtaagtggtgcaggccaattggcgatggaggaactaaaacttttaactgaaaaatatcttcggggtaatcctcaaaaaagtgaagttttgccatactcactggcttttaatttgtttttgcataattcacccatgcttgcgaataattactgcgaagaagagatgaaaatggttaatgagactaggaaaatattaaatattgctgatttaaagctctctgctacatgtgttcgagtcccagtactaagagcacattctgaatcgatcaatattgaatttgctagtgtagttgagcctaaagatgctcttgaagaattaaaaaaatctcccggaattgaaatcattgaggattacaaaaataatagatttcctatgccaaatgatgttatgggaagggataatgttgctgttggcagaataagaactgatataagtcagcctaatggattagaattatggttatgtggagatcaaataagaaaaggagcagctcttaatgctgttcaaatagctgagttattaattccaaaaaaatga

SEQ ID NO: 214804 - DNA, 880 bp, Unknown
  Bacterial polypeptide expressing nucleotide sequence isolated from the Sargasso Sea
aaaaaaattatttggaaaggtgaagaattagttacaaaaaaaacaactaaggaagaatttctgaatcttgatttagttttagcttcagccggtggaagtatttcaaaaaaatggttatctaccattatggaacaaaatgctttattgatagataattcaagtgctttcagattagataataatgtacctcttatagttcctgaagttaatggtagtgatgtaatcaatcatgatggggtaatagcgaatccaaactgcactaccattttgctgacattagttttagctccgttaaataaacttgcgccaattaaaagagttgttgtctcaacatatcaatccgtaagtggtgcaggccaattggcgatggaggaactaaaacttttaactgaaaaatatcttgggggtaatcctcaaaaaagtgaagttttgccatactcactggcttttaatttgtttttgcataattcacccatgctttcaaataattactgcgaagaagagatgaaaatggtttatgagactaggaaaatattaaatattgctgatttaaagctctctgctacatgtgttcgagttccagtactaagagcacattctgaatcgatcaatattgaatttgccggagtagttgagcctaaatttgcttttgaagaattaaaaaaatctcctggaattgaaattattgaggattacaaaaataatagatttcctatgccaaatgatgttatgggaagggataatgttgctgtcggtaggataagaactgatataagtcaacctaatggattagaattatggttatgtggagatcaaataagaaaaggcgcagctcttaatgctgttcaaatagctgagttattaattccaaaaaaatgat

SEQ ID NO: 214805 - DNA, 706 bp, Unknown
  Bacterial polypeptide expressing nucleotide sequence isolated from the Sargasso Sea
gaaaagaacgtacctcttgtcgttcctgaagttaactctggtgatgcactcaatcatgatggggtaatagcgaatccaaattgcactactattttattgacattagttttggcaccgttaaataaactttcttctattcaaagagttattgtctcaacatatcaatctgtcagtggtgcaggccaattggcgatggaggaactaaaactcttaactgaacaatttctacagggtaatcctcaaaaaagtgaagttttgccatactccttggcttttaatttgttcttacataattcacctatgcttgcaaataattactgcgaagaagagatgaaaatggttaatgagaccaggaaaatattaaatattactgatttaaagctctctgctacatgtgttcgagtcccagtactcagggcacattctgaatctatcaatattgaatttgctggtgtagttgatcctaaagatgctctgaaagaattaaaaaaatctcctggaattgaaattattgaggattaccaaaacaatagatttcctatgccaaatgatgttatgggaagggataatgttgctgttggcaggttaagaactgatataagtcagcccaatggattagaattatggctatgtggagatcaaataagaaaaggagcagctcttaatgctgttcaaatagctgagttattaattccaaaaaaatgat

SEQ ID NO: 214806 - DNA, 1003 bp, Unknown
  Bacterial polypeptide expressing nucleotide sequence isolated from the Sargasso Sea
atgtcacagcatgttgccattgccggagcgaccggtgcagttggaacggaatttttaaaacttttggaagcacgggatttccagatgaaaagccttcggttgcttgcttcttcacgatctgcgggatccaaactgaagttccggggtgagaacctggaagtagaggaactgaccccgaaatcctttgaagggattgatatcgcattcttctctgcaggaggctctaggagtagggaattcgcaccccatgcagtggattccggtgcggtggtgatcgataacagcagtgccttcaggatggatgaaaaggtccctctggtggttccggagattaatcctaaacaagcatttgagcatcaaggactgattgccaatcccaactgttcgacgatccagatggtggtagctctgaacccgatccatcgtgcagccaacatccagcgtgttgtggtttccacctatcaggccgtttccggggcaggcgccagtgcgatggaggaactcaaacaacaactgcgggcatgggcaaatgatgaaccgatgaagcaggaagtgtttcccacccaaatcgctttcaatctgtttccccacatcgatgtattccaggataacgggtacaccaaagaagagatgaagatggtccatgaaacccggaaaatcatgaatgctccgaacatgcagatctctgctacctgtgtcagggtgcccgtacttagagcgcattcagaagcagtctgggtcgagacggagaaacccctcagcgaatccgaagctcgtgaacttttcgaaaaggaacctgggattgttttacaggatgaacgcgaaagcggaggttacccgactccatggcatatcaccgaaacccaggagacttacgtcggtcgaatccgaaaagacatctcccatccgaacggtctcaccttttgggttgttgccgaccaactctacaagggagctgcgttgaatgcgatccagatagctgaagtcttacagcagggttgaa

SEQ ID NO: 214807 - DNA, 1033 bp, Unknown
  Bacterial polypeptide expressing nucleotide sequence isolated from the Sargasso Sea
ttggcttcttcaaaaaaaccaaaaattgctgttgtcggagcgactggaaatgttggaagagaggtcttagatataatcgatgaaaaagaaattcaatactctgatttaatcgctttagcttcatcccgctctaaaggaagcacaattgattatggagaaaacaagtctgtagtagtagctgatttagccgaatatgatttttcagatactgacatagccattttttctcctggagcaaaagtatctagtgagtttgctcctaaggcagctaaacaaggatgtatagtcatcgataatacttcgcactttcgaacagacccagatgttccattagtggttgccgaagtcaatccagaggtcttaaaagattttagaaaaaaaaatatcatagctaatccaaactgctcaaccatggggatgctagttgcaattaaacctttacacgatcaatttaacgtaaaaagaattgttgtttcaacttaccaatcagtttcaggggctggcaaggaagctgctgatgaattatttaatcaaacaaaatcaatttatgctaatgaagcaatcgtcaaagagaaatttactaaacaaattgcttttaatgttatcccgcacattgatgtttttttagaagacggacaaactaaagaagagtggaaaatgttcaatgaaacaaaaaaaatacttgatcaaaacattgaattaacagcaacttgtgttcgtgttccagtttttgtttctcattctttagcagtcaatgttgaatttaataatccgtatgatgaggaccaagtaagggaaatttttaaaaaatcaccaggtttaaaaatgattgattatcgcgctgatgaagggtatgtcacccctattgagtctgcaggcttagatccagtgtatatcagtagaattcgaagagatcctactattccaaatggtttaaacttctggtgtgtttctgataatttaagaaaaggcgctgctttaaataccgtacaaattgcagaaatactaattaaagattatttaagttcttagc

SEQ ID NO: 214808 - DNA, 1126 bp, Unknown
  Bacterial polypeptide expressing nucleotide sequence isolated from the Sargasso Sea
atgtcacaacaaaaagtaggtttagtgggctggcgcggtatggttggctcagtattaatgcagcgcatgcaagaagagcaagatttcgcgcacattgagcccacctttttcactacctcgcaaaaaggtagtgcagcaccagattttgctggaaaggatgctggtgttctagaagatgcgcacgatatcgaagcgctatctaaacaggatatcattattacctgtcagggcggcgactacacaaaagccgtgtacaacgatttaagagccactggctggaacggttattggattgatgctgcgtcagcgcttcgtatgaaagacgatgccgtaattattctagatccagtaaaccgcaaagaaattgatagtggcattgaaaaaggcattcgtacctacgtaggtggaaactgcacggtttcccttatgcttctggcactcggtggcctgtttgagaaagacttggttgaatgggcttcgccaatgacctatcaagccgcttcaggttcaggtgcacagcacatgcgtgagctaattaatcaaatgggtgcaattcacagtaatgtgaaagctaaagttgaagatcctgctaccgcgattttagaaattgaccagcaagtgtctgagtttattcgaagcgcagactaccctagtgaacagttcggtgttccgcttgcgggtagcttaattccgtacatcgattcgcaactaccttcaggtcaaagccgcgaagaatggaaagcccaagcggaagccaacaagattttaggtattaaaggcggtgaagtgccgattgacggtatttgtgtacgtgttggcgccatgcgctgtcatagccaggctatcacacttaagctaaagaaagacttgcctctagcggaaattgaaacaatcttggctaatcacaacgactgggtaaaagtgattcctaacgatcgcgacgcgacgatgcaagaacttacaccagcgaaagtgaccggtactctgtctattcccgtaggccgtattcgcaagcttaacatgggtcctgaatatatctcggcatttactgtcggcgaccagctattgtggggtgccgcagagccgcttcgcagaatgctgcgcattgtgcttgagcaaaagtaac

SEQ ID NO: 214809 - DNA, 1004 bp, Unknown
  Bacterial polypeptide expressing nucleotide sequence isolated from the Sargasso Sea
tatgttaactaaaaaagaatcgtataatgtagctgtagtaggagcaacaggtattgtaggagaatcactccttgaaatactttactctaggagatttcccataagcagtatacatgctgtagcaagtaaaaaatcaaagggttcaaaagctaaatttggagatcaattactcaccgtagagtctctggatgagtttaacttcactgacattgatatagctttttttagtgcaggaagttctgtatctaaagaatatgctactaaagctactacacaaggttgtattgtaattgacaacacctcagaatttagatacgagcaagacgtacctcttgtagtacctgaggttaatccacaagatatcgatttgtataagcataagaatattatcgcaaatccgaattgttctacgatacagatgcttgttgcacttaaaccactgcatgatactttttgtgtaaaacacattaatgtttgcacttatcaagcagtttccggatctggtaaagatggagttgaagaacttttacaacaatcatctgcatatattgatcaaagatcgattgataagaaagtttaccctaaacaaatcgcctttaactcaataccatttgtagattgttttctagataacaactacacaagagaagaaatgaagatggtatgggagacacataaaattcttgatgagaatataagtgttaatcctaccgcagtaagagtgcctgtgttagttggacatgcagagagcatatatattgaaactgagaaggagatagatattgaatcagcaaaaaactgcttaaatgagtttgcaggaatatcagtcatagataatgttcaagaagtcgattttccaacttcttttgagcatggtcatggaactgatgatgtctatgttggcaggattagaaagggacttagtaaaaataactctttaaatttatgggtagttgctgataatgtaagaaaaggtgctgcattaaacagtatccaaatcgctg

SEQ ID NO: 214810 - DNA, 1018 bp, Unknown
  Bacterial polypeptide expressing nucleotide sequence isolated from the Sargasso Sea
tatgtcgcaggaatttaatgttgtcgttttaggtgcatcgggtgcagtgggtcaaacaatgattgagatcctcgaagagcgtaacttcccggttgcgaacttatatcctttagccagtagccgtagcgccggtgaaacggtcagcttccatggcaaacaagttaccattttggacgtcgaaaccttcgattggagccaagcgcagttaggctttttctctgccggtggtgatgtctcggccaagtgggcgcctatcgcagctgaagcgggttgtgtggtgatcgataacacctctcacttccgctatgacattgatattccattggttgtgcctgaagttaacccccatgcgattgctgatttccgcaaccgtaatattattgccaacccgaactgctcgaccatccaaatgctggtggctctaaaaccgatttacgacacttatggcatcagtcgtattaacgtggcgacttatcaatcggtctctggtacgggtaaaaaagcgattgaagaactggcaaaacaatgcactaagctgctgcaaggtctgcctgctgacgctgaagtttatccaaagcaaatcgcgtttaacgtattgccgcaaattgataaatttatggacaacggctacaccaaagaagaaatgaaaatggtctgggaaacccagaagatttttggtgacgatgacattctcgttaatgcgactgctgtgcgcgtgccggtattctatggtcactcagaagccgtacatatcgaaacgcgtcaagtcgccgatgcagaagatattaaagctttactgcgtaatgccgaaggagtggtattgttcgagtccgatgacgaatatccaacggctgtgacccatgcagcgggtaccgatcctgtttacgtgggccgtgtgcgtaaggatatctcccattctcacggtattaatctttgggtagtgtcggataatattcgtaaaggcgcagccttaaacagtgtgcaaattgccgagattttagtgagagattattactaa

SEQ ID NO: 214811 - DNA, 1060 bp, Unknown
  Bacterial polypeptide expressing nucleotide sequence isolated from the Sargasso Sea
ttgagccggcagtctgctgtcccgttcaccccccgcttgtcctcgtcttttccagcccgtcccctcaacgttgctgttctcggcgccagtggtgcggtcggtcaggagttgcttcttctcctcgaagaacgcaactttccggttgctgaattgaagctgctggcttcggcgcgctccgccggcagcacgcagcagtggaacggccgcacgatcaccctcgaggaggtgaacgatgcggcgtttgagggggtggatctggtgctggcctccgctggcgggtcggtgtcgcggcagtggcgtgacgcgatcaccgccgcgggtgcagtgatggtggataactccagtgctttccgcatggaagagggtgttcctctggtggtgccggaggtcaatcccgatgcagcgttggcccacaacggggtgatcgccaaccccaactgcaccacgatcctgctcaccctggccctggcgcctctggccgccaaacgcccgatgcgacgggttgtggtgagcacctatcagtccgccagcggtgccggcgcccgggcgatggaggagctcaaaaccctgtcgcagactgtgctcgatgggggcaccccccaaggagaggtgctgccctactcactggccttcaatctgttcctgcacaactctccgctgcaggccaacaggtactgcgaggaggagatgaagatggtgaacgagacccgcaagatcatggatctgccggatctccgtttcacggccacctgcgtgcgtgttccggtgctgcgggcccattccgaggccgtcaacatcgaatttgagcagccgtttccggtggaggaggcgcgtgctctgttgagcgcggcccctggcgttgagttgatcgaggatccggccaccaaccgcttccctatgcccaccgatgtcacgggccgggatccggttgctgtggggcgcatccgtcaggacataagcgatccgaacgccctggagttgtggctctgcggtgatcagatccgcaagggagcggccctgaatgccgttcagatcgccgaactgctgctgccgtcatgac

SEQ ID NO: 214812 - DNA, 1030 bp, Unknown
  Bacterial polypeptide expressing nucleotide sequence isolated from the Sargasso Sea
tttgtccttcgcctcagcagcgactccccccaccgtcgccatccttggcgccactggggctgttgggcaggaactgttgaccctgcttgaggagcgctccttcccgctaaagcagttgcgattgttggcctctcctcgctcggctggtcaaaccgttccgttccaagatcagaccttgaccgtcgagccggtgagtgctgaggccctcgccggcgttgatttggtgttggcttctgctggcggttcggtctcgcgtgagtgggcgccggtggccgtgcagcagggtgccgttgtgatcgataactccagcgctttccggatggatccgactgtgcccttggtggtcccagaggtgaaccctcaagcggcactgacccatcagggaatcattgccaatccgaactgcaccacgatccttttgacgctggctttggctcccctggccgccatgcgtccccttcgtcgcgtggtggtgagcacctatcaatcagccagtggtgcaggcgcgcgtgccatggaggagctgcggcaactcagtcggaccgtgctcgatgggggtgaagcccgaagcgaagttcttccccattccttggccttcaatctgtttctccataactcccctttgaaggccaatggctactgcgaagaggagctcaagatgctgaatgaaacccgcaagatcatgcaattgccagagctgagcttctcggccacctgcgtgcgggttccggtgctccgggcccattccgaagccgtcaacattgaattcgaagcgcctttaagcgtggccgaagcccgcgcggccttggcccaagcgcctggggtggagttgatcgaagacttcgagaccaaccgctttccgatgccgacggatgtaacaggccgagaccccgtagctgtgggccgcatccgtcaggacctcagtcatccgcaggcccttgagctctggctctgcggagatcagatccgcaaaggtgctgcgctcaatgcggtgcaaatcgctgagctgttgttggaggcagcccaatga

SEQ ID NO: 214813 - DNA, 961 bp, Unknown
  Bacterial polypeptide expressing nucleotide sequence isolated from the Sargasso Sea
tggaacagaatttttaaaacttttagaagcacgggattttccgatgaaaagcattcggttgcttgcttcttcacgatctgcgggatccaaactgaagttccggggtgagaacttggaagttgaggaactgactccgaaatcctttaaagggattgatatcgcattcttctctgcaggaggttcgaggagcaaggaattcgcaccccatgcagtggattccggtgcggtggtaatcgacaacagcagtgcattcaggatggatgaaaaggtccccctggtggttccggaaattaatcctaaacaagcatttgagcatcagggactgattgccaatcccaactgttcgaccattcagatggtggtagctctgaacccgatccatcgtgcagccaacatccagcgtgttgtggtttccacctatcaggccgtttccggcgcaggcgccagtgcgatggaggaactcaaacaacaactgcgggcatgggcaaatgatgaaccgatgaagcaggaagtgtttcccacccaaatcgctttcaatctgttcccccacatcgatgtattccaggataacgggtataccaaagaagagatgaagatggtccatgaaacccggaaaatcatgaatgctccgaacatgcagatctcagccacctgtgtcagagtacccgtacttagagcgcattcagaagcagtctgggttgagacggagaaacccctcagcgaatccgaggctcgtgaacttttcgaaaaggaacctgggattgacgtccaggatgaacgcgaaagcggaggttacccgactccatggcatatcaccgaaacccaggaaacttacgtcggtcgaatccgaaaagacatctcccatccgaacggtctcaccttttgggttgttgccgaccaactctacaagggggctgcgttgaatgcgatccagatagccgaagtcttacagcagggttga

SEQ ID NO: 214814 - DNA, 1018 bp, Unknown
  Bacterial polypeptide expressing nucleotide sequence isolated from the Sargasso Sea
tatgtcgcaggaatttaatgttgtcgttttaggtgcatcgggtgcagtgggtcaaacaatgattgagatcctcgaagagcgtaacttcccggttgcgaacttatatcctttagccagtagccgtagcgccggtgaaacggtcagcttccatggcaaacaagttaccattttggacgtcgaaaccttcgattggagccaagcacaaatcggtttcttctctgccggtggcgatgtctcggccaagtgggcgcctatcgccgctgaagcgggttgtgtggtgatcgataacacctctcacttccgctacgacattgatattccattggttgttcctgaggtaaacccccatgcgattgccgatttccgcaaccgtaatatcattgcaaacccgaactgctcgaccatccaaatgctggtggcactaaaaccgatttacgacacttacggtatcagccgtattaacgtcgcgacctatcagtcagtctctggtacaggtaaaaaggcgattgaagaactggcaaaacaatgcactaagttgctacaaggcttgccttctgacgctgaagtttatccaaagcaaatcgcatttaacgtattgccgcaaatcgataaatttatggataacggctacaccaaagaagaaatgaaaatggtctgggaaacccagaagattttcggtgatgacgaaatcctcgttaacgcaacggccgtgcgtgtaccagtcttctatggtcactctgaagccgtacatattgagacgcgccaagtcgccgatgcagaagatattaaagctttactgcgcgatgccgaaggagtggtattgttcgaatccgatgacgaatatccaacggctgtgacccatgcagcaggtaccgatcctgtttatgtgggccgtgtgcgtaaggatatttcccattctcacggtattaacctttgggtggtgtcggacaatattcgtaaaggcgcagccttaaacagtgtgcaaattgccgagattttagtgagagactattactaa

SEQ ID NO: 214815 - DNA, 1123 bp, Unknown
  Bacterial polypeptide expressing nucleotide sequence isolated from the Sargasso Sea
atgaacgtaggtctcgtaggttggcgcggcatggtcggcagcgtcctgatgcagcgcatgcaggaagagggcgatttcgacctgatcgaaccggtgtttttcagcaccagcaacacgggcggcaaagcgccgtcgttcgcgaaaaacgagactacgctcaaggacgcgaccaacgtcgacgagctgaagaagtgcgacgtgatcatcacgtgccagggcggcgattacacgaacgacgtgttcccgaagctgcgcgcggccggctggaacggctactggatcgatgcggcatcgtcgctgcggatgaaggacgacgcggtcatcatcctcgatccggtcaacctcgacgtgatcaaggacgcgctcgtcaagggcacgaagaacttcatcggcggcaactgcacggtcagcctgatgctgatggcgctcggcggcctgttccgcgagaacctcgtcgactggatgacggcgatgacctaccaggccgcatcgggcgcgggcgcgcagaacatgcgcgagctgctgtcgcagatgggcacgctgaacggcgcggtgaaggagcagctcgccgatccggcttccgcgatcctcgacatcgaccgccgcgtgctggccgcgatgaacagcgatgcgatgccgacgagcaacttcggcgtgccgctcgccggttcgctgatcccgtggatcgacaaggatctcggcaacgggatgtcgaaggaagagtggaagggcggcgcggaaaccaacaagatcctcggcaagccggccatgggcgagccgggttcgatcccggtcgacggcctgtgcgtgcggatcggcgcaatgcgctgccactcgcaggcgctgacgatcaagctgaacaaggacgtgccgctcgacgagatcaacggcatcctcgcatcggcgaacgactgggtgaaggtcgtaccgaacgagcgtgaagcgtcgatgcgcgacctgtcgccggcgaacgtcacgggcacgctgacggtgccggtcggccgcctgcgcaagctcgcgatgggcggtgaatacctgtcggcattcacggtcggcgaccagctgctgtggggcgcggccgagccgctgcgccgcatgttgcgcatcctgctcgacaagtaag

SEQ ID NO: 214816 - DNA, 859 bp, Unknown
  Bacterial polypeptide expressing nucleotide sequence isolated from the Sargasso Sea
catgtcacagcatgttgccattgccggagctaccggtgcggttggaacagaatttttaaaacttttggaagcacgggattttccgatgaaaagccttcggttgcttgcttcttcacgatctgccgggtccaaactgaagttccggggtgagaacttggaagttgaggaactgactccgaaatcctttaaagggattgatatcgcattcttctctgcaggaggttcgaggagcaaggaattcgcaccccatgcagtggattccggtgcggtggtgatcgataacagcagtgctttcaggatggatgaaaaggtccccctggtggttccggagattaatcctaagcaagcatttgagcatcagggactgattgccaatcccaactgttcgacgatccagatggtggtagctctgaacccgatccatcgtgcagccaacatccagcgtgttgtggtttccacctatcaggccgtttccggcgcaggcgccagtgcgatggaggaactcaaacaacaactgcgggcatgggcaaatgatgaaccgatgaagcaggaagtgtttcccacccaaatcgctttcaatctgttcccccacatcgatgtattccaggataacgggtacaccaaagaagagatgaagatggtccatgaaacccggaaaatcatgaatgctccgaacatgcagatctcagccacctgtgtcagggtgccagtgcttagagcgcattcagaagcagtttgggttgagacggagaaacccctcagcgaatccgaggctcatgagcttttcgaaaaggaaccggggattgttgtccaggatgaacgcgaaagcggaggttacccgactccatggcatatcacc

SEQ ID NO: 214817 - DNA, 994 bp, Unknown
  Bacterial polypeptide expressing nucleotide sequence isolated from the Sargasso Sea
atgaattttgcaattattggcgcctcaggaaatgtaggaagaaaaactatagaaattttagaaaaatctaaattagctatcgataatctttttttagtagcatcttcaaaaagtgcaggaaaaaagattaaatttaaaaataaagaaattgaaatcgaagatttggaaaattacaatttttctagagcccaaattactttttttgcagcaggaagcaaggtagctaaagaatgggtccctaaagcagcaaaagaaactattgttatagataactctagttattttagaatgcaaaaagatgttcctcttgttgtaccagaagtaaattcagatgcactcaataagcataagaacatcatagcaaatccgaattgttcaactatgcaaatggttcttcctttaaagccattgcatgatgagtataaaatcaaacgagttatagtttcaacttaccaagcagtttctggtgctggcaaagagtctatggatgagctttttgatcaatcaagagattatttagatggaaaaaaaattaagccaataaattttactaaacaaatcgcttttaacttaattccgcatatcgattcttttgatcaggatggatatacaaaagaagaattaaaaatgactaatgaaacgaaaaagatcttagataatgaaattgatgtttctgcaacatgcgttagagttcctgttagaactggtcattcagagtctattaatattgagtttgataatctttatgattttgagaatataattaaaattttaaaaaatgccccaggttgtaaagttattgatgagcgtaatgatggaggatacatgacacctttagaagctgaaggaagttatacaacttatatatcaagaattagaaaagataattctaatattaaagctattaatttatgggtagtatcagacaatttattaaaaggagcggcattaaatactgtgcaaatcgctgagtgtttaatgaaaaaattataac

SEQ ID NO: 214818 - DNA, 672 bp, Unknown
  Bacterial polypeptide expressing nucleotide sequence isolated from the Sargasso Sea
tattattaactgcgccgggtaaaggaattccaaatattgttcatggtgtaaaccatttagaaaacaatccagattcaattgatattttctctgctgcatcttgtactacaaatgcaattacaccagtattaaaagtgttagaggataacttcggaattaaaaaaggacatttagaaactattcatgcatatactaatgatcaaaacttagtagataatatgcataaaaaataccgtagaggtagagctgcagctttaaacatggtaatcactgaaacaggagcaggaaaagcagtttctaaggcattacctgcattagaaggaaaattaacttcaaatgcaattagagttcctgtacctaacggatcattagctgttttgaatttacagttaaattcagaaactactgttgaagcagttaatgcaattatgaagcaatatgctttagaaggagatttagttgagcaaattaagtactcattaagcaatgaattagtatcttctgatatcgttggtacaactgctccttcaatttttgatagtaaagctacgattgtagatggagatacaattgtaatttacgtttggtatgataacgaatatggttattctcaccaagtaatgcgtttggctaagcacatagcaaaagttcgtcgatatacttattattagt

SEQ ID NO: 214819 - DNA, 815 bp, Unknown
  Bacterial polypeptide expressing nucleotide sequence isolated from the Sargasso Sea
agaaattgattatagcaaacttaattatcttaagaaaaaaaatgtattagtaactggtgctggtggctcaataggttcagaactatcaagacaaataagcaaacttaagccaacaaaattaattatgctcgatcattctgaaagttcattgcagaaattaaaatcttctgaaaaaataaaattatctaataagaatagattaattttgggtaatattttagatgaggggtttattgcaaacattataaacaaatacaaaattgatttaatttttcatacagcggcctataaacatgtagagatactcgaggacaatatttttaatgcaacaaaaaataatatttttggaacattatccctaattgaagctgccaattctgcaaataaaaaaattcaatttgtttatgtttcaacagataaagctgtaaaaccgataggaattttaggttatacaaagggtattggggaagtgttaacagagaatttatatgataattcaaaaaatttaaaaacttccatagttaggtttggtaatgtttttgcaagtgatggttcagtatttaataaatttgtagaccaaattaagagaaagaatagaattgagcttaccgacaaaaaaatggaaaggtattttatgagcatagaggaagcttgtcatttgttgttaaaatgcccaataatttcattaagaaaaaatatatttattttaaatatgggcaaaccaataaaaattttaaatttaatcaaaaaaatgaaaaagtttttaaataaagatattaaaattaaaattattggtaaaagaaaaggtgaaaaaa

SEQ ID NO: 214820 - DNA, 682 bp, Unknown
  Bacterial polypeptide expressing nucleotide sequence isolated from the Sargasso Sea
atggaaccctgcggagccctgcggaaccgctgcggaaccctgcggaactgccgcggaaccctgcggaaccctgcggaactgccgcggaaccctgcggaaccgccgcggaaccctgcggaaccctgcggaaccgctgcggaaccctggggaactgccgcggaaccctgcggaactgcggaaccgctgcggaaccctgcggaaccgccgcggaacccttcggaactctgtggaaccgctgcggaaccctgcgaaactgccgcggaaccctgcggaactctgcggaaccgccgcggaaccctgcggaaccgccgcggaaccccgcggaaccctgcggaaccgccgcggaaccatgcggaaccgctgcggaatcccgcggaactctgcggaactgccgcggaactctgcggaaccgctgcggaactccgcggaaccctgcggaaccgccgcggaaccctgcggaaccgccgcggaaccgctgcggaaccctgcggaactgctgcggaaccctgcggaaccctgcggaactgccgcggaactctgcggaaccctgcggaaccgctgcggaaccctgcggaactgccgcggaaccctgcggaaccctgcggaactgccgccgaaccttgcgtaaccgccgcggaaccttgcgggaccctgcggaactgccgcggaaccctgcggaacc

SEQ ID NO: 214821 - DNA, 239 bp, Unknown
  Bacterial polypeptide expressing nucleotide sequence isolated from the Sargasso Sea
aatgacagttaaaattggaattaacggaatgggacggattggtcgtatggttgttagatcaattgtcgaaagtaaaaataaaaatttaaaaattaaccatataaataacaggtcaaactcagaaactacatctaaattaatcaaatatgattctacacatggaaaattaaatgctaatttagattatgatccaaatcatttaataatcaataaaaataaaattacattttctcaagaaa

SEQ ID NO: 214822 - DNA, 196 bp, Unknown
  Bacterial polypeptide expressing nucleotide sequence isolated from the Sargasso Sea
atgtccaatcgcccctatcgtgtcgccctcaacggctatggccgcatcggccgttgcgtgctgcgcgcgctgcacgagcgtggcaattcagcgagcctggaaatcgtcgcgctgaacgacctggccgatcaggccagcatcgaatacctgacccgcttcgactccacccacgggcgctttcctggcgaggtgaagg

SEQ ID NO: 214823 - DNA, 163 bp, Unknown
  Bacterial polypeptide expressing nucleotide sequence isolated from the Sargasso Sea
atgacaataaaagttggaataaatggaatgggaagaattggtcgaatggtagttagatcaattattgaaagtgaaaacaataatataaaaattaaacatataaataatagatctaattctgaagcaacttgttctttaattaaatatgactctgttcacggga

SEQ ID NO: 214824 - DNA, 605 bp, Unknown
  Bacterial polypeptide expressing nucleotide sequence isolated from the Sargasso Sea
tatggcaataaaaattggaattaatggattgggaagaataggaaggatgattattagatcgctaatagaagctaataataaaaaaatagaaataaaacatattaatagcagatcaagtgctgaagttgttgcttcattattaaaatacgactctattcatggaaaatttaattgtaaaattaaacatggaaacaactatttaaatataaataataaaaaaattaccttctcacaacattcaaatttaaatgaaattaaatggaaaaagtttaatgtagattatgttttagaatgtacaggtaaatttaattcaaaagacaaacttattcctcatttaaaaaatggtgcaaaaaaagttattgtttctgcaccctgcaaaaatgctgataaaactattgtatatggagtaaatcataaatctattaacaaaaatgattttataatttctgcggcttcttgcaccaccaattgccttgcgccagttgcatatatattgaataaagaatttaaaatagaaaaaggttttatgacaactattcactcatatacctctgatcaaagattattagataattctcataaagatttaagacgagcaaggtctg

SEQ ID NO: 214825 - DNA, 565 bp, Unknown
  Bacterial polypeptide expressing nucleotide sequence isolated from the Sargasso Sea
cgctattgttccagcactcaaggttgttgatgataattttaaaatcttaagtggccatattgagaccgtgcatgcgtatacaaacgatcaaaacttaatagataactatcactcagctgatagaaggggcagaagtgcagctttaaaccttgttattaccgacacaggagcagcaaaagcaatttctggagtcttgcccgaacttaaaggaaaaataacagctaatgcaatcagagtaccgacaccaaatgtgagtctggctatcatgcaccttaatattaaaaaaggtgtttctgttgaagatctaaatcaatgtttcagaaatgcagcctttcactcaaacttaagaactacaattgactattcaaactctttagatgctgtttcttctgatttttatagcaatgaatttgcttgtgtttttgattctcaggcaacaattagcaattttaacaacataactatttactgctggtacgataatgagtatggttattccagacaagttgcaaggcttttaaataaagcacttggtattaatttagttagatacccgaaacagtag

SEQ ID NO: 214826 - DNA, 499 bp, Unknown
  Bacterial polypeptide expressing nucleotide sequence isolated from the Sargasso Sea
atgacaattaaaattggaataaatggaatgggtagaattggtcgaatggtagttagatcaattattgagtctaaaaataaaaaattcaaaataaatcacataaacaacaggtcaagctcagagactacttgtaaactaataaaatatgactctgttcacgggaaatttaatgcagatttaaaatttgatgagaaccacttgttaataaataaagacaaaattacattttcgcaagaatcaaaaattgaagatataaaatggaaaaaattcgatgttgattatgtttttgagtgtactggtaaatttaattcaaaagagaaattaaacgcacatatcaaaaatggagcaaaaaaagttattgtatctgctccatgtaaaagtgcagacaaaacaatagtatttggagttaatgaaaatataatatctaaaaatgataaaataatttctgctgcttcatgtacaactaattgtttggcacccaatcgtgaatgtgcttaat

SEQ ID NO: 214827 - DNA, 596 bp, Unknown
  Bacterial polypeptide expressing nucleotide sequence isolated from the Sargasso Sea
ggcggcggatgcctccgagggcgaccgttcgatcatcaccttttccaagccgcgcgacgttcgcggcacggcgctactgacccattccaagatcgagccgaatgatgactcgcaatggatcttcctgccggcggtgaagcgggtgaagcgtatttcctcgtcgaaccgcaccggcaagttcgtatcgtccgaattctcctacgaggaccttggttccgaggaagtggccgacaatgaccacatctggcttcaggacgccgcctgcgaacatgatggcgcccttacctgcgccgctgtcgaaagccgcccaaagaacaagcgttcgggctattcgcgccgcgtttccttcgtcgacctcgaagaatatcgcgttcaccggatcgatttctacaaccgccgcggcgaccttgaaaaatccctccgcttcgaggattaccggcagtatgagggccagttctggcgcgcccatgtaatgattatggataacaaccagaccggcaagtcgacccggcttgcctggggcgactacagcttccgtcaggggctgaccgaacgtgacttcaccccacagggacttcccaaggccagccgatgac

SEQ ID NO: 214828 - DNA, 499 bp, Unknown
  Bacterial polypeptide expressing nucleotide sequence isolated from the Sargasso Sea
atgactataaaagttggtataagtggctttggtagaattggcaaattagtttatagaattatagaagatttaagattaaataaaaatgaagatattcaagttgtagctttaaattgtccttcaatatcttctgaaaatttaaagtatttaattaattatgattctactcatcatttactaaaatataaaattttaacatttgaaaattatttagttgttaatgataataaagtaactttatttagagagcgtgatcctcaaaaaattaattggaaatcagcaaatgttgattatgttattgattctacaggagtatttaaaacaatagataaagcatctgtacatcttaaaaatggtgcaaaaaaagttattataactgctccatctgaagatgctcctatgtatgtcgttggtgttaattctgataaatatgataaatctcaaaaaatagtatcaaactcatcatgtacaactaattgtttagcaccctgttgctaaa

SEQ ID NO: 214829 - DNA, 757 bp, Unknown
  Bacterial polypeptide expressing nucleotide sequence isolated from the Sargasso Sea
aatgaatattttcataaatggcctaggaagaataggaaagcttgtttttcgtcgtctttgcgatgagggtctctataaaaaaatccattctgtaaatgaaaaggaaggaattccctcagatcaggagtattttcttaaatatgatagtgtccatggttcgtggggtgaaaaactaaattttaagaataataatcttttttataaagaacatcccattcgggtatctaacttcaatcacattgaagatcttagcttcccagaagctacgccaaatatagcgatagactgcacgggaaagtttaaagatgaaaagtcgttacaggcttattttgataaaggaatagactatgtattggtttcggcaccaatagattctaaaaatgtcttcaatatcgtttatgggattaatcataatgatgtcaatctagaaaagtataagatacttactgctgctagctgtacaacaaattgcctggcgccgattgtaaaagttttggaaactaacataggtataagccatggctcaataactacgatacacaacatcacaaatacccaaactatagctgactcacctaacagcaaccttaggagatctagatcaggaataaattctttgataccgactaccactggatctgcaaaggccatatcattaatatatccggaacttaaaggtaggctaaatggccatgccgtaagagttcctcttcttaactcctctttaactgattgtgtttttgagatgaagaaaaaa

SEQ ID NO: 214830 - DNA, 109 bp, Unknown
  Bacterial polypeptide expressing nucleotide sequence isolated from the Sargasso Sea
attcccgaattaaaaggaaagctcgagggtatcgcaataagagtccctacgcctaatgtttctttgatagaattagttttctgtacaaaaaaaaatctaacagattgaa

SEQ ID NO: 214831 - DNA, 310 bp, Unknown
  Bacterial polypeptide expressing nucleotide sequence isolated from the Sargasso Sea
ttgcctgaacttaaaggaaaaataacagctaatgcgatcagagtgccgacaccaaatgtgagcttggctatcatgcaccttaatattaaaaagggtgtttctgttgaagatttaaatcaatgtttcagaaatgcagcctttcactcaaacttaagaactacaattgactattcaaactccttagatgctgtttcttctgatttttatagcaatgaatttgcttgtgtttttgattctcaggcaacaattagcaattttaacaacataactatttactgctggtacgataatgagtatggttattccagac

SEQ ID NO: 214832 - DNA, 238 bp, Unknown
  Bacterial polypeptide expressing nucleotide sequence isolated from the Sargasso Sea
tgaaattaaaaaagttatgcttgaggcttcaaaaaatgatctatctggaatattaggttattgtgatgaacctgttgtttctcaggactttattggtgataaaagaacctcaatatttgatgcaaacgctggtatggagctaaattcaaatttttttaaaataatttcttggtacgataatgaatatggttattcaaataaacttcttgacttatcaaaacacatttactctatttaa

SEQ ID NO: 214833 - DNA, 563 bp, Unknown
  Bacterial polypeptide expressing nucleotide sequence isolated from the Sargasso Sea
cgccatcgtgccggtgctcaaggcggtcaatgatcagtacggcatcgtcaacggtcacgtcgagaccgttcactcgtacaccaacgaccagaacctgatcgacaacttccacaaaggcagtcgtcgtggtcgtagcgccgcgctgaacatggtcatcaccgaaaccggcgctgctaccgctgcggccaaggcgctgccggttctgaaaggcaagctgaccggcaacgccattcgtgtgccgacgccgaacgtgtccatggccatcctcaatctgaacctggagaaggccaccactcgcgaagagatcaacgagtacctgcgccagatggccatgcactcggatctgcagaagcagatcgacttcgtcagctcgcaggaagtggtatcgaccgacttcgtcggttcgcgccatgccggcgtggtggatgccgaagccaccatcgccaacgataaccgcgttgtgctgtacgtctggtacgacaacgagtttggttacagctgccaggtggtgcgcgtgatggaagacatggctggggtcaacccgccggccttcccgcgctaag

SEQ ID NO: 214834 - DNA, 916 bp, Unknown
  Bacterial polypeptide expressing nucleotide sequence isolated from the Sargasso Sea
atgactgatcttactaaaaatcctgatttacgttctcgagaaaaaatcgatgattactttggtgattggaagtggagagaaggtttagcagaattaatggtccctattgtagggagactttataggcatggagttcacattatgatttatggacaatctcttgttaataaatctcctatcgatatcatgcatgcccatagatttgtaagacaaattgaggaaaatgagttaagtgaattagaaacatatccactgctagaaaggcttagcaaaatggatctgccggattgtgaagtggatataggcgagcttgcaatgagatgttctttttttgaagacctcccaaacaatccagattcaatagaagatttcttacatgagcatatcaatgttgatggaattaccaccaaaagacctgagcaaccacaagatattgttctttatgggtttggcagaattggaagattgatggcaagaatgcttgctcaaacaaccggtccaggaaattatttccgtctcaaaggtgttgttgttagaaagactggtgaaaatgatttaattaaacgtgcaagtttgttaagaagagattcagtgcatggaagatttgatggaactataagggttgaccttgaaaatgaacttttagttatcaatgggaacccggttaaatttatttatgcaaattcaccttcggatgttaattattcagatttaaacattaattctccaatcgtgattgataatacaggtatatggcgtgatgagcagtcattgtcgcagcacttaaattgtggcgcatcaaaagtgatactaactgctcctgctaagggagatataagaaatattgtctttggtgttaatgattcagctttgcaagcatccgatcaaatatttcggctgcatcgtgtacaaccaa

SEQ ID NO: 214835 - DNA, 398 bp, Unknown
  Bacterial polypeptide expressing nucleotide sequence isolated from the Sargasso Sea
gaatgcagttgcaaaggcgatacctgaattagaaggcaagcttactggaaatgcaataagagttcctacaccaaatgtaagtctggccttacttgttttagaattaaatgaagaagttactaaagaatcactgaataattatttaaaagactcggcatttaggtctaaatacagacaaatattaggttttgttaattcttcagaaattgtgtcaacggatttttattcaagtcaatttgcttcagtaattgatgcccaagctacaattgtgaatggaaagcatgtaacactttattgttggtatgataatgagtatggttattcccaacaagttctcaatttaacaaaaaaaatcgcatctattgatttgccattattacctctatcaattcaataaa

SEQ ID NO: 214836 - DNA, 394 bp, Unknown
  Bacterial polypeptide expressing nucleotide sequence isolated from the Sargasso Sea
atgaaaataaaagttggtattaatggaatgggaagaattggaagaatggttcttagatcaatatttgaaaataattcaaaaaatatagaaattaaacatattaataacaaatcaagttcagaaatttttacaaatttaattaaatacgactcggttcacggaaaatttaatgcagatgtgagttttgatgaaaaacatttatttataaataaaaataaaatttcatatagtcggtattcaaatttagaagatattcaatggggaaaattagatgtggattatgtttttgaatgcactggtaaatttaactcaaaagaaaaactacagactcatttaaaaaatggagctaaaaaagttattgtttcggcgccatgtaaaaatgcagataagtcta

SEQ ID NO: 214837 - DNA, 676 bp, Unknown
  Bacterial polypeptide expressing nucleotide sequence isolated from the Sargasso Sea
catgacagtaaaaattggtattaatggtttgggtagaataggaagaatgatcatcagatcattgattgaaaataataataaaaaaatagaagttaaacacatcaacagtagatcaaactctaaggttgtctcctcattgttaaagtatgactctattcacggaaaatttaaatgtgaaataaaatatggagataactacttaagctttaatggtaaaaaagttacatattcacagtattcaaatttaaatgaaattaattggaagaaacttggcgtagattatgttttggaatgtacaggaaaatttaattcaaaagaaaagcttattcctcatataaaaaatggtgcaaaaaaagttattgtttctgcaccttgtaaaaacgctgacaaaactattgtttatggagtaaatcacaaatcgattagcaaaaatgacttggtaatttccgctgcttcttgcacgactaattgccttgcacctatcgtatacgttttaaataaggaatttaaaatagaaaaaggttttatgacaacaattcattcatacacaactgaccaaagactattggacaactcgcacaaagatccaagacgagcaagatctgccactcagtcaatggtaccaacttctacaggcgcttcaaaagctatcggagaaattatacccgaattaaaa

SEQ ID NO: 214838 - DNA, 892 bp, Unknown
  Bacterial polypeptide expressing nucleotide sequence isolated from the Sargasso Sea
ggtttcggtcgcataggcagaaatatatttcgccaagcgtacaaaaaccctctttttaatattgttgctattagcgaatacagtcacatcgaaacgcttcattatctgctagcaagagattcagttcatggtgtcctagaagatgagattggcattgaagaggattcatttgtgattaatgggaaaaaggtgaaaattttacccggagagaagcctggagggctaaattgggataaattcgatatagattttgttattgatgcaactggaaaataccatagacgatctgatttagagaaacatatatcatctggagcaaaaagggttattgtttcatccatgcctgaggatcatattgatcgggttgtaattaatggtataaatgatgatgaaatacaaacctcggataaaataatctcagccacttcttcaacaacgcaggtattagcgttgatggtgaaaatcttggacgaaaaatactctctgaacagggccatgatgactactgttcatgcttttaccgctgaccagccactttctgatgcagttagattggatctgcgaaggagtaggtctgcagtagaaaatataattccaaatacaactcatgcacctgctgccgtagaacgattgatgccaaagtttagtggtaaattagatggaatggcatttaacgttcctgttccaaatggatcatgcgttgatcttaccactgatctaaaaacgttacctaatatcgatcaggtcaatgaattaatgttagaaaaatctaaaaatggtctccatggaatagtaggttatactgaagatccaattgtaagtagtgatgtgagaggaagacaagaaactttggtttttgatgcgaaagcaacaatgatcactgcaggaagtt

SEQ ID NO: 214839 - DNA, 940 bp, Unknown
  Bacterial polypeptide expressing nucleotide sequence isolated from the Sargasso Sea
atgaaaaataaaaataaaaagattagaattggtctctttggttttggaaggattggtagaaacatttttcgcatcggttacaatgacccacgatttaattttgtagctatcagcgacctaggtgatgttgaggcaatgcattacttactaatgagagattctattcatgggtcaatggatgacgaaattttacttaatggaaatgatcttacctatgtcggaaattcaactcgactattacctggatctgcacctggcagtataccttgggatgcattcgatgttgacatagtaattgattcaacaggggtctatcgcaaaaaagagcaattacaactacatttagattctggagcaagaagagttcttgtaactaagccaccagctgatgaaatagatagaatagttatccaaggcattaatcacgataagattaatagtaaggatcaaattatatcgacaacctcctcaacaactcaagtcttagccttaatgttaaaagtccttgatcaaaattttggaattaaaaatgcaatgatgaccaatgttcacgcatatacatctgatcaacctctagctgattctgttagatctgatttaagacgaagtagatcagctgttgagaatattattccaaatgagacttgggcgcctgattatgtgtctcaattattgccgaaattcaaaaataaaattttaggaatggctatgaatgtgcctgttgcaaatggttcttgcgtagatctgacaactgaaatgtcttcaatgccttccatagaagaggtaaataatgcctttaaagacgctagcgaaaatgaattgatagatttaatacgatacacggaagatcccattgtttcaagcgatgcaattggaggaggggaaacaatggtatttgatagtaaagcaacgatgatgcatcaaataaactttaaaaaca

SEQ ID NO: 214840 - DNA, 391 bp, Unknown
  Bacterial polypeptide expressing nucleotide sequence isolated from the Sargasso Sea
gtttctaaagcattacctgaacttgatggaaaattaactggtaatgctataagagttccgactccaaatgtaagtttggctgtaatgtcacttacagtagataagaatgatctatataaagaggaagttaatgaatttctcaggaagacagcctttaactctaaatatagagaaattgttggttttgttaactccactgagattgtctcttctgacttttactcaagtccttttgcttccgtaattgattcacaagcaactatagtttctgacaataaaattactttatattgttggtatgacaatgagtatggttattcagtccaagttgttaatttagttaaaaatattgctggcataaatctaattagattgcccgtaaaggtttgat

SEQ ID NO: 214841 - DNA, 304 bp, Unknown
  Bacterial polypeptide expressing nucleotide sequence isolated from the Sargasso Sea
aaaaatgcagataaaacaattgtttatggaataaaccataaaacaataaataaaaaagatttgataatatcagcggcttcttgcactacaaattgcttagcgccaattgcacaggttttaaatgatgaattcaaaatagaaaaaggttttatgactactatccactcttatactaccgaccagagacttttggataattctcataaagatctaagaagggctagatcggcagcgcaatctattgttccaacttctactggtgcatctaaagctctaagtgaaattataccggaacttaaaggta

SEQ ID NO: 214842 - DNA, 394 bp, Unknown
  Bacterial polypeptide expressing nucleotide sequence isolated from the Sargasso Sea
aatgtcaataattgtaggaataagcggtttcgggcgtataggtcgtgccatatgcagattaatatttgaaacacccccagatacaaacaatccgatcacaattggtgcgataaatagttcaaaatcccccgaatacttggcatatttattgaagtatgatacggtacatggatgttttgcaggacaagtggattatacagaggataaattaatagtaaataacgtatccataccaattgtttctcatcgtaatcccagcgaaataccctggaaaaaatataatattaagtacgtttgcgagtgtacaggcgtttttaatacaaaagaaacggcaaaacagcatatagatcacgataatggtgccgaatacgtaattctatcgtgtccaccaaag

SEQ ID NO: 214843 - DNA, 919 bp, Unknown
  Bacterial polypeptide expressing nucleotide sequence isolated from the Sargasso Sea
ttgtatcattttgatgcacccggagatatttcacaacaagtatacccaagtaaatttagatgggaagatacaacaaaattaatttttgatcgcctaggtttaaaatgtcatttagcgaaacctctgaacacatcatatcgatctgtaagaagtattgtagatttagcaaattggtatttagaacaaatggatgaaagaaacagaatcactggacatgtgattaaagaagctttaactagcgaagcaggtattagaccatctattttattcaatgatgatgaaggtcattttattgaaaatttacttaaatttaagttgcctatgcctcattgcccattaattgtaagagatgaagttgaaaaagaacgtgtaataaaaataataaataaaaaagaagatgttaaaaaagaagattttaatccctctgtatttatatttacaattgccgaagtaaaaggtttagagtttaactatattattacgtgggactttacaagtggttcaaagcacctactaaaaagagcatttcatattaaaaaaggagattatatcgaaaaagaagattggaatttacaaatggagttaaaacatgcatttgttggagtcactagaacaagattattattattacatctttcaccaaatcacaaagaatatggaatagatcccctgatgcaaaaacaaatcaaaaataacttagcaattaaagaagaatctgatgatttatctagattttcagaagtgattctttccgatgaggaatatgaaaaacttgcagaaagttacaaggatgctgaaatgtttgctgccgctgctgcggtttacaggaaaattgaaatgattccagaatctattcattgtgagtatttaagtaaagatgatgacaatcttgaactcgcagttctggaagaactcttca

SEQ ID NO: 214844 - DNA, 657 bp, Unknown
  Bacterial polypeptide expressing nucleotide sequence isolated from the Sargasso Sea
catgaaaattaaaattggaataaatggactaggtagaattggaagaatggtagttagagctatcgtagaaaataataataaaaatatagaaataaagcacataaataacagaaccgatttaaaaaatattagccaattacttaagtatgactctatacatggaaaatttaatgctgatataaagtttaatgaaaaaaatttatttataaatggcaaagaaatattttattctagagaaacagcgctagaaaaaattaactggaaaaaaaacagtgtagatattgttttagaatgtactggaaagtacaattctagagaaaagtcttttcaacatattaaaaatggggcaaagaaagtaattgtatcagcgccatgtaaaaattccgacaaaacaatagtttatggtgtaaaccaaaattctataaataaaaatgatttagtaatttcagcagcttcatgtaccacaaattgtctagcgcctgttgcttatattcttaataaagattttggaatagagaaaggttttatgacaactattcattcctatacaactgaccaaaggcttttagataattctcataaagatttaaggagagcaagatctgcagcacaatctattgtaccaacttctactggtgcatcaaaagcgcttggtga

SEQ ID NO: 214845 - DNA, 885 bp, Unknown
  Bacterial polypeptide expressing nucleotide sequence isolated from the Sargasso Sea
ggtgtggcggacaatctttccgacggcgaccaggattacgcgattgtgttgacaggagacagttccagcacggatcttcgcttcaggaacgtggatcccccggatgtttcggtgcgaaacctcgattacacgaccaaaggcggcttctacgtctctcagatctcgggggataccgatgagaacttaaatacggcctttttcacggtgagtctttcgagtgcgccgtctaaggacaatgtgacgatcacgatggcgacgtcggatgctgaggaaggcgacatctctaccatcagcagtgcgtccccggacaacacctcgcagctggtctttaccgcctcgaactggaactcggtgcggacggtgacggtcaagggtgtggcggacaatctttccgacggcgaccaggattacgcgattgtgttgacaggagacagttccagcacggatcttcgcttcaggaacgtggatcccccggatgtttcggtgcgaaacctcgattacacgaccaaaggcggcttctacgtctctcagatctcgggggataccgatgagaacttaaatacggcctttttcacggtgagtctttcgagtgcgccgtctaaggacaatgtgacgatcacgatggcgacgtcggatgctgaggaaggcgacatctctaccatcagcagtgcgtccccggacaacacctcgcagctggtctttaccgcctcgaactggaactcggtgcggacggtgacggtcaagggtgtggcggacaatctttccgacggcgaccaggattacgcgattgtgttgacaggagacagttccagcacggatcttcgcttcaggaacgtggatcccccggatgtttcggtgcgaaacctcgattacacgaccaaaggc

SEQ ID NO: 214846 - DNA, 457 bp, Unknown
  Bacterial polypeptide expressing nucleotide sequence isolated from the Sargasso Sea
aatgactataaaagttggtataagtggctttggtagaattggaaaattagtttatagaataatagaagacttgagattaaatgaaaatgaagatatccaagttgttgcattaaattgtccatcaatctcttctgaaaatttaaaatatttgattaattatgattctactcatcatttacaaaaatataacattttaacatttgaaaattatttagttgttaacgataataaagtaacattatttagagaacgtgatcctcaaaaaattaattggaaatcagcaaatgttgattatgttattgattctacaggagtatttaaaacaatagataaagcatcagttcatctaaaaaatggagctaaaaaagttattataactgctccatctgaagatgctcctatgtatgttgtaggtgttaacactaataaatatgataaatctcaaaaaatagtatca

SEQ ID NO: 214847 - DNA, 344 bp, Unknown
  Bacterial polypeptide expressing nucleotide sequence isolated from the Sargasso Sea
aaatgctataagagtacctactccaaacgtaagtttggcaataatgaacttaaatttgaaaaaaagcgttggtgtagaggaactcaacgacttatttaagcaagctgcattccattcaaactttagaacaattgttgactattcaaactcgattgatggtgtttcttctgatttttatagcaacgaatttgcctgtgtgtatgatgcacaagcaactattagcaattttaactgtgtaactatttacgtctggtacgataacgagtatggttactccagacaagttgtaaggcttttgaaaaaagttcttggtgttaatttaattagatacccaaagcagtaaa

SEQ ID NO: 214848 - DNA, 1027 bp, Unknown
  Bacterial polypeptide expressing nucleotide sequence isolated from the Sargasso Sea
atgagtgatagctctaagaaaattaatatagctatttttggatttggtagaattggccgaaatattttcaggctagcatacaaagacccaagatttaatattgtcgcaattagcgagtttggtcatgcagaagccttgcactacctattagttcgtgattcggttcatggaaaactcaaagaccctattaagttagagggcaataacctagtatttggagatcaagttgtgcgtatacttcctggagagaaaccaggcgaaataccatggtctacaatgaacgttgactttgtaatcgacgccacgggtgcttttttagatagaaatgagttagaaaaacatatcaattcaggtgcaaaaagagttattgtatcaaggactcccactgatagaatagataggatggtcattcatggaataaatgaggattcaattgagcaatcagaccaaattatatcggcaacatcatctactacgcaggtgctcggtttaatgctaaaaattttggataatcattttggtctaaaaagagcaatgatgaccactgttcacgcatacaccgctgatcagcctcttactgatgcaatcggactagatcttagaaggagtagggcagccgtagagaatatcattccaaacacaaccagtgcgcccaatatcattgaaaaattaatgcccgagttcaagggtaaactagatggtatcgcttttaatgttccagtgcccaatggttcatgtgttgatctaactactgaattacaaaaaataccaaatgtagaagaattaaatgatgtatttagagaagaatcagaaaataaatttaaaaatctaattggctacacagaagaccccattgtttcaagcgatgttataggtcgtgaagaaaccatggtttttgatgccaaagcaactatgctaactgctgataagcttctgaagacactatgctggtatgataatggctggggtttctcaaaaagaattttagataccatagcactttatgaaactggggaagacaattaat

SEQ ID NO: 214849 - DNA, 2215 bp, Unknown
  Bacterial polypeptide expressing nucleotide sequence isolated from the Sargasso Sea
atgggatatcaacctaagagtaggatatcaaaagcaatcatgggctgtttgggcttaagcgtattacccgcgttgccactcaatgccaaggaagtattgggagcgcctaaggtcgagccaatcgagatattacaagtacatggccagcaataccgccgagcgaccacaatgactaagccgggcgaggcgatcatctcgatggagcagattgaagagatgcaagcgaccacatttgctgaagtcatcgatgatatggctggtgcccatgtcgatggtggaactcgcagtggcggcgagcgcatcaacctgtggggatttggcgaaaccgaagattttaatatttatgtcgataatgcccccgtgggatttgagcagtatcgctatggttcgtttttcttagatcccgatttaatcaagcgagtcgaagtgattaaaggggcccacgatgttcgctcgggtaacggcggctttggtggctctatgtatgttgtgactaaatctgccgatgattttttaacttacaatcaaaacgttggagcaagagtcaaagccagttacgccagtaataacgatgctcaaagctacacgggaacggtttatggacgagcgaataaacaactttcaggtttattgcatgtcactcgtcgtgatgcgggggatgtcacgctcgccaatggtgatgaatttgaatattcaggctatgagcaaaataattacctcggcaaactggattatgagcagggcgaccatcaactcatgctgagcctgacccattatctcgacgaaggtcgtaagccttgggccaatcgtcgtggacctatgcccgcaatttctgactataacatccgtaaatatggctcctatgaacaggcgctctatgccaccacggcctacaacacctatgaagacaatacttggtcggcgaattatcgctattcaccgagtaatcctttgatcgatacccaaattgtggtttcccattctgccaatgcacgtcactggatcaggccgccaatcgcgtgggaaaagatgactgtctccgtcggcaatttcggccatgaatcttggttggattacaagcgtgactacattgacatcaacaacttaagtattgttggggatcatgagatcacaaccgggttgcagttccgcagtctcgatagggattcgatggtctttaacaaaagttatgagaaaaatcccgagaaaaactacggttggtacaccccttactatcagcccgaaggacgtcaggatacctatgcggtgtatctgcgcgatgcgattagcgtgacagatgagctgaccatcaccccttcactacgctatgactatatctacagcattggccgtcccaacattgcccccgattacaacgatatcgaggctgggcacgactacagctcgacccaccattcgggcttttcaccgcgattgggaatcgactaccagttaactgcgaatactcgagtgaatttcgattacgcctacagtttacaagcgccagtggtcgatgaaatctatgcggtgcaatacgccaaggcgagcattaccggcacgagtcgagatatcgatgtagagcgtctgcacgcctttaaactgggcttgatgacacagcaaatcagcctttttgccgcccaagatacgctttcaacccaagtgaccctctttgctaacttagggcgggatgatattgcccagcgccgcggggcaaagtccgaccccaatcaagtgattcaaagtggttacaccaatcttgacggctatgagatctacggcgccgatctcgagtcccaataccgttatcaggatttcttcagtgacttagccgtttcttggttacagggcgaacacaggggatcgcttagagacagccaaggcgaggatgaataccttgccaacattgcgccgctggatattcgcctgcgtgtgggcatgtatattacggatgacatttcagtcgcttggcaaggtacttggtacgatgcgcaggataatgtgcctcagggtgatatcttcaatgctgagtccccaagtgagaattacttcttacaaaatatatatttagcctacgagccccaagagattctaaaaggactcagcgtgcgcttaatggcaaaaaacctgactaaccagcaagtgacgccgtttctatcggatggaattcccgcgccggggcgtgatattaggctcagtttagcttatgaattttaag

SEQ ID NO: 214850 - DNA, 625 bp, Unknown
  Bacterial polypeptide expressing nucleotide sequence isolated from the Sargasso Sea
atggcaataaaaattggaattaatggtttaggaagaataggaagaatgatcattagatctttggttgaaaataataataagaaaattgtaataaaacatattaatagtaggtccagtgcagaaattgtatcttcgctattaaagtacgactccatccacggaaaatttaattgtaaaattaagtatggaaataattacttaagtttaaatggaaaaaaaattacattttcacaatgctcagatttaaatcaaattaaatggaataagttaaatgtagactatgttttggagtgcactggaaaatttaattcaaaagaaaaattattaactcatttaaaaaatggtgcaaaaaaagttatagtttcagctccttgtaaaaatgcagataaaactattgtttatggcgtaaaccataaatcaattaagcaaaacgataacataatttctgcagcatcttgcacaacaaactgccttgcgcccgtggcatatgtgttaaatgaagagtttaaaatagaaaaaggttttatgacaaccatccattcatatactactgatcaaagactattggataattcacataaagattcaagaagaggaagatctgcggcgcaatctatagtaccaa

SEQ ID NO: 214851 - DNA, 1114 bp, Unknown
  Bacterial polypeptide expressing nucleotide sequence isolated from the Sargasso Sea
atggctgaagtatgtggttataaactaaaccaaacaaatgcaaaagatggggttaatccaaatgacacaaatgctgaatttcagctagaagaaaagaaggttgaaaaaataaaaataggcctttttggatttggtagaattggaagaaacatatttcgtatcggctatgaagacccccgatttgagtttgttgctattagcgatcttggagatgtagaagcaatgcactacctattaatgagggactcaattcatggagccatgaaaagcgacataaagcttgaaggtaaggacctgctatacaatggatcatcatctcggctattacccggtgctgcgccaggcagtattccttgggacgcttttggtgttgatatggttattgattcaacgggtgcgtatcgaaaaagagaagagttgcaaatgcatattgattccggggcaaagcgcgtattggtatcaaagcctcctataaacgaaatcgatcgaattgtaattcagggaattaatgaggatcaaatagatcgcaatgataaaataatttcaacaacttcatctacaactcaagtgcttgccttaatgatgaaagtcctcgatgactcttttggtattaatcgcgctatgatgacaactgtgcatgcttatacatctgatcagccattggcagatgcagttcgatccgatcttagaagaagtaggtcagcagttgaaaatatcattcccaatgaaacttgggcacctgactatgtatcacaactgatgccaaaatttaaagataaaatttccggtatagctatgaatgttcctgttgccaacggttcatgtattgatttaacaactgaaatgaaaaagatgccttcagtagaagaggcaaacaaaagttttgaggacgcaagtttaaatgaactgaagggtctcattaggtttactgaagatccaatagtttcaagtgatgctattggcggaggagaaacaatgttatttgatagtaaagcaaccatgattgcttcggaaaaattattaaaaactgtagcttggtttgataatggttggggttttgcgaatagaattcttgaactagctgaagcttattcaaaaaaagaaaggatataga

SEQ ID NO: 214852 - DNA, 336 bp, Unknown
  Bacterial polypeptide expressing nucleotide sequence isolated from the Sargasso Sea
tatgagaattgctataaatggcttcggaagggtcggcaggcacatcacaagagcacttattggtcagacagttcaggctcataatgacctcaaactgattgcagttaacgatttagcgccaatagagcacagcgcccatttattgaaatatgactcaatatacggtcaatttcatgagcctatatcagttaggggcgacgaaattatggtaggagataaatccataagatacttctgtgaccctgatccgaggaaagccagctggggagagctcgatatcgaccttgtgctcgagtgcactggccgctttgcctcaggcgagaaatcttccagcca

SEQ ID NO: 214853 - DNA, 559 bp, Unknown
  Bacterial polypeptide expressing nucleotide sequence isolated from the Sargasso Sea
atgcatcatgtacaactaatttgtattgctccagttttaaaagttctaaatgaatcaattggaattgattgtggttttttaactaccgttcactcttttacaaatgatcagagactcacagactcaaatcataaagacccaagaagagccagatctgcaaccgaatccatgattccgaccaagactggagcagcaattgctgtaggtgacgtaattccagacttaaaaggaaagcttgatggttatgctataagaattcctattataaatgtttcagttgcagatttagttttaaatgtaaaaaaggatacatcagtagaagaagtaaataatattattaaaactgcatgtacaaatgaaatgaaaaatataattgattataacgaattacctttagtgtcaaaagattttaatcaccgagcagcatcaggtgtatttgactcaacacttactaaagtaattgataagagacttgtaaagattttcacttggtatgataacgaatggggtttttctaatcgtatgcttgataccacattagtctttatgaagaaataaa

SEQ ID NO: 214854 - DNA, 1000 bp, Unknown
  Bacterial polypeptide expressing nucleotide sequence isolated from the Sargasso Sea
aatggttacatacggaatcaacggaattggaaggattggaaagtttgcacttaaagcacttattgagagagaggctaaagtttcctggataaatgattcttcgggaacgattgatttacatcgtcatcttcttgaatatgactcagttcatggaaaatgggacgctgattttagtaatgatgaaaaatctatcactataaatgataaaaaaataatctttcaaacaagctctactattgaaaatattgagttggaagatgttgatattattattgattgtactggttattataaatcaagatctaaacttttgaattactttaacatgggagttaaaaaagttgtcgtttctgctcccattgaagatgaaaatatagctaacattgtttacggggttaatcaagatatctacgattccaaaaaatacgatatagttactgctgcaagctgtactactaactgtcttgcaccgattgttaaagtaattcatgaaaatataggtataaaacacgggtcaattacaacaattcacaacccaacaaatacccaaacaatagttgataaggcaaataaagaatttcgaagagcaagatctgcactgaattctctaattccaacaaccacaggaagcgctaaagcaattactctaatttatcctgaattactaggaaaattaaatggtcaagccgtacgagtacctcttttaaattcatccttaactgattgtgtatttgaagtttctcggaaaacaaacaagaaagaaataaataatcttcttaaaaaagcttctgaacaagaacttagaggaatattaggttatgaggaaaagccactcgtttctactgattacctaagtgataaaaggtcagcaataattgatgctgattgtacaatggttattaacgaaacacaggtaaaaatttatgcgtggtatgataatgaaattggttatgctgagcgactaatagatgtatcccagatggtagggtcattgttgtga

SEQ ID NO: 214855 - DNA, 1087 bp, Unknown
  Bacterial polypeptide expressing nucleotide sequence isolated from the Sargasso Sea
aatgcattctaatgcaaaagacggaataggtcccaatgatagcgaagcacaattccaactagatgaaaatcaaattgaaaaaataagaataggcctttttggttttgggcgtattggaagaaatattttccgcataggatataatgaccctcgctttgaatttgttgcgatcagcgatcttggcaatgtagaggctatgcattatcttttaatgagagattccattcatggagctatgcaagacgatattattcttgaaggtaaagaccttatatataaagactcaaagacaagattgcttccaggtgccgcacctggcagtatcccatgggatgcatttgatgttgatctagtaattgactccaccggtgcttatagaaaaaaagacgagttgcaattgcatattgattcaggggctaagcgcgtattggtttctaagccaccaatcaatgaaattgatcgagtagttattcaaggcgtcaatcataatgatattcaatatagcgataaaattatttccactacatcatcaacaactcaagttctcgccttaatgatgaaaatactagatgggtctttcggtgttgatcgggcgatgatgacaacggtacatgcttacacgtcagatcagcctcttgctgatgctgtcagatctgacttaagacgtagccgttcggccgtagaaaatattattcccaatgaaacctgggctccagaatatgtttctcagttaatgccaaagttcaaagataaaatttctggtattgcgatgaatgtgcctgtcgccaatggatcatgcattgatttaaccacggaaatgaagaaaatgccaacggttgatgaggtaaataaatgctttgaagacgcaagtttaaataattttaaaggactggtgcgatatacagaggatccaattgtctctagcgatgcgattggcggaggagagaccatgttatttgatagccaagctacaatgattgcatcaaacaaacttttaaagactattgcttggtttgacaatggatggggatttgcatctagaattcttgaactagcagagtcttactcccaattggagagaagttaa

SEQ ID NO: 214856 - DNA, 625 bp, Unknown
  Bacterial polypeptide expressing nucleotide sequence isolated from the Sargasso Sea
tatgaaaataaaaataggaataaatggtctgggaagaataggaagaatggttattagatctatttttgaaaataacaaaaaaaatattgaaattaaacacataaataacagaactgatttgaaaaattgtagccaattactaaaatatgattcaatacatggaaaatttaatgctgatattaagtttaatgaaaaaaatttatttattaacaacaaaaaaatttcttattctagagaaacggaattaaataatattaactggaaaaaaaatggtgtggatattgttttagaatgtaccggaaagaataattctaaagagaagtcttttcaacatattaaaaacggtgcgaaaaaagtaattgtttcagctccatgtaaaaatgctgataaaacaatagtctatggtgtaaatcataaattaataaataaaaatgacttagtaatttcagcagcttcttgtacaacaaattgccttgcaccagttgcttatattcttaataaagagtttaaaatagaaaaaggatttatgactaccattcattcatacactacagaccaaagactcttagataattctcacaaagatccaagaagagcaagatctgcgggtcaatctatgtccaac

SEQ ID NO: 214857 - DNA, 298 bp, Unknown
  Bacterial polypeptide expressing nucleotide sequence isolated from the Sargasso Sea
aatgttagataatgtaattggtttttcatccattgaagttgaagaggcaatggtgcctagagcagatatagtagctattccagaaaaaagttcattaaatgaatgtatagatcaatttagaaaagccgcccattctagattgccagtatacagaggaactttagatgaagtgataggaatggtacatgtaaaagatattcttactttttggaataacgataaagattttattctagagaatataattagaaaagttattatctctgctccatcgtcattgatatccgatttatttcaa

SEQ ID NO: 214858 - DNA, 367 bp, Unknown
  Bacterial polypeptide expressing nucleotide sequence isolated from the Sargasso Sea
aaagcaataggtgaaataataccagaattaaagggtaagttggaaggtatagcaatgagagtaccaacaccaaatgtttctttggttgaattagtattttgtacaaaaaaaaatttatctgtagaaaagataaattctgcatttcaaaaattcatatctcaacaaaaaagtaaaattcttgaaatttcaaatgaaagacttgtatcaatagatttcaatcataattcagcgtcatcaataatagacgcctcacttacaaatgtggtgggtaaaaatatgggtaaaatttctgcgtggtatgataatgagtggggtttttcaaaccgaatgtgtgatatagcagagtttattcataaaaattcttaat

SEQ ID NO: 214859 - DNA, 800 bp, Unknown
  Bacterial polypeptide expressing nucleotide sequence isolated from the Sargasso Sea
ttttaaaaattaccttgatgttccttgggaaaaatcttctgtagatattattttggaatgtacaggaaagaataaaaagccagacaaactaaatccctattttgattctcttgggatgaaaagagtaatagtagcttgtccagtcaaaggaattgttgcagaagctgaatcacttaatattgtttacggtataaatcaaagtctttatgatccctccaaacataaattagtaactgcagcatcctgcactacaaattgcttagctcctatagtaaaggtaattaatgaaaatttctcaattaaacatggcgctattacaactattcacgatgtcacgaacactcaagttcctgtagatttttataaaagcgatttgaggagagcaagaggatgtatgcaaagtttaatacctactactactggatctgctaaagcaatagccgaaatcttcccagaattaaaaggaaaattaaatggccatgcagtaagagttcctctacttaatggctctttaacagatgcagtttttgaattaaataatgaagtgacagttgaacaagtaaatttggcacttaaggaagcttcagaaacttatttaaaaggaattcttggctacgaagaaagacctttagtttctgcagattatgtaaatgaccctagaagttcaatcgttgatagtttatcaacgatggttgttaattcaaatttattaaagatatacgcttggtacgacaacgaatggggttatagctgcaggcttgcagatcttactgaatatgtaatcaaaaacgagatttaat

SEQ ID NO: 214860 - DNA, 666 bp, Unknown
  Bacterial polypeptide expressing nucleotide sequence isolated from the Sargasso Sea
aatgacaattaaaataggaattaacggtttaggtagaatcggtagaatggtaattaggtctattattgaaaaaaataataaaaaaattgaaatcaaacatataaataacagaacagatttaaaaaactgtagccaattacttaaatacgactcagttcatggaaaatttaatgctgaaataaaatgtaacgaaaaatatttatttattaataaaaagaagatttcttactcgagagaaacagaattaagcaaaattaattggaaaaaaaataatgtagatatcgttttagaatgcacaggaaaatacaattctaaagaaaaatctttccaacatatcaaaaatggagcaaaaaaagttatagtttctgcaccttgtaaaaatgcagataagacaattgtgtatggtgttaatcacaaatcaataaaaaaatatgactcagttatttcagcagcctcatgtacaacaaattgtcttgctccagttgcatatgttcttaatcaaaaatttaaaatagaaaaaggttttatgacaactattcattcatacactactgaccaaagacttttagataattcccacaaagatcaaagaagagcaagatctgcaggacattctatagttccaacatctactggggcatctaaagctcttgctgaaattatacc

SEQ ID NO: 214861 - DNA, 346 bp, Unknown
  Bacterial polypeptide expressing nucleotide sequence isolated from the Sargasso Sea
tgagctaaatgggaagcttgacggtattgctatgatagtacctgtgccagatgggtcagttgtagactttaatgtgcgtatcaaagtagatgtcacagttgatcagattaatgatgcagttagatcggcctcagaaagtggttctttaaagaatattcttgaatattctacattgccggttgtttcatctgatattattggtaacagtcattcctctatctttgatgcaccttttactagggtcattgagggtaattatatcaaaacactcaattggtacgataacgagtggggctactcaaatcgagtagtagatctagtttcgctgcttggtcaagttggctaa

SEQ ID NO: 214862 - DNA, 493 bp, Unknown
  Bacterial polypeptide expressing nucleotide sequence isolated from the Sargasso Sea
catgactatcaaagttggtatcaacggttttggccgcatgggccgtctctcatttcgcgccgccttcgactgggcggatgtggagtttgtgcgcatcaatgacccggctggcgatgccgcctctctggcacacctcatcaccttcgattcagtccatggccgctggcatcatgaagccagcagcgatggggacgagatggtgatcggtaaccatcgcatcctctgcactcgcaacaaagagatcggtcagactgactggtctgattgtgatgtggtgatcgaggcttccggcaagatgaaaaccaaggccctgctcaatgcttatctagcgcaaggggtgaagcgtgttgtggtgacagctccggtcaaggaagaaggtgtcctgaacgtcgtcatgggagtcaaccaccacctctacgacaaggcgcagcatcccatagtgacggctgcctcctgtaccaccaactgcctggcgcccagtggtgaaggtgat

SEQ ID NO: 214863 - DNA, 548 bp, Unknown
  Bacterial polypeptide expressing nucleotide sequence isolated from the Sargasso Sea
aaattgtttagctccgatagtaaaggtaattaatgaaaatttttcaattaagcacggcgctattacaactattcacgatgtcaccaacactcaagttcctgtagatttttataaaagtgatttgaggagagcaagaggatgtatgcaaagtttaatacctactactactggatctgctaaagcaatagccgagatcttcccagaattaaaaggaaaattaaatggccatgcagtaagagttcctctacttaatggttctttaactgatgcagtttttgaattaaataatgaagtgacagttgaacaagtaaatttggcacttaaggaagcttcagaaacttatttaaaaggaattcttggctacgaagaaagacctttagtttctgcagattatgtaaatgactctagaagttcaatagttgatagtttatcaactatggttgttaattcaaatttattaaagatatacgcttggtatgacaacgagtggggttacagctgcagacttgcagatcttactgaatatgtcatcaaaaaagagatttaat

SEQ ID NO: 214864 - DNA, 802 bp, Unknown
  Bacterial polypeptide expressing nucleotide sequence isolated from the Sargasso Sea
tattaaaaatctacttagatacgactcaatacatggaaaatttaatgctaatattgaatttaatgaaaaaaatatttttattaataataaaaaaatatcttacaccagggaaacagatttagaaaaaattaattggaataaaagtggtgtagatattgttttggaatgcacaggaaaaaataattctaaagaaaaatctactatacatatcaaaaatggtgcgaaaaaagtaatcgtttctgcgccatgtaataatgctgacaaaacaattgtttatggtgtaaaccataaatctatcaacaaaaaagatttagtaatttcagctgcctcttgtactacaaattgtcttgctcctgttgcttatattcttaataaagagtttgttatagaaaaaggatttatgacaacaattcattcctataccaccgatcaaagacttttggataattctcataaagaccctagaagagcaagatctgctggacagtctattgttccaacttctactggagcttcaaaagctattggtgaaataataccagaactaaaaggtaaaattgaaggattggcaatgagagtccccactcctaacgtttcgctgatagatttagtatttaattcaaaaaaaaaattgtctataaataaaataaataattcatttaaaaaagcatcaaaaaaaaatcttaaaaatattttagaagcgacagaggaaaaattggtttctatcgattttaaccacaactctaattctgcaatagtagacttatctcttacaaatattgttggggatagaatgggaaaa

SEQ ID NO: 214865 - DNA, 751 bp, Unknown
  Bacterial polypeptide expressing nucleotide sequence isolated from the Sargasso Sea
tatggttataaaaattggtataaatggattgggaagaattggaagaatggctctaagatctattattgaaagcaaaagaaaagatcttgaagttgtagccattaataatagagccaactccaaaattagtagctttttgttaaaacatgacactatccatggtgagttaaaagcgcaaataactcactcagaaaatgaaattaaaattaacgggaaaaaaatagttttaagtcacgaaacggaaatttccaaaattaactggaaaaaaaataaagttgatgtcgtattagaatgcactggaaaatttaatagtaaagaaaaatcgtcccaacatataaaagcaggagcaaaaaaagttttggtttctgcgccttgtaaaggagctgccaatattgtttttggagtaaatcaaaaaaccttaaaaaataacgatcaagtaatttctgctgcatcatgcacaacaaattgtttggcgccagtagctaaagtaataaatgataattttggaattgagcgtggttttatgactactattcattcatacacacctgatcaaagactgctggataactcacataaagatttgagacgagcaagaagtgcaccaaattcaatgataccaactacaactggcgcaaccaaatctcttggagatgtcattcctaacttaaaaaataaagtagaaggaatttcaattagagttcctactccaaatgtttcattggttgagtttgttttttcttcaaagaaa

SEQ ID NO: 214866 - DNA, 559 bp, Unknown
  Bacterial polypeptide expressing nucleotide sequence isolated from the Sargasso Sea
tatgactgtaaaagttggaataaacggcttaggtagaataggaaggatgataattaggtctattgtagaaaataataaaaatatagaaattaaacacataaataacaaaactgatgtaaaaaatagcagtcaattacttaaatatgactctgtacatggaaaatttgatgcaaatattaaatttaatgaaaaaaatttatttataaataataaaaaaattaattattcaagggaaacagaaataaataaaattaactggaaaaaatatggcgtagatattgttctagaatgcactggtaaaaataactctaaagaaaagtcttctaaacatattaaaaatggtgcaaaaaaagttattgtatcagcgccttgtaaaaatgctgataaaacaattgtttatggagtaaaccataaaaaaataaataaaaaagatttaataatatcggcagcttcttgcacgacaaattgtttaggtccaattgtatatgttcttaataaagaatttaaaattgagaacggttttatgacaactattcattcttatacttccgatcagaga

SEQ ID NO: 214867 - DNA, 361 bp, Unknown
  Bacterial polypeptide expressing nucleotide sequence isolated from the Sargasso Sea
gatgagtctagtactgccaagtttaaaaggcaagctagatggtacggctataagagttccaaccccgaatgtttcattaattgatttaacattggtaacagataaagaagtcacacctgaaagtattaatgaagctatgacaaatgctgcaaaaggagagttaaaaggtatcttagatgtaaaccaaaaacctttagtatcaaaagattttaatcacaattctcatagctcgatatttgacgttactcaaacccaagttatcaaagggaaattcagtagagttctctcttggtatgataatgaatggggattttctaatagaatgtgtgatacggcaattcaaatatctggtttaatttaa

SEQ ID NO: 214868 - DNA, 634 bp, Unknown
  Bacterial polypeptide expressing nucleotide sequence isolated from the Sargasso Sea
gatgacaataaaaattggaattaatggaatgggcaggattggtcggatggtaattagatcaattattgaaactcaaaataaaaatttaaagattgtacatattaacaatagatcaaacttagaatctacctccaagttaataaagtacgattctgttcatggaaaatttaatgcagatataaaattcgataagaattacttaacaattaataaaaacaaaattaaattttcacaagagcctaaaatagaaaatattaattggaaaaatcaagatgttgattatgtttttgagtgtacaggaaaatttaattcaaaagaaaaacttatgtcacacattagaaatggtgcaaaaaaagttatcgtatcagcaccatgtaaaaatgcagataagacaattgtttttggtgttaatgataatattttatccaaaaatgatttaattatttctgccgcttcctgtacaactaattgtttagcgccaattgtagatgtgattaataatgaatttgggattgagagaggctttatgaccaccattcatgcatttactagtgatcaaagaattttagataactctcataaagatccaagaagagcaagagctgctagtcaatcaatagttccaacatcaact

SEQ ID NO: 214869 - DNA, 602 bp, Unknown
  Bacterial polypeptide expressing nucleotide sequence isolated from the Sargasso Sea
aaatctttatgacccttccaaacataaattagtaactgcagcatcctgcactacaaattgtttagctccgatagtaaaggtaattaatgaaaatttctcaattaaacatggcgctattacaactattcacgatgtcacgaacacgcaagttcctgtagatttttataaaagtgatttgaggagagcaagaggatgtatgcaaagtttaatacctactactactggatctgctaaagcaatagctgagatcttcccagaattaaaaggaaaattaaatggccatgcagtaagagttcctctacttaatggttctttaacagatgcagtttttgaattaaataatgctgtaactgaagagcaagtaaataatgaatttaaaaaagcatctgaaacatatttagaaggaattcttggttacgaagaaagacctttagtttctgcagattatgtaaatgactctagaagttcaatagttgatagtttatcaacgatggttgttaattcaaatttattaaagatatacgcttggtacgacaacgaatggggttacagctgcaggcttgcagatcttactgaatatgtaatcaaaaaagagatttaat

SEQ ID NO: 214870 - DNA, 517 bp, Unknown
  Bacterial polypeptide expressing nucleotide sequence isolated from the Sargasso Sea
atgagagtagcaataaacggttttggaagaattggaaaattagtatttagagcctttttagagaaaaaaatcaagaatgttgaagtagttgcaatcaatgaactaggaagtttagagtcaagtattcacttattaaaatacgatagtgtgcatggagaaatgccattaaaaataaacaaaactaaaaatggaattaagattgcaaataataatattaatttttattcagagagagacccctcaaatttaccatggaaatcattaaaagtagatattgttctagagtgtagtggagtttttacttcaaaggaaaaagctgctagtcacttaaatgctggtgctaagaaagtaataatttctgctccagcttcaaatgttgataaaaccgttgttcaaggtgtaaataatcaagagctatctagtaaacataatattatatcaaacggttcatgcacaacaaattgtctagctccagttgcaatggttctagattcatcactaggtatagaatctggtt

SEQ ID NO: 214871 - DNA, 607 bp, Unknown
  Bacterial polypeptide expressing nucleotide sequence isolated from the Sargasso Sea
ggggtcaaccacagatcattaacaagtgatgataaaatagtttctaatggctcttgtaccacaaattgcctcgcacctttggcaaaagtattgaatgataatatcggaattgagcgggggataatgactacaatacatagctatactggggatcaacccacattggacagaaggcatcacgatttataccgagcaagatcggcagctacttccatgataccaacatcaaccggggccgccaaagcattaggagaagttttgcccgaattacatggaaaattagatggcactgcactaagggtacccacgcctaatgtaagtgctgttgatttaacatttgaagctagcactccagtcactgagaaagatgttaattctgttgtagcacatgcagcaaaaaatgaaatggtacaagttttagcttacgatagtgaacctaaagtatctatagattttaatcataccacacaatcgtgtatttttgctccagatcaaacgaaggtagttggaaaacgtatggtgcgagttctagcttggtatgacaatgagtgggccttttcttgtaggatggctgatgttgcatcaactatgggccgccttttataaa

SEQ ID NO: 214872 - DNA, 793 bp, Unknown
  Bacterial polypeptide expressing nucleotide sequence isolated from the Sargasso Sea
tattaataatagatcagactcacaggtttgtgcaaacttgttaaaatacgactcagttcatggaaaatttaatgctgagataaaatccaattcaagttatttaaaaataaataaagacaaaatatcattttcacaattatcaaatattcaggacataaattggaaaaaatataatgttgattatgtatttgagtgcacaggaaaatttaattccaaagtaaaattaataccacatttaaaaaatggagcaaaaaaggttgtagtatcagccccatgtaaaaatgcagacaaaacaattgtttttggtgtaaatcataaaaaaattggaaagaatgataatattatttcagctgcatcttgcacaactaattgccttgctactgtagcagatgttataaatgcaaattttacaatccaaaatggttttatgacgaccattcatgcttttactacagatcaaagaatattagataattcacataaagatccgcgacgagcaagatctgccagccaatcaattgtaccatcttcaactggtgcttctaatgcaatcggtgaaattataccttcgttaaaaggaaagcttgaggggatcgctatgagagtaccaattcccaatgtttcgttggttgagtttgtatttaatgtcaaaaagaatatttctaaagaaaaattaaacaattcattcacaaaagcatcaaattcttatttaaaaaatatcttaaatattacaaaagaaaaattagtatcaatagatattaaccataatagcgcatcagcaatattagatagt

SEQ ID NO: 214873 - DNA, 391 bp, Unknown
  Bacterial polypeptide expressing nucleotide sequence isolated from the Sargasso Sea
ttgtaccaacttcaacctggtgcttctaaatcaataggtgaaataattcccgaattaaaagggaaacttgaaggcgttgcattaagagtcccaacaccaaatgtatccataattgagttagttttttgtacaaataaagaagttacaattaacaaaatcaacaatgtattaattagctcttcaaaaaaagaattaaatgggattcttgaagtaaccaatgaaaaactcgtttcaatagattttaatcataattctaattcagcaattatagatgcctccctaacaaatgttgttggaaaaaatatgggaaagatatctgcatggtatgataatgagtggggcttttcttgtagaatgatagatctagtaaaatatattagtaaaatttaat

SEQ ID NO: 214874 - DNA, 349 bp, Unknown
  Bacterial polypeptide expressing nucleotide sequence isolated from the Sargasso Sea
ttccaatttaaaaggtaaactagatggtactgctattagagtacctacgccaaatgtctcattgatagattttacctttataagcaagaaaaaaactaatgctaaggaaataaacaacattgttttaaaagcctctaaaactaaagagcttaaaaatatacttggaattaatgatcttcctttggtttcaattgattttaaccataatgcaagcagttcaatatttgatatgactcagacacaggtagttaaaaatagattttgtcgtattttatcttggtatgataatgaatggggtttttcaaatagaatgattgacactatgatagatctaagaaaatttgtttag

SEQ ID NO: 214875 - DNA, 604 bp, Unknown
  Bacterial polypeptide expressing nucleotide sequence isolated from the Sargasso Sea
attaggtgccgcttcatgcacaaccaatgcaatagtcccaacacttaaagttttaaatgatgaatttgatattcaatctgggcatattgaaagtgtccattcctatactaatgatcaaaacttaatagataatttccacaagaaagtgcgacgtggaagaagtgcagcattaaatatggtgattactgaaactggcgccggtaaagccgtaggacaagttcttcctgaattgcagggcaagctaactgcaaatgcagttagagttcctacaccaaatgtatctttagctattattaatcttcgtttcgcaaaagatatcaccttagaagaattgaatgatttcctgagacaaaaagcttttcattctgatctaaaagagcagattggttttaccaattctgcggaagtagtttcaactgattttgttggcgatcgacatgcaggcatcattgattctgctgcaactattgtaaatggaaataaatgtgttctttacgtgtggtatgacaatgaatttggttatacggctcaacttcttggattagcaaaagaaatggttggtttgacttatcaaagatatccaaattttagcgaatcaacctag

SEQ ID NO: 214876 - DNA, 759 bp, Unknown
  Bacterial polypeptide expressing nucleotide sequence isolated from the Sargasso Sea
ttcgctacttgaaaggctaagtaaaatggacttacctgactgcgagatcgatttaggtgaacttgcaatgagatgttcattttttaaagatctgccatctaatcctgattcaatagatgattttttaaacgagcaaatctcagttaatgatttaataatcaatagaccagataatcctcaagatatcgttctttatggtttcggaagaatcggtagattgatggcaagaatgttagctcaaacaaccggtccaggaaattatttcagacttaagggagttgtagttagaaaaacaggagataatgatcttataaaaagggcaagccttctaagaagagactctgttcatggtcgcttcgaaggaaccataagagtcgatcttgaaaatgagctcttagttataaacggtaatcctgtaaaatttatatattctaattcccctaatgagatcaattattctgatctaggtattaatgctccaatcgtaattgataacactggaatatggagaaacgaagaagatttatcacagcacttaggcagcggtgcttcaaaggttatcctaactgctcctgctaaaggtgatattagaaatattgtatttggagtaaatgatagtgcattaaaagattctgataaaattatatctgctgcgtcatgcacaaccaatgccatagtccctgttttaaaaattataagtgataattatggaattaaaagtggtcatattgagacagtccactcatatacgaacgatca

SEQ ID NO: 214877 - DNA, 499 bp, Unknown
  Bacterial polypeptide expressing nucleotide sequence isolated from the Sargasso Sea
attatagaaacaggttttatgacaacgattcattcttatacttctgatcaaagactcttggataattctcacaaagatcctagaagagcaagatctgctggacaatctattgttccaacttctaccggagcttcaaaagctctaagcgaaatcataccagagctaaaagataagattgaaggattggcaattagagttcctacccctaatgtttctttgatagagttagtttttaactccaaaaaaaagctatctattaataaaattaatgatttatttaataaagcttcaaaaaataatttaaaaaatattttagagaccacagaggaaaagcttgtttcaattgattttaatcacaattctaactctgcaataattgatttgtcattaaccaatgttgctggggacaaaatgggtaaagtttcagcatggtatgataatgagtggggttttgcatctagaatgtgcgatttggctgaatacattcataaaatttaat

SEQ ID NO: 214878 - DNA, 798 bp, Unknown
  Bacterial polypeptide expressing nucleotide sequence isolated from the Sargasso Sea
gaggaaaacgtcggtattaaagccaacggcactttcatcaaagtcatttatgccgactcaccagaactggtggattacacccaatatggcattcacgatgcgctggtagtggataacaccgggatttggaaagatgacaaagagttgtcgattcatttcaaatcgaagggcgcagccaaagtattgctgacagctcctgctaaaggtgaagtgcataacgtggtgtacggtgtgaaccacggcatgatccagcctgaagatcgcatcgtgtcagcggccagttgtaccaccaatgccattacgccggtattaaaagcactgaacgatgaatatggtattaaaaatggccacgtcgagacagtgcattcgtacactaacgatcagaacctaatcgacaactaccacaaagctgagcgtcgtggtcgtgctgctcctttgaatatggtgattacctccactggtgcagccagtgcggttgccaaagctttgcctgaactcaagggcaaactgacaggaaatgctattcgtgtacccacaccaaacgtgtctatggcaattttgtcgttaaatctgaacaaagaaaccaaccgcgaagagctgaacagctacctgcaaaaagtagcactgttttccgaattgcaggatcagattgatttcaccagttcgactgaaattgtatccagtgatttagtaggttcacgttacgcaggagtggtcgattcacaagccactattgtgcaggatgaccgctgcgtattgtacgtatggtacgacaacgagtttggttacagcactcag

SEQ ID NO: 214879 - DNA, 878 bp, Unknown
  Bacterial polypeptide expressing nucleotide sequence isolated from the Sargasso Sea
taaacacataaataacagatcaaatactctaataagctctaatttacttaaatacgattctgttcatggaaaatttaatgaaaagattcaatttgatgacaaatttataaaaataggaaagcataaaatatctttttctcaagaaacaaacatagaagatattaattggtcaaaatatggtgtggattatgttttagaatgtactggtaaatttaattctaaagatcaactttatacgcatttaaaaaatggtgcaaaaaaagtaattgtttcagctccatgcaaaaatgcagatagaactattgtttttggagtaaatgaaaaatcaattacaaagaaagatgaaattatatctgcagcctcatgcacaactaattgtttagctccagtattggacatattgaacaagaattttttaattgaaaaaggttttatgacaaccattcatgcattcacaacagatcaaagaatactagacaactcccataaagatcccagaagggcaagatcagcatctcaatctatagttccaacctcgaccggagcatcgaaagcaattggagaaatcattccatcgctaaaaggaaaactggaaggtgttgcaatgagggtccctacaccaaatgtttctttggtagaattagtattttgcacaaaaaaaaatctaacgactaatataataaatagtagttttgaaaaagcttcaaaaaattatttaaaaggtgtgttgtgtattactaaagaaaaattagtgtcagttgattttaaccataattcgcattcagcaattgttgatgcatctctaactaatactataggaaaaaatatgggtaaaatttcagcttggtatgataacgaaatggggattttcaaatagg

SEQ ID NO: 214880 - DNA, 850 bp, Unknown
  Bacterial polypeptide expressing nucleotide sequence isolated from the Sargasso Sea
atggcaataaaaattggtattaacggtttaggaagaattggaagaatgataattagatccttaatcgaaaaaaattataaagatattgaaattaaacatataaacaatagatcaaattctgaaactgcttcacaattattaaaatatgattctgtacatggtaaatttaattgtgaaattagaaatgataaaaatcatttaatattaaaaaataaaaaaattacctatactcagtacactaagttagaagatataaactggaaaaaatataacgtagattatgtcttagagtgcactggaaaatttaattctaaagaaaaaatattacctcatataaaaaatggtgctaaaaaaataatagtttcagctccatgcaaacaagctgacaaaacaatagtttatggtgtaaatgaaaaaataattcataaagaggataaaattatttcagcagcatcatgcactaccaattgtctagctcctgtggcagatgttttaaacaaaaattttattatcgaaaaaggctttatgactacaattcattcttttactactgatcaaagattgcttgataactcgcataaagacccaagaagggcaagatcagccgttcaatcaatagttccaacatctactggtgcctcaaaatctatcgcagaaataattccagatttaaaaggtaaactcgaaggtattgcgatgagagttccaactccaaatgtttctttaatagaattagttttttgtacaaaaaaagatttaacaattgaaaaaataaataatgtttttgccaaatcctcaaaagggaaattaaagggaatacttgatataactaatgaaaaacttgttcaac

SEQ ID NO: 214881 - DNA, 760 bp, Unknown
  Bacterial polypeptide expressing nucleotide sequence isolated from the Sargasso Sea
tctaattatagataatactgggatatggcgtgacaaagatgagttatcagctcatattaattcaggcggttctaaagttattttaactgcaccagctaaaggagacataaaaaacattgtatatggaatcaacgattcaataattgaagataatgacaacataatatctgctgcatcatgtactacaaatgctattgttcctgttcttaaagtaataaatgatgaatataaaattaaagatgggcacatcgaaacggttcatgcatatacaaatgatcaaaatctgatagataattttcataaaaaagacagaaggggtagaggggcaccattaaacatggtaattacatctactggtgctgttaaagctgttgctaaagccttgccggagcttgatggaaaattaacaggtaatgccattagagttccaacaccaaatgtaagtttggctatattatctttaacattagataaaaaagtaacgaatgatgttgtaaatgattatttaagatctattgcatttcattcaaaatatagagaaatcattggatttgtaaattcaacagaaattgtttcaacagatttctattcatctccatttgcaactatagttgattctcaggcaacaatttcgagcggtaataaattaactttatactgttggtatgataatgaatatggatactctaaacaggtcataagtttagctaaaaaagtagccaatattaatctaccaagattaccaaaaccagttaattaa

SEQ ID NO: 214882 - DNA, 349 bp, Unknown
  Bacterial polypeptide expressing nucleotide sequence isolated from the Sargasso Sea
ttacctagtttaaaaggaaaactagatggaactgctataagagttccaacaccaaatgtttcgttaattgatcttacatttgttcctaaaaaggaagtaacatccgaaagtattaatgatgcaatgattaaagctgctaaaggctctttaaaaggaatattggcaacaaattcagcgcctttagtttcaaaagattttaaccacaatcctcacagctcaatttttgatattacacaaacacaagtcataaagggtaaatttagcagagttttgtcttggtatgataatgagtggggattttctaatcgtatgtgtgatacagcaattcaaatagctggattaatttaga

SEQ ID NO: 214883 - DNA, 878 bp, Unknown
  Bacterial polypeptide expressing nucleotide sequence isolated from the Sargasso Sea
gatggttgttcgatcaatatatgaaaactacaaggggataattcaaattaaacatattaataatagatcaggctcagagatttgtgcaaacttattaaaatatgattcagttcatggaaaatttaatgctgagataaattctaaaccaaattatttaaaaataaacaaagacaaaatatcattttcacaaatcccaaatattcagaacataaattggaaaaaatacaatgttgattatgtttttgagtgtacaggtaaattcaattctaaagaacaacttatttcacatttaaaaaatggagcaaaaaaagttatagtatcagctccgtgtaaaaatgcagacaaaacagttgtttttggtgtaaatcataaaaaaattggaaagaaagacactattatttcagccgcatcttgtaccactaattgcctagctcctattgtagatgtaataaataaaaattttataatccaaaatggttttatgacaaccattcatgcttttacgacagatcaaagaatattagataattcacataaagacccgagacgagcaagatctgctagtcaatcaatcgtgccaacttcaactggtgcttctaaaacaattggagaaattataccctcattaaaaggaaagcttgaagggattgctatgagagtaccaactcctaatgtatcattggttgagtttgtatttaatgtaaaaaaaaatatttctaaagagcagttaaataattcattttcaaaagcatcaaatacatatcttaaaaatatcttaaatgtcacaaaagaaaaattagtatcagtagatttcaaccataatagtgcatcagcagtactagatagttctttaactaatgttgttggtttaaaaatgg

SEQ ID NO: 214884 - DNA, 370 bp, Unknown
  Bacterial polypeptide expressing nucleotide sequence isolated from the Sargasso Sea
tatgagtgcaaaaatcaaagtcgcaattaatggttatggtagaattggtcgcaatattttacgagctttatatgaaggccatcgtaaagatgcaattgagattgtagcgattaatgatctaggggatgctgccgttaatgctcatttaactcaatatgacacaactcacggtaagtttaacggtgaagttagcgttgagggtgataatttagttgtaaatggcgataaaattaaagttttatctgagcgtgacccatctaaattaccatggggtgatttaggagtagatgtggtttatgagtgtaccggtttttttgcaagcaaagaaaaggcaagcgcgcatttgcaaggtggggctaaaaaggtaatt

SEQ ID NO: 214885 - DNA, 748 bp, Unknown
  Bacterial polypeptide expressing nucleotide sequence isolated from the Sargasso Sea
ttccgggcgctctggggacggcccggcctcgagctggtgcatgtgaatgaccccgcgggcgacgctgcaaccgctgcccatctgctggagtttgattccgttcacggtcgctgggatcgcggcatcagcagtgatgcgtacggtttctccgtggagggatcaccactgacctggtcgagcgagaaagaccccacagcagtgccctggagagagcgcggggtggagatggtgctcgaggccagcggcaagatcaaaacacccgagaccctcagtccctatttcgagcaggtggggctgaaacgggtgttggtggcctgtccggtgaagggtgaggtggccggcgaggaggcactcaacatcgtttatggcatcaatcacgacctttatgagccagatcgacacaagttggtaacggccgcttcgtgcaccaccaactgcctcgctcccgtggtgaaggtggtgcacgagagcttcggcatcgagcacggaatgatcaccaccattcacgacatcaccaacacccaggtgccgatcgatgccttcaagagcgatctgcgccgggcccgctccggcctcacatccctgatcccgaccaccacgggctccgccaaggcgatcgccatgatcttcccagagctcaagggcaaactcaacggccacgccgtccgggtgccattgctgaatggatcgctcaccgatgcggtgttcgagctcaagcagagcgtcacggttgaacaggtgaatgctg

SEQ ID NO: 214886 - DNA, 768 bp, Unknown
  Bacterial polypeptide expressing nucleotide sequence isolated from the Sargasso Sea
ggaaagtttaattgtaaaattaaacatggagataattatctaaacataaatggtaaaaaaattacattttcacaatatccaaatttaagtgaaattaaatggaagaattttggtgttgattatgttttagaatgtactggaaaatttaattcaaaggaaaaacttattcctcatttaaaaaatggtgcaaaaaaagttattgtttcagcgccttgcaaaaatgctgacaaaactattgtatatggtgtaaatcataaaactttaaacaaaaatgatttagtaatttcagcagcatcttgtactacaaattgtcttgcgccagtcgcatatatactgaacaaagaattcaaaatagaaacaggttttatgacaactattcactcatacacttctgatcaaagattattagataattctcataaggatttaagacgagcaagatctgctgcacaatctatggtgccaacatctacaggtgcttcaaaatcaattggtgaaattattccagaattaaaaggtaagcttcaaggattagcaataagagttccaacaccaaatgtgtcacttatagattttgtttttaattcaaaaaataatttatcaataaaaaaaattaatgattcttttataaaagcttccaaaaaagaattacataatatattggaagctaccgaagaaaagctagtttcaacagattttaatcacaatccaaattctgctatcgtagatttatctctaactaacgtagcaagtgaaaaaatgggtaaa

SEQ ID NO: 214887 - DNA, 484 bp, Unknown
  Bacterial polypeptide expressing nucleotide sequence isolated from the Sargasso Sea
tatgaccacaatccatgcctataccggagaccagccaacacttgattccagccacaaggatttgcgacgggcacgcgctgcggccatgtcaatgatcccgacatcaaccggcgccacatccacggttggcgaagttttgccgacacttgttggcaagatgaacggttccgcgatacgtgtcccaacggcaaatgtgtcggttgttgaccttgtcgtgacgacaagccgtgacaccagccttgacgaaataaatcaagcatttcgtgacgctgcaaacggcccgatgcgcggcgttttgggcattaatgaacgtccgctggtgtcgatcgattttaaccatgacccgcattcatctgttgccgacctgacgcagaccaatgtcgccaacaagcggtttgtgcgggtgctcgcctggtatgataacgagtggggattttcatgccgcatgctggatacagcggcggctatggccaaatatctatag

SEQ ID NO: 214888 - DNA, 831 bp, Unknown
  Bacterial polypeptide expressing nucleotide sequence isolated from the Sargasso Sea
tatgaaggacgtatcgggaaagattggatttatcacaggcggagcgagcggtctgggctttgccatggcgaaaacatttttggcttctgggatgcgagtcgcacttacagatatcgaggacgccgcaatcgaaaaaaccaaggctttttttagtgatcgtgtcgaggacgtcttggtcatgaaaacggacgtgactgatcgggactcgatggccgcggcgagagaacaaaccctagaaaagtttgggaaggttcatgttgtttgtaacaacgcgggcatcgctttaaataaaaacgtggcggacatgacctataaagactgggactgggtgctcggagtcaacctagacggagtcgtaaacggtgtcacgacttttgtcggcgacataaaaagtcagggcgagggaggccattttgtcaacactgcgtctatcgccgggcatcatgggatgcttgggctgagtggttactgcgcaagcaagtttggtgtcgtgggcatgtccgaggcaatgcgaattgatttggctgaggatgatataggcatctccgttttatgccccgggcctgttgccacaggaattttcaattctgaaagagttcggcctgagaagtttgggggcaccgagcaggccgcctacccaataaaagagggagcgaggcagtctttagagatggaaacgttagagcctgatttggtcgggcaaatggtgcttaacgctgtgcttgaaaataggttttatataatgacccatagcgagtttcaggagtggtttaaaaccaggactgacgaaatccaagatgagtacgactactggaagaactttcgagagag

SEQ ID NO: 214889 - DNA, 841 bp, Unknown
  Bacterial polypeptide expressing nucleotide sequence isolated from the Sargasso Sea
aagggtagtagaagaagaggatctattaataattaacggaaatgaagtcaaagtgatctactccaatgacccaacaactattgattacactgattatggaatagaaaatgctttgttaattgacaacactggagtctggagaacaaaagaaggattagggcaacatttaaattgtacaggaatctccaaagtcttattaacagctccggccaaagatggaattaaaaacatagtacacggcatcaataatgacattatgaaaaatgatgacattttaggagcagcttcttgtactacaaatgcaattgttccaacattaaaagttttaaatgatgaatttgatattaaatcaggacacattgaaagcgttcactcttatacaaatgatcaaaacttaattgataattttcacaaaaaggaaagaagagggagaagcgctgcactgaatattgttattacagaaacaggagctggaaacgctgtaggacaagtattacctgaacttcaaggaaaattaactgctaatgctgtaagggtgccaacaccgaatgtttccttagcaattatgaatttagagttaggaaaagaagtttcggttgagactttaaatgattttcttagacaaaaggcatttcactccgacttaaaagaacaaataggttttactaactctcctgaagttgtgtcaacagattttgttagtgatagtcatgcaggcatagttgattcagcagccactatagttaataacaacaaatgtactctttatgtttggtacgataatgaatatggatacacggctcaacttctcggtttagctaaagaaatggtaggtttgacc

SEQ ID NO: 214890 - DNA, 490 bp, Unknown
  Bacterial polypeptide expressing nucleotide sequence isolated from the Sargasso Sea
tggatcaataacgacgatccatgatgtcactaacacgcagacaatagttgaccgaccgtctaaggacaagagacgagctagatcagctctcaataatttgataccaacaacaactggttctgcaactgcaataacgatgatatatccagaacttaaaggaaaactaaatggacacgcggtaagagtacctctgctcaatgcatctttaacagattgtgtttttgaggtggaacgcgcaacctcagcaaaggaagtgaatgctctttttgaagaagcctccaataagtcgcttaaaggtattcttggtttcgaaaaacgccctcttgtttccagtgactatacgaacgacccgcggtcatcgattgtggacggcctgtcaaccatggtcgttaacaaaactcaagtaaaagtctatgcgtggtatgataacgagtggggttacgcatgcagattaggtgatataacccgcatggtagcaggctcactttga

SEQ ID NO: 214891 - DNA, 233 bp, Unknown
  Bacterial polypeptide expressing nucleotide sequence isolated from the Sargasso Sea
tatgactttgcgtgttgcaattaacggctttggcagaattggtagaaactttatgcgctgttggcttagtagaggtgcttacaccaatattgaagtagttggtattaatgttacttctgatccgaagacaaacgctcatcttttaaaatacgattcagtactgggtcaacttgatggcgttgatattcaatatactgacgacacttttgtaatcaataacaaaacaattaagt

SEQ ID NO: 214892 - DNA, 370 bp, Unknown
  Bacterial polypeptide expressing nucleotide sequence isolated from the Sargasso Sea
atgactttgcgtgttgcaattaacgggtttggcagaattggtcgaaactttatgcgttgttggctcagtagaggtgcttacaccaatattgaagttgttggcattaacgtaacttcagatcctaagactaatgctcacctcttgaaatatgactcagtccttggtcaacttgatggtgttgatattcagtatacagatgacacttttgtaataaataacaagacaatcaagtgtttctctgatagaaatccaatgaatcttccttggaaagactggggtgtagatttagttattgaatcaactggagtttttaatacagatgttggtgccagcaaacacttagaagtgggagcaaaaaaagttttctaac

SEQ ID NO: 214893 - DNA, 481 bp, Unknown
  Bacterial polypeptide expressing nucleotide sequence isolated from the Sargasso Sea
tgatcagaacttgatagacaactatcatgtatctgatagaagaggtagaagtgcagctttaaaccttgtcatcacagatacgggtgctgcaaaagcaatttcaggagttttacctgaacttaaaggcaaactaacagccaatgcaatcagagttccaacaccgaatgtgagtttggccatcatgcatcttaatgtgaagaaaggtgtttctgttgaagagttaaatcaatgctttagaaatgctgcctttcactcaggcttaagaactacaattgattactctaattctttagatgcagtttcttcagatttttatagcaatgaatttgcttgtgtttttgattctcaggcaacaattagcaattttaacaacataactatttactgctggtacgataatgagtatggttattccagacaagttgcaaggcttttgaataaagcacttggtattaatttagttagataccctaaacagtaa

SEQ ID NO: 214894 - DNA, 787 bp, Unknown
  Bacterial polypeptide expressing nucleotide sequence isolated from the Sargasso Sea
aactacaggaccaggtaattattttaaacttagagctattgtcattagaaaagctactaatgatgatatctttaaaagagctagcttgttaacaaaagattctgttcatgggccttttgatgggacagtaagagttgatgaagaaaactctagtttagtaataaatggaaatccagttaaagttatttatgcaacaagtcctgataaagttaagtattctgattatgatattaatgatccccttgttattgataatactggtatttggagagacgaagaagaattatctgttcatattaaatcaggagcctcaaaggtgatcttaactgctcctgctaaaggaaatatcaaaaatattgtgtatggaataaatgattcaattcttaaagaaaatgatcagcttatatctgctgcatcatgcacaacaaatgcaattgttcctgtgcttaaaactattaatgatgaatttaaaattaatggaggtcatattgaaactgttcacgcctatacaaatgatcaaaatctaatcgataactttcataaaaaagatagacgtggaagaggtgctccacttaacatggttataacatcaactggagctgtaaatgcagtagcaaaagctttaccagaacttaaagggaaacttactggtaatgctattcgcgtgccgactcctaatgttagtcttgcaatattatctttggaattagataaaaaagttagtgttgaaataattaatgattatcttagatcaatggcttttcactctgaatatagagaaataatg

SEQ ID NO: 214895 - DNA, 406 bp, Unknown
  Bacterial polypeptide expressing nucleotide sequence isolated from the Sargasso Sea
catgactatcaaagttggtatcaacggttttggccgcatgggccgtctctcatttcgcgccgccttcgactgggcggatgtagagtttgtgcgtatcaatgacccggctggggatgccgcctccttggcacacctcatcaccttcgattccgtccatggccgctggcatcatgaagccagcagcgagggggatgagatggtgatcggtaaccatcgcatcctctgcactcgcaacaaagagatcggtcagactgactggtctgattgtgatgtggtgatcgaggcttccggcaagatgaaaaccaaggccctgctgagcgcctacctggcacaaggggtgaagcgcgtcgtggttacggctccggtcaaggaagagggtgtcctgaacgtcgtggatgggggttaa

SEQ ID NO: 214896 - DNA, 280 bp, Unknown
  Bacterial polypeptide expressing nucleotide sequence isolated from the Sargasso Sea
ttgtgtgttcgaggtcgagcgtgcgaccacggttgatgaggtcaacgcgctgttcaaggccgccgccgcgggcccgctggcggggattctcggttacgaggagcggccgctggtgtcgatcgattaccgtaccgatccgcgctcctcgatcatcgacgcgctcagcaccatggtggtcaacggcacccaggtgaagatttacagctggtacgacaacgagtggggctacagcaaccgcctggtcgagctggcgcgcaaggtggggcaggcgggcaattga

SEQ ID NO: 214897 - DNA, 669 bp, Unknown
  Bacterial polypeptide expressing nucleotide sequence isolated from the Sargasso Sea
cagctccaggcaaagggaaaattaaaaatattgtctatggtgtaaatgaccataaagttagtaatgaggataagtttttggcagctgcatcttgcacaactaacgccatcgttccagccctgaaagttgtagatgataatttcaagatcttaagtggacatattgaaactgtgcatgcttatacaaatgatcaaaacctaatagataattaccattccgctgacagaagaggtagaagtgccgctttaaaccttgttataactgatacaggggcagcaaaagctatatctggggttttgcctgaactaaaaggaaaacttacagcaaatgcgataagagtgccaacacctaatgtgagtttagctatcatgcatctcaatgtaaaaaagggtgtttctgttgaagatttaaatcaatgctttagaaatgcagcttttcattcaggccttagaactaccattgattattctaattctttggatgctgtttcttctgatttttatagcaatgagtttgcatgtgtttttgattctcaagcaactattagcaattttaacaacataactatttactgctggtacgataatgagtatggttattccaggcaagttgcaaggcttttaaataaggctcttggtattgatttagttagatatccaaaacagtaaa

SEQ ID NO: 214898 - DNA, 463 bp, Unknown
  Bacterial polypeptide expressing nucleotide sequence isolated from the Sargasso Sea
atgactttgcgtgttgcaattaacggctttggcagaattggtcgaaactttatgcgttgttggcttagtagaggggcttacaccaatattgaagttgttggaattaatgttacctcagatccaaagacaaatgctcatctactgaaatatgattcagtccttggtcaacttgatggtgttgatattcaatatactgatgatacttttgtaattaataacaagacaattaagtgtttttctgatagaaatccattaaatctcccctggaaagactggggcgtagatttggttatcgaatctactggagtttttaatacagacgtaggtgcaagtaagcacttagaggtaggagcaaaaaaagttatcttaactgctccaggtaaaggggatggcgttggcacttatgtagttggagttaatgctgatacatatagtcataaagattatgatattttgagtaatg

SEQ ID NO: 214899 - DNA, 441 bp, Unknown
  Bacterial polypeptide expressing nucleotide sequence isolated from the Sargasso Sea
cttgaaggtaggcgtcaacggcttcgggcgaatcggtcgtctggtatttcgtgccctgtgggggcgtcccggcatcgaactggtgcacgtcaatgacaacgcgggtgacgctgccaccgccgcccacctactcaccttcgattcggttcatggccgctggagccaagaggcccgagccacaggcagcggctttcaaatcgatggccaccccatcacctattcccagcacagcgatccaacagctgttccgtgggatcaagccggtgtggagttggtgctggagtgcaccggcaagatcaaaacccccgacacccttcagccctacttcgatcaaaccaaggttcgccgcgtaatcgtggcttgcccggtcaaaggccaggtcgccggcgctgaggctctcaacattgtttatggcatcaaccatcagctctacgagccaag

SEQ ID NO: 214900 - DNA, 202 bp, Unknown
  Bacterial polypeptide expressing nucleotide sequence isolated from the Sargasso Sea
aatgataaaggtcggaataaacggatttggcagaattggacgagctatatttcgtattaataattataatcaaatctttgaagttactgctatcaatgatatagaccctctgatagaaaaccatgtatacttagtaaactatgattcaatatatggctcattaaaaaatcatttatcagttagtaatgataaaaaatatatt

SEQ ID NO: 214901 - DNA, 349 bp, Unknown
  Bacterial polypeptide expressing nucleotide sequence isolated from the Sargasso Sea
tatgtcaaaaaagaaaattgcgattaatggttttggacgtatagggagattagtttttcgtgcttacatagagagagtaaaagaatttaacgacacatttgaaattgcttatatcaatgatttagctgatattgactcaaacattcacttattaaaatatgacagtgtccatggtgcattaaaccaagaaatcaacaaaacagctgaagataaattctcaattggtgataatgagttcattgttacctcagagcgcaatcccgttgatctcaaatggggcgataaaggagttgatattattctagagtgtacgggtgtatttgcatcaaaagaaaaagcaatgagtcac

SEQ ID NO: 214902 - DNA, 755 bp, Unknown
  Bacterial polypeptide expressing nucleotide sequence isolated from the Sargasso Sea
cgcctatgacgttgatgtagtcatcgatgccacaggtcgttttctgaaaagaggcgaactttctgcccaccttgaatcaggtgcgaagagagtattcttaagcaggaatgctaaggatactattgacagatatgtcatacctggtataaatgaatctagtattgaagcttcagaccgtattatttctaccacatcatcgactactcaggtattggcactgatggtgaaaatgcttgatgaaacttttggtctaaaaagagcaatgatgacaacgattcacgcatatactgcggaccagccattagctgatgctgcaggcgtagaccttcgcagaagtcgatctgcagttgaaaatattataccaaatactaccctagccccctcaatcgttgaggacctgatgccgcaattttctggtaagctagatggaattgcttttaatgttccagttccaaatggatcctgcgtagacctaactactgagttaaatgatactccgtctgttgataaggccaatgatgcaataaagaaattttcagaggattcactaaaaggtatcgttggttacactgaagatcctattgtttcaagtgatgtgattggaagagaagagactatggtgtttgaccaaaaggcaaccatgataactaaagacgaacttctcaaaacactttgctggtatgataatggttggggatttgctagtagaattttagatgtagtggatgcatatgccacattggaggataaatagt

SEQ ID NO: 214903 - DNA, 313 bp, Unknown
  Bacterial polypeptide expressing nucleotide sequence isolated from the Sargasso Sea
atgggaaaaattaaaattggaattaatggttttggtagaattggaagaatggtgctcagactatcattaaatagatctgatgttgaagttatagctataaatgatcttttagatataaatcatttagtatatctgttaaagtatgattctgttcatggtaaaattaattccaatgtttcagttgaaggtaacaacttaaatattgatggtcaaaaaattaaaattacatcagaaaaagatcccaaacagataggttgggacaatataggtgttgatgttgttttagaatgtacaggtatttttacaactctag

SEQ ID NO: 214904 - DNA, 814 bp, Unknown
  Bacterial polypeptide expressing nucleotide sequence isolated from the Sargasso Sea
caacggcaactttatcaaggtgatctactccgatggtccggacaaggtggactacaccgagtacggcatcaacaacgccatcgtggtcgacaataccggtaagtggcgcgatgaagcgggcctgggcctgcatctgaagtccaagggtgtcagtcgagtgattctgactgcgccgggcaagggcgacatcaagaacatcgtttatggcatcaacaacgactggatcaccgacgaagacaagatcctgtctgctgcttcctgtaccaccaacgccatcactccggtactgaaggccatcaatgacgagtacggcattgaggatggccacgttgaaaccgttcactcctacaccaacgaccagaacctgatcgacaactaccacaagggcagtcgtcgtggccgcagcgccccgttgaacatggttattaccgaaaccggcgcggccaaagctgttgccaaagcactgccggagctgaaaggcaagctgagcggtaatgcgatccgggtgccgacaccgaacgtgtccatggcgatcctgaatctgaacctgaaaagcgatgtggatggcgagcaggtaaacgaatatctgcgcgatatggcgcttcactccgagctgcagaagcagatcgacttcgtgaactctccggaagtggtttccaccgatttcgtgggctcccgccatgccggtatcgtcgatgcccaggctaccatcgccaatggcaagcgtttgatcctgtacgtgtggtacgacaacgaattcggctacagcgcccaggttgtgcgttgtgtgaaccagatggccggcgtaacctat

SEQ ID NO: 214905 - DNA, 805 bp, Unknown
  Bacterial polypeptide expressing nucleotide sequence isolated from the Sargasso Sea
attaatggattgggtagaattggaagaatggttatcagatcactcgaggaaaatagaaataaagatataaaaattgtacatgttaacaacagaactaattctgaaaatagtagtctattattaaagtatgactcagttcatgggaagtttaatgcaaatattgattttgataaaaaaaatttaattataaatagtaaaaaaatacatttttcacaagaaaccgaattagacaaaattaattggaaaaaaaataatgttgatattgttttagaatgtactggaaaatataattcaaaaaaacaatcaatgacacatgtaaaaaatggtgcgaaaaaagtaattgtttctgcaccctgtaaaaatgctgacagaactgttgtctatggcataaatcataaatcaataaaaaaaaatgatttaataatttctgctgcatcatgcactacaaattgtcttgcaccagtagcatttgtggttaatgaaaattttaatatagaaaaaggtttcatgactaccattcattcatatacaacggatcaaagacttttggataattcacataaagatccaagacgcgctagatctgcagctcaatcaattgttccaacttcaaccggtgcttcaaaagcaattggagatattattcctgaacttaaaggtaaactagaaggtttggcactgagagtaccaaccgcaaatgtttctttagttgaatttgttttcaattcaaaaaaaaaattgtctgttaaaaaaattaatgactcatttataaaagcttcgaataataaattaaaaaacgttctta

SEQ ID NO: 214906 - DNA, 742 bp, Unknown
  Bacterial polypeptide expressing nucleotide sequence isolated from the Sargasso Sea
cacgttaacaacagaactaattctgaaaatagcagcctattattaaagtatgactcggttcatggaaagtttaatgcgaatgtggatttcgataaaaaaaatttaattataaataataaaaagatacatttttctcaagaaactgaattaaacaaaattaactggaaaaaaaataatgttgatattgtcttggaatgtactggaaagtataattcaaaacaacaatcgatcacacacattaaaaatggcgccaaaaaagtaattgtttctgcaccatgtaaaaatgctgataaaactgtcgtatatggcataaaccataactcaataaaaaagaaagatttaataatttctgctgcatcttgtactacaaattgtcttgccccagtaacattcgtgataaatgaaaattttaaaatagaaaaaggttttatgactacaattcattcatatacaacagatcaaagacttttagataactcacataaagatcctagacgagctaggtcggcagctcagtcaattgttccaacttcaactggcgcttcaaaagcaattggagaaattattcccgaacttaaaggtaaacttgaaggcctggcaatgagagttccaactgcaaatgtttctttagttgaatttgtttttaattcaaagaaaaaattgtctgttaaaaaaattaatgactcttttaaaaaagcttcaaataataggctcaaaaatattcttagtgtaactaacgaaa

SEQ ID NO: 214907 - DNA, 268 bp, Unknown
  Bacterial polypeptide expressing nucleotide sequence isolated from the Sargasso Sea
aatgggaaaaattaaaattggaattaatggttttggtagaattggaagaatggtcctcaggctttcattaaagagatctgatgttgaagttatagctataaatgatcttttagatataaagcatttagcatatttgttaaaatacgattctgttcatgggaaaataaattccaatatttcaatagatggtaatagtttaaatattgatggccaaaaaattaaaattacgtcagaaaaagatcctaaacagataggttgggataatata

SEQ ID NO: 214908 - DNA, 955 bp, Unknown
  Bacterial polypeptide expressing nucleotide sequence isolated from the Sargasso Sea
aatgatcatcagatcattgattgaaaataataataaaaaagtagaaattaaacacatcaacagtagatcaaactctgagattgtctcctcattattgaagtatgactctattcacggaaagtttaattgtgaaataaaatatggagataactacttaaaattgaatggtaaaaaaattacattttcacaacattcaaatttaaatgagattaattggaagaaatttggtgtagattatgttttagagtgtacaggaaaatttaattcgaaagagaagctttatactcatataaaaaatggcgcgaaaaaagttattgtttccgcgccttgtaaaaacgctgacaaaactatcgtttatggagtgaatcacaaatcgattagcaaaaaagatttagtaatttctgcagcttcttgcacaactaattgccttgcaccaattgcatacgtgttaaataaggaatttaaaatagaaaaaggttttatgacaactattcattcatacacaactgaccaaagactattagacaactcccacaaagatccaagacgggcaagatctgctactcagtctatagtgccaacttctacaggtgcttccaaagctattggagaaattattcctgaattaaaaggaaagcttgaaggtttggctataagggtgccaaccccaaatgtttcattagtagattttgtatttaattcaaaaaacaaactaacagtaaaaaaaattaatgactcttttaaaaaagcttcagaaagagaattgaaaaatgtactatttgcaaccgatgaaaagcttgtatcaattgattttaatcataaccccaattcttctatcgtagatctatctttaactaatgttgttggagatacatgggtaaagtttcggcatggtatgataatgaatggggatttgcttccaggatgtgcgatttatcagaatatattcataaaa

SEQ ID NO: 214909 - DNA, 247 bp, Unknown
  Bacterial polypeptide expressing nucleotide sequence isolated from the Sargasso Sea
gcagaagagatcaactccgccatcaaagaagcgtccgatgggcgacttaaaaacgtgttggcctttaacgaggcgccgctggtatccatcgatttcaaccacaaccccgcctcaagcaccttcgacgccacccaaacacaagtcatcggaggtaacttcgtccgtgtgctgagctggtacgacaatgagtgggggttctccaaccgaatgtctgacacagctgtggctctggccaacgccagctaac

SEQ ID NO: 214910 - DNA, 463 bp, Unknown
  Bacterial polypeptide expressing nucleotide sequence isolated from the Sargasso Sea
tatggttttagataaagtattaggtatagaagctggttttatgactactgttcatagctttactggagatcaaagaaccctagatcaaactcatagtgatttgagaagagccagaacagcaactagttcaatgataccaacttctacaggagctgctaaagctctaagtttagttttaccaaaattaaaaggaaaacttgacggaacagcaattagagtacctacgcccaatgtttctctaattgacttcacattttcaagtaaaaaaaaggcttcagtagatcttataaatcattcaatgataaaagctgcgaaatcaaaaaatcttaaagggattttaacagtgaataatctgcctcttgtttcaatagattttaatcataatccaagtagttcaatttttgatttaacccaaacacaagtcgttagagataaattttgtcgagttttatcttggtatgat

SEQ ID NO: 214911 - DNA, 943 bp, Unknown
  Bacterial polypeptide expressing nucleotide sequence isolated from the Sargasso Sea
cgcaaaggtgatttagagaaacgcgccagtctgctgcgtcgcgattctatccatggcccgtttaacggcagtattaccgtggatgaagaaaacggcggcatcaaggccaatggtacttttattaaagtgatttatgccgattcacctgagttggtcgattacaccgcctatggcattcacgatgcgctggtggtggataacacgggtatttggaaagatgacaaagaactgtctattcactttaaatccaaaggcgctgcgaaagtgttattaacagctccggccaaaggcgaagtgcacaacgtggtctatggtgtgaatcacagcatgatccagccacaagaccgcatcgtttcagctgcaagctgcacaactaatgcgatcactcctgtgttaaaagctctgaacgatgaatacggcatcaaaaacggccacgtagagactgtgcattcgtacaccaacgatcagaacttaatcgacaactaccacaaagcagaacgtcgtggtcgtgcagcaccactgaatatggtgatcacttcaacgggtgccgccagcgctgtcgctaaagccttaccagagttaaaaggtaagctgacgggaaatgcaattcgggttccaacccctaatgtgtctatggcaattttgtcattaaatctgaataaaacaaccaaccgtgaagagctgaacagctatttacaaaaagtagcactgttttctgagctccaagaccagatcgatttcaccagttccactgaaattgtctccagcgacttagtcggctcacgttatgctggtgtggtcgattctcaagcgaccatagtgcaggatgaccgctgtgtactttatgtatggtatgacaacgagtttggttacagcactcaggtgattcgagtgatgaacgagatggctggtattaaatacccaacccttacctatcagcaaa

SEQ ID NO: 214912 - DNA, 793 bp, Unknown
  Bacterial polypeptide expressing nucleotide sequence isolated from the Sargasso Sea
atcatatatgatgattacggtattaaaaacccagttgtaatagataatacaggtatttggcgagatgaaaagtctttatcagttcatcttaaatcaggcgcatcgaaagtaatattgacagctcccgcaaaagataatgttaaaaatattgtttatggtattaatgatgatgaaataaataaaaaagatcaaatcatttcagctgcgtcctgtacaacaaatgccatagtgccaattctaaaagtaattaatgacaaatttattataaataatgggcatattgaaactgttcatgcatatacaaatgaccaaaatttgattgataattttcataagaaagatagaagaggaagaggagctccattaaatatggttataacatcaaccggtgctgtaaatgcagttgctaaagcattgcctgaacttaatggtaagttaactggtaatgcaataagagttcctacaccaaacgtaagtcttgctatattgtctctcaatctagaccaagaagtttctgaagttattattaatgattatctcagatcaattgcatttcattcaaaatatagagaaattattggctttgtaaactcgaccgaaattgtttcaactgatttttactcatcaccatttgcaacagttgtagactcgcaagctactattacaaatggtaaacaagtaacaatatattgttggtatgataatgaatacggttattctaagcaggtaattagtttagcaaagaaagtatcaaatattactctgccaagattaccaaaaccaattagttaaa

SEQ ID NO: 214913 - DNA, 832 bp, Unknown
  Bacterial polypeptide expressing nucleotide sequence isolated from the Sargasso Sea
gctaaaataagccattctgacaaagcaattgaaattaatggaaaaaaaataaatatgatgcacgaaactgaaataacaaaaattaattggaaaaaatataatgtaaatgttgttttagaatgcacaggtaaattcaatacaaaagaaaaatcttctcaacatattaaatcaggagctgaaaaagttttagtttcagccccttgcaaaggagcaaaaaatattattttcggagtaaatgaaaaagatgtgaaatctgaagacaaagtaatttctgcagcatcatgcacaacaaattgcctcgcgccggtagcgcatgtcttaaatgaagaatttgagattgagagaggtttcatgacaacaattcattcttatacaacagatcaaagactattagataattcccacaaagactttagaagagcaagaagtgctccaaattcaatggtaccaacaactactggagccactaaatctcttggcgatgttatacctagcttaaaggataaaatagaaggtatttcaataagagtgcctaccccaaatgtctcattggtagaatttgtattttcttcttcaaaaaaattaaccactgaaaaaataaacaattcctttataaaggcttcgaaatcaaaattgaaaaatattttagacgtaagtaatgaaccgcttgtttcttctgattttaatcataactcaaactcagcaatagttgatactgccctaacaaaagtaatagacaacaaaatgggaaaagtgtctgcctggtacgataatgaatggggttttgcctgcagaatgtgtgatttggctaattatttcggtaagatttaat

SEQ ID NO: 214914 - DNA, 499 bp, Unknown
  Bacterial polypeptide expressing nucleotide sequence isolated from the Sargasso Sea
aaagcacggtacaattacaacaattcataatgtgactaatagtcaaacaattgtcgataaacccgcaggcaacattcggcgaggccgttccgcattaaactctttatttccatcaacaacgggatctgcagctgcaatctcgttaatctttccagaattaaagggaaaattaaatggtcatgcagttagggttcccgtattaaatgcttctttaacggattgtgtttttgaaataaaaagaaaaattactgccaatgaaattaatgcactcttcgaacacgcatccaaacacgaacttactggaattcttggttatgaaaagcgagagctagtgtccgcagattacgtgaacaaccccctgtcaaccattatcgatgcttcctcgacgatggttgttaatgacacccaattgaaaatctatgcgtggtatgacaatgaatggggttatacatgtcgaatgacggatatcgcaaatttaataaaaaaagcgcatgaataa

SEQ ID NO: 214915 - DNA, 793 bp, Unknown
  Bacterial polypeptide expressing nucleotide sequence isolated from the Sargasso Sea
ggaaaaaaaatagctatgattcatgaaacagaaattgcaaaaattaactggaaaaaacataaagtcgatctcgttttagagtgtactggtaaattcaatactaaagaaaaatctgccgaacatattaaatctggagccaaaaaagttcttgtttcagcgccatgcaaaggagctattaatattgtttttggagtaaaccatagtgtattaaaaaaaagtgatcaggtaatttctgcagcttcatgtactacaaattgtcttgcaacagtagcacacgtaataaatgaggaattcggaattgaaagaggttttatgacaacaatacactcttatacaactgatcaaaggttgttggataattcacacaaagatttaagaagagcaagaagtgcgccgaattcgatgataccaacaacaactggagctacaaaatctcttggcgatataatacctagtttaaaaggtaaaattgaaggagtttcaataagagtaccaactccaaatgtatctttaatagaatttgtattttcttcacaaaaaaatttaactgcggataaaataaataattcttttataaatgcctcaaaatcaaaattaaaaaatattttagaagtaaataatgaacctttggtttcttcagattttaatcacaactcaaactcagcgatagtagatactgcattaacaaaagtaatagataataaaatggcaaaagtatctgcttggtacgataatgaatggggttttgcttgtagaatgtgtgatttgactaattatttcggcaagatttaat

SEQ ID NO: 214916 - DNA, 880 bp, Unknown
  Bacterial polypeptide expressing nucleotide sequence isolated from the Sargasso Sea
ctgcgaaattgatgtaggtgaaatagcagttaaatgtccattttttgaagatataaaaaatgacgattctaacataggtgattatattgatgctgaacttgaatctgtaataaataagaaatcaaataggccttctgaacctgcaaacatagtcttgtatggctttggaaggattggaagacttgttgcaagaatgatgacacaaactacaggaccaggtaattattttaaactaagagctattgtcattagaaaagctacagatgacgatatatttaaacgagcaagcttgttaacgaaagattctgttcatgggccttttgatggaacagtaagagttgatgaagaaaactcaagtttagtaatcaatggaaatcctgttaaggttatttacgcctcaggtcctgataaagttaaatattcagatcatggcattaatgatccagttgtaattgataatactggtatttggagagatgaagaagcattatctgttcatattaaatcaggagccttaaaggtaatcttaactgctcctgcaaaaggagatatcaaaaatattgtttacggaataaatgattcaattcttgaagaaaatgatcatcttatatctgctgcatcatgtacaacaaatgcgattgttcctgtgcttaaaaccattaatgatgagtttaaaattaatggaggccatattgaaactgttcacgcatatacaaatgatcaaaatctaatcgataactttcataagaaagacagaagaggaagaggtgctccacttaacatggttataacttcaactggagctgtaaatgcagtagcaaaagctttaccagaacttaaagggaaacttactggtaatgctattcgtgtgccaactcct

SEQ ID NO: 214917 - DNA, 526 bp, Unknown
  Bacterial polypeptide expressing nucleotide sequence isolated from the Sargasso Sea
tatggtaagactcgccattaatggctttggccgcattggccgaaatgtactgcgggcactctatgagagtggccgcaatcagtttatccaggtcgtcgcgattaacgaaatcgctgatcccgatggcatggcacatctgctcaaatacgatacgtcccatggccgttttgcctgccatgtggaacgtcagggcgaacaactcaccgtggccggtgacgttattcgtctgtgtcatcaaaccgaaatcaccggcctgccctgggccgaactgggcgtggatattgtgctggaatgtaccggccagtataccgataaagccagtggcctggcccacatcgaagctggcgctaaaaaagtgctgttttctcagccgggtgcgccggatatggacaacaccattatttacggttgtaacgaagacacgctgttaccagaacataaagtggtgtcgaatggctcctgtaccaccaactgtatagtgccggtgatccaggtgctcgactacgcttttggggtggagagcggc

SEQ ID NO: 214918 - DNA, 589 bp, Unknown
  Bacterial polypeptide expressing nucleotide sequence isolated from the Sargasso Sea
gtcttaaaaaaaagtgatcaggtaatttcagcagcttcatgtacaacaaactgtcttgctccagtagcacatgtaataaacgaagagtttggaattgagcaaggttttatgacaacaatacattcttatactacagatcaaagattgcttgacaactctcataaagatttaaggagagcaagaagcgcgccaaattcaataataccaacaacaacgggagccacaaaatctcttggtgatgtaatacctagcttaaaaggtaaagttgaaggaatttcaataagagttccaactccaaatgtttctttaattgagtttgtattttcttcaacaaaaaatttaactgtagaaaaaataaataattcttttattaaagcttctaaatcaaacttaaaaaatattttagaaataaataatgaaccacttgtttcttctgattttaatcataactcaaattcagcaataattgatgctgcattaacaaaagtaatagataacaaaatggcaaaagtgtctgcttggtacgataatgaatggggttttgcttgcagaatgtgtgatttggctaattatttcggcaagatttaat

SEQ ID NO: 214919 - DNA, 586 bp, Unknown
  Bacterial polypeptide expressing nucleotide sequence isolated from the Sargasso Sea
atgattcacgttggaataaatggttttggtaggattggaagagctgtcaccaagataatatcaaggtcaaaaaatataaaagtttcagtcataaacgaaatagatgatgatataaataacttatattatttattaaaatacgattcaatttacggaaagtttgatcaaaaagttaaagtagataataaaaaaaaaataatatctattggaaaaaataaaataaaaattttttcaaaaaaaaatatagatgatgtaaattggaaaaattttaaattagaccttgtaattgatgcgactggagtagaaaaaaatataattaacgcaaaaaaaataattaacaataagttatctaaggttataattacacattcaccagacaaatatgtagatactactattattttaggtgtgaatgaaaaaagttatagtttcaaaaaacataatattattagttcaagtatatgtgatgccacagcattaggacctgttctaagtgaactggaaaaagtctacggtatcgaaaaaggatttgtaacaactcttcatccaagattatcctaccaaaatatattagacggttcttaaa

SEQ ID NO: 214920 - DNA, 645 bp, Unknown
  Bacterial polypeptide expressing nucleotide sequence isolated from the Sargasso Sea
tggctggcgaagaagccctcaacgttgtttacggcatcaacgatcagctctatgacccgagccggcaccgtttggtgacggctgcatcgtgtaccaccaattgcctggcacccgtggtgaaggtggtgcacgaaggcttcgggatccggcacggaatgatcaccaccattcacgacatcaccaacacgcaggtgccgatcgatgccttcaagagtgatctgcgccgggcacgctccgggctcacctccttgattcccaccacgaccgggtcagccaaggccattgccatgatttttcccgagttgaagggcaaactcaatggccatgccgtgcgggtgcctctgctgaatggctcactcaccgacgcggtgttcgagctggagcagagcgtgaccgttgagcaggtgaatacggcgttcaaggccgcggcggcaggatctctgaaggggatccttggttacgaggagcgacctctggtctcatgtgattacaccaacgactcacgcagttcgatcatcgatgccttgtcgacgatggttgtcaatgacacccaggtgaaggtgtttgcctggtacgacaacgagtggggttatagctgccggatggcagacctcacctgccggctggtggagctcgagtcgtgac

SEQ ID NO: 214921 - DNA, 871 bp, Unknown
  Bacterial polypeptide expressing nucleotide sequence isolated from the Sargasso Sea
agatgggggaaagatatagaggtcaaagaagaagaaataataattggggaaaagaaattagcctacacatcttttaaaaattatcttgatgttccttgggaaaaatcttctgtagatataattttggaatgtacaggaaagaataaaaagccagacaaacttaatccatattttgattctcttgggatgaaaagagtaatagtagcttgtccagtaaaggggattgtagctggagaggaatcacttaatattgtttacggtataaatcaaagtctttatgacccttctaaacataaattagtaactgcagcatcttgcactacaaattgtttagctccgatagtaaaggtaattaatgaaaatttttcaattaagcacggcgctattacaactattcacgatgtcaccaacactcaagttcctgtagatttttataaaagtgatctgaggagagcaagaggatgtatgcaaagtttaatacctactactactggatctgctaaagcaatagccgagatcttcccagaattaaaaggaaaattaaatggccatgcagtaagagttcctctacttaatggttctttaactgatgcagtttttgaattaaataatgaagtgacagttgaacaagtaaatttggcacttaaggaagcttcagaaacttatttaaaaggaattcttggctacgaagaaagacctttagtttctgcagattatgtaaatgactctagaagttcaatagttgatagtttatcaactatggttgttaattcaaatttattaaagatatacgcttggtatgacaacgagtggggttacagctgcagacttgcagatcttactgaatatgtaatcaaaaaagagatttaat

SEQ ID NO: 214922 - DNA, 382 bp, Unknown
  Bacterial polypeptide expressing nucleotide sequence isolated from the Sargasso Sea
ccacttctacaggtgcttcaaatcccttggtgaaattatacctgaactaaaaggaaagcttgaaggtttggcaatgagagtaccaactccaaatgtctcattagtagatttagtttttaactcgaaaagtaaattgtctgtaaataaaattaacaactcctttaaaaaagcttcaaaaaaagaattaaaaaatgttcttgaaacaactaatgaaaaactagtttctattgatttcaaccacaatccaaattcttcaatcgtggatttatctttaactaatgttgtcggagataaaatgggcaaagtttcggcatggtatgataatgaatggggatttgcatcaagaatgtgtgatttagtagaatatattcataaagtttaa

SEQ ID NO: 214923 - DNA, 548 bp, Unknown
  Bacterial polypeptide expressing nucleotide sequence isolated from the Sargasso Sea
atgcactacaaataatgctgctgccatgttatgggtgttaaaaaaattaacgcttattgaatctgcttctattacaacaatacacagttacacctctgatcaaaaaatccacgattcaccacataaagatcttcgtcgagctagatctgcaggtctttctatcattccaaccaccacgggtgcagcaaaaactatcggagatgttttgccctctttaaaagggaaaataaaaggctcaagctttcgtgttccagtggcaaatggatcaattacagaaataacgattataggaaacaaagaggtttctaaagcagatattaatgccgctattaaaaaagcagcaaaaacagagcttaaaaacatcttgtcttataccgaagaaccattagtctcttcagatattattggcttaaaagatagctgtttatttgatggaaatcttactcaggttaataatggcttgataaaagttgttggatggtatgataatgaaattgggtattctaatcgattaatagatttagcaatgaagataaattccttttaag

SEQ ID NO: 214924 - DNA, 175 bp, Unknown
  Bacterial polypeptide expressing nucleotide sequence isolated from the Sargasso Sea
tatgactttgcgtgttgcgattaatgggtttggcagaattgggcgaaactttatgcgttgttggttaagtagaggagcttataccaacatcgaagtagttggtattaatgtaacttcagaccctaaaactaacgctcatcttctcaaatatgattcagtactaggaaaattggat

SEQ ID NO: 214925 - DNA, 409 bp, Unknown
  Bacterial polypeptide expressing nucleotide sequence isolated from the Sargasso Sea
atgactttgcgtgttgcaattaacggctttggcagaattggtcgaaactttatgcgttgttggcttagtagaggggcttacaccaatattgaagtagttggaattaacgttacctctgatcctaagactaatgctcatctattaaaatatgactcagttcttggtcaacttgatggtgttgatattcaatatactgatgatacttttgtaattaataacaagacaattaaatgtttctctgatagaaacccaatgaatctcccctggaaagactggggtgtagatttggttattgaatctactggagtatttaatacagatgtaggtgcaagtaagcacttagaggtaggagctaaaaaagtcatcttgactgctccaggtaaaggtgatggagttggtacttatgtag

SEQ ID NO: 214926 - DNA, 696 bp, Unknown
  Bacterial polypeptide expressing nucleotide sequence isolated from the Sargasso Sea
aagaatctaaaattgaagatataaattggaaaaaatttgatgtcgattatgtatttgaatgtactggaaaatttaattcaaaagaaaaactaaaagcacatttaaaaaatggtgcaaaaaaagtaattgtttcagctccatgtaaaaatgcagataaaactattgtatttggggtaaacgaaagtgttatgacaaaaaatgataaaataatttcggctgcttcatgtactactaactgcttagctccaattgcaaacgttcttaatgaaaattttaaaatagaaaaaggttttatgactactattcatgcttataccagtgatcaaagaattttagacaattctcataaagatcctagaagagctagatctgccaaccaatcaatagttccaacttcaacaggagcttcaaagtctattggtgagattattccatctttaaaaggaaaattagaaggtgttgctatgagagttcccactccaaatgtatcgcttattgaattagttttttgtaccaaagtaaatattgataaagaaaaaattaacaaagcatttaaattagcctctaaaaatcaatctaaaaaagttttagaaataacttctgaagaattggtatcaattgattttaatcataactcagcttctgcaattgtagatgcgtcgctaactaatgtagttggaaaaatacatgggtaaa

SEQ ID NO: 214927 - DNA, 887 bp, Unknown
  Bacterial polypeptide expressing nucleotide sequence isolated from the Sargasso Sea
agttgtttccaatttattaatgtatgactccgtacatggaaaatttgatgcaaaaataaaatttactgaaaaaaatataacgattaataataaaaaaatttctttctctcaacattctaaaattgaagaaattaactggaaacagcacaatgtagatatagtttttgaatgcacaggtaagtttaattcaaaagaaaaattattaactcatttaaaaaatggtgcaaaaaaagttatagtctctgcaccctgcaaaaacgctgacaagactgttgtatttggagtcaatgaaatggagataaaaaaagaagatagtattatatccgccgcttcatgtactacgaactgccttgcgccggtagcatatgttttaaatcaaaattttgaaattgaaaaaggatttatgacaactattcattcatttactagtgatcaaagaattttggataattcacacaaagatccaagaagagctagatctgcaagtcaatcaatagtgccaacgtctacaggagcatcaaaagcaataggtgaaattattccttcgctaaaaggaaagttagagggtatagctatgagagttccaactccaaatgtatctttggtagagttagtcttttgtacaaaaaaagatttgtccattgataaaatcaattctgcgtttcaaaagtatattgaaaagcaaaagcaaaaagtgattgaaataactagtgaaaaacttgtatcaattgacttcaatcataattcagcctcatcaattgtagatgcttcacttaccaatgttgttggaaaaaatatgggtaaaatttctgcttggtacgacaacgaatggggtttctctaatagaatgtgtgatatagctgaatttattcacaaaaattcttaat

SEQ ID NO: 214928 - DNA, 731 bp, Unknown
  Bacterial polypeptide expressing nucleotide sequence isolated from the Sargasso Sea
tttggtaaaaagagcaagcttattaagaagagattcagttcatgggcgctttgatggcactataagggttgacttagaaaatgaactattagttatcaatggaaatcctgtaaagtttatatattcaagctctccaaacgaaattaattattctgaatttaaaattgattcaccaattgttattgataatacaggcatatggagggatgaaaatgatctctctcaacacttaaaaagtggtgcttcaaaggttattctgactgcacctgcgaaaggagacataagaaatatagtttttggtgtcaatgattctgctcttcaggaatcggatactattatttctgctgcatcctgtacgactaacgctattgttccagtattaaaacttattagtgataactatggaatttcaaatggccacattgaaacagtgcattcttatacaaatgatcaaaatcttattgataattttcataagggtgatagaagaggaagaagcgctgcattaaacatggttataacatcaactggtgcagtaaaagcagtatctaaagcaatacccgaacttaaagataaattaactggtaacgctatcagggttccaacacctaacgtaagcctagctgtactagttttaaatattgatacatccgtcactcgagatgatctaaataatttcttaaaagaatcagcctttactagtaaatatagagaaattattggttacacaa

SEQ ID NO: 214929 - DNA, 127 bp, Unknown
  Bacterial polypeptide expressing nucleotide sequence isolated from the Sargasso Sea
atgaaaattggaattaacggttttggaagaattggcagattagttttcagagcattatgggatagagctgatatagaaataactcatataaatgagatagcgggagattcgaatgctgctgcacatc

SEQ ID NO: 214930 - DNA, 908 bp, Unknown
  Bacterial polypeptide expressing nucleotide sequence isolated from the Sargasso Sea
cggaagttttcaaggtacaatacgagtagatgaagaaaattcctgcattatcgcgaatggaaatgtgatccggtttttgtatgcgaattcgcctgatgagctcaattatgaggactacgatattagtcgagcgatattgattgataacacaggggtttggagggatagagatgggttatccaagcacttagagagtaaaggcgtggctaaggttgtcttaaccgctccaggaaagggtgacatgaagaatgtcgtgtctggcgttaattcacatttaattgatgctgaggatgagattatcgctgccgctagctgtacgacgaacgcgattgttcctcctttaaaggcgatcaacgaagaattctcgatagtatctgggcatatggagaccgtgcatgcgtatacacccgaccagaatctgatcgataactatcacaagagtaatcgcaggggtcgcagcgcgccactaaatatggttatcacagagaccggtgcatcttcggctgtgacaaagttgttgccggaattggatgggaaactaactggcaacgcgataagagtgcctaccccaaatgtttctctggcgatcttgaatttgacggttggacgggaaacaacattagaggaagttaacaattaccttagggaaagttgtatccacggcgatatgcaaagacaaatggatttcacatactcaccagaagtggtttcctcagactttgttggcaatcgccacgcctgcatcatcgacggtgaggcaactatcgttaaagataatcgtttggttttgtatgtttggtacgacaacgagttcggttattcctgtcaggttgtaagggtcgtacaaaaaattgcgggaataacctacccgctgatccctaacgatgtttataagatgggattttaat

SEQ ID NO: 214931 - DNA, 508 bp, Unknown
  Bacterial polypeptide expressing nucleotide sequence isolated from the Sargasso Sea
gatgaccaccattcatgcttataccaacgaccagaatctgtcagatgtcgcgcatagcgacccgtaccgcgctcgtgccgctgcgcatagcatgatccccactaaaacaggtgccgcggctgcaataggtttagtgatgcccgagctacagggcaaactagacgggctcgccgtgcgcgtcccaacgctaaatgtctcactggtggacctcaccttcacagcctccagaagcacatccgctgacgaaatcaacgccatcatgctgagagccgccgagtcagatcaatttggcgtattggatttcaacacgcagccacttgtgtccatcgactttaatcacaacagctactcgagcaatttcgacgccaaccacacgcgagtgcaggacaggttggtgaaagtgttggcttggtatgacaacgagtgggggttttcgaaccgcatgctggacacaggcctagcaattggctcaactctggcgaaacagggtttgggtgtcgccgcttag

SEQ ID NO: 214932 - DNA, 1300 bp, Unknown
  Bacterial polypeptide expressing nucleotide sequence isolated from the Sargasso Sea
atgaatgctcatagatttgtaagagaaactgaaaacaatgagatgagtgaatttgaaacctatcaagtcattgtagcacttggtgatttggaattaggaccggctgaagttgatataggaattatagcggcagcttacctgtttgatgataaggatctctctatcgaagatttcgtaaaagaatcggtatatgacttaattggaactaaaggatccatactcgaacaggcgcaggatgttgtcctttatggctttggaagaataggaagactattaacaagaatgttaattcaagattctggtggaggagataatctaaggttgcgagcaatagttgttagaaaggctgtagatgacgacatcattaaaagagcaaatctaatgagaactgattccgttcatggtcccttcaaaggaacaatacgtgttatagaagaagaggacaaattaatcataaatggtaatgaagtaaaaataatttatgctaatgatccttcagagattgactatactgactacggtataaaaaatgctttattgattgataatactggagtctggagaacaaaagagggtttgagtactcatttaaattgcaatggaatttctaaggtactacttactgccccagcaaaagaaggtataaaaaatattgttcatggtatcaataatgaaatcatagagaatgatgaaatcttaggggctgcttcatgcacaacgaatgctatagttccaactttaaaagtcctaaatgatgagtttaatattatctctgggcatatcgagagcgtacattcctacacaaatgatcagaatctaatagataatttccacaaaaaagctcgaagaggaagaagcgcagcacttaacatggtgataactgaaactggagctggaaaagcagtaggtcaggtgcttccagaacttataggcaaattgacagcaaatgctgtaagagttcctactccaaatgtatctctggcaataatgaatcttcaactgggtaatgaaatttcattagaagagctcaataacttccttagacaacaggcttttcattcagatttaaaagaacaaataggttttacaaattctccagaagttgtctctacagatttcgtaggggatagacatgcaggcatcattgattcagctgcgaccatcgtaaatggtgataaatgtgttctttacgtttggtatgacaatgagtatggatataccgctcaacttttaggattggcaaaagagatggttggattaacttatcaaagatatccaaattttagcgaaacatcctagt

SEQ ID NO: 214933 - DNA, 337 bp, Unknown
  Bacterial polypeptide expressing nucleotide sequence isolated from the Sargasso Sea
atgtcagtaagggttgctattaatggatttggaagaataggaagaaatattttaagagctattgttgaaacagctcgagatgacataattgttgttggtataaatgatttaggcccagtagaaactaatgctcatttattaagatatgatagcgttcacggaaagtttccagcagatgttaaaattagtggcaatgatttggatgttggacatggtcctatcaaagttacttctattagagatccaaaagatttgccttggaaagagcttgatgtagatatagctatggagtgtactggaatatttgctagccgagaaaagctttcatgcatataga

SEQ ID NO: 214934 - DNA, 638 bp, Unknown
  Bacterial polypeptide expressing nucleotide sequence isolated from the Sargasso Sea
tggaataaatgataatattcttgaagatgaagactcaataatatcagctgcatcatgcactacaaacgcaatagttccagttttaaaggcagtcaatgacaaatataaaattaaaggtggtcatatagaaactgttcatgcatatacaaatgatcaaaatttaattgataattttcataaaggtgatagaaggggtcgtggagcaccattaaacatggttattactaccacaggagcagttaaggcggttgctaaagccctaccagagcttgaaggaaaacttactggtaatgctataagagttccgacacccaatgtaagccttgcaatactatcattagctcttaaagagaaggttaccgatatacagattaatgattatcttaaatcaattgcttttcattcaaaatatagagaaataattggctttgtaaattctccggaaattgtatcaactgatttttattcaagtccatttgcatcaattattgactctcaagcgacaattgctagtaaaaatagagttaccctttattgttggtatgacaatgaatatggctattctaaacaagttattggacttaccaaaaaagtagctaaaattaatctaccaagattgccaaatccagtaaactaaa

SEQ ID NO: 214935 - DNA, 518 bp, Unknown
  Bacterial polypeptide expressing nucleotide sequence isolated from the Sargasso Sea
caatgaaaatttttcaattaagcacggcgctattacaactattcacgatgttaccaacactcaagttcctgtagatttttataaaagtgatttgaggagagcaagaggatgtatgcaaagtttaatacctactactactggatctgctaaagctatcgctgagatcttcccagaattaaaaggaaaattaaatgggcatgcagtaagagttcctctacttaatggttctttaactgatgcagtttttgaattaaataatgaagtgtcaactgaacaagtaaatttggcacttaagttagcttcagaaacttatttaaaaggaattcttggctacgaagaaagacctttagtttctgcagattatgtaaatgactctagaagttcaatagttgatagtttatcaactatggttgttaattcaaatttattaaagatatacgcttggtatgacaacgagtggggttacagctgcagacttgcagatcttactgaatatgtaatcaaaaaagagatttaat

SEQ ID NO: 214936 - DNA, 799 bp, Unknown
  Bacterial polypeptide expressing nucleotide sequence isolated from the Sargasso Sea
attgactatactgacttcggcataaataaagctttactgattgacaatactggagtctggagaacaaaagaaggtttaaatactcatttaagttgcaatggaatttctaaggtactacttactgccccagcaaaagaaggtataaaaaacattgttcatggtataaataacgaaattatagataatgatgaaatcttaggagctgcttcatgtacaacgaatgctatagttccaactttaaaagtcctaaatgatgagtttaatattatctcaggtcacatcgagagcgtacattcctacactaatgatcagaatctaatagataatttccacaaaaaagctcgaagaggaaggagtgcagcccttaacatggtgattactgaaactggagcgggaaaagcagtaggtcaggtgcttcctgaacttataggcaaattgacagcaaatgctgtaagagttcctactccaaatgtatctctcgcaataatgaatcttcaactaggtaaagaaacttcgttagaagagctcaataacttccttagacaacaggcgtttcattcagatttaaaagaacagatcggttttacaaattctccagaagttgtttctacagattttgtaggggataggcatgcaggcataattgattcagctgcgacaatcgtaaatggagataaatgtgttctttacgtttggtatgacaatgagtttggatataccgcacaacttttgggattggcaaaagagatggtcggattaacttatcaacgatatccaaattttagcgaaacatcctagt

SEQ ID NO: 214937 - DNA, 664 bp, Unknown
  Bacterial polypeptide expressing nucleotide sequence isolated from the Sargasso Sea
gagggtattaaaaatattgtccatggaattaataacgagataattgaagatgattctattttaggggcagcttcttgtacaactaatgccattgttcctacccttaaagtactaaatgatgagttcagcattgtggctggacatattgaaagtgtccattcgtatactaatgatcaaaacttaattgataattttcataaaaaagaacgaagaggtagaagtgctgccctcaatatggtcatcactgaaacaggtgcaggtaaggcagtaggtcaagtattaccagaacttataggaaaacttaccgctaatgccgtgagagtccccacacctaatgtctcacttgcaataataaacttacaattagggcgtgatatcactgttgaagaagtaaatgattttcttagacaaaaagcatttcattccgatctaaaagaacaaataggttttactaattctcctgaagttgtctcaacagactttgtaggtgacagacatgcaggaataattgattcagcagcaactttagttaatggtgataaatgtgttctctatgtttggtatgataatgaatatgggtacactgcacagcttttaggattagctaaagagatggttggtttgacctataaaagatatccaaattttagcgaaacttcctagc

SEQ ID NO: 214938 - DNA, 1018 bp, Unknown
  Bacterial polypeptide expressing nucleotide sequence isolated from the Sargasso Sea
aatgatccgagtcgcaatcaatggttatggtcgtattggccgctcaatccttcgtgctttatatgagtccggaaaacgccagcaaatccaaattgtcgcaatcaatgagttggctaagcctgaagccattgtccatttgacccagtacgatactacccacggtcgatttcagcccagagtcaaattagtcgatgatcagatgctgatcggcgatgacgccatcaaaattctccatgaacctgatccagccaagctaccttggcgcgagatggacatcgatatcgtctatgaagcgacaggtgccattttagatcgacaaagctgcgaggcccatatccacgcgggtgccaaacaagtcttaatcagtcatccttcatcggccgatgtcgacggcacaatcgtttacggtgtgaatcaagaattactgcgcgccgagcatacagtggtctccaatgcctcttgtaccaccaactgtatcgtgcctgtgattgatgtactggataaacactttggtgtgaaaagcggcgcgattaccaccattcattcggcgatgaacgatcagcaagtgattgatgcctatcatgatgacttacgccgcacccgagctgcgggtcagtcaattatccctgttgatactaaacttgcccgtggtattgagcggattttgccgcacatgaaggacaaatttgaggcgatttcggtgcgagtgccgacgattaacgttaccgctatcgatctttcggtaacattagataaaacagtggatattgcgaccgtcaatcaagtgttagaattggccgccaatggacgatttaacggcatcttaggctatactgacgagccgctggtatcctgtgattttaaccatgatccgcgctccagtattgtcgatggcacccagactcgggtgagcgcagggcagttggttaaactgttgctgtggtgcgataacgagtggggctttgccaatcgcatgttagataccagtttagcgatgattgcagctaaacaaagctga

SEQ ID NO: 214939 - DNA, 1018 bp, Unknown
  Bacterial polypeptide expressing nucleotide sequence isolated from the Sargasso Sea
atgatccgagtcgcaatcaatggttatggtcgtattggccgctcaatccttcgcgctttatatgagtccggaaaacgtcagcaaatacaaattgtcgcaatcaacgagttggctaagcccgaagccatcattcatctgacccagtacgacactacccacggtcggtttcagcccagagtcaaattagtcgatgatcagatgctgatcggcgatgacgtcatcaaaattctccatgaaccggatccagccaagttgccttggggtgagatggacatcgacatcgtctatgaagcgacaggcgccatcttagatcgcaacagctgcgaggcccatatccacgcaggcgccaaacaggtcttaatcagtcacccttcttctgccgatgttgacggcactatcgtttacggtgtgaaccaagacttactgcgcgccgagcataccgtggtctccaatgcttcttgtacgaccaactgtatcgtgcccgtcatcgacgtgctggataaacactttggtgtgaaaagtggcgcgattacgactatccattcggcgatgaacgatcagcaagtgattgatgcctatcatgatgatttacgccgcacccgagctgcgggtcagtcaatcatccccgtcgacactaaacttgcccgtggtatcgagcggattttgccgcacatgaaagacaagtttgaggcgatttcggtgcgcgttcccacgatcaacgttactgctatcgatctttcggtaacattagataaaacagtggatattgcgaccgtcaatcaagtgttagaattggccgccaatggacgatttaacggtatcttaggctatactgatgagccgctcgtatcctgtgattttaaccatgatccgcgctcaagtattgtcgatggcacccaaactcgggtgagtgcagggcagttggttaagctgttgctgtggtgcgataacgagtggggctttgcaaatcgtatgctagataccagtttggcgatgattgcagctaaacaaagctgaa

SEQ ID NO: 214940 - DNA, 358 bp, Unknown
  Bacterial polypeptide expressing nucleotide sequence isolated from the Sargasso Sea
tatgaaaaaaattaaactaggtattaatggttttggccgaatcggccgtttagcgttacgtgcttcttttgactggcctgaatttgagtttgtgcaaatcaatgacccggctggtgacgctgctacttttgctcatttactgaatttcgactcagtgcacggccgctggcagcatcaggctgaagcacaaggcaataccgttgttattcaaggccagtctattgcggtcacgcacaataaagccatcaacgacaccgactggtcaggttgtgatgtggtgattgaatgctctggcaaaatgaaaagcacagagttactacaggcttatttagaccagggcgtaaaacgtgtagtagtc

SEQ ID NO: 214941 - DNA, 1318 bp, Unknown
  Bacterial polypeptide expressing nucleotide sequence isolated from the Sargasso Sea
gagatcttaaaagcccatagatttgctcgccaagttgataacaatgagctaagtgaacttgaaacatttcctattcttcagagattggtaactctaaatcttgctgattgtgaaattgatattggagaactaacgcttagatgtccattttttaaagaattaagagataaccctttagaaaaaatagatgaatatctaaataaagaactgagtagtgttatagatgttgaatctaaaagacctgaatcatctaaagatattgtcttatatggtttcggtaggataggaaggttgatggcaaggctattagttgagactacgggtcccggcaattattttagactcagagctgttgttgtaagaaaaggagctagtgaagacgatttacttaaaagagcttcattgcttagacgtgattcggtccatggaaaattctcagggactataagagttgattctgatagtgattcattgattgttaacggaaacccaatcaagtttatatatgctaatggtccagaatcctttaaatattctgattttgatattgataaaccaatagtaattgataatacaggtgtatggagagatgaagctggcttatcaaaacatctagaaactggtgcagataaagtagttctgactgcacctggtaaaggaagtatcaagaatattgtttttggtgttaatgaagagatacttgatgaaaaagatcaaattatttctgctgcatcatgtaccactaacgcaatagttcctgttttaaagattatgaatgataaatataggatcaattcaggtcatattgaaacagtgcattcatacacaaatgatcaaaatttaattgataactatcataaaggagatcgaagaggtaggagtgctgccctgaatatggtgattacatcaactggtgcagttaaagctgttgcaaaagctattcctgagttggagaacaagttaactggaaatgctataagagtcccaacaccaaatgtaagccttgctgttttagtgcttaatctaaatgaagaagtaaataaaagtgaggtaaacacttttttaagagattctgcatttagatcagaatatagaaaaattttaggattcgtaaattcatctgaaattgtttcaacggacttttactcgagtgagtttgcctctgttattgatgcgcaagcaaccattgcagatggtaaaaaagtaactttatattgctggtatgacaatgagtatggatattcgaaacaagtgcttaatttaacacgaaaaatagcgcatattgagctacctattttacctctatcaattaactaat

SEQ ID NO: 214942 - DNA, 622 bp, Unknown
  Bacterial polypeptide expressing nucleotide sequence isolated from the Sargasso Sea
ttgaataaaaaaatcaatattgcactttttggctttggtcgaatcggcagaaatatttttagactcggatatacaaaccctaatttaaattttgttgctataagcgatttggggcatgccgaagcgcttcattatttattaatgagagactctattcatggatctttagatgatgaaattaaagttgatggcaattattttatttctaaaaatcaaaatgtgagaattctttccggtggaaaaccagggactattccttgggatacttttgatgtagactttgttatagatgctacgggtaagtatctaaataaggaagaacttgaacagcatttaaactctggagcaaaaagagttttggttactagaaccccaaacgatgatattgatagaatagttattccaggaatcaatgaagagactgctaatataaatgataaaataatttctgccacgtcctcaactactcaagtattagctttaatgttgaaaatattagataagaatttttcagtaaataaagcaatgatgactacgattcatgcctatactgctgatcagcctcttgcagatgcagttgggatagatttaagacgtagccgttctgcggttgaaaatatta

SEQ ID NO: 214943 - DNA, 964 bp, Unknown
  Bacterial polypeptide expressing nucleotide sequence isolated from the Sargasso Sea
tgttgttgttagagattcagaaaatcctgaagatctaatcaaaagggcaagtctacttagaaatgacagcgttcatggaacatttccaggaacaatcagagtaaacagaaaaaataactctttaatagtcaatggtaacgaaattgtgtttatttatgccagtgatccaagaaaagtagattacaaaaaatatgggatcaaaaaggctactataattgataatactggggtttggagagatgaagatgggcttaaaaaacatgtcaaaaacccatcagttgaaagagttgtgcttaccgctccaggaaagggcaaaattaaaaatattgtatatggcataaatgatcataaagtcagcgaagaagataagattttaggtgctgcatcttgtacaacaaacgccattgttccagcactcaaggttgttgatgataattttaaaatcttaagtgggcatattgagaccgtacatgcctatacaaacgatcaaaacttaatagataactatcattcagctgacagaagaggcagaagtgcggccttaaatcttgttattacagacacaggtgcagcaaaagcaatttctagtatcttgcctgaacttaaaggaaaaataacagctaatgcgatcagagtgccgacaccaaatgtgagtctggctatcatgcaccttaatattaaaaagggtgtttctgttgaagatttaaatcaatgtttcagaaatgcagcctttcactcaaacttaagaactacaattgactattcaaactccttagatgctgtttcttctgatttttatagcaatgaatttgcttgtgtttttgattctcaggcaacaattagcaattttaacaacataactatttactgctggtacgataatgagtatggttattccagacaagttgcaaggcttttaaataaagcgcttggtattaatttagttagatacccgaaacagtag

SEQ ID NO: 214944 - DNA, 190 bp, Unknown
  Bacterial polypeptide expressing nucleotide sequence isolated from the Sargasso Sea
ttgaaaattggcattaacggttttggtcggataggacgtctggcttttcgttgcgcatgggaacacccggcctgggacatcgttcaaataaatgatcccgccggtgatgccttgacttggtctcacttagtcaatttcgattctgtacagggcaagtggcaacacagtgcggcgtcgacgagagaggcaa

SEQ ID NO: 214945 - DNA, 1065 bp, Unknown
  Bacterial polypeptide expressing nucleotide sequence isolated from the Sargasso Sea
tatgactgatcttactaagaatcctgatttacggtctcgagaaaaaattgatgattacttcggcgattggaaatggagagaaggcctagctgaacttatggtcccgatcgtgggaagattatataggcatggggttcatgtcatgatttatggtcagtctcttgttaataaatctcctatcgatatcatgcatgctcataggtttgtcaggcagatagaggcaaatgagttaagcgaacttgaaacatatccgctacttgaaaggttaagtaaaatggacttgcctgattgcgagatcgatttaggcgaacttgcaatgaggtgttcatttttcaaagatcttccatcaaatcccgattcaatagatgattttttaaatgaacaaatctcagttaatgatttaaccatcaataggccagaaaatcctcaaaacatagtactttatggttttggaagaatcggtagattgatggccagaatgttagctcaaactactggaccaggaaattatttcagacttaagggagttgtcgtcagaaaaacaggagataatgatcttgtaaaaagagctagtctactaagaagagactctgtccatggtcgattcgaaggaactatcagagtagatctagaaaatgagttattagttataaacggcaacccagtaaaatttatttattctaattctccaaaagaggttgactattctgagctaggtataaacgctcctattgtaattgataacactgggatatggagaaatgaagaagatttatcacagcatttagatagcggcgcgtcaaaagttattttaactgctccggcaaaaggtgatataagaaatattgtatttggagttaatgatagtgcattaaaagattctgataaaattatctctgctgcgtcatgtacaaccaatgccatagtccctgttttaaaaattattagtgataattatggaatcgatagcggtcacattgaaacagtccattcatacactaatgatcaaaatttaattgataattttcataagggtgacaggagaggaagaagtgctccattaaa

SEQ ID NO: 214946 - DNA, 1009 bp, Unknown
  Bacterial polypeptide expressing nucleotide sequence isolated from the Sargasso Sea
atgaaaaacgttaactttgcaataaatgggttaggtagaataggtaaattactttttcgtgctttatttgataaaggcctatctattaaattggttaatgagataaatggtaatttagagattaattctgaattattaattcatgattctattcatggtaaatgggataaagatatattcctcaataaaaatgatttaaagataaataatagtattattaaattttcaaactataaaaatttaaatgatattcaactatcggatattgatattttaattgattgtactggaaaaaataaaaattttgaatacttaagtaattacataaaaaaaggcgttaaaaaggtaattgtgtctgctccaatagatgatcctaaaatattaaatttagtgtatggcgtaaatcaccatttatataatgaaaatgaacataatatcattacaggagcaagttgcacaacaaattgcatagctcctattgtaaaagttattcatgataatctcaaaattaatcatggatcaataacaacaattcataacatcacaaatagtcaaacaataattgataagccttcttcagatcttagaagatcaagagcatcaatgacaaatcttattccaacaactacaggttctgctaaggccattaatctgatctaccctgaattaaaaggtaaattaaatgggcatgctatcagagtacctgtaattaatgcctctttaacagactgtgtttttgaagttaaacaaaacacttctaaagaagaagttaatgaacttttaaaagaagcatcaaaaaataaattaaaaaacatacttggttatgaagaaaaattattagtttcatctgattatttaaatgatccaagaagtacaataattgatgcagattcaacaatggtagttaatgaaactcatgttaaagtttatgcttggtatgataatgaatggggctacgtaaatagattagctgatatcgcaagtatggttgggaaatcaatttgttaag

SEQ ID NO: 214947 - DNA, 220 bp, Unknown
  Bacterial polypeptide expressing nucleotide sequence isolated from the Sargasso Sea
atccgcatcagaggggagtcttaaaggaattttaggctatactgatgaagatgtcgtctcaagtgatttcataggaagtacttactcttctatatatgatgccggtgcaggaattgggctcaatgacaaattttttaaactggtctcatggtatgataatgaaatgggatactcagcccgcttaattgacttagttgagtacatggaaacacgaaactga

SEQ ID NO: 214948 - DNA, 310 bp, Unknown
  Bacterial polypeptide expressing nucleotide sequence isolated from the Sargasso Sea
agagttcctgtcccgaatggtagtgttgtagaccttgttgttgaggtagagaaagaagtaactattgatgatataaataatgcagtaaaaaaagcctctgaaaatgaacttaaaggaattttagattactcagatattccacttgtttctacagatattctcaagaatcctcattcaagtatttatgatgcttcatcaacacaaatactaaataacaaccatatcaaagtagtttgctggtatgacaacgaatggggttattcaaatcgtgttgtagatttacttgaaaaattatcaaaagatgaatgat

SEQ ID NO: 214949 - DNA, 1504 bp, Unknown
  Bacterial polypeptide expressing nucleotide sequence isolated from the Sargasso Sea
atgggagacgagagggatataaattttcaatccacagagcgtcagaaaagaatcttacccgaagattcatttggtgattggaaatggagagaagcgcttgcagaattaatggttccattaattggttcattgtatagagatggagttaatctcatgatttatggaaaatctctagtgaatgagtctccagttgcaataatgaaagcacataggtttgcaagacagtctgataataatgaattaagtgaatttgaaacttatccaatgatagagtacataagtacactaaatcttcatgattgtgaaattgatataggcgaaattgcagttaagtgtcctttttttgatgagattaaagaagatcaatcaaaaattaaagattatttgaataaagagcttgaatctgtaatagatgtagaaactgttagaccagacgaaccaaagtcaatagttctttatggttttggaaggattggaagacttttggcaagaatgatgacgcaaactactggtccaggtaactactttagaattaaagctattgtaattagaaaagcttctgatgatgatattttcaaaagagcaagtctactttctcgagattctgttcatggaccttttgacggaacagttagggttgatgaagaaaatacatcattagttgttaatggaaacgcaataaaagtaatttatgcttcaagcccagatgaagttaaatatgcagaacacaacattattgatcctattgttattgataacaccggtgtatggagagatgaggatagtctttcaaaacacttaaaatctggagctagcaaagttatattaacagcacctgcaaaaggtgatattaaaaatattgtttttggaataaacgatgatattttaaataacaaggatgccattatatctgcagcttcatgcacaactaatgcaattgtgcctgttttaaaagccataaatgatgaatactcaattaaaggtggacatattgaaacagttcatgcctatacaaatgatcagaatcttatagataactttcataaaggtgatagaagaggtcgtggcgctcctctgaatatggtgattactacaacaggagctgttaaagctgttgcaaaagcgttgcctgaacttgaaggtaaattaactggtaatgccataagagtacctactccaaatgtaagtttagcaatactatcacttcaacttaataaagaggtaagtgtaactcatgttaatgagtacctaagaactgtagcatttcattcacaatatagagaaataattggttatgttaattcatcagaaattgtatcaactgatttttattccagcccttttgcttcagtaattgactcacaagcgacaattgcatcaaataaaagcataactctatattgttggtatgataacgaatatggctattcaaaacaggtacttggattagttaaaaaagtagctaatattgaacttccaagattacctaaaccaattgtttaaa

SEQ ID NO: 214950 - DNA, 880 bp, Unknown
  Bacterial polypeptide expressing nucleotide sequence isolated from the Sargasso Sea
agtccatggtagatgggtgaaagatataaaggttaaagaagaagaaataataattgatggaaagaaattaacctacacatcttttaaaaattaccttgatgttccttgggaaaaatcttctgtagatattattttggaatgtacaggaaagaataaaaagccagacaaactaaatccctattttgatactcttgggatgaaaagagtaatagtagcttgtccagtcaaaggaattgttgcagaagctgaatcactgaatattgtttacggtataaatcaaagtctttatgaccctaccaaacataaattagtaactgcagcatcctgcactacaaattgtttagctccgatagtaaaggtaattaatgaaaatttttctattaaacacggtgctattacaactattcacgatgtaacgaacactcaagttcctgtagatttttataaaagtgatctgaggagagcaagaggatgtatgcaaagtttaatacctactaccactggatctgctaaagctatcgctgagatctttccagaattaaaaggaaaattaaatggacatgcagtaagagttcctctacttaatggttctttaacagatgcagtttttgaattaaataaagaagtgacaactgaacaagtgaatatggcactaaaggaagcttcagaaacttatttaaaaggaattcttggctacgaagaaagacctttagtttctgcagattatgtaaatgactctagaagttcaatagttgatagtttatcaacaatggttgttaatttaaatttattaaagatatacgcttggtatgacaacgagtggggttacagctgcaggcttgcagatcttactgaatatgtaatcaaaaaagagatttaa

SEQ ID NO: 214951 - DNA, 1474 bp, Unknown
  Bacterial polypeptide expressing nucleotide sequence isolated from the Sargasso Sea
tatggcaaaagatcaaccagataagaggttaaggccagaacctcctaaagatccttttggtgattttcaatatcgccaagctttggctgaagaaatgcttcccatgatcggacgtatttatagaagcaatgttcatttacttttatacggcaaaccgttagttaatttatctgtatccgagatcatgaatgctcataggtttgttagagaaacagaaaataatgaattaagtgaatttgaaacctaccaagttattgttgccttaagtgaattagaacttggtcccgctgaagttgatattggtattattgctgcggcctatttattcgaagataaaggacttagtttagatgattttgttaaagagtcggtagaagatctaataggcaaagcaggagcaattttagataaggctcaagatgtagttttgtatggatttggaagaataggtagattgcttactagaatgttgatcgaagactcagcaggcggcgataatttaaggttaagggcaatagtggtaagaaaagcaatcgatgatgatctcataaaaagagcaaacttaatgagaacggattctgtacatggcccctttaaaggaactattagggtagttgaagaagatgatttattaataattaatggtaatgaagttaaggttatctattcaaatgacccaacaaatattaactatcttgagtatggtattgaagatgctttattgatagataacactggagtctggagaacaaaagaaggtttaggacaacatttaaattgtgcggggatatcgaaagtactactaaccgcacccgctaaagacgaaataaaaaatattgtgcatgggatcaataatgaaattatagataatgacgatattttaggcgcagcctcatgcacaacaaatgctattgtgccgactctaaaagtattgaatgatgaatttaaaattaaatcaggacatattgaaagcgtacattcctacacaaatgaccaaaatttaattgacaactttcacaaaaaggaaagaagaggaagaagtgccgctctcaatatagtaattacggaaactggtgctggaaaagcagttgggcaagtgttaccagagctacacggaaaattgaccgccaatgccgtaagagttccaacgccgaacgtttctcttgcaataatgactttagagttgggtaaggaagtgagcgttgagattttgaatgattttctaagacaaaaagcttttcattcagacctaaaagagcaaattggttttacaaattctcctgaggtagtttcaacagattttgtaagtgatagtcatgcaggaataattgattccgttgctactatagttaatggtaataaatgtactctttatgtttggtacgacaatgaatatggatacacagctcaacttcttggtttggctaaagaaatggtaggtttaacctacaaaagatatccaaattttagctaa

SEQ ID NO: 214952 - DNA, 208 bp, Unknown
  Bacterial polypeptide expressing nucleotide sequence isolated from the Sargasso Sea
atgcgtgtaggtattaatggatttggtaggattggaaggtccgtatttcgcgtattaaacaaccgcgatgatattgatgttgttgctataaatgatatatttgacaaggatgcgctcacataccttctgaaatatgatacagtaatgggaagatttcccggtgatatttcgttggactctgatattttgagtgctggaaaccaaaaag

SEQ ID NO: 214953 - DNA, 334 bp, Unknown
  Bacterial polypeptide expressing nucleotide sequence isolated from the Sargasso Sea
tatgactttgcgtgttgcaattaacggctttggcagaattggtcgaaactttatgcgttgttggcttagtaggggggcttacaccaatattgaagtagttgggattaatgttacctcagatcctaaaactaatgctcatctactaaagtatgactcagttcttggtcaacttgatggcgttgatattcaatatactgatgatacttttgtaattaataacaagacaattaaatgtttctctgataggaaccccatgaatctcccttggaaagactggggtgtagatttggtcattgaatctactggagtatttaatacagatgtaggcgcaagt

SEQ ID NO: 214954 - DNA, 805 bp, Unknown
  Bacterial polypeptide expressing nucleotide sequence isolated from the Sargasso Sea
atgaccaaaatagctataaatggtataggaagaataggtaagttagttttaaaattacttatttcaaatgattataaagtaacatatttaaatgaacttaatggaaaccattcttctctattacacagtttagagtttgatagtattcacggtaaatgggacgctagctttaaactagataatgaaaaaatttcaataaacaaaaaagttattcaatcaaccttctcaaaaaatattgaaaacttagatctaaacaacattgatatcttaatcgattgcactggtgcacataataactcatcagatttaaaaaaatattttgacaaaggtgtaaagaaagttgttgtctcagctcctgtaaacgaggaaaacattgcaaatatagcttatggtgtaaatcaaaacatatataacccaaataaacataatataattacagcagcaagttgtactaccaactgcatagcccctatcattaaagtaatacacgaaaatataggcatagttcacggctctataacaacaattcataatttaacaaatagccaaacattagtcgatattcctcaaaataatcttaggagagccaggtctgcagtaaataacttaattccaacaactactggatctgccaaggctatttcactaatttaccctgaactcaaaggtaagttaaatggccacgccgtaagagtgcctttattaaacgcatccttaactgactgcgtctttgaaatgaaacgtcctgttaatgaagacgaggtcaatactatgcttaaaaactcaagtgaaaatgagcttaaag

SEQ ID NO: 214955 - DNA, 892 bp, Unknown
  Bacterial polypeptide expressing nucleotide sequence isolated from the Sargasso Sea
tacatacaaacatttattaaagtacgattctgcctatggaagactcaatatagatattgaatgtgataaagattatttatacataggtgacagaaaaataaaatgttttagagagaacgatccttcaaaaatcccatggaaaaacgaagatgtagaaatagttatagaatcctcaggaaagtttaatgataaaaaaggagcctctaaacatataagagattcagtaaaaaaagttttgcttactgctccaggcaagaacgaagatgtaacaattgtagttggagtcaatgaaggaatttatgataataaaaaccacaatgtaatatcaaattcttcttgtacaaccaactgtttagcaccaatagttaaggttcttgaagataattttggaatagaaagtggtttcatgaccactattcattcatatactaatgatcaaaatattcttgataattcacacaaagatcttagaagggcaagagccggtgccacaagtattattccaaccactactggggcagcaaaatctgttggaaaagtaattaagagtgttgagggtaaaatagatggcatggcttttagggtgcctactccaagttgttcagttgtagacttaaatgtcgttctcaaagaaaaagtaactgcaaataaaatcaacgaagtttttacagaatactctaaaaatcaacttaaaggaattattgatgttacagatgaagagcttgtatcaatagatttcttaggaaatcctcactcatcaataattgatttaaattcaactttagaagtaggaaataatatgttcaaggttgtaggttggtacgataatgagtggggttatgctcacagaacaattgatttactacagatattgttgacaaaattagattaa

SEQ ID NO: 214956 - DNA, 1474 bp, Unknown
  Bacterial polypeptide expressing nucleotide sequence isolated from the Sargasso Sea
ttggtcaaaagattcaatccagataaacgaagaaggccaaagttagatgattactttggtgactggaagtggagagaagcacttgcagaatcaatggttcctatagtcggtaaactctatcgaaacggtgtacgtattttaatgtatggacgtcccctgctgaattgctctgccttggaaataatgaaattacatagattcgtcagggaagttgagggaaatgagcttagtgagattgaaacctatccagtcctagagcaaatttcgaagatgaaattattgccatgtgaaatagatattggtgagatggttgtacatcttttagagaataaacaacttgactcggaaaagtatattgacaaatgtttagcagaacaaaaaagaacaaaaagatcttatcctttgaggccaaaagatattgttatttatggttttggaagaattggaagaatcttaacaagaatacttataagtgatactggtgcaggagcaaaatggaggcttagagcaattgttttaagagattctggacatcatgatgatcttataaaaagagcaggtctattgagaaatgacagcgttcatggtgcgtttccaggaactataagagtgaataaacaaaataattcattgataataaatggaaatgaagtttcgtttatatactcagacaatccaaagaaggtcaaatacaaagattttgatattaaaaaagcgactgtaatagatagtactggagtttggagagatgaagaggggctctcacaacatgtaaaaaacccaagtgttgaaagagttttattaactgctcctgggaagggaaaaattaaaaatattgtttttggagttaacgatgagaaggcatctcctgaggataaaatgcttgcggcagcatcatgcactaccaatgcaatagtccccgctctaaaacttatcgataataattttaagattgtaaacggtcacattgaaacagttcactcatttacaaatgatcagaatttaattgacaatttccatccttctgaccgaagaggcagaagtgctgccttaaatcttgtaattacggatacaggtgctgctaaagctgtagctaaaattctccccgaattaaaaggaaaaattacagcaaatgccataagagttccaacacctaatgttagtcttgcgataataagcctgacagttaaaagaggtgttggtgtagatgaagtgaatgagtgttttagaaaagcagcatttagttcaaatttaagagaaaccattgactactcaaactctatagatgctgtgtcatcggattattacagcaatgaatttgctttagtttatgactctcaagcaacaattagtaattttaacaatgtgactatttactgttggtacgataatgagtatggttacagcagacaggttgtaaggcttttgaaaaaagtattagatgtcaacctagtaagatatccaaagcaataaa

SEQ ID NO: 214957 - DNA, 709 bp, Unknown
  Bacterial polypeptide expressing nucleotide sequence isolated from the Sargasso Sea
caacatttaaaatgcaaaggaatttctaaagtcttattaacagctcctgctaaagacgatattaaaaacattgttcacggcatcaataatgacattatgaacaatgacgatattttaggagcagcttcttgtacgacaaatgcaattgttccaacattaaaagttttaaatgatgaatatgatattaaatcaggacatattgaaagcgttcattcttatactaatgatcaaaacttaattgataatttccataaaaaggaaagaagaggaagaagtgctgcattgaatattgttattacagaaacaggtgctggaaaagctgttgggcaagttttaccagaacttttaggaaaattaactgctaatgctgtgagagttccaactcccaatgtttcattagcaattatgagcttagaattaggaaaaaaagttactgtagaagctttaaatgattttcttagacaaaaagcattccactcagatttaaaagaacaaattggttttactaattcaccagaagttgtatcaactgattttgtaagcgatagtcatgcaggtatagttgattcagctgccacaatagttaatggcaacaaatgcactctttatgtttggtacgataatgaatatggatacacagctcaacttcttggtttagctaaagaaatggtaggtttgacctacaaaagatatccaaattttagctgat

SEQ ID NO: 214958 - DNA, 688 bp, Unknown
  Bacterial polypeptide expressing nucleotide sequence isolated from the Sargasso Sea
actgccactgctcatttgaattcaggtgcaaaaaaagttgtaatttctgctcctagtgcagatgctcctatgtttgtaatgggtgttaatcatcttgatgctaaacctggagatctaatagtatctaatgcgtcatgtacaactaattgcttagcaccaattgctaaagtattaaatgataattttggaatcgaagaaggtctaatgacaactgttcatgcggctactgcttcacagtttactgtcgatggtccatcaaagaaagattttagaggaggaagaagcacactcttaaatataattccaagttccactggagctgctaaagcagttacaaaagtaattccatctttagaaggcaaattaactgggatggcttttagaattccaactgcaaatgtctctgttgttgatttaacagttagattgtctaaaaagacaagctatgagcaaataaaaaaacagatgttagatgcatcacaaaaagatcttaatggaatactaggttattgtgatgatctcgttgtttctcaagattttataggtgataaaagaacatcaattttcgatgcaaatgcaggtatggaactaaaccccaactttttcaaaatagtttcatggtatgacaatgaatgtgggtattcaaacaagctacttgatttatctgaacacattttctcaatataaa

SEQ ID NO: 214959 - DNA, 871 bp, Unknown
  Bacterial polypeptide expressing nucleotide sequence isolated from the Sargasso Sea
atgacaataaaagttggaattaacggcatgggaagaattggcagaatgattgtaaggtcaatttatgaaaatcacaaaggtaaaataattatcaaacatattaataatagatcgagctctgaaatttgtgcaaatttattaaaatatgattcaattcatggtaattttagttctttagtgaaatctggagaaaattacataaaaataaataaagaaaaaatatcttacactcagcacactatgattgatgacataaagtggaaaaaatatggtgttgattatgttttcgagtgcacaggtaaatttaattctaaacatcaattactgccacatttaaaaaatggggtaaacaaagttattgtatcagctccatgtaaaatggcagataaaactgtagtttttggagtaaatcataagaagatccataaaaatgatagaattatttcagcagcttcttgcacaacaaattgtttagctcctgttgcagatgttattaataaaaatttcataattataaatggttttatgacaaccatacatgcttatactagcgatcaaagaatattggataactctcacaaagatccaagaagagctagatctgcgagccaatcaatagtacctacatctactggtgcatcaaaatcaataggtgacatcataccttcattaaaaggaaagttagaagggattgctatgagagtgccgacgccaaatgtttctttggtggaatttatctttaatgtaaaaaaaaatatttctgttaaaagattgaatgactcgctatcatcagcttctaggaggaatcttaaaaatattttagatgtcacaaatgaaaaattagtttcaatagattttaatcaccaataat

SEQ ID NO: 214960 - DNA, 976 bp, Unknown
  Bacterial polypeptide expressing nucleotide sequence isolated from the Sargasso Sea
gttttagaaaagaatctaaacttattagctacagctgaatgtttagataacggaaaacctataagagaatgtatggcagcagatttacctttggttattgatcattggagatattttgctggtgtgattagagcagaagaagggtcaattgctgaaattgctaataatcaatactcatacaattttcatgaaccactaggagttgtcggtcagatagttccatggaattttccattattaatggcaacatggaaattagcaccagctcttgctgcaggaaactgttcggtattaaaaccagctgagcaaacaccagcttctattatggtaatgatggaacttattggagatttattacctcctggagttgttaacatcgtcagtggttttggactagaagcaggtaaacctttagcatcatctaaaagagttgctaaagttgcctttactggtgaaacaacaactggaagattgattatgcagtacgctgcacaaaacattattccaattactttagagttaggtggaaaatcccctaatattttctttgaagacatcatggaaaaagatgatgatttctttgataagtgtattgagggttttgtaatgttcaatcttaaccaaggtgaggtttgtacttgtccaagtagagctttgatacaagagtctatctatgataaattcatggaaagagctattgcaagaacaaaagctgttgttcaagacaatcctttaaaaatggaaaccatgattggagctcaagcatctgtagagcaaatggagaagattaaatcttatcttgagcttggtaaaaaagaaggtgctaaggttcttacaggaggaagtgctgctaaacttaatagtggattggaaaaaggtaattatattcaaccaactatttttgaagctaataacagcatgcgaatttctcaagaagagatctttggacctgttgtatctgtgattaatttaaaga

SEQ ID NO: 214961 - DNA, 1006 bp, Unknown
  Bacterial polypeptide expressing nucleotide sequence isolated from the Sargasso Sea
gatgaaaaaaattaaagttgtaataaacggttttggccgtattggtcgtttggcgttacgtgcttcatttaattggcctgaatttgaatttgtgcagatcaacgaccctgccggtgacgctgcaacctttgctcatctattgaatttcgactcagtgcacggccgctggcagtatcaggccgaagcgcagggccattccgtcatcattcagggccattctattactgtgacgcacaataaagccattaacgacaccaactggtccggttgcgatctggtgattgaatgctctggcaaaatgaaaagcacagcgcagctgcaggcatatttggatcagggcgttaaacgtgtggtggtcagcgctccggtcaaagaagcgggtgtattaaatgtggtgatgggagtcaaccatcagttatttgatgcggcaacacaccagatagtcacagcagccagttgtactaccaactgtctggcgccagtggtcaaagtcattcatgaaaaactcggcattaaacatggctctatcaccactatccacgatttaaccaatactcagtctattctggatacaccccacaaagacttacgccgtgcccgcgcttgtggcagcagtttaattccaaccactacagggtcggctactgctattaccgaaatatttcctgaactcaaaggccggttaaatggccatgccgtaagagtaccactggctaatgcgtctttaactgactgcgtatttgaagtagaacgcgccaccacagcggaagaagtcaatgccttgttaaaagcggcatcagagcaggaactcaaagacattctgggttacgaagagcggccactggtctcggtcgattataaaaccgacccgcgctccagcattattgacgccctgtcgactatggtggtcaatggcactcaagtgaaaatttacgcctggtacgataacgaatggggctacgccaatcgtacagtagagttagccaaaatggtcgggtctatataa

SEQ ID NO: 214962 - DNA, 865 bp, Unknown
  Bacterial polypeptide expressing nucleotide sequence isolated from the Sargasso Sea
tgactcagtaatgggaatattggataggaaggtaagcgttgctggggacaaattaattgtagatgatagaactatacaattaacttcaattaaagaccctgcggagcttccttggaaagaaatggatgttgatgttgttgttgaatcaactggaatatttagagatagtgaatcattaaataagcatcttgatgctggagctaaaaaagtattacttactgtacctccaaaagacgatatagatgcgactatagtcctaggtgtcaatgatggtgatcttaagcctgaaaataaaatagtatcaaatgcatcctgcactacaaactgtttagctcctatagcaaaagttttagatgataactttggaattatatccggattgatgacaactgtacatgcatatactaatgatcaagcattagctgaaactacccatagtgactttagaagagggcgtagtgcaactcaaaatattatccctacatcaacaggtgcagcaaaagctgttggtatggttcttccagaacttaatggtaaattagatggaatggctatgagagtaccagttcctgatggaagcgtagttgatcttgtcgttgaattagaaaaaaaagtctctatagatgatatcaataaggcagttaagaatgctgcagataatgagttaaatggaatattagagtattcagaagttcctcttgtatctactgatattttgaacaatccgcattcaagtatatacgatgcttcgtctactcagttactagaaggaaatcatgtaaaagtagtttgctggtacgacaatgagtggggatattcaaatagagttgtagatttaattggaaacttactagataatggataa

SEQ ID NO: 214963 - DNA, 439 bp, Unknown
  Bacterial polypeptide expressing nucleotide sequence isolated from the Sargasso Sea
tatgaaaattggaattaatggttttggaagaattggcagattagttttcagagcattatgggatagagctgatatagaaataactcatataaatgagatcgcaggagattcgaatgccgctgcgcatttactcgaattcgattcagtccatggcagatgggggaaagatataaaggttaaagaagaagaaataataattgagggaaagaaattagactacacatcttttaaaaattatcttgatgttccttgggaaaaatcttctgtagatattattttggaatgtacaggaaagaataaaaagccagacaaactaaatccctattttgattctctagggatgaaaagagtaatagtagcttgtccagttaaaggagttgttgcagaagccgaatcacttaatattgtttacggtataaatcaaagtctttacgaccct

SEQ ID NO: 214964 - DNA, 715 bp, Unknown
  Bacterial polypeptide expressing nucleotide sequence isolated from the Sargasso Sea
catgactattcgagtggcgattaacggttttgggcgcattgggcgcaacgtattaagggcgttgttagcgcaagagcacagtgacattgagctggtggcttgtaatgacttaggtgaccctaaagtacacgcccaccttctggagtttgataccacccacggtccgttgggcatgcctgtggagttgcaagatgacatcatgaccgtcggacctcaccgcattcaatttttgagtgaaccgcagccgaagaacctaccctggaaagacatgaacatcgatttagtgatggagtgcacggggttgtttgccaaacgtggtaaagctcagtggcactgtgacgctggtgcaaaaaaagtattgatttctgcgccagccggtaaagatgttgatgcaaccattgtgtttggcgtcaatcaccacatgctgcgcgcatccgacaccatcgtttccaacgcgtcgtgcaccaccaactgcttggcccccatagtgaagccactggccgaagcggtgggttttgagcatggcttgatgaccaccattcatgcggtcaccaatgaccaaaagttgactgatgtttaccacagcgacgtgcgtcgtgcccggtcgggcacgcagtccatgattcccaccaaaactggagctgctcaggcagtgggtttggtgttacctgaaatggctggtaagttggatggggtggccatccgcgtgcccact

SEQ ID NO: 214965 - DNA, 955 bp, Unknown
  Bacterial polypeptide expressing nucleotide sequence isolated from the Sargasso Sea
ggtagaaatgtgatgagggcactttatgaaagtggccgcaccgatgaattacaagttcttgcgatcaatgatttgggtgatgccaacagcaatgctcatttgacaaaatatgatactgctcatggccaatttccatattctgtagaagctcgagatgacgcactcattgtcaatggcgatgagattaaagtttttgctgagagagatcctgagcaattgccttggggcgagcttggtgtcgatgttgtgcttgagtgcactggcttttttgcaaaaaaagagctggcaagcaaacacatcaaagctggagcaaaaaaagttgtgatctctgcgcccgctggcactgacatcgatgcaacgattgtatacggagtcaaccatgacaccctttcaaaagatgatactgtgatctcgaacgcatcttgcacaaccaattgtcttgctccacttgtcaaaccgatacatgaaagcattgggctcgagagtgggatcatgacaacgatccatgcttacacaaatgatcaagtcttgaccgatgtcatgcacagcgatctcagaagagcgaggtcagctacgcaatcaatgattccaaccaaaacaggcgcagccgctgcagtcggccttgtattgcctgaactggatgggaaactggatggcttctctgtgagagtgccaaccatcaatgtttcattggttgatctcagctttatcgcttccagagaaacttcggtcgatgagatcaatgaggtggtcaaagcggcatcagatggcgctttaaaaggagtgcttgattacagcgatggaccattggtatcaattgatttcaatcataatcctgcatcttccacatacgatgcaaccatgacaaaagtacaagagggaactttagtgaaagtatgctcttggtatgacaatgaatggggtttttcaaatcggatgcttgatacgacactcg

SEQ ID NO: 214966 - DNA, 798 bp, Unknown
  Bacterial polypeptide expressing nucleotide sequence isolated from the Sargasso Sea
atcaaaacataaaagtattcgctgaaagagacccagctaaattaccttggggaaaagttggtgcagatgttgtcttggaatgtactggtttttttctagataaagcttcagcaggcaaacatattcaagctggggcaaaaaaagtaataatttcagcaccagcaaaagaagttgattttactttggtgcaaggagttaacagcaaagagttaaaaaaagatcataatattatttctaatggttcttgtactacaaattgtttagcgcctgttgccatggttttagaaaaaactttcggaataacttatggttatatgacaactatccatagttatactggagatcaaaagcttttagatacattacataaagacttaaggagagcgagagctactgaaggatcaatgataccaacttctacaggagccgcaaaagcgatgagtttagttttaccaagtctaaaaggaaaattagatggaacagctatcagagttccaacaccaaacgtttctctaattgatttaacattagttactgaaaaagaagtgactcctgaaagcattaataatgctatgagtaaagcagctaaaggagaattaaaaggtattttagatataaatcaaaaacctttagtgtctaaagattttaatcacaatccacatagttcaatatttgatgccacacagacgcaagttgttaaaggaaaatttagtagagttctttcttggtacgataatgaatggggattttctaatcgtatgtgtgatacagctattcagatcgcaactttgatctaat

SEQ ID NO: 214967 - DNA, 413 bp, Unknown
  Bacterial polypeptide expressing nucleotide sequence isolated from the Sargasso Sea
agctgcgtcattgtcaatgatacctacatctacaggagctgcaaaagcagtaggactcgttatgcctgagctttctggtaagttagatggaactgcgattagagtaccaacacctaatgtttcattaatcgactttaaatttgtttctaaaaaaagaatgacagtcgatagtattaataaggctatgtcggctgcagcaaaatcaaataagctaaatggagtcctagatgtaaattctaaaccattggtttcatctgattttaatcataatcctgcctcatcaaattttgatttaactcaaacacaagtaattgatggaaagtttggaagagttttaagttggtatgataatgaatggggcttttcaaatcgaatgtgtgatactgcagttgcgatgaaaagatctagataga

SEQ ID NO: 214968 - DNA, 339 bp, Unknown
  Bacterial polypeptide expressing nucleotide sequence isolated from the Sargasso Sea
aatgataaaagttggaattaatgggtttggtagaattggaagattaattctaagagctttattagaaaattataaggataaaattcaaattgtaggtatcaatgaccttggctctattgatactaatgcacatttaataaaatatgatagtacacacggaactcttccacatgatgtaagcatttctaaagatggttttaaaattttaaatcaaaatataaaagtattcgccgaaaaagatcctgcaagtctgccgtggggtaagataggagcagacatcgttttagaatgcacaggattatttttaaataaagaaactgcaggcaaacatttaaaagc

SEQ ID NO: 214969 - DNA, 601 bp, Unknown
  Bacterial polypeptide expressing nucleotide sequence isolated from the Sargasso Sea
tatgacaattaaagtaggtataaatggctttggccgtattggtcgcctggctctgcgggcagcgtttgactggcctgaagtagaatttgtacagattaacgacccggcagccgatgccgccacgctggcccatttgcttaattttgactctgtgcacggtatctggcatcacactgccgtggcagagggcaataacatcgtgatcaatggcaaagcggtggcagttagcagtaataaagccattgccaataacgactggtcaggttgtgatgtggtgattgaagcctctggcaaaatgaaaagcacggcgctgttagaagcttatctggcacaaggcgtaaaacgggttgtggtcagtgcaccggtaaaagagccgggtgtgctcaatatagtgatgggggttaatcatcagttgtacaacaaacagcagcatcgcatcgtcaccgcggccagctgcacgacgaattgtctggcaccggtggttaaagtgatccatgaaaagctgggcattaagcacggcagcatgaccaccatccataacttaaccaatacccagagcattctggacacaccacataaagacttacgccgcgcccgcgct

SEQ ID NO: 214970 - DNA, 910 bp, Unknown
  Bacterial polypeptide expressing nucleotide sequence isolated from the Sargasso Sea
ttggtgccggcggaaaacctcgcatacctcatgaaatatgattcaacccacggaaggtttcctggaaatgtggaaatagacgggaacaatattctgatcgatgggaaaagcatcgaatgtgtttcagagagagatccggaacaactgggctggggagataaagaggttgattttgtgattgaatccacggggcttttcaccacccttgaaaaagctgagcttcacctcaaagcaggcgccaaaaaagtcgtcatttctgctcctgctaaatccaaggagatcagtacctttgtcatgggagtcaatcatgaaacctatcagccatcttcggatcaggtggtttccaatgcttcctgcacgaccaactgccttgcccctgtggttaaagttttgttagacaactttggaatcgaagaaggattgatgaccacgatccatgcggtcaccgctactcaacccactgttgacggtccctcgaaaaaagatttccgaggagggcgtggcggatttcaaaacatcattcccgcctcaacgggtgctgcaaaagcagtcggtttgtgtatccctgaggtccaggggaaactcaccggaatggcgatgcgggttcccaccgccaatgtctcggttgttgacctaaccgcaaggctttcaaagtcaacgtcttacgatgcgatcaatcaggcgatgaaatccgcttcagaaggcccgatgaagggaatcctgggatacacggaggaagatgtcgtttcctccgatttcaatggaagctcattatcatcgatctatgatgccggggctgggattggactcagcgaccaattctttaaggtggtatcatggtatgataacgaaatgggatattcatgcaggctgttggacctgatcgaatacatggattcccgcgggtaaa

SEQ ID NO: 214971 - DNA, 760 bp, Unknown
  Bacterial polypeptide expressing nucleotide sequence isolated from the Sargasso Sea
atgggaaacaaaggggttgattatgtgatcgaatccacagggcttttcaccacccttgaaaaagctgagcttcacctcaaagcaggcgccaaaaaagttgtcatttctgctcctgctaaatccaaggagatcagtacctttgtcatgggagtcaatcatgaaacctatcagccatcttcggatcaggtggtttccaatgcttcctgcacgaccaactgccttgcacctgtggttaaagttttgttagacaactttggaatcgaagagggattgatgaccacgatccatgcggtcaccgcgactcaacccaccgttgacggtccctcgaaaaaagatttccgaggaggacgtggcggatttcaaaacatcattcccgcctcaacgggcgctgcaaaagcagtcggtctgtgtatccctgaggtccaggggaaactcaccggaatggcgatgcgggttcccaccgccaatgtgtcggttgttgaccttaccgcaaggctttcaaagtcaacgtcttacgatgcgatcaatcaggcgatgaaatccgcttcagaaggcccgatgaagggtatcctgggatatactgaggaagatgtcgtttcctctgatttcaatggaagctcattatcatcgatctatgatgccggggctgggattggactcagtgaccaattctttaaggtggtatcatggtatgataatgaaatgggatattcatgcaggctgttggacttgatcgaatatatggattcccgcgggtaaa

SEQ ID NO: 214972 - DNA, 829 bp, Unknown
  Bacterial polypeptide expressing nucleotide sequence isolated from the Sargasso Sea
tatgaaagtgtcttcagttctagatacctctcatttaaaggtcaaatttccatttaaagctaagtatggaaattacattaatggtaaatttgtagaacctttatctggtaaatattttgataatgttagcccgatatctaatgagaagatctgttcagttgcacgatcaaatgaaaaagacgttgaagctgctctagacgcggctcacgcagctttcccagaatggggaaaaacagacataaccacaaggtcaaacattttatacaagattgctgatgtcttagaaaaaaatcttaacttattggcagttgcagagtgtttggataacggaaaacctattagagaatgtatggcagcagacttacctttggtaattgatcactggagatattttgctggggttattagagccgaagaaggttcaattgcagaaattgctaataatcaatattcatacaactttcatgaacctttaggagtagttggtcaaatagttccttggaattttccattattaatggcaacttggaaattagcaccagcccttgcagcaggaaactgttcagttctaaaaccagctgagcaaacaccagcatcgatcatgataatgatggagcttattggagatttattacctccaggagttgttaacattgttagtggttttggtttggaagcaggtaaacctttagcatcttctaaaagagtggcaaaagttgcatttactggtgaaaccacaactggtagattgattatgcaatatgctgcacaaaacataattccaatcacattagagttaggaggaaaatctcctaaatattttctttga

SEQ ID NO: 214973 - DNA, 470 bp, Unknown
  Bacterial polypeptide expressing nucleotide sequence isolated from the Sargasso Sea
gatggctgatggtggacatcgggcctcgtggagcagaccagccggcacaaccgtcacggcaatacgaggagactgtgtgtccatcaaggtcggtatcaatggattcggtcgaataggccgcaacttcttccgcgctctacttagcagcggtgcaaacgtcgagattgtgggcatcaacgacctcacggacacaaccgcacttgcgcatctactgaaatacgactcagttctcggccgcatcgatgtgccggtggaagcagcagagaacgcgatcgtggtggacggcacatcgatccctgttttcgctgagcgagatccggcgagtctgccctgggcgtcggtcggtgccgccgtagtcgtggagtccaccggaattttcacgtctgccgacgacgcccgcaagcacgtcgatgcgggagcgtcgaaggtgatcatctccgcacccgccaagggcgaggacatcaccatcg

SEQ ID NO: 214974 - DNA, 856 bp, Unknown
  Bacterial polypeptide expressing nucleotide sequence isolated from the Sargasso Sea
atgaaaattggaattaatggttttggaagaattggcagattagttttcagagcattatgggatagagctgatatagaaataactcacattaatgagatagcaggagattcgaatgccgctgcgcatctactcgaattcgattcggtccatggcagatgggggaaaaatatagaggtcaaagaagaagaaataataattgatggaaagaaattagcctacacatcttttaaaaattaccttgatgttccttgggaaaaatcttctgtagatattattttggaatgtacgggaaagaataaaaagccagacaaactaaatccctattttgatactctagggatgaaaagagtaatagttgcttgtccagtcaaaggaattgttgcagaagctgaatcacttaatgtagtttatggcataaatcaaagtctttatgacccttccaaacataaattagtaactgcagcatcctgtaccacaaattgtttagctccgatagtaaaggtaattaatgaaaatttttcaattaaacacggtgctattacaactattcacgatgtcacgaacactcaagttcctatagatttttataaaagtgatttgaggagagcaagaggatgtatgcaaagtttaatacctactaccactggatctgctaaagctatcgctgagatctttccagaattaaaaggaaaattaaatggacatgcagtaagagttcctctacttaatggttctttaacagatgcagtttttgaattaaataatgaagtgacaactgaacaagtaaatattgcactaaaggaagcttcagaaacttatttaaaaggaattcttggctacgaagaaagacctttag

SEQ ID NO: 214975 - DNA, 861 bp, Unknown
  Bacterial polypeptide expressing nucleotide sequence isolated from the Sargasso Sea
catgacagtaaaaatcggcattaatggtttgggtagaataggaagaatgatcattagatcattgattgaaaataataataaaaaagttgaaattaaacacataaacagtagatcagactctgaggttgtctcctcattattaaagtatgattctattcatggaaaatttaattgtgaaataaaatacggagataaccacctaaacataaacggtaaaaaaattacattctcacaacattcaaatttaaatgaaattaattggaagaaacttggtgtggattatgttttggaatgcacaggaaaatttaattcaaaagagaagcttcatactcatataaaaaatggtgcaaaaaaagttattgtttctgcgccttgcaaaaatgctgacaaaactattgtttatggagtaaatcacaaatcaattagcaaaaaagatttagtaatttctgctgcttcttgcacaactaattgtcttgcgccaatcgcatacattttaaataaggaatttaaaatagaaaaaggttttatgacaacaattcattcatatacaagtgaccaaagacttttagataactctcacaaagatccaagacgcgcaagatctgccgctcagtctatggtgccaacttctacaggtgcttcaaaagctattggggaaattattccagaattaaaaggaaagctcgaaggtttggctataagagtgccaaccccaaatgtttcattggtagatcttgtgtttaattcaaaaaacaaattaactataaaaaaaattaatgactcttttaaaaaagcttcaaaaaaagaattgaaaaatgtactatttgcaactgatgaaaagcttgtatcaatcgattttaa

SEQ ID NO: 214976 - DNA, 817 bp, Unknown
  Bacterial polypeptide expressing nucleotide sequence isolated from the Sargasso Sea
aatggccattcgagtaggtattaatgggttcggaaggataggaagaaacttctttcgagcagccaagctctcaggtgcaaaaatagaattcgtagccgtaaacgacctcggctctttagaaacgcttgcgcatctactaaaaaatgactccgtccatggtaagttcggaggatcagtcaaagcagtacgggggggaattagcgttgacggacagaaactcgctgtgctctctgagcgcaaccctggtgacctcccatggggagaccttggtgttgatgtagtgatagagtcaacaggaatctttgccgacaaagaaaaagcccaacctcacattgaagctggagcaaaaaaagtcatcatttcagcgcctgcctcatgtgacgcaacatttgttgttggagttaatgatgatgattatgacccaaagaagcatcatataatttcaaatgcatcctgcaccacaaactgtttcgtccctatgatcaaagtcctcgatgatgcatttggggttcaagagggacttatgaccacaacgcatgcgtacactggtgaccaggcaattgttgatggcccccatagcgacttgagaagagctcgcgcagctgcggtcaacattatccccacaagcactggcgcagcaagagcaacaggattagttcttaaaaaaatgcaaggaaaactcgacggaatagctatgcgcgtgcctatacccgatggatcagttacagacttcacaggaataatgagaaagacaccatcagtagaagcagtaaatgaggcttttaaagaagcggcgcgacggggtcctctcaaaaat

SEQ ID NO: 214977 - DNA, 607 bp, Unknown
  Bacterial polypeptide expressing nucleotide sequence isolated from the Sargasso Sea
tatgacaattcgcatcggtatcaatggttttggccgtattggacgcctagtaatgcgcgcagcagccgagcgcaacgacatcgaagttgttgcaataaacgacttactagacacggactacattgcttatcttttgaaatacgactctacacacggtctattcgacggtgaagttacagtagataacaatagtctagttgtaaatggcaaaactatccgcattacttctgaaagggatccagcagcgcttaaatgggacgaagtagacgttgacgtagttgttgagtcgacaggtttattcctgactaaagaaactgccgcgaagcatattgaagctggtgcgaagaaagttgtaatgtctgcaccgtctaaagacgacacgccaatgtttgtaatgggtgttaaccaagaaagctacgctggcgaaactatcgtttcaaacgcgtcttgcacaactaactgtcttgctccacttgccaaagtgcttaacgataaatttggtatcgtggacggcctgatgacgaccgttcacgcgactactgcgactcaaaaaacggtagatggcccttcaatgaaagattggcgtggcggccgcggcgcgggtcaa

SEQ ID NO: 214978 - DNA, 742 bp, Unknown
  Bacterial polypeptide expressing nucleotide sequence isolated from the Sargasso Sea
tatgagtttaaaagttggtattaatggatttggtagaattggaagaatggtccttaggtccattattgaaaataatagaaaagatattgaggtagtagctatcaataatagaggtaactctgaaattagtagttttttactaaagcatgataccatacatggaaaactaaaagctaaagtatcacattctgaaaaagcaattgaagttaacgggaaaaaaataaatataattcatgaaactgaaatttcaaaaattgattggaaaaaatacaaagttgaagttgttttagaatgtacaggtaaatttaattctaaagaaaaatcttcacaacatattaaatcaggtgcaaaaaaagttttagtttcagctccgtgtaaaggagcaataaatattgtatttggagtgaatcaagaaatactaaaaaaaagtgatgttatagttgccgctgcttcttgcacaacaaattgtttggctccaatagcaaaggtagtaaatgataattttggtatagaacgtggttttatgactactattcattcttatactacagaccaaagattgcttgataattcacataaagatttgagaagagcaagaagtgctcccaattcaatgataccaacaacaaccggcgcaactaaatctcttggtgatattattccagatttaaaaaacaaagtagaagggatatcaattagagttccaacaccaaatgtttctttagttgaattgtttttcttc

SEQ ID NO: 214979 - DNA, 808 bp, Unknown
  Bacterial polypeptide expressing nucleotide sequence isolated from the Sargasso Sea
tatgactttgcgtgttgcaattaacggctttggcagaattggtcgaaactttatgcgttgttggcttagtagaggggcttacaccaatattgaagtagtcggaattaacgttacatcagatcctaagactaatgctcatttattaaaatatgactcagtccttggtcaacttgatggtgttgatattcaatatactgatgatacttttgtaattaataacaagacaattaaatgtttctcagatagaaacccactgaatcttccttggaaagagtggggtgtagatttagttattgaatctactggagtttttaatacagacgtaggtgcaagtaagcacttagaggtaggagcaaaaaaagttatcttaactgcgcctggaaaaggcgatggcgttggtacttatgtagttggagttaatgctgatacatataaacacaaagattacgatattttgagtaatgctagttgtacaacgaactgtttagctccagtagtcaaagttttagatcaaacttttgggattaataaaggtttgatgactacaattcatagttatacaggtgatcaaagaattttagataatagtcatagagatctaagaagggctagagccgctgctacaaacatcgttcctacctctacaggagctgcaaaagcagtcgctcttgtatatccagaaatgaaaggcaaattaactggaattgcaatgagagttccaactcctaacgtttcagcagtagattttgtttttgaatcttcaaaatctgtcacagctgaagaagtcaataatgctctcaaggaagca

SEQ ID NO: 214980 - DNA, 625 bp, Unknown
  Bacterial polypeptide expressing nucleotide sequence isolated from the Sargasso Sea
atgactttgcgtgttgcaattaacggctttggcagaattggtcgaaactttatgcgttgttggcttagtagaggggcttacaccaatattgaagtagttggaattaacgttacctcagatcctaagactaatgctcatttattaaagtatgactcagttcttggtcaacttgatggtgttgatattcaatatactgatgatacttttgtaattaataacaagacaattaaatgtttctctgatagaaatccaatgaatctcccttggaaagactggggtgtagatttggttattgaatctactggggtatttaatacagatgtaggtgcaagtaagcacttagaggtaggagcaaaaaaagtcatcttgactgctcctggtaaaggcgatggcgttggtacttatgtagttggagtcaatgctgatacatataaacataaagattatgatattttgagtaatgctagttgtacaacgaactgtttagctccagtagttaaagttttagaccaaacttttgggattaacaaaggcttgatgaatacaattcatagctatacaggggatcaaagaattttaaaaaatagtcatagagatctaagaagggctagagccgctgctacaa

SEQ ID NO: 214981 - DNA, 856 bp, Unknown
  Bacterial polypeptide expressing nucleotide sequence isolated from the Sargasso Sea
atgacagtaaaaatcggtattaatggcttgggtagaataggaagaatgatcatcagatcattaattgaaaataacaataaaaaagtagaaattaaacatattaacagtagatcaaactctggggttgtctcctcattattaaagtatgactctgttcatggaaaatttaactgtgaaataaaatctggagataactacttaaaattaaacggtaagaatattacgttctcacaacattcaaatttaaatgaaattaattggaggaaatttggtgtagattatgttttagaatgtacaggaaaatttaattcaaaagaaaagctttatactcatataaaaaatggtgcaaaaaaagttattgtttccgcaccttgtaaaaacgccgacaaaactatcgtttatggagtgaatcacaaatcgattagcaaaaaagatttagtaatttctgcagcttcttgcacaactaattgccttgcgccaattgtatacgtgttaaacaatgaatttaaaatagaaaaaggttttatgacaactattcattcatatacaactgaccaaagactattggacaactcccacaaagatccaagacgggcaagatctgctactcagtctatggttccaacttctacaggcgcttcaaaagctatcggagaaattattcctgaattaaaaggaaagcttgaaggtttggctataagagtaccaacaccaaacgtttcattagtagatcttgtatttaattcaaaaaacaaactaacagtaaaaaaaattaatgactcttttaaaaaagcttcaaaaaaggagttgaaaaatgtactatttgcaactgatgaaaagcttgtatcaatcgatt

SEQ ID NO: 214982 - DNA, 865 bp, Unknown
  Bacterial polypeptide expressing nucleotide sequence isolated from the Sargasso Sea
tatgaaaaaaattaaactaggtattaatggttttggccgtatcggccgtttggcgttacgtgcctcttttgactggcctgaatttgagtttttgcaaatcaacgacccagccggtgacgctgctacttttgcgcatttactgaacttcgactcagtgcacggccgctggacgcatcaggctgacgccgaaggcaataccgttgttattcaaggccaacgtattgctgtcacgcacaataaagccatcaacgacaccgactggtcagcttgtgatgttgttattgaatgctctggcaaaatgaaaagctcagctcaactgcaggcttatttagaccaaggtgtaaaacgtgtggttgtcagcgcgccggtgaaagaagcaggcgtattaaacgtcgttatgggggtgaatcatcatctgtttaatgctctcacacataagatagtcacagcagccagctgcactaccaactgtctggcgcctgtggtgaaagtgatccatgaaaaggtggggattaaacatggatctatcaccaccattcacgacttaaccaatacccagtctattctggataccccccacaaagacttacgccgcgcccgcgcttgtggcagcagtttaattccaaccaccacaggttcggctactgctattaccgaaatattccctgagttaaaaggccggttaaatggtcatgcagtgcgggtgccgctggccaatgcgtccttaaccgactgtgtgtttgaagtagaacgtgccaccacggctgacgaagtaaacgccttcttaaaagcggcatcacaacaagaacttaaagatattctggggtacgaagagcgacctctggtctcggtcgattataaaacc

SEQ ID NO: 214983 - DNA, 406 bp, Unknown
  Bacterial polypeptide expressing nucleotide sequence isolated from the Sargasso Sea
atgagtattaatatcgggatcaatggatttggaagaatcggacgtatggtattgcgggcggggatcaataatccgaatgttcgttttgtggctatcaatgatttggtgccggcggaaaatctcgcatacctgatgaaatatgattcaacccatggaaggtttcccggaaatgtggaaacagacgggaacagtattatgattgatgggaaaagcatcgaatgtgtttcagagagagatccggaacaactgggttggggagataaaggggttgattatgtgattgaatccacggggcttttcactacccttgaaaaagctgagcttcacctcaaagcaggcgccaaaaaagtcatcatttctgctcctgctaaatccaaggagatcagtacctttgtcatgggagtca

SEQ ID NO: 214984 - DNA, 628 bp, Unknown
  Bacterial polypeptide expressing nucleotide sequence isolated from the Sargasso Sea
atggttaaagtaggaatcaatggttttggtagaataggtcggcttatcttaagagctttattagaaaattataaaggaaaaattcaagtagtaggcataaatgatcttggttctatagaagctaacgctcatctgataaaatttgacagtacacatggaacattaaaccatgaggtaaaaactaccaaagatggtttccagataggagatcaaaacatcaaagtttttgctgaaagagatccagccaaattgccttgggggaaaattggagcagatgtagttttagaatgcacaggtttctttttagataaaaaatcagctggaaaacatatagaggctggcgctaaaaaagtaataatttctgctccagcaaaggaagtagattttactgttgtgcaaggagtaaacagcaaagatttaaaaaaagaacataatataatttctaatggctcttgtactacaaactgtttagcaccagtcgctatggttttagaaaatacttttggtattgaatacggatatatgaccactattcatagttataccggagatcaaaaattattagacacacttcataaagacttgagaagagctagagcatcaggtgatgcaatgataccaacctcta

SEQ ID NO: 214985 - DNA, 424 bp, Unknown
  Bacterial polypeptide expressing nucleotide sequence isolated from the Sargasso Sea
catgaccaccacacttgccatcaatggatttggacgaattggccgctgtgttctgcgggccttgattgaatcaaaccgcactgatttggacattgtcgccatcaacgacctggccccgatcgaaaccactgcgcatctattgaagtatgatagcgttcacggacggtttcacgccgatgtcgcggtcgatggcgatcatttggtgatcaacggccaccgtattcgcgtcaccgcagaacgcgagccggcgaaactgccatgggcgggggttgatgtcgcacttgaatgcaccgggattttcaccacccgcacaaaggccgctgcgcatctggaaaacggagcgggcaaagtgttgatttccgccccggcagacggcgccgacaagaccatcgttttcggcgtcaatgatgacaccttgaccgcc

SEQ ID NO: 214986 - DNA, 238 bp, Unknown
  Bacterial polypeptide expressing nucleotide sequence isolated from the Sargasso Sea
atgacagttagagttggaattaatgggttcggcaggattggtcgtcttgtcctgagagcaggttggaacacgcctgacatcgatttttgtcatattaatgagataaagggcggggctaaatgtgctgctcatctgcttgaatttgattccgttcaaggccgttttgagcataatatacatgctcataacgataaaataaccctcgatggtcataaaattggattttccggaatttgat

SEQ ID NO: 214987 - DNA, 277 bp, Unknown
  Bacterial polypeptide expressing nucleotide sequence isolated from the Sargasso Sea
aatggtcaaagtaggaattaatggttttggtagaatagggcgccttattttaagagctttattagaaaactataaaggtaaaattcaagtagtaggcattaatgatcttggttctatagaagccaacgctcacctaataaaatttgatagtacacacggaacattaaatttcgatgtaaaaacaactaaagaaggttttcaaataggagatcaaaatattaaagtttttgctgaaagggatccagctaaattacctttggggaaaaattggagctga

SEQ ID NO: 214988 - DNA, 562 bp, Unknown
  Bacterial polypeptide expressing nucleotide sequence isolated from the Sargasso Sea
tactttagtgcaaggagttaacagtaaagagttaaagaaagatcataatattatttccaatggttcttgtactacaaattgtttagctcctgttgctatggttttagaaaaaacttttggaattacatatggctatatgacaaccatccacagttatacaggtgatcaaaaacttttagatacattacacaaagatctaaggagggctagggccacagaaggctcgatgatacccacttctactggagctgctaaagcgatgagtttagttttacctagtttaaagggtaagttagatggaacagctataagagttccaacaccaaatgtgtctttaatagacttaaccttagtaactgaaaaagaggtaactccaaaaagcataaacgatgcgatgagcaaagctgcaaaaggagatttgaaaggcattttagatattaatcaaaaacctttagtctctaaagattttaatcataatccacatagctcaatatttgacgctacacagactcaagttgttaaagggaaatttagtagagtactttcctggtatgataatgaa

SEQ ID NO: 214989 - DNA, 703 bp, Unknown
  Bacterial polypeptide expressing nucleotide sequence isolated from the Sargasso Sea
ttagtgattgatcactggagatattttgctggagtaattagagcagaagagggatctgttgctgaaataagtaattcacaatactcttacaatatacctgagcctttaggtgttgtggctcaaatagttccatggaacttcccattattaatggcgacatggaaattagctccagctttagctgcaggaaattgttcagttcttaaaccagcagaacaaacaccagcatcaattatggttatgatggaactaatcggagatttattacctccaggtgttgtaaacatcgtaagtggtttcggtttagaagctggaaaacctttagcttcatcaaaaagagttgcaaaagttgcattcactggcgagactacaactggaagactgatcatgcaatatgctgcacaaaacattattccaataacacttgagttaggtggaaaatctcctaacattttctttgaggatatcatggataaagatgatgatttcttagataagtgtgttgaaggttttgtaatgttcaacttaaatcagggtgaggtttgtacttgtccaagtagagcattagtccaagaatctatttatgataaattcatggaaaaatgtatcgctagaacaaaagctgttatccaagataatccattgaaaatggaaactatgattggagcacaagcttcagttgagcaaatggagaagattaaat

SEQ ID NO: 214990 - DNA, 910 bp, Unknown
  Bacterial polypeptide expressing nucleotide sequence isolated from the Sargasso Sea
tgatatagtggctattaatgaattaggtactattgactcaagttatcatttaattaattttgatagtactcacggtagacttccagtgaatatccaaaaaacaaaaactggcttaaaatataaaaataaaaaaatctcttttttttcagaaataaatccaaaaaatttaccctggaaaaaattaaatgttgatgtagttttggagtgtagcggtgttttcacttctaaagaaaaatctcaagctcatatagaggcaggggctaaaaaggtaatcatttcagcgccagctgcaaatgcagatgcaacaattgttcaaggagttaatagcaacacattaaaaagaaaacataacataatatcaaacggatcttgcactactaactgtttggcacctgtagcaatggtcttggataaaactataggaatacaatcaggatttatgacaacagtgcatagttttacaggagatcaaagaactgttgatcaaacacatagtgattttaggagagccagaacagcttcaacttcaatgatccctacttctacaggtgcagcaaaagctattggcttggtcctccctaaattgataggaaaacttgacggaacagctattagggttcctactccaaatgtttcgttaatagatttaacatttttaagtaaaaagaaaacatctgtagaatttattaataaatcaataattaatgcttcaaaaaaaacaaatcttagcggtatattaactattaatgatctgccacttgtatcaattgattttaatcataattcaagtagctctatttttgatttaacacaaacccaagttgttaacgataaattttgtagaatattatcctggtatgacaatgaatggggtttttcaaatcgtatgattgatacattgatgtgttta

SEQ ID NO: 214991 - DNA, 373 bp, Unknown
  Bacterial polypeptide expressing nucleotide sequence isolated from the Sargasso Sea
cactggtgcagcaaaagccgtaacaaaagttattccttctctagaaggaaagattacaggaatggcatttagagtaccaacagctaatgtgtctgtagttgacttgactgtcaaacttgcaaaagaaacaagttacgaagaagtaatgtcaactcttaaaaatgcatctgaaaatgaacttaaaaacattttaggttatactgaagaggcagttgtttcacaagactttatcggagacagtagaacttcaattgtagatgcaaaagcaggtatccagttaaattcaaaattttacaaaatcatttcatggtatgataatgaagctggttactcaaataaattattagatttagctaaacatttttgtagttaa

SEQ ID NO: 214992 - DNA, 488 bp, Unknown
  Bacterial polypeptide expressing nucleotide sequence isolated from the Sargasso Sea
tatgacgttaagagtagggataaatggctttggtcgcatcggcaggaatgttctcagagctataattgaatctcaaagagaagatatcaaggttgttgcaataaacaacagatcatcaattcaggtttgcgctcatcttttgaagtacgactcaattcatggaagatttccatttgatgtgagtacaaatgaaaacattatagcagtagacaataataatattcatgtttcaaatgaattaactattgatgaaattcgatgggataaaaataatgttgatctagtcatggagtgtacgggtaagtttaactctgcaaaagaatgccaaaaacatatttctgctggtgcaaaaaaagttttaatttctgcacctgcaaaagatgcagacttaacagtagtatatggtgtcaatgagcaagatataaattctagtcacaacataatttcaaatgcatcttgtacaacaaactgcctagcccctatagcca

SEQ ID NO: 214993 - DNA, 691 bp, Unknown
  Bacterial polypeptide expressing nucleotide sequence isolated from the Sargasso Sea
atgaaaaaaattaaagtgggtatcaacggctttggccgtataggtcgtttggcgttacgcgcctcttttaactggcctgaatttgaatttgtgcagatcaacgaccctgccggtgacgctgcaacctttgctcatttactgaatttcgactcagtgcacggtcgctggaatcatcaggctgaagcgcagggcaattccgtcatcattcagggtcattctattgctgtgacgcacaataaagccattaacgacaccgactggtcaggctgccatctggtgattgaatgctctggcaaaatgaaaagctcagcacagctacaggcttatttagatcaaggcgtaaaacgtgtggtggtcagcgcgcctgtgaaagaagctggcgtattaaacgtagtgatgggtgtcaatcaccagttatttgatgcggcaacacacaaaatagtcacagcagccagctgcactaccaactgtctggcgcctgtggtcaaagtcattcatgaaaagttgggcattaaacatggctctatcaccactatccacgatttaaccaatactcagtctattctggatacaccgcacaaagacttacgccgtgcccgcgcttgtggcagcagtttaattccaaccactacagggtcggctactgctattaccgaaatatttcctgagctaaaaggccggttaaatggcc

SEQ ID NO: 214994 - DNA, 553 bp, Unknown
  Bacterial polypeptide expressing nucleotide sequence isolated from the Sargasso Sea
tacacaaattgtcttgctcctgtagcaaagatcttagatgaaggactgggtatagaaagtggatttatgactactatacatagttatacaggtgatcaaagaaccgtagaccaaaaccatagcgatatgagaagggctagaggggctgcaatttctatgattccaacttcaactggagcagctaaagctctaagtttagttttaccaaaacttaaaggaaagttagatgggacagcaataagagttcctacacctaatgtttctttgatagatttaacttttgtatcaaagaaaaaagcaacggtagaaaaaataaataacttaattttaaaagctagcaaatctaaaaaattaaagaacattctcacaactaatgatttacctctagtttcaatagactttaatcataattcaagtagttcgatatttgaccttacgcagacacaagtattgaataataaattttgcagggtattatcatggtatgataatgaatggggtttttcaaatagaatggtagaaaccatgatggatttaaaaaaatttatctagg

SEQ ID NO: 214995 - DNA, 436 bp, Unknown
  Bacterial polypeptide expressing nucleotide sequence isolated from the Sargasso Sea
tatggtcaaaattggaattaacggattcggtagaattggtcgattaattttaagagccttattagaaaactataaaggcaaaattcaagtagttggaataaatgacttaggctctgttgaagccaacgctcatttaataaagtacgatagtactcatggaatattaaataacgatgtaaaaacaaccaaagaaggttttcaaattggtgatcaaaatataaaagtttttgctgaacgcgatcctgctaatttgccttggggcaaaataggagctgacattgttttagaatgtacaggtttatttctaaataaagaaacagcaggtaaacatttaaaagctggagcaaaaaaagtaattatttcggcacctggaaaagatgttgatttcaaaattgttcagggtgtaaacagcaagcaacttaaaaaagaacataat

SEQ ID NO: 214996 - DNA, 500 bp, Unknown
  Bacterial polypeptide expressing nucleotide sequence isolated from the Sargasso Sea
aatgactgttcgagtaggcataaacggctacggtcgtattggccgcaacatcctacgagctttacatgaatcggagggagaaaaacagatcgaaattgttgctataaatgacctaggcgacgccaaaacgaatgcccacctgacacgattcgacaccgctcatggccgtttcccaggaactgtagagttaggggacaaagagatgatcgttaacggaaaacaaatcaaggttttatcagaaagagaccctgctaaattaccttggggtgatctaggagtggatgtggtgcatgagtgcactggtttttttgcaaataaaaccgccgcttcagctcatctccagggtggcgcgcagaaagtccttatctcagcgccggcaggaaccgaagtagacgctacaatagtatatggagtgaaccattcaaaccttaaagcaacagacgagattgtctcaaacgcttcttgtacgacgaattgccttgcacccctcgtgaagcctc

SEQ ID NO: 214997 - DNA, 529 bp, Unknown
  Bacterial polypeptide expressing nucleotide sequence isolated from the Sargasso Sea
atggcattaagagtagggataaatggctttggtcgcatcggcaggaatgttctcagggctataattgaatctcaaagagaagatattaaggttgttgcaataaacaacagatcatcaattcaggtttgtgctcatcttttgaagtacgactcaattcatggaagatttccatttgatgtaagtacaactgaaaatattataacagtagacaataataatattcatgtttcaaatgaactaactattgatgaaattcgatgggataaaaatgatgttgatctagtaatggagtgtacgggtaagtttaactctgcaaaagaatgccaaaaacatatttctgctggtgcaaaaaaagttttaatttctgcacctgcaaaagatgcagacttaacagtagtatatggtgtcaatgagcaagatataaattcaagtcacagtataatttcaaacgcatcttgtacaacaaactgcctagcccctatagctaaagttttaaatgataattttggaattgaagagggtttcatga

SEQ ID NO: 214998 - DNA, 612 bp, Unknown
  Bacterial polypeptide expressing nucleotide sequence isolated from the Sargasso Sea
aatggctattaaagttggaataaatgggtttggtagaataggtaggcaagtattaaggatagctctttcaaataaagatatagaagttgtggctattaatgacatagcagatttaaaaacttgttctcaattattaaaatacgactctatatttggtgtcttagatgccgatattgatttgcttgatgatgggataagtattgatggaagaaaagttcgttttttttctgaaatgtctccaagtgacattaaatggacagatgagaaatgtgacatagtaattgaatcaactggaatatttactactcaagaaaaagcttcaatgcatttgggcgggactgttaagaaagtagttatttctgcccctgccagcggagatgtggatttaacgacagttatgggtgcaaatgattcgttatataataacaaaaagcacaatattatttctaatgcatcctgtacaacaaattgcttagcaatgattgttaaagttcttagggatagctttggtttacaaagtggtcatatgacaactgttcattcttatactaacgaccaacctatagttgattctccacacaaagatttaagaagagcgagagccggtggctt

SEQ ID NO: 214999 - DNA, 776 bp, Unknown
  Bacterial polypeptide expressing nucleotide sequence isolated from the Sargasso Sea
aatgagaattgcaataaatggttttggcagaattggaagaaacattctgcgctcctatctggcgagagaacaggtctggaaaaaattcaatcaaatagaaattgttgctattaacgacctcggatctccaagcgataatgcacatcttctgaaatacgattcagtgcatggcaaacttaagaatgaagttgaatgctcagaaacctcaataaaagttgacggttttgacattgcatgtttttcagaaaaggatccagcaaaacttccatgggctaaattaaatatagatattgtatttgaatgcactggtttatttacaagcaaagataaagcagaacaacatattcaggcaggtgccaaaagagttttaatttcagcaccagggcaaaatgttgataaaaccatcgtcttcggtgtgaatcatgagacgttaacaaatgaggatcgaattatttcaaatgcatcttgcacaaccaattgtcttgctccattagcaaaaataatccatgaagaatataaaattttaaatggcctggtaaatactattcatgcttataccaatgatcaatccttgttagatgttcatcactctgatcttttacgagcaagagcagctagcttatcaatgattcccacaaaaacaggtgctgcttcagcggttggcgatgtcttgccagagttaagaggcaaactagatggacttgcggtgagagtcccagtttcaaatgtctcgctattagattttacctttacaactgagaaagatttttcaattg

SEQ ID NO: 215000 - DNA, 877 bp, Unknown
  Bacterial polypeptide expressing nucleotide sequence isolated from the Sargasso Sea
aatgacaattaaagtagcaataaatggttttggtagaattggcagaaatgtgcttagggcaaattatgagagtggttatgataaagacatagagattgttgcaataaatgatttgggtgatgctgaaattaatgcacatttattgaaatatgatactgctcatggaccatttaataaaagcgtagaaataaagaataaaaaaatccttatagatggtaaagatgaagttactgtattaagtgaaagaaatccagaaaagttaccctggaaagatctcggcatagatgttgtattagagtgtacgggtttctttgcctcaaaatcagcttcaatgtcacatattaaggctggtgctaaaaaggttttaatatctgctccggcaaaagaagtagatgcaactgttgtatacggtgtcaatcataatattataaaaactgaggatcaggttgtttctaatgcttcatgcaccactaattgtttagctaccctaatcaaagatatacatgaaaaattgaatattgagaatggcatcatgactacaatacattcatatacaaatgatcaagtactaacagatgtttatcactctgacttacgacgagcaaggtctgcaacacaatccatgattccggcaaaaacaggagcagcttcggctgttggcttagttcttcctgatttgaatggcaagcttgatggatttgcaatcagggtccctactataaacgtttcattagtagatttatgttttaatatttctaaaaaatcttccatcagtgaacttaataatataattaaaaatgcttcggaaactagcctaaagggaattttaggttataatgtcgatccattagtttctattgattttaatcactcttct

SEQ ID NO: 215001 - DNA, 377 bp, Unknown
  Bacterial polypeptide expressing nucleotide sequence isolated from the Sargasso Sea
tggtgcagctaaagctatgagtttagttttaccaagcttgaaaggaaaattagatggaactgcaattagagttcccacacctaacgtttcactaatagacttaactttggtcactgaaaaagatgtaacacctgaaataattaataacgcaatgataaaagcagctgagggtgaactgaaaggtattttagatgtaaatcaaaaaccattggtttcaaaagattttaaccataatccacatagttcaatttttgatgtgactcaaactcaggtagtcaaaggaaaattcagtagagtcctttcttggtatgataacgaatggggattttctaatagaatgtgcgatacttctattcaaattgctggactaatttagt

SEQ ID NO: 215002 - DNA, 223 bp, Unknown
  Bacterial polypeptide expressing nucleotide sequence isolated from the Sargasso Sea
aatgatcaaagttggaataaatggatttggaagaataggaagattaattttaagagcccttctagaaaattataaaggtaaaattcaagttgtaggtataaatgaccttggctcaatcgaagctaatgcacatttaattaaatttgatagtacacatggaactttaactcaagatgttaaaacttcatctgaaggatttcaaataggagatcaaaacataaaa

SEQ ID NO: 215003 - DNA, 867 bp, Unknown
  Bacterial polypeptide expressing nucleotide sequence isolated from the Sargasso Sea
ttttagaaaaaaaaataaaaaatgttcaaatagttgcaattaatgaattaggtagtttagaatctagcatgcatttacttaaatatgatagtattcatggcataattccatataatatttcaaaaacaaataaaggcataaaacttggatctcataatattaatttttattctgaaaatgatccaagcaaacttccatggaagtctctgaatatagatgtagttcttgaatgtagtggtgtttttacttccaaagaaaaaactatagctcatattaatgcaggagcaaaaaaggtgataatatctgcgccaggaacaaatgttgataaaacagtagttcagggtgtgaataatcatgaactaaataaaaagcataatattatttcaaatggatcatgtactactaattgtttagccccattggcaatggttttagataaaggtttgggaattgagtcaggctttatgacaacaattcatagttacactggagatcaaagaacagttgatcaaactcataaagatttaagaagagcaagagcagcagctgagtcaatgataccaacttctactggtgctgcaaaagctctaagtttagtactacctaaactaaaaggtaagttagatggtacagctataagagtaccaactcctaatgtttcgcttatcgactttacctttattagcagaaaaaaaacttctcctaatcaaattaacacactagttttgaaagcatctaaatctaaagctctaaaaaatatattaagtgttaacaatatgcccttggtttcaatagattttaatcataatcataacagctcaatatttgattcaactcaaactcaagtggtaaagaaaaatttgtaga

SEQ ID NO: 215004 - DNA, 508 bp, Unknown
  Bacterial polypeptide expressing nucleotide sequence isolated from the Sargasso Sea
gatagctttggcattgaagaggcgttgatgactactgttcatgctgtaactgctacacaatttacagttgatggcccttctaagaaagattacagaggaggtagaagttctcttttaaacataattccagcgtcgacaggagcagcaaaagctgtaactaaagtcatcccatcattggagggaaaaattactggaatggctttcagagttccaacagcgaatgtgtctgttgttgatctgactgtaaaactaagtaaagaaactagttatgaagaagtaatgaaaactataaaaaaagcttctgaaagtgaactacataatattttaggatatactgaagagccagtagtttctcaagatttcattggagatagtagaacatctattgtggatgctaaagccggtatacaattaaattcaatgttttataaaataatatcctggtatgataacgaggctggatattcgaataaattgttagacctagctaaacatttttccagttaac

SEQ ID NO: 215005 - DNA, 181 bp, Unknown
  Bacterial polypeptide expressing nucleotide sequence isolated from the Sargasso Sea
catgagcatcaaagtaggtatcaacggttttggccgcatcggccgtctggcattacgcgcggcctggaactggccagaactggagttcgtgcagatcaacgacccggcaggcgacgccgccacccacgcgcacctgctcaatttcgactcggtgcatggccgctggcagcatgaggcgagc

SEQ ID NO: 215006 - DNA, 586 bp, Unknown
  Bacterial polypeptide expressing nucleotide sequence isolated from the Sargasso Sea
catgcttatatctccagaacataaaataatctcgaatgcttcgtgcacaaccaattgtctggcgccaattgcgcatgtcctgcataacacatgtggtattaaacaaggtttcatgactactattcacagctacactggcgaccaacgtattctggatacagaacataaagatttatatcgctcgcgtgccgctgcattaaacatgattcccactacaactggagctgccaaggctgtcggacttgttttaccagaactaaacggcaaacttgacggagttgctatccgtgttccaacaccaaatgtatctgcggttgattttgtgtttgaacccgtcaagcaaatatctgccgacgaaataaatcaatttattaaaatcgctgctgacggcgaattaaaaaatgttttagattttacagaacgtgagttggtatcaacagattttaatcatcacccagcatcttctattgcccacattgatcaaacacgtgtgatgccagatggaatggcgcgcattttcagctggtatgataatgagtggggtttctctaatagaatgcttgatactgtgtcgtgcatgggatga

SEQ ID NO: 215007 - DNA, 466 bp, Unknown
  Bacterial polypeptide expressing nucleotide sequence isolated from the Sargasso Sea
ctgagagttggaattaacggatttggacggattggccgcaatgtgctgcgcgccttttgggaaacttctcggtccgatattgaaattgtcgcggtgaatgatattgccgatatccagacagcggcctttctgctggaatatgattctgtccatggtcgtctggcagcgccagtcacctatgatggtgatgtgatcaggaccgccaagtgtgaggtcagatatttcagcgagagagatccgtccgcattgccttggggaaagctcggtgttgacgttgttttcgaatgtacgggcattttcactgcggcagagaaagctagagtgcatatcgaggcgggggcaaagaaggttctgatttcggctccctcgagcggcgctgatatcaccgtcgtctatggggtgaatcatacggcgctccgccccgaacaccggatcatctccaacgcctcatgcaccacgaactgtc

SEQ ID NO: 215008 - DNA, 745 bp, Unknown
  Bacterial polypeptide expressing nucleotide sequence isolated from the Sargasso Sea
atgaagatagcaattaatggttttggtagaattggaaaattagtctttagagcttttttagaacaaaaattaaaaggagtagaggttgtagctataaatgaacttggaagtttagactccagtatacatctattgcaatttgatagcttacatggaaaactacctattgatataaaaaaaactaaagatggtataggatacaaaaataaaaaaataaaatttttaagtgaaagaaaccctttaaatcttccatggagaaaacttaaagtggatgtagtattagaatgtagtggaatttttacaagtaaagaaaaagcgactgcacatttagttgcaggagcaaaaaaagtaataatttctgctcctggctcgaaagttgatgcaacaattgttcaaggggtgaataaccaaattttaagcaaaaaacacaaaataatttcaaatggttcatgtacaactaattgtttagcaccagtagcaatgattttagacaaaggagttggaattgaaaatggtttttgcacaactattcatagttatactggtgatcaaaaaattcttgatcagagtcacagtgatttaagaagagcaagaggtgctgcaatatctatgatacctacatcaactggtgcagctaaagctcttagcttagttcttccaaaaatgaaggataaacttgatggaacagctataagagttccaactcctaatgtttctctaattgactttactgtcataagtaaga

SEQ ID NO: 215009 - DNA, 454 bp, Unknown
  Bacterial polypeptide expressing nucleotide sequence isolated from the Sargasso Sea
tatgagcatcaaggtaggtatcaacggttttggtcgcatcggccgcctggcgctgcgcgcagcctgggactggccagagctggagtttgtgcgcatcaatgacccggcgggcgacgcggcgacgcacgcccacctgctcaactttgattcggtgcacggccgctggcagcacgaggccggcagcaacgccgagcaggtgttgatcgagggcaaagcgatcacggttacggccaatcgcgcgctggccgataccgactggagcgactgcgatctggtcatcgaggccagcggcaagatgaaaaccctggccagcctgcagccgtacctggatcagggcgtcaaacgggtggtggtctgtgcgccggtcaaggagccgggcgcgctgaatgtggtgatgggcgtcaaccaggaccgctttgacccgcaacagcaccgcattgttaccgccgcctcc

SEQ ID NO: 215010 - DNA, 841 bp, Unknown
  Bacterial polypeptide expressing nucleotide sequence isolated from the Sargasso Sea
ggaaattgttcagtttttaaaccagcagaacaaacaccagcatcaattatggttatgatggaattaattggagatttactacctccaggagttgtaaacattgttagtggttttggtttggaagcaggaaaacctttagcttcatctaaaagagttgctaaagttgcattcactggtgaaactacaactggaagactgatcatgcagtatgctgcacaaaacattattccaataacacttgagttaggtggaaaatctcctaacattttctttgaggatatcatggataaagatgatgatttcttagataagtgtgttgaaggttttgtaatgttcaacttaaaccagggtgaggtttgtacttgtccaagtagagcattagttcaagaatctatttatgataaattcatggaaaaatgtattgctagaacgaaagctgttatccaagataatccattgaaaatggagactatgattggagcacaagcttcagttgagcaaatggagaagattaaatcttatctagatcttggtaaaaaagagggtgcaaaagttcttgctggaggtgaagttggaaaactaaatagtggattggaaaaaggaaattatatccaaccaactatttttgaaaccaataacaaatctaggatttcacaagaagaaatttttggacctgtagtatctgtaattaaatttaaagatgaagcagaagcattagaaattgctaatgatactctttatggtttaggcgcaggtgtttggactagaaatggaaatattgcttacagaatgggtagagcaatacaagcaggaatagtatggacgaattgttatccatgct

SEQ ID NO: 215011 - DNA, 331 bp, Unknown
  Bacterial polypeptide expressing nucleotide sequence isolated from the Sargasso Sea
atggttaaagttggcatcaatggttttggaagaataggtaggttaattttaagagctattttagaaaattataaaaataagattcaagttgttgcaattaatgatttaggttcaatagaaactaacgctcacctaattaaatacgatagtactcatggcatcattaatgaagatattcagactacaaaggagggttttaaaatcagcaatcaagaaataaaagtttttgcagaaaaagatccagctaatatcccttggggaaaaataggtgttgacgtagttttagaatgtacaggtatttttttagataaaacttcagcagaaaaacata

SEQ ID NO: 215012 - DNA, 508 bp, Unknown
  Bacterial polypeptide expressing nucleotide sequence isolated from the Sargasso Sea
cctgttcggcatcgagcgcggctacatgaccaccatccactcctacaccggcgaccagccgacgctggatacgatgcataaggatctgtaccgcgcccgcgcggcgggcctgtccatgatcccgacctcgaccggcgccgccaaggctctgggtctggtcctgccggagttgaagggcaagctggacggctcgtcgatccgcgtcccgacgccgaacgtctcggtcgtggacctcaaggtcgtcgccggtcgcgaggtcacggtcgaagagatcaacgcggcgcttcaggccgccgccgacggtccgatgaacggcgtcctgttcacgacgaccgatccgctggtttcgcacgacctgaaccacatcgccgcctcctccaccgccgccctcccccagacccaggtcgtcgacgggaagctggcccgcgtcctcagctggtacgacaacgaatggggcttcgcgacgcggatgtcggacaccgcgctgcagatggcgaagttcctgtaa

SEQ ID NO: 215013 - DNA, 662 bp, Unknown
  Bacterial polypeptide expressing nucleotide sequence isolated from the Sargasso Sea
aggagccagtaaagttattatatctgctccaggaaaagaagttgataatacggttgtcttcggtgtaaatcataagacattgactgataagcaacaagttatatcaaatgcatcttgtacgacaaactgtcttgctacagtcattaaaaatattcataaaaatctagaaataacaaatggtctaatgacgacaatccactcatatactaacgatcaagtcttaacggatgtctatcactcagatttaagacgagcacgttcagctacacaatccatgataccaacaaatacgggagctgcagcagcggttggattagtaatgccagatttaaatggtaagctagacggttttgctatacgagttccaacaactaacgtttctgttgtcgatttatgttttaatacaagtaaatctacatctgtagctgaacttaataatcttgtattacaatcatctgaaggcgacatgaaaaatattgtgggctataacaacctacctttagtttccattgattttaatcattcatcttattcatcagtgtttgatgaaagtttgacaagagcatctgatgacaagttgtataaaatttgtgcatggtatgataacgaatggggattttctaatcgaatgttagatgtgacgatgcattgggttaattaag

SEQ ID NO: 215014 - DNA, 821 bp, Unknown
  Bacterial polypeptide expressing nucleotide sequence isolated from the Sargasso Sea
tatgagaatagcaataaatggatttggcagaattggaaaacttgtttttagatcctttcttgaaagaaaaataccaaaagttgatcttgttgcaataaatgaactaggagatattgcatctagccaccatcttttaaaatatgattctgttcatggaaaaattcaaactgagatacaacaagtaagaaatggacttaaatataataataaatttacatcttttttttctgaaaaaaatccgaatgatctaccatggaaaaaattaaaaatagatatagttcttgaatgtagtggtgtttttacttcaaaagaaaaatctattgcccatttacaagcaggtgcaaaaaaagtcattatttcagcacctgcaaaaaatgttgatgctactatagttcaaggtgtaaatgaaaatatattaagaaaaaatcataacattatctctaatggatcatgcacaactaattgtttagcgcctgttgcaatggttttggataaaaaagttggtatagtttctggttttatgactacaatacatagctatacaggagatcaaagaacagttgaccaagttcatagcgatttaagaagagctagagctgcagctgaatcaatgataccaacttctactggggctgcaaaagcaataagtttagttttgccaaaattaaaaaataaattagatggaactgcaattagagtgcctactccaaatgtatcattaattgacttaacttttattagtagaaaaaaaaccagtgcaaaagaaattaacaattttattttaaaggaaagtagaacgaaaaaattaaaaaatatattaa

SEQ ID NO: 215015 - DNA, 796 bp, Unknown
  Bacterial polypeptide expressing nucleotide sequence isolated from the Sargasso Sea
aagtattacagtattgagtcagagagatcctcaaaaacttccttggaaaagaatgacaattgacgtcgctcttgaatgcactggattatttacttcaaaagataaggcggcaatgcatattaaggccggcgcaaaaaaggttttggtctcagcgccatgtacaaatgctgataaaactattgtatatggagtaaatgaagatgagattacaaaagaagacctagttgtctctaatgcgtcttgtacaacaaattgtctagctcctgttgcaaaagttttacacgataaatttaaaattgttcatggctatatgacaactatacacgcctttactggtgaccaaagtgttctggatacatttcactcagacttaagaagagctcgagctgcgtcattgtcaatgatacctacatccacaggagctgcaaaagcagtaggactcgttatgcctgagctttctggtaagttagatggaactgcaattagagtaccaacacctaatgtttcattaatcgactttaaatttgtttctaaaaaaagaatgacagtcgatagtattaataaggctatgtcagctgcagcaagatcaaataagcttaatggaattctagatgtaaattctaaaccattggtttcatctgattttaatcataatcctgcctcatcaaatttcgatttaactcaaacacaagtaattgatggaaagtttggaagagttttaagttggtatgataatgaatggggcttttcaaatagaatgtgtgatactgcagttgcgatgaaaagatctagatag

SEQ ID NO: 215016 - DNA, 587 bp, Unknown
  Bacterial polypeptide expressing nucleotide sequence isolated from the Sargasso Sea
aaaaaaagaacacaatgttatttctaatggatcttgtacaacaaattgtttagcacctgttgctatggttttagaaaatagttttggaattgagtatggatacatgacaacaattcacagttatacgggagatcaaaaattactagacacacttcataaagatttaagaagagcaagatcaactgaaggagcgatgataccaacctcaacaggagctgctaaagcaatgagtttagttttaccaagtttaaagggaaaactagatggtacagctataagagtcccaacaccaaatgtttctttaattgattttacattagttacaaaaaaagatgttacagctgatactataaatgaagctatgacaaaagcatctaatggtgagttaaagggtattcttggaattaataaacacccactagtttctaaggattttaatcatgatgcacatagttcaatatttgatattacccaaactcaagttatcaaaaataaatttagtagagttctatcttggtatgataatgaatggggtttttcaaaccggatgtgtgatacctcaatacaaatttcaaaactcatttaat

SEQ ID NO: 215017 - DNA, 780 bp, Unknown
  Bacterial polypeptide expressing nucleotide sequence isolated from the Sargasso Sea
aatgaccgttagagttgcagtgaatggctttgggcgaattggcagaaatgttgttagagcattatatgaatcctcaaaaagagccgagatggaaattgttgccatcaatggcaggggatcgccagagcaaataacgcaccttttcaaatatgatagtgcgcatggaaagttccctcatgaagtacattgcgatggaaaatcattggtcatcgatgataaagataaaattaaatttatctatgatcgagatccgactaagctgccatggaatgatctcgatattgatgttgttttggaatgtacaggtgcatttagagatcatgaaactgcatcaaaacaccttgatgcaggagcacgtaaagtattaatttctgcgccgggcaagaatatggatgccacgatagtttttggagtgaaccataacattctcagtgatgagcataaaattgtgtcaaatgcatcatgtacaacaaattgtcttgctcctcttgtgaacccgctttacaaaactattggtataaaacatggttccatgactacaattcattcatacaccaatgatcaagtattaaccgatgcttttcacagtgatcctcggcgagcaagatcagctactatgtcacaagtccccactaaaacaggagcagcaaagggccttggtcaagttattccagagcttgatggaaggctggatggatttgctatgcgtgtgcccactttgaacgtatctgccgtagatttaagttttgtccctgaaagagaaacttctgaagaggaaat

SEQ ID NO: 215018 - DNA, 697 bp, Unknown
  Bacterial polypeptide expressing nucleotide sequence isolated from the Sargasso Sea
gtcatcatctctgcgccgtccaaggacgccgacacgccgaccatcgttgtgggcgtcaacaccgaggactacgactccgcgaccatgaacgtcgtctcgtgcgcctcgtgcaccaccaacggcctcgcgcccctggtgaagaccatcaacgagaagttcggcatcaagcagggccttatgaccaccgtgcacgccgcgaccgcctcgcagctgaccgtcgacggctcgatgaagggcgccgactggcgcgcgggccgcgccgcctcggccaacatcatcccctcgtccaccggcgccgccaaggccgtcgccaaggcgtaccccgtcatgaagggcaagctgaccggcatggccttccgtgtgccgaccgtcgacgtctccgtcgtcgacctgacgtgcgagctggagacgccgacgacgtacgaggagatcaaggccgaggtcaagctcgcgtccgagacgtacgccaagggcatcgtcggctacaccgaggaccaggtcgtctcctccgacttcgtcggcgagacctgctcgaccgtcttcgacgcgggcgccggcatcatgctcaccccgaccttcgtcaagctcgtctcatggtacgacaacgagtggggctactcgacccgcctcgtcgacctcgtcgccaacatggccgtcgccgacggcgtcctcgccaaggaggccatgctcgcctaag

SEQ ID NO: 215019 - DNA, 578 bp, Unknown
  Bacterial polypeptide expressing nucleotide sequence isolated from the Sargasso Sea
tttggtgtttcgtgcgattgcagacagaggtcttttaggtaaagacattgaagttgttgcaatcaacgatttagttcctgcagataacttggcgtatctcttgaaatatgactctattcaaggtcgatttaaggggacggttgaaaatgagggtgcggatacacttgttgttaatgggcataagattaagtgtttggctcttcgagagggtccagctgctttgccttggaaggatttgggtgtggatattgttattgagagtacggggttatttactcaggacgaaaaagctatgggccatttggaggctggtgccaagaaggtgattatttcagctccaggtaagggcaatatgaagactgtagtcgttggcgtaaatgatcatattttaggtgctgatgataatattatttcaaatgcatcttgtacgactaactgtttggcccctattactaaagtgatgcttgataactttggaattgcggaggggttgatgacgactattcatagttatacttcgactcaaaaagtggtcgacggtccttctcataaggattggaaaggtggccgtactgctg

SEQ ID NO: 215020 - DNA, 895 bp, Unknown
  Bacterial polypeptide expressing nucleotide sequence isolated from the Sargasso Sea
tttgaaggtaaaatttccgtttaaagctaaatacggaaactacattaatggaaaatttgtagagcctaaatctggcaaatatttcgataatgttagccctatatcaaatgagaaaatctgtagtgttgcacgatcaaatgataaagatgtagagtctgctttagacgcagcacatgcagcttttaaagaatggggaaaaaccgacatcactactagatcaaatattttgaacaaaatagcagatgttattgaaaaaaacctaaacttgttagcagtagctgaatgtttagacaacggaaagccaatcagagaatgtatggcagctgacttacctttagttgttgatcactggagatattttgctggagtaatcagagcagaagagggatcaattgctgaaatagctaacaaccaatactcatacaattttcatgagccattaggtgttgtaggtcaaataattccatggaacttcccattattaatggcaacttggaaattagctccggctcttgcagcagggaattgtgttgtattaaagcctgcagagcaaacgccagcatcgatcaatgttttaatggaacttattggtgatttattacctccaggagttgttaacattgtgagtggctttggattagaagcaggtaaaccattagcatcatctaaaagagttgctaaagttgcatttactggagaaacaacaactggaagattgattatgcagtacgccgcacaaaacataattccgataactttggaattaggtggaaaatctccaaacattttctttgaagacgtattagaaaaagatgacgacttctttgataaatgtattgaaggttttgtgatgttcaatcttaaccaaggtggaagtttgtactgtccaagtaga

SEQ ID NO: 215021 - DNA, 271 bp, Unknown
  Bacterial polypeptide expressing nucleotide sequence isolated from the Sargasso Sea
tatgaaagttgcaataaatggatttggaagaattggaaaacttgtttttagagctttattagaaaaaaatcctaaagatattaatattgtagctattaatgaactaggaagtgttgagagcagtgctcacttacttaaatatgacagtgttcacggtattcttaaagatgagattagctcaatcaaaaatggattaaaaatcggtaaacataaaattaatttttattccgaaagagatcaaataaccttcccttggaatcactcaaggtag

SEQ ID NO: 215022 - DNA, 511 bp, Unknown
  Bacterial polypeptide expressing nucleotide sequence isolated from the Sargasso Sea
aatattggaattgaatcaggctatatgacgacagttcactcagttaccggagatcaaaataccattgatacatttcataaagatctaagacgggcaagaaattccttactttcaatgatacctacttcaacaggagccgcgcgtgccgtttctgaagtattaccaaatttaaaaggaaaattagatggaagtgcgataagagtaccaactgccaacgtttcattggtagacttcagctttatgacaaaaaaaaatacctcagaaaatgaaattaacagaatttttataaacgcagaaaaaaatgaatttaaaggaattgtagaaacaatatcagctcctcttgtatccagtgactttaatcataactcacatagctcagtcgttgatcttactgaaacaaaagtaataaatgaaagattctgtagaatattatcttggtatgataatgaatggggtttttctaatagacttgttgatataatattagaacttagtaatgaaaatttatgaa

SEQ ID NO: 215023 - DNA, 838 bp, Unknown
  Bacterial polypeptide expressing nucleotide sequence isolated from the Sargasso Sea
gtttccttagatggtgatatgttacatgcaggaaaacaaaaggttaaactcattgcagagaaaaacccttcagagttaccatggggagaacttggcattaacattgtcattgaatctactggcattttcagaactcgcgaacaattagagcagcatttgactgctgggtgtaagaaagttgttttgactgttcctgcaaaagatgaaattgattatacagtagttttaggtgtcaatgataaaggcttgaaagctgagcataagatagtatctaatgcgagttgcactacaaattgtttagctccaatggctaaggtattaaatgaaaactttggcattgaacttggtgtgattaacacaatacatgcttacacaaatgatcaaagattggctgatgttccgcattctgattggagaagaagtagggcggcagcagaaaacgtcattccgacaactactggagccgctagagcggttggtgttgttttaccagagttaaatggtaagttagatgggattgcaatgcgtgttcctgttcctgatggttctgttgttgattttaatgttcagctaaataatgatgtcacagtcgatcaaataaatgaggctgttcgtgaggcttctattaatggttccttaaaaggaattcttgagtattctactttgcctgtagtttcatccgatattattggtaatagtcattcatctatatttgatgctccgtttactagagttattggcgggaattatgtcaaaacacttaattggtatgataatgaatggggatattcaaatagagtcgttgatcttgtatctttacttggaagtattggttaga

SEQ ID NO: 215024 - DNA, 426 bp, Unknown
  Bacterial polypeptide expressing nucleotide sequence isolated from the Sargasso Sea
aagattttagaggaggtagaagttcactattgaatataattcccgcatctactggagcagccaaagcagttacaaaggttattccaagtctagagggaaaattaactgggatggcatttcgaattcctacagctaatgtatctgtagttgatcttacggttgaattggaaaaatcaacagattacgagggtattaaaaaggttatgaaaaatgcaagtgagacttctatgaagaatgttttgggttatgaggacgaaccagttgtttctcaagattttattggagatgaaagaacttcaatttttgatgctaatgcaggtataaaactaaatgataatttttttaaaataattagctggtatgataatgaatgtggatattcatcaaagttaatttcattagcacagctcattaataacacttaaa

SEQ ID NO: 215025 - DNA, 860 bp, Unknown
  Bacterial polypeptide expressing nucleotide sequence isolated from the Sargasso Sea
aatggttaatattgcaataaacggttttggtagaattggaaggctttttttaagagctttgtcagaaagtaaaaatgcaaaaaatataaaagtaaaaattataaatgatttggctgatttagaatccaatatacatttatttaaatatgattccgttcatggaacatataatagaaaaattaaaaattacaaaaattcatttgatattggttttggtaaaattaaaattatttctgaaacaaacccagcaaaacttccttggaaaaaaaataatattgatgttgtaattgaatgcacaggaattttaacatcaaaaaaagattctttaaaacatttaaaatctggagcaaaaaaagtaattatttctgccccatctgataaccctgacattactgttgtatttggagtcaatcataaagaaattaataataatcatagaataatttccaatgcatcctgtactacaaattgcctagctcctgtggttagcattttaaataattctattggtatagaaactggtcatatgacaactattcattcatatactggtgatcaaagaattgttgatacttttcataaaagcgatttaagaagagcaaggtcagctgcttcgtccttgatacctactaaaacaggagcagctaaagcaataggtttagtgatacctgaattagaagggagacttgatggcactgctattagagttcctactccaaatgttagtttaatagactttgtctttaatgcttctagagatacatcggaaaatgaaataaataaaatatgtattaattcatcagaaaggcatttaaaaaatattttatcaattactaatgaacctctagtttcaatagatt

SEQ ID NO: 215026 - DNA, 946 bp, Unknown
  Bacterial polypeptide expressing nucleotide sequence isolated from the Sargasso Sea
aaaaaacaagagagaggttaaaaatatgagtgcagaagcattaaaagtgtcttcagctctagacacatctcatttaaaagtggattttccatataaggcaaaatacggaaattttattaatgggaaattcgtagagcctttatcgggtaaatattttgataatccaagcccgatatcaaatgaaattatctgttcagttgctagatcaaatgaaaaagatgttgaagcagcattagatgcagctcatgcagcttttccagaatggggaaagacagatattacaactagatccattattcttaacaagatagcagatgttcttgaacaaaacaaagataagttagcagttgccgaatgtttagataatggtaagccaattagagaatgtatggctgcagatatagctttagtgattgatcactggagatattttgctggagttattagagcagaagaaggttcagttgctgaaataagtaactcacagtactcttacaatattcctgagcctttaggagttgtagctcaaatagttccgtggaacttcccattattaatggctacatggaaattagcaccagctcttgcagctggaaattgttctgttcttaaaccagccgaacaaacaccagcatcaattatggttatgatggaactaattggagatttattacctccaggggttgtaaacatagtaagtggttttggtttagaagcaggaaagcctttagcatcatctaaaagagttgctaaagttgcatttactggtgaaactacaactggaagattgattatgcagtatgctgcacaaaacattattccaattacacttgagttaggtggtaagtctcctaacattttctttgaagatatcatggataaagatgatgatttcttagataagtgtgttgaaggttttgtgatgtttaatttaaatcagggtgag
